United States Patent Application Publication US 2011/0177960 A1 - sequence listing, part 21

SEQ ID NO: 369476 - DNA, 25 bp, Artificial
  probe
  misc_feature (1)..(25): SEQ ID NO: 3985; WAN024DZA; Start 84; Stop 108
ttccaccattctgagaagtattgaa

SEQ ID NO: 369477 - DNA, 25 bp, Artificial
  probe
  misc_feature (1)..(25): SEQ ID NO: 3985; WAN024DZA; Start 85; Stop 109
tccaccattctgagaagtattgaag

SEQ ID NO: 369478 - DNA, 25 bp, Artificial
  probe
  misc_feature (1)..(25): SEQ ID NO: 3985; WAN024DZA; Start 88; Stop 112
accattctgagaagtattgaagtga

SEQ ID NO: 369479 - DNA, 25 bp, Artificial
  probe
  misc_feature (1)..(25): SEQ ID NO: 3985; WAN024DZA; Start 86; Stop 110
ccaccattctgagaagtattgaagt

SEQ ID NO: 369480 - DNA, 25 bp, Artificial
  probe
  misc_feature (1)..(25): SEQ ID NO: 3985; WAN024DZA; Start 96; Stop 120
gagaagtattgaagtgatggctcat

SEQ ID NO: 369481 - DNA, 25 bp, Artificial
  probe
  misc_feature (1)..(25): SEQ ID NO: 3985; WAN024DZA; Start 92; Stop 116
ttctgagaagtattgaagtgatggc

SEQ ID NO: 369482 - DNA, 25 bp, Artificial
  probe
  misc_feature (1)..(25): SEQ ID NO: 3985; WAN024DZA; Start 94; Stop 118
ctgagaagtattgaagtgatggctc

SEQ ID NO: 369483 - DNA, 25 bp, Artificial
  probe
  misc_feature (1)..(25): SEQ ID NO: 3985; WAN024DZA; Start 91; Stop 115
attctgagaagtattgaagtgatgg

SEQ ID NO: 369484 - DNA, 25 bp, Artificial
  probe
  misc_feature (1)..(25): SEQ ID NO: 3985; WAN024DZA; Start 89; Stop 113
ccattctgagaagtattgaagtgat

SEQ ID NO: 369485 - DNA, 25 bp, Artificial
  probe
  misc_feature (1)..(25): SEQ ID NO: 3985; WAN024DZA; Start 87; Stop 111
caccattctgagaagtattgaagtg

SEQ ID NO: 369486 - DNA, 25 bp, Artificial
  probe
  misc_feature (1)..(25): SEQ ID NO: 3985; WAN024DZA; Start 90; Stop 114
cattctgagaagtattgaagtgatg

SEQ ID NO: 369487 - DNA, 25 bp, Artificial
  probe
  misc_feature (1)..(25): SEQ ID NO: 3985; WAN024DZA; Start 83; Stop 107
tttccaccattctgagaagtattga

SEQ ID NO: 369488 - DNA, 25 bp, Artificial
  probe
  misc_feature (1)..(25): SEQ ID NO: 3985; WAN024DZA; Start 82; Stop 106
gtttccaccattctgagaagtattg

SEQ ID NO: 369489 - DNA, 25 bp, Artificial
  probe
  misc_feature (1)..(25): SEQ ID NO: 3985; WAN024DZA; Start 81; Stop 105
tgtttccaccattctgagaagtatt

SEQ ID NO: 369490 - DNA, 25 bp, Artificial
  probe
  misc_feature (1)..(25): SEQ ID NO: 3985; WAN024DZA; Start 80; Stop 104
ttgtttccaccattctgagaagtat

SEQ ID NO: 369491 - DNA, 25 bp, Artificial
  probe
  misc_feature (1)..(25): SEQ ID NO: 3985; WAN024DZA; Start 79; Stop 103
attgtttccaccattctgagaagta

SEQ ID NO: 369492 - DNA, 25 bp, Artificial
  probe
  misc_feature (1)..(25): SEQ ID NO: 3985; WAN024DZA; Start 104; Stop 128
ttgaagtgatggctcatagtttacc

SEQ ID NO: 369493 - DNA, 25 bp, Artificial
  probe
  misc_feature (1)..(25): SEQ ID NO: 3985; WAN024DZA; Start 103; Stop 127
attgaagtgatggctcatagtttac

SEQ ID NO: 369494 - DNA, 25 bp, Artificial
  probe
  misc_feature (1)..(25): SEQ ID NO: 3985; WAN024DZA; Start 101; Stop 125
gtattgaagtgatggctcatagttt

SEQ ID NO: 369495 - DNA, 25 bp, Artificial
  probe
  misc_feature (1)..(25): SEQ ID NO: 3985; WAN024DZA; Start 78; Stop 102
aattgtttccaccattctgagaagt

SEQ ID NO: 369496 - DNA, 25 bp, Artificial
  probe
  misc_feature (1)..(25): SEQ ID NO: 3985; WAN024DZA; Start 20; Stop 44
gaagttggctgaagttgggtagata

SEQ ID NO: 369497 - DNA, 25 bp, Artificial
  probe
  misc_feature (1)..(25): SEQ ID NO: 3985; WAN024DZA; Start 21; Stop 45
aagttggctgaagttgggtagatac

SEQ ID NO: 369498 - DNA, 25 bp, Artificial
  probe
  misc_feature (1)..(25): SEQ ID NO: 3985; WAN024DZA; Start 102; Stop 126
tattgaagtgatggctcatagttta

SEQ ID NO: 369499 - DNA, 25 bp, Artificial
  probe
  misc_feature (1)..(25): SEQ ID NO: 3985; WAN024DZA; Start 109; Stop 133
gtgatggctcatagtttaccaagat

SEQ ID NO: 369500 - DNA, 25 bp, Artificial
  probe
  misc_feature (1)..(25): SEQ ID NO: 3985; WAN024DZA; Start 107; Stop 131
aagtgatggctcatagtttaccaag

SEQ ID NO: 369501 - DNA, 25 bp, Artificial
  probe
  misc_feature (1)..(25): SEQ ID NO: 3985; WAN024DZA; Start 106; Stop 130
gaagtgatggctcatagtttaccaa

SEQ ID NO: 369502 - DNA, 25 bp, Artificial
  probe
  misc_feature (1)..(25): SEQ ID NO: 3985; WAN024DZA; Start 206; Stop 230
tttgtctgaagtgtagtctttgcga

SEQ ID NO: 369503 - DNA, 25 bp, Artificial
  probe
  misc_feature (1)..(25): SEQ ID NO: 3985; WAN024DZA; Start 110; Stop 134
tgatggctcatagtttaccaagatc

SEQ ID NO: 369504 - DNA, 25 bp, Artificial
  probe
  misc_feature (1)..(25): SEQ ID NO: 3986; WAN024D9D; Start 117; Stop 141
tatacttacagttgttctgctccaa

SEQ ID NO: 369505 - DNA, 25 bp, Artificial
  probe
  misc_feature (1)..(25): SEQ ID NO: 3986; WAN024D9D; Start 116; Stop 140
ttatacttacagttgttctgctcca

SEQ ID NO: 369506 - DNA, 25 bp, Artificial
  probe
  misc_feature (1)..(25): SEQ ID NO: 3986; WAN024D9D; Start 118; Stop 142
atacttacagttgttctgctccaaa

SEQ ID NO: 369507 - DNA, 25 bp, Artificial
  probe
  misc_feature (1)..(25): SEQ ID NO: 3986; WAN024D9D; Start 119; Stop 143
tacttacagttgttctgctccaaag

SEQ ID NO: 369508 - DNA, 25 bp, Artificial
  probe
  misc_feature (1)..(25): SEQ ID NO: 3986; WAN024D9D; Start 115; Stop 139
tttatacttacagttgttctgctcc

SEQ ID NO: 369509 - DNA, 25 bp, Artificial
  probe
  misc_feature (1)..(25): SEQ ID NO: 3986; WAN024D9D; Start 31; Stop 55
ttcagtacaaatttaacgggtcaag

SEQ ID NO: 369510 - DNA, 25 bp, Artificial
  probe
  misc_feature (1)..(25): SEQ ID NO: 3986; WAN024D9D; Start 137; Stop 161
tccaaagagcttgtagagaagaatt

SEQ ID NO: 369511 - DNA, 25 bp, Artificial
  probe
  misc_feature (1)..(25): SEQ ID NO: 3986; WAN024D9D; Start 33; Stop 57
cagtacaaatttaacgggtcaagat

SEQ ID NO: 369512 - DNA, 25 bp, Artificial
  probe
  misc_feature (1)..(25): SEQ ID NO: 3986; WAN024D9D; Start 32; Stop 56
tcagtacaaatttaacgggtcaaga

SEQ ID NO: 369513 - DNA, 25 bp, Artificial
  probe
  misc_feature (1)..(25): SEQ ID NO: 3986; WAN024D9D; Start 121; Stop 145
cttacagttgttctgctccaaagag

SEQ ID NO: 369514 - DNA, 25 bp, Artificial
  probe
  misc_feature (1)..(25): SEQ ID NO: 3986; WAN024D9D; Start 30; Stop 54
attcagtacaaatttaacgggtcaa

SEQ ID NO: 369515 - DNA, 25 bp, Artificial
  probe
  misc_feature (1)..(25): SEQ ID NO: 3986; WAN024D9D; Start 136; Stop 160
ctccaaagagcttgtagagaagaat

SEQ ID NO: 369516 - DNA, 25 bp, Artificial
  probe
  misc_feature (1)..(25): SEQ ID NO: 3986; WAN024D9D; Start 34; Stop 58
agtacaaatttaacgggtcaagatt

SEQ ID NO: 369517 - DNA, 25 bp, Artificial
  probe
  misc_feature (1)..(25): SEQ ID NO: 3986; WAN024D9D; Start 138; Stop 162
ccaaagagcttgtagagaagaatta

SEQ ID NO: 369518 - DNA, 25 bp, Artificial
  probe
  misc_feature (1)..(25): SEQ ID NO: 3986; WAN024D9D; Start 145; Stop 169
gcttgtagagaagaattagctcata

SEQ ID NO: 369519 - DNA, 25 bp, Artificial
  probe
  misc_feature (1)..(25): SEQ ID NO: 3986; WAN024D9D; Start 29; Stop 53
tattcagtacaaatttaacgggtca

SEQ ID NO: 369520 - DNA, 25 bp, Artificial
  probe
  misc_feature (1)..(25): SEQ ID NO: 3986; WAN024D9D; Start 120; Stop 144
acttacagttgttctgctccaaaga

SEQ ID NO: 369521 - DNA, 25 bp, Artificial
  probe
  misc_feature (1)..(25): SEQ ID NO: 3986; WAN024D9D; Start 80; Stop 104
gggctgagagaagtatcttgatttt

SEQ ID NO: 369522 - DNA, 25 bp, Artificial
  probe
  misc_feature (1)..(25): SEQ ID NO: 3986; WAN024D9D; Start 152; Stop 176
gagaagaattagctcataaaggaga

SEQ ID NO: 369523 - DNA, 25 bp, Artificial
  probe
  misc_feature (1)..(25): SEQ ID NO: 3986; WAN024D9D; Start 151; Stop 175
agagaagaattagctcataaaggag

SEQ ID NO: 369524 - DNA, 25 bp, Artificial
  probe
  misc_feature (1)..(25): SEQ ID NO: 3986; WAN024D9D; Start 35; Stop 59
gtacaaatttaacgggtcaagattt

SEQ ID NO: 369525 - DNA, 25 bp, Artificial
  probe
  misc_feature (1)..(25): SEQ ID NO: 3986; WAN024D9D; Start 28; Stop 52
ttattcagtacaaatttaacgggtc

SEQ ID NO: 369526 - DNA, 25 bp, Artificial
  probe
  misc_feature (1)..(25): SEQ ID NO: 3986; WAN024D9D; Start 139; Stop 163
caaagagcttgtagagaagaattag

SEQ ID NO: 369527 - DNA, 25 bp, Artificial
  probe
  misc_feature (1)..(25): SEQ ID NO: 3986; WAN024D9D; Start 146; Stop 170
cttgtagagaagaattagctcataa

SEQ ID NO: 369528 - DNA, 25 bp, Artificial
  probe
  misc_feature (1)..(25): SEQ ID NO: 3986; WAN024D9D; Start 81; Stop 105
ggctgagagaagtatcttgatttta

SEQ ID NO: 369529 - DNA, 25 bp, Artificial
  probe
  misc_feature (1)..(25): SEQ ID NO: 3986; WAN024D9D; Start 27; Stop 51
tttattcagtacaaatttaacgggt

SEQ ID NO: 369530 - DNA, 25 bp, Artificial
  probe
  misc_feature (1)..(25): SEQ ID NO: 3986; WAN024D9D; Start 140; Stop 164
aaagagcttgtagagaagaattagc

SEQ ID NO: 369531 - DNA, 25 bp, Artificial
  probe
  misc_feature (1)..(25): SEQ ID NO: 3986; WAN024D9D; Start 153; Stop 177
agaagaattagctcataaaggagat

SEQ ID NO: 369532 - DNA, 25 bp, Artificial
  probe
  misc_feature (1)..(25): SEQ ID NO: 3986; WAN024D9D; Start 79; Stop 103
ggggctgagagaagtatcttgattt

SEQ ID NO: 369533 - DNA, 25 bp, Artificial
  probe
  misc_feature (1)..(25): SEQ ID NO: 3986; WAN024D9D; Start 37; Stop 61
acaaatttaacgggtcaagatttat

SEQ ID NO: 369534 - DNA, 25 bp, Artificial
  probe
  misc_feature (1)..(25): SEQ ID NO: 3986; WAN024D9D; Start 26; Stop 50
gtttattcagtacaaatttaacggg

SEQ ID NO: 369535 - DNA, 25 bp, Artificial
  probe
  misc_feature (1)..(25): SEQ ID NO: 3986; WAN024D9D; Start 149; Stop 173
gtagagaagaattagctcataaagg

SEQ ID NO: 369536 - DNA, 25 bp, Artificial
  probe
  misc_feature (1)..(25): SEQ ID NO: 3986; WAN024D9D; Start 75; Stop 99
ttttggggctgagagaagtatcttg

SEQ ID NO: 369537 - DNA, 25 bp, Artificial
  probe
  misc_feature (1)..(25): SEQ ID NO: 3987; WAN024C6E; Start 337; Stop 361
acaataccgcctactatcataccaa

SEQ ID NO: 369538 - DNA, 25 bp, Artificial
  probe
  misc_feature (1)..(25): SEQ ID NO: 3987; WAN024C6E; Start 336; Stop 360
aacaataccgcctactatcatacca

SEQ ID NO: 369539 - DNA, 25 bp, Artificial
  probe
  misc_feature (1)..(25): SEQ ID NO: 3987; WAN024C6E; Start 62; Stop 86
ataacaatcacgaagtcacctgtat

SEQ ID NO: 369540 - DNA, 25 bp, Artificial
  probe
  misc_feature (1)..(25): SEQ ID NO: 3987; WAN024C6E; Start 63; Stop 87
taacaatcacgaagtcacctgtatc

SEQ ID NO: 369541 - DNA, 25 bp, Artificial
  probe
  misc_feature (1)..(25): SEQ ID NO: 3987; WAN024C6E; Start 61; Stop 85
gataacaatcacgaagtcacctgta

SEQ ID NO: 369542 - DNA, 25 bp, Artificial
  probe
  misc_feature (1)..(25): SEQ ID NO: 3987; WAN024C6E; Start 338; Stop 362
caataccgcctactatcataccaaa

SEQ ID NO: 369543 - DNA, 25 bp, Artificial
  probe
  misc_feature (1)..(25): SEQ ID NO: 3987; WAN024C6E; Start 335; Stop 359
aaacaataccgcctactatcatacc

SEQ ID NO: 369544 - DNA, 25 bp, Artificial
  probe
  misc_feature (1)..(25): SEQ ID NO: 3987; WAN024C6E; Start 83; Stop 107
gtatcagtgtgtggtgtaaatgttg

SEQ ID NO: 369545 - DNA, 25 bp, Artificial
  probe
  misc_feature (1)..(25): SEQ ID NO: 3987; WAN024C6E; Start 339; Stop 363
aataccgcctactatcataccaaat

SEQ ID NO: 369546 - DNA, 25 bp, Artificial
  probe
  misc_feature (1)..(25): SEQ ID NO: 3987; WAN024C6E; Start 82; Stop 106
tgtatcagtgtgtggtgtaaatgtt

SEQ ID NO: 369547 - DNA, 25 bp, Artificial
  probe
  misc_feature (1)..(25): SEQ ID NO: 3987; WAN024C6E; Start 64; Stop 88
aacaatcacgaagtcacctgtatca

SEQ ID NO: 369548 - DNA, 25 bp, Artificial
  probe
  misc_feature (1)..(25): SEQ ID NO: 3987; WAN024C6E; Start 340; Stop 364
ataccgcctactatcataccaaatt

SEQ ID NO: 369549 - DNA, 25 bp, Artificial
  probe
  misc_feature (1)..(25): SEQ ID NO: 3987; WAN024C6E; Start 91; Stop 115
gtgtggtgtaaatgttggtttgttt

SEQ ID NO: 369550 - DNA, 25 bp, Artificial
  probe
  misc_feature (1)..(25): SEQ ID NO: 3987; WAN024C6E; Start 84; Stop 108
tatcagtgtgtggtgtaaatgttgg

SEQ ID NO: 369551 - DNA, 25 bp, Artificial
  probe
  misc_feature (1)..(25): SEQ ID NO: 3987; WAN024C6E; Start 66; Stop 90
caatcacgaagtcacctgtatcagt

SEQ ID NO: 369552 - DNA, 25 bp, Artificial
  probe
  misc_feature (1)..(25): SEQ ID NO: 3987; WAN024C6E; Start 65; Stop 89
acaatcacgaagtcacctgtatcag

SEQ ID NO: 369553 - DNA, 25 bp, Artificial
  probe
  misc_feature (1)..(25): SEQ ID NO: 3987; WAN024C6E; Start 52; Stop 76
ttcagcattgataacaatcacgaag

SEQ ID NO: 369554 - DNA, 25 bp, Artificial
  probe
  misc_feature (1)..(25): SEQ ID NO: 3987; WAN024C6E; Start 334; Stop 358
taaacaataccgcctactatcatac

SEQ ID NO: 369555 - DNA, 25 bp, Artificial
  probe
  misc_feature (1)..(25): SEQ ID NO: 3987; WAN024C6E; Start 90; Stop 114
tgtgtggtgtaaatgttggtttgtt

SEQ ID NO: 369556 - DNA, 25 bp, Artificial
  probe
  misc_feature (1)..(25): SEQ ID NO: 3987; WAN024C6E; Start 58; Stop 82
attgataacaatcacgaagtcacct

SEQ ID NO: 369557 - DNA, 25 bp, Artificial
  probe
  misc_feature (1)..(25): SEQ ID NO: 3987; WAN024C6E; Start 57; Stop 81
cattgataacaatcacgaagtcacc

SEQ ID NO: 369558 - DNA, 25 bp, Artificial
  probe
  misc_feature (1)..(25): SEQ ID NO: 3987; WAN024C6E; Start 333; Stop 357
gtaaacaataccgcctactatcata

SEQ ID NO: 369559 - DNA, 25 bp, Artificial
  probe
  misc_feature (1)..(25): SEQ ID NO: 3987; WAN024C6E; Start 67; Stop 91
aatcacgaagtcacctgtatcagtg

SEQ ID NO: 369560 - DNA, 25 bp, Artificial
  probe
  misc_feature (1)..(25): SEQ ID NO: 3987; WAN024C6E; Start 54; Stop 78
cagcattgataacaatcacgaagtc

SEQ ID NO: 369561 - DNA, 25 bp, Artificial
  probe
  misc_feature (1)..(25): SEQ ID NO: 3987; WAN024C6E; Start 56; Stop 80
gcattgataacaatcacgaagtcac

SEQ ID NO: 369562 - DNA, 25 bp, Artificial
  probe
  misc_feature (1)..(25): SEQ ID NO: 3987; WAN024C6E; Start 55; Stop 79
agcattgataacaatcacgaagtca

SEQ ID NO: 369563 - DNA, 25 bp, Artificial
  probe
  misc_feature (1)..(25): SEQ ID NO: 3987; WAN024C6E; Start 53; Stop 77
tcagcattgataacaatcacgaagt

SEQ ID NO: 369564 - DNA, 25 bp, Artificial
  probe
  misc_feature (1)..(25): SEQ ID NO: 3987; WAN024C6E; Start 81; Stop 105
ctgtatcagtgtgtggtgtaaatgt

SEQ ID NO: 369565 - DNA, 25 bp, Artificial
  probe
  misc_feature (1)..(25): SEQ ID NO: 3987; WAN024C6E; Start 59; Stop 83
ttgataacaatcacgaagtcacctg

SEQ ID NO: 369566 - DNA, 25 bp, Artificial
  probe
  misc_feature (1)..(25): SEQ ID NO: 3987; WAN024C6E; Start 88; Stop 112
agtgtgtggtgtaaatgttggtttg

SEQ ID NO: 369567 - DNA, 25 bp, Artificial
  probe
  misc_feature (1)..(25): SEQ ID NO: 3987; WAN024C6E; Start 87; Stop 111
cagtgtgtggtgtaaatgttggttt

SEQ ID NO: 369568 - DNA, 25 bp, Artificial
  probe
  misc_feature (1)..(25): SEQ ID NO: 3987; WAN024C6E; Start 89; Stop 113
gtgtgtggtgtaaatgttggtttgt

SEQ ID NO: 369569 - DNA, 25 bp, Artificial
  probe
  misc_feature (1)..(25): SEQ ID NO: 3987; WAN024C6E; Start 80; Stop 104
cctgtatcagtgtgtggtgtaaatg

SEQ ID NO: 369570 - DNA, 25 bp, Artificial
  probe
  misc_feature (1)..(25): SEQ ID NO: 3988; WAN024DN4; Start 109; Stop 133
tatggagcagattggaaaagtcttc

SEQ ID NO: 369571 - DNA, 25 bp, Artificial
  probe
  misc_feature (1)..(25): SEQ ID NO: 3988; WAN024DN4; Start 111; Stop 135
tggagcagattggaaaagtcttcta

SEQ ID NO: 369572 - DNA, 25 bp, Artificial
  probe
  misc_feature (1)..(25): SEQ ID NO: 3988; WAN024DN4; Start 110; Stop 134
atggagcagattggaaaagtcttct

SEQ ID NO: 369573 - DNA, 25 bp, Artificial
  probe
  misc_feature (1)..(25): SEQ ID NO: 3988; WAN024DN4; Start 76; Stop 100
aaaatgaagaaaatacggaatcaag

SEQ ID NO: 369574 - DNA, 25 bp, Artificial
  probe
  misc_feature (1)..(25): SEQ ID NO: 3988; WAN024DN4; Start 72; Stop 96
tgataaaatgaagaaaatacggaat

SEQ ID NO: 369575 - DNA, 25 bp, Artificial
  probe
  misc_feature (1)..(25): SEQ ID NO: 3988; WAN024DN4; Start 71; Stop 95
atgataaaatgaagaaaatacggaa

SEQ ID NO: 369576 - DNA, 25 bp, Artificial
  probe
  misc_feature (1)..(25): SEQ ID NO: 3988; WAN024DN4; Start 75; Stop 99
taaaatgaagaaaatacggaatcaa

SEQ ID NO: 369577 - DNA, 25 bp, Artificial
  probe
  misc_feature (1)..(25): SEQ ID NO: 3988; WAN024DN4; Start 74; Stop 98
ataaaatgaagaaaatacggaatca

SEQ ID NO: 369578 - DNA, 25 bp, Artificial
  probe
  misc_feature (1)..(25): SEQ ID NO: 3988; WAN024DN4; Start 73; Stop 97
gataaaatgaagaaaatacggaatc

SEQ ID NO: 369579 - DNA, 25 bp, Artificial
  probe
  misc_feature (1)..(25): SEQ ID NO: 3989; WAN024GJY; Start 284; Stop 308
tttcttctttgtcagtcttgtccaa

SEQ ID NO: 369580 - DNA, 25 bp, Artificial
  probe
  misc_feature (1)..(25): SEQ ID NO: 3989; WAN024GJY; Start 26; Stop 50
ttgaagttacaccagaaaggtcttt

SEQ ID NO: 369581 - DNA, 25 bp, Artificial
  probe
  misc_feature (1)..(25): SEQ ID NO: 3989; WAN024GJY; Start 131; Stop 155
attctgctaccaagtggtcaatgat

SEQ ID NO: 369582 - DNA, 25 bp, Artificial
  probe
  misc_feature (1)..(25): SEQ ID NO: 3989; WAN024GJY; Start 25; Stop 49
gttgaagttacaccagaaaggtctt

SEQ ID NO: 369583 - DNA, 25 bp, Artificial
  probe
  misc_feature (1)..(25): SEQ ID NO: 3989; WAN024GJY; Start 259; Stop 283
ccaccaaggtcaaataccaagattt

SEQ ID NO: 369584 - DNA, 25 bp, Artificial
  probe
  misc_feature (1)..(25): SEQ ID NO: 3989; WAN024GJY; Start 132; Stop 156
ttctgctaccaagtggtcaatgatt

SEQ ID NO: 369585 - DNA, 25 bp, Artificial
  probe
  misc_feature (1)..(25): SEQ ID NO: 3989; WAN024GJY; Start 130; Stop 154
aattctgctaccaagtggtcaatga

SEQ ID NO: 369586 - DNA, 25 bp, Artificial
  probe
  misc_feature (1)..(25): SEQ ID NO: 3989; WAN024GJY; Start 12; Stop 36
caagctgatttgtgttgaagttaca

SEQ ID NO: 369587 - DNA, 25 bp, Artificial
  probe
  misc_feature (1)..(25): SEQ ID NO: 3989; WAN024GJY; Start 3; Stop 27
gataaatggcaagctgatttgtgtt

SEQ ID NO: 369588 - DNA, 25 bp, Artificial
  probe
  misc_feature (1)..(25): SEQ ID NO: 3989; WAN024GJY; Start 11; Stop 35
gcaagctgatttgtgttgaagttac

SEQ ID NO: 369589 - DNA, 25 bp, Artificial
  probe
  misc_feature (1)..(25): SEQ ID NO: 3989; WAN024GJY; Start 4; Stop 28
ataaatggcaagctgatttgtgttg

SEQ ID NO: 369590 - DNA, 25 bp, Artificial
  probe
  misc_feature (1)..(25): SEQ ID NO: 3989; WAN024GJY; Start 24; Stop 48
tgttgaagttacaccagaaaggtct

SEQ ID NO: 369591 - DNA, 25 bp, Artificial
  probe
  misc_feature (1)..(25): SEQ ID NO: 3989; WAN024GJY; Start 1; Stop 25
gtgataaatggcaagctgatttgtg

SEQ ID NO: 369592 - DNA, 25 bp, Artificial
  probe
  misc_feature (1)..(25): SEQ ID NO: 3989; WAN024GJY; Start 283; Stop 307
ttttcttctttgtcagtcttgtcca

SEQ ID NO: 369593 - DNA, 25 bp, Artificial
  probe
  misc_feature (1)..(25): SEQ ID NO: 3989; WAN024GJY; Start 2; Stop 26
tgataaatggcaagctgatttgtgt

SEQ ID NO: 369594 - DNA, 25 bp, Artificial
  probe
  misc_feature (1)..(25): SEQ ID NO: 3989; WAN024GJY; Start 285; Stop 309
ttcttctttgtcagtcttgtccaaa

SEQ ID NO: 369595 - DNA, 25 bp, Artificial
  probe
  misc_feature (1)..(25): SEQ ID NO: 3989; WAN024GJY; Start 291; Stop 315
tttgtcagtcttgtccaaaccataa

SEQ ID NO: 369596 - DNA, 25 bp, Artificial
  probe
  misc_feature (1)..(25): SEQ ID NO: 3989; WAN024GJY; Start 258; Stop 282
accaccaaggtcaaataccaagatt

SEQ ID NO: 369597 - DNA, 25 bp, Artificial
  probe
  misc_feature (1)..(25): SEQ ID NO: 3989; WAN024GJY; Start 5; Stop 29
taaatggcaagctgatttgtgttga

SEQ ID NO: 369598 - DNA, 25 bp, Artificial
  probe
  misc_feature (1)..(25): SEQ ID NO: 3989; WAN024GJY; Start 250; Stop 274
aatgtaccaccaccaaggtcaaata

SEQ ID NO: 369599 - DNA, 25 bp, Artificial
  probe
  misc_feature (1)..(25): SEQ ID NO: 3989; WAN024GJY; Start 222; Stop 246
gtcacccaattcaaggatagagacg

SEQ ID NO: 369600 - DNA, 25 bp, Artificial
  probe
  misc_feature (1)..(25): SEQ ID NO: 3989; WAN024GJY; Start 221; Stop 245
cgtcacccaattcaaggatagagac

SEQ ID NO: 369601 - DNA, 25 bp, Artificial
  probe
  misc_feature (1)..(25): SEQ ID NO: 3989; WAN024GJY; Start 290; Stop 314
ctttgtcagtcttgtccaaaccata

SEQ ID NO: 369602 - DNA, 25 bp, Artificial
  probe
  misc_feature (1)..(25): SEQ ID NO: 3989; WAN024GJY; Start 286; Stop 310
tcttctttgtcagtcttgtccaaac

SEQ ID NO: 369603 - DNA, 25 bp, Artificial
  probe
  misc_feature (1)..(25): SEQ ID NO: 3989; WAN024GJY; Start 10; Stop 34
ggcaagctgatttgtgttgaagtta

SEQ ID NO: 369604 - DNA, 25 bp, Artificial
  probe
  misc_feature (1)..(25): SEQ ID NO: 3989; WAN024GJY; Start 80; Stop 104
gttgcattgccatcttgtcagtaga

SEQ ID NO: 369605 - DNA, 25 bp, Artificial
  probe
  misc_feature (1)..(25): SEQ ID NO: 3989; WAN024GJY; Start 129; Stop 153
gaattctgctaccaagtggtcaatg

SEQ ID NO: 369606 - DNA, 25 bp, Artificial
  probe
  misc_feature (1)..(25): SEQ ID NO: 3989; WAN024GJY; Start 119; Stop 143
tttctttcttgaattctgctaccaa

SEQ ID NO: 369607 - DNA, 25 bp, Artificial
  probe
  misc_feature (1)..(25): SEQ ID NO: 3989; WAN024GJY; Start 27; Stop 51
tgaagttacaccagaaaggtctttc

SEQ ID NO: 369608 - DNA, 25 bp, Artificial
  probe
  misc_feature (1)..(25): SEQ ID NO: 3989; WAN024GJY; Start 128; Stop 152
tgaattctgctaccaagtggtcaat

SEQ ID NO: 369609 - DNA, 25 bp, Artificial
  probe
  misc_feature (1)..(25): SEQ ID NO: 3989; WAN024GJY; Start 220; Stop 244
ccgtcacccaattcaaggatagaga

SEQ ID NO: 369610 - DNA, 25 bp, Artificial
  probe
  misc_feature (1)..(25): SEQ ID NO: 3989; WAN024GJY; Start 257; Stop 281
caccaccaaggtcaaataccaagat

SEQ ID NO: 369611 - DNA, 25 bp, Artificial
  probe
  misc_feature (1)..(25): SEQ ID NO: 3989; WAN024GJY; Start 251; Stop 275
atgtaccaccaccaaggtcaaatac

SEQ ID NO: 369612 - DNA, 25 bp, Artificial
  probe
  misc_feature (1)..(25): SEQ ID NO: 3990; WAN024F5B; Start 145; Stop 169
acatcatccgcaataatcaagagtg

SEQ ID NO: 369613 - DNA, 25 bp, Artificial
  probe
  misc_feature (1)..(25): SEQ ID NO: 3990; WAN024F5B; Start 144; Stop 168
cacatcatccgcaataatcaagagt

SEQ ID NO: 369614 - DNA, 25 bp, Artificial
  probe
  misc_feature (1)..(25): SEQ ID NO: 3990; WAN024F5B; Start 141; Stop 165
atccacatcatccgcaataatcaag

SEQ ID NO: 369615 - DNA, 25 bp, Artificial
  probe
  misc_feature (1)..(25): SEQ ID NO: 3990; WAN024F5B; Start 140; Stop 164
catccacatcatccgcaataatcaa

SEQ ID NO: 369616 - DNA, 25 bp, Artificial
  probe
  misc_feature (1)..(25): SEQ ID NO: 3990; WAN024F5B; Start 146; Stop 170
catcatccgcaataatcaagagtgg

SEQ ID NO: 369617 - DNA, 25 bp, Artificial
  probe
  misc_feature (1)..(25): SEQ ID NO: 3990; WAN024F5B; Start 143; Stop 167
ccacatcatccgcaataatcaagag

SEQ ID NO: 369618 - DNA, 25 bp, Artificial
  probe
  misc_feature (1)..(25): SEQ ID NO: 3990; WAN024F5B; Start 142; Stop 166
tccacatcatccgcaataatcaaga

SEQ ID NO: 369619 - DNA, 25 bp, Artificial
  probe
  misc_feature (1)..(25): SEQ ID NO: 3990; WAN024F5B; Start 90; Stop 114
gttgaaggttccacgaatcttgttc

SEQ ID NO: 369620 - DNA, 25 bp, Artificial
  probe
  misc_feature (1)..(25): SEQ ID NO: 3990; WAN024F5B; Start 156; Stop 180
aataatcaagagtggacgattgctt

SEQ ID NO: 369621 - DNA, 25 bp, Artificial
  probe
  misc_feature (1)..(25): SEQ ID NO: 3990; WAN024F5B; Start 3; Stop 27
gataactgttccgcctgttaagatg

SEQ ID NO: 369622 - DNA, 25 bp, Artificial
  probe
  misc_feature (1)..(25): SEQ ID NO: 3990; WAN024F5B; Start 2; Stop 26
tgataactgttccgcctgttaagat

SEQ ID NO: 369623 - DNA, 25 bp, Artificial
  probe
  misc_feature (1)..(25): SEQ ID NO: 3990; WAN024F5B; Start 147; Stop 171
atcatccgcaataatcaagagtgga

SEQ ID NO: 369624 - DNA, 25 bp, Artificial
  probe
  misc_feature (1)..(25): SEQ ID NO: 3990; WAN024F5B; Start 139; Stop 163
ccatccacatcatccgcaataatca

SEQ ID NO: 369625 - DNA, 25 bp, Artificial
  probe
  misc_feature (1)..(25): SEQ ID NO: 3990; WAN024F5B; Start 155; Stop 179
caataatcaagagtggacgattgct

SEQ ID NO: 369626 - DNA, 25 bp, Artificial
  probe
  misc_feature (1)..(25): SEQ ID NO: 3990; WAN024F5B; Start 93; Stop 117
gaaggttccacgaatcttgttcaaa

SEQ ID NO: 369627 - DNA, 25 bp, Artificial
  probe
  misc_feature (1)..(25): SEQ ID NO: 3990; WAN024F5B; Start 4; Stop 28
ataactgttccgcctgttaagatgg

SEQ ID NO: 369628 - DNA, 25 bp, Artificial
  probe
  misc_feature (1)..(25): SEQ ID NO: 3990; WAN024F5B; Start 1; Stop 25
gtgataactgttccgcctgttaaga

SEQ ID NO: 369629 - DNA, 25 bp, Artificial
  probe
  misc_feature (1)..(25): SEQ ID NO: 3990; WAN024F5B; Start 148; Stop 172
tcatccgcaataatcaagagtggac

SEQ ID NO: 369630 - DNA, 25 bp, Artificial
  probe
  misc_feature (1)..(25): SEQ ID NO: 3990; WAN024F5B; Start 76; Stop 100
ttgactgctactacgttgaaggttc

SEQ ID NO: 369631 - DNA, 25 bp, Artificial
  probe
  misc_feature (1)..(25): SEQ ID NO: 3990; WAN024F5B; Start 157; Stop 181
ataatcaagagtggacgattgcttt

SEQ ID NO: 369632 - DNA, 25 bp, Artificial
  probe
  misc_feature (1)..(25): SEQ ID NO: 3990; WAN024F5B; Start 75; Stop 99
cttgactgctactacgttgaaggtt

SEQ ID NO: 369633 - DNA, 25 bp, Artificial
  probe
  misc_feature (1)..(25): SEQ ID NO: 3990; WAN024F5B; Start 153; Stop 177
cgcaataatcaagagtggacgattg

SEQ ID NO: 369634 - DNA, 25 bp, Artificial
  probe
  misc_feature (1)..(25): SEQ ID NO: 3990; WAN024F5B; Start 158; Stop 182
taatcaagagtggacgattgctttg

SEQ ID NO: 369635 - DNA, 25 bp, Artificial
  probe
  misc_feature (1)..(25): SEQ ID NO: 3990; WAN024F5B; Start 152; Stop 176
ccgcaataatcaagagtggacgatt

SEQ ID NO: 369636 - DNA, 25 bp, Artificial
  probe
  misc_feature (1)..(25): SEQ ID NO: 3990; WAN024F5B; Start 138; Stop 162
gccatccacatcatccgcaataatc

SEQ ID NO: 369637 - DNA, 25 bp, Artificial
  probe
  misc_feature (1)..(25): SEQ ID NO: 3990; WAN024F5B; Start 170; Stop 194
gacgattgctttggagaatgctttc

SEQ ID NO: 369638 - DNA, 25 bp, Artificial
  probe
  misc_feature (1)..(25): SEQ ID NO: 3990; WAN024F5B; Start 92; Stop 116
tgaaggttccacgaatcttgttcaa

SEQ ID NO: 369639 - DNA, 25 bp, Artificial
  probe
  misc_feature (1)..(25): SEQ ID NO: 3990; WAN024F5B; Start 91; Stop 115
ttgaaggttccacgaatcttgttca

SEQ ID NO: 369640 - DNA, 25 bp, Artificial
  probe
  misc_feature (1)..(25): SEQ ID NO: 3990; WAN024F5B; Start 149; Stop 173
catccgcaataatcaagagtggacg

SEQ ID NO: 369641 - DNA, 25 bp, Artificial
  probe
  misc_feature (1)..(25): SEQ ID NO: 3990; WAN024F5B; Start 94; Stop 118
aaggttccacgaatcttgttcaaaa

SEQ ID NO: 369642 - DNA, 25 bp, Artificial
  probe
  misc_feature (1)..(25): SEQ ID NO: 3990; WAN024F5B; Start 151; Stop 175
tccgcaataatcaagagtggacgat

SEQ ID NO: 369643 - DNA, 25 bp, Artificial
  probe
  misc_feature (1)..(25): SEQ ID NO: 3990; WAN024F5B; Start 150; Stop 174
atccgcaataatcaagagtggacga

SEQ ID NO: 369644 - DNA, 25 bp, Artificial
  probe
  misc_feature (1)..(25): SEQ ID NO: 3990; WAN024F5B; Start 231; Stop 255
cttgtctgtaatcaaaatgtacgga

SEQ ID NO: 369645 - DNA, 25 bp, Artificial
  probe
  misc_feature (1)..(25): SEQ ID NO: 3991; WAN024C8T; Start 178; Stop 202
ttacgaatacgagttaggaagtctg

SEQ ID NO: 369646 - DNA, 25 bp, Artificial
  probe
  misc_feature (1)..(25): SEQ ID NO: 3991; WAN024C8T; Start 169; Stop 193
tggttagcattacgaatacgagtta

SEQ ID NO: 369647 - DNA, 25 bp, Artificial
  probe
  misc_feature (1)..(25): SEQ ID NO: 3991; WAN024C8T; Start 174; Stop 198
agcattacgaatacgagttaggaag

SEQ ID NO: 369648 - DNA, 25 bp, Artificial
  probe
  misc_feature (1)..(25): SEQ ID NO: 3991; WAN024C8T; Start 171; Stop 195
gttagcattacgaatacgagttagg

SEQ ID NO: 369649 - DNA, 25 bp, Artificial
  probe
  misc_feature (1)..(25): SEQ ID NO: 3991; WAN024C8T; Start 170; Stop 194
ggttagcattacgaatacgagttag

SEQ ID NO: 369650 - DNA, 25 bp, Artificial
  probe
  misc_feature (1)..(25): SEQ ID NO: 3991; WAN024C8T; Start 173; Stop 197
tagcattacgaatacgagttaggaa

SEQ ID NO: 369651 - DNA, 25 bp, Artificial
  probe
  misc_feature (1)..(25): SEQ ID NO: 3991; WAN024C8T; Start 172; Stop 196
ttagcattacgaatacgagttagga

SEQ ID NO: 369652 - DNA, 25 bp, Artificial
  probe
  misc_feature (1)..(25): SEQ ID NO: 3991; WAN024C8T; Start 168; Stop 192
ttggttagcattacgaatacgagtt

SEQ ID NO: 369653 - DNA, 25 bp, Artificial
  probe
  misc_feature (1)..(25): SEQ ID NO: 3991; WAN024C8T; Start 176; Stop 200
cattacgaatacgagttaggaagtc

SEQ ID NO: 369654 - DNA, 25 bp, Artificial
  probe
  misc_feature (1)..(25): SEQ ID NO: 3991; WAN024C8T; Start 175; Stop 199
gcattacgaatacgagttaggaagt

SEQ ID NO: 369655 - DNA, 25 bp, Artificial
  probe
  misc_feature (1)..(25): SEQ ID NO: 3991; WAN024C8T; Start 177; Stop 201
attacgaatacgagttaggaagtct

SEQ ID NO: 369656 - DNA, 25 bp, Artificial
  probe
  misc_feature (1)..(25): SEQ ID NO: 3991; WAN024C8T; Start 167; Stop 191
cttggttagcattacgaatacgagt

SEQ ID NO: 369657 - DNA, 25 bp, Artificial
  probe
  misc_feature (1)..(25): SEQ ID NO: 3991; WAN024C8T; Start 183; Stop 207
aatacgagttaggaagtctgcgatt

SEQ ID NO: 369658 - DNA, 25 bp, Artificial
  probe
  misc_feature (1)..(25): SEQ ID NO: 3991; WAN024C8T; Start 179; Stop 203
tacgaatacgagttaggaagtctgc

SEQ ID NO: 369659 - DNA, 25 bp, Artificial
  probe
  misc_feature (1)..(25): SEQ ID NO: 3991; WAN024C8T; Start 182; Stop 206
gaatacgagttaggaagtctgcgat

SEQ ID NO: 369660 - DNA, 25 bp, Artificial
  probe
  misc_feature (1)..(25): SEQ ID NO: 3991; WAN024C8T; Start 184; Stop 208
atacgagttaggaagtctgcgattg

SEQ ID NO: 369661 - DNA, 25 bp, Artificial
  probe
  misc_feature (1)..(25): SEQ ID NO: 3991; WAN024C8T; Start 29; Stop 53
atttaagaaatacacggatgacgcc

SEQ ID NO: 369662 - DNA, 25 bp, Artificial
  probe
  misc_feature (1)..(25): SEQ ID NO: 3991; WAN024C8T; Start 166; Stop 190
gcttggttagcattacgaatacgag

SEQ ID NO: 369663 - DNA, 25 bp, Artificial
  probe
  misc_feature (1)..(25): SEQ ID NO: 3991; WAN024C8T; Start 163; Stop 187
ttagcttggttagcattacgaatac

SEQ ID NO: 369664 - DNA, 25 bp, Artificial
  probe
  misc_feature (1)..(25): SEQ ID NO: 3991; WAN024C8T; Start 30; Stop 54
tttaagaaatacacggatgacgcct

SEQ ID NO: 369665 - DNA, 25 bp, Artificial
  probe
  misc_feature (1)..(25): SEQ ID NO: 3991; WAN024C8T; Start 164; Stop 188
tagcttggttagcattacgaatacg

SEQ ID NO: 369666 - DNA, 25 bp, Artificial
  probe
  misc_feature (1)..(25): SEQ ID NO: 3991; WAN024C8T; Start 31; Stop 55
ttaagaaatacacggatgacgcctt

SEQ ID NO: 369667 - DNA, 25 bp, Artificial
  probe
  misc_feature (1)..(25): SEQ ID NO: 3991; WAN024C8T; Start 185; Stop 209
tacgagttaggaagtctgcgattgg

SEQ ID NO: 369668 - DNA, 25 bp, Artificial
  probe
  misc_feature (1)..(25): SEQ ID NO: 3991; WAN024C8T; Start 181; Stop 205
cgaatacgagttaggaagtctgcga

SEQ ID NO: 369669 - DNA, 25 bp, Artificial
  probe
  misc_feature (1)..(25): SEQ ID NO: 3991; WAN024C8T; Start 28; Stop 52
tatttaagaaatacacggatgacgc

SEQ ID NO: 369670 - DNA, 25 bp, Artificial
  probe
  misc_feature (1)..(25): SEQ ID NO: 3991; WAN024C8T; Start 32; Stop 56
taagaaatacacggatgacgccttg

SEQ ID NO: 369671 - DNA, 25 bp, Artificial
  probe
  misc_feature (1)..(25): SEQ ID NO: 3991; WAN024C8T; Start 126; Stop 150
tttgatgtttgatgcaggtacttca

SEQ ID NO: 369672 - DNA, 25 bp, Artificial
  probe
  misc_feature (1)..(25): SEQ ID NO: 3991; WAN024C8T; Start 14; Stop 38
caccatttggtccgtatttaagaaa

SEQ ID NO: 369673 - DNA, 25 bp, Artificial
  probe
  misc_feature (1)..(25): SEQ ID NO: 3991; WAN024C8T; Start 13; Stop 37
tcaccatttggtccgtatttaagaa

SEQ ID NO: 369674 - DNA, 25 bp, Artificial
  probe
  misc_feature (1)..(25): SEQ ID NO: 3991; WAN024C8T; Start 10; Stop 34
ttctcaccatttggtccgtatttaa

SEQ ID NO: 369675 - DNA, 25 bp, Artificial
  probe
  misc_feature (1)..(25): SEQ ID NO: 3991; WAN024C8T; Start 9; Stop 33
tttctcaccatttggtccgtattta

SEQ ID NO: 369676 - DNA, 25 bp, Artificial
  probe
  misc_feature (1)..(25): SEQ ID NO: 3991; WAN024C8T; Start 51; Stop 75
gccttgtttgtcatcttcaatgatt

SEQ ID NO: 369677 - DNA, 25 bp, Artificial
  probe
  misc_feature (1)..(25): SEQ ID NO: 3991; WAN024C8T; Start 12; Stop 36
ctcaccatttggtccgtatttaaga

SEQ ID NO: 369678 - DNA, 25 bp, Artificial
  probe
  misc_feature (1)..(25): SEQ ID NO: 3992; WAN024GEH; Start 86; Stop 110
caggtatcggatttggtttagcaat

SEQ ID NO: 369679 - DNA, 25 bp, Artificial
  probe
  misc_feature (1)..(25): SEQ ID NO: 3992; WAN024GEH; Start 83; Stop 107
caacaggtatcggatttggtttagc

SEQ ID NO: 369680 - DNA, 25 bp, Artificial
  probe
  misc_feature (1)..(25): SEQ ID NO: 3992; WAN024GEH; Start 82; Stop 106
gcaacaggtatcggatttggtttag

SEQ ID NO: 369681 - DNA, 25 bp, Artificial
  probe
  misc_feature (1)..(25): SEQ ID NO: 3992; WAN024GEH; Start 84; Stop 108
aacaggtatcggatttggtttagca

SEQ ID NO: 369682 - DNA, 25 bp, Artificial
  probe
  misc_feature (1)..(25): SEQ ID NO: 3992; WAN024GEH; Start 85; Stop 109
acaggtatcggatttggtttagcaa

SEQ ID NO: 369683 - DNA, 25 bp, Artificial
  probe
  misc_feature (1)..(25): SEQ ID NO: 3992; WAN024GEH; Start 87; Stop 111
aggtatcggatttggtttagcaatc

SEQ ID NO: 369684 - DNA, 25 bp, Artificial
  probe
  misc_feature (1)..(25): SEQ ID NO: 3992; WAN024GEH; Start 81; Stop 105
tgcaacaggtatcggatttggttta

SEQ ID NO: 369685 - DNA, 25 bp, Artificial
  probe
  misc_feature (1)..(25): SEQ ID NO: 3992; WAN024GEH; Start 44; Stop 68
aaatttcagtaccagttaatgattt

SEQ ID NO: 369686 - DNA, 25 bp, Artificial
  probe
  misc_feature (1)..(25): SEQ ID NO: 3992; WAN024GEH; Start 80; Stop 104
ttgcaacaggtatcggatttggttt

SEQ ID NO: 369687 - DNA, 25 bp, Artificial
  probe
  misc_feature (1)..(25): SEQ ID NO: 3992; WAN024GEH; Start 1; Stop 25
gtgataatcatgcaagataactttt

SEQ ID NO: 369688 - DNA, 25 bp, Artificial
  probe
  misc_feature (1)..(25): SEQ ID NO: 3992; WAN024GEH; Start 79; Stop 103
cttgcaacaggtatcggatttggtt

SEQ ID NO: 369689 - DNA, 25 bp, Artificial
  probe
  misc_feature (1)..(25): SEQ ID NO: 3992; WAN024GEH; Start 45; Stop 69
aatttcagtaccagttaatgatttt

SEQ ID NO: 369690 - DNA, 25 bp, Artificial
  probe
  misc_feature (1)..(25): SEQ ID NO: 3992; WAN024GEH; Start 77; Stop 101
gacttgcaacaggtatcggatttgg

SEQ ID NO: 369691 - DNA, 25 bp, Artificial
  probe
  misc_feature (1)..(25): SEQ ID NO: 3992; WAN024GEH; Start 76; Stop 100
ggacttgcaacaggtatcggatttg

SEQ ID NO: 369692 - DNA, 25 bp, Artificial
  probe
  misc_feature (1)..(25): SEQ ID NO: 3992; WAN024GEH; Start 74; Stop 98
ctggacttgcaacaggtatcggatt

SEQ ID NO: 369693 - DNA, 25 bp, Artificial
  probe
  misc_feature (1)..(25): SEQ ID NO: 3992; WAN024GEH; Start 75; Stop 99
tggacttgcaacaggtatcggattt

SEQ ID NO: 369694 - DNA, 25 bp, Artificial
  probe
  misc_feature (1)..(25): SEQ ID NO: 3992; WAN024GEH; Start 78; Stop 102
acttgcaacaggtatcggatttggt

SEQ ID NO: 369695 - DNA, 25 bp, Artificial
  probe
  misc_feature (1)..(25): SEQ ID NO: 3993; WAN024DSX; Start 124; Stop 148
ttttagcccatattcacattcacta

SEQ ID NO: 369696 - DNA, 25 bp, Artificial
  probe
  misc_feature (1)..(25): SEQ ID NO: 3993; WAN024DSX; Start 49; Stop 73
agagttggaacgtccagtgaacatt

SEQ ID NO: 369697 - DNA, 25 bp, Artificial
  probe
  misc_feature (1)..(25): SEQ ID NO: 3993; WAN024DSX; Start 48; Stop 72
aagagttggaacgtccagtgaacat

SEQ ID NO: 369698 - DNA, 25 bp, Artificial
  probe
  misc_feature (1)..(25): SEQ ID NO: 3993; WAN024DSX; Start 50; Stop 74
gagttggaacgtccagtgaacattt

SEQ ID NO: 369699 - DNA, 25 bp, Artificial
  probe
  misc_feature (1)..(25): SEQ ID NO: 3993; WAN024DSX; Start 37; Stop 61
cagaaatggggaagagttggaacgt

SEQ ID NO: 369700 - DNA, 25 bp, Artificial
  probe
  misc_feature (1)..(25): SEQ ID NO: 3993; WAN024DSX; Start 47; Stop 71
gaagagttggaacgtccagtgaaca

SEQ ID NO: 369701 - DNA, 25 bp, Artificial
  probe
  misc_feature (1)..(25): SEQ ID NO: 3993; WAN024DSX; Start 51; Stop 75
agttggaacgtccagtgaacatttt

SEQ ID NO: 369702 - DNA, 25 bp, Artificial
  probe
  misc_feature (1)..(25): SEQ ID NO: 3993; WAN024DSX; Start 102; Stop 126
agttggaacgtccagtggatgtttt

SEQ ID NO: 369703 - DNA, 25 bp, Artificial
  probe
  misc_feature (1)..(25): SEQ ID NO: 3994; WAN024GLZ; Start 95; Stop 119
ttatgatgttagtcgttgttgctgg

SEQ ID NO: 369704 - DNA, 25 bp, Artificial
  probe
  misc_feature (1)..(25): SEQ ID NO: 3994; WAN024GLZ; Start 96; Stop 120
tatgatgttagtcgttgttgctgga

SEQ ID NO: 369705 - DNA, 25 bp, Artificial
  probe
  misc_feature (1)..(25): SEQ ID NO: 3994; WAN024GLZ; Start 100; Stop 124
atgttagtcgttgttgctggagtaa

SEQ ID NO: 369706 - DNA, 25 bp, Artificial
  probe
  misc_feature (1)..(25): SEQ ID NO: 3994; WAN024GLZ; Start 103; Stop 127
ttagtcgttgttgctggagtaagtc

SEQ ID NO: 369707 - DNA, 25 bp, Artificial
  probe
  misc_feature (1)..(25): SEQ ID NO: 3994; WAN024GLZ; Start 99; Stop 123
gatgttagtcgttgttgctggagta

SEQ ID NO: 369708 - DNA, 25 bp, Artificial
  probe
  misc_feature (1)..(25): SEQ ID NO: 3994; WAN024GLZ; Start 94; Stop 118
tttatgatgttagtcgttgttgctg

SEQ ID NO: 369709 - DNA, 25 bp, Artificial
  probe
  misc_feature (1)..(25): SEQ ID NO: 3994; WAN024GLZ; Start 225; Stop 249
aatcatttgtttcctcctttggttt

SEQ ID NO: 369710 - DNA, 25 bp, Artificial
  probe
  misc_feature (1)..(25): SEQ ID NO: 3994; WAN024GLZ; Start 223; Stop 247
gtaatcatttgtttcctcctttggt

SEQ ID NO: 369711 - DNA, 25 bp, Artificial
  probe
  misc_feature (1)..(25): SEQ ID NO: 3994; WAN024GLZ; Start 222; Stop 246
tgtaatcatttgtttcctcctttgg

SEQ ID NO: 369712 - DNA, 25 bp, Artificial
  probe
  misc_feature (1)..(25): SEQ ID NO: 3994; WAN024GLZ; Start 45; Stop 69
gctaaattcatcaccagtttcgtat

SEQ ID NO: 369713 - DNA, 25 bp, Artificial
  probe
  misc_feature (1)..(25): SEQ ID NO: 3994; WAN024GLZ; Start 227; Stop 251
tcatttgtttcctcctttggtttat

SEQ ID NO: 369714 - DNA, 25 bp, Artificial
  probe
  misc_feature (1)..(25): SEQ ID NO: 3994; WAN024GLZ; Start 226; Stop 250
atcatttgtttcctcctttggttta

SEQ ID NO: 369715 - DNA, 25 bp, Artificial
  probe
  misc_feature (1)..(25): SEQ ID NO: 3994; WAN024GLZ; Start 224; Stop 248
taatcatttgtttcctcctttggtt

SEQ ID NO: 369716 - DNA, 25 bp, Artificial
  probe
  misc_feature (1)..(25): SEQ ID NO: 3994; WAN024GLZ; Start 102; Stop 126
gttagtcgttgttgctggagtaagt

SEQ ID NO: 369717 - DNA, 25 bp, Artificial
  probe
  misc_feature (1)..(25): SEQ ID NO: 3994; WAN024GLZ; Start 101; Stop 125
tgttagtcgttgttgctggagtaag

SEQ ID NO: 369718 - DNA, 25 bp, Artificial
  probe
  misc_feature (1)..(25): SEQ ID NO: 3994; WAN024GLZ; Start 228; Stop 252
catttgtttcctcctttggtttatt

SEQ ID NO: 369719 - DNA, 25 bp, Artificial
  probe
  misc_feature (1)..(25): SEQ ID NO: 3994; WAN024GLZ; Start 97; Stop 121
atgatgttagtcgttgttgctggag

SEQ ID NO: 369720 - DNA, 25 bp, Artificial
  probe
  misc_feature (1)..(25): SEQ ID NO: 3994; WAN024GLZ; Start 221; Stop 245
ttgtaatcatttgtttcctcctttg

SEQ ID NO: 369721 - DNA, 25 bp, Artificial
  probe
  misc_feature (1)..(25): SEQ ID NO: 3994; WAN024GLZ; Start 44; Stop 68
cgctaaattcatcaccagtttcgta

SEQ ID NO: 369722 - DNA, 25 bp, Artificial
  probe
  misc_feature (1)..(25): SEQ ID NO: 3994; WAN024GLZ; Start 41; Stop 65
actcgctaaattcatcaccagtttc

SEQ ID NO: 369723 - DNA, 25 bp, Artificial
  probe
  misc_feature (1)..(25): SEQ ID NO: 3994; WAN024GLZ; Start 229; Stop 253
atttgtttcctcctttggtttattt

SEQ ID NO: 369724 - DNA, 25 bp, Artificial
  probe
  misc_feature (1)..(25): SEQ ID NO: 3994; WAN024GLZ; Start 54; Stop 78
atcaccagtttcgtatatgagggac

SEQ ID NO: 369725 - DNA, 25 bp, Artificial
  probe
  misc_feature (1)..(25): SEQ ID NO: 3994; WAN024GLZ; Start 53; Stop 77
catcaccagtttcgtatatgaggga

SEQ ID NO: 369726 - DNA, 25 bp, Artificial
  probe
  misc_feature (1)..(25): SEQ ID NO: 3994; WAN024GLZ; Start 220; Stop 244
tttgtaatcatttgtttcctccttt

SEQ ID NO: 369727 - DNA, 25 bp, Artificial
  probe
  misc_feature (1)..(25): SEQ ID NO: 3994; WAN024GLZ; Start 116; Stop 140
ctggagtaagtcctgtttcattaac

SEQ ID NO: 369728 - DNA, 25 bp, Artificial
  probe
  misc_feature (1)..(25): SEQ ID NO: 3994; WAN024GLZ; Start 48; Stop 72
aaattcatcaccagtttcgtatatg

SEQ ID NO: 369729 - DNA, 25 bp, Artificial
  probe
  misc_feature (1)..(25): SEQ ID NO: 3994; WAN024GLZ; Start 115; Stop 139
gctggagtaagtcctgtttcattaa

SEQ ID NO: 369730 - DNA, 25 bp, Artificial
  probe
  misc_feature (1)..(25): SEQ ID NO: 3994; WAN024GLZ; Start 153; Stop 177
ggatgttgctggatttcgatataga

SEQ ID NO: 369731 - DNA, 25 bp, Artificial
  probe
  misc_feature (1)..(25): SEQ ID NO: 3994; WAN024GLZ; Start 175; Stop 199
agaaactccagtatagtggctctat

SEQ ID NO: 369732 - DNA, 25 bp, Artificial
  probe
  misc_feature (1)..(25): SEQ ID NO: 3994; WAN024GLZ; Start 174; Stop 198
tagaaactccagtatagtggctcta

SEQ ID NO: 369733 - DNA, 25 bp, Artificial
  probe
  misc_feature (1)..(25): SEQ ID NO: 3994; WAN024GLZ; Start 173; Stop 197
atagaaactccagtatagtggctct

SEQ ID NO: 369734 - DNA, 25 bp, Artificial
  probe
  misc_feature (1)..(25): SEQ ID NO: 3994; WAN024GLZ; Start 65; Stop 89
cgtatatgagggactgttcgcttag

SEQ ID NO: 369735 - DNA, 25 bp, Artificial
  probe
  misc_feature (1)..(25): SEQ ID NO: 3994; WAN024GLZ; Start 176; Stop 200
gaaactccagtatagtggctctatt

SEQ ID NO: 369736 - DNA, 25 bp, Artificial
  probe
  misc_feature (1)..(25): SEQ ID NO: 3995; WAN024G4Z; Start 65; Stop 89
ttgtgattcatcctcttctctctcc

SEQ ID NO: 369737 - DNA, 25 bp, Artificial
  probe
  misc_feature (1)..(25): SEQ ID NO: 3995; WAN024G4Z; Start 109; Stop 133
caactcttgaagataggcagattcc

SEQ ID NO: 369738 - DNA, 25 bp, Artificial
  probe
  misc_feature (1)..(25): SEQ ID NO: 3995; WAN024G4Z; Start 114; Stop 138
cttgaagataggcagattccttact

SEQ ID NO: 369739 - DNA, 25 bp, Artificial
  probe
  misc_feature (1)..(25): SEQ ID NO: 3995; WAN024G4Z; Start 115; Stop 139
ttgaagataggcagattccttactt

SEQ ID NO: 369740 - DNA, 25 bp, Artificial
  probe
  misc_feature (1)..(25): SEQ ID NO: 3995; WAN024G4Z; Start 113; Stop 137
tcttgaagataggcagattccttac

SEQ ID NO: 369741 - DNA, 25 bp, Artificial
  probe
  misc_feature (1)..(25): SEQ ID NO: 3995; WAN024G4Z; Start 112; Stop 136
ctcttgaagataggcagattcctta

SEQ ID NO: 369742 - DNA, 25 bp, Artificial
  probe
  misc_feature (1)..(25): SEQ ID NO: 3995; WAN024G4Z; Start 111; Stop 135
actcttgaagataggcagattcctt

SEQ ID NO: 369743 - DNA, 25 bp, Artificial
  probe
  misc_feature (1)..(25): SEQ ID NO: 3995; WAN024G4Z; Start 110; Stop 134
aactcttgaagataggcagattcct

SEQ ID NO: 369744 - DNA, 25 bp, Artificial
  probe
  misc_feature (1)..(25): SEQ ID NO: 3995; WAN024G4Z; Start 126; Stop 150
cagattccttactttcactttcgtt

SEQ ID NO: 369745 - DNA, 25 bp, Artificial
  probe
  misc_feature (1)..(25): SEQ ID NO: 3995; WAN024G4Z; Start 64; Stop 88
tttgtgattcatcctcttctctctc

SEQ ID NO: 369746 - DNA, 25 bp, Artificial
  probe
  misc_feature (1)..(25): SEQ ID NO: 3995; WAN024G4Z; Start 63; Stop 87
ctttgtgattcatcctcttctctct

SEQ ID NO: 369747 - DNA, 25 bp, Artificial
  probe
  misc_feature (1)..(25): SEQ ID NO: 3995; WAN024G4Z; Start 192; Stop 216
aattgaccaaggaaagcatagtgta

SEQ ID NO: 369748 - DNA, 25 bp, Artificial
  probe
  misc_feature (1)..(25): SEQ ID NO: 3995; WAN024G4Z; Start 43; Stop 67
catatcctccttagacagtcctttg

SEQ ID NO: 369749 - DNA, 25 bp, Artificial
  probe
  misc_feature (1)..(25): SEQ ID NO: 3995; WAN024G4Z; Start 193; Stop 217
attgaccaaggaaagcatagtgtag

SEQ ID NO: 369750 - DNA, 25 bp, Artificial
  probe
  misc_feature (1)..(25): SEQ ID NO: 3995; WAN024G4Z; Start 62; Stop 86
cctttgtgattcatcctcttctctc

SEQ ID NO: 369751 - DNA, 25 bp, Artificial
  probe
  misc_feature (1)..(25): SEQ ID NO: 3995; WAN024G4Z; Start 61; Stop 85
tcctttgtgattcatcctcttctct

SEQ ID NO: 369752 - DNA, 25 bp, Artificial
  probe
  misc_feature (1)..(25): SEQ ID NO: 3995; WAN024G4Z; Start 60; Stop 84
gtcctttgtgattcatcctcttctc

SEQ ID NO: 369753 - DNA, 25 bp, Artificial
  probe
  misc_feature (1)..(25): SEQ ID NO: 3995; WAN024G4Z; Start 42; Stop 66
ccatatcctccttagacagtccttt

SEQ ID NO: 369754 - DNA, 25 bp, Artificial
  probe
  misc_feature (1)..(25): SEQ ID NO: 3995; WAN024G4Z; Start 125; Stop 149
gcagattccttactttcactttcgt

SEQ ID NO: 369755 - DNA, 25 bp, Artificial
  probe
  misc_feature (1)..(25): SEQ ID NO: 3995; WAN024G4Z; Start 190; Stop 214
agaattgaccaaggaaagcatagtg

SEQ ID NO: 369756 - DNA, 25 bp, Artificial
  probe
  misc_feature (1)..(25): SEQ ID NO: 3995; WAN024G4Z; Start 189; Stop 213
cagaattgaccaaggaaagcatagt

SEQ ID NO: 369757 - DNA, 25 bp, Artificial
  probe
  misc_feature (1)..(25): SEQ ID NO: 3995; WAN024G4Z; Start 59; Stop 83
agtcctttgtgattcatcctcttct

SEQ ID NO: 369758 - DNA, 25 bp, Artificial
  probe
  misc_feature (1)..(25): SEQ ID NO: 3995; WAN024G4Z; Start 58; Stop 82
cagtcctttgtgattcatcctcttc

SEQ ID NO: 369759 - DNA, 25 bp, Artificial
  probe
  misc_feature (1)..(25): SEQ ID NO: 3995; WAN024G4Z; Start 181; Stop 205
cttacgagcagaattgaccaaggaa

SEQ ID NO: 369760 - DNA, 25 bp, Artificial
  probe
  misc_feature (1)..(25): SEQ ID NO: 3995; WAN024G4Z; Start 199; Stop 223
caaggaaagcatagtgtagcgattt

SEQ ID NO: 369761 - DNA, 25 bp, Artificial
  probe
  misc_feature (1)..(25): SEQ ID NO: 3995; WAN024G4Z; Start 191; Stop 215
gaattgaccaaggaaagcatagtgt

SEQ ID NO: 369762 - DNA, 25 bp, Artificial
  probe
  misc_feature (1)..(25): SEQ ID NO: 3995; WAN024G4Z; Start 127; Stop 151
agattccttactttcactttcgtta

SEQ ID NO: 369763 - DNA, 25 bp, Artificial
  probe
  misc_feature (1)..(25): SEQ ID NO: 3995; WAN024G4Z; Start 66; Stop 90
tgtgattcatcctcttctctctccg

SEQ ID NO: 369764 - DNA, 25 bp, Artificial
  probe
  misc_feature (1)..(25): SEQ ID NO: 3995; WAN024G4Z; Start 44; Stop 68
atatcctccttagacagtcctttgt

SEQ ID NO: 369765 - DNA, 25 bp, Artificial
  probe
  misc_feature (1)..(25): SEQ ID NO: 3995; WAN024G4Z; Start 53; Stop 77
ttagacagtcctttgtgattcatcc

SEQ ID NO: 369766 - DNA, 25 bp, Artificial
  probe
  misc_feature (1)..(25): SEQ ID NO: 3995; WAN024G4Z; Start 51; Stop 75
ccttagacagtcctttgtgattcat

SEQ ID NO: 369767 - DNA, 25 bp, Artificial
  probe
  misc_feature (1)..(25): SEQ ID NO: 3995; WAN024G4Z; Start 52; Stop 76
cttagacagtcctttgtgattcatc

SEQ ID NO: 369768 - DNA, 25 bp, Artificial
  probe
  misc_feature (1)..(25): SEQ ID NO: 3995; WAN024G4Z; Start 49; Stop 73
ctccttagacagtcctttgtgattc

SEQ ID NO: 369769 - DNA, 25 bp, Artificial
  probe
  misc_feature (1)..(25): SEQ ID NO: 3996; WAN024EVU; Start 146; Stop 170
agatactggatattgagcaagcctt

SEQ ID NO: 369770 - DNA, 25 bp, Artificial
  probe
  misc_feature (1)..(25): SEQ ID NO: 3996; WAN024EVU; Start 143; Stop 167
atcagatactggatattgagcaagc

SEQ ID NO: 369771 - DNA, 25 bp, Artificial
  probe
  misc_feature (1)..(25): SEQ ID NO: 3996; WAN024EVU; Start 141; Stop 165
cgatcagatactggatattgagcaa

SEQ ID NO: 369772 - DNA, 25 bp, Artificial
  probe
  misc_feature (1)..(25): SEQ ID NO: 3996; WAN024EVU; Start 147; Stop 171
gatactggatattgagcaagccttg

SEQ ID NO: 369773 - DNA, 25 bp, Artificial
  probe
  misc_feature (1)..(25): SEQ ID NO: 3996; WAN024EVU; Start 142; Stop 166
gatcagatactggatattgagcaag

SEQ ID NO: 369774 - DNA, 25 bp, Artificial
  probe
  misc_feature (1)..(25): SEQ ID NO: 3996; WAN024EVU; Start 145; Stop 169
cagatactggatattgagcaagcct

SEQ ID NO: 369775 - DNA, 25 bp, Artificial
  probe
  misc_feature (1)..(25): SEQ ID NO: 3996; WAN024EVU; Start 144; Stop 168
tcagatactggatattgagcaagcc

SEQ ID NO: 369776 - DNA, 25 bp, Artificial
  probe
  misc_feature (1)..(25): SEQ ID NO: 3996; WAN024EVU; Start 140; Stop 164
tcgatcagatactggatattgagca

SEQ ID NO: 369777 - DNA, 25 bp, Artificial
  probe
  misc_feature (1)..(25): SEQ ID NO: 3996; WAN024EVU; Start 285; Stop 309
cgtatcgtaccatattcccagttga

SEQ ID NO: 369778 - DNA, 25 bp, Artificial
  probe
  misc_feature (1)..(25): SEQ ID NO: 3996; WAN024EVU; Start 68; Stop 92
acagccttcttgacaccttggataa

SEQ ID NO: 369779 - DNA, 25 bp, Artificial
  probe
  misc_feature (1)..(25): SEQ ID NO: 3996; WAN024EVU; Start 67; Stop 91
aacagccttcttgacaccttggata

SEQ ID NO: 369780 - DNA, 25 bp, Artificial
  probe
  misc_feature (1)..(25): SEQ ID NO: 3996; WAN024EVU; Start 69; Stop 93
cagccttcttgacaccttggataaa

SEQ ID NO: 369781 - DNA, 25 bp, Artificial
  probe
  misc_feature (1)..(25): SEQ ID NO: 3996; WAN024EVU; Start 278; Stop 302
tcaatcacgtatcgtaccatattcc

SEQ ID NO: 369782 - DNA, 25 bp, Artificial
  probe
  misc_feature (1)..(25): SEQ ID NO: 3996; WAN024EVU; Start 55; Stop 79
gacaaagtcttcaacagccttcttg

SEQ ID NO: 369783 - DNA, 25 bp, Artificial
  probe
  misc_feature (1)..(25): SEQ ID NO: 3996; WAN024EVU; Start 277; Stop 301
ttcaatcacgtatcgtaccatattc

SEQ ID NO: 369784 - DNA, 25 bp, Artificial
  probe
  misc_feature (1)..(25): SEQ ID NO: 3996; WAN024EVU; Start 77; Stop 101
ttgacaccttggataaaatctggat

SEQ ID NO: 369785 - DNA, 25 bp, Artificial
  probe
  misc_feature (1)..(25): SEQ ID NO: 3996; WAN024EVU; Start 72; Stop 96
ccttcttgacaccttggataaaatc

SEQ ID NO: 369786 - DNA, 25 bp, Artificial
  probe
  misc_feature (1)..(25): SEQ ID NO: 3996; WAN024EVU; Start 76; Stop 100
cttgacaccttggataaaatctgga

SEQ ID NO: 369787 - DNA, 25 bp, Artificial
  probe
  misc_feature (1)..(25): SEQ ID NO: 3996; WAN024EVU; Start 75; Stop 99
tcttgacaccttggataaaatctgg

SEQ ID NO: 369788 - DNA, 25 bp, Artificial
  probe
  misc_feature (1)..(25): SEQ ID NO: 3996; WAN024EVU; Start 74; Stop 98
ttcttgacaccttggataaaatctg

SEQ ID NO: 369789 - DNA, 25 bp, Artificial
  probe
  misc_feature (1)..(25): SEQ ID NO: 3996; WAN024EVU; Start 139; Stop 163
atcgatcagatactggatattgagc

SEQ ID NO: 369790 - DNA, 25 bp, Artificial
  probe
  misc_feature (1)..(25): SEQ ID NO: 3996; WAN024EVU; Start 73; Stop 97
cttcttgacaccttggataaaatct

SEQ ID NO: 369791 - DNA, 25 bp, Artificial
  probe
  misc_feature (1)..(25): SEQ ID NO: 3996; WAN024EVU; Start 78; Stop 102
tgacaccttggataaaatctggatt

SEQ ID NO: 369792 - DNA, 25 bp, Artificial
  probe
  misc_feature (1)..(25): SEQ ID NO: 3996; WAN024EVU; Start 71; Stop 95
gccttcttgacaccttggataaaat

SEQ ID NO: 369793 - DNA, 25 bp, Artificial
  probe
  misc_feature (1)..(25): SEQ ID NO: 3996; WAN024EVU; Start 252; Stop 276
cgtcccaatcagtatgaccagattt

SEQ ID NO: 369794 - DNA, 25 bp, Artificial
  probe
  misc_feature (1)..(25): SEQ ID NO: 3996; WAN024EVU; Start 93; Stop 117
aatctggattttgactgatagagcc

SEQ ID NO: 369795 - DNA, 25 bp, Artificial
  probe
  misc_feature (1)..(25): SEQ ID NO: 3996; WAN024EVU; Start 35; Stop 59
gtgtattcttcgtaggcatcgacaa

SEQ ID NO: 369796 - DNA, 25 bp, Artificial
  probe
  misc_feature (1)..(25): SEQ ID NO: 3996; WAN024EVU; Start 59; Stop 83
aagtcttcaacagccttcttgacac

SEQ ID NO: 369797 - DNA, 25 bp, Artificial
  probe
  misc_feature (1)..(25): SEQ ID NO: 3996; WAN024EVU; Start 70; Stop 94
agccttcttgacaccttggataaaa

SEQ ID NO: 369798 - DNA, 25 bp, Artificial
  probe
  misc_feature (1)..(25): SEQ ID NO: 3996; WAN024EVU; Start 54; Stop 78
cgacaaagtcttcaacagccttctt

SEQ ID NO: 369799 - DNA, 25 bp, Artificial
  probe
  misc_feature (1)..(25): SEQ ID NO: 3996; WAN024EVU; Start 37; Stop 61
gtattcttcgtaggcatcgacaaag

SEQ ID NO: 369800 - DNA, 25 bp, Artificial
  probe
  misc_feature (1)..(25): SEQ ID NO: 3996; WAN024EVU; Start 20; Stop 44
ataactggtgcgaccgtgtattctt

SEQ ID NO: 369801 - DNA, 25 bp, Artificial
  probe
  misc_feature (1)..(25): SEQ ID NO: 3996; WAN024EVU; Start 253; Stop 277
gtcccaatcagtatgaccagatttt

SEQ ID NO: 369802 - DNA, 25 bp, Artificial
  probe
  misc_feature (1)..(25): SEQ ID NO: 3997; WAN024FCR; Start 494; Stop 518
atatccacatcatccaagagaactc

SEQ ID NO: 369803 - DNA, 25 bp, Artificial
  probe
  misc_feature (1)..(25): SEQ ID NO: 3997; WAN024FCR; Start 398; Stop 422
atggcgatattggacttaatagttc

SEQ ID NO: 369804 - DNA, 25 bp, Artificial
  probe
  misc_feature (1)..(25): SEQ ID NO: 3997; WAN024FCR; Start 393; Stop 417
ggtacatggcgatattggacttaat

SEQ ID NO: 369805 - DNA, 25 bp, Artificial
  probe
  misc_feature (1)..(25): SEQ ID NO: 3997; WAN024FCR; Start 495; Stop 519
tatccacatcatccaagagaactct

SEQ ID NO: 369806 - DNA, 25 bp, Artificial
  probe
  misc_feature (1)..(25): SEQ ID NO: 3997; WAN024FCR; Start 396; Stop 420
acatggcgatattggacttaatagt

SEQ ID NO: 369807 - DNA, 25 bp, Artificial
  probe
  misc_feature (1)..(25): SEQ ID NO: 3997; WAN024FCR; Start 399; Stop 423
tggcgatattggacttaatagttcc

SEQ ID NO: 369808 - DNA, 25 bp, Artificial
  probe
  misc_feature (1)..(25): SEQ ID NO: 3997; WAN024FCR; Start 397; Stop 421
catggcgatattggacttaatagtt

SEQ ID NO: 369809 - DNA, 25 bp, Artificial
  probe
  misc_feature (1)..(25): SEQ ID NO: 3997; WAN024FCR; Start 394; Stop 418
gtacatggcgatattggacttaata

SEQ ID NO: 369810 - DNA, 25 bp, Artificial
  probe
  misc_feature (1)..(25): SEQ ID NO: 3997; WAN024FCR; Start 392; Stop 416
tggtacatggcgatattggacttaa

SEQ ID NO: 369811 - DNA, 25 bp, Artificial
  probe
  misc_feature (1)..(25): SEQ ID NO: 3997; WAN024FCR; Start 391; Stop 415
ttggtacatggcgatattggactta

SEQ ID NO: 369812 - DNA, 25 bp, Artificial
  probe
  misc_feature (1)..(25): SEQ ID NO: 3997; WAN024FCR; Start 395; Stop 419
tacatggcgatattggacttaatag

SEQ ID NO: 369813 - DNA, 25 bp, Artificial
  probe
  misc_feature (1)..(25): SEQ ID NO: 3997; WAN024FCR; Start 60; Stop 84
ccttatccaagacatagatgcagtt

SEQ ID NO: 369814 - DNA, 25 bp, Artificial
  probe
  misc_feature (1)..(25): SEQ ID NO: 3997; WAN024FCR; Start 493; Stop 517
gatatccacatcatccaagagaact

SEQ ID NO: 369815 - DNA, 25 bp, Artificial
  probe
  misc_feature (1)..(25): SEQ ID NO: 3997; WAN024FCR; Start 472; Stop 496
ctcttcttgactgaaatccctgata

SEQ ID NO: 369816 - DNA, 25 bp, Artificial
  probe
  misc_feature (1)..(25): SEQ ID NO: 3997; WAN024FCR; Start 496; Stop 520
atccacatcatccaagagaactctc

SEQ ID NO: 369817 - DNA, 25 bp, Artificial
  probe
  misc_feature (1)..(25): SEQ ID NO: 3997; WAN024FCR; Start 61; Stop 85
cttatccaagacatagatgcagttg

SEQ ID NO: 369818 - DNA, 25 bp, Artificial
  probe
  misc_feature (1)..(25): SEQ ID NO: 3997; WAN024FCR; Start 473; Stop 497
tcttcttgactgaaatccctgatat

SEQ ID NO: 369819 - DNA, 25 bp, Artificial
  probe
  misc_feature (1)..(25): SEQ ID NO: 3997; WAN024FCR; Start 316; Stop 340
ctgaggaagttcttgaataaaggaa

SEQ ID NO: 369820 - DNA, 25 bp, Artificial
  probe
  misc_feature (1)..(25): SEQ ID NO: 3997; WAN024FCR; Start 321; Stop 345
gaagttcttgaataaaggaatctgc

SEQ ID NO: 369821 - DNA, 25 bp, Artificial
  probe
  misc_feature (1)..(25): SEQ ID NO: 3997; WAN024FCR; Start 390; Stop 414
cttggtacatggcgatattggactt

SEQ ID NO: 369822 - DNA, 25 bp, Artificial
  probe
  misc_feature (1)..(25): SEQ ID NO: 3997; WAN024FCR; Start 388; Stop 412
ttcttggtacatggcgatattggac

SEQ ID NO: 369823 - DNA, 25 bp, Artificial
  probe
  misc_feature (1)..(25): SEQ ID NO: 3997; WAN024FCR; Start 409; Stop 433
ggacttaatagttccatgatagagg

SEQ ID NO: 369824 - DNA, 25 bp, Artificial
  probe
  misc_feature (1)..(25): SEQ ID NO: 3997; WAN024FCR; Start 317; Stop 341
tgaggaagttcttgaataaaggaat

SEQ ID NO: 369825 - DNA, 25 bp, Artificial
  probe
  misc_feature (1)..(25): SEQ ID NO: 3997; WAN024FCR; Start 315; Stop 339
cctgaggaagttcttgaataaagga

SEQ ID NO: 369826 - DNA, 25 bp, Artificial
  probe
  misc_feature (1)..(25): SEQ ID NO: 3997; WAN024FCR; Start 320; Stop 344
ggaagttcttgaataaaggaatctg

SEQ ID NO: 369827 - DNA, 25 bp, Artificial
  probe
  misc_feature (1)..(25): SEQ ID NO: 3997; WAN024FCR; Start 319; Stop 343
aggaagttcttgaataaaggaatct

SEQ ID NO: 369828 - DNA, 25 bp, Artificial
  probe
  misc_feature (1)..(25): SEQ ID NO: 3997; WAN024FCR; Start 89; Stop 113
tcttgaatagtagaaaggcggtgag

SEQ ID NO: 369829 - DNA, 25 bp, Artificial
  probe
  misc_feature (1)..(25): SEQ ID NO: 3997; WAN024FCR; Start 51; Stop 75
taatgcgtcccttatccaagacata

SEQ ID NO: 369830 - DNA, 25 bp, Artificial
  probe
  misc_feature (1)..(25): SEQ ID NO: 3997; WAN024FCR; Start 314; Stop 338
ccctgaggaagttcttgaataaagg

SEQ ID NO: 369831 - DNA, 25 bp, Artificial
  probe
  misc_feature (1)..(25): SEQ ID NO: 3997; WAN024FCR; Start 318; Stop 342
gaggaagttcttgaataaaggaatc

SEQ ID NO: 369832 - DNA, 25 bp, Artificial
  probe
  misc_feature (1)..(25): SEQ ID NO: 3997; WAN024FCR; Start 471; Stop 495
gctcttcttgactgaaatccctgat

SEQ ID NO: 369833 - DNA, 25 bp, Artificial
  probe
  misc_feature (1)..(25): SEQ ID NO: 3997; WAN024FCR; Start 389; Stop 413
tcttggtacatggcgatattggact

SEQ ID NO: 369834 - DNA, 25 bp, Artificial
  probe
  misc_feature (1)..(25): SEQ ID NO: 3997; WAN024FCR; Start 50; Stop 74
ataatgcgtcccttatccaagacat

SEQ ID NO: 369835 - DNA, 25 bp, Artificial
  probe
  misc_feature (1)..(25): SEQ ID NO: 3998; WAN024GKW; Start 105; Stop 129
gtacgctaatcagagaagtccattc

SEQ ID NO: 369836 - DNA, 25 bp, Artificial
  probe
  misc_feature (1)..(25): SEQ ID NO: 3998; WAN024GKW; Start 106; Stop 130
tacgctaatcagagaagtccattcg

SEQ ID NO: 369837 - DNA, 25 bp, Artificial
  probe
  misc_feature (1)..(25): SEQ ID NO: 3998; WAN024GKW; Start 104; Stop 128
ggtacgctaatcagagaagtccatt

SEQ ID NO: 369838 - DNA, 25 bp, Artificial
  probe
  misc_feature (1)..(25): SEQ ID NO: 3998; WAN024GKW; Start 124; Stop 148
ccattcgcttcttacccttctatat

SEQ ID NO: 369839 - DNA, 25 bp, Artificial
  probe
  misc_feature (1)..(25): SEQ ID NO: 3998; WAN024GKW; Start 123; Stop 147
tccattcgcttcttacccttctata

SEQ ID NO: 369840 - DNA, 25 bp, Artificial
  probe
  misc_feature (1)..(25): SEQ ID NO: 3998; WAN024GKW; Start 109; Stop 133
gctaatcagagaagtccattcgctt

SEQ ID NO: 369841 - DNA, 25 bp, Artificial
  probe
  misc_feature (1)..(25): SEQ ID NO: 3998; WAN024GKW; Start 46; Stop 70
atggataatgaaatgcttgttcgta

SEQ ID NO: 369842 - DNA, 25 bp, Artificial
  probe
  misc_feature (1)..(25): SEQ ID NO: 3998; WAN024GKW; Start 45; Stop 69
tatggataatgaaatgcttgttcgt

SEQ ID NO: 369843 - DNA, 25 bp, Artificial
  probe
  misc_feature (1)..(25): SEQ ID NO: 3998; WAN024GKW; Start 199; Stop 223
catgaccgtggttatataggagcag

SEQ ID NO: 369844 - DNA, 25 bp, Artificial
  probe
  misc_feature (1)..(25): SEQ ID NO: 3998; WAN024GKW; Start 125; Stop 149
cattcgcttcttacccttctatatt

SEQ ID NO: 369845 - DNA, 25 bp, Artificial
  probe
  misc_feature (1)..(25): SEQ ID NO: 3998; WAN024GKW; Start 97; Stop 121
tatagagggtacgctaatcagagaa

SEQ ID NO: 369846 - DNA, 25 bp, Artificial
  probe
  misc_feature (1)..(25): SEQ ID NO: 3998; WAN024GKW; Start 96; Stop 120
ttatagagggtacgctaatcagaga

SEQ ID NO: 369847 - DNA, 25 bp, Artificial
  probe
  misc_feature (1)..(25): SEQ ID NO: 3998; WAN024GKW; Start 95; Stop 119
tttatagagggtacgctaatcagag

SEQ ID NO: 369848 - DNA, 25 bp, Artificial
  probe
  misc_feature (1)..(25): SEQ ID NO: 3998; WAN024GKW; Start 47; Stop 71
tggataatgaaatgcttgttcgtac

SEQ ID NO: 369849 - DNA, 25 bp, Artificial
  probe
  misc_feature (1)..(25): SEQ ID NO: 3998; WAN024GKW; Start 98; Stop 122
atagagggtacgctaatcagagaag

SEQ ID NO: 369850 - DNA, 25 bp, Artificial
  probe
  misc_feature (1)..(25): SEQ ID NO: 3998; WAN024GKW; Start 44; Stop 68
ttatggataatgaaatgcttgttcg

SEQ ID NO: 369851 - DNA, 25 bp, Artificial
  probe
  misc_feature (1)..(25): SEQ ID NO: 3998; WAN024GKW; Start 122; Stop 146
gtccattcgcttcttacccttctat

SEQ ID NO: 369852 - DNA, 25 bp, Artificial
  probe
  misc_feature (1)..(25): SEQ ID NO: 3998; WAN024GKW; Start 94; Stop 118
atttatagagggtacgctaatcaga

SEQ ID NO: 369853 - DNA, 25 bp, Artificial
  probe
  misc_feature (1)..(25): SEQ ID NO: 3998; WAN024GKW; Start 41; Stop 65
ctgttatggataatgaaatgcttgt

SEQ ID NO: 369854 - DNA, 25 bp, Artificial
  probe
  misc_feature (1)..(25): SEQ ID NO: 3998; WAN024GKW; Start 48; Stop 72
ggataatgaaatgcttgttcgtaca

SEQ ID NO: 369855 - DNA, 25 bp, Artificial
  probe
  misc_feature (1)..(25): SEQ ID NO: 3998; WAN024GKW; Start 51; Stop 75
taatgaaatgcttgttcgtacagag

SEQ ID NO: 369856 - DNA, 25 bp, Artificial
  probe
  misc_feature (1)..(25): SEQ ID NO: 3998; WAN024GKW; Start 200; Stop 224
atgaccgtggttatataggagcagg

SEQ ID NO: 369857 - DNA, 25 bp, Artificial
  probe
  misc_feature (1)..(25): SEQ ID NO: 3998; WAN024GKW; Start 50; Stop 74
ataatgaaatgcttgttcgtacaga

SEQ ID NO: 369858 - DNA, 25 bp, Artificial
  probe
  misc_feature (1)..(25): SEQ ID NO: 3998; WAN024GKW; Start 99; Stop 123
tagagggtacgctaatcagagaagt

SEQ ID NO: 369859 - DNA, 25 bp, Artificial
  probe
  misc_feature (1)..(25): SEQ ID NO: 3998; WAN024GKW; Start 49; Stop 73
gataatgaaatgcttgttcgtacag

SEQ ID NO: 369860 - DNA, 25 bp, Artificial
  probe
  misc_feature (1)..(25): SEQ ID NO: 3998; WAN024GKW; Start 42; Stop 66
tgttatggataatgaaatgcttgtt

SEQ ID NO: 369861 - DNA, 25 bp, Artificial
  probe
  misc_feature (1)..(25): SEQ ID NO: 3998; WAN024GKW; Start 128; Stop 152
tcgcttcttacccttctatattaaa

SEQ ID NO: 369862 - DNA, 25 bp, Artificial
  probe
  misc_feature (1)..(25): SEQ ID NO: 3998; WAN024GKW; Start 127; Stop 151
ttcgcttcttacccttctatattaa

SEQ ID NO: 369863 - DNA, 25 bp, Artificial
  probe
  misc_feature (1)..(25): SEQ ID NO: 3998; WAN024GKW; Start 110; Stop 134
ctaatcagagaagtccattcgcttc

SEQ ID NO: 369864 - DNA, 25 bp, Artificial
  probe
  misc_feature (1)..(25): SEQ ID NO: 3998; WAN024GKW; Start 88; Stop 112
tctgatatttatagagggtacgcta

SEQ ID NO: 369865 - DNA, 25 bp, Artificial
  probe
  misc_feature (1)..(25): SEQ ID NO: 3998; WAN024GKW; Start 196; Stop 220
tatcatgaccgtggttatataggag

SEQ ID NO: 369866 - DNA, 25 bp, Artificial
  probe
  misc_feature (1)..(25): SEQ ID NO: 3998; WAN024GKW; Start 126; Stop 150
attcgcttcttacccttctatatta

SEQ ID NO: 369867 - DNA, 25 bp, Artificial
  probe
  misc_feature (1)..(25): SEQ ID NO: 3998; WAN024GKW; Start 52; Stop 76
aatgaaatgcttgttcgtacagagg

SEQ ID NO: 369868 - DNA, 25 bp, Artificial
  probe
  misc_feature (1)..(25): SEQ ID NO: 3999; WAN024CB4; Start 696; Stop 720
tgagacagttgataaggagagtgaa

SEQ ID NO: 369869 - DNA, 25 bp, Artificial
  probe
  misc_feature (1)..(25): SEQ ID NO: 3999; WAN024CB4; Start 131; Stop 155
caatcttactctcttacgctgactg

SEQ ID NO: 369870 - DNA, 25 bp, Artificial
  probe
  misc_feature (1)..(25): SEQ ID NO: 3999; WAN024CB4; Start 1192; Stop 1216
ttcagtagtctcttgcgtaacaata

SEQ ID NO: 369871 - DNA, 25 bp, Artificial
  probe
  misc_feature (1)..(25): SEQ ID NO: 3999; WAN024CB4; Start 1191; Stop 1215
attcagtagtctcttgcgtaacaat

SEQ ID NO: 369872 - DNA, 25 bp, Artificial
  probe
  misc_feature (1)..(25): SEQ ID NO: 3999; WAN024CB4; Start 1193; Stop 1217
tcagtagtctcttgcgtaacaatat

SEQ ID NO: 369873 - DNA, 25 bp, Artificial
  probe
  misc_feature (1)..(25): SEQ ID NO: 3999; WAN024CB4; Start 1114; Stop 1138
atgtataatacgctggagttcttgc

SEQ ID NO: 369874 - DNA, 25 bp, Artificial
  probe
  misc_feature (1)..(25): SEQ ID NO: 3999; WAN024CB4; Start 695; Stop 719
gtgagacagttgataaggagagtga

SEQ ID NO: 369875 - DNA, 25 bp, Artificial
  probe
  misc_feature (1)..(25): SEQ ID NO: 3999; WAN024CB4; Start 1190; Stop 1214
aattcagtagtctcttgcgtaacaa

SEQ ID NO: 369876 - DNA, 25 bp, Artificial
  probe
  misc_feature (1)..(25): SEQ ID NO: 3999; WAN024CB4; Start 352; Stop 376
gcttcgccttatatatcagtctctc

SEQ ID NO: 369877 - DNA, 25 bp, Artificial
  probe
  misc_feature (1)..(25): SEQ ID NO: 3999; WAN024CB4; Start 612; Stop 636
ccatgccattgataatactagaggt

SEQ ID NO: 369878 - DNA, 25 bp, Artificial
  probe
  misc_feature (1)..(25): SEQ ID NO: 3999; WAN024CB4; Start 611; Stop 635
accatgccattgataatactagagg

SEQ ID NO: 369879 - DNA, 25 bp, Artificial
  probe
  misc_feature (1)..(25): SEQ ID NO: 3999; WAN024CB4; Start 353; Stop 377
cttcgccttatatatcagtctctct

SEQ ID NO: 369880 - DNA, 25 bp, Artificial
  probe
  misc_feature (1)..(25): SEQ ID NO: 3999; WAN024CB4; Start 132; Stop 156
aatcttactctcttacgctgactgg

SEQ ID NO: 369881 - DNA, 25 bp, Artificial
  probe
  misc_feature (1)..(25): SEQ ID NO: 3999; WAN024CB4; Start 1157; Stop 1181
agagtcaagatgagttggcagatat

SEQ ID NO: 369882 - DNA, 25 bp, Artificial
  probe
  misc_feature (1)..(25): SEQ ID NO: 3999; WAN024CB4; Start 1668; Stop 1692
cggtgttcagtatcgtattacaatt

SEQ ID NO: 369883 - DNA, 25 bp, Artificial
  probe
  misc_feature (1)..(25): SEQ ID NO: 3999; WAN024CB4; Start 615; Stop 639
tgccattgataatactagaggtcat

SEQ ID NO: 369884 - DNA, 25 bp, Artificial
  probe
  misc_feature (1)..(25): SEQ ID NO: 3999; WAN024CB4; Start 614; Stop 638
atgccattgataatactagaggtca

SEQ ID NO: 369885 - DNA, 25 bp, Artificial
  probe
  misc_feature (1)..(25): SEQ ID NO: 3999; WAN024CB4; Start 625; Stop 649
aatactagaggtcatactccgatgg

SEQ ID NO: 369886 - DNA, 25 bp, Artificial
  probe
  misc_feature (1)..(25): SEQ ID NO: 3999; WAN024CB4; Start 613; Stop 637
catgccattgataatactagaggtc

SEQ ID NO: 369887 - DNA, 25 bp, Artificial
  probe
  misc_feature (1)..(25): SEQ ID NO: 3999; WAN024CB4; Start 694; Stop 718
ggtgagacagttgataaggagagtg

SEQ ID NO: 369888 - DNA, 25 bp, Artificial
  probe
  misc_feature (1)..(25): SEQ ID NO: 3999; WAN024CB4; Start 130; Stop 154
gcaatcttactctcttacgctgact

SEQ ID NO: 369889 - DNA, 25 bp, Artificial
  probe
  misc_feature (1)..(25): SEQ ID NO: 3999; WAN024CB4; Start 624; Stop 648
taatactagaggtcatactccgatg

SEQ ID NO: 369890 - DNA, 25 bp, Artificial
  probe
  misc_feature (1)..(25): SEQ ID NO: 3999; WAN024CB4; Start 621; Stop 645
tgataatactagaggtcatactccg

SEQ ID NO: 369891 - DNA, 25 bp, Artificial
  probe
  misc_feature (1)..(25): SEQ ID NO: 3999; WAN024CB4; Start 355; Stop 379
tcgccttatatatcagtctctctgt

SEQ ID NO: 369892 - DNA, 25 bp, Artificial
  probe
  misc_feature (1)..(25): SEQ ID NO: 3999; WAN024CB4; Start 351; Stop 375
agcttcgccttatatatcagtctct

SEQ ID NO: 369893 - DNA, 25 bp, Artificial
  probe
  misc_feature (1)..(25): SEQ ID NO: 3999; WAN024CB4; Start 1319; Stop 1343
tcaagatagatccagagttagagaa

SEQ ID NO: 369894 - DNA, 25 bp, Artificial
  probe
  misc_feature (1)..(25): SEQ ID NO: 3999; WAN024CB4; Start 1318; Stop 1342
ttcaagatagatccagagttagaga

SEQ ID NO: 369895 - DNA, 25 bp, Artificial
  probe
  misc_feature (1)..(25): SEQ ID NO: 3999; WAN024CB4; Start 1156; Stop 1180
cagagtcaagatgagttggcagata

SEQ ID NO: 369896 - DNA, 25 bp, Artificial
  probe
  misc_feature (1)..(25): SEQ ID NO: 3999; WAN024CB4; Start 354; Stop 378
ttcgccttatatatcagtctctctg

SEQ ID NO: 369897 - DNA, 25 bp, Artificial
  probe
  misc_feature (1)..(25): SEQ ID NO: 3999; WAN024CB4; Start 622; Stop 646
gataatactagaggtcatactccga

SEQ ID NO: 369898 - DNA, 25 bp, Artificial
  probe
  misc_feature (1)..(25): SEQ ID NO: 3999; WAN024CB4; Start 1194; Stop 1218
cagtagtctcttgcgtaacaatatt

SEQ ID NO: 369899 - DNA, 25 bp, Artificial
  probe
  misc_feature (1)..(25): SEQ ID NO: 3999; WAN024CB4; Start 1413; Stop 1437
gcggacagataatgtgattagcatc

SEQ ID NO: 369900 - DNA, 25 bp, Artificial
  probe
  misc_feature (1)..(25): SEQ ID NO: 3999; WAN024CB4; Start 356; Stop 380
cgccttatatatcagtctctctgta

SEQ ID NO: 369901 - DNA, 25 bp, Artificial
  probe
  misc_feature (1)..(25): SEQ ID NO: 4000; WAN024ERN; Start 775; Stop 799
attgatatgaccactattagccgtt

SEQ ID NO: 369902 - DNA, 25 bp, Artificial
  probe
  misc_feature (1)..(25): SEQ ID NO: 4000; WAN024ERN; Start 774; Stop 798
tattgatatgaccactattagccgt

SEQ ID NO: 369903 - DNA, 25 bp, Artificial
  probe
  misc_feature (1)..(25): SEQ ID NO: 4000; WAN024ERN; Start 93; Stop 117
agaagatgttcattccgaagattac

SEQ ID NO: 369904 - DNA, 25 bp, Artificial
  probe
  misc_feature (1)..(25): SEQ ID NO: 4000; WAN024ERN; Start 91; Stop 115
cgagaagatgttcattccgaagatt

SEQ ID NO: 369905 - DNA, 25 bp, Artificial
  probe
  misc_feature (1)..(25): SEQ ID NO: 4000; WAN024ERN; Start 102; Stop 126
tcattccgaagattacagtaccaat

SEQ ID NO: 369906 - DNA, 25 bp, Artificial
  probe
  misc_feature (1)..(25): SEQ ID NO: 4000; WAN024ERN; Start 92; Stop 116
gagaagatgttcattccgaagatta

SEQ ID NO: 369907 - DNA, 25 bp, Artificial
  probe
  misc_feature (1)..(25): SEQ ID NO: 4000; WAN024ERN; Start 101; Stop 125
ttcattccgaagattacagtaccaa

SEQ ID NO: 369908 - DNA, 25 bp, Artificial
  probe
  misc_feature (1)..(25): SEQ ID NO: 4000; WAN024ERN; Start 96; Stop 120
agatgttcattccgaagattacagt

SEQ ID NO: 369909 - DNA, 25 bp, Artificial
  probe
  misc_feature (1)..(25): SEQ ID NO: 4000; WAN024ERN; Start 100; Stop 124
gttcattccgaagattacagtacca

SEQ ID NO: 369910 - DNA, 25 bp, Artificial
  probe
  misc_feature (1)..(25): SEQ ID NO: 4000; WAN024ERN; Start 773; Stop 797
atattgatatgaccactattagccg

SEQ ID NO: 369911 - DNA, 25 bp, Artificial
  probe
  misc_feature (1)..(25): SEQ ID NO: 4000; WAN024ERN; Start 702; Stop 726
tatgtcattggaacagattgaacag

SEQ ID NO: 369912 - DNA, 25 bp, Artificial
  probe
  misc_feature (1)..(25): SEQ ID NO: 4000; WAN024ERN; Start 104; Stop 128
attccgaagattacagtaccaatgc

SEQ ID NO: 369913 - DNA, 25 bp, Artificial
  probe
  misc_feature (1)..(25): SEQ ID NO: 4000; WAN024ERN; Start 95; Stop 119
aagatgttcattccgaagattacag

SEQ ID NO: 369914 - DNA, 25 bp, Artificial
  probe
  misc_feature (1)..(25): SEQ ID NO: 4000; WAN024ERN; Start 94; Stop 118
gaagatgttcattccgaagattaca

SEQ ID NO: 369915 - DNA, 25 bp, Artificial
  probe
  misc_feature (1)..(25): SEQ ID NO: 4000; WAN024ERN; Start 108; Stop 132
cgaagattacagtaccaatgccatt

SEQ ID NO: 369916 - DNA, 25 bp, Artificial
  probe
  misc_feature (1)..(25): SEQ ID NO: 4000; WAN024ERN; Start 239; Stop 263
tgaccttccagaatcctcatcaatt

SEQ ID NO: 369917 - DNA, 25 bp, Artificial
  probe
  misc_feature (1)..(25): SEQ ID NO: 4000; WAN024ERN; Start 701; Stop 725
atatgtcattggaacagattgaaca

SEQ ID NO: 369918 - DNA, 25 bp, Artificial
  probe
  misc_feature (1)..(25): SEQ ID NO: 4000; WAN024ERN; Start 97; Stop 121
gatgttcattccgaagattacagta

SEQ ID NO: 369919 - DNA, 25 bp, Artificial
  probe
  misc_feature (1)..(25): SEQ ID NO: 4000; WAN024ERN; Start 99; Stop 123
tgttcattccgaagattacagtacc

SEQ ID NO: 369920 - DNA, 25 bp, Artificial
  probe
  misc_feature (1)..(25): SEQ ID NO: 4000; WAN024ERN; Start 703; Stop 727
atgtcattggaacagattgaacagg

SEQ ID NO: 369921 - DNA, 25 bp, Artificial
  probe
  misc_feature (1)..(25): SEQ ID NO: 4000; WAN024ERN; Start 98; Stop 122
atgttcattccgaagattacagtac

SEQ ID NO: 369922 - DNA, 25 bp, Artificial
  probe
  misc_feature (1)..(25): SEQ ID NO: 4000; WAN024ERN; Start 694; Stop 718
ttggataatatgtcattggaacaga

SEQ ID NO: 369923 - DNA, 25 bp, Artificial
  probe
  misc_feature (1)..(25): SEQ ID NO: 4000; WAN024ERN; Start 693; Stop 717
gttggataatatgtcattggaacag

SEQ ID NO: 369924 - DNA, 25 bp, Artificial
  probe
  misc_feature (1)..(25): SEQ ID NO: 4000; WAN024ERN; Start 238; Stop 262
gtgaccttccagaatcctcatcaat

SEQ ID NO: 369925 - DNA, 25 bp, Artificial
  probe
  misc_feature (1)..(25): SEQ ID NO: 4000; WAN024ERN; Start 776; Stop 800
ttgatatgaccactattagccgttt

SEQ ID NO: 369926 - DNA, 25 bp, Artificial
  probe
  misc_feature (1)..(25): SEQ ID NO: 4000; WAN024ERN; Start 700; Stop 724
aatatgtcattggaacagattgaac

SEQ ID NO: 369927 - DNA, 25 bp, Artificial
  probe
  misc_feature (1)..(25): SEQ ID NO: 4000; WAN024ERN; Start 751; Stop 775
tctcggattgaatgttctggaaata

SEQ ID NO: 369928 - DNA, 25 bp, Artificial
  probe
  misc_feature (1)..(25): SEQ ID NO: 4000; WAN024ERN; Start 691; Stop 715
atgttggataatatgtcattggaac

SEQ ID NO: 369929 - DNA, 25 bp, Artificial
  probe
  misc_feature (1)..(25): SEQ ID NO: 4000; WAN024ERN; Start 689; Stop 713
tcatgttggataatatgtcattgga

SEQ ID NO: 369930 - DNA, 25 bp, Artificial
  probe
  misc_feature (1)..(25): SEQ ID NO: 4000; WAN024ERN; Start 836; Stop 860
gtttaacccatagtgctaagagtct

SEQ ID NO: 369931 - DNA, 25 bp, Artificial
  probe
  misc_feature (1)..(25): SEQ ID NO: 4000; WAN024ERN; Start 835; Stop 859
agtttaacccatagtgctaagagtc

SEQ ID NO: 369932 - DNA, 25 bp, Artificial
  probe
  misc_feature (1)..(25): SEQ ID NO: 4000; WAN024ERN; Start 695; Stop 719
tggataatatgtcattggaacagat

SEQ ID NO: 369933 - DNA, 25 bp, Artificial
  probe
  misc_feature (1)..(25): SEQ ID NO: 4000; WAN024ERN; Start 413; Stop 437
taggcgatgattgcattaaggtatt

SEQ ID NO: 369934 - DNA, 25 bp, Artificial
  probe
  misc_feature (1)..(25): SEQ ID NO: 4001; WAN024CCO; Start 81; Stop 105
tcataacttccagattgcgttccat

SEQ ID NO: 369935 - DNA, 25 bp, Artificial
  probe
  misc_feature (1)..(25): SEQ ID NO: 4001; WAN024CCO; Start 73; Stop 97
agaggctttcataacttccagattg

SEQ ID NO: 369936 - DNA, 25 bp, Artificial
  probe
  misc_feature (1)..(25): SEQ ID NO: 4001; WAN024CCO; Start 72; Stop 96
cagaggctttcataacttccagatt

SEQ ID NO: 369937 - DNA, 25 bp, Artificial
  probe
  misc_feature (1)..(25): SEQ ID NO: 4001; WAN024CCO; Start 80; Stop 104
ttcataacttccagattgcgttcca

SEQ ID NO: 369938 - DNA, 25 bp, Artificial
  probe
  misc_feature (1)..(25): SEQ ID NO: 4001; WAN024CCO; Start 78; Stop 102
ctttcataacttccagattgcgttc

SEQ ID NO: 369939 - DNA, 25 bp, Artificial
  probe
  misc_feature (1)..(25): SEQ ID NO: 4001; WAN024CCO; Start 135; Stop 159
cggtcaattcaaactctgttgtaat

SEQ ID NO: 369940 - DNA, 25 bp, Artificial
  probe
  misc_feature (1)..(25): SEQ ID NO: 4001; WAN024CCO; Start 246; Stop 270
aaagaaattgacattgtggagatga

SEQ ID NO: 369941 - DNA, 25 bp, Artificial
  probe
  misc_feature (1)..(25): SEQ ID NO: 4001; WAN024CCO; Start 83; Stop 107
ataacttccagattgcgttccatga

SEQ ID NO: 369942 - DNA, 25 bp, Artificial
  probe
  misc_feature (1)..(25): SEQ ID NO: 4001; WAN024CCO; Start 82; Stop 106
cataacttccagattgcgttccatg

SEQ ID NO: 369943 - DNA, 25 bp, Artificial
  probe
  misc_feature (1)..(25): SEQ ID NO: 4001; WAN024CCO; Start 71; Stop 95
acagaggctttcataacttccagat

SEQ ID NO: 369944 - DNA, 25 bp, Artificial
  probe
  misc_feature (1)..(25): SEQ ID NO: 4001; WAN024CCO; Start 136; Stop 160
ggtcaattcaaactctgttgtaatc

SEQ ID NO: 369945 - DNA, 25 bp, Artificial
  probe
  misc_feature (1)..(25): SEQ ID NO: 4001; WAN024CCO; Start 79; Stop 103
tttcataacttccagattgcgttcc

SEQ ID NO: 369946 - DNA, 25 bp, Artificial
  probe
  misc_feature (1)..(25): SEQ ID NO: 4001; WAN024CCO; Start 66; Stop 90
gttggacagaggctttcataacttc

SEQ ID NO: 369947 - DNA, 25 bp, Artificial
  probe
  misc_feature (1)..(25): SEQ ID NO: 4001; WAN024CCO; Start 74; Stop 98
gaggctttcataacttccagattgc

SEQ ID NO: 369948 - DNA, 25 bp, Artificial
  probe
  misc_feature (1)..(25): SEQ ID NO: 4001; WAN024CCO; Start 70; Stop 94
gacagaggctttcataacttccaga

SEQ ID NO: 369949 - DNA, 25 bp, Artificial
  probe
  misc_feature (1)..(25): SEQ ID NO: 4001; WAN024CCO; Start 137; Stop 161
gtcaattcaaactctgttgtaatca

SEQ ID NO: 369950 - DNA, 25 bp, Artificial
  probe
  misc_feature (1)..(25): SEQ ID NO: 4001; WAN024CCO; Start 63; Stop 87
caagttggacagaggctttcataac

SEQ ID NO: 369951 - DNA, 25 bp, Artificial
  probe
  misc_feature (1)..(25): SEQ ID NO: 4001; WAN024CCO; Start 84; Stop 108
taacttccagattgcgttccatgag

SEQ ID NO: 369952 - DNA, 25 bp, Artificial
  probe
  misc_feature (1)..(25): SEQ ID NO: 4001; WAN024CCO; Start 245; Stop 269
taaagaaattgacattgtggagatg

SEQ ID NO: 369953 - DNA, 25 bp, Artificial
  probe
  misc_feature (1)..(25): SEQ ID NO: 4001; WAN024CCO; Start 77; Stop 101
gctttcataacttccagattgcgtt

SEQ ID NO: 369954 - DNA, 25 bp, Artificial
  probe
  misc_feature (1)..(25): SEQ ID NO: 4001; WAN024CCO; Start 244; Stop 268
ttaaagaaattgacattgtggagat

SEQ ID NO: 369955 - DNA, 25 bp, Artificial
  probe
  misc_feature (1)..(25): SEQ ID NO: 4001; WAN024CCO; Start 198; Stop 222
cttgctcgaccaattctttgataga

SEQ ID NO: 369956 - DNA, 25 bp, Artificial
  probe
  misc_feature (1)..(25): SEQ ID NO: 4001; WAN024CCO; Start 228; Stop 252
acatgcttcctcctatttaaagaaa

SEQ ID NO: 369957 - DNA, 25 bp, Artificial
  probe
  misc_feature (1)..(25): SEQ ID NO: 4001; WAN024CCO; Start 227; Stop 251
aacatgcttcctcctatttaaagaa

SEQ ID NO: 369958 - DNA, 25 bp, Artificial
  probe
  misc_feature (1)..(25): SEQ ID NO: 4001; WAN024CCO; Start 226; Stop 250
aaacatgcttcctcctatttaaaga

SEQ ID NO: 369959 - DNA, 25 bp, Artificial
  probe
  misc_feature (1)..(25): SEQ ID NO: 4001; WAN024CCO; Start 161; Stop 185
atgagttctgcgacatttccttgaa

SEQ ID NO: 369960 - DNA, 25 bp, Artificial
  probe
  misc_feature (1)..(25): SEQ ID NO: 4001; WAN024CCO; Start 138; Stop 162
tcaattcaaactctgttgtaatcat

SEQ ID NO: 369961 - DNA, 25 bp, Artificial
  probe
  misc_feature (1)..(25): SEQ ID NO: 4001; WAN024CCO; Start 153; Stop 177
ttgtaatcatgagttctgcgacatt

SEQ ID NO: 369962 - DNA, 25 bp, Artificial
  probe
  misc_feature (1)..(25): SEQ ID NO: 4001; WAN024CCO; Start 139; Stop 163
caattcaaactctgttgtaatcatg

SEQ ID NO: 369963 - DNA, 25 bp, Artificial
  probe
  misc_feature (1)..(25): SEQ ID NO: 4001; WAN024CCO; Start 34; Stop 58
gccactacgagatttattttcattg

SEQ ID NO: 369964 - DNA, 25 bp, Artificial
  probe
  misc_feature (1)..(25): SEQ ID NO: 4001; WAN024CCO; Start 150; Stop 174
ctgttgtaatcatgagttctgcgac

SEQ ID NO: 369965 - DNA, 25 bp, Artificial
  probe
  misc_feature (1)..(25): SEQ ID NO: 4001; WAN024CCO; Start 149; Stop 173
tctgttgtaatcatgagttctgcga

SEQ ID NO: 369966 - DNA, 25 bp, Artificial
  probe
  misc_feature (1)..(25): SEQ ID NO: 4001; WAN024CCO; Start 75; Stop 99
aggctttcataacttccagattgcg

SEQ ID NO: 369967 - DNA, 25 bp, Artificial
  probe
  misc_feature (1)..(25): SEQ ID NO: 4002; WAN024GK9; Start 47; Stop 71
tagtaaccgttcaagacagtatcaa

SEQ ID NO: 369968 - DNA, 25 bp, Artificial
  probe
  misc_feature (1)..(25): SEQ ID NO: 4002; WAN024GK9; Start 46; Stop 70
atagtaaccgttcaagacagtatca

SEQ ID NO: 369969 - DNA, 25 bp, Artificial
  probe
  misc_feature (1)..(25): SEQ ID NO: 4002; WAN024GK9; Start 44; Stop 68
tcatagtaaccgttcaagacagtat

SEQ ID NO: 369970 - DNA, 25 bp, Artificial
  probe
  misc_feature (1)..(25): SEQ ID NO: 4002; WAN024GK9; Start 45; Stop 69
catagtaaccgttcaagacagtatc

SEQ ID NO: 369971 - DNA, 25 bp, Artificial
  probe
  misc_feature (1)..(25): SEQ ID NO: 4002; WAN024GK9; Start 48; Stop 72
agtaaccgttcaagacagtatcaac

SEQ ID NO: 369972 - DNA, 25 bp, Artificial
  probe
  misc_feature (1)..(25): SEQ ID NO: 4002; WAN024GK9; Start 43; Stop 67
gtcatagtaaccgttcaagacagta

SEQ ID NO: 369973 - DNA, 25 bp, Artificial
  probe
  misc_feature (1)..(25): SEQ ID NO: 4002; WAN024GK9; Start 4; Stop 28
atcttccaagttcttcgccatcatt

SEQ ID NO: 369974 - DNA, 25 bp, Artificial
  probe
  misc_feature (1)..(25): SEQ ID NO: 4002; WAN024GK9; Start 35; Stop 59
aagtctttgtcatagtaaccgttca

SEQ ID NO: 369975 - DNA, 25 bp, Artificial
  probe
  misc_feature (1)..(25): SEQ ID NO: 4002; WAN024GK9; Start 268; Stop 292
tcctttaacaatttcaacaccttcg

SEQ ID NO: 369976 - DNA, 25 bp, Artificial
  probe
  misc_feature (1)..(25): SEQ ID NO: 4002; WAN024GK9; Start 34; Stop 58
gaagtctttgtcatagtaaccgttc

SEQ ID NO: 369977 - DNA, 25 bp, Artificial
  probe
  misc_feature (1)..(25): SEQ ID NO: 4002; WAN024GK9; Start 67; Stop 91
atcaacgatatcaacaaggacaact

SEQ ID NO: 369978 - DNA, 25 bp, Artificial
  probe
  misc_feature (1)..(25): SEQ ID NO: 4002; WAN024GK9; Start 172; Stop 196
ttggctcttgtcagaaagtttattg

SEQ ID NO: 369979 - DNA, 25 bp, Artificial
  probe
  misc_feature (1)..(25): SEQ ID NO: 4002; WAN024GK9; Start 171; Stop 195
gttggctcttgtcagaaagtttatt

SEQ ID NO: 369980 - DNA, 25 bp, Artificial
  probe
  misc_feature (1)..(25): SEQ ID NO: 4002; WAN024GK9; Start 71; Stop 95
acgatatcaacaaggacaacttctt

SEQ ID NO: 369981 - DNA, 25 bp, Artificial
  probe
  misc_feature (1)..(25): SEQ ID NO: 4002; WAN024GK9; Start 70; Stop 94
aacgatatcaacaaggacaacttct

SEQ ID NO: 369982 - DNA, 25 bp, Artificial
  probe
  misc_feature (1)..(25): SEQ ID NO: 4002; WAN024GK9; Start 69; Stop 93
caacgatatcaacaaggacaacttc

SEQ ID NO: 369983 - DNA, 25 bp, Artificial
  probe
  misc_feature (1)..(25): SEQ ID NO: 4002; WAN024GK9; Start 263; Stop 287
cggtttcctttaacaatttcaacac

SEQ ID NO: 369984 - DNA, 25 bp, Artificial
  probe
  misc_feature (1)..(25): SEQ ID NO: 4002; WAN024GK9; Start 37; Stop 61
gtctttgtcatagtaaccgttcaag

SEQ ID NO: 369985 - DNA, 25 bp, Artificial
  probe
  misc_feature (1)..(25): SEQ ID NO: 4002; WAN024GK9; Start 36; Stop 60
agtctttgtcatagtaaccgttcaa

SEQ ID NO: 369986 - DNA, 25 bp, Artificial
  probe
  misc_feature (1)..(25): SEQ ID NO: 4002; WAN024GK9; Start 170; Stop 194
tgttggctcttgtcagaaagtttat

SEQ ID NO: 369987 - DNA, 25 bp, Artificial
  probe
  misc_feature (1)..(25): SEQ ID NO: 4002; WAN024GK9; Start 68; Stop 92
tcaacgatatcaacaaggacaactt

SEQ ID NO: 369988 - DNA, 25 bp, Artificial
  probe
  misc_feature (1)..(25): SEQ ID NO: 4002; WAN024GK9; Start 33; Stop 57
tgaagtctttgtcatagtaaccgtt

SEQ ID NO: 369989 - DNA, 25 bp, Artificial
  probe
  misc_feature (1)..(25): SEQ ID NO: 4002; WAN024GK9; Start 22; Stop 46
catcatttgtgtgaagtctttgtca

SEQ ID NO: 369990 - DNA, 25 bp, Artificial
  probe
  misc_feature (1)..(25): SEQ ID NO: 4002; WAN024GK9; Start 174; Stop 198
ggctcttgtcagaaagtttattgat

SEQ ID NO: 369991 - DNA, 25 bp, Artificial
  probe
  misc_feature (1)..(25): SEQ ID NO: 4002; WAN024GK9; Start 30; Stop 54
gtgtgaagtctttgtcatagtaacc

SEQ ID NO: 369992 - DNA, 25 bp, Artificial
  probe
  misc_feature (1)..(25): SEQ ID NO: 4002; WAN024GK9; Start 173; Stop 197
tggctcttgtcagaaagtttattga

SEQ ID NO: 369993 - DNA, 25 bp, Artificial
  probe
  misc_feature (1)..(25): SEQ ID NO: 4002; WAN024GK9; Start 23; Stop 47
atcatttgtgtgaagtctttgtcat

SEQ ID NO: 369994 - DNA, 25 bp, Artificial
  probe
  misc_feature (1)..(25): SEQ ID NO: 4002; WAN024GK9; Start 32; Stop 56
gtgaagtctttgtcatagtaaccgt

SEQ ID NO: 369995 - DNA, 25 bp, Artificial
  probe
  misc_feature (1)..(25): SEQ ID NO: 4002; WAN024GK9; Start 31; Stop 55
tgtgaagtctttgtcatagtaaccg

SEQ ID NO: 369996 - DNA, 25 bp, Artificial
  probe
  misc_feature (1)..(25): SEQ ID NO: 4002; WAN024GK9; Start 21; Stop 45
ccatcatttgtgtgaagtctttgtc

SEQ ID NO: 369997 - DNA, 25 bp, Artificial
  probe
  misc_feature (1)..(25): SEQ ID NO: 4002; WAN024GK9; Start 262; Stop 286
gcggtttcctttaacaatttcaaca

SEQ ID NO: 369998 - DNA, 25 bp, Artificial
  probe
  misc_feature (1)..(25): SEQ ID NO: 4002; WAN024GK9; Start 29; Stop 53
tgtgtgaagtctttgtcatagtaac

SEQ ID NO: 369999 - DNA, 25 bp, Artificial
  probe
  misc_feature (1)..(25): SEQ ID NO: 4002; WAN024GK9; Start 267; Stop 291
ttcctttaacaatttcaacaccttc

SEQ ID NO: 370000 - DNA, 25 bp, Artificial
  probe
  misc_feature (1)..(25): SEQ ID NO: 4003; WAN024G53-5; Start 541; Stop 565
ttgattgaggctattgagaatgaca

SEQ ID NO: 370001 - DNA, 25 bp, Artificial
  probe
  misc_feature (1)..(25): SEQ ID NO: 4003; WAN024G53-5; Start 555; Stop 579
tgagaatgacaaggtaagtagtgat

SEQ ID NO: 370002 - DNA, 25 bp, Artificial
  probe
  misc_feature (1)..(25): SEQ ID NO: 4003; WAN024G53-5; Start 1259; Stop 1283
atatccgctatcttggtatcaatgg

SEQ ID NO: 370003 - DNA, 25 bp, Artificial
  probe
  misc_feature (1)..(25): SEQ ID NO: 4003; WAN024G53-5; Start 543; Stop 567
gattgaggctattgagaatgacaag

SEQ ID NO: 370004 - DNA, 25 bp, Artificial
  probe
  misc_feature (1)..(25): SEQ ID NO: 4003; WAN024G53-5; Start 542; Stop 566
tgattgaggctattgagaatgacaa

SEQ ID NO: 370005 - DNA, 25 bp, Artificial
  probe
  misc_feature (1)..(25): SEQ ID NO: 4003; WAN024G53-5; Start 548; Stop 572
aggctattgagaatgacaaggtaag

SEQ ID NO: 370006 - DNA, 25 bp, Artificial
  probe
  misc_feature (1)..(25): SEQ ID NO: 4003; WAN024G53-5; Start 547; Stop 571
gaggctattgagaatgacaaggtaa

SEQ ID NO: 370007 - DNA, 25 bp, Artificial
  probe
  misc_feature (1)..(25): SEQ ID NO: 4003; WAN024G53-5; Start 554; Stop 578
ttgagaatgacaaggtaagtagtga

SEQ ID NO: 370008 - DNA, 25 bp, Artificial
  probe
  misc_feature (1)..(25): SEQ ID NO: 4003; WAN024G53-5; Start 549; Stop 573
ggctattgagaatgacaaggtaagt

SEQ ID NO: 370009 - DNA, 25 bp, Artificial
  probe
  misc_feature (1)..(25): SEQ ID NO: 4003; WAN024G53-5; Start 544; Stop 568
attgaggctattgagaatgacaagg

SEQ ID NO: 370010 - DNA, 25 bp, Artificial
  probe
  misc_feature (1)..(25): SEQ ID NO: 4003; WAN024G53-5; Start 495; Stop 519
ctatcttaatcaaggtcagttagcc

SEQ ID NO: 370011 - DNA, 25 bp, Artificial
  probe
  misc_feature (1)..(25): SEQ ID NO: 4003; WAN024G53-5; Start 556; Stop 580
gagaatgacaaggtaagtagtgatt

SEQ ID NO: 370012 - DNA, 25 bp, Artificial
  probe
  misc_feature (1)..(25): SEQ ID NO: 4003; WAN024G53-5; Start 546; Stop 570
tgaggctattgagaatgacaaggta

SEQ ID NO: 370013 - DNA, 25 bp, Artificial
  probe
  misc_feature (1)..(25): SEQ ID NO: 4003; WAN024G53-5; Start 553; Stop 577
attgagaatgacaaggtaagtagtg

SEQ ID NO: 370014 - DNA, 25 bp, Artificial
  probe
  misc_feature (1)..(25): SEQ ID NO: 4003; WAN024G53-5; Start 550; Stop 574
gctattgagaatgacaaggtaagta

SEQ ID NO: 370015 - DNA, 25 bp, Artificial
  probe
  misc_feature (1)..(25): SEQ ID NO: 4003; WAN024G53-5; Start 1254; Stop 1278
gcaatatatccgctatcttggtatc

SEQ ID NO: 370016 - DNA, 25 bp, Artificial
  probe
  misc_feature (1)..(25): SEQ ID NO: 4003; WAN024G53-5; Start 491; Stop 515
cagcctatcttaatcaaggtcagtt

SEQ ID NO: 370017 - DNA, 25 bp, Artificial
  probe
  misc_feature (1)..(25): SEQ ID NO: 4003; WAN024G53-5; Start 489; Stop 513
aacagcctatcttaatcaaggtcag

SEQ ID NO: 370018 - DNA, 25 bp, Artificial
  probe
  misc_feature (1)..(25): SEQ ID NO: 4003; WAN024G53-5; Start 545; Stop 569
ttgaggctattgagaatgacaaggt

SEQ ID NO: 370019 - DNA, 25 bp, Artificial
  probe
  misc_feature (1)..(25): SEQ ID NO: 4003; WAN024G53-5; Start 488; Stop 512
taacagcctatcttaatcaaggtca

SEQ ID NO: 370020 - DNA, 25 bp, Artificial
  probe
  misc_feature (1)..(25): SEQ ID NO: 4003; WAN024G53-5; Start 486; Stop 510
agtaacagcctatcttaatcaaggt

SEQ ID NO: 370021 - DNA, 25 bp, Artificial
  probe
  misc_feature (1)..(25): SEQ ID NO: 4003; WAN024G53-5; Start 492; Stop 516
agcctatcttaatcaaggtcagtta

SEQ ID NO: 370022 - DNA, 25 bp, Artificial
  probe
  misc_feature (1)..(25): SEQ ID NO: 4003; WAN024G53-5; Start 487; Stop 511
gtaacagcctatcttaatcaaggtc

SEQ ID NO: 370023 - DNA, 25 bp, Artificial
  probe
  misc_feature (1)..(25): SEQ ID NO: 4003; WAN024G53-5; Start 1258; Stop 1282
tatatccgctatcttggtatcaatg

SEQ ID NO: 370024 - DNA, 25 bp, Artificial
  probe
  misc_feature (1)..(25): SEQ ID NO: 4003; WAN024G53-5; Start 1032; Stop 1056
ggatgtagcttcttaccagttatct

SEQ ID NO: 370025 - DNA, 25 bp, Artificial
  probe
  misc_feature (1)..(25): SEQ ID NO: 4003; WAN024G53-5; Start 1036; Stop 1060
gtagcttcttaccagttatctctca

SEQ ID NO: 370026 - DNA, 25 bp, Artificial
  probe
  misc_feature (1)..(25): SEQ ID NO: 4003; WAN024G53-5; Start 1035; Stop 1059
tgtagcttcttaccagttatctctc

SEQ ID NO: 370027 - DNA, 25 bp, Artificial
  probe
  misc_feature (1)..(25): SEQ ID NO: 4003; WAN024G53-5; Start 494; Stop 518
cctatcttaatcaaggtcagttagc

SEQ ID NO: 370028 - DNA, 25 bp, Artificial
  probe
  misc_feature (1)..(25): SEQ ID NO: 4003; WAN024G53-5; Start 493; Stop 517
gcctatcttaatcaaggtcagttag

SEQ ID NO: 370029 - DNA, 25 bp, Artificial
  probe
  misc_feature (1)..(25): SEQ ID NO: 4003; WAN024G53-5; Start 490; Stop 514
acagcctatcttaatcaaggtcagt

SEQ ID NO: 370030 - DNA, 25 bp, Artificial
  probe
  misc_feature (1)..(25): SEQ ID NO: 4003; WAN024G53-5; Start 1260; Stop 1284
tatccgctatcttggtatcaatggc

SEQ ID NO: 370031 - DNA, 25 bp, Artificial
  probe
  misc_feature (1)..(25): SEQ ID NO: 4003; WAN024G53-5; Start 1037; Stop 1061
tagcttcttaccagttatctctcaa

SEQ ID NO: 370032 - DNA, 25 bp, Artificial
  probe
  misc_feature (1)..(25): SEQ ID NO: 4003; WAN024G53-5; Start 1034; Stop 1058
atgtagcttcttaccagttatctct

SEQ ID NO: 370033 - DNA, 25 bp, Artificial
  probe
  misc_feature (1)..(25): SEQ ID NO: 4004; WAN024DBS; Start 118; Stop 142
aagtcccaggttattgaattactcc

SEQ ID NO: 370034 - DNA, 25 bp, Artificial
  probe
  misc_feature (1)..(25): SEQ ID NO: 4004; WAN024DBS; Start 115; Stop 139
acaaagtcccaggttattgaattac

SEQ ID NO: 370035 - DNA, 25 bp, Artificial
  probe
  misc_feature (1)..(25): SEQ ID NO: 4004; WAN024DBS; Start 116; Stop 140
caaagtcccaggttattgaattact

SEQ ID NO: 370036 - DNA, 25 bp, Artificial
  probe
  misc_feature (1)..(25): SEQ ID NO: 4004; WAN024DBS; Start 114; Stop 138
aacaaagtcccaggttattgaatta

SEQ ID NO: 370037 - DNA, 25 bp, Artificial
  probe
  misc_feature (1)..(25): SEQ ID NO: 4004; WAN024DBS; Start 117; Stop 141
aaagtcccaggttattgaattactc

SEQ ID NO: 370038 - DNA, 25 bp, Artificial
  probe
  misc_feature (1)..(25): SEQ ID NO: 4004; WAN024DBS; Start 131; Stop 155
ttgaattactcctaaataccgttga

SEQ ID NO: 370039 - DNA, 25 bp, Artificial
  probe
  misc_feature (1)..(25): SEQ ID NO: 4004; WAN024DBS; Start 120; Stop 144
gtcccaggttattgaattactccta

SEQ ID NO: 370040 - DNA, 25 bp, Artificial
  probe
  misc_feature (1)..(25): SEQ ID NO: 4004; WAN024DBS; Start 132; Stop 156
tgaattactcctaaataccgttgat

SEQ ID NO: 370041 - DNA, 25 bp, Artificial
  probe
  misc_feature (1)..(25): SEQ ID NO: 4004; WAN024DBS; Start 119; Stop 143
agtcccaggttattgaattactcct

SEQ ID NO: 370042 - DNA, 25 bp, Artificial
  probe
  misc_feature (1)..(25): SEQ ID NO: 4004; WAN024DBS; Start 111; Stop 135
actaacaaagtcccaggttattgaa

SEQ ID NO: 370043 - DNA, 25 bp, Artificial
  probe
  misc_feature (1)..(25): SEQ ID NO: 4004; WAN024DBS; Start 121; Stop 145
tcccaggttattgaattactcctaa

SEQ ID NO: 370044 - DNA, 25 bp, Artificial
  probe
  misc_feature (1)..(25): SEQ ID NO: 4004; WAN024DBS; Start 112; Stop 136
ctaacaaagtcccaggttattgaat

SEQ ID NO: 370045 - DNA, 25 bp, Artificial
  probe
  misc_feature (1)..(25): SEQ ID NO: 4004; WAN024DBS; Start 113; Stop 137
taacaaagtcccaggttattgaatt

SEQ ID NO: 370046 - DNA, 25 bp, Artificial
  probe
  misc_feature (1)..(25): SEQ ID NO: 4004; WAN024DBS; Start 122; Stop 146
cccaggttattgaattactcctaaa

SEQ ID NO: 370047 - DNA, 25 bp, Artificial
  probe
  misc_feature (1)..(25): SEQ ID NO: 4004; WAN024DBS; Start 130; Stop 154
attgaattactcctaaataccgttg

SEQ ID NO: 370048 - DNA, 25 bp, Artificial
  probe
  misc_feature (1)..(25): SEQ ID NO: 4004; WAN024DBS; Start 133; Stop 157
gaattactcctaaataccgttgatt

SEQ ID NO: 370049 - DNA, 25 bp, Artificial
  probe
  misc_feature (1)..(25): SEQ ID NO: 4004; WAN024DBS; Start 1; Stop 25
gtgatgaaaatggcaaccgataaaa

SEQ ID NO: 370050 - DNA, 25 bp, Artificial
  probe
  misc_feature (1)..(25): SEQ ID NO: 4004; WAN024DBS; Start 139; Stop 163
ctcctaaataccgttgattatttcg

SEQ ID NO: 370051 - DNA, 25 bp, Artificial
  probe
  misc_feature (1)..(25): SEQ ID NO: 4004; WAN024DBS; Start 90; Stop 114
tagagatagaaggggaatgcgacta

SEQ ID NO: 370052 - DNA, 25 bp, Artificial
  probe
  misc_feature (1)..(25): SEQ ID NO: 4004; WAN024DBS; Start 95; Stop 119
atagaaggggaatgcgactaacaaa

SEQ ID NO: 370053 - DNA, 25 bp, Artificial
  probe
  misc_feature (1)..(25): SEQ ID NO: 4004; WAN024DBS; Start 94; Stop 118
gatagaaggggaatgcgactaacaa

SEQ ID NO: 370054 - DNA, 25 bp, Artificial
  probe
  misc_feature (1)..(25): SEQ ID NO: 4004; WAN024DBS; Start 96; Stop 120
tagaaggggaatgcgactaacaaag

SEQ ID NO: 370055 - DNA, 25 bp, Artificial
  probe
  misc_feature (1)..(25): SEQ ID NO: 4004; WAN024DBS; Start 92; Stop 116
gagatagaaggggaatgcgactaac

SEQ ID NO: 370056 - DNA, 25 bp, Artificial
  probe
  misc_feature (1)..(25): SEQ ID NO: 4004; WAN024DBS; Start 91; Stop 115
agagatagaaggggaatgcgactaa

SEQ ID NO: 370057 - DNA, 25 bp, Artificial
  probe
  misc_feature (1)..(25): SEQ ID NO: 4004; WAN024DBS; Start 123; Stop 147
ccaggttattgaattactcctaaat

SEQ ID NO: 370058 - DNA, 25 bp, Artificial
  probe
  misc_feature (1)..(25): SEQ ID NO: 4004; WAN024DBS; Start 28; Stop 52
agaataatgattagcttggatgata

SEQ ID NO: 370059 - DNA, 25 bp, Artificial
  probe
  misc_feature (1)..(25): SEQ ID NO: 4004; WAN024DBS; Start 27; Stop 51
tagaataatgattagcttggatgat

SEQ ID NO: 370060 - DNA, 25 bp, Artificial
  probe
  misc_feature (1)..(25): SEQ ID NO: 4004; WAN024DBS; Start 26; Stop 50
atagaataatgattagcttggatga

SEQ ID NO: 370061 - DNA, 25 bp, Artificial
  probe
  misc_feature (1)..(25): SEQ ID NO: 4004; WAN024DBS; Start 140; Stop 164
tcctaaataccgttgattatttcga

SEQ ID NO: 370062 - DNA, 25 bp, Artificial
  probe
  misc_feature (1)..(25): SEQ ID NO: 4004; WAN024DBS; Start 134; Stop 158
aattactcctaaataccgttgatta

SEQ ID NO: 370063 - DNA, 25 bp, Artificial
  probe
  misc_feature (1)..(25): SEQ ID NO: 4004; WAN024DBS; Start 148; Stop 172
accgttgattatttcgatgatatta

SEQ ID NO: 370064 - DNA, 25 bp, Artificial
  probe
  misc_feature (1)..(25): SEQ ID NO: 4004; WAN024DBS; Start 147; Stop 171
taccgttgattatttcgatgatatt

SEQ ID NO: 370065 - DNA, 25 bp, Artificial
  probe
  misc_feature (1)..(25): SEQ ID NO: 4004; WAN024DBS; Start 110; Stop 134
gactaacaaagtcccaggttattga

SEQ ID NO: 370066 - DNA, 25 bp, Artificial
  probe
  misc_feature (1)..(25): SEQ ID NO: 4005; WAN024DF5; Start 37; Stop 61
gaaggttgtgtcttggatatgattg

SEQ ID NO: 370067 - DNA, 25 bp, Artificial
  probe
  misc_feature (1)..(25): SEQ ID NO: 4005; WAN024DF5; Start 36; Stop 60
tgaaggttgtgtcttggatatgatt

SEQ ID NO: 370068 - DNA, 25 bp, Artificial
  probe
  misc_feature (1)..(25): SEQ ID NO: 4005; WAN024DF5; Start 35; Stop 59
ttgaaggttgtgtcttggatatgat

SEQ ID NO: 370069 - DNA, 25 bp, Artificial
  probe
  misc_feature (1)..(25): SEQ ID NO: 4005; WAN024DF5; Start 32; Stop 56
ttcttgaaggttgtgtcttggatat

SEQ ID NO: 370070 - DNA, 25 bp, Artificial
  probe
  misc_feature (1)..(25): SEQ ID NO: 4005; WAN024DF5; Start 34; Stop 58
cttgaaggttgtgtcttggatatga

SEQ ID NO: 370071 - DNA, 25 bp, Artificial
  probe
  misc_feature (1)..(25): SEQ ID NO: 4005; WAN024DF5; Start 33; Stop 57
tcttgaaggttgtgtcttggatatg

SEQ ID NO: 370072 - DNA, 25 bp, Artificial
  probe
  misc_feature (1)..(25): SEQ ID NO: 4005; WAN024DF5; Start 31; Stop 55
gttcttgaaggttgtgtcttggata

SEQ ID NO: 370073 - DNA, 25 bp, Artificial
  probe
  misc_feature (1)..(25): SEQ ID NO: 4005; WAN024DF5; Start 38; Stop 62
aaggttgtgtcttggatatgattgg

SEQ ID NO: 370074 - DNA, 25 bp, Artificial
  probe
  misc_feature (1)..(25): SEQ ID NO: 4005; WAN024DF5; Start 75; Stop 99
gtatggttatgagttggttcagact

SEQ ID NO: 370075 - DNA, 25 bp, Artificial
  probe
  misc_feature (1)..(25): SEQ ID NO: 4005; WAN024DF5; Start 76; Stop 100
tatggttatgagttggttcagactt

SEQ ID NO: 370076 - DNA, 25 bp, Artificial
  probe
  misc_feature (1)..(25): SEQ ID NO: 4005; WAN024DF5; Start 42; Stop 66
ttgtgtcttggatatgattggtcaa

SEQ ID NO: 370077 - DNA, 25 bp, Artificial
  probe
  misc_feature (1)..(25): SEQ ID NO: 4005; WAN024DF5; Start 40; Stop 64
ggttgtgtcttggatatgattggtc

SEQ ID NO: 370078 - DNA, 25 bp, Artificial
  probe
  misc_feature (1)..(25): SEQ ID NO: 4005; WAN024DF5; Start 41; Stop 65
gttgtgtcttggatatgattggtca

SEQ ID NO: 370079 - DNA, 25 bp, Artificial
  probe
  misc_feature (1)..(25): SEQ ID NO: 4005; WAN024DF5; Start 74; Stop 98
ggtatggttatgagttggttcagac

SEQ ID NO: 370080 - DNA, 25 bp, Artificial
  probe
  misc_feature (1)..(25): SEQ ID NO: 4005; WAN024DF5; Start 39; Stop 63
aggttgtgtcttggatatgattggt

SEQ ID NO: 370081 - DNA, 25 bp, Artificial
  probe
  misc_feature (1)..(25): SEQ ID NO: 4005; WAN024DF5; Start 30; Stop 54
tgttcttgaaggttgtgtcttggat

SEQ ID NO: 370082 - DNA, 25 bp, Artificial
  probe
  misc_feature (1)..(25): SEQ ID NO: 4005; WAN024DF5; Start 73; Stop 97
cggtatggttatgagttggttcaga

SEQ ID NO: 370083 - DNA, 25 bp, Artificial
  probe
  misc_feature (1)..(25): SEQ ID NO: 4005; WAN024DF5; Start 26; Stop 50
aaggtgttcttgaaggttgtgtctt

SEQ ID NO: 370084 - DNA, 25 bp, Artificial
  probe
  misc_feature (1)..(25): SEQ ID NO: 4005; WAN024DF5; Start 232; Stop 256
ttaatgaaagaaggagaagagcgtg

SEQ ID NO: 370085 - DNA, 25 bp, Artificial
  probe
  misc_feature (1)..(25): SEQ ID NO: 4005; WAN024DF5; Start 106; Stop 130
gaggctggatttgatactatcgttc

SEQ ID NO: 370086 - DNA, 25 bp, Artificial
  probe
  misc_feature (1)..(25): SEQ ID NO: 4005; WAN024DF5; Start 77; Stop 101
atggttatgagttggttcagacttt

SEQ ID NO: 370087 - DNA, 25 bp, Artificial
  probe
  misc_feature (1)..(25): SEQ ID NO: 4005; WAN024DF5; Start 43; Stop 67
tgtgtcttggatatgattggtcaaa

SEQ ID NO: 370088 - DNA, 25 bp, Artificial
  probe
  misc_feature (1)..(25): SEQ ID NO: 4005; WAN024DF5; Start 105; Stop 129
agaggctggatttgatactatcgtt

SEQ ID NO: 370089 - DNA, 25 bp, Artificial
  probe
  misc_feature (1)..(25): SEQ ID NO: 4005; WAN024DF5; Start 233; Stop 257
taatgaaagaaggagaagagcgtgt

SEQ ID NO: 370090 - DNA, 25 bp, Artificial
  probe
  misc_feature (1)..(25): SEQ ID NO: 4005; WAN024DF5; Start 78; Stop 102
tggttatgagttggttcagactttg

SEQ ID NO: 370091 - DNA, 25 bp, Artificial
  probe
  misc_feature (1)..(25): SEQ ID NO: 4005; WAN024DF5; Start 70; Stop 94
gagcggtatggttatgagttggttc

SEQ ID NO: 370092 - DNA, 25 bp, Artificial
  probe
  misc_feature (1)..(25): SEQ ID NO: 4005; WAN024DF5; Start 104; Stop 128
gagaggctggatttgatactatcgt

SEQ ID NO: 370093 - DNA, 25 bp, Artificial
  probe
  misc_feature (1)..(25): SEQ ID NO: 4005; WAN024DF5; Start 29; Stop 53
gtgttcttgaaggttgtgtcttgga

SEQ ID NO: 370094 - DNA, 25 bp, Artificial
  probe
  misc_feature (1)..(25): SEQ ID NO: 4005; WAN024DF5; Start 27; Stop 51
aggtgttcttgaaggttgtgtcttg

SEQ ID NO: 370095 - DNA, 25 bp, Artificial
  probe
  misc_feature (1)..(25): SEQ ID NO: 4005; WAN024DF5; Start 231; Stop 255
attaatgaaagaaggagaagagcgt

SEQ ID NO: 370096 - DNA, 25 bp, Artificial
  probe
  misc_feature (1)..(25): SEQ ID NO: 4005; WAN024DF5; Start 69; Stop 93
agagcggtatggttatgagttggtt

SEQ ID NO: 370097 - DNA, 25 bp, Artificial
  probe
  misc_feature (1)..(25): SEQ ID NO: 4005; WAN024DF5; Start 68; Stop 92
aagagcggtatggttatgagttggt

SEQ ID NO: 370098 - DNA, 25 bp, Artificial
  probe
  misc_feature (1)..(25): SEQ ID NO: 4005; WAN024DF5; Start 168; Stop 192
aaatcaatggataagaggcgacatg

SEQ ID NO: 370099 - DNA, 25 bp, Artificial
  probe
  misc_feature (1)..(25): SEQ ID NO: 4006; WAN024C6K; Start 26; Stop 50
aagaattattgaatcgtgcaggttg

SEQ ID NO: 370100 - DNA, 25 bp, Artificial
  probe
  misc_feature (1)..(25): SEQ ID NO: 4006; WAN024C6K; Start 27; Stop 51
agaattattgaatcgtgcaggttgg

SEQ ID NO: 370101 - DNA, 25 bp, Artificial
  probe
  misc_feature (1)..(25): SEQ ID NO: 4006; WAN024C6K; Start 419; Stop 443
ctccaatttgtgaggaaatcttgtg

SEQ ID NO: 370102 - DNA, 25 bp, Artificial
  probe
  misc_feature (1)..(25): SEQ ID NO: 4006; WAN024C6K; Start 416; Stop 440
ttgctccaatttgtgaggaaatctt

SEQ ID NO: 370103 - DNA, 25 bp, Artificial
  probe
  misc_feature (1)..(25): SEQ ID NO: 4006; WAN024C6K; Start 25; Stop 49
aaagaattattgaatcgtgcaggtt

SEQ ID NO: 370104 - DNA, 25 bp, Artificial
  probe
  misc_feature (1)..(25): SEQ ID NO: 4006; WAN024C6K; Start 24; Stop 48
gaaagaattattgaatcgtgcaggt

SEQ ID NO: 370105 - DNA, 25 bp, Artificial
  probe
  misc_feature (1)..(25): SEQ ID NO: 4006; WAN024C6K; Start 22; Stop 46
tggaaagaattattgaatcgtgcag

SEQ ID NO: 370106 - DNA, 25 bp, Artificial
  probe
  misc_feature (1)..(25): SEQ ID NO: 4006; WAN024C6K; Start 23; Stop 47
ggaaagaattattgaatcgtgcagg

SEQ ID NO: 370107 - DNA, 25 bp, Artificial
  probe
  misc_feature (1)..(25): SEQ ID NO: 4006; WAN024C6K; Start 415; Stop 439
cttgctccaatttgtgaggaaatct

SEQ ID NO: 370108 - DNA, 25 bp, Artificial
  probe
  misc_feature (1)..(25): SEQ ID NO: 4006; WAN024C6K; Start 418; Stop 442
gctccaatttgtgaggaaatcttgt

SEQ ID NO: 370109 - DNA, 25 bp, Artificial
  probe
  misc_feature (1)..(25): SEQ ID NO: 4006; WAN024C6K; Start 417; Stop 441
tgctccaatttgtgaggaaatcttg

SEQ ID NO: 370110 - DNA, 25 bp, Artificial
  probe
  misc_feature (1)..(25): SEQ ID NO: 4006; WAN024C6K; Start 28; Stop 52
gaattattgaatcgtgcaggttggc

SEQ ID NO: 370111 - DNA, 25 bp, Artificial
  probe
  misc_feature (1)..(25): SEQ ID NO: 4006; WAN024C6K; Start 420; Stop 444
tccaatttgtgaggaaatcttgtgc

SEQ ID NO: 370112 - DNA, 25 bp, Artificial
  probe
  misc_feature (1)..(25): SEQ ID NO: 4006; WAN024C6K; Start 386; Stop 410
tgatttccagtttcttcttgttggc

SEQ ID NO: 370113 - DNA, 25 bp, Artificial
  probe
  misc_feature (1)..(25): SEQ ID NO: 4006; WAN024C6K; Start 29; Stop 53
aattattgaatcgtgcaggttggct

SEQ ID NO: 370114 - DNA, 25 bp, Artificial
  probe
  misc_feature (1)..(25): SEQ ID NO: 4006; WAN024C6K; Start 421; Stop 445
ccaatttgtgaggaaatcttgtgcc

SEQ ID NO: 370115 - DNA, 25 bp, Artificial
  probe
  misc_feature (1)..(25): SEQ ID NO: 4006; WAN024C6K; Start 473; Stop 497
gaggaaaagagaacttgggatttgt

SEQ ID NO: 370116 - DNA, 25 bp, Artificial
  probe
  misc_feature (1)..(25): SEQ ID NO: 4006; WAN024C6K; Start 422; Stop 446
caatttgtgaggaaatcttgtgccg

SEQ ID NO: 370117 - DNA, 25 bp, Artificial
  probe
  misc_feature (1)..(25): SEQ ID NO: 4006; WAN024C6K; Start 414; Stop 438
gcttgctccaatttgtgaggaaatc

SEQ ID NO: 370118 - DNA, 25 bp, Artificial
  probe
  misc_feature (1)..(25): SEQ ID NO: 4006; WAN024C6K; Start 423; Stop 447
aatttgtgaggaaatcttgtgccgt

SEQ ID NO: 370119 - DNA, 25 bp, Artificial
  probe
  misc_feature (1)..(25): SEQ ID NO: 4006; WAN024C6K; Start 413; Stop 437
tgcttgctccaatttgtgaggaaat

SEQ ID NO: 370120 - DNA, 25 bp, Artificial
  probe
  misc_feature (1)..(25): SEQ ID NO: 4006; WAN024C6K; Start 30; Stop 54
attattgaatcgtgcaggttggctg

SEQ ID NO: 370121 - DNA, 25 bp, Artificial
  probe
  misc_feature (1)..(25): SEQ ID NO: 4006; WAN024C6K; Start 412; Stop 436
ttgcttgctccaatttgtgaggaaa

SEQ ID NO: 370122 - DNA, 25 bp, Artificial
  probe
  misc_feature (1)..(25): SEQ ID NO: 4006; WAN024C6K; Start 424; Stop 448
atttgtgaggaaatcttgtgccgtg

SEQ ID NO: 370123 - DNA, 25 bp, Artificial
  probe
  misc_feature (1)..(25): SEQ ID NO: 4006; WAN024C6K; Start 411; Stop 435
cttgcttgctccaatttgtgaggaa

SEQ ID NO: 370124 - DNA, 25 bp, Artificial
  probe
  misc_feature (1)..(25): SEQ ID NO: 4006; WAN024C6K; Start 36; Stop 60
gaatcgtgcaggttggctgttaatc

SEQ ID NO: 370125 - DNA, 25 bp, Artificial
  probe
  misc_feature (1)..(25): SEQ ID NO: 4006; WAN024C6K; Start 387; Stop 411
gatttccagtttcttcttgttggcc

SEQ ID NO: 370126 - DNA, 25 bp, Artificial
  probe
  misc_feature (1)..(25): SEQ ID NO: 4006; WAN024C6K; Start 38; Stop 62
atcgtgcaggttggctgttaatctt

SEQ ID NO: 370127 - DNA, 25 bp, Artificial
  probe
  misc_feature (1)..(25): SEQ ID NO: 4006; WAN024C6K; Start 37; Stop 61
aatcgtgcaggttggctgttaatct

SEQ ID NO: 370128 - DNA, 25 bp, Artificial
  probe
  misc_feature (1)..(25): SEQ ID NO: 4006; WAN024C6K; Start 388; Stop 412
atttccagtttcttcttgttggcct

SEQ ID NO: 370129 - DNA, 25 bp, Artificial
  probe
  misc_feature (1)..(25): SEQ ID NO: 4006; WAN024C6K; Start 389; Stop 413
tttccagtttcttcttgttggcctt

SEQ ID NO: 370130 - DNA, 25 bp, Artificial
  probe
  misc_feature (1)..(25): SEQ ID NO: 4006; WAN024C6K; Start 433; Stop 457
gaaatcttgtgccgtgggattgttc

SEQ ID NO: 370131 - DNA, 25 bp, Artificial
  probe
  misc_feature (1)..(25): SEQ ID NO: 4006; WAN024C6K; Start 394; Stop 418
agtttcttcttgttggccttgcttg

SEQ ID NO: 370132 - DNA, 25 bp, Artificial
  probe
  misc_feature (1)..(25): SEQ ID NO: 4007; WAN024FMN; Start 558; Stop 582
atctgcttattggctgtatgatgaa

SEQ ID NO: 370133 - DNA, 25 bp, Artificial
  probe
  misc_feature (1)..(25): SEQ ID NO: 4007; WAN024FMN; Start 557; Stop 581
tatctgcttattggctgtatgatga

SEQ ID NO: 370134 - DNA, 25 bp, Artificial
  probe
  misc_feature (1)..(25): SEQ ID NO: 4007; WAN024FMN; Start 475; Stop 499
atcttgatgatgaacatagtcgcta

SEQ ID NO: 370135 - DNA, 25 bp, Artificial
  probe
  misc_feature (1)..(25): SEQ ID NO: 4007; WAN024FMN; Start 474; Stop 498
tatcttgatgatgaacatagtcgct

SEQ ID NO: 370136 - DNA, 25 bp, Artificial
  probe
  misc_feature (1)..(25): SEQ ID NO: 4007; WAN024FMN; Start 556; Stop 580
ttatctgcttattggctgtatgatg

SEQ ID NO: 370137 - DNA, 25 bp, Artificial
  probe
  misc_feature (1)..(25): SEQ ID NO: 4007; WAN024FMN; Start 479; Stop 503
tgatgatgaacatagtcgctattgt

SEQ ID NO: 370138 - DNA, 25 bp, Artificial
  probe
  misc_feature (1)..(25): SEQ ID NO: 4007; WAN024FMN; Start 476; Stop 500
tcttgatgatgaacatagtcgctat

SEQ ID NO: 370139 - DNA, 25 bp, Artificial
  probe
  misc_feature (1)..(25): SEQ ID NO: 4007; WAN024FMN; Start 473; Stop 497
ctatcttgatgatgaacatagtcgc

SEQ ID NO: 370140 - DNA, 25 bp, Artificial
  probe
  misc_feature (1)..(25): SEQ ID NO: 4007; WAN024FMN; Start 478; Stop 502
ttgatgatgaacatagtcgctattg

SEQ ID NO: 370141 - DNA, 25 bp, Artificial
  probe
  misc_feature (1)..(25): SEQ ID NO: 4007; WAN024FMN; Start 477; Stop 501
cttgatgatgaacatagtcgctatt

SEQ ID NO: 370142 - DNA, 25 bp, Artificial
  probe
  misc_feature (1)..(25): SEQ ID NO: 4007; WAN024FMN; Start 480; Stop 504
gatgatgaacatagtcgctattgta

SEQ ID NO: 370143 - DNA, 25 bp, Artificial
  probe
  misc_feature (1)..(25): SEQ ID NO: 4007; WAN024FMN; Start 985; Stop 1009
ggaataatgctcctagtcctaactt

SEQ ID NO: 370144 - DNA, 25 bp, Artificial
  probe
  misc_feature (1)..(25): SEQ ID NO: 4007; WAN024FMN; Start 482; Stop 506
tgatgaacatagtcgctattgtatt

SEQ ID NO: 370145 - DNA, 25 bp, Artificial
  probe
  misc_feature (1)..(25): SEQ ID NO: 4007; WAN024FMN; Start 472; Stop 496
tctatcttgatgatgaacatagtcg

SEQ ID NO: 370146 - DNA, 25 bp, Artificial
  probe
  misc_feature (1)..(25): SEQ ID NO: 4007; WAN024FMN; Start 481; Stop 505
atgatgaacatagtcgctattgtat

SEQ ID NO: 370147 - DNA, 25 bp, Artificial
  probe
  misc_feature (1)..(25): SEQ ID NO: 4007; WAN024FMN; Start 1170; Stop 1194
tgatgaaagtgatgaagagttaggg

SEQ ID NO: 370148 - DNA, 25 bp, Artificial
  probe
  misc_feature (1)..(25): SEQ ID NO: 4007; WAN024FMN; Start 560; Stop 584
ctgcttattggctgtatgatgaaac

SEQ ID NO: 370149 - DNA, 25 bp, Artificial
  probe
  misc_feature (1)..(25): SEQ ID NO: 4007; WAN024FMN; Start 559; Stop 583
tctgcttattggctgtatgatgaaa

SEQ ID NO: 370150 - DNA, 25 bp, Artificial
  probe
  misc_feature (1)..(25): SEQ ID NO: 4007; WAN024FMN; Start 565; Stop 589
tattggctgtatgatgaaacggatt

SEQ ID NO: 370151 - DNA, 25 bp, Artificial
  probe
  misc_feature (1)..(25): SEQ ID NO: 4007; WAN024FMN; Start 564; Stop 588
ttattggctgtatgatgaaacggat

SEQ ID NO: 370152 - DNA, 25 bp, Artificial
  probe
  misc_feature (1)..(25): SEQ ID NO: 4007; WAN024FMN; Start 1169; Stop 1193
ctgatgaaagtgatgaagagttagg

SEQ ID NO: 370153 - DNA, 25 bp, Artificial
  probe
  misc_feature (1)..(25): SEQ ID NO: 4007; WAN024FMN; Start 457; Stop 481
tacgcactattcccatctatcttga

SEQ ID NO: 370154 - DNA, 25 bp, Artificial
  probe
  misc_feature (1)..(25): SEQ ID NO: 4007; WAN024FMN; Start 554; Stop 578
ctttatctgcttattggctgtatga

SEQ ID NO: 370155 - DNA, 25 bp, Artificial
  probe
  misc_feature (1)..(25): SEQ ID NO: 4007; WAN024FMN; Start 553; Stop 577
tctttatctgcttattggctgtatg

SEQ ID NO: 370156 - DNA, 25 bp, Artificial
  probe
  misc_feature (1)..(25): SEQ ID NO: 4007; WAN024FMN; Start 973; Stop 997
ttactcgctctaggaataatgctcc

SEQ ID NO: 370157 - DNA, 25 bp, Artificial
  probe
  misc_feature (1)..(25): SEQ ID NO: 4007; WAN024FMN; Start 891; Stop 915
tctgaccattgaaggagttagaaac

SEQ ID NO: 370158 - DNA, 25 bp, Artificial
  probe
  misc_feature (1)..(25): SEQ ID NO: 4007; WAN024FMN; Start 563; Stop 587
cttattggctgtatgatgaaacgga

SEQ ID NO: 370159 - DNA, 25 bp, Artificial
  probe
  misc_feature (1)..(25): SEQ ID NO: 4007; WAN024FMN; Start 969; Stop 993
tggtttactcgctctaggaataatg

SEQ ID NO: 370160 - DNA, 25 bp, Artificial
  probe
  misc_feature (1)..(25): SEQ ID NO: 4007; WAN024FMN; Start 965; Stop 989
aatttggtttactcgctctaggaat

SEQ ID NO: 370161 - DNA, 25 bp, Artificial
  probe
  misc_feature (1)..(25): SEQ ID NO: 4007; WAN024FMN; Start 972; Stop 996
tttactcgctctaggaataatgctc

SEQ ID NO: 370162 - DNA, 25 bp, Artificial
  probe
  misc_feature (1)..(25): SEQ ID NO: 4007; WAN024FMN; Start 967; Stop 991
tttggtttactcgctctaggaataa

SEQ ID NO: 370163 - DNA, 25 bp, Artificial
  probe
  misc_feature (1)..(25): SEQ ID NO: 4007; WAN024FMN; Start 971; Stop 995
gtttactcgctctaggaataatgct

SEQ ID NO: 370164 - DNA, 25 bp, Artificial
  probe
  misc_feature (1)..(25): SEQ ID NO: 4007; WAN024FMN; Start 968; Stop 992
ttggtttactcgctctaggaataat

SEQ ID NO: 370165 - DNA, 25 bp, Artificial
  probe
  misc_feature (1)..(25): SEQ ID NO: 4008; WAN024DLC; Start 674; Stop 698
ggaatatgaataaggtgctcttggt

SEQ ID NO: 370166 - DNA, 25 bp, Artificial
  probe
  misc_feature (1)..(25): SEQ ID NO: 4008; WAN024DLC; Start 673; Stop 697
tggaatatgaataaggtgctcttgg

SEQ ID NO: 370167 - DNA, 25 bp, Artificial
  probe
  misc_feature (1)..(25): SEQ ID NO: 4008; WAN024DLC; Start 675; Stop 699
gaatatgaataaggtgctcttggtt

SEQ ID NO: 370168 - DNA, 25 bp, Artificial
  probe
  misc_feature (1)..(25): SEQ ID NO: 4008; WAN024DLC; Start 913; Stop 937
gtcatccagttgcttcttctagtag

SEQ ID NO: 370169 - DNA, 25 bp, Artificial
  probe
  misc_feature (1)..(25): SEQ ID NO: 4008; WAN024DLC; Start 672; Stop 696
atggaatatgaataaggtgctcttg

SEQ ID NO: 370170 - DNA, 25 bp, Artificial
  probe
  misc_feature (1)..(25): SEQ ID NO: 4008; WAN024DLC; Start 912; Stop 936
tgtcatccagttgcttcttctagta

SEQ ID NO: 370171 - DNA, 25 bp, Artificial
  probe
  misc_feature (1)..(25): SEQ ID NO: 4008; WAN024DLC; Start 32; Stop 56
ttaggcaattaactatcaaccagtg

SEQ ID NO: 370172 - DNA, 25 bp, Artificial
  probe
  misc_feature (1)..(25): SEQ ID NO: 4008; WAN024DLC; Start 36; Stop 60
gcaattaactatcaaccagtggatt

SEQ ID NO: 370173 - DNA, 25 bp, Artificial
  probe
  misc_feature (1)..(25): SEQ ID NO: 4008; WAN024DLC; Start 33; Stop 57
taggcaattaactatcaaccagtgg

SEQ ID NO: 370174 - DNA, 25 bp, Artificial
  probe
  misc_feature (1)..(25): SEQ ID NO: 4008; WAN024DLC; Start 910; Stop 934
cttgtcatccagttgcttcttctag

SEQ ID NO: 370175 - DNA, 25 bp, Artificial
  probe
  misc_feature (1)..(25): SEQ ID NO: 4008; WAN024DLC; Start 914; Stop 938
tcatccagttgcttcttctagtagg

SEQ ID NO: 370176 - DNA, 25 bp, Artificial
  probe
  misc_feature (1)..(25): SEQ ID NO: 4008; WAN024DLC; Start 35; Stop 59
ggcaattaactatcaaccagtggat

SEQ ID NO: 370177 - DNA, 25 bp, Artificial
  probe
  misc_feature (1)..(25): SEQ ID NO: 4008; WAN024DLC; Start 911; Stop 935
ttgtcatccagttgcttcttctagt

SEQ ID NO: 370178 - DNA, 25 bp, Artificial
  probe
  misc_feature (1)..(25): SEQ ID NO: 4008; WAN024DLC; Start 909; Stop 933
acttgtcatccagttgcttcttcta

SEQ ID NO: 370179 - DNA, 25 bp, Artificial
  probe
  misc_feature (1)..(25): SEQ ID NO: 4008; WAN024DLC; Start 668; Stop 692
tgatatggaatatgaataaggtgct

SEQ ID NO: 370180 - DNA, 25 bp, Artificial
  probe
  misc_feature (1)..(25): SEQ ID NO: 4008; WAN024DLC; Start 34; Stop 58
aggcaattaactatcaaccagtgga

SEQ ID NO: 370181 - DNA, 25 bp, Artificial
  probe
  misc_feature (1)..(25): SEQ ID NO: 4008; WAN024DLC; Start 917; Stop 941
tccagttgcttcttctagtaggatt

SEQ ID NO: 370182 - DNA, 25 bp, Artificial
  probe
  misc_feature (1)..(25): SEQ ID NO: 4008; WAN024DLC; Start 671; Stop 695
tatggaatatgaataaggtgctctt

SEQ ID NO: 370183 - DNA, 25 bp, Artificial
  probe
  misc_feature (1)..(25): SEQ ID NO: 4008; WAN024DLC; Start 670; Stop 694
atatggaatatgaataaggtgctct

SEQ ID NO: 370184 - DNA, 25 bp, Artificial
  probe
  misc_feature (1)..(25): SEQ ID NO: 4008; WAN024DLC; Start 1189; Stop 1213
gttgcctttgttatgcttctgaata

SEQ ID NO: 370185 - DNA, 25 bp, Artificial
  probe
  misc_feature (1)..(25): SEQ ID NO: 4008; WAN024DLC; Start 669; Stop 693
gatatggaatatgaataaggtgctc

SEQ ID NO: 370186 - DNA, 25 bp, Artificial
  probe
  misc_feature (1)..(25): SEQ ID NO: 4008; WAN024DLC; Start 1190; Stop 1214
ttgcctttgttatgcttctgaatat

SEQ ID NO: 370187 - DNA, 25 bp, Artificial
  probe
  misc_feature (1)..(25): SEQ ID NO: 4008; WAN024DLC; Start 915; Stop 939
catccagttgcttcttctagtagga

SEQ ID NO: 370188 - DNA, 25 bp, Artificial
  probe
  misc_feature (1)..(25): SEQ ID NO: 4008; WAN024DLC; Start 1187; Stop 1211
tagttgcctttgttatgcttctgaa

SEQ ID NO: 370189 - DNA, 25 bp, Artificial
  probe
  misc_feature (1)..(25): SEQ ID NO: 4008; WAN024DLC; Start 918; Stop 942
ccagttgcttcttctagtaggattt

SEQ ID NO: 370190 - DNA, 25 bp, Artificial
  probe
  misc_feature (1)..(25): SEQ ID NO: 4008; WAN024DLC; Start 667; Stop 691
ttgatatggaatatgaataaggtgc

SEQ ID NO: 370191 - DNA, 25 bp, Artificial
  probe
  misc_feature (1)..(25): SEQ ID NO: 4008; WAN024DLC; Start 919; Stop 943
cagttgcttcttctagtaggatttg

SEQ ID NO: 370192 - DNA, 25 bp, Artificial
  probe
  misc_feature (1)..(25): SEQ ID NO: 4008; WAN024DLC; Start 1184; Stop 1208
ttctagttgcctttgttatgcttct

SEQ ID NO: 370193 - DNA, 25 bp, Artificial
  probe
  misc_feature (1)..(25): SEQ ID NO: 4008; WAN024DLC; Start 1188; Stop 1212
agttgcctttgttatgcttctgaat

SEQ ID NO: 370194 - DNA, 25 bp, Artificial
  probe
  misc_feature (1)..(25): SEQ ID NO: 4008; WAN024DLC; Start 920; Stop 944
agttgcttcttctagtaggatttgc

SEQ ID NO: 370195 - DNA, 25 bp, Artificial
  probe
  misc_feature (1)..(25): SEQ ID NO: 4008; WAN024DLC; Start 925; Stop 949
cttcttctagtaggatttgccacag

SEQ ID NO: 370196 - DNA, 25 bp, Artificial
  probe
  misc_feature (1)..(25): SEQ ID NO: 4008; WAN024DLC; Start 676; Stop 700
aatatgaataaggtgctcttggttt

SEQ ID NO: 370197 - DNA, 25 bp, Artificial
  probe
  misc_feature (1)..(25): SEQ ID NO: 4008; WAN024DLC; Start 961; Stop 985
tggattctcatctttagtaccttgg

SEQ ID NO: 370198 - DNA, 25 bp, Artificial
  probe
  misc_feature (1)..(25): SEQ ID NO: 4009; WAN024DXA; Start 60; Stop 84
atttctactgattgggatggaccta

SEQ ID NO: 370199 - DNA, 25 bp, Artificial
  probe
  misc_feature (1)..(25): SEQ ID NO: 4009; WAN024DXA; Start 59; Stop 83
tatttctactgattgggatggacct

SEQ ID NO: 370200 - DNA, 25 bp, Artificial
  probe
  misc_feature (1)..(25): SEQ ID NO: 4009; WAN024DXA; Start 58; Stop 82
gtatttctactgattgggatggacc

SEQ ID NO: 370201 - DNA, 25 bp, Artificial
  probe
  misc_feature (1)..(25): SEQ ID NO: 4009; WAN024DXA; Start 61; Stop 85
tttctactgattgggatggacctaa

SEQ ID NO: 370202 - DNA, 25 bp, Artificial
  probe
  misc_feature (1)..(25): SEQ ID NO: 4009; WAN024DXA; Start 62; Stop 86
ttctactgattgggatggacctaag

SEQ ID NO: 370203 - DNA, 25 bp, Artificial
  probe
  misc_feature (1)..(25): SEQ ID NO: 4009; WAN024DXA; Start 113; Stop 137
aatttgtttgggtctactttgctct

SEQ ID NO: 370204 - DNA, 25 bp, Artificial
  probe
  misc_feature (1)..(25): SEQ ID NO: 4009; WAN024DXA; Start 114; Stop 138
atttgtttgggtctactttgctctc

SEQ ID NO: 370205 - DNA, 25 bp, Artificial
  probe
  misc_feature (1)..(25): SEQ ID NO: 4009; WAN024DXA; Start 112; Stop 136
caatttgtttgggtctactttgctc

SEQ ID NO: 370206 - DNA, 25 bp, Artificial
  probe
  misc_feature (1)..(25): SEQ ID NO: 4009; WAN024DXA; Start 116; Stop 140
ttgtttgggtctactttgctctcat

SEQ ID NO: 370207 - DNA, 25 bp, Artificial
  probe
  misc_feature (1)..(25): SEQ ID NO: 4009; WAN024DXA; Start 115; Stop 139
tttgtttgggtctactttgctctca

SEQ ID NO: 370208 - DNA, 25 bp, Artificial
  probe
  misc_feature (1)..(25): SEQ ID NO: 4009; WAN024DXA; Start 117; Stop 141
tgtttgggtctactttgctctcatc

SEQ ID NO: 370209 - DNA, 25 bp, Artificial
  probe
  misc_feature (1)..(25): SEQ ID NO: 4009; WAN024DXA; Start 31; Stop 55
gtagtggtcatagctttattagtca

SEQ ID NO: 370210 - DNA, 25 bp, Artificial
  probe
  misc_feature (1)..(25): SEQ ID NO: 4009; WAN024DXA; Start 30; Stop 54
tgtagtggtcatagctttattagtc

SEQ ID NO: 370211 - DNA, 25 bp, Artificial
  probe
  misc_feature (1)..(25): SEQ ID NO: 4009; WAN024DXA; Start 118; Stop 142
gtttgggtctactttgctctcatcc

SEQ ID NO: 370212 - DNA, 25 bp, Artificial
  probe
  misc_feature (1)..(25): SEQ ID NO: 4009; WAN024DXA; Start 63; Stop 87
tctactgattgggatggacctaagc

SEQ ID NO: 370213 - DNA, 25 bp, Artificial
  probe
  misc_feature (1)..(25): SEQ ID NO: 4009; WAN024DXA; Start 32; Stop 56
tagtggtcatagctttattagtcag

SEQ ID NO: 370214 - DNA, 25 bp, Artificial
  probe
  misc_feature (1)..(25): SEQ ID NO: 4009; WAN024DXA; Start 29; Stop 53
atgtagtggtcatagctttattagt

SEQ ID NO: 370215 - DNA, 25 bp, Artificial
  probe
  misc_feature (1)..(25): SEQ ID NO: 4009; WAN024DXA; Start 64; Stop 88
ctactgattgggatggacctaagct

SEQ ID NO: 370216 - DNA, 25 bp, Artificial
  probe
  misc_feature (1)..(25): SEQ ID NO: 4009; WAN024DXA; Start 16; Stop 40
aaagtgatttattatgtagtggtca

SEQ ID NO: 370217 - DNA, 25 bp, Artificial
  probe
  misc_feature (1)..(25): SEQ ID NO: 4009; WAN024DXA; Start 1; Stop 25
gtgatgaacaagtataaagtgattt

SEQ ID NO: 370218 - DNA, 25 bp, Artificial
  probe
  misc_feature (1)..(25): SEQ ID NO: 4009; WAN024DXA; Start 20; Stop 44
tgatttattatgtagtggtcatagc

SEQ ID NO: 370219 - DNA, 25 bp, Artificial
  probe
  misc_feature (1)..(25): SEQ ID NO: 4009; WAN024DXA; Start 65; Stop 89
tactgattgggatggacctaagctg

SEQ ID NO: 370220 - DNA, 25 bp, Artificial
  probe
  misc_feature (1)..(25): SEQ ID NO: 4009; WAN024DXA; Start 17; Stop 41
aagtgatttattatgtagtggtcat

SEQ ID NO: 370221 - DNA, 25 bp, Artificial
  probe
  misc_feature (1)..(25): SEQ ID NO: 4009; WAN024DXA; Start 73; Stop 97
gggatggacctaagctggtttaatc

SEQ ID NO: 370222 - DNA, 25 bp, Artificial
  probe
  misc_feature (1)..(25): SEQ ID NO: 4009; WAN024DXA; Start 72; Stop 96
tgggatggacctaagctggtttaat

SEQ ID NO: 370223 - DNA, 25 bp, Artificial
  probe
  misc_feature (1)..(25): SEQ ID NO: 4009; WAN024DXA; Start 70; Stop 94
attgggatggacctaagctggttta

SEQ ID NO: 370224 - DNA, 25 bp, Artificial
  probe
  misc_feature (1)..(25): SEQ ID NO: 4009; WAN024DXA; Start 21; Stop 45
gatttattatgtagtggtcatagct

SEQ ID NO: 370225 - DNA, 25 bp, Artificial
  probe
  misc_feature (1)..(25): SEQ ID NO: 4009; WAN024DXA; Start 99; Stop 123
ctatcaaagcgaccaatttgtttgg

SEQ ID NO: 370226 - DNA, 25 bp, Artificial
  probe
  misc_feature (1)..(25): SEQ ID NO: 4009; WAN024DXA; Start 71; Stop 95
ttgggatggacctaagctggtttaa

SEQ ID NO: 370227 - DNA, 25 bp, Artificial
  probe
  misc_feature (1)..(25): SEQ ID NO: 4009; WAN024DXA; Start 23; Stop 47
tttattatgtagtggtcatagcttt

SEQ ID NO: 370228 - DNA, 25 bp, Artificial
  probe
  misc_feature (1)..(25): SEQ ID NO: 4009; WAN024DXA; Start 111; Stop 135
ccaatttgtttgggtctactttgct

SEQ ID NO: 370229 - DNA, 25 bp, Artificial
  probe
  misc_feature (1)..(25): SEQ ID NO: 4009; WAN024DXA; Start 18; Stop 42
agtgatttattatgtagtggtcata

SEQ ID NO: 370230 - DNA, 25 bp, Artificial
  probe
  misc_feature (1)..(25): SEQ ID NO: 4009; WAN024DXA; Start 110; Stop 134
accaatttgtttgggtctactttgc

SEQ ID NO: 370231 - DNA, 25 bp, Artificial
  probe
  misc_feature (1)..(25): SEQ ID NO: 4010; WAN024GLX; Start 462; Stop 486
tattggattggttacagcagagatt

SEQ ID NO: 370232 - DNA, 25 bp, Artificial
  probe
  misc_feature (1)..(25): SEQ ID NO: 4010; WAN024GLX; Start 459; Stop 483
tactattggattggttacagcagag

SEQ ID NO: 370233 - DNA, 25 bp, Artificial
  probe
  misc_feature (1)..(25): SEQ ID NO: 4010; WAN024GLX; Start 455; Stop 479
cgattactattggattggttacagc

SEQ ID NO: 370234 - DNA, 25 bp, Artificial
  probe
  misc_feature (1)..(25): SEQ ID NO: 4010; WAN024GLX; Start 454; Stop 478
gcgattactattggattggttacag

SEQ ID NO: 370235 - DNA, 25 bp, Artificial
  probe
  misc_feature (1)..(25): SEQ ID NO: 4010; WAN024GLX; Start 451; Stop 475
atggcgattactattggattggtta

SEQ ID NO: 370236 - DNA, 25 bp, Artificial
  probe
  misc_feature (1)..(25): SEQ ID NO: 4010; WAN024GLX; Start 450; Stop 474
tatggcgattactattggattggtt

SEQ ID NO: 370237 - DNA, 25 bp, Artificial
  probe
  misc_feature (1)..(25): SEQ ID NO: 4010; WAN024GLX; Start 449; Stop 473
ttatggcgattactattggattggt

SEQ ID NO: 370238 - DNA, 25 bp, Artificial
  probe
  misc_feature (1)..(25): SEQ ID NO: 4010; WAN024GLX; Start 458; Stop 482
ttactattggattggttacagcaga

SEQ ID NO: 370239 - DNA, 25 bp, Artificial
  probe
  misc_feature (1)..(25): SEQ ID NO: 4010; WAN024GLX; Start 461; Stop 485
ctattggattggttacagcagagat

SEQ ID NO: 370240 - DNA, 25 bp, Artificial
  probe
  misc_feature (1)..(25): SEQ ID NO: 4010; WAN024GLX; Start 702; Stop 726
gcttccaggtatgattctatgtgtt

SEQ ID NO: 370241 - DNA, 25 bp, Artificial
  probe
  misc_feature (1)..(25): SEQ ID NO: 4010; WAN024GLX; Start 221; Stop 245
atcagtcaacagtagcgattatctc

SEQ ID NO: 370242 - DNA, 25 bp, Artificial
  probe
  misc_feature (1)..(25): SEQ ID NO: 4010; WAN024GLX; Start 850; Stop 874
ctccaacacattattacattaccgt

SEQ ID NO: 370243 - DNA, 25 bp, Artificial
  probe
  misc_feature (1)..(25): SEQ ID NO: 4010; WAN024GLX; Start 849; Stop 873
actccaacacattattacattaccg

SEQ ID NO: 370244 - DNA, 25 bp, Artificial
  probe
  misc_feature (1)..(25): SEQ ID NO: 4010; WAN024GLX; Start 1103; Stop 1127
atgtatcaatggctgtaggattagt

SEQ ID NO: 370245 - DNA, 25 bp, Artificial
  probe
  misc_feature (1)..(25): SEQ ID NO: 4010; WAN024GLX; Start 453; Stop 477
ggcgattactattggattggttaca

SEQ ID NO: 370246 - DNA, 25 bp, Artificial
  probe
  misc_feature (1)..(25): SEQ ID NO: 4010; WAN024GLX; Start 452; Stop 476
tggcgattactattggattggttac

SEQ ID NO: 370247 - DNA, 25 bp, Artificial
  probe
  misc_feature (1)..(25): SEQ ID NO: 4010; WAN024GLX; Start 188; Stop 212
gtgttggattgctaagtatcttgac

SEQ ID NO: 370248 - DNA, 25 bp, Artificial
  probe
  misc_feature (1)..(25): SEQ ID NO: 4010; WAN024GLX; Start 187; Stop 211
agtgttggattgctaagtatcttga

SEQ ID NO: 370249 - DNA, 25 bp, Artificial
  probe
  misc_feature (1)..(25): SEQ ID NO: 4010; WAN024GLX; Start 457; Stop 481
attactattggattggttacagcag

SEQ ID NO: 370250 - DNA, 25 bp, Artificial
  probe
  misc_feature (1)..(25): SEQ ID NO: 4010; WAN024GLX; Start 456; Stop 480
gattactattggattggttacagca

SEQ ID NO: 370251 - DNA, 25 bp, Artificial
  probe
  misc_feature (1)..(25): SEQ ID NO: 4010; WAN024GLX; Start 180; Stop 204
gctgaatagtgttggattgctaagt

SEQ ID NO: 370252 - DNA, 25 bp, Artificial
  probe
  misc_feature (1)..(25): SEQ ID NO: 4010; WAN024GLX; Start 1104; Stop 1128
tgtatcaatggctgtaggattagta

SEQ ID NO: 370253 - DNA, 25 bp, Artificial
  probe
  misc_feature (1)..(25): SEQ ID NO: 4010; WAN024GLX; Start 224; Stop 248
agtcaacagtagcgattatctcctt

SEQ ID NO: 370254 - DNA, 25 bp, Artificial
  probe
  misc_feature (1)..(25): SEQ ID NO: 4010; WAN024GLX; Start 460; Stop 484
actattggattggttacagcagaga

SEQ ID NO: 370255 - DNA, 25 bp, Artificial
  probe
  misc_feature (1)..(25): SEQ ID NO: 4010; WAN024GLX; Start 181; Stop 205
ctgaatagtgttggattgctaagta

SEQ ID NO: 370256 - DNA, 25 bp, Artificial
  probe
  misc_feature (1)..(25): SEQ ID NO: 4010; WAN024GLX; Start 191; Stop 215
ttggattgctaagtatcttgacaac

SEQ ID NO: 370257 - DNA, 25 bp, Artificial
  probe
  misc_feature (1)..(25): SEQ ID NO: 4010; WAN024GLX; Start 190; Stop 214
gttggattgctaagtatcttgacaa

SEQ ID NO: 370258 - DNA, 25 bp, Artificial
  probe
  misc_feature (1)..(25): SEQ ID NO: 4010; WAN024GLX; Start 212; Stop 236
caactatgaatcagtcaacagtagc

SEQ ID NO: 370259 - DNA, 25 bp, Artificial
  probe
  misc_feature (1)..(25): SEQ ID NO: 4010; WAN024GLX; Start 192; Stop 216
tggattgctaagtatcttgacaact

SEQ ID NO: 370260 - DNA, 25 bp, Artificial
  probe
  misc_feature (1)..(25): SEQ ID NO: 4010; WAN024GLX; Start 215; Stop 239
ctatgaatcagtcaacagtagcgat

SEQ ID NO: 370261 - DNA, 25 bp, Artificial
  probe
  misc_feature (1)..(25): SEQ ID NO: 4010; WAN024GLX; Start 698; Stop 722
gaacgcttccaggtatgattctatg

SEQ ID NO: 370262 - DNA, 25 bp, Artificial
  probe
  misc_feature (1)..(25): SEQ ID NO: 4010; WAN024GLX; Start 851; Stop 875
tccaacacattattacattaccgtt

SEQ ID NO: 370263 - DNA, 25 bp, Artificial
  probe
  misc_feature (1)..(25): SEQ ID NO: 4010; WAN024GLX; Start 186; Stop 210
tagtgttggattgctaagtatcttg

SEQ ID NO: 370264 - DNA, 25 bp, Artificial
  probe
  misc_feature (1)..(25): SEQ ID NO: 4011; WAN024F9G; Start 4; Stop 28
atgaagttacgaattgagattgacg

SEQ ID NO: 370265 - DNA, 25 bp, Artificial
  probe
  misc_feature (1)..(25): SEQ ID NO: 4011; WAN024F9G; Start 5; Stop 29
tgaagttacgaattgagattgacgg

SEQ ID NO: 370266 - DNA, 25 bp, Artificial
  probe
  misc_feature (1)..(25): SEQ ID NO: 4011; WAN024F9G; Start 2; Stop 26
tgatgaagttacgaattgagattga

SEQ ID NO: 370267 - DNA, 25 bp, Artificial
  probe
  misc_feature (1)..(25): SEQ ID NO: 4011; WAN024F9G; Start 1; Stop 25
gtgatgaagttacgaattgagattg

SEQ ID NO: 370268 - DNA, 25 bp, Artificial
  probe
  misc_feature (1)..(25): SEQ ID NO: 4011; WAN024F9G; Start 3; Stop 27
gatgaagttacgaattgagattgac

SEQ ID NO: 370269 - DNA, 25 bp, Artificial
  probe
  misc_feature (1)..(25): SEQ ID NO: 4011; WAN024F9G; Start 205; Stop 229
atctacgctcataaccagaaggaag

SEQ ID NO: 370270 - DNA, 25 bp, Artificial
  probe
  misc_feature (1)..(25): SEQ ID NO: 4011; WAN024F9G; Start 6; Stop 30
gaagttacgaattgagattgacggc

SEQ ID NO: 370271 - DNA, 25 bp, Artificial
  probe
  misc_feature (1)..(25): SEQ ID NO: 4011; WAN024F9G; Start 204; Stop 228
gatctacgctcataaccagaaggaa

SEQ ID NO: 370272 - DNA, 25 bp, Artificial
  probe
  misc_feature (1)..(25): SEQ ID NO: 4011; WAN024F9G; Start 7; Stop 31
aagttacgaattgagattgacggca

SEQ ID NO: 370273 - DNA, 25 bp, Artificial
  probe
  misc_feature (1)..(25): SEQ ID NO: 4011; WAN024F9G; Start 8; Stop 32
agttacgaattgagattgacggcaa

SEQ ID NO: 370274 - DNA, 25 bp, Artificial
  probe
  misc_feature (1)..(25): SEQ ID NO: 4011; WAN024F9G; Start 37; Stop 61
gaggagactgaaattgtcatcaaga

SEQ ID NO: 370275 - DNA, 25 bp, Artificial
  probe
  misc_feature (1)..(25): SEQ ID NO: 4011; WAN024F9G; Start 36; Stop 60
agaggagactgaaattgtcatcaag

SEQ ID NO: 370276 - DNA, 25 bp, Artificial
  probe
  misc_feature (1)..(25): SEQ ID NO: 4011; WAN024F9G; Start 35; Stop 59
tagaggagactgaaattgtcatcaa

SEQ ID NO: 370277 - DNA, 25 bp, Artificial
  probe
  misc_feature (1)..(25): SEQ ID NO: 4011; WAN024F9G; Start 34; Stop 58
ttagaggagactgaaattgtcatca

SEQ ID NO: 370278 - DNA, 25 bp, Artificial
  probe
  misc_feature (1)..(25): SEQ ID NO: 4011; WAN024F9G; Start 38; Stop 62
aggagactgaaattgtcatcaagac

SEQ ID NO: 370279 - DNA, 25 bp, Artificial
  probe
  misc_feature (1)..(25): SEQ ID NO: 4011; WAN024F9G; Start 9; Stop 33
gttacgaattgagattgacggcaat

SEQ ID NO: 370280 - DNA, 25 bp, Artificial
  probe
  misc_feature (1)..(25): SEQ ID NO: 4011; WAN024F9G; Start 33; Stop 57
tttagaggagactgaaattgtcatc

SEQ ID NO: 370281 - DNA, 25 bp, Artificial
  probe
  misc_feature (1)..(25): SEQ ID NO: 4011; WAN024F9G; Start 40; Stop 64
gagactgaaattgtcatcaagaccc

SEQ ID NO: 370282 - DNA, 25 bp, Artificial
  probe
  misc_feature (1)..(25): SEQ ID NO: 4011; WAN024F9G; Start 39; Stop 63
ggagactgaaattgtcatcaagacc

SEQ ID NO: 370283 - DNA, 25 bp, Artificial
  probe
  misc_feature (1)..(25): SEQ ID NO: 4011; WAN024F9G; Start 201; Stop 225
caagatctacgctcataaccagaag

SEQ ID NO: 370284 - DNA, 25 bp, Artificial
  probe
  misc_feature (1)..(25): SEQ ID NO: 4011; WAN024F9G; Start 68; Stop 92
ctttgacagatgaaattgcagactt

SEQ ID NO: 370285 - DNA, 25 bp, Artificial
  probe
  misc_feature (1)..(25): SEQ ID NO: 4011; WAN024F9G; Start 183; Stop 207
ctttgaaacagaagggagcaagatc

SEQ ID NO: 370286 - DNA, 25 bp, Artificial
  probe
  misc_feature (1)..(25): SEQ ID NO: 4011; WAN024F9G; Start 69; Stop 93
tttgacagatgaaattgcagacttg

SEQ ID NO: 370287 - DNA, 25 bp, Artificial
  probe
  misc_feature (1)..(25): SEQ ID NO: 4011; WAN024F9G; Start 26; Stop 50
acggcaatttagaggagactgaaat

SEQ ID NO: 370288 - DNA, 25 bp, Artificial
  probe
  misc_feature (1)..(25): SEQ ID NO: 4011; WAN024F9G; Start 25; Stop 49
gacggcaatttagaggagactgaaa

SEQ ID NO: 370289 - DNA, 25 bp, Artificial
  probe
  misc_feature (1)..(25): SEQ ID NO: 4011; WAN024F9G; Start 32; Stop 56
atttagaggagactgaaattgtcat

SEQ ID NO: 370290 - DNA, 25 bp, Artificial
  probe
  misc_feature (1)..(25): SEQ ID NO: 4011; WAN024F9G; Start 67; Stop 91
actttgacagatgaaattgcagact

SEQ ID NO: 370291 - DNA, 25 bp, Artificial
  probe
  misc_feature (1)..(25): SEQ ID NO: 4011; WAN024F9G; Start 66; Stop 90
cactttgacagatgaaattgcagac

SEQ ID NO: 370292 - DNA, 25 bp, Artificial
  probe
  misc_feature (1)..(25): SEQ ID NO: 4011; WAN024F9G; Start 202; Stop 226
aagatctacgctcataaccagaagg

SEQ ID NO: 370293 - DNA, 25 bp, Artificial
  probe
  misc_feature (1)..(25): SEQ ID NO: 4011; WAN024F9G; Start 164; Stop 188
acctgtcagaaattctcttctttga

SEQ ID NO: 370294 - DNA, 25 bp, Artificial
  probe
  misc_feature (1)..(25): SEQ ID NO: 4011; WAN024F9G; Start 163; Stop 187
gacctgtcagaaattctcttctttg

SEQ ID NO: 370295 - DNA, 25 bp, Artificial
  probe
  misc_feature (1)..(25): SEQ ID NO: 4011; WAN024F9G; Start 162; Stop 186
agacctgtcagaaattctcttcttt

SEQ ID NO: 370296 - DNA, 25 bp, Artificial
  probe
  misc_feature (1)..(25): SEQ ID NO: 4011; WAN024F9G; Start 160; Stop 184
ctagacctgtcagaaattctcttct

SEQ ID NO: 370297 - DNA, 25 bp, Artificial
  probe
  misc_feature (1)..(25): SEQ ID NO: 4012; WAN024C5Z; Start 13; Stop 37
acacttgaagaaggaatgaagaatc

SEQ ID NO: 370298 - DNA, 25 bp, Artificial
  probe
  misc_feature (1)..(25): SEQ ID NO: 4012; WAN024C5Z; Start 12; Stop 36
aacacttgaagaaggaatgaagaat

SEQ ID NO: 370299 - DNA, 25 bp, Artificial
  probe
  misc_feature (1)..(25): SEQ ID NO: 4012; WAN024C5Z; Start 14; Stop 38
cacttgaagaaggaatgaagaatca

SEQ ID NO: 370300 - DNA, 25 bp, Artificial
  probe
  misc_feature (1)..(25): SEQ ID NO: 4012; WAN024C5Z; Start 93; Stop 117
aatagtaaataaacacggtcaagcg

SEQ ID NO: 370301 - DNA, 25 bp, Artificial
  probe
  misc_feature (1)..(25): SEQ ID NO: 4012; WAN024C5Z; Start 170; Stop 194
aagcgataaagaaagagtttggaaa

SEQ ID NO: 370302 - DNA, 25 bp, Artificial
  probe
  misc_feature (1)..(25): SEQ ID NO: 4012; WAN024C5Z; Start 169; Stop 193
aaagcgataaagaaagagtttggaa

SEQ ID NO: 370303 - DNA, 25 bp, Artificial
  probe
  misc_feature (1)..(25): SEQ ID NO: 4012; WAN024C5Z; Start 9; Stop 33
acaaacacttgaagaaggaatgaag

SEQ ID NO: 370304 - DNA, 25 bp, Artificial
  probe
  misc_feature (1)..(25): SEQ ID NO: 4012; WAN024C5Z; Start 8; Stop 32
cacaaacacttgaagaaggaatgaa

SEQ ID NO: 370305 - DNA, 25 bp, Artificial
  probe
  misc_feature (1)..(25): SEQ ID NO: 4012; WAN024C5Z; Start 10; Stop 34
caaacacttgaagaaggaatgaaga

SEQ ID NO: 370306 - DNA, 25 bp, Artificial
  probe
  misc_feature (1)..(25): SEQ ID NO: 4012; WAN024C5Z; Start 234; Stop 258
agaggtcgctattgtcaatttaagt

SEQ ID NO: 370307 - DNA, 25 bp, Artificial
  probe
  misc_feature (1)..(25): SEQ ID NO: 4012; WAN024C5Z; Start 11; Stop 35
aaacacttgaagaaggaatgaagaa

SEQ ID NO: 370308 - DNA, 25 bp, Artificial
  probe
  misc_feature (1)..(25): SEQ ID NO: 4012; WAN024C5Z; Start 92; Stop 116
gaatagtaaataaacacggtcaagc

SEQ ID NO: 370309 - DNA, 25 bp, Artificial
  probe
  misc_feature (1)..(25): SEQ ID NO: 4012; WAN024C5Z; Start 233; Stop 257
aagaggtcgctattgtcaatttaag

SEQ ID NO: 370310 - DNA, 25 bp, Artificial
  probe
  misc_feature (1)..(25): SEQ ID NO: 4012; WAN024C5Z; Start 232; Stop 256
gaagaggtcgctattgtcaatttaa

SEQ ID NO: 370311 - DNA, 25 bp, Artificial
  probe
  misc_feature (1)..(25): SEQ ID NO: 4012; WAN024C5Z; Start 6; Stop 30
gacacaaacacttgaagaaggaatg

SEQ ID NO: 370312 - DNA, 25 bp, Artificial
  probe
  misc_feature (1)..(25): SEQ ID NO: 4012; WAN024C5Z; Start 138; Stop 162
aagtatattcgctttaccttcgctg

SEQ ID NO: 370313 - DNA, 25 bp, Artificial
  probe
  misc_feature (1)..(25): SEQ ID NO: 4012; WAN024C5Z; Start 137; Stop 161
caagtatattcgctttaccttcgct

SEQ ID NO: 370314 - DNA, 25 bp, Artificial
  probe
  misc_feature (1)..(25): SEQ ID NO: 4012; WAN024C5Z; Start 91; Stop 115
cgaatagtaaataaacacggtcaag

SEQ ID NO: 370315 - DNA, 25 bp, Artificial
  probe
  misc_feature (1)..(25): SEQ ID NO: 4012; WAN024C5Z; Start 7; Stop 31
acacaaacacttgaagaaggaatga

SEQ ID NO: 370316 - DNA, 25 bp, Artificial
  probe
  misc_feature (1)..(25): SEQ ID NO: 4012; WAN024C5Z; Start 5; Stop 29
tgacacaaacacttgaagaaggaat

SEQ ID NO: 370317 - DNA, 25 bp, Artificial
  probe
  misc_feature (1)..(25): SEQ ID NO: 4012; WAN024C5Z; Start 4; Stop 28
atgacacaaacacttgaagaaggaa

SEQ ID NO: 370318 - DNA, 25 bp, Artificial
  probe
  misc_feature (1)..(25): SEQ ID NO: 4012; WAN024C5Z; Start 235; Stop 259
gaggtcgctattgtcaatttaagta

SEQ ID NO: 370319 - DNA, 25 bp, Artificial
  probe
  misc_feature (1)..(25): SEQ ID NO: 4012; WAN024C5Z; Start 231; Stop 255
tgaagaggtcgctattgtcaattta

SEQ ID NO: 370320 - DNA, 25 bp, Artificial
  probe
  misc_feature (1)..(25): SEQ ID NO: 4012; WAN024C5Z; Start 3; Stop 27
gatgacacaaacacttgaagaagga

SEQ ID NO: 370321 - DNA, 25 bp, Artificial
  probe
  misc_feature (1)..(25): SEQ ID NO: 4012; WAN024C5Z; Start 236; Stop 260
aggtcgctattgtcaatttaagtaa

SEQ ID NO: 370322 - DNA, 25 bp, Artificial
  probe
  misc_feature (1)..(25): SEQ ID NO: 4012; WAN024C5Z; Start 18; Stop 42
tgaagaaggaatgaagaatcaaagt

SEQ ID NO: 370323 - DNA, 25 bp, Artificial
  probe
  misc_feature (1)..(25): SEQ ID NO: 4012; WAN024C5Z; Start 2; Stop 26
tgatgacacaaacacttgaagaagg

SEQ ID NO: 370324 - DNA, 25 bp, Artificial
  probe
  misc_feature (1)..(25): SEQ ID NO: 4012; WAN024C5Z; Start 1; Stop 25
gtgatgacacaaacacttgaagaag

SEQ ID NO: 370325 - DNA, 25 bp, Artificial
  probe
  misc_feature (1)..(25): SEQ ID NO: 4012; WAN024C5Z; Start 237; Stop 261
ggtcgctattgtcaatttaagtaaa

SEQ ID NO: 370326 - DNA, 25 bp, Artificial
  probe
  misc_feature (1)..(25): SEQ ID NO: 4012; WAN024C5Z; Start 24; Stop 48
aggaatgaagaatcaaagtaaatgc

SEQ ID NO: 370327 - DNA, 25 bp, Artificial
  probe
  misc_feature (1)..(25): SEQ ID NO: 4012; WAN024C5Z; Start 15; Stop 39
acttgaagaaggaatgaagaatcaa

SEQ ID NO: 370328 - DNA, 25 bp, Artificial
  probe
  misc_feature (1)..(25): SEQ ID NO: 4012; WAN024C5Z; Start 229; Stop 253
gttgaagaggtcgctattgtcaatt

SEQ ID NO: 370329 - DNA, 25 bp, Artificial
  probe
  misc_feature (1)..(25): SEQ ID NO: 4012; WAN024C5Z; Start 139; Stop 163
agtatattcgctttaccttcgctgg

SEQ ID NO: 370330 - DNA, 25 bp, Artificial
  probe
  misc_feature (1)..(25): SEQ ID NO: 4013; WAN024D6Y; Start 771; Stop 795
aactgaaggatacatacgcttagag

SEQ ID NO: 370331 - DNA, 25 bp, Artificial
  probe
  misc_feature (1)..(25): SEQ ID NO: 4013; WAN024D6Y; Start 595; Stop 619
acattatcagataggattgctgtgt

SEQ ID NO: 370332 - DNA, 25 bp, Artificial
  probe
  misc_feature (1)..(25): SEQ ID NO: 4013; WAN024D6Y; Start 596; Stop 620
cattatcagataggattgctgtgtt

SEQ ID NO: 370333 - DNA, 25 bp, Artificial
  probe
  misc_feature (1)..(25): SEQ ID NO: 4013; WAN024D6Y; Start 594; Stop 618
aacattatcagataggattgctgtg

SEQ ID NO: 370334 - DNA, 25 bp, Artificial
  probe
  misc_feature (1)..(25): SEQ ID NO: 4013; WAN024D6Y; Start 766; Stop 790
aaagaaactgaaggatacatacgct

SEQ ID NO: 370335 - DNA, 25 bp, Artificial
  probe
  misc_feature (1)..(25): SEQ ID NO: 4013; WAN024D6Y; Start 624; Stop 648
taatggatttattgagcaagttggc

SEQ ID NO: 370336 - DNA, 25 bp, Artificial
  probe
  misc_feature (1)..(25): SEQ ID NO: 4013; WAN024D6Y; Start 767; Stop 791
aagaaactgaaggatacatacgctt

SEQ ID NO: 370337 - DNA, 25 bp, Artificial
  probe
  misc_feature (1)..(25): SEQ ID NO: 4013; WAN024D6Y; Start 770; Stop 794
aaactgaaggatacatacgcttaga

SEQ ID NO: 370338 - DNA, 25 bp, Artificial
  probe
  misc_feature (1)..(25): SEQ ID NO: 4013; WAN024D6Y; Start 768; Stop 792
agaaactgaaggatacatacgctta

SEQ ID NO: 370339 - DNA, 25 bp, Artificial
  probe
  misc_feature (1)..(25): SEQ ID NO: 4013; WAN024D6Y; Start 765; Stop 789
taaagaaactgaaggatacatacgc

SEQ ID NO: 370340 - DNA, 25 bp, Artificial
  probe
  misc_feature (1)..(25): SEQ ID NO: 4013; WAN024D6Y; Start 769; Stop 793
gaaactgaaggatacatacgcttag

SEQ ID NO: 370341 - DNA, 25 bp, Artificial
  probe
  misc_feature (1)..(25): SEQ ID NO: 4013; WAN024D6Y; Start 550; Stop 574
ggaatcactactctttatgtcacac

SEQ ID NO: 370342 - DNA, 25 bp, Artificial
  probe
  misc_feature (1)..(25): SEQ ID NO: 4013; WAN024D6Y; Start 549; Stop 573
aggaatcactactctttatgtcaca

SEQ ID NO: 370343 - DNA, 25 bp, Artificial
  probe
  misc_feature (1)..(25): SEQ ID NO: 4013; WAN024D6Y; Start 607; Stop 631
aggattgctgtgtttaataatggat

SEQ ID NO: 370344 - DNA, 25 bp, Artificial
  probe
  misc_feature (1)..(25): SEQ ID NO: 4013; WAN024D6Y; Start 368; Stop 392
cagacgagcaactaaaccgaaatat

SEQ ID NO: 370345 - DNA, 25 bp, Artificial
  probe
  misc_feature (1)..(25): SEQ ID NO: 4013; WAN024D6Y; Start 593; Stop 617
taacattatcagataggattgctgt

SEQ ID NO: 370346 - DNA, 25 bp, Artificial
  probe
  misc_feature (1)..(25): SEQ ID NO: 4013; WAN024D6Y; Start 482; Stop 506
tatcaaacctagatgccaaactacg

SEQ ID NO: 370347 - DNA, 25 bp, Artificial
  probe
  misc_feature (1)..(25): SEQ ID NO: 4013; WAN024D6Y; Start 788; Stop 812
gcttagagcgtgttaagttagagaa

SEQ ID NO: 370348 - DNA, 25 bp, Artificial
  probe
  misc_feature (1)..(25): SEQ ID NO: 4013; WAN024D6Y; Start 579; Stop 603
tcaagaagaagcattaacattatca

SEQ ID NO: 370349 - DNA, 25 bp, Artificial
  probe
  misc_feature (1)..(25): SEQ ID NO: 4013; WAN024D6Y; Start 227; Stop 251
ttggtattgtgtttcaaagttatgc

SEQ ID NO: 370350 - DNA, 25 bp, Artificial
  probe
  misc_feature (1)..(25): SEQ ID NO: 4013; WAN024D6Y; Start 625; Stop 649
aatggatttattgagcaagttggca

SEQ ID NO: 370351 - DNA, 25 bp, Artificial
  probe
  misc_feature (1)..(25): SEQ ID NO: 4013; WAN024D6Y; Start 481; Stop 505
ttatcaaacctagatgccaaactac

SEQ ID NO: 370352 - DNA, 25 bp, Artificial
  probe
  misc_feature (1)..(25): SEQ ID NO: 4013; WAN024D6Y; Start 361; Stop 385
aatatctcagacgagcaactaaacc

SEQ ID NO: 370353 - DNA, 25 bp, Artificial
  probe
  misc_feature (1)..(25): SEQ ID NO: 4013; WAN024D6Y; Start 472; Stop 496
gatgaaccgttatcaaacctagatg

SEQ ID NO: 370354 - DNA, 25 bp, Artificial
  probe
  misc_feature (1)..(25): SEQ ID NO: 4013; WAN024D6Y; Start 471; Stop 495
ggatgaaccgttatcaaacctagat

SEQ ID NO: 370355 - DNA, 25 bp, Artificial
  probe
  misc_feature (1)..(25): SEQ ID NO: 4013; WAN024D6Y; Start 606; Stop 630
taggattgctgtgtttaataatgga

SEQ ID NO: 370356 - DNA, 25 bp, Artificial
  probe
  misc_feature (1)..(25): SEQ ID NO: 4013; WAN024D6Y; Start 608; Stop 632
ggattgctgtgtttaataatggatt

SEQ ID NO: 370357 - DNA, 25 bp, Artificial
  probe
  misc_feature (1)..(25): SEQ ID NO: 4013; WAN024D6Y; Start 469; Stop 493
ttggatgaaccgttatcaaacctag

SEQ ID NO: 370358 - DNA, 25 bp, Artificial
  probe
  misc_feature (1)..(25): SEQ ID NO: 4013; WAN024D6Y; Start 480; Stop 504
gttatcaaacctagatgccaaacta

SEQ ID NO: 370359 - DNA, 25 bp, Artificial
  probe
  misc_feature (1)..(25): SEQ ID NO: 4013; WAN024D6Y; Start 580; Stop 604
caagaagaagcattaacattatcag

SEQ ID NO: 370360 - DNA, 25 bp, Artificial
  probe
  misc_feature (1)..(25): SEQ ID NO: 4013; WAN024D6Y; Start 646; Stop 670
ggcacgccgtatgatatttataatc

SEQ ID NO: 370361 - DNA, 25 bp, Artificial
  probe
  misc_feature (1)..(25): SEQ ID NO: 4013; WAN024D6Y; Start 479; Stop 503
cgttatcaaacctagatgccaaact

SEQ ID NO: 370362 - DNA, 25 bp, Artificial
  probe
  misc_feature (1)..(25): SEQ ID NO: 4013; WAN024D6Y; Start 645; Stop 669
tggcacgccgtatgatatttataat

SEQ ID NO: 370363 - DNA, 25 bp, Artificial
  probe
  misc_feature (1)..(25): SEQ ID NO: 4014; WAN024GHM; Start 146; Stop 170
cgatgattgtagttgacatgatgtg

SEQ ID NO: 370364 - DNA, 25 bp, Artificial
  probe
  misc_feature (1)..(25): SEQ ID NO: 4014; WAN024GHM; Start 147; Stop 171
gatgattgtagttgacatgatgtgt

SEQ ID NO: 370365 - DNA, 25 bp, Artificial
  probe
  misc_feature (1)..(25): SEQ ID NO: 4014; WAN024GHM; Start 143; Stop 167
aaccgatgattgtagttgacatgat

SEQ ID NO: 370366 - DNA, 25 bp, Artificial
  probe
  misc_feature (1)..(25): SEQ ID NO: 4014; WAN024GHM; Start 145; Stop 169
ccgatgattgtagttgacatgatgt

SEQ ID NO: 370367 - DNA, 25 bp, Artificial
  probe
  misc_feature (1)..(25): SEQ ID NO: 4014; WAN024GHM; Start 144; Stop 168
accgatgattgtagttgacatgatg

SEQ ID NO: 370368 - DNA, 25 bp, Artificial
  probe
  misc_feature (1)..(25): SEQ ID NO: 4014; WAN024GHM; Start 140; Stop 164
ggaaaccgatgattgtagttgacat

SEQ ID NO: 370369 - DNA, 25 bp, Artificial
  probe
  misc_feature (1)..(25): SEQ ID NO: 4014; WAN024GHM; Start 141; Stop 165
gaaaccgatgattgtagttgacatg

SEQ ID NO: 370370 - DNA, 25 bp, Artificial
  probe
  misc_feature (1)..(25): SEQ ID NO: 4014; WAN024GHM; Start 142; Stop 166
aaaccgatgattgtagttgacatga

SEQ ID NO: 370371 - DNA, 25 bp, Artificial
  probe
  misc_feature (1)..(25): SEQ ID NO: 4014; WAN024GHM; Start 137; Stop 161
gagggaaaccgatgattgtagttga

SEQ ID NO: 370372 - DNA, 25 bp, Artificial
  probe
  misc_feature (1)..(25): SEQ ID NO: 4014; WAN024GHM; Start 138; Stop 162
agggaaaccgatgattgtagttgac

SEQ ID NO: 370373 - DNA, 25 bp, Artificial
  probe
  misc_feature (1)..(25): SEQ ID NO: 4014; WAN024GHM; Start 133; Stop 157
aaacgagggaaaccgatgattgtag

SEQ ID NO: 370374 - DNA, 25 bp, Artificial
  probe
  misc_feature (1)..(25): SEQ ID NO: 4014; WAN024GHM; Start 139; Stop 163
gggaaaccgatgattgtagttgaca

SEQ ID NO: 370375 - DNA, 25 bp, Artificial
  probe
  misc_feature (1)..(25): SEQ ID NO: 4014; WAN024GHM; Start 132; Stop 156
caaacgagggaaaccgatgattgta

SEQ ID NO: 370376 - DNA, 25 bp, Artificial
  probe
  misc_feature (1)..(25): SEQ ID NO: 4014; WAN024GHM; Start 148; Stop 172
atgattgtagttgacatgatgtgtc

SEQ ID NO: 370377 - DNA, 25 bp, Artificial
  probe
  misc_feature (1)..(25): SEQ ID NO: 4014; WAN024GHM; Start 151; Stop 175
attgtagttgacatgatgtgtcctc

SEQ ID NO: 370378 - DNA, 25 bp, Artificial
  probe
  misc_feature (1)..(25): SEQ ID NO: 4014; WAN024GHM; Start 150; Stop 174
gattgtagttgacatgatgtgtcct

SEQ ID NO: 370379 - DNA, 25 bp, Artificial
  probe
  misc_feature (1)..(25): SEQ ID NO: 4014; WAN024GHM; Start 136; Stop 160
cgagggaaaccgatgattgtagttg

SEQ ID NO: 370380 - DNA, 25 bp, Artificial
  probe
  misc_feature (1)..(25): SEQ ID NO: 4014; WAN024GHM; Start 149; Stop 173
tgattgtagttgacatgatgtgtcc

SEQ ID NO: 370381 - DNA, 25 bp, Artificial
  probe
  misc_feature (1)..(25): SEQ ID NO: 4014; WAN024GHM; Start 134; Stop 158
aacgagggaaaccgatgattgtagt

SEQ ID NO: 370382 - DNA, 25 bp, Artificial
  probe
  misc_feature (1)..(25): SEQ ID NO: 4014; WAN024GHM; Start 135; Stop 159
acgagggaaaccgatgattgtagtt

SEQ ID NO: 370383 - DNA, 25 bp, Artificial
  probe
  misc_feature (1)..(25): SEQ ID NO: 4014; WAN024GHM; Start 171; Stop 195
tcctccaaaatttgttgttgaaact

SEQ ID NO: 370384 - DNA, 25 bp, Artificial
  probe
  misc_feature (1)..(25): SEQ ID NO: 4014; WAN024GHM; Start 170; Stop 194
gtcctccaaaatttgttgttgaaac

SEQ ID NO: 370385 - DNA, 25 bp, Artificial
  probe
  misc_feature (1)..(25): SEQ ID NO: 4014; WAN024GHM; Start 169; Stop 193
tgtcctccaaaatttgttgttgaaa

SEQ ID NO: 370386 - DNA, 25 bp, Artificial
  probe
  misc_feature (1)..(25): SEQ ID NO: 4014; WAN024GHM; Start 163; Stop 187
atgatgtgtcctccaaaatttgttg

SEQ ID NO: 370387 - DNA, 25 bp, Artificial
  probe
  misc_feature (1)..(25): SEQ ID NO: 4014; WAN024GHM; Start 162; Stop 186
catgatgtgtcctccaaaatttgtt

SEQ ID NO: 370388 - DNA, 25 bp, Artificial
  probe
  misc_feature (1)..(25): SEQ ID NO: 4014; WAN024GHM; Start 165; Stop 189
gatgtgtcctccaaaatttgttgtt

SEQ ID NO: 370389 - DNA, 25 bp, Artificial
  probe
  misc_feature (1)..(25): SEQ ID NO: 4014; WAN024GHM; Start 168; Stop 192
gtgtcctccaaaatttgttgttgaa

SEQ ID NO: 370390 - DNA, 25 bp, Artificial
  probe
  misc_feature (1)..(25): SEQ ID NO: 4014; WAN024GHM; Start 65; Stop 89
gttcttcttctgagatttcttttct

SEQ ID NO: 370391 - DNA, 25 bp, Artificial
  probe
  misc_feature (1)..(25): SEQ ID NO: 4014; WAN024GHM; Start 64; Stop 88
agttcttcttctgagatttcttttc

SEQ ID NO: 370392 - DNA, 25 bp, Artificial
  probe
  misc_feature (1)..(25): SEQ ID NO: 4014; WAN024GHM; Start 154; Stop 178
gtagttgacatgatgtgtcctccaa

SEQ ID NO: 370393 - DNA, 25 bp, Artificial
  probe
  misc_feature (1)..(25): SEQ ID NO: 4014; WAN024GHM; Start 152; Stop 176
ttgtagttgacatgatgtgtcctcc

SEQ ID NO: 370394 - DNA, 25 bp, Artificial
  probe
  misc_feature (1)..(25): SEQ ID NO: 4014; WAN024GHM; Start 166; Stop 190
atgtgtcctccaaaatttgttgttg

SEQ ID NO: 370395 - DNA, 25 bp, Artificial
  probe
  misc_feature (1)..(25): SEQ ID NO: 4014; WAN024GHM; Start 172; Stop 196
cctccaaaatttgttgttgaaacta

SEQ ID NO: 370396 - DNA, 25 bp, Artificial
  probe
  misc_feature (1)..(25): SEQ ID NO: 4015; WAN024CFZ; Start 125; Stop 149
atgaccgtgaatttacaattactgt

SEQ ID NO: 370397 - DNA, 25 bp, Artificial
  probe
  misc_feature (1)..(25): SEQ ID NO: 4015; WAN024CFZ; Start 124; Stop 148
aatgaccgtgaatttacaattactg

SEQ ID NO: 370398 - DNA, 25 bp, Artificial
  probe
  misc_feature (1)..(25): SEQ ID NO: 4015; WAN024CFZ; Start 111; Stop 135
acctttaaacataaatgaccgtgaa

SEQ ID NO: 370399 - DNA, 25 bp, Artificial
  probe
  misc_feature (1)..(25): SEQ ID NO: 4015; WAN024CFZ; Start 110; Stop 134
tacctttaaacataaatgaccgtga

SEQ ID NO: 370400 - DNA, 25 bp, Artificial
  probe
  misc_feature (1)..(25): SEQ ID NO: 4015; WAN024CFZ; Start 123; Stop 147
aaatgaccgtgaatttacaattact

SEQ ID NO: 370401 - DNA, 25 bp, Artificial
  probe
  misc_feature (1)..(25): SEQ ID NO: 4015; WAN024CFZ; Start 109; Stop 133
ctacctttaaacataaatgaccgtg

SEQ ID NO: 370402 - DNA, 25 bp, Artificial
  probe
  misc_feature (1)..(25): SEQ ID NO: 4015; WAN024CFZ; Start 108; Stop 132
tctacctttaaacataaatgaccgt

SEQ ID NO: 370403 - DNA, 25 bp, Artificial
  probe
  misc_feature (1)..(25): SEQ ID NO: 4015; WAN024CFZ; Start 112; Stop 136
cctttaaacataaatgaccgtgaat

SEQ ID NO: 370404 - DNA, 25 bp, Artificial
  probe
  misc_feature (1)..(25): SEQ ID NO: 4015; WAN024CFZ; Start 126; Stop 150
tgaccgtgaatttacaattactgta

SEQ ID NO: 370405 - DNA, 25 bp, Artificial
  probe
  misc_feature (1)..(25): SEQ ID NO: 4015; WAN024CFZ; Start 69; Stop 93
attggatttgctaaaagacgattca

SEQ ID NO: 370406 - DNA, 25 bp, Artificial
  probe
  misc_feature (1)..(25): SEQ ID NO: 4015; WAN024CFZ; Start 65; Stop 89
ttgtattggatttgctaaaagacga

SEQ ID NO: 370407 - DNA, 25 bp, Artificial
  probe
  misc_feature (1)..(25): SEQ ID NO: 4015; WAN024CFZ; Start 128; Stop 152
accgtgaatttacaattactgtaga

SEQ ID NO: 370408 - DNA, 25 bp, Artificial
  probe
  misc_feature (1)..(25): SEQ ID NO: 4015; WAN024CFZ; Start 66; Stop 90
tgtattggatttgctaaaagacgat

SEQ ID NO: 370409 - DNA, 25 bp, Artificial
  probe
  misc_feature (1)..(25): SEQ ID NO: 4015; WAN024CFZ; Start 140; Stop 164
caattactgtagaaaaggaggtcac

SEQ ID NO: 370410 - DNA, 25 bp, Artificial
  probe
  misc_feature (1)..(25): SEQ ID NO: 4015; WAN024CFZ; Start 127; Stop 151
gaccgtgaatttacaattactgtag

SEQ ID NO: 370411 - DNA, 25 bp, Artificial
  probe
  misc_feature (1)..(25): SEQ ID NO: 4015; WAN024CFZ; Start 70; Stop 94
ttggatttgctaaaagacgattcaa

SEQ ID NO: 370412 - DNA, 25 bp, Artificial
  probe
  misc_feature (1)..(25): SEQ ID NO: 4015; WAN024CFZ; Start 64; Stop 88
attgtattggatttgctaaaagacg

SEQ ID NO: 370413 - DNA, 25 bp, Artificial
  probe
  misc_feature (1)..(25): SEQ ID NO: 4015; WAN024CFZ; Start 107; Stop 131
ttctacctttaaacataaatgaccg

SEQ ID NO: 370414 - DNA, 25 bp, Artificial
  probe
  misc_feature (1)..(25): SEQ ID NO: 4015; WAN024CFZ; Start 67; Stop 91
gtattggatttgctaaaagacgatt

SEQ ID NO: 370415 - DNA, 25 bp, Artificial
  probe
  misc_feature (1)..(25): SEQ ID NO: 4015; WAN024CFZ; Start 141; Stop 165
aattactgtagaaaaggaggtcaca

SEQ ID NO: 370416 - DNA, 25 bp, Artificial
  probe
  misc_feature (1)..(25): SEQ ID NO: 4015; WAN024CFZ; Start 139; Stop 163
acaattactgtagaaaaggaggtca

SEQ ID NO: 370417 - DNA, 25 bp, Artificial
  probe
  misc_feature (1)..(25): SEQ ID NO: 4015; WAN024CFZ; Start 118; Stop 142
aacataaatgaccgtgaatttacaa

SEQ ID NO: 370418 - DNA, 25 bp, Artificial
  probe
  misc_feature (1)..(25): SEQ ID NO: 4015; WAN024CFZ; Start 117; Stop 141
aaacataaatgaccgtgaatttaca

SEQ ID NO: 370419 - DNA, 25 bp, Artificial
  probe
  misc_feature (1)..(25): SEQ ID NO: 4015; WAN024CFZ; Start 68; Stop 92
tattggatttgctaaaagacgattc

SEQ ID NO: 370420 - DNA, 25 bp, Artificial
  probe
  misc_feature (1)..(25): SEQ ID NO: 4015; WAN024CFZ; Start 129; Stop 153
ccgtgaatttacaattactgtagaa

SEQ ID NO: 370421 - DNA, 25 bp, Artificial
  probe
  misc_feature (1)..(25): SEQ ID NO: 4015; WAN024CFZ; Start 119; Stop 143
acataaatgaccgtgaatttacaat

SEQ ID NO: 370422 - DNA, 25 bp, Artificial
  probe
  misc_feature (1)..(25): SEQ ID NO: 4015; WAN024CFZ; Start 113; Stop 137
ctttaaacataaatgaccgtgaatt

SEQ ID NO: 370423 - DNA, 25 bp, Artificial
  probe
  misc_feature (1)..(25): SEQ ID NO: 4015; WAN024CFZ; Start 50; Stop 74
agcaagttttagaaattgtattgga

SEQ ID NO: 370424 - DNA, 25 bp, Artificial
  probe
  misc_feature (1)..(25): SEQ ID NO: 4015; WAN024CFZ; Start 120; Stop 144
cataaatgaccgtgaatttacaatt

SEQ ID NO: 370425 - DNA, 25 bp, Artificial
  probe
  misc_feature (1)..(25): SEQ ID NO: 4015; WAN024CFZ; Start 106; Stop 130
gttctacctttaaacataaatgacc

SEQ ID NO: 370426 - DNA, 25 bp, Artificial
  probe
  misc_feature (1)..(25): SEQ ID NO: 4015; WAN024CFZ; Start 114; Stop 138
tttaaacataaatgaccgtgaattt

SEQ ID NO: 370427 - DNA, 25 bp, Artificial
  probe
  misc_feature (1)..(25): SEQ ID NO: 4015; WAN024CFZ; Start 71; Stop 95
tggatttgctaaaagacgattcaaa

SEQ ID NO: 370428 - DNA, 25 bp, Artificial
  probe
  misc_feature (1)..(25): SEQ ID NO: 4015; WAN024CFZ; Start 38; Stop 62
tgattttaggtaagcaagttttaga

SEQ ID NO: 370429 - DNA, 25 bp, Artificial
  probe
  misc_feature (1)..(25): SEQ ID NO: 4016; WAN024FFJ; Start 226; Stop 250
tggctattattactacttatcgctt

SEQ ID NO: 370430 - DNA, 25 bp, Artificial
  probe
  misc_feature (1)..(25): SEQ ID NO: 4016; WAN024FFJ; Start 225; Stop 249
ttggctattattactacttatcgct

SEQ ID NO: 370431 - DNA, 25 bp, Artificial
  probe
  misc_feature (1)..(25): SEQ ID NO: 4016; WAN024FFJ; Start 117; Stop 141
gatttacatcaccctctatgctctt

SEQ ID NO: 370432 - DNA, 25 bp, Artificial
  probe
  misc_feature (1)..(25): SEQ ID NO: 4016; WAN024FFJ; Start 118; Stop 142
atttacatcaccctctatgctcttt

SEQ ID NO: 370433 - DNA, 25 bp, Artificial
  probe
  misc_feature (1)..(25): SEQ ID NO: 4016; WAN024FFJ; Start 112; Stop 136
tactggatttacatcaccctctatg

SEQ ID NO: 370434 - DNA, 25 bp, Artificial
  probe
  misc_feature (1)..(25): SEQ ID NO: 4016; WAN024FFJ; Start 110; Stop 134
tttactggatttacatcaccctcta

SEQ ID NO: 370435 - DNA, 25 bp, Artificial
  probe
  misc_feature (1)..(25): SEQ ID NO: 4016; WAN024FFJ; Start 111; Stop 135
ttactggatttacatcaccctctat

SEQ ID NO: 370436 - DNA, 25 bp, Artificial
  probe
  misc_feature (1)..(25): SEQ ID NO: 4016; WAN024FFJ; Start 116; Stop 140
ggatttacatcaccctctatgctct

SEQ ID NO: 370437 - DNA, 25 bp, Artificial
  probe
  misc_feature (1)..(25): SEQ ID NO: 4016; WAN024FFJ; Start 115; Stop 139
tggatttacatcaccctctatgctc

SEQ ID NO: 370438 - DNA, 25 bp, Artificial
  probe
  misc_feature (1)..(25): SEQ ID NO: 4016; WAN024FFJ; Start 114; Stop 138
ctggatttacatcaccctctatgct

SEQ ID NO: 370439 - DNA, 25 bp, Artificial
  probe
  misc_feature (1)..(25): SEQ ID NO: 4016; WAN024FFJ; Start 113; Stop 137
actggatttacatcaccctctatgc

SEQ ID NO: 370440 - DNA, 25 bp, Artificial
  probe
  misc_feature (1)..(25): SEQ ID NO: 4016; WAN024FFJ; Start 224; Stop 248
tttggctattattactacttatcgc

SEQ ID NO: 370441 - DNA, 25 bp, Artificial
  probe
  misc_feature (1)..(25): SEQ ID NO: 4016; WAN024FFJ; Start 109; Stop 133
ttttactggatttacatcaccctct

SEQ ID NO: 370442 - DNA, 25 bp, Artificial
  probe
  misc_feature (1)..(25): SEQ ID NO: 4016; WAN024FFJ; Start 227; Stop 251
ggctattattactacttatcgcttt

SEQ ID NO: 370443 - DNA, 25 bp, Artificial
  probe
  misc_feature (1)..(25): SEQ ID NO: 4016; WAN024FFJ; Start 119; Stop 143
tttacatcaccctctatgctctttt

SEQ ID NO: 370444 - DNA, 25 bp, Artificial
  probe
  misc_feature (1)..(25): SEQ ID NO: 4016; WAN024FFJ; Start 209; Stop 233
tcaagttatggggtatttggctatt

SEQ ID NO: 370445 - DNA, 25 bp, Artificial
  probe
  misc_feature (1)..(25): SEQ ID NO: 4016; WAN024FFJ; Start 208; Stop 232
atcaagttatggggtatttggctat

SEQ ID NO: 370446 - DNA, 25 bp, Artificial
  probe
  misc_feature (1)..(25): SEQ ID NO: 4016; WAN024FFJ; Start 206; Stop 230
atatcaagttatggggtatttggct

SEQ ID NO: 370447 - DNA, 25 bp, Artificial
  probe
  misc_feature (1)..(25): SEQ ID NO: 4016; WAN024FFJ; Start 207; Stop 231
tatcaagttatggggtatttggcta

SEQ ID NO: 370448 - DNA, 25 bp, Artificial
  probe
  misc_feature (1)..(25): SEQ ID NO: 4016; WAN024FFJ; Start 185; Stop 209
tcgtcttgagaaatttgacagatat

SEQ ID NO: 370449 - DNA, 25 bp, Artificial
  probe
  misc_feature (1)..(25): SEQ ID NO: 4016; WAN024FFJ; Start 184; Stop 208
atcgtcttgagaaatttgacagata

SEQ ID NO: 370450 - DNA, 25 bp, Artificial
  probe
  misc_feature (1)..(25): SEQ ID NO: 4016; WAN024FFJ; Start 183; Stop 207
tatcgtcttgagaaatttgacagat

SEQ ID NO: 370451 - DNA, 25 bp, Artificial
  probe
  misc_feature (1)..(25): SEQ ID NO: 4016; WAN024FFJ; Start 182; Stop 206
atatcgtcttgagaaatttgacaga

SEQ ID NO: 370452 - DNA, 25 bp, Artificial
  probe
  misc_feature (1)..(25): SEQ ID NO: 4016; WAN024FFJ; Start 180; Stop 204
caatatcgtcttgagaaatttgaca

SEQ ID NO: 370453 - DNA, 25 bp, Artificial
  probe
  misc_feature (1)..(25): SEQ ID NO: 4016; WAN024FFJ; Start 210; Stop 234
caagttatggggtatttggctatta

SEQ ID NO: 370454 - DNA, 25 bp, Artificial
  probe
  misc_feature (1)..(25): SEQ ID NO: 4016; WAN024FFJ; Start 219; Stop 243
gggtatttggctattattactactt

SEQ ID NO: 370455 - DNA, 25 bp, Artificial
  probe
  misc_feature (1)..(25): SEQ ID NO: 4016; WAN024FFJ; Start 217; Stop 241
tggggtatttggctattattactac

SEQ ID NO: 370456 - DNA, 25 bp, Artificial
  probe
  misc_feature (1)..(25): SEQ ID NO: 4016; WAN024FFJ; Start 186; Stop 210
cgtcttgagaaatttgacagatatc

SEQ ID NO: 370457 - DNA, 25 bp, Artificial
  probe
  misc_feature (1)..(25): SEQ ID NO: 4016; WAN024FFJ; Start 181; Stop 205
aatatcgtcttgagaaatttgacag

SEQ ID NO: 370458 - DNA, 25 bp, Artificial
  probe
  misc_feature (1)..(25): SEQ ID NO: 4016; WAN024FFJ; Start 212; Stop 236
agttatggggtatttggctattatt

SEQ ID NO: 370459 - DNA, 25 bp, Artificial
  probe
  misc_feature (1)..(25): SEQ ID NO: 4016; WAN024FFJ; Start 211; Stop 235
aagttatggggtatttggctattat

SEQ ID NO: 370460 - DNA, 25 bp, Artificial
  probe
  misc_feature (1)..(25): SEQ ID NO: 4016; WAN024FFJ; Start 218; Stop 242
ggggtatttggctattattactact

SEQ ID NO: 370461 - DNA, 25 bp, Artificial
  probe
  misc_feature (1)..(25): SEQ ID NO: 4016; WAN024FFJ; Start 235; Stop 259
ttactacttatcgcttttgctagtg

SEQ ID NO: 370462 - DNA, 25 bp, Artificial
  probe
  misc_feature (1)..(25): SEQ ID NO: 4017; WAN024DZF; Start 71; Stop 95
taattctattaacacgggcagtagg

SEQ ID NO: 370463 - DNA, 25 bp, Artificial
  probe
  misc_feature (1)..(25): SEQ ID NO: 4017; WAN024DZF; Start 68; Stop 92
ccataattctattaacacgggcagt

SEQ ID NO: 370464 - DNA, 25 bp, Artificial
  probe
  misc_feature (1)..(25): SEQ ID NO: 4017; WAN024DZF; Start 117; Stop 141
tttggagaccttagttctaccttta

SEQ ID NO: 370465 - DNA, 25 bp, Artificial
  probe
  misc_feature (1)..(25): SEQ ID NO: 4017; WAN024DZF; Start 118; Stop 142
ttggagaccttagttctacctttaa

SEQ ID NO: 370466 - DNA, 25 bp, Artificial
  probe
  misc_feature (1)..(25): SEQ ID NO: 4017; WAN024DZF; Start 76; Stop 100
ctattaacacgggcagtaggaattg

SEQ ID NO: 370467 - DNA, 25 bp, Artificial
  probe
  misc_feature (1)..(25): SEQ ID NO: 4017; WAN024DZF; Start 75; Stop 99
tctattaacacgggcagtaggaatt

SEQ ID NO: 370468 - DNA, 25 bp, Artificial
  probe
  misc_feature (1)..(25): SEQ ID NO: 4017; WAN024DZF; Start 72; Stop 96
aattctattaacacgggcagtagga

SEQ ID NO: 370469 - DNA, 25 bp, Artificial
  probe
  misc_feature (1)..(25): SEQ ID NO: 4017; WAN024DZF; Start 69; Stop 93
cataattctattaacacgggcagta

SEQ ID NO: 370470 - DNA, 25 bp, Artificial
  probe
  misc_feature (1)..(25): SEQ ID NO: 4017; WAN024DZF; Start 61; Stop 85
acacccgccataattctattaacac

SEQ ID NO: 370471 - DNA, 25 bp, Artificial
  probe
  misc_feature (1)..(25): SEQ ID NO: 4017; WAN024DZF; Start 60; Stop 84
cacacccgccataattctattaaca

SEQ ID NO: 370472 - DNA, 25 bp, Artificial
  probe
  misc_feature (1)..(25): SEQ ID NO: 4017; WAN024DZF; Start 74; Stop 98
ttctattaacacgggcagtaggaat

SEQ ID NO: 370473 - DNA, 25 bp, Artificial
  probe
  misc_feature (1)..(25): SEQ ID NO: 4017; WAN024DZF; Start 73; Stop 97
attctattaacacgggcagtaggaa

SEQ ID NO: 370474 - DNA, 25 bp, Artificial
  probe
  misc_feature (1)..(25): SEQ ID NO: 4017; WAN024DZF; Start 77; Stop 101
tattaacacgggcagtaggaattga

SEQ ID NO: 370475 - DNA, 25 bp, Artificial
  probe
  misc_feature (1)..(25): SEQ ID NO: 4017; WAN024DZF; Start 70; Stop 94
ataattctattaacacgggcagtag

SEQ ID NO: 370476 - DNA, 25 bp, Artificial
  probe
  misc_feature (1)..(25): SEQ ID NO: 4017; WAN024DZF; Start 59; Stop 83
ccacacccgccataattctattaac

SEQ ID NO: 370477 - DNA, 25 bp, Artificial
  probe
  misc_feature (1)..(25): SEQ ID NO: 4017; WAN024DZF; Start 58; Stop 82
accacacccgccataattctattaa

SEQ ID NO: 370478 - DNA, 25 bp, Artificial
  probe
  misc_feature (1)..(25): SEQ ID NO: 4017; WAN024DZF; Start 131; Stop 155
ttctacctttaaactatgcccgtaa

SEQ ID NO: 370479 - DNA, 25 bp, Artificial
  probe
  misc_feature (1)..(25): SEQ ID NO: 4017; WAN024DZF; Start 62; Stop 86
cacccgccataattctattaacacg

SEQ ID NO: 370480 - DNA, 25 bp, Artificial
  probe
  misc_feature (1)..(25): SEQ ID NO: 4017; WAN024DZF; Start 130; Stop 154
gttctacctttaaactatgcccgta

SEQ ID NO: 370481 - DNA, 25 bp, Artificial
  probe
  misc_feature (1)..(25): SEQ ID NO: 4017; WAN024DZF; Start 78; Stop 102
attaacacgggcagtaggaattgaa

SEQ ID NO: 370482 - DNA, 25 bp, Artificial
  probe
  misc_feature (1)..(25): SEQ ID NO: 4017; WAN024DZF; Start 132; Stop 156
tctacctttaaactatgcccgtaaa

SEQ ID NO: 370483 - DNA, 25 bp, Artificial
  probe
  misc_feature (1)..(25): SEQ ID NO: 4017; WAN024DZF; Start 119; Stop 143
tggagaccttagttctacctttaaa

SEQ ID NO: 370484 - DNA, 25 bp, Artificial
  probe
  misc_feature (1)..(25): SEQ ID NO: 4017; WAN024DZF; Start 90; Stop 114
agtaggaattgaacccacactgaag

SEQ ID NO: 370485 - DNA, 25 bp, Artificial
  probe
  misc_feature (1)..(25): SEQ ID NO: 4017; WAN024DZF; Start 57; Stop 81
caccacacccgccataattctatta

SEQ ID NO: 370486 - DNA, 25 bp, Artificial
  probe
  misc_feature (1)..(25): SEQ ID NO: 4017; WAN024DZF; Start 120; Stop 144
ggagaccttagttctacctttaaac

SEQ ID NO: 370487 - DNA, 25 bp, Artificial
  probe
  misc_feature (1)..(25): SEQ ID NO: 4017; WAN024DZF; Start 91; Stop 115
gtaggaattgaacccacactgaagg

SEQ ID NO: 370488 - DNA, 25 bp, Artificial
  probe
  misc_feature (1)..(25): SEQ ID NO: 4017; WAN024DZF; Start 79; Stop 103
ttaacacgggcagtaggaattgaac

SEQ ID NO: 370489 - DNA, 25 bp, Artificial
  probe
  misc_feature (1)..(25): SEQ ID NO: 4017; WAN024DZF; Start 222; Stop 246
ctcttcgctacccttccaaaatata

SEQ ID NO: 370490 - DNA, 25 bp, Artificial
  probe
  misc_feature (1)..(25): SEQ ID NO: 4017; WAN024DZF; Start 139; Stop 163
ttaaactatgcccgtaaaatggaag

SEQ ID NO: 370491 - DNA, 25 bp, Artificial
  probe
  misc_feature (1)..(25): SEQ ID NO: 4017; WAN024DZF; Start 140; Stop 164
taaactatgcccgtaaaatggaagg

SEQ ID NO: 370492 - DNA, 25 bp, Artificial
  probe
  misc_feature (1)..(25): SEQ ID NO: 4017; WAN024DZF; Start 115; Stop 139
gttttggagaccttagttctacctt

SEQ ID NO: 370493 - DNA, 25 bp, Artificial
  probe
  misc_feature (1)..(25): SEQ ID NO: 4017; WAN024DZF; Start 116; Stop 140
ttttggagaccttagttctaccttt

SEQ ID NO: 370494 - DNA, 25 bp, Artificial
  probe
  misc_feature (1)..(25): SEQ ID NO: 4017; WAN024DZF; Start 223; Stop 247
tcttcgctacccttccaaaatatat

SEQ ID NO: 370495 - DNA, 25 bp, Artificial
  probe
  misc_feature (1)..(25): SEQ ID NO: 4019; WAN024CWY; Start 165; Stop 189
cagaccagtacagatgacgatgatt

SEQ ID NO: 370496 - DNA, 25 bp, Artificial
  probe
  misc_feature (1)..(25): SEQ ID NO: 4019; WAN024CWY; Start 166; Stop 190
agaccagtacagatgacgatgattt

SEQ ID NO: 370497 - DNA, 25 bp, Artificial
  probe
  misc_feature (1)..(25): SEQ ID NO: 4019; WAN024CWY; Start 228; Stop 252
ttctcctctcttagattattcgtaa

SEQ ID NO: 370498 - DNA, 25 bp, Artificial
  probe
  misc_feature (1)..(25): SEQ ID NO: 4019; WAN024CWY; Start 97; Stop 121
aaattcgtctctttgacaggtgttt

SEQ ID NO: 370499 - DNA, 25 bp, Artificial
  probe
  misc_feature (1)..(25): SEQ ID NO: 4019; WAN024CWY; Start 164; Stop 188
ccagaccagtacagatgacgatgat

SEQ ID NO: 370500 - DNA, 25 bp, Artificial
  probe
  misc_feature (1)..(25): SEQ ID NO: 4019; WAN024CWY; Start 98; Stop 122
aattcgtctctttgacaggtgtttg

SEQ ID NO: 370501 - DNA, 25 bp, Artificial
  probe
  misc_feature (1)..(25): SEQ ID NO: 4019; WAN024CWY; Start 215; Stop 239
ttgcttccatattttctcctctctt

SEQ ID NO: 370502 - DNA, 25 bp, Artificial
  probe
  misc_feature (1)..(25): SEQ ID NO: 4019; WAN024CWY; Start 214; Stop 238
attgcttccatattttctcctctct

SEQ ID NO: 370503 - DNA, 25 bp, Artificial
  probe
  misc_feature (1)..(25): SEQ ID NO: 4019; WAN024CWY; Start 216; Stop 240
tgcttccatattttctcctctctta

SEQ ID NO: 370504 - DNA, 25 bp, Artificial
  probe
  misc_feature (1)..(25): SEQ ID NO: 4019; WAN024CWY; Start 99; Stop 123
attcgtctctttgacaggtgtttgt

SEQ ID NO: 370505 - DNA, 25 bp, Artificial
  probe
  misc_feature (1)..(25): SEQ ID NO: 4019; WAN024CWY; Start 213; Stop 237
aattgcttccatattttctcctctc

SEQ ID NO: 370506 - DNA, 25 bp, Artificial
  probe
  misc_feature (1)..(25): SEQ ID NO: 4019; WAN024CWY; Start 217; Stop 241
gcttccatattttctcctctcttag

SEQ ID NO: 370507 - DNA, 25 bp, Artificial
  probe
  misc_feature (1)..(25): SEQ ID NO: 4019; WAN024CWY; Start 227; Stop 251
tttctcctctcttagattattcgta

SEQ ID NO: 370508 - DNA, 25 bp, Artificial
  probe
  misc_feature (1)..(25): SEQ ID NO: 4019; WAN024CWY; Start 168; Stop 192
accagtacagatgacgatgatttta

SEQ ID NO: 370509 - DNA, 25 bp, Artificial
  probe
  misc_feature (1)..(25): SEQ ID NO: 4019; WAN024CWY; Start 209; Stop 233
cgataattgcttccatattttctcc

SEQ ID NO: 370510 - DNA, 25 bp, Artificial
  probe
  misc_feature (1)..(25): SEQ ID NO: 4019; WAN024CWY; Start 167; Stop 191
gaccagtacagatgacgatgatttt

SEQ ID NO: 370511 - DNA, 25 bp, Artificial
  probe
  misc_feature (1)..(25): SEQ ID NO: 4019; WAN024CWY; Start 204; Stop 228
tttctcgataattgcttccatattt

SEQ ID NO: 370512 - DNA, 25 bp, Artificial
  probe
  misc_feature (1)..(25): SEQ ID NO: 4019; WAN024CWY; Start 169; Stop 193
ccagtacagatgacgatgattttat

SEQ ID NO: 370513 - DNA, 25 bp, Artificial
  probe
  misc_feature (1)..(25): SEQ ID NO: 4019; WAN024CWY; Start 96; Stop 120
caaattcgtctctttgacaggtgtt

SEQ ID NO: 370514 - DNA, 25 bp, Artificial
  probe
  misc_feature (1)..(25): SEQ ID NO: 4019; WAN024CWY; Start 212; Stop 236
taattgcttccatattttctcctct

SEQ ID NO: 370515 - DNA, 25 bp, Artificial
  probe
  misc_feature (1)..(25): SEQ ID NO: 4019; WAN024CWY; Start 103; Stop 127
gtctctttgacaggtgtttgtggag

SEQ ID NO: 370516 - DNA, 25 bp, Artificial
  probe
  misc_feature (1)..(25): SEQ ID NO: 4019; WAN024CWY; Start 100; Stop 124
ttcgtctctttgacaggtgtttgtg

SEQ ID NO: 370517 - DNA, 25 bp, Artificial
  probe
  misc_feature (1)..(25): SEQ ID NO: 4019; WAN024CWY; Start 174; Stop 198
acagatgacgatgattttatactct

SEQ ID NO: 370518 - DNA, 25 bp, Artificial
  probe
  misc_feature (1)..(25): SEQ ID NO: 4019; WAN024CWY; Start 199; Stop 223
ttgattttctcgataattgcttcca

SEQ ID NO: 370519 - DNA, 25 bp, Artificial
  probe
  misc_feature (1)..(25): SEQ ID NO: 4019; WAN024CWY; Start 200; Stop 224
tgattttctcgataattgcttccat

SEQ ID NO: 370520 - DNA, 25 bp, Artificial
  probe
  misc_feature (1)..(25): SEQ ID NO: 4019; WAN024CWY; Start 198; Stop 222
tttgattttctcgataattgcttcc

SEQ ID NO: 370521 - DNA, 25 bp, Artificial
  probe
  misc_feature (1)..(25): SEQ ID NO: 4019; WAN024CWY; Start 226; Stop 250
ttttctcctctcttagattattcgt

SEQ ID NO: 370522 - DNA, 25 bp, Artificial
  probe
  misc_feature (1)..(25): SEQ ID NO: 4019; WAN024CWY; Start 218; Stop 242
cttccatattttctcctctcttaga

SEQ ID NO: 370523 - DNA, 25 bp, Artificial
  probe
  misc_feature (1)..(25): SEQ ID NO: 4019; WAN024CWY; Start 211; Stop 235
ataattgcttccatattttctcctc

SEQ ID NO: 370524 - DNA, 25 bp, Artificial
  probe
  misc_feature (1)..(25): SEQ ID NO: 4019; WAN024CWY; Start 210; Stop 234
gataattgcttccatattttctcct

SEQ ID NO: 370525 - DNA, 25 bp, Artificial
  probe
  misc_feature (1)..(25): SEQ ID NO: 4019; WAN024CWY; Start 194; Stop 218
actctttgattttctcgataattgc

SEQ ID NO: 370526 - DNA, 25 bp, Artificial
  probe
  misc_feature (1)..(25): SEQ ID NO: 4019; WAN024CWY; Start 195; Stop 219
ctctttgattttctcgataattgct

SEQ ID NO: 370527 - DNA, 25 bp, Artificial
  probe
  misc_feature (1)..(25): SEQ ID NO: 4019; WAN024CWY; Start 175; Stop 199
cagatgacgatgattttatactctt

SEQ ID NO: 370528 - DNA, 25 bp, Artificial
  probe
  misc_feature (1)..(25): SEQ ID NO: 4020; WAN024DXD; Start 423; Stop 447
agaaggaactcatagataccgtgat

SEQ ID NO: 370529 - DNA, 25 bp, Artificial
  probe
  misc_feature (1)..(25): SEQ ID NO: 4020; WAN024DXD; Start 424; Stop 448
gaaggaactcatagataccgtgata

SEQ ID NO: 370530 - DNA, 25 bp, Artificial
  probe
  misc_feature (1)..(25): SEQ ID NO: 4020; WAN024DXD; Start 422; Stop 446
aagaaggaactcatagataccgtga

SEQ ID NO: 370531 - DNA, 25 bp, Artificial
  probe
  misc_feature (1)..(25): SEQ ID NO: 4020; WAN024DXD; Start 425; Stop 449
aaggaactcatagataccgtgataa

SEQ ID NO: 370532 - DNA, 25 bp, Artificial
  probe
  misc_feature (1)..(25): SEQ ID NO: 4020; WAN024DXD; Start 421; Stop 445
aaagaaggaactcatagataccgtg

SEQ ID NO: 370533 - DNA, 25 bp, Artificial
  probe
  misc_feature (1)..(25): SEQ ID NO: 4020; WAN024DXD; Start 410; Stop 434
acaaactggataaagaaggaactca

SEQ ID NO: 370534 - DNA, 25 bp, Artificial
  probe
  misc_feature (1)..(25): SEQ ID NO: 4020; WAN024DXD; Start 233; Stop 257
accaagaaagaaatactaccgacat

SEQ ID NO: 370535 - DNA, 25 bp, Artificial
  probe
  misc_feature (1)..(25): SEQ ID NO: 4020; WAN024DXD; Start 175; Stop 199
ataaagagcgtatttccaaccaaag

SEQ ID NO: 370536 - DNA, 25 bp, Artificial
  probe
  misc_feature (1)..(25): SEQ ID NO: 4020; WAN024DXD; Start 409; Stop 433
gacaaactggataaagaaggaactc

SEQ ID NO: 370537 - DNA, 25 bp, Artificial
  probe
  misc_feature (1)..(25): SEQ ID NO: 4020; WAN024DXD; Start 232; Stop 256
taccaagaaagaaatactaccgaca

SEQ ID NO: 370538 - DNA, 25 bp, Artificial
  probe
  misc_feature (1)..(25): SEQ ID NO: 4020; WAN024DXD; Start 408; Stop 432
ggacaaactggataaagaaggaact

SEQ ID NO: 370539 - DNA, 25 bp, Artificial
  probe
  misc_feature (1)..(25): SEQ ID NO: 4020; WAN024DXD; Start 443; Stop 467
gtgataaaggtaaagacggtgaact

SEQ ID NO: 370540 - DNA, 25 bp, Artificial
  probe
  misc_feature (1)..(25): SEQ ID NO: 4020; WAN024DXD; Start 234; Stop 258
ccaagaaagaaatactaccgacatt

SEQ ID NO: 370541 - DNA, 25 bp, Artificial
  probe
  misc_feature (1)..(25): SEQ ID NO: 4020; WAN024DXD; Start 444; Stop 468
tgataaaggtaaagacggtgaactt

SEQ ID NO: 370542 - DNA, 25 bp, Artificial
  probe
  misc_feature (1)..(25): SEQ ID NO: 4020; WAN024DXD; Start 411; Stop 435
caaactggataaagaaggaactcat

SEQ ID NO: 370543 - DNA, 25 bp, Artificial
  probe
  misc_feature (1)..(25): SEQ ID NO: 4020; WAN024DXD; Start 173; Stop 197
gaataaagagcgtatttccaaccaa

SEQ ID NO: 370544 - DNA, 25 bp, Artificial
  probe
  misc_feature (1)..(25): SEQ ID NO: 4020; WAN024DXD; Start 420; Stop 444
taaagaaggaactcatagataccgt

SEQ ID NO: 370545 - DNA, 25 bp, Artificial
  probe
  misc_feature (1)..(25): SEQ ID NO: 4020; WAN024DXD; Start 174; Stop 198
aataaagagcgtatttccaaccaaa

SEQ ID NO: 370546 - DNA, 25 bp, Artificial
  probe
  misc_feature (1)..(25): SEQ ID NO: 4020; WAN024DXD; Start 172; Stop 196
agaataaagagcgtatttccaacca

SEQ ID NO: 370547 - DNA, 25 bp, Artificial
  probe
  misc_feature (1)..(25): SEQ ID NO: 4020; WAN024DXD; Start 3; Stop 27
gattataggttccttctgcatcgtg

SEQ ID NO: 370548 - DNA, 25 bp, Artificial
  probe
  misc_feature (1)..(25): SEQ ID NO: 4020; WAN024DXD; Start 1; Stop 25
gtgattataggttccttctgcatcg

SEQ ID NO: 370549 - DNA, 25 bp, Artificial
  probe
  misc_feature (1)..(25): SEQ ID NO: 4020; WAN024DXD; Start 448; Stop 472
aaaggtaaagacggtgaacttatgg

SEQ ID NO: 370550 - DNA, 25 bp, Artificial
  probe
  misc_feature (1)..(25): SEQ ID NO: 4020; WAN024DXD; Start 414; Stop 438
actggataaagaaggaactcataga

SEQ ID NO: 370551 - DNA, 25 bp, Artificial
  probe
  misc_feature (1)..(25): SEQ ID NO: 4020; WAN024DXD; Start 231; Stop 255
ttaccaagaaagaaatactaccgac

SEQ ID NO: 370552 - DNA, 25 bp, Artificial
  probe
  misc_feature (1)..(25): SEQ ID NO: 4020; WAN024DXD; Start 242; Stop 266
gaaatactaccgacattcttacccg

SEQ ID NO: 370553 - DNA, 25 bp, Artificial
  probe
  misc_feature (1)..(25): SEQ ID NO: 4020; WAN024DXD; Start 70; Stop 94
aattaccttctctggatgatttgtc

SEQ ID NO: 370554 - DNA, 25 bp, Artificial
  probe
  misc_feature (1)..(25): SEQ ID NO: 4020; WAN024DXD; Start 407; Stop 431
gggacaaactggataaagaaggaac

SEQ ID NO: 370555 - DNA, 25 bp, Artificial
  probe
  misc_feature (1)..(25): SEQ ID NO: 4020; WAN024DXD; Start 406; Stop 430
agggacaaactggataaagaaggaa

SEQ ID NO: 370556 - DNA, 25 bp, Artificial
  probe
  misc_feature (1)..(25): SEQ ID NO: 4020; WAN024DXD; Start 245; Stop 269
atactaccgacattcttacccgttt

SEQ ID NO: 370557 - DNA, 25 bp, Artificial
  probe
  misc_feature (1)..(25): SEQ ID NO: 4020; WAN024DXD; Start 244; Stop 268
aatactaccgacattcttacccgtt

SEQ ID NO: 370558 - DNA, 25 bp, Artificial
  probe
  misc_feature (1)..(25): SEQ ID NO: 4020; WAN024DXD; Start 243; Stop 267
aaatactaccgacattcttacccgt

SEQ ID NO: 370559 - DNA, 25 bp, Artificial
  probe
  misc_feature (1)..(25): SEQ ID NO: 4020; WAN024DXD; Start 447; Stop 471
taaaggtaaagacggtgaacttatg

SEQ ID NO: 370560 - DNA, 25 bp, Artificial
  probe
  misc_feature (1)..(25): SEQ ID NO: 4020; WAN024DXD; Start 176; Stop 200
taaagagcgtatttccaaccaaagg

SEQ ID NO: 370561 - DNA, 25 bp, Artificial
  probe
  misc_feature (1)..(25): SEQ ID NO: 4021; WAN024D5L; Start 530; Stop 554
ccattatcaacaactactcaccaac

SEQ ID NO: 370562 - DNA, 25 bp, Artificial
  probe
  misc_feature (1)..(25): SEQ ID NO: 4021; WAN024D5L; Start 529; Stop 553
accattatcaacaactactcaccaa

SEQ ID NO: 370563 - DNA, 25 bp, Artificial
  probe
  misc_feature (1)..(25): SEQ ID NO: 4021; WAN024D5L; Start 536; Stop 560
tcaacaactactcaccaacttctac

SEQ ID NO: 370564 - DNA, 25 bp, Artificial
  probe
  misc_feature (1)..(25): SEQ ID NO: 4021; WAN024D5L; Start 535; Stop 559
atcaacaactactcaccaacttcta

SEQ ID NO: 370565 - DNA, 25 bp, Artificial
  probe
  misc_feature (1)..(25): SEQ ID NO: 4021; WAN024D5L; Start 534; Stop 558
tatcaacaactactcaccaacttct

SEQ ID NO: 370566 - DNA, 25 bp, Artificial
  probe
  misc_feature (1)..(25): SEQ ID NO: 4021; WAN024D5L; Start 528; Stop 552
taccattatcaacaactactcacca

SEQ ID NO: 370567 - DNA, 25 bp, Artificial
  probe
  misc_feature (1)..(25): SEQ ID NO: 4021; WAN024D5L; Start 510; Stop 534
ccgtgcttatatcctcaataccatt

SEQ ID NO: 370568 - DNA, 25 bp, Artificial
  probe
  misc_feature (1)..(25): SEQ ID NO: 4021; WAN024D5L; Start 533; Stop 557
ttatcaacaactactcaccaacttc

SEQ ID NO: 370569 - DNA, 25 bp, Artificial
  probe
  misc_feature (1)..(25): SEQ ID NO: 4021; WAN024D5L; Start 531; Stop 555
cattatcaacaactactcaccaact

SEQ ID NO: 370570 - DNA, 25 bp, Artificial
  probe
  misc_feature (1)..(25): SEQ ID NO: 4021; WAN024D5L; Start 537; Stop 561
caacaactactcaccaacttctacc

SEQ ID NO: 370571 - DNA, 25 bp, Artificial
  probe
  misc_feature (1)..(25): SEQ ID NO: 4021; WAN024D5L; Start 306; Stop 330
cctaacctacttcaagaccttctat

SEQ ID NO: 370572 - DNA, 25 bp, Artificial
  probe
  misc_feature (1)..(25): SEQ ID NO: 4021; WAN024D5L; Start 532; Stop 556
attatcaacaactactcaccaactt

SEQ ID NO: 370573 - DNA, 25 bp, Artificial
  probe
  misc_feature (1)..(25): SEQ ID NO: 4021; WAN024D5L; Start 527; Stop 551
ataccattatcaacaactactcacc

SEQ ID NO: 370574 - DNA, 25 bp, Artificial
  probe
  misc_feature (1)..(25): SEQ ID NO: 4021; WAN024D5L; Start 511; Stop 535
cgtgcttatatcctcaataccatta

SEQ ID NO: 370575 - DNA, 25 bp, Artificial
  probe
  misc_feature (1)..(25): SEQ ID NO: 4021; WAN024D5L; Start 520; Stop 544
atcctcaataccattatcaacaact

SEQ ID NO: 370576 - DNA, 25 bp, Artificial
  probe
  misc_feature (1)..(25): SEQ ID NO: 4021; WAN024D5L; Start 538; Stop 562
aacaactactcaccaacttctaccg

SEQ ID NO: 370577 - DNA, 25 bp, Artificial
  probe
  misc_feature (1)..(25): SEQ ID NO: 4021; WAN024D5L; Start 522; Stop 546
cctcaataccattatcaacaactac

SEQ ID NO: 370578 - DNA, 25 bp, Artificial
  probe
  misc_feature (1)..(25): SEQ ID NO: 4021; WAN024D5L; Start 521; Stop 545
tcctcaataccattatcaacaacta

SEQ ID NO: 370579 - DNA, 25 bp, Artificial
  probe
  misc_feature (1)..(25): SEQ ID NO: 4021; WAN024D5L; Start 540; Stop 564
caactactcaccaacttctaccgtt

SEQ ID NO: 370580 - DNA, 25 bp, Artificial
  probe
  misc_feature (1)..(25): SEQ ID NO: 4021; WAN024D5L; Start 566; Stop 590
tgatttctacccacttgatttctga

SEQ ID NO: 370581 - DNA, 25 bp, Artificial
  probe
  misc_feature (1)..(25): SEQ ID NO: 4021; WAN024D5L; Start 259; Stop 283
ttgcctgatacgacctatctcaatg

SEQ ID NO: 370582 - DNA, 25 bp, Artificial
  probe
  misc_feature (1)..(25): SEQ ID NO: 4021; WAN024D5L; Start 565; Stop 589
ttgatttctacccacttgatttctg

SEQ ID NO: 370583 - DNA, 25 bp, Artificial
  probe
  misc_feature (1)..(25): SEQ ID NO: 4021; WAN024D5L; Start 264; Stop 288
tgatacgacctatctcaatgagcaa

SEQ ID NO: 370584 - DNA, 25 bp, Artificial
  probe
  misc_feature (1)..(25): SEQ ID NO: 4021; WAN024D5L; Start 567; Stop 591
gatttctacccacttgatttctgat

SEQ ID NO: 370585 - DNA, 25 bp, Artificial
  probe
  misc_feature (1)..(25): SEQ ID NO: 4021; WAN024D5L; Start 263; Stop 287
ctgatacgacctatctcaatgagca

SEQ ID NO: 370586 - DNA, 25 bp, Artificial
  probe
  misc_feature (1)..(25): SEQ ID NO: 4021; WAN024D5L; Start 305; Stop 329
ccctaacctacttcaagaccttcta

SEQ ID NO: 370587 - DNA, 25 bp, Artificial
  probe
  misc_feature (1)..(25): SEQ ID NO: 4021; WAN024D5L; Start 526; Stop 550
aataccattatcaacaactactcac

SEQ ID NO: 370588 - DNA, 25 bp, Artificial
  probe
  misc_feature (1)..(25): SEQ ID NO: 4021; WAN024D5L; Start 525; Stop 549
caataccattatcaacaactactca

SEQ ID NO: 370589 - DNA, 25 bp, Artificial
  probe
  misc_feature (1)..(25): SEQ ID NO: 4021; WAN024D5L; Start 564; Stop 588
tttgatttctacccacttgatttct

SEQ ID NO: 370590 - DNA, 25 bp, Artificial
  probe
  misc_feature (1)..(25): SEQ ID NO: 4021; WAN024D5L; Start 280; Stop 304
aatgagcaaatgaaggtcaaagaag

SEQ ID NO: 370591 - DNA, 25 bp, Artificial
  probe
  misc_feature (1)..(25): SEQ ID NO: 4021; WAN024D5L; Start 279; Stop 303
caatgagcaaatgaaggtcaaagaa

SEQ ID NO: 370592 - DNA, 25 bp, Artificial
  probe
  misc_feature (1)..(25): SEQ ID NO: 4021; WAN024D5L; Start 539; Stop 563
acaactactcaccaacttctaccgt

SEQ ID NO: 370593 - DNA, 25 bp, Artificial
  probe
  misc_feature (1)..(25): SEQ ID NO: 4021; WAN024D5L; Start 524; Stop 548
tcaataccattatcaacaactactc

SEQ ID NO: 370594 - DNA, 25 bp, Artificial
  probe
  misc_feature (1)..(25): SEQ ID NO: 4022; WAN024D6S; Start 133; Stop 157
aatcttctcttctttacacctctgg

SEQ ID NO: 370595 - DNA, 25 bp, Artificial
  probe
  misc_feature (1)..(25): SEQ ID NO: 4022; WAN024D6S; Start 131; Stop 155
acaatcttctcttctttacacctct

SEQ ID NO: 370596 - DNA, 25 bp, Artificial
  probe
  misc_feature (1)..(25): SEQ ID NO: 4022; WAN024D6S; Start 132; Stop 156
caatcttctcttctttacacctctg

SEQ ID NO: 370597 - DNA, 25 bp, Artificial
  probe
  misc_feature (1)..(25): SEQ ID NO: 4022; WAN024D6S; Start 130; Stop 154
aacaatcttctcttctttacacctc

SEQ ID NO: 370598 - DNA, 25 bp, Artificial
  probe
  misc_feature (1)..(25): SEQ ID NO: 4022; WAN024D6S; Start 129; Stop 153
aaacaatcttctcttctttacacct

SEQ ID NO: 370599 - DNA, 25 bp, Artificial
  probe
  misc_feature (1)..(25): SEQ ID NO: 4022; WAN024D6S; Start 3; Stop 27
gattatcatgcgtagattctattcc

SEQ ID NO: 370600 - DNA, 25 bp, Artificial
  probe
  misc_feature (1)..(25): SEQ ID NO: 4022; WAN024D6S; Start 66; Stop 90
gccactttatgagttgttcttacta

SEQ ID NO: 370601 - DNA, 25 bp, Artificial
  probe
  misc_feature (1)..(25): SEQ ID NO: 4022; WAN024D6S; Start 5; Stop 29
ttatcatgcgtagattctattccca

SEQ ID NO: 370602 - DNA, 25 bp, Artificial
  probe
  misc_feature (1)..(25): SEQ ID NO: 4022; WAN024D6S; Start 7; Stop 31
atcatgcgtagattctattcccatc

SEQ ID NO: 370603 - DNA, 25 bp, Artificial
  probe
  misc_feature (1)..(25): SEQ ID NO: 4022; WAN024D6S; Start 6; Stop 30
tatcatgcgtagattctattcccat

SEQ ID NO: 370604 - DNA, 25 bp, Artificial
  probe
  misc_feature (1)..(25): SEQ ID NO: 4022; WAN024D6S; Start 4; Stop 28
attatcatgcgtagattctattccc

SEQ ID NO: 370605 - DNA, 25 bp, Artificial
  probe
  misc_feature (1)..(25): SEQ ID NO: 4022; WAN024D6S; Start 1; Stop 25
gtgattatcatgcgtagattctatt

SEQ ID NO: 370606 - DNA, 25 bp, Artificial
  probe
  misc_feature (1)..(25): SEQ ID NO: 4022; WAN024D6S; Start 136; Stop 160
cttctcttctttacacctctggtaa

SEQ ID NO: 370607 - DNA, 25 bp, Artificial
  probe
  misc_feature (1)..(25): SEQ ID NO: 4022; WAN024D6S; Start 135; Stop 159
tcttctcttctttacacctctggta

SEQ ID NO: 370608 - DNA, 25 bp, Artificial
  probe
  misc_feature (1)..(25): SEQ ID NO: 4022; WAN024D6S; Start 139; Stop 163
ctcttctttacacctctggtaatct

SEQ ID NO: 370609 - DNA, 25 bp, Artificial
  probe
  misc_feature (1)..(25): SEQ ID NO: 4022; WAN024D6S; Start 138; Stop 162
tctcttctttacacctctggtaatc

SEQ ID NO: 370610 - DNA, 25 bp, Artificial
  probe
  misc_feature (1)..(25): SEQ ID NO: 4022; WAN024D6S; Start 142; Stop 166
ttctttacacctctggtaatcttga

SEQ ID NO: 370611 - DNA, 25 bp, Artificial
  probe
  misc_feature (1)..(25): SEQ ID NO: 4022; WAN024D6S; Start 134; Stop 158
atcttctcttctttacacctctggt

SEQ ID NO: 370612 - DNA, 25 bp, Artificial
  probe
  misc_feature (1)..(25): SEQ ID NO: 4022; WAN024D6S; Start 143; Stop 167
tctttacacctctggtaatcttgat

SEQ ID NO: 370613 - DNA, 25 bp, Artificial
  probe
  misc_feature (1)..(25): SEQ ID NO: 4022; WAN024D6S; Start 141; Stop 165
cttctttacacctctggtaatcttg

SEQ ID NO: 370614 - DNA, 25 bp, Artificial
  probe
  misc_feature (1)..(25): SEQ ID NO: 4022; WAN024D6S; Start 140; Stop 164
tcttctttacacctctggtaatctt

SEQ ID NO: 370615 - DNA, 25 bp, Artificial
  probe
  misc_feature (1)..(25): SEQ ID NO: 4022; WAN024D6S; Start 137; Stop 161
ttctcttctttacacctctggtaat

SEQ ID NO: 370616 - DNA, 25 bp, Artificial
  probe
  misc_feature (1)..(25): SEQ ID NO: 4022; WAN024D6S; Start 2; Stop 26
tgattatcatgcgtagattctattc

SEQ ID NO: 370617 - DNA, 25 bp, Artificial
  probe
  misc_feature (1)..(25): SEQ ID NO: 4022; WAN024D6S; Start 144; Stop 168
ctttacacctctggtaatcttgatt

SEQ ID NO: 370618 - DNA, 25 bp, Artificial
  probe
  misc_feature (1)..(25): SEQ ID NO: 4022; WAN024D6S; Start 128; Stop 152
taaacaatcttctcttctttacacc

SEQ ID NO: 370619 - DNA, 25 bp, Artificial
  probe
  misc_feature (1)..(25): SEQ ID NO: 4022; WAN024D6S; Start 34; Stop 58
ccctactatctggtcatattattct

SEQ ID NO: 370620 - DNA, 25 bp, Artificial
  probe
  misc_feature (1)..(25): SEQ ID NO: 4022; WAN024D6S; Start 19; Stop 43
ttctattcccatctcccctactatc

SEQ ID NO: 370621 - DNA, 25 bp, Artificial
  probe
  misc_feature (1)..(25): SEQ ID NO: 4022; WAN024D6S; Start 28; Stop 52
catctcccctactatctggtcatat

SEQ ID NO: 370622 - DNA, 25 bp, Artificial
  probe
  misc_feature (1)..(25): SEQ ID NO: 4022; WAN024D6S; Start 67; Stop 91
ccactttatgagttgttcttactag

SEQ ID NO: 370623 - DNA, 25 bp, Artificial
  probe
  misc_feature (1)..(25): SEQ ID NO: 4022; WAN024D6S; Start 18; Stop 42
attctattcccatctcccctactat

SEQ ID NO: 370624 - DNA, 25 bp, Artificial
  probe
  misc_feature (1)..(25): SEQ ID NO: 4022; WAN024D6S; Start 29; Stop 53
atctcccctactatctggtcatatt

SEQ ID NO: 370625 - DNA, 25 bp, Artificial
  probe
  misc_feature (1)..(25): SEQ ID NO: 4022; WAN024D6S; Start 17; Stop 41
gattctattcccatctcccctacta

SEQ ID NO: 370626 - DNA, 25 bp, Artificial
  probe
  misc_feature (1)..(25): SEQ ID NO: 4022; WAN024D6S; Start 9; Stop 33
catgcgtagattctattcccatctc

SEQ ID NO: 370627 - DNA, 25 bp, Artificial
  probe
  misc_feature (1)..(25): SEQ ID NO: 4023; WAN024DQV; Start 49; Stop 73
cgctttcttgaaaacaacaaaatca

SEQ ID NO: 370628 - DNA, 25 bp, Artificial
  probe
  misc_feature (1)..(25): SEQ ID NO: 4023; WAN024DQV; Start 79; Stop 103
ttaggaggagaaaatgaagaatcca

SEQ ID NO: 370629 - DNA, 25 bp, Artificial
  probe
  misc_feature (1)..(25): SEQ ID NO: 4023; WAN024DQV; Start 80; Stop 104
taggaggagaaaatgaagaatccat

SEQ ID NO: 370630 - DNA, 25 bp, Artificial
  probe
  misc_feature (1)..(25): SEQ ID NO: 4023; WAN024DQV; Start 78; Stop 102
tttaggaggagaaaatgaagaatcc

SEQ ID NO: 370631 - DNA, 25 bp, Artificial
  probe
  misc_feature (1)..(25): SEQ ID NO: 4023; WAN024DQV; Start 65; Stop 89
acaaaatcaatcttttaggaggaga

SEQ ID NO: 370632 - DNA, 25 bp, Artificial
  probe
  misc_feature (1)..(25): SEQ ID NO: 4023; WAN024DQV; Start 2; Stop 26
tgattatcatggttctagagtttga

SEQ ID NO: 370633 - DNA, 25 bp, Artificial
  probe
  misc_feature (1)..(25): SEQ ID NO: 4023; WAN024DQV; Start 1; Stop 25
gtgattatcatggttctagagtttg

SEQ ID NO: 370634 - DNA, 25 bp, Artificial
  probe
  misc_feature (1)..(25): SEQ ID NO: 4023; WAN024DQV; Start 81; Stop 105
aggaggagaaaatgaagaatccatt

SEQ ID NO: 370635 - DNA, 25 bp, Artificial
  probe
  misc_feature (1)..(25): SEQ ID NO: 4023; WAN024DQV; Start 62; Stop 86
acaacaaaatcaatcttttaggagg

SEQ ID NO: 370636 - DNA, 25 bp, Artificial
  probe
  misc_feature (1)..(25): SEQ ID NO: 4023; WAN024DQV; Start 71; Stop 95
tcaatcttttaggaggagaaaatga

SEQ ID NO: 370637 - DNA, 25 bp, Artificial
  probe
  misc_feature (1)..(25): SEQ ID NO: 4023; WAN024DQV; Start 63; Stop 87
caacaaaatcaatcttttaggagga

SEQ ID NO: 370638 - DNA, 25 bp, Artificial
  probe
  misc_feature (1)..(25): SEQ ID NO: 4023; WAN024DQV; Start 64; Stop 88
aacaaaatcaatcttttaggaggag

SEQ ID NO: 370639 - DNA, 25 bp, Artificial
  probe
  misc_feature (1)..(25): SEQ ID NO: 4023; WAN024DQV; Start 72; Stop 96
caatcttttaggaggagaaaatgaa

SEQ ID NO: 370640 - DNA, 25 bp, Artificial
  probe
  misc_feature (1)..(25): SEQ ID NO: 4023; WAN024DQV; Start 66; Stop 90
caaaatcaatcttttaggaggagaa

SEQ ID NO: 370641 - DNA, 25 bp, Artificial
  probe
  misc_feature (1)..(25): SEQ ID NO: 4023; WAN024DQV; Start 77; Stop 101
ttttaggaggagaaaatgaagaatc

SEQ ID NO: 370642 - DNA, 25 bp, Artificial
  probe
  misc_feature (1)..(25): SEQ ID NO: 4023; WAN024DQV; Start 76; Stop 100
cttttaggaggagaaaatgaagaat

SEQ ID NO: 370643 - DNA, 25 bp, Artificial
  probe
  misc_feature (1)..(25): SEQ ID NO: 4023; WAN024DQV; Start 73; Stop 97
aatcttttaggaggagaaaatgaag

SEQ ID NO: 370644 - DNA, 25 bp, Artificial
  probe
  misc_feature (1)..(25): SEQ ID NO: 4023; WAN024DQV; Start 70; Stop 94
atcaatcttttaggaggagaaaatg

SEQ ID NO: 370645 - DNA, 25 bp, Artificial
  probe
  misc_feature (1)..(25): SEQ ID NO: 4023; WAN024DQV; Start 75; Stop 99
tcttttaggaggagaaaatgaagaa

SEQ ID NO: 370646 - DNA, 25 bp, Artificial
  probe
  misc_feature (1)..(25): SEQ ID NO: 4023; WAN024DQV; Start 74; Stop 98
atcttttaggaggagaaaatgaaga

SEQ ID NO: 370647 - DNA, 25 bp, Artificial
  probe
  misc_feature (1)..(25): SEQ ID NO: 4023; WAN024DQV; Start 50; Stop 74
gctttcttgaaaacaacaaaatcaa

SEQ ID NO: 370648 - DNA, 25 bp, Artificial
  probe
  misc_feature (1)..(25): SEQ ID NO: 4023; WAN024DQV; Start 68; Stop 92
aaatcaatcttttaggaggagaaaa

SEQ ID NO: 370649 - DNA, 25 bp, Artificial
  probe
  misc_feature (1)..(25): SEQ ID NO: 4023; WAN024DQV; Start 67; Stop 91
aaaatcaatcttttaggaggagaaa

SEQ ID NO: 370650 - DNA, 25 bp, Artificial
  probe
  misc_feature (1)..(25): SEQ ID NO: 4023; WAN024DQV; Start 61; Stop 85
aacaacaaaatcaatcttttaggag

SEQ ID NO: 370651 - DNA, 25 bp, Artificial
  probe
  misc_feature (1)..(25): SEQ ID NO: 4023; WAN024DQV; Start 69; Stop 93
aatcaatcttttaggaggagaaaat

SEQ ID NO: 370652 - DNA, 25 bp, Artificial
  probe
  misc_feature (1)..(25): SEQ ID NO: 4023; WAN024DQV; Start 60; Stop 84
aaacaacaaaatcaatcttttagga

SEQ ID NO: 370653 - DNA, 25 bp, Artificial
  probe
  misc_feature (1)..(25): SEQ ID NO: 4023; WAN024DQV; Start 48; Stop 72
gcgctttcttgaaaacaacaaaatc

SEQ ID NO: 370654 - DNA, 25 bp, Artificial
  probe
  misc_feature (1)..(25): SEQ ID NO: 4023; WAN024DQV; Start 3; Stop 27
gattatcatggttctagagtttgat

SEQ ID NO: 370655 - DNA, 25 bp, Artificial
  probe
  misc_feature (1)..(25): SEQ ID NO: 4023; WAN024DQV; Start 54; Stop 78
tcttgaaaacaacaaaatcaatctt

SEQ ID NO: 370656 - DNA, 25 bp, Artificial
  probe
  misc_feature (1)..(25): SEQ ID NO: 4023; WAN024DQV; Start 53; Stop 77
ttcttgaaaacaacaaaatcaatct

SEQ ID NO: 370657 - DNA, 25 bp, Artificial
  probe
  misc_feature (1)..(25): SEQ ID NO: 4023; WAN024DQV; Start 59; Stop 83
aaaacaacaaaatcaatcttttagg

SEQ ID NO: 370658 - DNA, 25 bp, Artificial
  probe
  misc_feature (1)..(25): SEQ ID NO: 4023; WAN024DQV; Start 82; Stop 106
ggaggagaaaatgaagaatccattt

SEQ ID NO: 370659 - DNA, 25 bp, Artificial
  probe
  misc_feature (1)..(25): SEQ ID NO: 4023; WAN024DQV; Start 55; Stop 79
cttgaaaacaacaaaatcaatcttt

SEQ ID NO: 370660 - DNA, 25 bp, Artificial
  probe
  misc_feature (1)..(25): SEQ ID NO: 4024; WAN024DNC; Start 33; Stop 57
atcactaggattgatgacttctcaa

SEQ ID NO: 370661 - DNA, 25 bp, Artificial
  probe
  misc_feature (1)..(25): SEQ ID NO: 4024; WAN024DNC; Start 5; Stop 29
ttatcttgggttctcacttttctca

SEQ ID NO: 370662 - DNA, 25 bp, Artificial
  probe
  misc_feature (1)..(25): SEQ ID NO: 4024; WAN024DNC; Start 6; Stop 30
tatcttgggttctcacttttctcac

SEQ ID NO: 370663 - DNA, 25 bp, Artificial
  probe
  misc_feature (1)..(25): SEQ ID NO: 4024; WAN024DNC; Start 4; Stop 28
attatcttgggttctcacttttctc

SEQ ID NO: 370664 - DNA, 25 bp, Artificial
  probe
  misc_feature (1)..(25): SEQ ID NO: 4024; WAN024DNC; Start 3; Stop 27
gattatcttgggttctcacttttct

SEQ ID NO: 370665 - DNA, 25 bp, Artificial
  probe
  misc_feature (1)..(25): SEQ ID NO: 4024; WAN024DNC; Start 15; Stop 39
ttctcacttttctcacccatcacta

SEQ ID NO: 370666 - DNA, 25 bp, Artificial
  probe
  misc_feature (1)..(25): SEQ ID NO: 4024; WAN024DNC; Start 23; Stop 47
tttctcacccatcactaggattgat

SEQ ID NO: 370667 - DNA, 25 bp, Artificial
  probe
  misc_feature (1)..(25): SEQ ID NO: 4024; WAN024DNC; Start 34; Stop 58
tcactaggattgatgacttctcaaa

SEQ ID NO: 370668 - DNA, 25 bp, Artificial
  probe
  misc_feature (1)..(25): SEQ ID NO: 4024; WAN024DNC; Start 21; Stop 45
cttttctcacccatcactaggattg

SEQ ID NO: 370669 - DNA, 25 bp, Artificial
  probe
  misc_feature (1)..(25): SEQ ID NO: 4024; WAN024DNC; Start 2; Stop 26
tgattatcttgggttctcacttttc

SEQ ID NO: 370670 - DNA, 25 bp, Artificial
  probe
  misc_feature (1)..(25): SEQ ID NO: 4024; WAN024DNC; Start 20; Stop 44
acttttctcacccatcactaggatt

SEQ ID NO: 370671 - DNA, 25 bp, Artificial
  probe
  misc_feature (1)..(25): SEQ ID NO: 4024; WAN024DNC; Start 16; Stop 40
tctcacttttctcacccatcactag

SEQ ID NO: 370672 - DNA, 25 bp, Artificial
  probe
  misc_feature (1)..(25): SEQ ID NO: 4024; WAN024DNC; Start 22; Stop 46
ttttctcacccatcactaggattga

SEQ ID NO: 370673 - DNA, 25 bp, Artificial
  probe
  misc_feature (1)..(25): SEQ ID NO: 4024; WAN024DNC; Start 19; Stop 43
cacttttctcacccatcactaggat

SEQ ID NO: 370674 - DNA, 25 bp, Artificial
  probe
  misc_feature (1)..(25): SEQ ID NO: 4024; WAN024DNC; Start 14; Stop 38
gttctcacttttctcacccatcact

SEQ ID NO: 370675 - DNA, 25 bp, Artificial
  probe
  misc_feature (1)..(25): SEQ ID NO: 4024; WAN024DNC; Start 17; Stop 41
ctcacttttctcacccatcactagg

SEQ ID NO: 370676 - DNA, 25 bp, Artificial
  probe
  misc_feature (1)..(25): SEQ ID NO: 4024; WAN024DNC; Start 18; Stop 42
tcacttttctcacccatcactagga

SEQ ID NO: 370677 - DNA, 25 bp, Artificial
  probe
  misc_feature (1)..(25): SEQ ID NO: 4024; WAN024DNC; Start 7; Stop 31
atcttgggttctcacttttctcacc

SEQ ID NO: 370678 - DNA, 25 bp, Artificial
  probe
  misc_feature (1)..(25): SEQ ID NO: 4024; WAN024DNC; Start 35; Stop 59
cactaggattgatgacttctcaaaa

SEQ ID NO: 370679 - DNA, 25 bp, Artificial
  probe
  misc_feature (1)..(25): SEQ ID NO: 4024; WAN024DNC; Start 36; Stop 60
actaggattgatgacttctcaaaat

SEQ ID NO: 370680 - DNA, 25 bp, Artificial
  probe
  misc_feature (1)..(25): SEQ ID NO: 4024; WAN024DNC; Start 37; Stop 61
ctaggattgatgacttctcaaaatc

SEQ ID NO: 370681 - DNA, 25 bp, Artificial
  probe
  misc_feature (1)..(25): SEQ ID NO: 4024; WAN024DNC; Start 13; Stop 37
ggttctcacttttctcacccatcac

SEQ ID NO: 370682 - DNA, 25 bp, Artificial
  probe
  misc_feature (1)..(25): SEQ ID NO: 4024; WAN024DNC; Start 1; Stop 25
gtgattatcttgggttctcactttt

SEQ ID NO: 370683 - DNA, 25 bp, Artificial
  probe
  misc_feature (1)..(25): SEQ ID NO: 4025; WAN024GLH; Start 50; Stop 74
caatgagagcaagattccaacaatg

SEQ ID NO: 370684 - DNA, 25 bp, Artificial
  probe
  misc_feature (1)..(25): SEQ ID NO: 4025; WAN024GLH; Start 43; Stop 67
gtagaaccaatgagagcaagattcc

SEQ ID NO: 370685 - DNA, 25 bp, Artificial
  probe
  misc_feature (1)..(25): SEQ ID NO: 4025; WAN024GLH; Start 49; Stop 73
ccaatgagagcaagattccaacaat

SEQ ID NO: 370686 - DNA, 25 bp, Artificial
  probe
  misc_feature (1)..(25): SEQ ID NO: 4025; WAN024GLH; Start 44; Stop 68
tagaaccaatgagagcaagattcca

SEQ ID NO: 370687 - DNA, 25 bp, Artificial
  probe
  misc_feature (1)..(25): SEQ ID NO: 4025; WAN024GLH; Start 46; Stop 70
gaaccaatgagagcaagattccaac

SEQ ID NO: 370688 - DNA, 25 bp, Artificial
  probe
  misc_feature (1)..(25): SEQ ID NO: 4025; WAN024GLH; Start 45; Stop 69
agaaccaatgagagcaagattccaa

SEQ ID NO: 370689 - DNA, 25 bp, Artificial
  probe
  misc_feature (1)..(25): SEQ ID NO: 4025; WAN024GLH; Start 336; Stop 360
gcaatagcaaatccaatcaaggtaa

SEQ ID NO: 370690 - DNA, 25 bp, Artificial
  probe
  misc_feature (1)..(25): SEQ ID NO: 4025; WAN024GLH; Start 48; Stop 72
accaatgagagcaagattccaacaa

SEQ ID NO: 370691 - DNA, 25 bp, Artificial
  probe
  misc_feature (1)..(25): SEQ ID NO: 4025; WAN024GLH; Start 47; Stop 71
aaccaatgagagcaagattccaaca

SEQ ID NO: 370692 - DNA, 25 bp, Artificial
  probe
  misc_feature (1)..(25): SEQ ID NO: 4025; WAN024GLH; Start 339; Stop 363
atagcaaatccaatcaaggtaaagg

SEQ ID NO: 370693 - DNA, 25 bp, Artificial
  probe
  misc_feature (1)..(25): SEQ ID NO: 4025; WAN024GLH; Start 42; Stop 66
ggtagaaccaatgagagcaagattc

SEQ ID NO: 370694 - DNA, 25 bp, Artificial
  probe
  misc_feature (1)..(25): SEQ ID NO: 4025; WAN024GLH; Start 344; Stop 368
aaatccaatcaaggtaaaggctgtc

SEQ ID NO: 370695 - DNA, 25 bp, Artificial
  probe
  misc_feature (1)..(25): SEQ ID NO: 4025; WAN024GLH; Start 340; Stop 364
tagcaaatccaatcaaggtaaaggc

SEQ ID NO: 370696 - DNA, 25 bp, Artificial
  probe
  misc_feature (1)..(25): SEQ ID NO: 4025; WAN024GLH; Start 51; Stop 75
aatgagagcaagattccaacaatgg

SEQ ID NO: 370697 - DNA, 25 bp, Artificial
  probe
  misc_feature (1)..(25): SEQ ID NO: 4025; WAN024GLH; Start 335; Stop 359
ggcaatagcaaatccaatcaaggta

SEQ ID NO: 370698 - DNA, 25 bp, Artificial
  probe
  misc_feature (1)..(25): SEQ ID NO: 4025; WAN024GLH; Start 311; Stop 335
gataatcgcatcaagacccaaattg

SEQ ID NO: 370699 - DNA, 25 bp, Artificial
  probe
  misc_feature (1)..(25): SEQ ID NO: 4025; WAN024GLH; Start 343; Stop 367
caaatccaatcaaggtaaaggctgt

SEQ ID NO: 370700 - DNA, 25 bp, Artificial
  probe
  misc_feature (1)..(25): SEQ ID NO: 4025; WAN024GLH; Start 337; Stop 361
caatagcaaatccaatcaaggtaaa

SEQ ID NO: 370701 - DNA, 25 bp, Artificial
  probe
  misc_feature (1)..(25): SEQ ID NO: 4025; WAN024GLH; Start 242; Stop 266
gacaatgacaatcataacgatagca

SEQ ID NO: 370702 - DNA, 25 bp, Artificial
  probe
  misc_feature (1)..(25): SEQ ID NO: 4025; WAN024GLH; Start 241; Stop 265
tgacaatgacaatcataacgatagc

SEQ ID NO: 370703 - DNA, 25 bp, Artificial
  probe
  misc_feature (1)..(25): SEQ ID NO: 4025; WAN024GLH; Start 238; Stop 262
tgttgacaatgacaatcataacgat

SEQ ID NO: 370704 - DNA, 25 bp, Artificial
  probe
  misc_feature (1)..(25): SEQ ID NO: 4025; WAN024GLH; Start 243; Stop 267
acaatgacaatcataacgatagcaa

SEQ ID NO: 370705 - DNA, 25 bp, Artificial
  probe
  misc_feature (1)..(25): SEQ ID NO: 4025; WAN024GLH; Start 338; Stop 362
aatagcaaatccaatcaaggtaaag

SEQ ID NO: 370706 - DNA, 25 bp, Artificial
  probe
  misc_feature (1)..(25): SEQ ID NO: 4025; WAN024GLH; Start 295; Stop 319
ctggaattgagtacttgataatcgc

SEQ ID NO: 370707 - DNA, 25 bp, Artificial
  probe
  misc_feature (1)..(25): SEQ ID NO: 4025; WAN024GLH; Start 296; Stop 320
tggaattgagtacttgataatcgca

SEQ ID NO: 370708 - DNA, 25 bp, Artificial
  probe
  misc_feature (1)..(25): SEQ ID NO: 4025; WAN024GLH; Start 297; Stop 321
ggaattgagtacttgataatcgcat

SEQ ID NO: 370709 - DNA, 25 bp, Artificial
  probe
  misc_feature (1)..(25): SEQ ID NO: 4025; WAN024GLH; Start 244; Stop 268
caatgacaatcataacgatagcaat

SEQ ID NO: 370710 - DNA, 25 bp, Artificial
  probe
  misc_feature (1)..(25): SEQ ID NO: 4025; WAN024GLH; Start 142; Stop 166
caaccttaaacgagcttcctagtac

SEQ ID NO: 370711 - DNA, 25 bp, Artificial
  probe
  misc_feature (1)..(25): SEQ ID NO: 4025; WAN024GLH; Start 141; Stop 165
tcaaccttaaacgagcttcctagta

SEQ ID NO: 370712 - DNA, 25 bp, Artificial
  probe
  misc_feature (1)..(25): SEQ ID NO: 4025; WAN024GLH; Start 237; Stop 261
ttgttgacaatgacaatcataacga

SEQ ID NO: 370713 - DNA, 25 bp, Artificial
  probe
  misc_feature (1)..(25): SEQ ID NO: 4025; WAN024GLH; Start 350; Stop 374
aatcaaggtaaaggctgtcgcataa

SEQ ID NO: 370714 - DNA, 25 bp, Artificial
  probe
  misc_feature (1)..(25): SEQ ID NO: 4025; WAN024GLH; Start 342; Stop 366
gcaaatccaatcaaggtaaaggctg

SEQ ID NO: 370715 - DNA, 25 bp, Artificial
  probe
  misc_feature (1)..(25): SEQ ID NO: 4025; WAN024GLH; Start 245; Stop 269
aatgacaatcataacgatagcaatc

SEQ ID NO: 370716 - DNA, 25 bp, Artificial
  probe
  misc_feature (1)..(25): SEQ ID NO: 4026; WAN024FVD; Start 502; Stop 526
cagacttcctactatgcctactatg

SEQ ID NO: 370717 - DNA, 25 bp, Artificial
  probe
  misc_feature (1)..(25): SEQ ID NO: 4026; WAN024FVD; Start 503; Stop 527
agacttcctactatgcctactatgc

SEQ ID NO: 370718 - DNA, 25 bp, Artificial
  probe
  misc_feature (1)..(25): SEQ ID NO: 4026; WAN024FVD; Start 56; Stop 80
cgctagtaagtggaattgtgtatct

SEQ ID NO: 370719 - DNA, 25 bp, Artificial
  probe
  misc_feature (1)..(25): SEQ ID NO: 4026; WAN024FVD; Start 57; Stop 81
gctagtaagtggaattgtgtatctg

SEQ ID NO: 370720 - DNA, 25 bp, Artificial
  probe
  misc_feature (1)..(25): SEQ ID NO: 4026; WAN024FVD; Start 55; Stop 79
acgctagtaagtggaattgtgtatc

SEQ ID NO: 370721 - DNA, 25 bp, Artificial
  probe
  misc_feature (1)..(25): SEQ ID NO: 4026; WAN024FVD; Start 54; Stop 78
gacgctagtaagtggaattgtgtat

SEQ ID NO: 370722 - DNA, 25 bp, Artificial
  probe
  misc_feature (1)..(25): SEQ ID NO: 4026; WAN024FVD; Start 1148; Stop 1172
ggcatggtatcggaagtagttatat

SEQ ID NO: 370723 - DNA, 25 bp, Artificial
  probe
  misc_feature (1)..(25): SEQ ID NO: 4026; WAN024FVD; Start 800; Stop 824
gttctcctattctcatgttagcgat

SEQ ID NO: 370724 - DNA, 25 bp, Artificial
  probe
  misc_feature (1)..(25): SEQ ID NO: 4026; WAN024FVD; Start 258; Stop 282
tacctatcatccaatagcctatcgt

SEQ ID NO: 370725 - DNA, 25 bp, Artificial
  probe
  misc_feature (1)..(25): SEQ ID NO: 4026; WAN024FVD; Start 801; Stop 825
ttctcctattctcatgttagcgatg

SEQ ID NO: 370726 - DNA, 25 bp, Artificial
  probe
  misc_feature (1)..(25): SEQ ID NO: 4026; WAN024FVD; Start 259; Stop 283
acctatcatccaatagcctatcgtt

SEQ ID NO: 370727 - DNA, 25 bp, Artificial
  probe
  misc_feature (1)..(25): SEQ ID NO: 4026; WAN024FVD; Start 257; Stop 281
atacctatcatccaatagcctatcg

SEQ ID NO: 370728 - DNA, 25 bp, Artificial
  probe
  misc_feature (1)..(25): SEQ ID NO: 4026; WAN024FVD; Start 53; Stop 77
tgacgctagtaagtggaattgtgta

SEQ ID NO: 370729 - DNA, 25 bp, Artificial
  probe
  misc_feature (1)..(25): SEQ ID NO: 4026; WAN024FVD; Start 1158; Stop 1182
cggaagtagttatatcatggagttg

SEQ ID NO: 370730 - DNA, 25 bp, Artificial
  probe
  misc_feature (1)..(25): SEQ ID NO: 4026; WAN024FVD; Start 1157; Stop 1181
tcggaagtagttatatcatggagtt

SEQ ID NO: 370731 - DNA, 25 bp, Artificial
  probe
  misc_feature (1)..(25): SEQ ID NO: 4026; WAN024FVD; Start 1149; Stop 1173
gcatggtatcggaagtagttatatc

SEQ ID NO: 370732 - DNA, 25 bp, Artificial
  probe
  misc_feature (1)..(25): SEQ ID NO: 4026; WAN024FVD; Start 58; Stop 82
ctagtaagtggaattgtgtatctgt

SEQ ID NO: 370733 - DNA, 25 bp, Artificial
  probe
  misc_feature (1)..(25): SEQ ID NO: 4026; WAN024FVD; Start 1156; Stop 1180
atcggaagtagttatatcatggagt

SEQ ID NO: 370734 - DNA, 25 bp, Artificial
  probe
  misc_feature (1)..(25): SEQ ID NO: 4026; WAN024FVD; Start 51; Stop 75
cttgacgctagtaagtggaattgtg

SEQ ID NO: 370735 - DNA, 25 bp, Artificial
  probe
  misc_feature (1)..(25): SEQ ID NO: 4026; WAN024FVD; Start 59; Stop 83
tagtaagtggaattgtgtatctgtt

SEQ ID NO: 370736 - DNA, 25 bp, Artificial
  probe
  misc_feature (1)..(25): SEQ ID NO: 4026; WAN024FVD; Start 1153; Stop 1177
ggtatcggaagtagttatatcatgg

SEQ ID NO: 370737 - DNA, 25 bp, Artificial
  probe
  misc_feature (1)..(25): SEQ ID NO: 4026; WAN024FVD; Start 1054; Stop 1078
gaacatacaaccaatagtgtggaac

SEQ ID NO: 370738 - DNA, 25 bp, Artificial
  probe
  misc_feature (1)..(25): SEQ ID NO: 4026; WAN024FVD; Start 1055; Stop 1079
aacatacaaccaatagtgtggaact

SEQ ID NO: 370739 - DNA, 25 bp, Artificial
  probe
  misc_feature (1)..(25): SEQ ID NO: 4026; WAN024FVD; Start 1056; Stop 1080
acatacaaccaatagtgtggaacta

SEQ ID NO: 370740 - DNA, 25 bp, Artificial
  probe
  misc_feature (1)..(25): SEQ ID NO: 4026; WAN024FVD; Start 1053; Stop 1077
tgaacatacaaccaatagtgtggaa

SEQ ID NO: 370741 - DNA, 25 bp, Artificial
  probe
  misc_feature (1)..(25): SEQ ID NO: 4026; WAN024FVD; Start 1052; Stop 1076
ttgaacatacaaccaatagtgtgga

SEQ ID NO: 370742 - DNA, 25 bp, Artificial
  probe
  misc_feature (1)..(25): SEQ ID NO: 4026; WAN024FVD; Start 802; Stop 826
tctcctattctcatgttagcgatgg

SEQ ID NO: 370743 - DNA, 25 bp, Artificial
  probe
  misc_feature (1)..(25): SEQ ID NO: 4026; WAN024FVD; Start 799; Stop 823
ggttctcctattctcatgttagcga

SEQ ID NO: 370744 - DNA, 25 bp, Artificial
  probe
  misc_feature (1)..(25): SEQ ID NO: 4026; WAN024FVD; Start 52; Stop 76
ttgacgctagtaagtggaattgtgt

SEQ ID NO: 370745 - DNA, 25 bp, Artificial
  probe
  misc_feature (1)..(25): SEQ ID NO: 4026; WAN024FVD; Start 1058; Stop 1082
atacaaccaatagtgtggaactagc

SEQ ID NO: 370746 - DNA, 25 bp, Artificial
  probe
  misc_feature (1)..(25): SEQ ID NO: 4026; WAN024FVD; Start 1057; Stop 1081
catacaaccaatagtgtggaactag

SEQ ID NO: 370747 - DNA, 25 bp, Artificial
  probe
  misc_feature (1)..(25): SEQ ID NO: 4026; WAN024FVD; Start 575; Stop 599
ttacggtctatgcaatgtgtatgta

SEQ ID NO: 370748 - DNA, 25 bp, Artificial
  probe
  misc_feature (1)..(25): SEQ ID NO: 4026; WAN024FVD; Start 1159; Stop 1183
ggaagtagttatatcatggagttgt

SEQ ID NO: 370749 - DNA, 25 bp, Artificial
  probe
  misc_feature (1)..(25): SEQ ID NO: 4027; WAN024DHB; Start 50; Stop 74
atgcggtgtattctatgtatattcg

SEQ ID NO: 370750 - DNA, 25 bp, Artificial
  probe
  misc_feature (1)..(25): SEQ ID NO: 4027; WAN024DHB; Start 263; Stop 287
cagatgtcgtgacttatcgtatgtc

SEQ ID NO: 370751 - DNA, 25 bp, Artificial
  probe
  misc_feature (1)..(25): SEQ ID NO: 4027; WAN024DHB; Start 49; Stop 73
gatgcggtgtattctatgtatattc

SEQ ID NO: 370752 - DNA, 25 bp, Artificial
  probe
  misc_feature (1)..(25): SEQ ID NO: 4027; WAN024DHB; Start 264; Stop 288
agatgtcgtgacttatcgtatgtcc

SEQ ID NO: 370753 - DNA, 25 bp, Artificial
  probe
  misc_feature (1)..(25): SEQ ID NO: 4027; WAN024DHB; Start 262; Stop 286
gcagatgtcgtgacttatcgtatgt

SEQ ID NO: 370754 - DNA, 25 bp, Artificial
  probe
  misc_feature (1)..(25): SEQ ID NO: 4027; WAN024DHB; Start 265; Stop 289
gatgtcgtgacttatcgtatgtcca

SEQ ID NO: 370755 - DNA, 25 bp, Artificial
  probe
  misc_feature (1)..(25): SEQ ID NO: 4027; WAN024DHB; Start 266; Stop 290
atgtcgtgacttatcgtatgtccac

SEQ ID NO: 370756 - DNA, 25 bp, Artificial
  probe
  misc_feature (1)..(25): SEQ ID NO: 4027; WAN024DHB; Start 260; Stop 284
atgcagatgtcgtgacttatcgtat

SEQ ID NO: 370757 - DNA, 25 bp, Artificial
  probe
  misc_feature (1)..(25): SEQ ID NO: 4027; WAN024DHB; Start 320; Stop 344
atatgactgagaatctggaacgtct

SEQ ID NO: 370758 - DNA, 25 bp, Artificial
  probe
  misc_feature (1)..(25): SEQ ID NO: 4027; WAN024DHB; Start 5; Stop 29
ttgatgtcaatctcattaacgggat

SEQ ID NO: 370759 - DNA, 25 bp, Artificial
  probe
  misc_feature (1)..(25): SEQ ID NO: 4027; WAN024DHB; Start 321; Stop 345
tatgactgagaatctggaacgtctt

SEQ ID NO: 370760 - DNA, 25 bp, Artificial
  probe
  misc_feature (1)..(25): SEQ ID NO: 4027; WAN024DHB; Start 259; Stop 283
aatgcagatgtcgtgacttatcgta

SEQ ID NO: 370761 - DNA, 25 bp, Artificial
  probe
  misc_feature (1)..(25): SEQ ID NO: 4027; WAN024DHB; Start 328; Stop 352
gagaatctggaacgtcttgagagtt

SEQ ID NO: 370762 - DNA, 25 bp, Artificial
  probe
  misc_feature (1)..(25): SEQ ID NO: 4027; WAN024DHB; Start 319; Stop 343
catatgactgagaatctggaacgtc

SEQ ID NO: 370763 - DNA, 25 bp, Artificial
  probe
  misc_feature (1)..(25): SEQ ID NO: 4027; WAN024DHB; Start 6; Stop 30
tgatgtcaatctcattaacgggatt

SEQ ID NO: 370764 - DNA, 25 bp, Artificial
  probe
  misc_feature (1)..(25): SEQ ID NO: 4027; WAN024DHB; Start 326; Stop 350
ctgagaatctggaacgtcttgagag

SEQ ID NO: 370765 - DNA, 25 bp, Artificial
  probe
  misc_feature (1)..(25): SEQ ID NO: 4027; WAN024DHB; Start 261; Stop 285
tgcagatgtcgtgacttatcgtatg

SEQ ID NO: 370766 - DNA, 25 bp, Artificial
  probe
  misc_feature (1)..(25): SEQ ID NO: 4027; WAN024DHB; Start 203; Stop 227
aagaagaagaaatctacaaacgtgg

SEQ ID NO: 370767 - DNA, 25 bp, Artificial
  probe
  misc_feature (1)..(25): SEQ ID NO: 4027; WAN024DHB; Start 322; Stop 346
atgactgagaatctggaacgtcttg

SEQ ID NO: 370768 - DNA, 25 bp, Artificial
  probe
  misc_feature (1)..(25): SEQ ID NO: 4027; WAN024DHB; Start 341; Stop 365
gtcttgagagtttggtttcatggtg

SEQ ID NO: 370769 - DNA, 25 bp, Artificial
  probe
  misc_feature (1)..(25): SEQ ID NO: 4027; WAN024DHB; Start 204; Stop 228
agaagaagaaatctacaaacgtggc

SEQ ID NO: 370770 - DNA, 25 bp, Artificial
  probe
  misc_feature (1)..(25): SEQ ID NO: 4027; WAN024DHB; Start 327; Stop 351
tgagaatctggaacgtcttgagagt

SEQ ID NO: 370771 - DNA, 25 bp, Artificial
  probe
  misc_feature (1)..(25): SEQ ID NO: 4027; WAN024DHB; Start 325; Stop 349
actgagaatctggaacgtcttgaga

SEQ ID NO: 370772 - DNA, 25 bp, Artificial
  probe
  misc_feature (1)..(25): SEQ ID NO: 4027; WAN024DHB; Start 324; Stop 348
gactgagaatctggaacgtcttgag

SEQ ID NO: 370773 - DNA, 25 bp, Artificial
  probe
  misc_feature (1)..(25): SEQ ID NO: 4027; WAN024DHB; Start 318; Stop 342
ccatatgactgagaatctggaacgt

SEQ ID NO: 370774 - DNA, 25 bp, Artificial
  probe
  misc_feature (1)..(25): SEQ ID NO: 4027; WAN024DHB; Start 337; Stop 361
gaacgtcttgagagtttggtttcat

SEQ ID NO: 370775 - DNA, 25 bp, Artificial
  probe
  misc_feature (1)..(25): SEQ ID NO: 4027; WAN024DHB; Start 330; Stop 354
gaatctggaacgtcttgagagtttg

SEQ ID NO: 370776 - DNA, 25 bp, Artificial
  probe
  misc_feature (1)..(25): SEQ ID NO: 4027; WAN024DHB; Start 329; Stop 353
agaatctggaacgtcttgagagttt

SEQ ID NO: 370777 - DNA, 25 bp, Artificial
  probe
  misc_feature (1)..(25): SEQ ID NO: 4027; WAN024DHB; Start 202; Stop 226
aaagaagaagaaatctacaaacgtg

SEQ ID NO: 370778 - DNA, 25 bp, Artificial
  probe
  misc_feature (1)..(25): SEQ ID NO: 4027; WAN024DHB; Start 53; Stop 77
cggtgtattctatgtatattcgccg

SEQ ID NO: 370779 - DNA, 25 bp, Artificial
  probe
  misc_feature (1)..(25): SEQ ID NO: 4027; WAN024DHB; Start 338; Stop 362
aacgtcttgagagtttggtttcatg

SEQ ID NO: 370780 - DNA, 25 bp, Artificial
  probe
  misc_feature (1)..(25): SEQ ID NO: 4027; WAN024DHB; Start 4; Stop 28
attgatgtcaatctcattaacggga

SEQ ID NO: 370781 - DNA, 25 bp, Artificial
  probe
  misc_feature (1)..(25): SEQ ID NO: 4027; WAN024DHB; Start 323; Stop 347
tgactgagaatctggaacgtcttga

SEQ ID NO: 370782 - DNA, 25 bp, Artificial
  probe
  misc_feature (1)..(25): SEQ ID NO: 4028; WAN024FWG; Start 2; Stop 26
tgattggaggcaagaatatggataa

SEQ ID NO: 370783 - DNA, 25 bp, Artificial
  probe
  misc_feature (1)..(25): SEQ ID NO: 4028; WAN024FWG; Start 616; Stop 640
atggtaacgcacgatatagaattgg

SEQ ID NO: 370784 - DNA, 25 bp, Artificial
  probe
  misc_feature (1)..(25): SEQ ID NO: 4028; WAN024FWG; Start 615; Stop 639
tatggtaacgcacgatatagaattg

SEQ ID NO: 370785 - DNA, 25 bp, Artificial
  probe
  misc_feature (1)..(25): SEQ ID NO: 4028; WAN024FWG; Start 1; Stop 25
gtgattggaggcaagaatatggata

SEQ ID NO: 370786 - DNA, 25 bp, Artificial
  probe
  misc_feature (1)..(25): SEQ ID NO: 4028; WAN024FWG; Start 493; Stop 517
gcggttattgctgatagtgatataa

SEQ ID NO: 370787 - DNA, 25 bp, Artificial
  probe
  misc_feature (1)..(25): SEQ ID NO: 4028; WAN024FWG; Start 729; Stop 753
cttagaggtacaatcaactacggag

SEQ ID NO: 370788 - DNA, 25 bp, Artificial
  probe
  misc_feature (1)..(25): SEQ ID NO: 4028; WAN024FWG; Start 727; Stop 751
atcttagaggtacaatcaactacgg

SEQ ID NO: 370789 - DNA, 25 bp, Artificial
  probe
  misc_feature (1)..(25): SEQ ID NO: 4028; WAN024FWG; Start 728; Stop 752
tcttagaggtacaatcaactacgga

SEQ ID NO: 370790 - DNA, 25 bp, Artificial
  probe
  misc_feature (1)..(25): SEQ ID NO: 4028; WAN024FWG; Start 734; Stop 758
aggtacaatcaactacggaggaata

SEQ ID NO: 370791 - DNA, 25 bp, Artificial
  probe
  misc_feature (1)..(25): SEQ ID NO: 4028; WAN024FWG; Start 614; Stop 638
ttatggtaacgcacgatatagaatt

SEQ ID NO: 370792 - DNA, 25 bp, Artificial
  probe
  misc_feature (1)..(25): SEQ ID NO: 4028; WAN024FWG; Start 612; Stop 636
aattatggtaacgcacgatatagaa

SEQ ID NO: 370793 - DNA, 25 bp, Artificial
  probe
  misc_feature (1)..(25): SEQ ID NO: 4028; WAN024FWG; Start 613; Stop 637
attatggtaacgcacgatatagaat

SEQ ID NO: 370794 - DNA, 25 bp, Artificial
  probe
  misc_feature (1)..(25): SEQ ID NO: 4028; WAN024FWG; Start 601; Stop 625
ggtaagtgtgtaattatggtaacgc

SEQ ID NO: 370795 - DNA, 25 bp, Artificial
  probe
  misc_feature (1)..(25): SEQ ID NO: 4028; WAN024FWG; Start 602; Stop 626
gtaagtgtgtaattatggtaacgca

SEQ ID NO: 370796 - DNA, 25 bp, Artificial
  probe
  misc_feature (1)..(25): SEQ ID NO: 4028; WAN024FWG; Start 730; Stop 754
ttagaggtacaatcaactacggagg

SEQ ID NO: 370797 - DNA, 25 bp, Artificial
  probe
  misc_feature (1)..(25): SEQ ID NO: 4028; WAN024FWG; Start 733; Stop 757
gaggtacaatcaactacggaggaat

SEQ ID NO: 370798 - DNA, 25 bp, Artificial
  probe
  misc_feature (1)..(25): SEQ ID NO: 4028; WAN024FWG; Start 726; Stop 750
aatcttagaggtacaatcaactacg

SEQ ID NO: 370799 - DNA, 25 bp, Artificial
  probe
  misc_feature (1)..(25): SEQ ID NO: 4028; WAN024FWG; Start 731; Stop 755
tagaggtacaatcaactacggagga

SEQ ID NO: 370800 - DNA, 25 bp, Artificial
  probe
  misc_feature (1)..(25): SEQ ID NO: 4028; WAN024FWG; Start 609; Stop 633
tgtaattatggtaacgcacgatata

SEQ ID NO: 370801 - DNA, 25 bp, Artificial
  probe
  misc_feature (1)..(25): SEQ ID NO: 4028; WAN024FWG; Start 142; Stop 166
attctaggaattagtggttctggaa

SEQ ID NO: 370802 - DNA, 25 bp, Artificial
  probe
  misc_feature (1)..(25): SEQ ID NO: 4028; WAN024FWG; Start 607; Stop 631
tgtgtaattatggtaacgcacgata

SEQ ID NO: 370803 - DNA, 25 bp, Artificial
  probe
  misc_feature (1)..(25): SEQ ID NO: 4028; WAN024FWG; Start 6; Stop 30
tggaggcaagaatatggataaagat

SEQ ID NO: 370804 - DNA, 25 bp, Artificial
  probe
  misc_feature (1)..(25): SEQ ID NO: 4028; WAN024FWG; Start 603; Stop 627
taagtgtgtaattatggtaacgcac

SEQ ID NO: 370805 - DNA, 25 bp, Artificial
  probe
  misc_feature (1)..(25): SEQ ID NO: 4028; WAN024FWG; Start 608; Stop 632
gtgtaattatggtaacgcacgatat

SEQ ID NO: 370806 - DNA, 25 bp, Artificial
  probe
  misc_feature (1)..(25): SEQ ID NO: 4028; WAN024FWG; Start 308; Stop 332
catacaatttaataccttccctgcc

SEQ ID NO: 370807 - DNA, 25 bp, Artificial
  probe
  misc_feature (1)..(25): SEQ ID NO: 4028; WAN024FWG; Start 410; Stop 434
aaagaatgaagtttaatgctggctt

SEQ ID NO: 370808 - DNA, 25 bp, Artificial
  probe
  misc_feature (1)..(25): SEQ ID NO: 4028; WAN024FWG; Start 146; Stop 170
taggaattagtggttctggaaagtc

SEQ ID NO: 370809 - DNA, 25 bp, Artificial
  probe
  misc_feature (1)..(25): SEQ ID NO: 4028; WAN024FWG; Start 610; Stop 634
gtaattatggtaacgcacgatatag

SEQ ID NO: 370810 - DNA, 25 bp, Artificial
  probe
  misc_feature (1)..(25): SEQ ID NO: 4028; WAN024FWG; Start 309; Stop 333
atacaatttaataccttccctgccg

SEQ ID NO: 370811 - DNA, 25 bp, Artificial
  probe
  misc_feature (1)..(25): SEQ ID NO: 4028; WAN024FWG; Start 411; Stop 435
aagaatgaagtttaatgctggctta

SEQ ID NO: 370812 - DNA, 25 bp, Artificial
  probe
  misc_feature (1)..(25): SEQ ID NO: 4028; WAN024FWG; Start 149; Stop 173
gaattagtggttctggaaagtcaac

SEQ ID NO: 370813 - DNA, 25 bp, Artificial
  probe
  misc_feature (1)..(25): SEQ ID NO: 4028; WAN024FWG; Start 141; Stop 165
tattctaggaattagtggttctgga

SEQ ID NO: 370814 - DNA, 25 bp, Artificial
  probe
  misc_feature (1)..(25): SEQ ID NO: 4028; WAN024FWG; Start 140; Stop 164
gtattctaggaattagtggttctgg

SEQ ID NO: 370815 - DNA, 25 bp, Artificial
  probe
  misc_feature (1)..(25): SEQ ID NO: 4029; WAN024GID; Start 219; Stop 243
ggtagataggattgttgaggaagac

SEQ ID NO: 370816 - DNA, 25 bp, Artificial
  probe
  misc_feature (1)..(25): SEQ ID NO: 4029; WAN024GID; Start 220; Stop 244
gtagataggattgttgaggaagacg

SEQ ID NO: 370817 - DNA, 25 bp, Artificial
  probe
  misc_feature (1)..(25): SEQ ID NO: 4029; WAN024GID; Start 224; Stop 248
ataggattgttgaggaagacggtat

SEQ ID NO: 370818 - DNA, 25 bp, Artificial
  probe
  misc_feature (1)..(25): SEQ ID NO: 4029; WAN024GID; Start 225; Stop 249
taggattgttgaggaagacggtatt

SEQ ID NO: 370819 - DNA, 25 bp, Artificial
  probe
  misc_feature (1)..(25): SEQ ID NO: 4029; WAN024GID; Start 221; Stop 245
tagataggattgttgaggaagacgg

SEQ ID NO: 370820 - DNA, 25 bp, Artificial
  probe
  misc_feature (1)..(25): SEQ ID NO: 4029; WAN024GID; Start 223; Stop 247
gataggattgttgaggaagacggta

SEQ ID NO: 370821 - DNA, 25 bp, Artificial
  probe
  misc_feature (1)..(25): SEQ ID NO: 4029; WAN024GID; Start 218; Stop 242
gggtagataggattgttgaggaaga

SEQ ID NO: 370822 - DNA, 25 bp, Artificial
  probe
  misc_feature (1)..(25): SEQ ID NO: 4029; WAN024GID; Start 114; Stop 138
tatcagtcatcaggagaaattggaa

SEQ ID NO: 370823 - DNA, 25 bp, Artificial
  probe
  misc_feature (1)..(25): SEQ ID NO: 4029; WAN024GID; Start 113; Stop 137
ttatcagtcatcaggagaaattgga

SEQ ID NO: 370824 - DNA, 25 bp, Artificial
  probe
  misc_feature (1)..(25): SEQ ID NO: 4029; WAN024GID; Start 222; Stop 246
agataggattgttgaggaagacggt

SEQ ID NO: 370825 - DNA, 25 bp, Artificial
  probe
  misc_feature (1)..(25): SEQ ID NO: 4029; WAN024GID; Start 115; Stop 139
atcagtcatcaggagaaattggaac

SEQ ID NO: 370826 - DNA, 25 bp, Artificial
  probe
  misc_feature (1)..(25): SEQ ID NO: 4029; WAN024GID; Start 112; Stop 136
tttatcagtcatcaggagaaattgg

SEQ ID NO: 370827 - DNA, 25 bp, Artificial
  probe
  misc_feature (1)..(25): SEQ ID NO: 4029; WAN024GID; Start 74; Stop 98
ctgatgaaacttctatgcttgcgat

SEQ ID NO: 370828 - DNA, 25 bp, Artificial
  probe
  misc_feature (1)..(25): SEQ ID NO: 4029; WAN024GID; Start 227; Stop 251
ggattgttgaggaagacggtatttg

SEQ ID NO: 370829 - DNA, 25 bp, Artificial
  probe
  misc_feature (1)..(25): SEQ ID NO: 4029; WAN024GID; Start 226; Stop 250
aggattgttgaggaagacggtattt

SEQ ID NO: 370830 - DNA, 25 bp, Artificial
  probe
  misc_feature (1)..(25): SEQ ID NO: 4029; WAN024GID; Start 338; Stop 362
caacctatttcatgggagatggata

SEQ ID NO: 370831 - DNA, 25 bp, Artificial
  probe
  misc_feature (1)..(25): SEQ ID NO: 4029; WAN024GID; Start 75; Stop 99
tgatgaaacttctatgcttgcgatg

SEQ ID NO: 370832 - DNA, 25 bp, Artificial
  probe
  misc_feature (1)..(25): SEQ ID NO: 4029; WAN024GID; Start 72; Stop 96
ttctgatgaaacttctatgcttgcg

SEQ ID NO: 370833 - DNA, 25 bp, Artificial
  probe
  misc_feature (1)..(25): SEQ ID NO: 4029; WAN024GID; Start 339; Stop 363
aacctatttcatgggagatggatat

SEQ ID NO: 370834 - DNA, 25 bp, Artificial
  probe
  misc_feature (1)..(25): SEQ ID NO: 4029; WAN024GID; Start 31; Stop 55
gcagagcagatcaaacagtatcaaa

SEQ ID NO: 370835 - DNA, 25 bp, Artificial
  probe
  misc_feature (1)..(25): SEQ ID NO: 4029; WAN024GID; Start 228; Stop 252
gattgttgaggaagacggtatttgc

SEQ ID NO: 370836 - DNA, 25 bp, Artificial
  probe
  misc_feature (1)..(25): SEQ ID NO: 4029; WAN024GID; Start 76; Stop 100
gatgaaacttctatgcttgcgatgg

SEQ ID NO: 370837 - DNA, 25 bp, Artificial
  probe
  misc_feature (1)..(25): SEQ ID NO: 4029; WAN024GID; Start 73; Stop 97
tctgatgaaacttctatgcttgcga

SEQ ID NO: 370838 - DNA, 25 bp, Artificial
  probe
  misc_feature (1)..(25): SEQ ID NO: 4029; WAN024GID; Start 77; Stop 101
atgaaacttctatgcttgcgatgga

SEQ ID NO: 370839 - DNA, 25 bp, Artificial
  probe
  misc_feature (1)..(25): SEQ ID NO: 4029; WAN024GID; Start 139; Stop 163
cgtttgggagtgcattatgaaattt

SEQ ID NO: 370840 - DNA, 25 bp, Artificial
  probe
  misc_feature (1)..(25): SEQ ID NO: 4029; WAN024GID; Start 116; Stop 140
tcagtcatcaggagaaattggaacg

SEQ ID NO: 370841 - DNA, 25 bp, Artificial
  probe
  misc_feature (1)..(25): SEQ ID NO: 4029; WAN024GID; Start 71; Stop 95
tttctgatgaaacttctatgcttgc

SEQ ID NO: 370842 - DNA, 25 bp, Artificial
  probe
  misc_feature (1)..(25): SEQ ID NO: 4029; WAN024GID; Start 343; Stop 367
tatttcatgggagatggatatcagc

SEQ ID NO: 370843 - DNA, 25 bp, Artificial
  probe
  misc_feature (1)..(25): SEQ ID NO: 4029; WAN024GID; Start 341; Stop 365
cctatttcatgggagatggatatca

SEQ ID NO: 370844 - DNA, 25 bp, Artificial
  probe
  misc_feature (1)..(25): SEQ ID NO: 4029; WAN024GID; Start 340; Stop 364
acctatttcatgggagatggatatc

SEQ ID NO: 370845 - DNA, 25 bp, Artificial
  probe
  misc_feature (1)..(25): SEQ ID NO: 4029; WAN024GID; Start 138; Stop 162
acgtttgggagtgcattatgaaatt

SEQ ID NO: 370846 - DNA, 25 bp, Artificial
  probe
  misc_feature (1)..(25): SEQ ID NO: 4029; WAN024GID; Start 108; Stop 132
tggttttatcagtcatcaggagaaa

SEQ ID NO: 370847 - DNA, 25 bp, Artificial
  probe
  misc_feature (1)..(25): SEQ ID NO: 4029; WAN024GID; Start 78; Stop 102
tgaaacttctatgcttgcgatggag

SEQ ID NO: 370848 - DNA, 25 bp, Artificial
  probe
  misc_feature (1)..(25): SEQ ID NO: 4030; WAN024CGG-5; Start 320; Stop 344
tggattcactctattctatcgttca

SEQ ID NO: 370849 - DNA, 25 bp, Artificial
  probe
  misc_feature (1)..(25): SEQ ID NO: 4030; WAN024CGG-5; Start 428; Stop 452
tctctgtagaagataagtccattgc

SEQ ID NO: 370850 - DNA, 25 bp, Artificial
  probe
  misc_feature (1)..(25): SEQ ID NO: 4030; WAN024CGG-5; Start 423; Stop 447
tctcctctctgtagaagataagtcc

SEQ ID NO: 370851 - DNA, 25 bp, Artificial
  probe
  misc_feature (1)..(25): SEQ ID NO: 4030; WAN024CGG-5; Start 325; Stop 349
tcactctattctatcgttcagatgc

SEQ ID NO: 370852 - DNA, 25 bp, Artificial
  probe
  misc_feature (1)..(25): SEQ ID NO: 4030; WAN024CGG-5; Start 425; Stop 449
tcctctctgtagaagataagtccat

SEQ ID NO: 370853 - DNA, 25 bp, Artificial
  probe
  misc_feature (1)..(25): SEQ ID NO: 4030; WAN024CGG-5; Start 424; Stop 448
ctcctctctgtagaagataagtcca

SEQ ID NO: 370854 - DNA, 25 bp, Artificial
  probe
  misc_feature (1)..(25): SEQ ID NO: 4030; WAN024CGG-5; Start 421; Stop 445
cgtctcctctctgtagaagataagt

SEQ ID NO: 370855 - DNA, 25 bp, Artificial
  probe
  misc_feature (1)..(25): SEQ ID NO: 4030; WAN024CGG-5; Start 422; Stop 446
gtctcctctctgtagaagataagtc

SEQ ID NO: 370856 - DNA, 25 bp, Artificial
  probe
  misc_feature (1)..(25): SEQ ID NO: 4030; WAN024CGG-5; Start 321; Stop 345
ggattcactctattctatcgttcag

SEQ ID NO: 370857 - DNA, 25 bp, Artificial
  probe
  misc_feature (1)..(25): SEQ ID NO: 4030; WAN024CGG-5; Start 426; Stop 450
cctctctgtagaagataagtccatt

SEQ ID NO: 370858 - DNA, 25 bp, Artificial
  probe
  misc_feature (1)..(25): SEQ ID NO: 4030; WAN024CGG-5; Start 326; Stop 350
cactctattctatcgttcagatgcc

SEQ ID NO: 370859 - DNA, 25 bp, Artificial
  probe
  misc_feature (1)..(25): SEQ ID NO: 4030; WAN024CGG-5; Start 429; Stop 453
ctctgtagaagataagtccattgcg

SEQ ID NO: 370860 - DNA, 25 bp, Artificial
  probe
  misc_feature (1)..(25): SEQ ID NO: 4030; WAN024CGG-5; Start 420; Stop 444
ccgtctcctctctgtagaagataag

SEQ ID NO: 370861 - DNA, 25 bp, Artificial
  probe
  misc_feature (1)..(25): SEQ ID NO: 4030; WAN024CGG-5; Start 419; Stop 443
tccgtctcctctctgtagaagataa

SEQ ID NO: 370862 - DNA, 25 bp, Artificial
  probe
  misc_feature (1)..(25): SEQ ID NO: 4030; WAN024CGG-5; Start 427; Stop 451
ctctctgtagaagataagtccattg

SEQ ID NO: 370863 - DNA, 25 bp, Artificial
  probe
  misc_feature (1)..(25): SEQ ID NO: 4030; WAN024CGG-5; Start 418; Stop 442
ctccgtctcctctctgtagaagata

SEQ ID NO: 370864 - DNA, 25 bp, Artificial
  probe
  misc_feature (1)..(25): SEQ ID NO: 4030; WAN024CGG-5; Start 324; Stop 348
ttcactctattctatcgttcagatg

SEQ ID NO: 370865 - DNA, 25 bp, Artificial
  probe
  misc_feature (1)..(25): SEQ ID NO: 4030; WAN024CGG-5; Start 430; Stop 454
tctgtagaagataagtccattgcgg

SEQ ID NO: 370866 - DNA, 25 bp, Artificial
  probe
  misc_feature (1)..(25): SEQ ID NO: 4030; WAN024CGG-5; Start 327; Stop 351
actctattctatcgttcagatgccg

SEQ ID NO: 370867 - DNA, 25 bp, Artificial
  probe
  misc_feature (1)..(25): SEQ ID NO: 4030; WAN024CGG-5; Start 322; Stop 346
gattcactctattctatcgttcaga

SEQ ID NO: 370868 - DNA, 25 bp, Artificial
  probe
  misc_feature (1)..(25): SEQ ID NO: 4030; WAN024CGG-5; Start 319; Stop 343
gtggattcactctattctatcgttc

SEQ ID NO: 370869 - DNA, 25 bp, Artificial
  probe
  misc_feature (1)..(25): SEQ ID NO: 4030; WAN024CGG-5; Start 433; Stop 457
gtagaagataagtccattgcggatg

SEQ ID NO: 370870 - DNA, 25 bp, Artificial
  probe
  misc_feature (1)..(25): SEQ ID NO: 4030; WAN024CGG-5; Start 432; Stop 456
tgtagaagataagtccattgcggat

SEQ ID NO: 370871 - DNA, 25 bp, Artificial
  probe
  misc_feature (1)..(25): SEQ ID NO: 4030; WAN024CGG-5; Start 195; Stop 219
tagtcgtggcatcaagatcatcatc

SEQ ID NO: 370872 - DNA, 25 bp, Artificial
  probe
  misc_feature (1)..(25): SEQ ID NO: 4030; WAN024CGG-5; Start 323; Stop 347
attcactctattctatcgttcagat

SEQ ID NO: 370873 - DNA, 25 bp, Artificial
  probe
  misc_feature (1)..(25): SEQ ID NO: 4030; WAN024CGG-5; Start 194; Stop 218
gtagtcgtggcatcaagatcatcat

SEQ ID NO: 370874 - DNA, 25 bp, Artificial
  probe
  misc_feature (1)..(25): SEQ ID NO: 4030; WAN024CGG-5; Start 22; Stop 46
aaaggagaagaaatgaaaccagtaa

SEQ ID NO: 370875 - DNA, 25 bp, Artificial
  probe
  misc_feature (1)..(25): SEQ ID NO: 4030; WAN024CGG-5; Start 431; Stop 455
ctgtagaagataagtccattgcgga

SEQ ID NO: 370876 - DNA, 25 bp, Artificial
  probe
  misc_feature (1)..(25): SEQ ID NO: 4030; WAN024CGG-5; Start 23; Stop 47
aaggagaagaaatgaaaccagtaat

SEQ ID NO: 370877 - DNA, 25 bp, Artificial
  probe
  misc_feature (1)..(25): SEQ ID NO: 4030; WAN024CGG-5; Start 24; Stop 48
aggagaagaaatgaaaccagtaatt

SEQ ID NO: 370878 - DNA, 25 bp, Artificial
  probe
  misc_feature (1)..(25): SEQ ID NO: 4030; WAN024CGG-5; Start 434; Stop 458
tagaagataagtccattgcggatgc

SEQ ID NO: 370879 - DNA, 25 bp, Artificial
  probe
  misc_feature (1)..(25): SEQ ID NO: 4030; WAN024CGG-5; Start 464; Stop 488
ccaactttgctgaagaacaaggaaa

SEQ ID NO: 370880 - DNA, 25 bp, Artificial
  probe
  misc_feature (1)..(25): SEQ ID NO: 4030; WAN024CGG-5; Start 25; Stop 49
ggagaagaaatgaaaccagtaattt

SEQ ID NO: 370881 - DNA, 25 bp, Artificial
  probe
  misc_feature (1)..(25): SEQ ID NO: 4031; WAN024FB3; Start 113; Stop 137
atcaaggctggaataatcggagtaa

SEQ ID NO: 370882 - DNA, 25 bp, Artificial
  probe
  misc_feature (1)..(25): SEQ ID NO: 4031; WAN024FB3; Start 22; Stop 46
ctgagaggattctgtgatggtcttg

SEQ ID NO: 370883 - DNA, 25 bp, Artificial
  probe
  misc_feature (1)..(25): SEQ ID NO: 4031; WAN024FB3; Start 21; Stop 45
actgagaggattctgtgatggtctt

SEQ ID NO: 370884 - DNA, 25 bp, Artificial
  probe
  misc_feature (1)..(25): SEQ ID NO: 4031; WAN024FB3; Start 20; Stop 44
aactgagaggattctgtgatggtct

SEQ ID NO: 370885 - DNA, 25 bp, Artificial
  probe
  misc_feature (1)..(25): SEQ ID NO: 4031; WAN024FB3; Start 114; Stop 138
tcaaggctggaataatcggagtaaa

SEQ ID NO: 370886 - DNA, 25 bp, Artificial
  probe
  misc_feature (1)..(25): SEQ ID NO: 4031; WAN024FB3; Start 207; Stop 231
cttctttggaaacaccctcaatacc

SEQ ID NO: 370887 - DNA, 25 bp, Artificial
  probe
  misc_feature (1)..(25): SEQ ID NO: 4031; WAN024FB3; Start 208; Stop 232
ttctttggaaacaccctcaatacct

SEQ ID NO: 370888 - DNA, 25 bp, Artificial
  probe
  misc_feature (1)..(25): SEQ ID NO: 4031; WAN024FB3; Start 19; Stop 43
aaactgagaggattctgtgatggtc

SEQ ID NO: 370889 - DNA, 25 bp, Artificial
  probe
  misc_feature (1)..(25): SEQ ID NO: 4031; WAN024FB3; Start 206; Stop 230
gcttctttggaaacaccctcaatac

SEQ ID NO: 370890 - DNA, 25 bp, Artificial
  probe
  misc_feature (1)..(25): SEQ ID NO: 4031; WAN024FB3; Start 209; Stop 233
tctttggaaacaccctcaatacctg

SEQ ID NO: 370891 - DNA, 25 bp, Artificial
  probe
  misc_feature (1)..(25): SEQ ID NO: 4031; WAN024FB3; Start 205; Stop 229
tgcttctttggaaacaccctcaata

SEQ ID NO: 370892 - DNA, 25 bp, Artificial
  probe
  misc_feature (1)..(25): SEQ ID NO: 4031; WAN024FB3; Start 210; Stop 234
ctttggaaacaccctcaatacctga

SEQ ID NO: 370893 - DNA, 25 bp, Artificial
  probe
  misc_feature (1)..(25): SEQ ID NO: 4031; WAN024FB3; Start 23; Stop 47
tgagaggattctgtgatggtcttgc

SEQ ID NO: 370894 - DNA, 25 bp, Artificial
  probe
  misc_feature (1)..(25): SEQ ID NO: 4031; WAN024FB3; Start 204; Stop 228
ctgcttctttggaaacaccctcaat

SEQ ID NO: 370895 - DNA, 25 bp, Artificial
  probe
  misc_feature (1)..(25): SEQ ID NO: 4031; WAN024FB3; Start 17; Stop 41
caaaactgagaggattctgtgatgg

SEQ ID NO: 370896 - DNA, 25 bp, Artificial
  probe
  misc_feature (1)..(25): SEQ ID NO: 4031; WAN024FB3; Start 16; Stop 40
ccaaaactgagaggattctgtgatg

SEQ ID NO: 370897 - DNA, 25 bp, Artificial
  probe
  misc_feature (1)..(25): SEQ ID NO: 4031; WAN024FB3; Start 18; Stop 42
aaaactgagaggattctgtgatggt

SEQ ID NO: 370898 - DNA, 25 bp, Artificial
  probe
  misc_feature (1)..(25): SEQ ID NO: 4031; WAN024FB3; Start 24; Stop 48
gagaggattctgtgatggtcttgcc

SEQ ID NO: 370899 - DNA, 25 bp, Artificial
  probe
  misc_feature (1)..(25): SEQ ID NO: 4031; WAN024FB3; Start 15; Stop 39
cccaaaactgagaggattctgtgat

SEQ ID NO: 370900 - DNA, 25 bp, Artificial
  probe
  misc_feature (1)..(25): SEQ ID NO: 4031; WAN024FB3; Start 166; Stop 190
ttggaccacgttttgattactctta

SEQ ID NO: 370901 - DNA, 25 bp, Artificial
  probe
  misc_feature (1)..(25): SEQ ID NO: 4031; WAN024FB3; Start 167; Stop 191
tggaccacgttttgattactcttag

SEQ ID NO: 370902 - DNA, 25 bp, Artificial
  probe
  misc_feature (1)..(25): SEQ ID NO: 4031; WAN024FB3; Start 169; Stop 193
gaccacgttttgattactcttagct

SEQ ID NO: 370903 - DNA, 25 bp, Artificial
  probe
  misc_feature (1)..(25): SEQ ID NO: 4031; WAN024FB3; Start 170; Stop 194
accacgttttgattactcttagctg

SEQ ID NO: 370904 - DNA, 25 bp, Artificial
  probe
  misc_feature (1)..(25): SEQ ID NO: 4031; WAN024FB3; Start 165; Stop 189
cttggaccacgttttgattactctt

SEQ ID NO: 370905 - DNA, 25 bp, Artificial
  probe
  misc_feature (1)..(25): SEQ ID NO: 4031; WAN024FB3; Start 62; Stop 86
caatggacaccttccaagacattac

SEQ ID NO: 370906 - DNA, 25 bp, Artificial
  probe
  misc_feature (1)..(25): SEQ ID NO: 4031; WAN024FB3; Start 147; Stop 171
ccagagtggtcataacaccttggac

SEQ ID NO: 370907 - DNA, 25 bp, Artificial
  probe
  misc_feature (1)..(25): SEQ ID NO: 4031; WAN024FB3; Start 172; Stop 196
cacgttttgattactcttagctgca

SEQ ID NO: 370908 - DNA, 25 bp, Artificial
  probe
  misc_feature (1)..(25): SEQ ID NO: 4031; WAN024FB3; Start 168; Stop 192
ggaccacgttttgattactcttagc

SEQ ID NO: 370909 - DNA, 25 bp, Artificial
  probe
  misc_feature (1)..(25): SEQ ID NO: 4031; WAN024FB3; Start 171; Stop 195
ccacgttttgattactcttagctgc

SEQ ID NO: 370910 - DNA, 25 bp, Artificial
  probe
  misc_feature (1)..(25): SEQ ID NO: 4031; WAN024FB3; Start 197; Stop 221
gacttggctgcttctttggaaacac

SEQ ID NO: 370911 - DNA, 25 bp, Artificial
  probe
  misc_feature (1)..(25): SEQ ID NO: 4031; WAN024FB3; Start 61; Stop 85
ccaatggacaccttccaagacatta

SEQ ID NO: 370912 - DNA, 25 bp, Artificial
  probe
  misc_feature (1)..(25): SEQ ID NO: 4031; WAN024FB3; Start 196; Stop 220
agacttggctgcttctttggaaaca

SEQ ID NO: 370913 - DNA, 25 bp, Artificial
  probe
  misc_feature (1)..(25): SEQ ID NO: 4031; WAN024FB3; Start 195; Stop 219
cagacttggctgcttctttggaaac

SEQ ID NO: 370914 - DNA, 25 bp, Artificial
  probe
  misc_feature (1)..(25): SEQ ID NO: 4032; WAN024C8R; Start 99; Stop 123
attccgttctaatacaggcatctac

SEQ ID NO: 370915 - DNA, 25 bp, Artificial
  probe
  misc_feature (1)..(25): SEQ ID NO: 4032; WAN024C8R; Start 98; Stop 122
tattccgttctaatacaggcatcta

SEQ ID NO: 370916 - DNA, 25 bp, Artificial
  probe
  misc_feature (1)..(25): SEQ ID NO: 4032; WAN024C8R; Start 105; Stop 129
ttctaatacaggcatctacgctcaa

SEQ ID NO: 370917 - DNA, 25 bp, Artificial
  probe
  misc_feature (1)..(25): SEQ ID NO: 4032; WAN024C8R; Start 106; Stop 130
tctaatacaggcatctacgctcaag

SEQ ID NO: 370918 - DNA, 25 bp, Artificial
  probe
  misc_feature (1)..(25): SEQ ID NO: 4032; WAN024C8R; Start 107; Stop 131
ctaatacaggcatctacgctcaagt

SEQ ID NO: 370919 - DNA, 25 bp, Artificial
  probe
  misc_feature (1)..(25): SEQ ID NO: 4032; WAN024C8R; Start 104; Stop 128
gttctaatacaggcatctacgctca

SEQ ID NO: 370920 - DNA, 25 bp, Artificial
  probe
  misc_feature (1)..(25): SEQ ID NO: 4032; WAN024C8R; Start 108; Stop 132
taatacaggcatctacgctcaagtg

SEQ ID NO: 370921 - DNA, 25 bp, Artificial
  probe
  misc_feature (1)..(25): SEQ ID NO: 4032; WAN024C8R; Start 249; Stop 273
aaacgctaaaggtatttcagaagtg

SEQ ID NO: 370922 - DNA, 25 bp, Artificial
  probe
  misc_feature (1)..(25): SEQ ID NO: 4032; WAN024C8R; Start 248; Stop 272
caaacgctaaaggtatttcagaagt

SEQ ID NO: 370923 - DNA, 25 bp, Artificial
  probe
  misc_feature (1)..(25): SEQ ID NO: 4032; WAN024C8R; Start 253; Stop 277
gctaaaggtatttcagaagtggtgt

SEQ ID NO: 370924 - DNA, 25 bp, Artificial
  probe
  misc_feature (1)..(25): SEQ ID NO: 4032; WAN024C8R; Start 247; Stop 271
gcaaacgctaaaggtatttcagaag

SEQ ID NO: 370925 - DNA, 25 bp, Artificial
  probe
  misc_feature (1)..(25): SEQ ID NO: 4032; WAN024C8R; Start 254; Stop 278
ctaaaggtatttcagaagtggtgtt

SEQ ID NO: 370926 - DNA, 25 bp, Artificial
  probe
  misc_feature (1)..(25): SEQ ID NO: 4032; WAN024C8R; Start 255; Stop 279
taaaggtatttcagaagtggtgttc

SEQ ID NO: 370927 - DNA, 25 bp, Artificial
  probe
  misc_feature (1)..(25): SEQ ID NO: 4032; WAN024C8R; Start 250; Stop 274
aacgctaaaggtatttcagaagtgg

SEQ ID NO: 370928 - DNA, 25 bp, Artificial
  probe
  misc_feature (1)..(25): SEQ ID NO: 4032; WAN024C8R; Start 256; Stop 280
aaaggtatttcagaagtggtgttcg

SEQ ID NO: 370929 - DNA, 25 bp, Artificial
  probe
  misc_feature (1)..(25): SEQ ID NO: 4032; WAN024C8R; Start 252; Stop 276
cgctaaaggtatttcagaagtggtg

SEQ ID NO: 370930 - DNA, 25 bp, Artificial
  probe
  misc_feature (1)..(25): SEQ ID NO: 4032; WAN024C8R; Start 251; Stop 275
acgctaaaggtatttcagaagtggt

SEQ ID NO: 370931 - DNA, 25 bp, Artificial
  probe
  misc_feature (1)..(25): SEQ ID NO: 4032; WAN024C8R; Start 110; Stop 134
atacaggcatctacgctcaagtgat

SEQ ID NO: 370932 - DNA, 25 bp, Artificial
  probe
  misc_feature (1)..(25): SEQ ID NO: 4032; WAN024C8R; Start 109; Stop 133
aatacaggcatctacgctcaagtga

SEQ ID NO: 370933 - DNA, 25 bp, Artificial
  probe
  misc_feature (1)..(25): SEQ ID NO: 4032; WAN024C8R; Start 111; Stop 135
tacaggcatctacgctcaagtgatt

SEQ ID NO: 370934 - DNA, 25 bp, Artificial
  probe
  misc_feature (1)..(25): SEQ ID NO: 4032; WAN024C8R; Start 288; Stop 312
tggatatctatatcacggacgtgtg

SEQ ID NO: 370935 - DNA, 25 bp, Artificial
  probe
  misc_feature (1)..(25): SEQ ID NO: 4032; WAN024C8R; Start 287; Stop 311
gtggatatctatatcacggacgtgt

SEQ ID NO: 370936 - DNA, 25 bp, Artificial
  probe
  misc_feature (1)..(25): SEQ ID NO: 4032; WAN024C8R; Start 117; Stop 141
catctacgctcaagtgattgatgac

SEQ ID NO: 370937 - DNA, 25 bp, Artificial
  probe
  misc_feature (1)..(25): SEQ ID NO: 4032; WAN024C8R; Start 100; Stop 124
ttccgttctaatacaggcatctacg

SEQ ID NO: 370938 - DNA, 25 bp, Artificial
  probe
  misc_feature (1)..(25): SEQ ID NO: 4032; WAN024C8R; Start 246; Stop 270
tgcaaacgctaaaggtatttcagaa

SEQ ID NO: 370939 - DNA, 25 bp, Artificial
  probe
  misc_feature (1)..(25): SEQ ID NO: 4032; WAN024C8R; Start 286; Stop 310
ggtggatatctatatcacggacgtg

SEQ ID NO: 370940 - DNA, 25 bp, Artificial
  probe
  misc_feature (1)..(25): SEQ ID NO: 4032; WAN024C8R; Start 97; Stop 121
gtattccgttctaatacaggcatct

SEQ ID NO: 370941 - DNA, 25 bp, Artificial
  probe
  misc_feature (1)..(25): SEQ ID NO: 4032; WAN024C8R; Start 192; Stop 216
aaaaggaactaaaactgaacaagcc

SEQ ID NO: 370942 - DNA, 25 bp, Artificial
  probe
  misc_feature (1)..(25): SEQ ID NO: 4032; WAN024C8R; Start 191; Stop 215
caaaaggaactaaaactgaacaagc

SEQ ID NO: 370943 - DNA, 25 bp, Artificial
  probe
  misc_feature (1)..(25): SEQ ID NO: 4032; WAN024C8R; Start 257; Stop 281
aaggtatttcagaagtggtgttcga

SEQ ID NO: 370944 - DNA, 25 bp, Artificial
  probe
  misc_feature (1)..(25): SEQ ID NO: 4032; WAN024C8R; Start 245; Stop 269
gtgcaaacgctaaaggtatttcaga

SEQ ID NO: 370945 - DNA, 25 bp, Artificial
  probe
  misc_feature (1)..(25): SEQ ID NO: 4032; WAN024C8R; Start 96; Stop 120
cgtattccgttctaatacaggcatc

SEQ ID NO: 370946 - DNA, 25 bp, Artificial
  probe
  misc_feature (1)..(25): SEQ ID NO: 4032; WAN024C8R; Start 162; Stop 186
aagtgcttcaactcttgataaagaa

SEQ ID NO: 370947 - DNA, 25 bp, Artificial
  probe
  misc_feature (1)..(25): SEQ ID NO: 4033; WAN024FXL; Start 1; Stop 25
gtgatttctgaattgctaaacattt

SEQ ID NO: 370948 - DNA, 25 bp, Artificial
  probe
  misc_feature (1)..(25): SEQ ID NO: 4033; WAN024FXL; Start 213; Stop 237
tgacaataaaaggagaacgatatga

SEQ ID NO: 370949 - DNA, 25 bp, Artificial
  probe
  misc_feature (1)..(25): SEQ ID NO: 4033; WAN024FXL; Start 212; Stop 236
atgacaataaaaggagaacgatatg

SEQ ID NO: 370950 - DNA, 25 bp, Artificial
  probe
  misc_feature (1)..(25): SEQ ID NO: 4033; WAN024FXL; Start 208; Stop 232
aaatatgacaataaaaggagaacga

SEQ ID NO: 370951 - DNA, 25 bp, Artificial
  probe
  misc_feature (1)..(25): SEQ ID NO: 4033; WAN024FXL; Start 37; Stop 61
agcataccatactttaagattttgt

SEQ ID NO: 370952 - DNA, 25 bp, Artificial
  probe
  misc_feature (1)..(25): SEQ ID NO: 4033; WAN024FXL; Start 209; Stop 233
aatatgacaataaaaggagaacgat

SEQ ID NO: 370953 - DNA, 25 bp, Artificial
  probe
  misc_feature (1)..(25): SEQ ID NO: 4033; WAN024FXL; Start 38; Stop 62
gcataccatactttaagattttgtc

SEQ ID NO: 370954 - DNA, 25 bp, Artificial
  probe
  misc_feature (1)..(25): SEQ ID NO: 4033; WAN024FXL; Start 2; Stop 26
tgatttctgaattgctaaacatttt

SEQ ID NO: 370955 - DNA, 25 bp, Artificial
  probe
  misc_feature (1)..(25): SEQ ID NO: 4033; WAN024FXL; Start 9; Stop 33
tgaattgctaaacattttcttttct

SEQ ID NO: 370956 - DNA, 25 bp, Artificial
  probe
  misc_feature (1)..(25): SEQ ID NO: 4033; WAN024FXL; Start 7; Stop 31
tctgaattgctaaacattttctttt

SEQ ID NO: 370957 - DNA, 25 bp, Artificial
  probe
  misc_feature (1)..(25): SEQ ID NO: 4033; WAN024FXL; Start 6; Stop 30
ttctgaattgctaaacattttcttt

SEQ ID NO: 370958 - DNA, 25 bp, Artificial
  probe
  misc_feature (1)..(25): SEQ ID NO: 4033; WAN024FXL; Start 5; Stop 29
tttctgaattgctaaacattttctt

SEQ ID NO: 370959 - DNA, 25 bp, Artificial
  probe
  misc_feature (1)..(25): SEQ ID NO: 4033; WAN024FXL; Start 207; Stop 231
aaaatatgacaataaaaggagaacg

SEQ ID NO: 370960 - DNA, 25 bp, Artificial
  probe
  misc_feature (1)..(25): SEQ ID NO: 4033; WAN024FXL; Start 8; Stop 32
ctgaattgctaaacattttcttttc

SEQ ID NO: 370961 - DNA, 25 bp, Artificial
  probe
  misc_feature (1)..(25): SEQ ID NO: 4033; WAN024FXL; Start 62; Stop 86
ctttgagaaagatatttccaagaaa

SEQ ID NO: 370962 - DNA, 25 bp, Artificial
  probe
  misc_feature (1)..(25): SEQ ID NO: 4033; WAN024FXL; Start 4; Stop 28
atttctgaattgctaaacattttct

SEQ ID NO: 370963 - DNA, 25 bp, Artificial
  probe
  misc_feature (1)..(25): SEQ ID NO: 4033; WAN024FXL; Start 3; Stop 27
gatttctgaattgctaaacattttc

SEQ ID NO: 370964 - DNA, 25 bp, Artificial
  probe
  misc_feature (1)..(25): SEQ ID NO: 4033; WAN024FXL; Start 211; Stop 235
tatgacaataaaaggagaacgatat

SEQ ID NO: 370965 - DNA, 25 bp, Artificial
  probe
  misc_feature (1)..(25): SEQ ID NO: 4033; WAN024FXL; Start 210; Stop 234
atatgacaataaaaggagaacgata

SEQ ID NO: 370966 - DNA, 25 bp, Artificial
  probe
  misc_feature (1)..(25): SEQ ID NO: 4033; WAN024FXL; Start 21; Stop 45
cattttcttttcttatagcatacca

SEQ ID NO: 370967 - DNA, 25 bp, Artificial
  probe
  misc_feature (1)..(25): SEQ ID NO: 4033; WAN024FXL; Start 20; Stop 44
acattttcttttcttatagcatacc

SEQ ID NO: 370968 - DNA, 25 bp, Artificial
  probe
  misc_feature (1)..(25): SEQ ID NO: 4033; WAN024FXL; Start 26; Stop 50
tcttttcttatagcataccatactt

SEQ ID NO: 370969 - DNA, 25 bp, Artificial
  probe
  misc_feature (1)..(25): SEQ ID NO: 4033; WAN024FXL; Start 25; Stop 49
ttcttttcttatagcataccatact

SEQ ID NO: 370970 - DNA, 25 bp, Artificial
  probe
  misc_feature (1)..(25): SEQ ID NO: 4033; WAN024FXL; Start 10; Stop 34
gaattgctaaacattttcttttctt

SEQ ID NO: 370971 - DNA, 25 bp, Artificial
  probe
  misc_feature (1)..(25): SEQ ID NO: 4033; WAN024FXL; Start 36; Stop 60
tagcataccatactttaagattttg

SEQ ID NO: 370972 - DNA, 25 bp, Artificial
  probe
  misc_feature (1)..(25): SEQ ID NO: 4033; WAN024FXL; Start 59; Stop 83
tgtctttgagaaagatatttccaag

SEQ ID NO: 370973 - DNA, 25 bp, Artificial
  probe
  misc_feature (1)..(25): SEQ ID NO: 4033; WAN024FXL; Start 24; Stop 48
tttcttttcttatagcataccatac

SEQ ID NO: 370974 - DNA, 25 bp, Artificial
  probe
  misc_feature (1)..(25): SEQ ID NO: 4033; WAN024FXL; Start 60; Stop 84
gtctttgagaaagatatttccaaga

SEQ ID NO: 370975 - DNA, 25 bp, Artificial
  probe
  misc_feature (1)..(25): SEQ ID NO: 4033; WAN024FXL; Start 39; Stop 63
cataccatactttaagattttgtct

SEQ ID NO: 370976 - DNA, 25 bp, Artificial
  probe
  misc_feature (1)..(25): SEQ ID NO: 4033; WAN024FXL; Start 58; Stop 82
ttgtctttgagaaagatatttccaa

SEQ ID NO: 370977 - DNA, 25 bp, Artificial
  probe
  misc_feature (1)..(25): SEQ ID NO: 4033; WAN024FXL; Start 57; Stop 81
tttgtctttgagaaagatatttcca

SEQ ID NO: 370978 - DNA, 25 bp, Artificial
  probe
  misc_feature (1)..(25): SEQ ID NO: 4033; WAN024FXL; Start 42; Stop 66
accatactttaagattttgtctttg

SEQ ID NO: 370979 - DNA, 25 bp, Artificial
  probe
  misc_feature (1)..(25): SEQ ID NO: 4033; WAN024FXL; Start 43; Stop 67
ccatactttaagattttgtctttga

SEQ ID NO: 370980 - DNA, 25 bp, Artificial
  probe
  misc_feature (1)..(25): SEQ ID NO: 4034; WAN024CL2; Start 576; Stop 600
tgttgttgaaggattgatgactact

SEQ ID NO: 370981 - DNA, 25 bp, Artificial
  probe
  misc_feature (1)..(25): SEQ ID NO: 4034; WAN024CL2; Start 575; Stop 599
gtgttgttgaaggattgatgactac

SEQ ID NO: 370982 - DNA, 25 bp, Artificial
  probe
  misc_feature (1)..(25): SEQ ID NO: 4034; WAN024CL2; Start 587; Stop 611
gattgatgactactatccacgctta

SEQ ID NO: 370983 - DNA, 25 bp, Artificial
  probe
  misc_feature (1)..(25): SEQ ID NO: 4034; WAN024CL2; Start 588; Stop 612
attgatgactactatccacgcttac

SEQ ID NO: 370984 - DNA, 25 bp, Artificial
  probe
  misc_feature (1)..(25): SEQ ID NO: 4034; WAN024CL2; Start 873; Stop 897
cgaatcatacggttacacagaagat

SEQ ID NO: 370985 - DNA, 25 bp, Artificial
  probe
  misc_feature (1)..(25): SEQ ID NO: 4034; WAN024CL2; Start 574; Stop 598
ggtgttgttgaaggattgatgacta

SEQ ID NO: 370986 - DNA, 25 bp, Artificial
  probe
  misc_feature (1)..(25): SEQ ID NO: 4034; WAN024CL2; Start 577; Stop 601
gttgttgaaggattgatgactacta

SEQ ID NO: 370987 - DNA, 25 bp, Artificial
  probe
  misc_feature (1)..(25): SEQ ID NO: 4034; WAN024CL2; Start 589; Stop 613
ttgatgactactatccacgcttaca

SEQ ID NO: 370988 - DNA, 25 bp, Artificial
  probe
  misc_feature (1)..(25): SEQ ID NO: 4034; WAN024CL2; Start 871; Stop 895
aacgaatcatacggttacacagaag

SEQ ID NO: 370989 - DNA, 25 bp, Artificial
  probe
  misc_feature (1)..(25): SEQ ID NO: 4034; WAN024CL2; Start 883; Stop 907
ggttacacagaagatccaatcgtat

SEQ ID NO: 370990 - DNA, 25 bp, Artificial
  probe
  misc_feature (1)..(25): SEQ ID NO: 4034; WAN024CL2; Start 879; Stop 903
atacggttacacagaagatccaatc

SEQ ID NO: 370991 - DNA, 25 bp, Artificial
  probe
  misc_feature (1)..(25): SEQ ID NO: 4034; WAN024CL2; Start 878; Stop 902
catacggttacacagaagatccaat

SEQ ID NO: 370992 - DNA, 25 bp, Artificial
  probe
  misc_feature (1)..(25): SEQ ID NO: 4034; WAN024CL2; Start 875; Stop 899
aatcatacggttacacagaagatcc

SEQ ID NO: 370993 - DNA, 25 bp, Artificial
  probe
  misc_feature (1)..(25): SEQ ID NO: 4034; WAN024CL2; Start 884; Stop 908
gttacacagaagatccaatcgtatc

SEQ ID NO: 370994 - DNA, 25 bp, Artificial
  probe
  misc_feature (1)..(25): SEQ ID NO: 4034; WAN024CL2; Start 874; Stop 898
gaatcatacggttacacagaagatc

SEQ ID NO: 370995 - DNA, 25 bp, Artificial
  probe
  misc_feature (1)..(25): SEQ ID NO: 4034; WAN024CL2; Start 591; Stop 615
gatgactactatccacgcttacact

SEQ ID NO: 370996 - DNA, 25 bp, Artificial
  probe
  misc_feature (1)..(25): SEQ ID NO: 4034; WAN024CL2; Start 1039; Stop 1063
cttgttcgtactcttgaatacttcg

SEQ ID NO: 370997 - DNA, 25 bp, Artificial
  probe
  misc_feature (1)..(25): SEQ ID NO: 4034; WAN024CL2; Start 872; Stop 896
acgaatcatacggttacacagaaga

SEQ ID NO: 370998 - DNA, 25 bp, Artificial
  probe
  misc_feature (1)..(25): SEQ ID NO: 4034; WAN024CL2; Start 506; Stop 530
ttatctcaggtgcttcatgtactac

SEQ ID NO: 370999 - DNA, 25 bp, Artificial
  probe
  misc_feature (1)..(25): SEQ ID NO: 4034; WAN024CL2; Start 505; Stop 529
gttatctcaggtgcttcatgtacta

SEQ ID NO: 371000 - DNA, 25 bp, Artificial
  probe
  misc_feature (1)..(25): SEQ ID NO: 4034; WAN024CL2; Start 592; Stop 616
atgactactatccacgcttacactg

SEQ ID NO: 371001 - DNA, 25 bp, Artificial
  probe
  misc_feature (1)..(25): SEQ ID NO: 4034; WAN024CL2; Start 572; Stop 596
ttggtgttgttgaaggattgatgac

SEQ ID NO: 371002 - DNA, 25 bp, Artificial
  probe
  misc_feature (1)..(25): SEQ ID NO: 4034; WAN024CL2; Start 590; Stop 614
tgatgactactatccacgcttacac

SEQ ID NO: 371003 - DNA, 25 bp, Artificial
  probe
  misc_feature (1)..(25): SEQ ID NO: 4034; WAN024CL2; Start 579; Stop 603
tgttgaaggattgatgactactatc

SEQ ID NO: 371004 - DNA, 25 bp, Artificial
  probe
  misc_feature (1)..(25): SEQ ID NO: 4034; WAN024CL2; Start 172; Stop 196
gaccttacagatccagttatgcttg

SEQ ID NO: 371005 - DNA, 25 bp, Artificial
  probe
  misc_feature (1)..(25): SEQ ID NO: 4034; WAN024CL2; Start 1038; Stop 1062
acttgttcgtactcttgaatacttc

SEQ ID NO: 371006 - DNA, 25 bp, Artificial
  probe
  misc_feature (1)..(25): SEQ ID NO: 4034; WAN024CL2; Start 876; Stop 900
atcatacggttacacagaagatcca

SEQ ID NO: 371007 - DNA, 25 bp, Artificial
  probe
  misc_feature (1)..(25): SEQ ID NO: 4034; WAN024CL2; Start 1036; Stop 1060
caacttgttcgtactcttgaatact

SEQ ID NO: 371008 - DNA, 25 bp, Artificial
  probe
  misc_feature (1)..(25): SEQ ID NO: 4034; WAN024CL2; Start 877; Stop 901
tcatacggttacacagaagatccaa

SEQ ID NO: 371009 - DNA, 25 bp, Artificial
  probe
  misc_feature (1)..(25): SEQ ID NO: 4034; WAN024CL2; Start 503; Stop 527
cagttatctcaggtgcttcatgtac

SEQ ID NO: 371010 - DNA, 25 bp, Artificial
  probe
  misc_feature (1)..(25): SEQ ID NO: 4034; WAN024CL2; Start 168; Stop 192
caacgaccttacagatccagttatg

SEQ ID NO: 371011 - DNA, 25 bp, Artificial
  probe
  misc_feature (1)..(25): SEQ ID NO: 4034; WAN024CL2; Start 167; Stop 191
tcaacgaccttacagatccagttat

SEQ ID NO: 371012 - DNA, 25 bp, Artificial
  probe
  misc_feature (1)..(25): SEQ ID NO: 4034; WAN024CL2; Start 166; Stop 190
atcaacgaccttacagatccagtta

SEQ ID NO: 371013 - DNA, 25 bp, Artificial
  probe
  misc_feature (1)..(25): SEQ ID NO: 4035; WAN024E29; Start 156; Stop 180
aaatcaggtaagcatcaacggagtt

SEQ ID NO: 371014 - DNA, 25 bp, Artificial
  probe
  misc_feature (1)..(25): SEQ ID NO: 4035; WAN024E29; Start 172; Stop 196
aacggagttgagattcaggtatttt

SEQ ID NO: 371015 - DNA, 25 bp, Artificial
  probe
  misc_feature (1)..(25): SEQ ID NO: 4035; WAN024E29; Start 174; Stop 198
cggagttgagattcaggtattttct

SEQ ID NO: 371016 - DNA, 25 bp, Artificial
  probe
  misc_feature (1)..(25): SEQ ID NO: 4035; WAN024E29; Start 173; Stop 197
acggagttgagattcaggtattttc

SEQ ID NO: 371017 - DNA, 25 bp, Artificial
  probe
  misc_feature (1)..(25): SEQ ID NO: 4035; WAN024E29; Start 106; Stop 130
caaaaggaagaagtcttgagggtag

SEQ ID NO: 371018 - DNA, 25 bp, Artificial
  probe
  misc_feature (1)..(25): SEQ ID NO: 4035; WAN024E29; Start 108; Stop 132
aaaggaagaagtcttgagggtagct

SEQ ID NO: 371019 - DNA, 25 bp, Artificial
  probe
  misc_feature (1)..(25): SEQ ID NO: 4035; WAN024E29; Start 154; Stop 178
caaaatcaggtaagcatcaacggag

SEQ ID NO: 371020 - DNA, 25 bp, Artificial
  probe
  misc_feature (1)..(25): SEQ ID NO: 4035; WAN024E29; Start 175; Stop 199
ggagttgagattcaggtattttcta

SEQ ID NO: 371021 - DNA, 25 bp, Artificial
  probe
  misc_feature (1)..(25): SEQ ID NO: 4035; WAN024E29; Start 111; Stop 135
ggaagaagtcttgagggtagctaag

SEQ ID NO: 371022 - DNA, 25 bp, Artificial
  probe
  misc_feature (1)..(25): SEQ ID NO: 4035; WAN024E29; Start 155; Stop 179
aaaatcaggtaagcatcaacggagt

SEQ ID NO: 371023 - DNA, 25 bp, Artificial
  probe
  misc_feature (1)..(25): SEQ ID NO: 4035; WAN024E29; Start 110; Stop 134
aggaagaagtcttgagggtagctaa

SEQ ID NO: 371024 - DNA, 25 bp, Artificial
  probe
  misc_feature (1)..(25): SEQ ID NO: 4035; WAN024E29; Start 109; Stop 133
aaggaagaagtcttgagggtagcta

SEQ ID NO: 371025 - DNA, 25 bp, Artificial
  probe
  misc_feature (1)..(25): SEQ ID NO: 4035; WAN024E29; Start 107; Stop 131
aaaaggaagaagtcttgagggtagc

SEQ ID NO: 371026 - DNA, 25 bp, Artificial
  probe
  misc_feature (1)..(25): SEQ ID NO: 4035; WAN024E29; Start 171; Stop 195
caacggagttgagattcaggtattt

SEQ ID NO: 371027 - DNA, 25 bp, Artificial
  probe
  misc_feature (1)..(25): SEQ ID NO: 4035; WAN024E29; Start 178; Stop 202
gttgagattcaggtattttctagtg

SEQ ID NO: 371028 - DNA, 25 bp, Artificial
  probe
  misc_feature (1)..(25): SEQ ID NO: 4035; WAN024E29; Start 17; Stop 41
cagtagtcgctctagctatctttgc

SEQ ID NO: 371029 - DNA, 25 bp, Artificial
  probe
  misc_feature (1)..(25): SEQ ID NO: 4035; WAN024E29; Start 16; Stop 40
gcagtagtcgctctagctatctttg

SEQ ID NO: 371030 - DNA, 25 bp, Artificial
  probe
  misc_feature (1)..(25): SEQ ID NO: 4035; WAN024E29; Start 179; Stop 203
ttgagattcaggtattttctagtga

SEQ ID NO: 371031 - DNA, 25 bp, Artificial
  probe
  misc_feature (1)..(25): SEQ ID NO: 4035; WAN024E29; Start 177; Stop 201
agttgagattcaggtattttctagt

SEQ ID NO: 371032 - DNA, 25 bp, Artificial
  probe
  misc_feature (1)..(25): SEQ ID NO: 4035; WAN024E29; Start 105; Stop 129
gcaaaaggaagaagtcttgagggta

SEQ ID NO: 371033 - DNA, 25 bp, Artificial
  probe
  misc_feature (1)..(25): SEQ ID NO: 4035; WAN024E29; Start 157; Stop 181
aatcaggtaagcatcaacggagttg

SEQ ID NO: 371034 - DNA, 25 bp, Artificial
  probe
  misc_feature (1)..(25): SEQ ID NO: 4035; WAN024E29; Start 113; Stop 137
aagaagtcttgagggtagctaagat

SEQ ID NO: 371035 - DNA, 25 bp, Artificial
  probe
  misc_feature (1)..(25): SEQ ID NO: 4035; WAN024E29; Start 14; Stop 38
aagcagtagtcgctctagctatctt

SEQ ID NO: 371036 - DNA, 25 bp, Artificial
  probe
  misc_feature (1)..(25): SEQ ID NO: 4035; WAN024E29; Start 112; Stop 136
gaagaagtcttgagggtagctaaga

SEQ ID NO: 371037 - DNA, 25 bp, Artificial
  probe
  misc_feature (1)..(25): SEQ ID NO: 4035; WAN024E29; Start 114; Stop 138
agaagtcttgagggtagctaagatg

SEQ ID NO: 371038 - DNA, 25 bp, Artificial
  probe
  misc_feature (1)..(25): SEQ ID NO: 4035; WAN024E29; Start 176; Stop 200
gagttgagattcaggtattttctag

SEQ ID NO: 371039 - DNA, 25 bp, Artificial
  probe
  misc_feature (1)..(25): SEQ ID NO: 4035; WAN024E29; Start 13; Stop 37
gaagcagtagtcgctctagctatct

SEQ ID NO: 371040 - DNA, 25 bp, Artificial
  probe
  misc_feature (1)..(25): SEQ ID NO: 4035; WAN024E29; Start 115; Stop 139
gaagtcttgagggtagctaagatgg

SEQ ID NO: 371041 - DNA, 25 bp, Artificial
  probe
  misc_feature (1)..(25): SEQ ID NO: 4035; WAN024E29; Start 20; Stop 44
tagtcgctctagctatctttgccag

SEQ ID NO: 371042 - DNA, 25 bp, Artificial
  probe
  misc_feature (1)..(25): SEQ ID NO: 4035; WAN024E29; Start 18; Stop 42
agtagtcgctctagctatctttgcc

SEQ ID NO: 371043 - DNA, 25 bp, Artificial
  probe
  misc_feature (1)..(25): SEQ ID NO: 4035; WAN024E29; Start 153; Stop 177
gcaaaatcaggtaagcatcaacgga

SEQ ID NO: 371044 - DNA, 25 bp, Artificial
  probe
  misc_feature (1)..(25): SEQ ID NO: 4035; WAN024E29; Start 19; Stop 43
gtagtcgctctagctatctttgcca

SEQ ID NO: 371045 - DNA, 25 bp, Artificial
  probe
  misc_feature (1)..(25): SEQ ID NO: 4035; WAN024E29; Start 12; Stop 36
ggaagcagtagtcgctctagctatc

SEQ ID NO: 371046 - DNA, 25 bp, Artificial
  probe
  misc_feature (1)..(25): SEQ ID NO: 4036; WAN024DWR; Start 279; Stop 303
gccagaacaatatccagattatgat

SEQ ID NO: 371047 - DNA, 25 bp, Artificial
  probe
  misc_feature (1)..(25): SEQ ID NO: 4036; WAN024DWR; Start 98; Stop 122
ttgttagtgacgatgttgaagaacg

SEQ ID NO: 371048 - DNA, 25 bp, Artificial
  probe
  misc_feature (1)..(25): SEQ ID NO: 4036; WAN024DWR; Start 52; Stop 76
atggataatgttgagtggagtcatg

SEQ ID NO: 371049 - DNA, 25 bp, Artificial
  probe
  misc_feature (1)..(25): SEQ ID NO: 4036; WAN024DWR; Start 51; Stop 75
catggataatgttgagtggagtcat

SEQ ID NO: 371050 - DNA, 25 bp, Artificial
  probe
  misc_feature (1)..(25): SEQ ID NO: 4036; WAN024DWR; Start 49; Stop 73
ttcatggataatgttgagtggagtc

SEQ ID NO: 371051 - DNA, 25 bp, Artificial
  probe
  misc_feature (1)..(25): SEQ ID NO: 4036; WAN024DWR; Start 280; Stop 304
ccagaacaatatccagattatgatg

SEQ ID NO: 371052 - DNA, 25 bp, Artificial
  probe
  misc_feature (1)..(25): SEQ ID NO: 4036; WAN024DWR; Start 50; Stop 74
tcatggataatgttgagtggagtca

SEQ ID NO: 371053 - DNA, 25 bp, Artificial
  probe
  misc_feature (1)..(25): SEQ ID NO: 4036; WAN024DWR; Start 137; Stop 161
tctatctggatagcctaagtgtcaa

SEQ ID NO: 371054 - DNA, 25 bp, Artificial
  probe
  misc_feature (1)..(25): SEQ ID NO: 4036; WAN024DWR; Start 134; Stop 158
atgtctatctggatagcctaagtgt

SEQ ID NO: 371055 - DNA, 25 bp, Artificial
  probe
  misc_feature (1)..(25): SEQ ID NO: 4036; WAN024DWR; Start 133; Stop 157
aatgtctatctggatagcctaagtg

SEQ ID NO: 371056 - DNA, 25 bp, Artificial
  probe
  misc_feature (1)..(25): SEQ ID NO: 4036; WAN024DWR; Start 136; Stop 160
gtctatctggatagcctaagtgtca

SEQ ID NO: 371057 - DNA, 25 bp, Artificial
  probe
  misc_feature (1)..(25): SEQ ID NO: 4036; WAN024DWR; Start 135; Stop 159
tgtctatctggatagcctaagtgtc

SEQ ID NO: 371058 - DNA, 25 bp, Artificial
  probe
  misc_feature (1)..(25): SEQ ID NO: 4036; WAN024DWR; Start 139; Stop 163
tatctggatagcctaagtgtcaaac

SEQ ID NO: 371059 - DNA, 25 bp, Artificial
  probe
  misc_feature (1)..(25): SEQ ID NO: 4036; WAN024DWR; Start 96; Stop 120
ctttgttagtgacgatgttgaagaa

SEQ ID NO: 371060 - DNA, 25 bp, Artificial
  probe
  misc_feature (1)..(25): SEQ ID NO: 4036; WAN024DWR; Start 97; Stop 121
tttgttagtgacgatgttgaagaac

SEQ ID NO: 371061 - DNA, 25 bp, Artificial
  probe
  misc_feature (1)..(25): SEQ ID NO: 4036; WAN024DWR; Start 95; Stop 119
gctttgttagtgacgatgttgaaga

SEQ ID NO: 371062 - DNA, 25 bp, Artificial
  probe
  misc_feature (1)..(25): SEQ ID NO: 4036; WAN024DWR; Start 65; Stop 89
agtggagtcatgcagattcttactt

SEQ ID NO: 371063 - DNA, 25 bp, Artificial
  probe
  misc_feature (1)..(25): SEQ ID NO: 4036; WAN024DWR; Start 62; Stop 86
ttgagtggagtcatgcagattctta

SEQ ID NO: 371064 - DNA, 25 bp, Artificial
  probe
  misc_feature (1)..(25): SEQ ID NO: 4036; WAN024DWR; Start 55; Stop 79
gataatgttgagtggagtcatgcag

SEQ ID NO: 371065 - DNA, 25 bp, Artificial
  probe
  misc_feature (1)..(25): SEQ ID NO: 4036; WAN024DWR; Start 142; Stop 166
ctggatagcctaagtgtcaaacaaa

SEQ ID NO: 371066 - DNA, 25 bp, Artificial
  probe
  misc_feature (1)..(25): SEQ ID NO: 4036; WAN024DWR; Start 53; Stop 77
tggataatgttgagtggagtcatgc

SEQ ID NO: 371067 - DNA, 25 bp, Artificial
  probe
  misc_feature (1)..(25): SEQ ID NO: 4036; WAN024DWR; Start 48; Stop 72
tttcatggataatgttgagtggagt

SEQ ID NO: 371068 - DNA, 25 bp, Artificial
  probe
  misc_feature (1)..(25): SEQ ID NO: 4036; WAN024DWR; Start 282; Stop 306
agaacaatatccagattatgatggt

SEQ ID NO: 371069 - DNA, 25 bp, Artificial
  probe
  misc_feature (1)..(25): SEQ ID NO: 4036; WAN024DWR; Start 140; Stop 164
atctggatagcctaagtgtcaaaca

SEQ ID NO: 371070 - DNA, 25 bp, Artificial
  probe
  misc_feature (1)..(25): SEQ ID NO: 4036; WAN024DWR; Start 57; Stop 81
taatgttgagtggagtcatgcagat

SEQ ID NO: 371071 - DNA, 25 bp, Artificial
  probe
  misc_feature (1)..(25): SEQ ID NO: 4036; WAN024DWR; Start 56; Stop 80
ataatgttgagtggagtcatgcaga

SEQ ID NO: 371072 - DNA, 25 bp, Artificial
  probe
  misc_feature (1)..(25): SEQ ID NO: 4036; WAN024DWR; Start 281; Stop 305
cagaacaatatccagattatgatgg

SEQ ID NO: 371073 - DNA, 25 bp, Artificial
  probe
  misc_feature (1)..(25): SEQ ID NO: 4036; WAN024DWR; Start 64; Stop 88
gagtggagtcatgcagattcttact

SEQ ID NO: 371074 - DNA, 25 bp, Artificial
  probe
  misc_feature (1)..(25): SEQ ID NO: 4036; WAN024DWR; Start 141; Stop 165
tctggatagcctaagtgtcaaacaa

SEQ ID NO: 371075 - DNA, 25 bp, Artificial
  probe
  misc_feature (1)..(25): SEQ ID NO: 4036; WAN024DWR; Start 93; Stop 117
tagctttgttagtgacgatgttgaa

SEQ ID NO: 371076 - DNA, 25 bp, Artificial
  probe
  misc_feature (1)..(25): SEQ ID NO: 4036; WAN024DWR; Start 63; Stop 87
tgagtggagtcatgcagattcttac

SEQ ID NO: 371077 - DNA, 25 bp, Artificial
  probe
  misc_feature (1)..(25): SEQ ID NO: 4036; WAN024DWR; Start 138; Stop 162
ctatctggatagcctaagtgtcaaa

SEQ ID NO: 371078 - DNA, 25 bp, Artificial
  probe
  misc_feature (1)..(25): SEQ ID NO: 4036; WAN024DWR; Start 132; Stop 156
aaatgtctatctggatagcctaagt

SEQ ID NO: 371079 - DNA, 25 bp, Artificial
  probe
  misc_feature (1)..(25): SEQ ID NO: 4037; WAN024DBC; Start 245; Stop 269
atgatgctatgatagaggttccaga

SEQ ID NO: 371080 - DNA, 25 bp, Artificial
  probe
  misc_feature (1)..(25): SEQ ID NO: 4037; WAN024DBC; Start 246; Stop 270
tgatgctatgatagaggttccagaa

SEQ ID NO: 371081 - DNA, 25 bp, Artificial
  probe
  misc_feature (1)..(25): SEQ ID NO: 4037; WAN024DBC; Start 244; Stop 268
tatgatgctatgatagaggttccag

SEQ ID NO: 371082 - DNA, 25 bp, Artificial
  probe
  misc_feature (1)..(25): SEQ ID NO: 4037; WAN024DBC; Start 243; Stop 267
ttatgatgctatgatagaggttcca

SEQ ID NO: 371083 - DNA, 25 bp, Artificial
  probe
  misc_feature (1)..(25): SEQ ID NO: 4037; WAN024DBC; Start 229; Stop 253
ttgacagaccagatttatgatgcta

SEQ ID NO: 371084 - DNA, 25 bp, Artificial
  probe
  misc_feature (1)..(25): SEQ ID NO: 4037; WAN024DBC; Start 232; Stop 256
acagaccagatttatgatgctatga

SEQ ID NO: 371085 - DNA, 25 bp, Artificial
  probe
  misc_feature (1)..(25): SEQ ID NO: 4037; WAN024DBC; Start 230; Stop 254
tgacagaccagatttatgatgctat

SEQ ID NO: 371086 - DNA, 25 bp, Artificial
  probe
  misc_feature (1)..(25): SEQ ID NO: 4037; WAN024DBC; Start 228; Stop 252
tttgacagaccagatttatgatgct

SEQ ID NO: 371087 - DNA, 25 bp, Artificial
  probe
  misc_feature (1)..(25): SEQ ID NO: 4037; WAN024DBC; Start 231; Stop 255
gacagaccagatttatgatgctatg

SEQ ID NO: 371088 - DNA, 25 bp, Artificial
  probe
  misc_feature (1)..(25): SEQ ID NO: 4037; WAN024DBC; Start 233; Stop 257
cagaccagatttatgatgctatgat

SEQ ID NO: 371089 - DNA, 25 bp, Artificial
  probe
  misc_feature (1)..(25): SEQ ID NO: 4037; WAN024DBC; Start 281; Stop 305
ctgaggttaaattagtctggtatcc

SEQ ID NO: 371090 - DNA, 25 bp, Artificial
  probe
  misc_feature (1)..(25): SEQ ID NO: 4037; WAN024DBC; Start 274; Stop 298
acggatactgaggttaaattagtct

SEQ ID NO: 371091 - DNA, 25 bp, Artificial
  probe
  misc_feature (1)..(25): SEQ ID NO: 4037; WAN024DBC; Start 176; Stop 200
aaacagagattgacatgactttgac

SEQ ID NO: 371092 - DNA, 25 bp, Artificial
  probe
  misc_feature (1)..(25): SEQ ID NO: 4037; WAN024DBC; Start 177; Stop 201
aacagagattgacatgactttgaca

SEQ ID NO: 371093 - DNA, 25 bp, Artificial
  probe
  misc_feature (1)..(25): SEQ ID NO: 4037; WAN024DBC; Start 275; Stop 299
cggatactgaggttaaattagtctg

SEQ ID NO: 371094 - DNA, 25 bp, Artificial
  probe
  misc_feature (1)..(25): SEQ ID NO: 4037; WAN024DBC; Start 242; Stop 266
tttatgatgctatgatagaggttcc

SEQ ID NO: 371095 - DNA, 25 bp, Artificial
  probe
  misc_feature (1)..(25): SEQ ID NO: 4037; WAN024DBC; Start 184; Stop 208
attgacatgactttgacaactatgg

SEQ ID NO: 371096 - DNA, 25 bp, Artificial
  probe
  misc_feature (1)..(25): SEQ ID NO: 4037; WAN024DBC; Start 180; Stop 204
agagattgacatgactttgacaact

SEQ ID NO: 371097 - DNA, 25 bp, Artificial
  probe
  misc_feature (1)..(25): SEQ ID NO: 4037; WAN024DBC; Start 179; Stop 203
cagagattgacatgactttgacaac

SEQ ID NO: 371098 - DNA, 25 bp, Artificial
  probe
  misc_feature (1)..(25): SEQ ID NO: 4037; WAN024DBC; Start 276; Stop 300
ggatactgaggttaaattagtctgg

SEQ ID NO: 371099 - DNA, 25 bp, Artificial
  probe
  misc_feature (1)..(25): SEQ ID NO: 4037; WAN024DBC; Start 178; Stop 202
acagagattgacatgactttgacaa

SEQ ID NO: 371100 - DNA, 25 bp, Artificial
  probe
  misc_feature (1)..(25): SEQ ID NO: 4037; WAN024DBC; Start 181; Stop 205
gagattgacatgactttgacaacta

SEQ ID NO: 371101 - DNA, 25 bp, Artificial
  probe
  misc_feature (1)..(25): SEQ ID NO: 4037; WAN024DBC; Start 187; Stop 211
gacatgactttgacaactatgggtt

SEQ ID NO: 371102 - DNA, 25 bp, Artificial
  probe
  misc_feature (1)..(25): SEQ ID NO: 4037; WAN024DBC; Start 185; Stop 209
ttgacatgactttgacaactatggg

SEQ ID NO: 371103 - DNA, 25 bp, Artificial
  probe
  misc_feature (1)..(25): SEQ ID NO: 4037; WAN024DBC; Start 183; Stop 207
gattgacatgactttgacaactatg

SEQ ID NO: 371104 - DNA, 25 bp, Artificial
  probe
  misc_feature (1)..(25): SEQ ID NO: 4037; WAN024DBC; Start 182; Stop 206
agattgacatgactttgacaactat

SEQ ID NO: 371105 - DNA, 25 bp, Artificial
  probe
  misc_feature (1)..(25): SEQ ID NO: 4037; WAN024DBC; Start 280; Stop 304
actgaggttaaattagtctggtatc

SEQ ID NO: 371106 - DNA, 25 bp, Artificial
  probe
  misc_feature (1)..(25): SEQ ID NO: 4037; WAN024DBC; Start 277; Stop 301
gatactgaggttaaattagtctggt

SEQ ID NO: 371107 - DNA, 25 bp, Artificial
  probe
  misc_feature (1)..(25): SEQ ID NO: 4037; WAN024DBC; Start 282; Stop 306
tgaggttaaattagtctggtatcca

SEQ ID NO: 371108 - DNA, 25 bp, Artificial
  probe
  misc_feature (1)..(25): SEQ ID NO: 4037; WAN024DBC; Start 234; Stop 258
agaccagatttatgatgctatgata

SEQ ID NO: 371109 - DNA, 25 bp, Artificial
  probe
  misc_feature (1)..(25): SEQ ID NO: 4037; WAN024DBC; Start 186; Stop 210
tgacatgactttgacaactatgggt

SEQ ID NO: 371110 - DNA, 25 bp, Artificial
  probe
  misc_feature (1)..(25): SEQ ID NO: 4037; WAN024DBC; Start 173; Stop 197
ggcaaacagagattgacatgacttt

SEQ ID NO: 371111 - DNA, 25 bp, Artificial
  probe
  misc_feature (1)..(25): SEQ ID NO: 4037; WAN024DBC; Start 7; Stop 31
ttattgaagactaagagtgaggaaa

SEQ ID NO: 371112 - DNA, 25 bp, Artificial
  probe
  misc_feature (1)..(25): SEQ ID NO: 4038; WAN024FV2; Start 326; Stop 350
cagttcttggtgaggaaggttatat

SEQ ID NO: 371113 - DNA, 25 bp, Artificial
  probe
  misc_feature (1)..(25): SEQ ID NO: 4038; WAN024FV2; Start 258; Stop 282
aattatagcggttccacgattagag

SEQ ID NO: 371114 - DNA, 25 bp, Artificial
  probe
  misc_feature (1)..(25): SEQ ID NO: 4038; WAN024FV2; Start 327; Stop 351
agttcttggtgaggaaggttatatt

SEQ ID NO: 371115 - DNA, 25 bp, Artificial
  probe
  misc_feature (1)..(25): SEQ ID NO: 4038; WAN024FV2; Start 325; Stop 349
acagttcttggtgaggaaggttata

SEQ ID NO: 371116 - DNA, 25 bp, Artificial
  probe
  misc_feature (1)..(25): SEQ ID NO: 4038; WAN024FV2; Start 259; Stop 283
attatagcggttccacgattagagc

SEQ ID NO: 371117 - DNA, 25 bp, Artificial
  probe
  misc_feature (1)..(25): SEQ ID NO: 4038; WAN024FV2; Start 79; Stop 103
gaagtgataaaggaagaggtgtttg

SEQ ID NO: 371118 - DNA, 25 bp, Artificial
  probe
  misc_feature (1)..(25): SEQ ID NO: 4038; WAN024FV2; Start 78; Stop 102
agaagtgataaaggaagaggtgttt

SEQ ID NO: 371119 - DNA, 25 bp, Artificial
  probe
  misc_feature (1)..(25): SEQ ID NO: 4038; WAN024FV2; Start 257; Stop 281
aaattatagcggttccacgattaga

SEQ ID NO: 371120 - DNA, 25 bp, Artificial
  probe
  misc_feature (1)..(25): SEQ ID NO: 4038; WAN024FV2; Start 77; Stop 101
tagaagtgataaaggaagaggtgtt

SEQ ID NO: 371121 - DNA, 25 bp, Artificial
  probe
  misc_feature (1)..(25): SEQ ID NO: 4038; WAN024FV2; Start 76; Stop 100
ttagaagtgataaaggaagaggtgt

SEQ ID NO: 371122 - DNA, 25 bp, Artificial
  probe
  misc_feature (1)..(25): SEQ ID NO: 4038; WAN024FV2; Start 306; Stop 330
tcaccaattacaaatcatcacagtt

SEQ ID NO: 371123 - DNA, 25 bp, Artificial
  probe
  misc_feature (1)..(25): SEQ ID NO: 4038; WAN024FV2; Start 307; Stop 331
caccaattacaaatcatcacagttc

SEQ ID NO: 371124 - DNA, 25 bp, Artificial
  probe
  misc_feature (1)..(25): SEQ ID NO: 4038; WAN024FV2; Start 305; Stop 329
atcaccaattacaaatcatcacagt

SEQ ID NO: 371125 - DNA, 25 bp, Artificial
  probe
  misc_feature (1)..(25): SEQ ID NO: 4038; WAN024FV2; Start 308; Stop 332
accaattacaaatcatcacagttct

SEQ ID NO: 371126 - DNA, 25 bp, Artificial
  probe
  misc_feature (1)..(25): SEQ ID NO: 4038; WAN024FV2; Start 80; Stop 104
aagtgataaaggaagaggtgtttgc

SEQ ID NO: 371127 - DNA, 25 bp, Artificial
  probe
  misc_feature (1)..(25): SEQ ID NO: 4038; WAN024FV2; Start 328; Stop 352
gttcttggtgaggaaggttatattt

SEQ ID NO: 371128 - DNA, 25 bp, Artificial
  probe
  misc_feature (1)..(25): SEQ ID NO: 4038; WAN024FV2; Start 324; Stop 348
cacagttcttggtgaggaaggttat

SEQ ID NO: 371129 - DNA, 25 bp, Artificial
  probe
  misc_feature (1)..(25): SEQ ID NO: 4038; WAN024FV2; Start 312; Stop 336
attacaaatcatcacagttcttggt

SEQ ID NO: 371130 - DNA, 25 bp, Artificial
  probe
  misc_feature (1)..(25): SEQ ID NO: 4038; WAN024FV2; Start 75; Stop 99
attagaagtgataaaggaagaggtg

SEQ ID NO: 371131 - DNA, 25 bp, Artificial
  probe
  misc_feature (1)..(25): SEQ ID NO: 4038; WAN024FV2; Start 309; Stop 333
ccaattacaaatcatcacagttctt

SEQ ID NO: 371132 - DNA, 25 bp, Artificial
  probe
  misc_feature (1)..(25): SEQ ID NO: 4038; WAN024FV2; Start 304; Stop 328
aatcaccaattacaaatcatcacag

SEQ ID NO: 371133 - DNA, 25 bp, Artificial
  probe
  misc_feature (1)..(25): SEQ ID NO: 4038; WAN024FV2; Start 81; Stop 105
agtgataaaggaagaggtgtttgct

SEQ ID NO: 371134 - DNA, 25 bp, Artificial
  probe
  misc_feature (1)..(25): SEQ ID NO: 4038; WAN024FV2; Start 214; Stop 238
ggtgggactgctagtattgttaaag

SEQ ID NO: 371135 - DNA, 25 bp, Artificial
  probe
  misc_feature (1)..(25): SEQ ID NO: 4038; WAN024FV2; Start 313; Stop 337
ttacaaatcatcacagttcttggtg

SEQ ID NO: 371136 - DNA, 25 bp, Artificial
  probe
  misc_feature (1)..(25): SEQ ID NO: 4038; WAN024FV2; Start 260; Stop 284
ttatagcggttccacgattagagca

SEQ ID NO: 371137 - DNA, 25 bp, Artificial
  probe
  misc_feature (1)..(25): SEQ ID NO: 4038; WAN024FV2; Start 212; Stop 236
atggtgggactgctagtattgttaa

SEQ ID NO: 371138 - DNA, 25 bp, Artificial
  probe
  misc_feature (1)..(25): SEQ ID NO: 4038; WAN024FV2; Start 84; Stop 108
gataaaggaagaggtgtttgctcag

SEQ ID NO: 371139 - DNA, 25 bp, Artificial
  probe
  misc_feature (1)..(25): SEQ ID NO: 4038; WAN024FV2; Start 311; Stop 335
aattacaaatcatcacagttcttgg

SEQ ID NO: 371140 - DNA, 25 bp, Artificial
  probe
  misc_feature (1)..(25): SEQ ID NO: 4038; WAN024FV2; Start 213; Stop 237
tggtgggactgctagtattgttaaa

SEQ ID NO: 371141 - DNA, 25 bp, Artificial
  probe
  misc_feature (1)..(25): SEQ ID NO: 4038; WAN024FV2; Start 273; Stop 297
acgattagagcagtttggagaacat

SEQ ID NO: 371142 - DNA, 25 bp, Artificial
  probe
  misc_feature (1)..(25): SEQ ID NO: 4038; WAN024FV2; Start 82; Stop 106
gtgataaaggaagaggtgtttgctc

SEQ ID NO: 371143 - DNA, 25 bp, Artificial
  probe
  misc_feature (1)..(25): SEQ ID NO: 4038; WAN024FV2; Start 86; Stop 110
taaaggaagaggtgtttgctcagat

SEQ ID NO: 371144 - DNA, 25 bp, Artificial
  probe
  misc_feature (1)..(25): SEQ ID NO: 4038; WAN024FV2; Start 85; Stop 109
ataaaggaagaggtgtttgctcaga

SEQ ID NO: 371145 - DNA, 25 bp, Artificial
  probe
  misc_feature (1)..(25): SEQ ID NO: 4039; WAN024FNR; Start 176; Stop 200
taacagtgccttcgttggtgatatt

SEQ ID NO: 371146 - DNA, 25 bp, Artificial
  probe
  misc_feature (1)..(25): SEQ ID NO: 4039; WAN024FNR; Start 175; Stop 199
ttaacagtgccttcgttggtgatat

SEQ ID NO: 371147 - DNA, 25 bp, Artificial
  probe
  misc_feature (1)..(25): SEQ ID NO: 4039; WAN024FNR; Start 74; Stop 98
ttccacaatccaagtcttctgattc

SEQ ID NO: 371148 - DNA, 25 bp, Artificial
  probe
  misc_feature (1)..(25): SEQ ID NO: 4039; WAN024FNR; Start 187; Stop 211
tcgttggtgatatttccgttgttat

SEQ ID NO: 371149 - DNA, 25 bp, Artificial
  probe
  misc_feature (1)..(25): SEQ ID NO: 4039; WAN024FNR; Start 45; Stop 69
aacttctgtgatggttgtagcgatt

SEQ ID NO: 371150 - DNA, 25 bp, Artificial
  probe
  misc_feature (1)..(25): SEQ ID NO: 4039; WAN024FNR; Start 186; Stop 210
ttcgttggtgatatttccgttgtta

SEQ ID NO: 371151 - DNA, 25 bp, Artificial
  probe
  misc_feature (1)..(25): SEQ ID NO: 4039; WAN024FNR; Start 161; Stop 185
aagtttcaaggaatttaacagtgcc

SEQ ID NO: 371152 - DNA, 25 bp, Artificial
  probe
  misc_feature (1)..(25): SEQ ID NO: 4039; WAN024FNR; Start 160; Stop 184
caagtttcaaggaatttaacagtgc

SEQ ID NO: 371153 - DNA, 25 bp, Artificial
  probe
  misc_feature (1)..(25): SEQ ID NO: 4039; WAN024FNR; Start 159; Stop 183
gcaagtttcaaggaatttaacagtg

SEQ ID NO: 371154 - DNA, 25 bp, Artificial
  probe
  misc_feature (1)..(25): SEQ ID NO: 4039; WAN024FNR; Start 158; Stop 182
agcaagtttcaaggaatttaacagt

SEQ ID NO: 371155 - DNA, 25 bp, Artificial
  probe
  misc_feature (1)..(25): SEQ ID NO: 4039; WAN024FNR; Start 148; Stop 172
aagttatctaagcaagtttcaagga

SEQ ID NO: 371156 - DNA, 25 bp, Artificial
  probe
  misc_feature (1)..(25): SEQ ID NO: 4039; WAN024FNR; Start 46; Stop 70
acttctgtgatggttgtagcgattg

SEQ ID NO: 371157 - DNA, 25 bp, Artificial
  probe
  misc_feature (1)..(25): SEQ ID NO: 4039; WAN024FNR; Start 157; Stop 181
aagcaagtttcaaggaatttaacag

SEQ ID NO: 371158 - DNA, 25 bp, Artificial
  probe
  misc_feature (1)..(25): SEQ ID NO: 4039; WAN024FNR; Start 149; Stop 173
agttatctaagcaagtttcaaggaa

SEQ ID NO: 371159 - DNA, 25 bp, Artificial
  probe
  misc_feature (1)..(25): SEQ ID NO: 4039; WAN024FNR; Start 188; Stop 212
cgttggtgatatttccgttgttatc

SEQ ID NO: 371160 - DNA, 25 bp, Artificial
  probe
  misc_feature (1)..(25): SEQ ID NO: 4039; WAN024FNR; Start 78; Stop 102
acaatccaagtcttctgattcgatt

SEQ ID NO: 371161 - DNA, 25 bp, Artificial
  probe
  misc_feature (1)..(25): SEQ ID NO: 4039; WAN024FNR; Start 185; Stop 209
cttcgttggtgatatttccgttgtt

SEQ ID NO: 371162 - DNA, 25 bp, Artificial
  probe
  misc_feature (1)..(25): SEQ ID NO: 4039; WAN024FNR; Start 147; Stop 171
aaagttatctaagcaagtttcaagg

SEQ ID NO: 371163 - DNA, 25 bp, Artificial
  probe
  misc_feature (1)..(25): SEQ ID NO: 4039; WAN024FNR; Start 77; Stop 101
cacaatccaagtcttctgattcgat

SEQ ID NO: 371164 - DNA, 25 bp, Artificial
  probe
  misc_feature (1)..(25): SEQ ID NO: 4039; WAN024FNR; Start 162; Stop 186
agtttcaaggaatttaacagtgcct

SEQ ID NO: 371165 - DNA, 25 bp, Artificial
  probe
  misc_feature (1)..(25): SEQ ID NO: 4039; WAN024FNR; Start 150; Stop 174
gttatctaagcaagtttcaaggaat

SEQ ID NO: 371166 - DNA, 25 bp, Artificial
  probe
  misc_feature (1)..(25): SEQ ID NO: 4039; WAN024FNR; Start 145; Stop 169
acaaagttatctaagcaagtttcaa

SEQ ID NO: 371167 - DNA, 25 bp, Artificial
  probe
  misc_feature (1)..(25): SEQ ID NO: 4039; WAN024FNR; Start 75; Stop 99
tccacaatccaagtcttctgattcg

SEQ ID NO: 371168 - DNA, 25 bp, Artificial
  probe
  misc_feature (1)..(25): SEQ ID NO: 4039; WAN024FNR; Start 73; Stop 97
tttccacaatccaagtcttctgatt

SEQ ID NO: 371169 - DNA, 25 bp, Artificial
  probe
  misc_feature (1)..(25): SEQ ID NO: 4039; WAN024FNR; Start 156; Stop 180
taagcaagtttcaaggaatttaaca

SEQ ID NO: 371170 - DNA, 25 bp, Artificial
  probe
  misc_feature (1)..(25): SEQ ID NO: 4039; WAN024FNR; Start 47; Stop 71
cttctgtgatggttgtagcgattgg

SEQ ID NO: 371171 - DNA, 25 bp, Artificial
  probe
  misc_feature (1)..(25): SEQ ID NO: 4039; WAN024FNR; Start 144; Stop 168
aacaaagttatctaagcaagtttca

SEQ ID NO: 371172 - DNA, 25 bp, Artificial
  probe
  misc_feature (1)..(25): SEQ ID NO: 4039; WAN024FNR; Start 174; Stop 198
tttaacagtgccttcgttggtgata

SEQ ID NO: 371173 - DNA, 25 bp, Artificial
  probe
  misc_feature (1)..(25): SEQ ID NO: 4039; WAN024FNR; Start 229; Stop 253
ttaccaagaaggaattcgttacctg

SEQ ID NO: 371174 - DNA, 25 bp, Artificial
  probe
  misc_feature (1)..(25): SEQ ID NO: 4039; WAN024FNR; Start 146; Stop 170
caaagttatctaagcaagtttcaag

SEQ ID NO: 371175 - DNA, 25 bp, Artificial
  probe
  misc_feature (1)..(25): SEQ ID NO: 4039; WAN024FNR; Start 155; Stop 179
ctaagcaagtttcaaggaatttaac

SEQ ID NO: 371176 - DNA, 25 bp, Artificial
  probe
  misc_feature (1)..(25): SEQ ID NO: 4039; WAN024FNR; Start 154; Stop 178
tctaagcaagtttcaaggaatttaa

SEQ ID NO: 371177 - DNA, 25 bp, Artificial
  probe
  misc_feature (1)..(25): SEQ ID NO: 4039; WAN024FNR; Start 233; Stop 257
caagaaggaattcgttacctggaag

SEQ ID NO: 371178 - DNA, 25 bp, Artificial
  probe
  misc_feature (1)..(25): SEQ ID NO: 4040; WAN024DYM; Start 707; Stop 731
gaaccagaaccttaacaaccaatat

SEQ ID NO: 371179 - DNA, 25 bp, Artificial
  probe
  misc_feature (1)..(25): SEQ ID NO: 4040; WAN024DYM; Start 225; Stop 249
aattaccttaggagcgattgtgatt

SEQ ID NO: 371180 - DNA, 25 bp, Artificial
  probe
  misc_feature (1)..(25): SEQ ID NO: 4040; WAN024DYM; Start 706; Stop 730
ggaaccagaaccttaacaaccaata

SEQ ID NO: 371181 - DNA, 25 bp, Artificial
  probe
  misc_feature (1)..(25): SEQ ID NO: 4040; WAN024DYM; Start 436; Stop 460
accgcttcgttactattaggaataa

SEQ ID NO: 371182 - DNA, 25 bp, Artificial
  probe
  misc_feature (1)..(25): SEQ ID NO: 4040; WAN024DYM; Start 435; Stop 459
aaccgcttcgttactattaggaata

SEQ ID NO: 371183 - DNA, 25 bp, Artificial
  probe
  misc_feature (1)..(25): SEQ ID NO: 4040; WAN024DYM; Start 226; Stop 250
attaccttaggagcgattgtgattg

SEQ ID NO: 371184 - DNA, 25 bp, Artificial
  probe
  misc_feature (1)..(25): SEQ ID NO: 4040; WAN024DYM; Start 383; Stop 407
aattattggtgccttggattagaag

SEQ ID NO: 371185 - DNA, 25 bp, Artificial
  probe
  misc_feature (1)..(25): SEQ ID NO: 4040; WAN024DYM; Start 384; Stop 408
attattggtgccttggattagaagc

SEQ ID NO: 371186 - DNA, 25 bp, Artificial
  probe
  misc_feature (1)..(25): SEQ ID NO: 4040; WAN024DYM; Start 437; Stop 461
ccgcttcgttactattaggaataat

SEQ ID NO: 371187 - DNA, 25 bp, Artificial
  probe
  misc_feature (1)..(25): SEQ ID NO: 4040; WAN024DYM; Start 382; Stop 406
caattattggtgccttggattagaa

SEQ ID NO: 371188 - DNA, 25 bp, Artificial
  probe
  misc_feature (1)..(25): SEQ ID NO: 4040; WAN024DYM; Start 381; Stop 405
acaattattggtgccttggattaga

SEQ ID NO: 371189 - DNA, 25 bp, Artificial
  probe
  misc_feature (1)..(25): SEQ ID NO: 4040; WAN024DYM; Start 380; Stop 404
tacaattattggtgccttggattag

SEQ ID NO: 371190 - DNA, 25 bp, Artificial
  probe
  misc_feature (1)..(25): SEQ ID NO: 4040; WAN024DYM; Start 379; Stop 403
ctacaattattggtgccttggatta

SEQ ID NO: 371191 - DNA, 25 bp, Artificial
  probe
  misc_feature (1)..(25): SEQ ID NO: 4040; WAN024DYM; Start 223; Stop 247
ttaattaccttaggagcgattgtga

SEQ ID NO: 371192 - DNA, 25 bp, Artificial
  probe
  misc_feature (1)..(25): SEQ ID NO: 4040; WAN024DYM; Start 224; Stop 248
taattaccttaggagcgattgtgat

SEQ ID NO: 371193 - DNA, 25 bp, Artificial
  probe
  misc_feature (1)..(25): SEQ ID NO: 4040; WAN024DYM; Start 378; Stop 402
cctacaattattggtgccttggatt

SEQ ID NO: 371194 - DNA, 25 bp, Artificial
  probe
  misc_feature (1)..(25): SEQ ID NO: 4040; WAN024DYM; Start 222; Stop 246
attaattaccttaggagcgattgtg

SEQ ID NO: 371195 - DNA, 25 bp, Artificial
  probe
  misc_feature (1)..(25): SEQ ID NO: 4040; WAN024DYM; Start 433; Stop 457
ctaaccgcttcgttactattaggaa

SEQ ID NO: 371196 - DNA, 25 bp, Artificial
  probe
  misc_feature (1)..(25): SEQ ID NO: 4040; WAN024DYM; Start 434; Stop 458
taaccgcttcgttactattaggaat

SEQ ID NO: 371197 - DNA, 25 bp, Artificial
  probe
  misc_feature (1)..(25): SEQ ID NO: 4040; WAN024DYM; Start 438; Stop 462
cgcttcgttactattaggaataatg

SEQ ID NO: 371198 - DNA, 25 bp, Artificial
  probe
  misc_feature (1)..(25): SEQ ID NO: 4040; WAN024DYM; Start 708; Stop 732
aaccagaaccttaacaaccaatatt

SEQ ID NO: 371199 - DNA, 25 bp, Artificial
  probe
  misc_feature (1)..(25): SEQ ID NO: 4040; WAN024DYM; Start 430; Stop 454
gtcctaaccgcttcgttactattag

SEQ ID NO: 371200 - DNA, 25 bp, Artificial
  probe
  misc_feature (1)..(25): SEQ ID NO: 4040; WAN024DYM; Start 429; Stop 453
tgtcctaaccgcttcgttactatta

SEQ ID NO: 371201 - DNA, 25 bp, Artificial
  probe
  misc_feature (1)..(25): SEQ ID NO: 4040; WAN024DYM; Start 227; Stop 251
ttaccttaggagcgattgtgattgg

SEQ ID NO: 371202 - DNA, 25 bp, Artificial
  probe
  misc_feature (1)..(25): SEQ ID NO: 4040; WAN024DYM; Start 819; Stop 843
taatgcctactttgcctacttgaaa

SEQ ID NO: 371203 - DNA, 25 bp, Artificial
  probe
  misc_feature (1)..(25): SEQ ID NO: 4040; WAN024DYM; Start 288; Stop 312
ttattattgtccaaagcccgtctat

SEQ ID NO: 371204 - DNA, 25 bp, Artificial
  probe
  misc_feature (1)..(25): SEQ ID NO: 4040; WAN024DYM; Start 287; Stop 311
tttattattgtccaaagcccgtcta

SEQ ID NO: 371205 - DNA, 25 bp, Artificial
  probe
  misc_feature (1)..(25): SEQ ID NO: 4040; WAN024DYM; Start 818; Stop 842
ttaatgcctactttgcctacttgaa

SEQ ID NO: 371206 - DNA, 25 bp, Artificial
  probe
  misc_feature (1)..(25): SEQ ID NO: 4040; WAN024DYM; Start 802; Stop 826
ttccttattctcttgattaatgcct

SEQ ID NO: 371207 - DNA, 25 bp, Artificial
  probe
  misc_feature (1)..(25): SEQ ID NO: 4040; WAN024DYM; Start 289; Stop 313
tattattgtccaaagcccgtctatg

SEQ ID NO: 371208 - DNA, 25 bp, Artificial
  probe
  misc_feature (1)..(25): SEQ ID NO: 4040; WAN024DYM; Start 469; Stop 493
ccaaccattatcagtttgtcagaat

SEQ ID NO: 371209 - DNA, 25 bp, Artificial
  probe
  misc_feature (1)..(25): SEQ ID NO: 4040; WAN024DYM; Start 705; Stop 729
aggaaccagaaccttaacaaccaat

SEQ ID NO: 371210 - DNA, 25 bp, Artificial
  probe
  misc_feature (1)..(25): SEQ ID NO: 4040; WAN024DYM; Start 275; Stop 299
cggtgtttatggtttattattgtcc

SEQ ID NO: 371211 - DNA, 25 bp, Artificial
  probe
  misc_feature (1)..(25): SEQ ID NO: 4041; WAN024GL4; Start 45; Stop 69
tatggataatgaaatgcttgcttgc

SEQ ID NO: 371212 - DNA, 25 bp, Artificial
  probe
  misc_feature (1)..(25): SEQ ID NO: 4041; WAN024GL4; Start 44; Stop 68
ttatggataatgaaatgcttgcttg

SEQ ID NO: 371213 - DNA, 25 bp, Artificial
  probe
  misc_feature (1)..(25): SEQ ID NO: 4041; WAN024GL4; Start 43; Stop 67
gttatggataatgaaatgcttgctt

SEQ ID NO: 371214 - DNA, 25 bp, Artificial
  probe
  misc_feature (1)..(25): SEQ ID NO: 4041; WAN024GL4; Start 49; Stop 73
gataatgaaatgcttgcttgcgttg

SEQ ID NO: 371215 - DNA, 25 bp, Artificial
  probe
  misc_feature (1)..(25): SEQ ID NO: 4041; WAN024GL4; Start 50; Stop 74
ataatgaaatgcttgcttgcgttga

SEQ ID NO: 371216 - DNA, 25 bp, Artificial
  probe
  misc_feature (1)..(25): SEQ ID NO: 4041; WAN024GL4; Start 51; Stop 75
taatgaaatgcttgcttgcgttgaa

SEQ ID NO: 371217 - DNA, 25 bp, Artificial
  probe
  misc_feature (1)..(25): SEQ ID NO: 4041; WAN024GL4; Start 46; Stop 70
atggataatgaaatgcttgcttgcg

SEQ ID NO: 371218 - DNA, 25 bp, Artificial
  probe
  misc_feature (1)..(25): SEQ ID NO: 4041; WAN024GL4; Start 48; Stop 72
ggataatgaaatgcttgcttgcgtt

SEQ ID NO: 371219 - DNA, 25 bp, Artificial
  probe
  misc_feature (1)..(25): SEQ ID NO: 4041; WAN024GL4; Start 52; Stop 76
aatgaaatgcttgcttgcgttgaag

SEQ ID NO: 371220 - DNA, 25 bp, Artificial
  probe
  misc_feature (1)..(25): SEQ ID NO: 4041; WAN024GL4; Start 47; Stop 71
tggataatgaaatgcttgcttgcgt

SEQ ID NO: 371221 - DNA, 25 bp, Artificial
  probe
  misc_feature (1)..(25): SEQ ID NO: 4042; WAN024FCE; Start 418; Stop 442
attaccatcaatctctctaagcctg

SEQ ID NO: 371222 - DNA, 25 bp, Artificial
  probe
  misc_feature (1)..(25): SEQ ID NO: 4042; WAN024FCE; Start 417; Stop 441
aattaccatcaatctctctaagcct

SEQ ID NO: 371223 - DNA, 25 bp, Artificial
  probe
  misc_feature (1)..(25): SEQ ID NO: 4042; WAN024FCE; Start 376; Stop 400
aatatcgcttatcgtgttccatctg

SEQ ID NO: 371224 - DNA, 25 bp, Artificial
  probe
  misc_feature (1)..(25): SEQ ID NO: 4042; WAN024FCE; Start 420; Stop 444
taccatcaatctctctaagcctgaa

SEQ ID NO: 371225 - DNA, 25 bp, Artificial
  probe
  misc_feature (1)..(25): SEQ ID NO: 4042; WAN024FCE; Start 419; Stop 443
ttaccatcaatctctctaagcctga

SEQ ID NO: 371226 - DNA, 25 bp, Artificial
  probe
  misc_feature (1)..(25): SEQ ID NO: 4042; WAN024FCE; Start 377; Stop 401
atatcgcttatcgtgttccatctga

SEQ ID NO: 371227 - DNA, 25 bp, Artificial
  probe
  misc_feature (1)..(25): SEQ ID NO: 4042; WAN024FCE; Start 480; Stop 504
gcaagctagtaattatcctcagtgt

SEQ ID NO: 371228 - DNA, 25 bp, Artificial
  probe
  misc_feature (1)..(25): SEQ ID NO: 4042; WAN024FCE; Start 482; Stop 506
aagctagtaattatcctcagtgtca

SEQ ID NO: 371229 - DNA, 25 bp, Artificial
  probe
  misc_feature (1)..(25): SEQ ID NO: 4042; WAN024FCE; Start 481; Stop 505
caagctagtaattatcctcagtgtc

SEQ ID NO: 371230 - DNA, 25 bp, Artificial
  probe
  misc_feature (1)..(25): SEQ ID NO: 4042; WAN024FCE; Start 479; Stop 503
tgcaagctagtaattatcctcagtg

SEQ ID NO: 371231 - DNA, 25 bp, Artificial
  probe
  misc_feature (1)..(25): SEQ ID NO: 4042; WAN024FCE; Start 478; Stop 502
gtgcaagctagtaattatcctcagt

SEQ ID NO: 371232 - DNA, 25 bp, Artificial
  probe
  misc_feature (1)..(25): SEQ ID NO: 4042; WAN024FCE; Start 375; Stop 399
aaatatcgcttatcgtgttccatct

SEQ ID NO: 371233 - DNA, 25 bp, Artificial
  probe
  misc_feature (1)..(25): SEQ ID NO: 4042; WAN024FCE; Start 614; Stop 638
attcgccctatgcttactttaatga

SEQ ID NO: 371234 - DNA, 25 bp, Artificial
  probe
  misc_feature (1)..(25): SEQ ID NO: 4042; WAN024FCE; Start 477; Stop 501
ggtgcaagctagtaattatcctcag

SEQ ID NO: 371235 - DNA, 25 bp, Artificial
  probe
  misc_feature (1)..(25): SEQ ID NO: 4042; WAN024FCE; Start 113; Stop 137
tggaagttgagaccaatctggataa

SEQ ID NO: 371236 - DNA, 25 bp, Artificial
  probe
  misc_feature (1)..(25): SEQ ID NO: 4042; WAN024FCE; Start 615; Stop 639
ttcgccctatgcttactttaatgag

SEQ ID NO: 371237 - DNA, 25 bp, Artificial
  probe
  misc_feature (1)..(25): SEQ ID NO: 4042; WAN024FCE; Start 471; Stop 495
caagttggtgcaagctagtaattat

SEQ ID NO: 371238 - DNA, 25 bp, Artificial
  probe
  misc_feature (1)..(25): SEQ ID NO: 4042; WAN024FCE; Start 613; Stop 637
tattcgccctatgcttactttaatg

SEQ ID NO: 371239 - DNA, 25 bp, Artificial
  probe
  misc_feature (1)..(25): SEQ ID NO: 4042; WAN024FCE; Start 612; Stop 636
gtattcgccctatgcttactttaat

SEQ ID NO: 371240 - DNA, 25 bp, Artificial
  probe
  misc_feature (1)..(25): SEQ ID NO: 4042; WAN024FCE; Start 475; Stop 499
ttggtgcaagctagtaattatcctc

SEQ ID NO: 371241 - DNA, 25 bp, Artificial
  probe
  misc_feature (1)..(25): SEQ ID NO: 4042; WAN024FCE; Start 472; Stop 496
aagttggtgcaagctagtaattatc

SEQ ID NO: 371242 - DNA, 25 bp, Artificial
  probe
  misc_feature (1)..(25): SEQ ID NO: 4042; WAN024FCE; Start 474; Stop 498
gttggtgcaagctagtaattatcct

SEQ ID NO: 371243 - DNA, 25 bp, Artificial
  probe
  misc_feature (1)..(25): SEQ ID NO: 4042; WAN024FCE; Start 473; Stop 497
agttggtgcaagctagtaattatcc

SEQ ID NO: 371244 - DNA, 25 bp, Artificial
  probe
  misc_feature (1)..(25): SEQ ID NO: 4042; WAN024FCE; Start 476; Stop 500
tggtgcaagctagtaattatcctca

SEQ ID NO: 371245 - DNA, 25 bp, Artificial
  probe
  misc_feature (1)..(25): SEQ ID NO: 4042; WAN024FCE; Start 416; Stop 440
aaattaccatcaatctctctaagcc

SEQ ID NO: 371246 - DNA, 25 bp, Artificial
  probe
  misc_feature (1)..(25): SEQ ID NO: 4042; WAN024FCE; Start 421; Stop 445
accatcaatctctctaagcctgaaa

SEQ ID NO: 371247 - DNA, 25 bp, Artificial
  probe
  misc_feature (1)..(25): SEQ ID NO: 4042; WAN024FCE; Start 1306; Stop 1330
ctcaaatcccaacatccagacctaa

SEQ ID NO: 371248 - DNA, 25 bp, Artificial
  probe
  misc_feature (1)..(25): SEQ ID NO: 4042; WAN024FCE; Start 1307; Stop 1331
tcaaatcccaacatccagacctaac

SEQ ID NO: 371249 - DNA, 25 bp, Artificial
  probe
  misc_feature (1)..(25): SEQ ID NO: 4042; WAN024FCE; Start 415; Stop 439
gaaattaccatcaatctctctaagc

SEQ ID NO: 371250 - DNA, 25 bp, Artificial
  probe
  misc_feature (1)..(25): SEQ ID NO: 4042; WAN024FCE; Start 611; Stop 635
agtattcgccctatgcttactttaa

SEQ ID NO: 371251 - DNA, 25 bp, Artificial
  probe
  misc_feature (1)..(25): SEQ ID NO: 4042; WAN024FCE; Start 470; Stop 494
ccaagttggtgcaagctagtaatta

SEQ ID NO: 371252 - DNA, 25 bp, Artificial
  probe
  misc_feature (1)..(25): SEQ ID NO: 4042; WAN024FCE; Start 610; Stop 634
cagtattcgccctatgcttacttta

SEQ ID NO: 371253 - DNA, 25 bp, Artificial
  probe
  misc_feature (1)..(25): SEQ ID NO: 4042; WAN024FCE; Start 114; Stop 138
ggaagttgagaccaatctggataaa

SEQ ID NO: 371254 - DNA, 25 bp, Artificial
  probe
  misc_feature (1)..(25): SEQ ID NO: 4043; WAN024F7T; Start 27; Stop 51
tattgtgggaaggtttactccattt

SEQ ID NO: 371255 - DNA, 25 bp, Artificial
  probe
  misc_feature (1)..(25): SEQ ID NO: 4043; WAN024F7T; Start 26; Stop 50
ttattgtgggaaggtttactccatt

SEQ ID NO: 371256 - DNA, 25 bp, Artificial
  probe
  misc_feature (1)..(25): SEQ ID NO: 4043; WAN024F7T; Start 25; Stop 49
tttattgtgggaaggtttactccat

SEQ ID NO: 371257 - DNA, 25 bp, Artificial
  probe
  misc_feature (1)..(25): SEQ ID NO: 4043; WAN024F7T; Start 11; Stop 35
ttgatactatgcgttttattgtggg

SEQ ID NO: 371258 - DNA, 25 bp, Artificial
  probe
  misc_feature (1)..(25): SEQ ID NO: 4043; WAN024F7T; Start 22; Stop 46
cgttttattgtgggaaggtttactc

SEQ ID NO: 371259 - DNA, 25 bp, Artificial
  probe
  misc_feature (1)..(25): SEQ ID NO: 4043; WAN024F7T; Start 15; Stop 39
tactatgcgttttattgtgggaagg

SEQ ID NO: 371260 - DNA, 25 bp, Artificial
  probe
  misc_feature (1)..(25): SEQ ID NO: 4043; WAN024F7T; Start 19; Stop 43
atgcgttttattgtgggaaggttta

SEQ ID NO: 371261 - DNA, 25 bp, Artificial
  probe
  misc_feature (1)..(25): SEQ ID NO: 4043; WAN024F7T; Start 18; Stop 42
tatgcgttttattgtgggaaggttt

SEQ ID NO: 371262 - DNA, 25 bp, Artificial
  probe
  misc_feature (1)..(25): SEQ ID NO: 4043; WAN024F7T; Start 10; Stop 34
cttgatactatgcgttttattgtgg

SEQ ID NO: 371263 - DNA, 25 bp, Artificial
  probe
  misc_feature (1)..(25): SEQ ID NO: 4043; WAN024F7T; Start 17; Stop 41
ctatgcgttttattgtgggaaggtt

SEQ ID NO: 371264 - DNA, 25 bp, Artificial
  probe
  misc_feature (1)..(25): SEQ ID NO: 4043; WAN024F7T; Start 21; Stop 45
gcgttttattgtgggaaggtttact

SEQ ID NO: 371265 - DNA, 25 bp, Artificial
  probe
  misc_feature (1)..(25): SEQ ID NO: 4043; WAN024F7T; Start 9; Stop 33
acttgatactatgcgttttattgtg

SEQ ID NO: 371266 - DNA, 25 bp, Artificial
  probe
  misc_feature (1)..(25): SEQ ID NO: 4043; WAN024F7T; Start 20; Stop 44
tgcgttttattgtgggaaggtttac

SEQ ID NO: 371267 - DNA, 25 bp, Artificial
  probe
  misc_feature (1)..(25): SEQ ID NO: 4043; WAN024F7T; Start 36; Stop 60
aaggtttactccattttctcctgaa

SEQ ID NO: 371268 - DNA, 25 bp, Artificial
  probe
  misc_feature (1)..(25): SEQ ID NO: 4043; WAN024F7T; Start 35; Stop 59
gaaggtttactccattttctcctga

SEQ ID NO: 371269 - DNA, 25 bp, Artificial
  probe
  misc_feature (1)..(25): SEQ ID NO: 4043; WAN024F7T; Start 23; Stop 47
gttttattgtgggaaggtttactcc

SEQ ID NO: 371270 - DNA, 25 bp, Artificial
  probe
  misc_feature (1)..(25): SEQ ID NO: 4043; WAN024F7T; Start 24; Stop 48
ttttattgtgggaaggtttactcca

SEQ ID NO: 371271 - DNA, 25 bp, Artificial
  probe
  misc_feature (1)..(25): SEQ ID NO: 4043; WAN024F7T; Start 16; Stop 40
actatgcgttttattgtgggaaggt

SEQ ID NO: 371272 - DNA, 25 bp, Artificial
  probe
  misc_feature (1)..(25): SEQ ID NO: 4043; WAN024F7T; Start 28; Stop 52
attgtgggaaggtttactccatttt

SEQ ID NO: 371273 - DNA, 25 bp, Artificial
  probe
  misc_feature (1)..(25): SEQ ID NO: 4043; WAN024F7T; Start 34; Stop 58
ggaaggtttactccattttctcctg

SEQ ID NO: 371274 - DNA, 25 bp, Artificial
  probe
  misc_feature (1)..(25): SEQ ID NO: 4043; WAN024F7T; Start 8; Stop 32
aacttgatactatgcgttttattgt

SEQ ID NO: 371275 - DNA, 25 bp, Artificial
  probe
  misc_feature (1)..(25): SEQ ID NO: 4043; WAN024F7T; Start 29; Stop 53
ttgtgggaaggtttactccattttc

SEQ ID NO: 371276 - DNA, 25 bp, Artificial
  probe
  misc_feature (1)..(25): SEQ ID NO: 4043; WAN024F7T; Start 37; Stop 61
aggtttactccattttctcctgaaa

SEQ ID NO: 371277 - DNA, 25 bp, Artificial
  probe
  misc_feature (1)..(25): SEQ ID NO: 4043; WAN024F7T; Start 31; Stop 55
gtgggaaggtttactccattttctc

SEQ ID NO: 371278 - DNA, 25 bp, Artificial
  probe
  misc_feature (1)..(25): SEQ ID NO: 4043; WAN024F7T; Start 44; Stop 68
ctccattttctcctgaaattgagtt

SEQ ID NO: 371279 - DNA, 25 bp, Artificial
  probe
  misc_feature (1)..(25): SEQ ID NO: 4043; WAN024F7T; Start 38; Stop 62
ggtttactccattttctcctgaaat

SEQ ID NO: 371280 - DNA, 25 bp, Artificial
  probe
  misc_feature (1)..(25): SEQ ID NO: 4043; WAN024F7T; Start 45; Stop 69
tccattttctcctgaaattgagttt

SEQ ID NO: 371281 - DNA, 25 bp, Artificial
  probe
  misc_feature (1)..(25): SEQ ID NO: 4043; WAN024F7T; Start 33; Stop 57
gggaaggtttactccattttctcct

SEQ ID NO: 371282 - DNA, 25 bp, Artificial
  probe
  misc_feature (1)..(25): SEQ ID NO: 4043; WAN024F7T; Start 42; Stop 66
tactccattttctcctgaaattgag

SEQ ID NO: 371283 - DNA, 25 bp, Artificial
  probe
  misc_feature (1)..(25): SEQ ID NO: 4043; WAN024F7T; Start 30; Stop 54
tgtgggaaggtttactccattttct

SEQ ID NO: 371284 - DNA, 25 bp, Artificial
  probe
  misc_feature (1)..(25): SEQ ID NO: 4043; WAN024F7T; Start 46; Stop 70
ccattttctcctgaaattgagtttt

SEQ ID NO: 371285 - DNA, 25 bp, Artificial
  probe
  misc_feature (1)..(25): SEQ ID NO: 4043; WAN024F7T; Start 41; Stop 65
ttactccattttctcctgaaattga

SEQ ID NO: 371286 - DNA, 25 bp, Artificial
  probe
  misc_feature (1)..(25): SEQ ID NO: 4043; WAN024F7T; Start 32; Stop 56
tgggaaggtttactccattttctcc

SEQ ID NO: 371287 - DNA, 25 bp, Artificial
  probe
  misc_feature (1)..(25): SEQ ID NO: 4044; WAN024FDZ; Start 85; Stop 109
aaaggacattacgaatttctggaga

SEQ ID NO: 371288 - DNA, 25 bp, Artificial
  probe
  misc_feature (1)..(25): SEQ ID NO: 4044; WAN024FDZ; Start 195; Stop 219
tgatacatggtcaatacctctacat

SEQ ID NO: 371289 - DNA, 25 bp, Artificial
  probe
  misc_feature (1)..(25): SEQ ID NO: 4044; WAN024FDZ; Start 90; Stop 114
acattacgaatttctggagaaggat

SEQ ID NO: 371290 - DNA, 25 bp, Artificial
  probe
  misc_feature (1)..(25): SEQ ID NO: 4044; WAN024FDZ; Start 86; Stop 110
aaggacattacgaatttctggagaa

SEQ ID NO: 371291 - DNA, 25 bp, Artificial
  probe
  misc_feature (1)..(25): SEQ ID NO: 4044; WAN024FDZ; Start 89; Stop 113
gacattacgaatttctggagaagga

SEQ ID NO: 371292 - DNA, 25 bp, Artificial
  probe
  misc_feature (1)..(25): SEQ ID NO: 4044; WAN024FDZ; Start 87; Stop 111
aggacattacgaatttctggagaag

SEQ ID NO: 371293 - DNA, 25 bp, Artificial
  probe
  misc_feature (1)..(25): SEQ ID NO: 4044; WAN024FDZ; Start 124; Stop 148
gatcaaacaaccactggatttcttc

SEQ ID NO: 371294 - DNA, 25 bp, Artificial
  probe
  misc_feature (1)..(25): SEQ ID NO: 4044; WAN024FDZ; Start 93; Stop 117
ttacgaatttctggagaaggatttc

SEQ ID NO: 371295 - DNA, 25 bp, Artificial
  probe
  misc_feature (1)..(25): SEQ ID NO: 4044; WAN024FDZ; Start 91; Stop 115
cattacgaatttctggagaaggatt

SEQ ID NO: 371296 - DNA, 25 bp, Artificial
  probe
  misc_feature (1)..(25): SEQ ID NO: 4044; WAN024FDZ; Start 88; Stop 112
ggacattacgaatttctggagaagg

SEQ ID NO: 371297 - DNA, 25 bp, Artificial
  probe
  misc_feature (1)..(25): SEQ ID NO: 4044; WAN024FDZ; Start 92; Stop 116
attacgaatttctggagaaggattt

SEQ ID NO: 371298 - DNA, 25 bp, Artificial
  probe
  misc_feature (1)..(25): SEQ ID NO: 4044; WAN024FDZ; Start 196; Stop 220
gatacatggtcaatacctctacatt

SEQ ID NO: 371299 - DNA, 25 bp, Artificial
  probe
  misc_feature (1)..(25): SEQ ID NO: 4044; WAN024FDZ; Start 14; Stop 38
aacccaaccatactgacttgagaaa

SEQ ID NO: 371300 - DNA, 25 bp, Artificial
  probe
  misc_feature (1)..(25): SEQ ID NO: 4044; WAN024FDZ; Start 194; Stop 218
ttgatacatggtcaatacctctaca

SEQ ID NO: 371301 - DNA, 25 bp, Artificial
  probe
  misc_feature (1)..(25): SEQ ID NO: 4044; WAN024FDZ; Start 191; Stop 215
atcttgatacatggtcaatacctct

SEQ ID NO: 371302 - DNA, 25 bp, Artificial
  probe
  misc_feature (1)..(25): SEQ ID NO: 4044; WAN024FDZ; Start 94; Stop 118
tacgaatttctggagaaggatttcc

SEQ ID NO: 371303 - DNA, 25 bp, Artificial
  probe
  misc_feature (1)..(25): SEQ ID NO: 4044; WAN024FDZ; Start 13; Stop 37
gaacccaaccatactgacttgagaa

SEQ ID NO: 371304 - DNA, 25 bp, Artificial
  probe
  misc_feature (1)..(25): SEQ ID NO: 4044; WAN024FDZ; Start 99; Stop 123
atttctggagaaggatttcccaaat

SEQ ID NO: 371305 - DNA, 25 bp, Artificial
  probe
  misc_feature (1)..(25): SEQ ID NO: 4044; WAN024FDZ; Start 98; Stop 122
aatttctggagaaggatttcccaaa

SEQ ID NO: 371306 - DNA, 25 bp, Artificial
  probe
  misc_feature (1)..(25): SEQ ID NO: 4044; WAN024FDZ; Start 193; Stop 217
cttgatacatggtcaatacctctac

SEQ ID NO: 371307 - DNA, 25 bp, Artificial
  probe
  misc_feature (1)..(25): SEQ ID NO: 4044; WAN024FDZ; Start 192; Stop 216
tcttgatacatggtcaatacctcta

SEQ ID NO: 371308 - DNA, 25 bp, Artificial
  probe
  misc_feature (1)..(25): SEQ ID NO: 4044; WAN024FDZ; Start 190; Stop 214
aatcttgatacatggtcaatacctc

SEQ ID NO: 371309 - DNA, 25 bp, Artificial
  probe
  misc_feature (1)..(25): SEQ ID NO: 4044; WAN024FDZ; Start 97; Stop 121
gaatttctggagaaggatttcccaa

SEQ ID NO: 371310 - DNA, 25 bp, Artificial
  probe
  misc_feature (1)..(25): SEQ ID NO: 4044; WAN024FDZ; Start 15; Stop 39
acccaaccatactgacttgagaaac

SEQ ID NO: 371311 - DNA, 25 bp, Artificial
  probe
  misc_feature (1)..(25): SEQ ID NO: 4044; WAN024FDZ; Start 125; Stop 149
atcaaacaaccactggatttcttcc

SEQ ID NO: 371312 - DNA, 25 bp, Artificial
  probe
  misc_feature (1)..(25): SEQ ID NO: 4044; WAN024FDZ; Start 100; Stop 124
tttctggagaaggatttcccaaatg

SEQ ID NO: 371313 - DNA, 25 bp, Artificial
  probe
  misc_feature (1)..(25): SEQ ID NO: 4044; WAN024FDZ; Start 199; Stop 223
acatggtcaatacctctacatttct

SEQ ID NO: 371314 - DNA, 25 bp, Artificial
  probe
  misc_feature (1)..(25): SEQ ID NO: 4044; WAN024FDZ; Start 60; Stop 84
gaaagatagtgcaagccttgattta

SEQ ID NO: 371315 - DNA, 25 bp, Artificial
  probe
  misc_feature (1)..(25): SEQ ID NO: 4044; WAN024FDZ; Start 102; Stop 126
tctggagaaggatttcccaaatgat

SEQ ID NO: 371316 - DNA, 25 bp, Artificial
  probe
  misc_feature (1)..(25): SEQ ID NO: 4044; WAN024FDZ; Start 134; Stop 158
ccactggatttcttcctggttataa

SEQ ID NO: 371317 - DNA, 25 bp, Artificial
  probe
  misc_feature (1)..(25): SEQ ID NO: 4044; WAN024FDZ; Start 62; Stop 86
aagatagtgcaagccttgatttaaa

SEQ ID NO: 371318 - DNA, 25 bp, Artificial
  probe
  misc_feature (1)..(25): SEQ ID NO: 4044; WAN024FDZ; Start 61; Stop 85
aaagatagtgcaagccttgatttaa

SEQ ID NO: 371319 - DNA, 25 bp, Artificial
  probe
  misc_feature (1)..(25): SEQ ID NO: 4044; WAN024FDZ; Start 103; Stop 127
ctggagaaggatttcccaaatgatc

SEQ ID NO: 371320 - DNA, 25 bp, Artificial
  probe
  misc_feature (1)..(25): SEQ ID NO: 4045; WAN024G8U; Start 144; Stop 168
aatcatttctttggcacctttgtat

SEQ ID NO: 371321 - DNA, 25 bp, Artificial
  probe
  misc_feature (1)..(25): SEQ ID NO: 4045; WAN024G8U; Start 143; Stop 167
aaatcatttctttggcacctttgta

SEQ ID NO: 371322 - DNA, 25 bp, Artificial
  probe
  misc_feature (1)..(25): SEQ ID NO: 4045; WAN024G8U; Start 145; Stop 169
atcatttctttggcacctttgtatg

SEQ ID NO: 371323 - DNA, 25 bp, Artificial
  probe
  misc_feature (1)..(25): SEQ ID NO: 4045; WAN024G8U; Start 119; Stop 143
tcttattatcaagttcttccactca

SEQ ID NO: 371324 - DNA, 25 bp, Artificial
  probe
  misc_feature (1)..(25): SEQ ID NO: 4045; WAN024G8U; Start 148; Stop 172
atttctttggcacctttgtatggaa

SEQ ID NO: 371325 - DNA, 25 bp, Artificial
  probe
  misc_feature (1)..(25): SEQ ID NO: 4045; WAN024G8U; Start 116; Stop 140
acatcttattatcaagttcttccac

SEQ ID NO: 371326 - DNA, 25 bp, Artificial
  probe
  misc_feature (1)..(25): SEQ ID NO: 4045; WAN024G8U; Start 127; Stop 151
tcaagttcttccactcaaatcattt

SEQ ID NO: 371327 - DNA, 25 bp, Artificial
  probe
  misc_feature (1)..(25): SEQ ID NO: 4045; WAN024G8U; Start 126; Stop 150
atcaagttcttccactcaaatcatt

SEQ ID NO: 371328 - DNA, 25 bp, Artificial
  probe
  misc_feature (1)..(25): SEQ ID NO: 4045; WAN024G8U; Start 128; Stop 152
caagttcttccactcaaatcatttc

SEQ ID NO: 371329 - DNA, 25 bp, Artificial
  probe
  misc_feature (1)..(25): SEQ ID NO: 4045; WAN024G8U; Start 131; Stop 155
gttcttccactcaaatcatttcttt

SEQ ID NO: 371330 - DNA, 25 bp, Artificial
  probe
  misc_feature (1)..(25): SEQ ID NO: 4045; WAN024G8U; Start 130; Stop 154
agttcttccactcaaatcatttctt

SEQ ID NO: 371331 - DNA, 25 bp, Artificial
  probe
  misc_feature (1)..(25): SEQ ID NO: 4045; WAN024G8U; Start 129; Stop 153
aagttcttccactcaaatcatttct

SEQ ID NO: 371332 - DNA, 25 bp, Artificial
  probe
  misc_feature (1)..(25): SEQ ID NO: 4045; WAN024G8U; Start 189; Stop 213
gtcaatcttatctaagactgcttgc

SEQ ID NO: 371333 - DNA, 25 bp, Artificial
  probe
  misc_feature (1)..(25): SEQ ID NO: 4045; WAN024G8U; Start 187; Stop 211
tggtcaatcttatctaagactgctt

SEQ ID NO: 371334 - DNA, 25 bp, Artificial
  probe
  misc_feature (1)..(25): SEQ ID NO: 4045; WAN024G8U; Start 186; Stop 210
ttggtcaatcttatctaagactgct

SEQ ID NO: 371335 - DNA, 25 bp, Artificial
  probe
  misc_feature (1)..(25): SEQ ID NO: 4045; WAN024G8U; Start 120; Stop 144
cttattatcaagttcttccactcaa

SEQ ID NO: 371336 - DNA, 25 bp, Artificial
  probe
  misc_feature (1)..(25): SEQ ID NO: 4045; WAN024G8U; Start 188; Stop 212
ggtcaatcttatctaagactgcttg

SEQ ID NO: 371337 - DNA, 25 bp, Artificial
  probe
  misc_feature (1)..(25): SEQ ID NO: 4045; WAN024G8U; Start 124; Stop 148
ttatcaagttcttccactcaaatca

SEQ ID NO: 371338 - DNA, 25 bp, Artificial
  probe
  misc_feature (1)..(25): SEQ ID NO: 4045; WAN024G8U; Start 147; Stop 171
catttctttggcacctttgtatgga

SEQ ID NO: 371339 - DNA, 25 bp, Artificial
  probe
  misc_feature (1)..(25): SEQ ID NO: 4045; WAN024G8U; Start 146; Stop 170
tcatttctttggcacctttgtatgg

SEQ ID NO: 371340 - DNA, 25 bp, Artificial
  probe
  misc_feature (1)..(25): SEQ ID NO: 4045; WAN024G8U; Start 74; Stop 98
ttggcagttggttatacatagctaa

SEQ ID NO: 371341 - DNA, 25 bp, Artificial
  probe
  misc_feature (1)..(25): SEQ ID NO: 4045; WAN024G8U; Start 150; Stop 174
ttctttggcacctttgtatggaaac

SEQ ID NO: 371342 - DNA, 25 bp, Artificial
  probe
  misc_feature (1)..(25): SEQ ID NO: 4045; WAN024G8U; Start 125; Stop 149
tatcaagttcttccactcaaatcat

SEQ ID NO: 371343 - DNA, 25 bp, Artificial
  probe
  misc_feature (1)..(25): SEQ ID NO: 4045; WAN024G8U; Start 73; Stop 97
gttggcagttggttatacatagcta

SEQ ID NO: 371344 - DNA, 25 bp, Artificial
  probe
  misc_feature (1)..(25): SEQ ID NO: 4045; WAN024G8U; Start 185; Stop 209
attggtcaatcttatctaagactgc

SEQ ID NO: 371345 - DNA, 25 bp, Artificial
  probe
  misc_feature (1)..(25): SEQ ID NO: 4045; WAN024G8U; Start 117; Stop 141
catcttattatcaagttcttccact

SEQ ID NO: 371346 - DNA, 25 bp, Artificial
  probe
  misc_feature (1)..(25): SEQ ID NO: 4045; WAN024G8U; Start 152; Stop 176
ctttggcacctttgtatggaaactc

SEQ ID NO: 371347 - DNA, 25 bp, Artificial
  probe
  misc_feature (1)..(25): SEQ ID NO: 4045; WAN024G8U; Start 118; Stop 142
atcttattatcaagttcttccactc

SEQ ID NO: 371348 - DNA, 25 bp, Artificial
  probe
  misc_feature (1)..(25): SEQ ID NO: 4045; WAN024G8U; Start 70; Stop 94
ggcgttggcagttggttatacatag

SEQ ID NO: 371349 - DNA, 25 bp, Artificial
  probe
  misc_feature (1)..(25): SEQ ID NO: 4045; WAN024G8U; Start 72; Stop 96
cgttggcagttggttatacatagct

SEQ ID NO: 371350 - DNA, 25 bp, Artificial
  probe
  misc_feature (1)..(25): SEQ ID NO: 4045; WAN024G8U; Start 191; Stop 215
caatcttatctaagactgcttgcac

SEQ ID NO: 371351 - DNA, 25 bp, Artificial
  probe
  misc_feature (1)..(25): SEQ ID NO: 4045; WAN024G8U; Start 190; Stop 214
tcaatcttatctaagactgcttgca

SEQ ID NO: 371352 - DNA, 25 bp, Artificial
  probe
  misc_feature (1)..(25): SEQ ID NO: 4045; WAN024G8U; Start 151; Stop 175
tctttggcacctttgtatggaaact

SEQ ID NO: 371353 - DNA, 25 bp, Artificial
  probe
  misc_feature (1)..(25): SEQ ID NO: 4046; WAN024CO4; Start 21; Stop 45
aagaagaacgatgctcagttacttg

SEQ ID NO: 371354 - DNA, 25 bp, Artificial
  probe
  misc_feature (1)..(25): SEQ ID NO: 4046; WAN024CO4; Start 20; Stop 44
caagaagaacgatgctcagttactt

SEQ ID NO: 371355 - DNA, 25 bp, Artificial
  probe
  misc_feature (1)..(25): SEQ ID NO: 4046; WAN024CO4; Start 80; Stop 104
tacttacatttcaggaaacgctcta

SEQ ID NO: 371356 - DNA, 25 bp, Artificial
  probe
  misc_feature (1)..(25): SEQ ID NO: 4046; WAN024CO4; Start 81; Stop 105
acttacatttcaggaaacgctctaa

SEQ ID NO: 371357 - DNA, 25 bp, Artificial
  probe
  misc_feature (1)..(25): SEQ ID NO: 4046; WAN024CO4; Start 79; Stop 103
ttacttacatttcaggaaacgctct

SEQ ID NO: 371358 - DNA, 25 bp, Artificial
  probe
  misc_feature (1)..(25): SEQ ID NO: 4046; WAN024CO4; Start 69; Stop 93
gcagttgaggttacttacatttcag

SEQ ID NO: 371359 - DNA, 25 bp, Artificial
  probe
  misc_feature (1)..(25): SEQ ID NO: 4046; WAN024CO4; Start 71; Stop 95
agttgaggttacttacatttcagga

SEQ ID NO: 371360 - DNA, 25 bp, Artificial
  probe
  misc_feature (1)..(25): SEQ ID NO: 4046; WAN024CO4; Start 70; Stop 94
cagttgaggttacttacatttcagg

SEQ ID NO: 371361 - DNA, 25 bp, Artificial
  probe
  misc_feature (1)..(25): SEQ ID NO: 4046; WAN024CO4; Start 75; Stop 99
gaggttacttacatttcaggaaacg

SEQ ID NO: 371362 - DNA, 25 bp, Artificial
  probe
  misc_feature (1)..(25): SEQ ID NO: 4046; WAN024CO4; Start 78; Stop 102
gttacttacatttcaggaaacgctc

SEQ ID NO: 371363 - DNA, 25 bp, Artificial
  probe
  misc_feature (1)..(25): SEQ ID NO: 4046; WAN024CO4; Start 72; Stop 96
gttgaggttacttacatttcaggaa

SEQ ID NO: 371364 - DNA, 25 bp, Artificial
  probe
  misc_feature (1)..(25): SEQ ID NO: 4046; WAN024CO4; Start 74; Stop 98
tgaggttacttacatttcaggaaac

SEQ ID NO: 371365 - DNA, 25 bp, Artificial
  probe
  misc_feature (1)..(25): SEQ ID NO: 4046; WAN024CO4; Start 24; Stop 48
aagaacgatgctcagttacttgctc

SEQ ID NO: 371366 - DNA, 25 bp, Artificial
  probe
  misc_feature (1)..(25): SEQ ID NO: 4046; WAN024CO4; Start 23; Stop 47
gaagaacgatgctcagttacttgct

SEQ ID NO: 371367 - DNA, 25 bp, Artificial
  probe
  misc_feature (1)..(25): SEQ ID NO: 4046; WAN024CO4; Start 22; Stop 46
agaagaacgatgctcagttacttgc

SEQ ID NO: 371368 - DNA, 25 bp, Artificial
  probe
  misc_feature (1)..(25): SEQ ID NO: 4046; WAN024CO4; Start 77; Stop 101
ggttacttacatttcaggaaacgct

SEQ ID NO: 371369 - DNA, 25 bp, Artificial
  probe
  misc_feature (1)..(25): SEQ ID NO: 4046; WAN024CO4; Start 76; Stop 100
aggttacttacatttcaggaaacgc

SEQ ID NO: 371370 - DNA, 25 bp, Artificial
  probe
  misc_feature (1)..(25): SEQ ID NO: 4046; WAN024CO4; Start 26; Stop 50
gaacgatgctcagttacttgctcaa

SEQ ID NO: 371371 - DNA, 25 bp, Artificial
  probe
  misc_feature (1)..(25): SEQ ID NO: 4046; WAN024CO4; Start 73; Stop 97
ttgaggttacttacatttcaggaaa

SEQ ID NO: 371372 - DNA, 25 bp, Artificial
  probe
  misc_feature (1)..(25): SEQ ID NO: 4046; WAN024CO4; Start 27; Stop 51
aacgatgctcagttacttgctcaac

SEQ ID NO: 371373 - DNA, 25 bp, Artificial
  probe
  misc_feature (1)..(25): SEQ ID NO: 4046; WAN024CO4; Start 68; Stop 92
tgcagttgaggttacttacatttca

SEQ ID NO: 371374 - DNA, 25 bp, Artificial
  probe
  misc_feature (1)..(25): SEQ ID NO: 4046; WAN024CO4; Start 25; Stop 49
agaacgatgctcagttacttgctca

SEQ ID NO: 371375 - DNA, 25 bp, Artificial
  probe
  misc_feature (1)..(25): SEQ ID NO: 4046; WAN024CO4; Start 19; Stop 43
gcaagaagaacgatgctcagttact

SEQ ID NO: 371376 - DNA, 25 bp, Artificial
  probe
  misc_feature (1)..(25): SEQ ID NO: 4046; WAN024CO4; Start 31; Stop 55
atgctcagttacttgctcaacggaa

SEQ ID NO: 371377 - DNA, 25 bp, Artificial
  probe
  misc_feature (1)..(25): SEQ ID NO: 4046; WAN024CO4; Start 30; Stop 54
gatgctcagttacttgctcaacgga

SEQ ID NO: 371378 - DNA, 25 bp, Artificial
  probe
  misc_feature (1)..(25): SEQ ID NO: 4046; WAN024CO4; Start 4; Stop 28
caaagcctcgttctagcaagaagaa

SEQ ID NO: 371379 - DNA, 25 bp, Artificial
  probe
  misc_feature (1)..(25): SEQ ID NO: 4046; WAN024CO4; Start 32; Stop 56
tgctcagttacttgctcaacggaaa

SEQ ID NO: 371380 - DNA, 25 bp, Artificial
  probe
  misc_feature (1)..(25): SEQ ID NO: 4046; WAN024CO4; Start 33; Stop 57
gctcagttacttgctcaacggaaaa

SEQ ID NO: 371381 - DNA, 25 bp, Artificial
  probe
  misc_feature (1)..(25): SEQ ID NO: 4047; WAN024EV9; Start 102; Stop 126
gctttgtccttgctttcttagttca

SEQ ID NO: 371382 - DNA, 25 bp, Artificial
  probe
  misc_feature (1)..(25): SEQ ID NO: 4047; WAN024EV9; Start 61; Stop 85
ccagaaacatccacaccaaatcttt

SEQ ID NO: 371383 - DNA, 25 bp, Artificial
  probe
  misc_feature (1)..(25): SEQ ID NO: 4047; WAN024EV9; Start 60; Stop 84
accagaaacatccacaccaaatctt

SEQ ID NO: 371384 - DNA, 25 bp, Artificial
  probe
  misc_feature (1)..(25): SEQ ID NO: 4047; WAN024EV9; Start 62; Stop 86
cagaaacatccacaccaaatctttt

SEQ ID NO: 371385 - DNA, 25 bp, Artificial
  probe
  misc_feature (1)..(25): SEQ ID NO: 4047; WAN024EV9; Start 101; Stop 125
agctttgtccttgctttcttagttc

SEQ ID NO: 371386 - DNA, 25 bp, Artificial
  probe
  misc_feature (1)..(25): SEQ ID NO: 4047; WAN024EV9; Start 27; Stop 51
taaagctcatctcaaagattcagat

SEQ ID NO: 371387 - DNA, 25 bp, Artificial
  probe
  misc_feature (1)..(25): SEQ ID NO: 4047; WAN024EV9; Start 26; Stop 50
ataaagctcatctcaaagattcaga

SEQ ID NO: 371388 - DNA, 25 bp, Artificial
  probe
  misc_feature (1)..(25): SEQ ID NO: 4047; WAN024EV9; Start 25; Stop 49
tataaagctcatctcaaagattcag

SEQ ID NO: 371389 - DNA, 25 bp, Artificial
  probe
  misc_feature (1)..(25): SEQ ID NO: 4047; WAN024EV9; Start 24; Stop 48
ttataaagctcatctcaaagattca

SEQ ID NO: 371390 - DNA, 25 bp, Artificial
  probe
  misc_feature (1)..(25): SEQ ID NO: 4047; WAN024EV9; Start 100; Stop 124
aagctttgtccttgctttcttagtt

SEQ ID NO: 371391 - DNA, 25 bp, Artificial
  probe
  misc_feature (1)..(25): SEQ ID NO: 4047; WAN024EV9; Start 97; Stop 121
ttgaagctttgtccttgctttctta

SEQ ID NO: 371392 - DNA, 25 bp, Artificial
  probe
  misc_feature (1)..(25): SEQ ID NO: 4047; WAN024EV9; Start 23; Stop 47
tttataaagctcatctcaaagattc

SEQ ID NO: 371393 - DNA, 25 bp, Artificial
  probe
  misc_feature (1)..(25): SEQ ID NO: 4047; WAN024EV9; Start 99; Stop 123
gaagctttgtccttgctttcttagt

SEQ ID NO: 371394 - DNA, 25 bp, Artificial
  probe
  misc_feature (1)..(25): SEQ ID NO: 4047; WAN024EV9; Start 98; Stop 122
tgaagctttgtccttgctttcttag

SEQ ID NO: 371395 - DNA, 25 bp, Artificial
  probe
  misc_feature (1)..(25): SEQ ID NO: 4047; WAN024EV9; Start 96; Stop 120
tttgaagctttgtccttgctttctt

SEQ ID NO: 371396 - DNA, 25 bp, Artificial
  probe
  misc_feature (1)..(25): SEQ ID NO: 4047; WAN024EV9; Start 95; Stop 119
gtttgaagctttgtccttgctttct

SEQ ID NO: 371397 - DNA, 25 bp, Artificial
  probe
  misc_feature (1)..(25): SEQ ID NO: 4047; WAN024EV9; Start 94; Stop 118
tgtttgaagctttgtccttgctttc

SEQ ID NO: 371398 - DNA, 25 bp, Artificial
  probe
  misc_feature (1)..(25): SEQ ID NO: 4047; WAN024EV9; Start 93; Stop 117
ctgtttgaagctttgtccttgcttt

SEQ ID NO: 371399 - DNA, 25 bp, Artificial
  probe
  misc_feature (1)..(25): SEQ ID NO: 4047; WAN024EV9; Start 92; Stop 116
gctgtttgaagctttgtccttgctt

SEQ ID NO: 371400 - DNA, 25 bp, Artificial
  probe
  misc_feature (1)..(25): SEQ ID NO: 4048; WAN024F8L; Start 18; Stop 42
catctcggatcatcagaatatcgtc

SEQ ID NO: 371401 - DNA, 25 bp, Artificial
  probe
  misc_feature (1)..(25): SEQ ID NO: 4048; WAN024F8L; Start 19; Stop 43
atctcggatcatcagaatatcgtca

SEQ ID NO: 371402 - DNA, 25 bp, Artificial
  probe
  misc_feature (1)..(25): SEQ ID NO: 4048; WAN024F8L; Start 162; Stop 186
aaggctcatccaagataatcaggtc

SEQ ID NO: 371403 - DNA, 25 bp, Artificial
  probe
  misc_feature (1)..(25): SEQ ID NO: 4048; WAN024F8L; Start 22; Stop 46
tcggatcatcagaatatcgtcacaa

SEQ ID NO: 371404 - DNA, 25 bp, Artificial
  probe
  misc_feature (1)..(25): SEQ ID NO: 4048; WAN024F8L; Start 20; Stop 44
tctcggatcatcagaatatcgtcac

SEQ ID NO: 371405 - DNA, 25 bp, Artificial
  probe
  misc_feature (1)..(25): SEQ ID NO: 4048; WAN024F8L; Start 202; Stop 226
agtaataatgagctgaatcttctgc

SEQ ID NO: 371406 - DNA, 25 bp, Artificial
  probe
  misc_feature (1)..(25): SEQ ID NO: 4048; WAN024F8L; Start 17; Stop 41
ccatctcggatcatcagaatatcgt

SEQ ID NO: 371407 - DNA, 25 bp, Artificial
  probe
  misc_feature (1)..(25): SEQ ID NO: 4048; WAN024F8L; Start 21; Stop 45
ctcggatcatcagaatatcgtcaca

SEQ ID NO: 371408 - DNA, 25 bp, Artificial
  probe
  misc_feature (1)..(25): SEQ ID NO: 4048; WAN024F8L; Start 168; Stop 192
catccaagataatcaggtctggttc

SEQ ID NO: 371409 - DNA, 25 bp, Artificial
  probe
  misc_feature (1)..(25): SEQ ID NO: 4048; WAN024F8L; Start 170; Stop 194
tccaagataatcaggtctggttcat

SEQ ID NO: 371410 - DNA, 25 bp, Artificial
  probe
  misc_feature (1)..(25): SEQ ID NO: 4048; WAN024F8L; Start 169; Stop 193
atccaagataatcaggtctggttca

SEQ ID NO: 371411 - DNA, 25 bp, Artificial
  probe
  misc_feature (1)..(25): SEQ ID NO: 4048; WAN024F8L; Start 167; Stop 191
tcatccaagataatcaggtctggtt

SEQ ID NO: 371412 - DNA, 25 bp, Artificial
  probe
  misc_feature (1)..(25): SEQ ID NO: 4048; WAN024F8L; Start 125; Stop 149
ttgagcaattctgtattaactgggt

SEQ ID NO: 371413 - DNA, 25 bp, Artificial
  probe
  misc_feature (1)..(25): SEQ ID NO: 4048; WAN024F8L; Start 29; Stop 53
atcagaatatcgtcacaaagttcct

SEQ ID NO: 371414 - DNA, 25 bp, Artificial
  probe
  misc_feature (1)..(25): SEQ ID NO: 4048; WAN024F8L; Start 28; Stop 52
catcagaatatcgtcacaaagttcc

SEQ ID NO: 371415 - DNA, 25 bp, Artificial
  probe
  misc_feature (1)..(25): SEQ ID NO: 4048; WAN024F8L; Start 124; Stop 148
tttgagcaattctgtattaactggg

SEQ ID NO: 371416 - DNA, 25 bp, Artificial
  probe
  misc_feature (1)..(25): SEQ ID NO: 4048; WAN024F8L; Start 32; Stop 56
agaatatcgtcacaaagttcctcaa

SEQ ID NO: 371417 - DNA, 25 bp, Artificial
  probe
  misc_feature (1)..(25): SEQ ID NO: 4048; WAN024F8L; Start 163; Stop 187
aggctcatccaagataatcaggtct

SEQ ID NO: 371418 - DNA, 25 bp, Artificial
  probe
  misc_feature (1)..(25): SEQ ID NO: 4048; WAN024F8L; Start 33; Stop 57
gaatatcgtcacaaagttcctcaac

SEQ ID NO: 371419 - DNA, 25 bp, Artificial
  probe
  misc_feature (1)..(25): SEQ ID NO: 4048; WAN024F8L; Start 30; Stop 54
tcagaatatcgtcacaaagttcctc

SEQ ID NO: 371420 - DNA, 25 bp, Artificial
  probe
  misc_feature (1)..(25): SEQ ID NO: 4048; WAN024F8L; Start 164; Stop 188
ggctcatccaagataatcaggtctg

SEQ ID NO: 371421 - DNA, 25 bp, Artificial
  probe
  misc_feature (1)..(25): SEQ ID NO: 4048; WAN024F8L; Start 126; Stop 150
tgagcaattctgtattaactgggtc

SEQ ID NO: 371422 - DNA, 25 bp, Artificial
  probe
  misc_feature (1)..(25): SEQ ID NO: 4048; WAN024F8L; Start 132; Stop 156
attctgtattaactgggtccaatcc

SEQ ID NO: 371423 - DNA, 25 bp, Artificial
  probe
  misc_feature (1)..(25): SEQ ID NO: 4048; WAN024F8L; Start 35; Stop 59
atatcgtcacaaagttcctcaacat

SEQ ID NO: 371424 - DNA, 25 bp, Artificial
  probe
  misc_feature (1)..(25): SEQ ID NO: 4048; WAN024F8L; Start 31; Stop 55
cagaatatcgtcacaaagttcctca

SEQ ID NO: 371425 - DNA, 25 bp, Artificial
  probe
  misc_feature (1)..(25): SEQ ID NO: 4048; WAN024F8L; Start 27; Stop 51
tcatcagaatatcgtcacaaagttc

SEQ ID NO: 371426 - DNA, 25 bp, Artificial
  probe
  misc_feature (1)..(25): SEQ ID NO: 4048; WAN024F8L; Start 166; Stop 190
ctcatccaagataatcaggtctggt

SEQ ID NO: 371427 - DNA, 25 bp, Artificial
  probe
  misc_feature (1)..(25): SEQ ID NO: 4048; WAN024F8L; Start 36; Stop 60
tatcgtcacaaagttcctcaacatt

SEQ ID NO: 371428 - DNA, 25 bp, Artificial
  probe
  misc_feature (1)..(25): SEQ ID NO: 4048; WAN024F8L; Start 34; Stop 58
aatatcgtcacaaagttcctcaaca

SEQ ID NO: 371429 - DNA, 25 bp, Artificial
  probe
  misc_feature (1)..(25): SEQ ID NO: 4048; WAN024F8L; Start 114; Stop 138
aaatgacttgtttgagcaattctgt

SEQ ID NO: 371430 - DNA, 25 bp, Artificial
  probe
  misc_feature (1)..(25): SEQ ID NO: 4048; WAN024F8L; Start 26; Stop 50
atcatcagaatatcgtcacaaagtt

SEQ ID NO: 371431 - DNA, 25 bp, Artificial
  probe
  misc_feature (1)..(25): SEQ ID NO: 4048; WAN024F8L; Start 130; Stop 154
caattctgtattaactgggtccaat

SEQ ID NO: 371432 - DNA, 25 bp, Artificial
  probe
  misc_feature (1)..(25): SEQ ID NO: 4048; WAN024F8L; Start 171; Stop 195
ccaagataatcaggtctggttcatg

SEQ ID NO: 371433 - DNA, 25 bp, Artificial
  probe
  misc_feature (1)..(25): SEQ ID NO: 4049; WAN024FBF; Start 120; Stop 144
ccataatatctctgagtccaatcgt

SEQ ID NO: 371434 - DNA, 25 bp, Artificial
  probe
  misc_feature (1)..(25): SEQ ID NO: 4049; WAN024FBF; Start 118; Stop 142
agccataatatctctgagtccaatc

SEQ ID NO: 371435 - DNA, 25 bp, Artificial
  probe
  misc_feature (1)..(25): SEQ ID NO: 4049; WAN024FBF; Start 122; Stop 146
ataatatctctgagtccaatcgtcc

SEQ ID NO: 371436 - DNA, 25 bp, Artificial
  probe
  misc_feature (1)..(25): SEQ ID NO: 4049; WAN024FBF; Start 117; Stop 141
aagccataatatctctgagtccaat

SEQ ID NO: 371437 - DNA, 25 bp, Artificial
  probe
  misc_feature (1)..(25): SEQ ID NO: 4049; WAN024FBF; Start 119; Stop 143
gccataatatctctgagtccaatcg

SEQ ID NO: 371438 - DNA, 25 bp, Artificial
  probe
  misc_feature (1)..(25): SEQ ID NO: 4049; WAN024FBF; Start 116; Stop 140
taagccataatatctctgagtccaa

SEQ ID NO: 371439 - DNA, 25 bp, Artificial
  probe
  misc_feature (1)..(25): SEQ ID NO: 4049; WAN024FBF; Start 121; Stop 145
cataatatctctgagtccaatcgtc

SEQ ID NO: 371440 - DNA, 25 bp, Artificial
  probe
  misc_feature (1)..(25): SEQ ID NO: 4049; WAN024FBF; Start 115; Stop 139
ataagccataatatctctgagtcca

SEQ ID NO: 371441 - DNA, 25 bp, Artificial
  probe
  misc_feature (1)..(25): SEQ ID NO: 4049; WAN024FBF; Start 95; Stop 119
ctcaagtcatgctccatctgataag

SEQ ID NO: 371442 - DNA, 25 bp, Artificial
  probe
  misc_feature (1)..(25): SEQ ID NO: 4049; WAN024FBF; Start 114; Stop 138
gataagccataatatctctgagtcc

SEQ ID NO: 371443 - DNA, 25 bp, Artificial
  probe
  misc_feature (1)..(25): SEQ ID NO: 4049; WAN024FBF; Start 186; Stop 210
tataggtcatctgactgagcaagag

SEQ ID NO: 371444 - DNA, 25 bp, Artificial
  probe
  misc_feature (1)..(25): SEQ ID NO: 4049; WAN024FBF; Start 185; Stop 209
gtataggtcatctgactgagcaaga

SEQ ID NO: 371445 - DNA, 25 bp, Artificial
  probe
  misc_feature (1)..(25): SEQ ID NO: 4049; WAN024FBF; Start 113; Stop 137
tgataagccataatatctctgagtc

SEQ ID NO: 371446 - DNA, 25 bp, Artificial
  probe
  misc_feature (1)..(25): SEQ ID NO: 4049; WAN024FBF; Start 112; Stop 136
ctgataagccataatatctctgagt

SEQ ID NO: 371447 - DNA, 25 bp, Artificial
  probe
  misc_feature (1)..(25): SEQ ID NO: 4049; WAN024FBF; Start 108; Stop 132
ccatctgataagccataatatctct

SEQ ID NO: 371448 - DNA, 25 bp, Artificial
  probe
  misc_feature (1)..(25): SEQ ID NO: 4049; WAN024FBF; Start 107; Stop 131
tccatctgataagccataatatctc

SEQ ID NO: 371449 - DNA, 25 bp, Artificial
  probe
  misc_feature (1)..(25): SEQ ID NO: 4049; WAN024FBF; Start 106; Stop 130
ctccatctgataagccataatatct

SEQ ID NO: 371450 - DNA, 25 bp, Artificial
  probe
  misc_feature (1)..(25): SEQ ID NO: 4049; WAN024FBF; Start 123; Stop 147
taatatctctgagtccaatcgtccc

SEQ ID NO: 371451 - DNA, 25 bp, Artificial
  probe
  misc_feature (1)..(25): SEQ ID NO: 4049; WAN024FBF; Start 104; Stop 128
tgctccatctgataagccataatat

SEQ ID NO: 371452 - DNA, 25 bp, Artificial
  probe
  misc_feature (1)..(25): SEQ ID NO: 4049; WAN024FBF; Start 103; Stop 127
atgctccatctgataagccataata

SEQ ID NO: 371453 - DNA, 25 bp, Artificial
  probe
  misc_feature (1)..(25): SEQ ID NO: 4049; WAN024FBF; Start 111; Stop 135
tctgataagccataatatctctgag

SEQ ID NO: 371454 - DNA, 25 bp, Artificial
  probe
  misc_feature (1)..(25): SEQ ID NO: 4049; WAN024FBF; Start 105; Stop 129
gctccatctgataagccataatatc

SEQ ID NO: 371455 - DNA, 25 bp, Artificial
  probe
  misc_feature (1)..(25): SEQ ID NO: 4049; WAN024FBF; Start 102; Stop 126
catgctccatctgataagccataat

SEQ ID NO: 371456 - DNA, 25 bp, Artificial
  probe
  misc_feature (1)..(25): SEQ ID NO: 4049; WAN024FBF; Start 94; Stop 118
gctcaagtcatgctccatctgataa

SEQ ID NO: 371457 - DNA, 25 bp, Artificial
  probe
  misc_feature (1)..(25): SEQ ID NO: 4049; WAN024FBF; Start 184; Stop 208
ggtataggtcatctgactgagcaag

SEQ ID NO: 371458 - DNA, 25 bp, Artificial
  probe
  misc_feature (1)..(25): SEQ ID NO: 4049; WAN024FBF; Start 15; Stop 39
taatggtgaaatcaggcgaaacaac

SEQ ID NO: 371459 - DNA, 25 bp, Artificial
  probe
  misc_feature (1)..(25): SEQ ID NO: 4049; WAN024FBF; Start 14; Stop 38
gtaatggtgaaatcaggcgaaacaa

SEQ ID NO: 371460 - DNA, 25 bp, Artificial
  probe
  misc_feature (1)..(25): SEQ ID NO: 4049; WAN024FBF; Start 101; Stop 125
tcatgctccatctgataagccataa

SEQ ID NO: 371461 - DNA, 25 bp, Artificial
  probe
  misc_feature (1)..(25): SEQ ID NO: 4049; WAN024FBF; Start 109; Stop 133
catctgataagccataatatctctg

SEQ ID NO: 371462 - DNA, 25 bp, Artificial
  probe
  misc_feature (1)..(25): SEQ ID NO: 4049; WAN024FBF; Start 110; Stop 134
atctgataagccataatatctctga

SEQ ID NO: 371463 - DNA, 25 bp, Artificial
  probe
  misc_feature (1)..(25): SEQ ID NO: 4049; WAN024FBF; Start 68; Stop 92
atatccgtatccgccatgatttctt

SEQ ID NO: 371464 - DNA, 25 bp, Artificial
  probe
  misc_feature (1)..(25): SEQ ID NO: 4049; WAN024FBF; Start 125; Stop 149
atatctctgagtccaatcgtcccaa

SEQ ID NO: 371465 - DNA, 25 bp, Artificial
  probe
  misc_feature (1)..(25): SEQ ID NO: 4049; WAN024FBF; Start 124; Stop 148
aatatctctgagtccaatcgtccca

SEQ ID NO: 371466 - DNA, 25 bp, Artificial
  probe
  misc_feature (1)..(25): SEQ ID NO: 4050; WAN024CUB; Start 200; Stop 224
gtttgaactttctggatttcctgta

SEQ ID NO: 371467 - DNA, 25 bp, Artificial
  probe
  misc_feature (1)..(25): SEQ ID NO: 4050; WAN024CUB; Start 201; Stop 225
tttgaactttctggatttcctgtaa

SEQ ID NO: 371468 - DNA, 25 bp, Artificial
  probe
  misc_feature (1)..(25): SEQ ID NO: 4050; WAN024CUB; Start 82; Stop 106
gtgttgagaagcatcttccaaggag

SEQ ID NO: 371469 - DNA, 25 bp, Artificial
  probe
  misc_feature (1)..(25): SEQ ID NO: 4050; WAN024CUB; Start 20; Stop 44
tcaacagtttgaaactcaagtccag

SEQ ID NO: 371470 - DNA, 25 bp, Artificial
  probe
  misc_feature (1)..(25): SEQ ID NO: 4050; WAN024CUB; Start 24; Stop 48
cagtttgaaactcaagtccagcttc

SEQ ID NO: 371471 - DNA, 25 bp, Artificial
  probe
  misc_feature (1)..(25): SEQ ID NO: 4050; WAN024CUB; Start 27; Stop 51
tttgaaactcaagtccagcttcact

SEQ ID NO: 371472 - DNA, 25 bp, Artificial
  probe
  misc_feature (1)..(25): SEQ ID NO: 4050; WAN024CUB; Start 26; Stop 50
gtttgaaactcaagtccagcttcac

SEQ ID NO: 371473 - DNA, 25 bp, Artificial
  probe
  misc_feature (1)..(25): SEQ ID NO: 4050; WAN024CUB; Start 25; Stop 49
agtttgaaactcaagtccagcttca

SEQ ID NO: 371474 - DNA, 25 bp, Artificial
  probe
  misc_feature (1)..(25): SEQ ID NO: 4050; WAN024CUB; Start 21; Stop 45
caacagtttgaaactcaagtccagc

SEQ ID NO: 371475 - DNA, 25 bp, Artificial
  probe
  misc_feature (1)..(25): SEQ ID NO: 4050; WAN024CUB; Start 23; Stop 47
acagtttgaaactcaagtccagctt

SEQ ID NO: 371476 - DNA, 25 bp, Artificial
  probe
  misc_feature (1)..(25): SEQ ID NO: 4050; WAN024CUB; Start 22; Stop 46
aacagtttgaaactcaagtccagct

SEQ ID NO: 371477 - DNA, 25 bp, Artificial
  probe
  misc_feature (1)..(25): SEQ ID NO: 4050; WAN024CUB; Start 83; Stop 107
tgttgagaagcatcttccaaggagg

SEQ ID NO: 371478 - DNA, 25 bp, Artificial
  probe
  misc_feature (1)..(25): SEQ ID NO: 4050; WAN024CUB; Start 28; Stop 52
ttgaaactcaagtccagcttcactc

SEQ ID NO: 371479 - DNA, 25 bp, Artificial
  probe
  misc_feature (1)..(25): SEQ ID NO: 4050; WAN024CUB; Start 169; Stop 193
cgtcaaagtcccggtcttatcaaag

SEQ ID NO: 371480 - DNA, 25 bp, Artificial
  probe
  misc_feature (1)..(25): SEQ ID NO: 4050; WAN024CUB; Start 170; Stop 194
gtcaaagtcccggtcttatcaaaga

SEQ ID NO: 371481 - DNA, 25 bp, Artificial
  probe
  misc_feature (1)..(25): SEQ ID NO: 4050; WAN024CUB; Start 81; Stop 105
ggtgttgagaagcatcttccaagga

SEQ ID NO: 371482 - DNA, 25 bp, Artificial
  probe
  misc_feature (1)..(25): SEQ ID NO: 4050; WAN024CUB; Start 19; Stop 43
ttcaacagtttgaaactcaagtcca

SEQ ID NO: 371483 - DNA, 25 bp, Artificial
  probe
  misc_feature (1)..(25): SEQ ID NO: 4050; WAN024CUB; Start 79; Stop 103
tgggtgttgagaagcatcttccaag

SEQ ID NO: 371484 - DNA, 25 bp, Artificial
  probe
  misc_feature (1)..(25): SEQ ID NO: 4050; WAN024CUB; Start 145; Stop 169
atctgttaccacaggtttcccttcc

SEQ ID NO: 371485 - DNA, 25 bp, Artificial
  probe
  misc_feature (1)..(25): SEQ ID NO: 4050; WAN024CUB; Start 29; Stop 53
tgaaactcaagtccagcttcactcg

SEQ ID NO: 371486 - DNA, 25 bp, Artificial
  probe
  misc_feature (1)..(25): SEQ ID NO: 4050; WAN024CUB; Start 168; Stop 192
ccgtcaaagtcccggtcttatcaaa

SEQ ID NO: 371487 - DNA, 25 bp, Artificial
  probe
  misc_feature (1)..(25): SEQ ID NO: 4050; WAN024CUB; Start 165; Stop 189
cttccgtcaaagtcccggtcttatc

SEQ ID NO: 371488 - DNA, 25 bp, Artificial
  probe
  misc_feature (1)..(25): SEQ ID NO: 4051; WAN024AEA; Start 14; Stop 38
cgctgtagcatataaatctatttcc

SEQ ID NO: 371489 - DNA, 25 bp, Artificial
  probe
  misc_feature (1)..(25): SEQ ID NO: 4051; WAN024AEA; Start 75; Stop 99
acgtttagcttgtggtataatagat

SEQ ID NO: 371490 - DNA, 25 bp, Artificial
  probe
  misc_feature (1)..(25): SEQ ID NO: 4051; WAN024AEA; Start 15; Stop 39
gctgtagcatataaatctatttcct

SEQ ID NO: 371491 - DNA, 25 bp, Artificial
  probe
  misc_feature (1)..(25): SEQ ID NO: 4051; WAN024AEA; Start 76; Stop 100
cgtttagcttgtggtataatagatt

SEQ ID NO: 371492 - DNA, 25 bp, Artificial
  probe
  misc_feature (1)..(25): SEQ ID NO: 4051; WAN024AEA; Start 4; Stop 28
caagttattgcgctgtagcatataa

SEQ ID NO: 371493 - DNA, 25 bp, Artificial
  probe
  misc_feature (1)..(25): SEQ ID NO: 4051; WAN024AEA; Start 13; Stop 37
gcgctgtagcatataaatctatttc

SEQ ID NO: 371494 - DNA, 25 bp, Artificial
  probe
  misc_feature (1)..(25): SEQ ID NO: 4051; WAN024AEA; Start 74; Stop 98
aacgtttagcttgtggtataataga

SEQ ID NO: 371495 - DNA, 25 bp, Artificial
  probe
  misc_feature (1)..(25): SEQ ID NO: 4051; WAN024AEA; Start 5; Stop 29
aagttattgcgctgtagcatataaa

SEQ ID NO: 371496 - DNA, 25 bp, Artificial
  probe
  misc_feature (1)..(25): SEQ ID NO: 4051; WAN024AEA; Start 77; Stop 101
gtttagcttgtggtataatagattt

SEQ ID NO: 371497 - DNA, 25 bp, Artificial
  probe
  misc_feature (1)..(25): SEQ ID NO: 4051; WAN024AEA; Start 6; Stop 30
agttattgcgctgtagcatataaat

SEQ ID NO: 371498 - DNA, 25 bp, Artificial
  probe
  misc_feature (1)..(25): SEQ ID NO: 4051; WAN024AEA; Start 7; Stop 31
gttattgcgctgtagcatataaatc

SEQ ID NO: 371499 - DNA, 25 bp, Artificial
  probe
  misc_feature (1)..(25): SEQ ID NO: 4051; WAN024AEA; Start 12; Stop 36
tgcgctgtagcatataaatctattt

SEQ ID NO: 371500 - DNA, 25 bp, Artificial
  probe
  misc_feature (1)..(25): SEQ ID NO: 4051; WAN024AEA; Start 11; Stop 35
ttgcgctgtagcatataaatctatt

SEQ ID NO: 371501 - DNA, 25 bp, Artificial
  probe
  misc_feature (1)..(25): SEQ ID NO: 4051; WAN024AEA; Start 8; Stop 32
ttattgcgctgtagcatataaatct

SEQ ID NO: 371502 - DNA, 25 bp, Artificial
  probe
  misc_feature (1)..(25): SEQ ID NO: 4051; WAN024AEA; Start 10; Stop 34
attgcgctgtagcatataaatctat

SEQ ID NO: 371503 - DNA, 25 bp, Artificial
  probe
  misc_feature (1)..(25): SEQ ID NO: 4051; WAN024AEA; Start 9; Stop 33
tattgcgctgtagcatataaatcta

SEQ ID NO: 371504 - DNA, 25 bp, Artificial
  probe
  misc_feature (1)..(25): SEQ ID NO: 4051; WAN024AEA; Start 55; Stop 79
gttctacgagttaatttgaaacgtt

SEQ ID NO: 371505 - DNA, 25 bp, Artificial
  probe
  misc_feature (1)..(25): SEQ ID NO: 4051; WAN024AEA; Start 3; Stop 27
gcaagttattgcgctgtagcatata

SEQ ID NO: 371506 - DNA, 25 bp, Artificial
  probe
  misc_feature (1)..(25): SEQ ID NO: 4051; WAN024AEA; Start 2; Stop 26
tgcaagttattgcgctgtagcatat

SEQ ID NO: 371507 - DNA, 25 bp, Artificial
  probe
  misc_feature (1)..(25): SEQ ID NO: 4051; WAN024AEA; Start 1; Stop 25
gtgcaagttattgcgctgtagcata

SEQ ID NO: 371508 - DNA, 25 bp, Artificial
  probe
  misc_feature (1)..(25): SEQ ID NO: 4052; WAN024GGW; Start 204; Stop 228
cgatagtaccaacttcagcttctac

SEQ ID NO: 371509 - DNA, 25 bp, Artificial
  probe
  misc_feature (1)..(25): SEQ ID NO: 4052; WAN024GGW; Start 222; Stop 246
cttctactgagatacctttagcgtg

SEQ ID NO: 371510 - DNA, 25 bp, Artificial
  probe
  misc_feature (1)..(25): SEQ ID NO: 4052; WAN024GGW; Start 125; Stop 149
ataccagtttcaaccattgctttag

SEQ ID NO: 371511 - DNA, 25 bp, Artificial
  probe
  misc_feature (1)..(25): SEQ ID NO: 4052; WAN024GGW; Start 124; Stop 148
gataccagtttcaaccattgcttta

SEQ ID NO: 371512 - DNA, 25 bp, Artificial
  probe
  misc_feature (1)..(25): SEQ ID NO: 4052; WAN024GGW; Start 257; Stop 281
acaacttctttagccaatttaaggt

SEQ ID NO: 371513 - DNA, 25 bp, Artificial
  probe
  misc_feature (1)..(25): SEQ ID NO: 4052; WAN024GGW; Start 223; Stop 247
ttctactgagatacctttagcgtgt

SEQ ID NO: 371514 - DNA, 25 bp, Artificial
  probe
  misc_feature (1)..(25): SEQ ID NO: 4052; WAN024GGW; Start 203; Stop 227
ccgatagtaccaacttcagcttcta

SEQ ID NO: 371515 - DNA, 25 bp, Artificial
  probe
  misc_feature (1)..(25): SEQ ID NO: 4052; WAN024GGW; Start 192; Stop 216
cttcttcaccaccgatagtaccaac

SEQ ID NO: 371516 - DNA, 25 bp, Artificial
  probe
  misc_feature (1)..(25): SEQ ID NO: 4052; WAN024GGW; Start 191; Stop 215
tcttcttcaccaccgatagtaccaa

SEQ ID NO: 371517 - DNA, 25 bp, Artificial
  probe
  misc_feature (1)..(25): SEQ ID NO: 4052; WAN024GGW; Start 17; Stop 41
aatcctggaagagcttctgtcaatt

SEQ ID NO: 371518 - DNA, 25 bp, Artificial
  probe
  misc_feature (1)..(25): SEQ ID NO: 4052; WAN024GGW; Start 206; Stop 230
atagtaccaacttcagcttctactg

SEQ ID NO: 371519 - DNA, 25 bp, Artificial
  probe
  misc_feature (1)..(25): SEQ ID NO: 4052; WAN024GGW; Start 252; Stop 276
tttcaacaacttctttagccaattt

SEQ ID NO: 371520 - DNA, 25 bp, Artificial
  probe
  misc_feature (1)..(25): SEQ ID NO: 4052; WAN024GGW; Start 205; Stop 229
gatagtaccaacttcagcttctact

SEQ ID NO: 371521 - DNA, 25 bp, Artificial
  probe
  misc_feature (1)..(25): SEQ ID NO: 4052; WAN024GGW; Start 224; Stop 248
tctactgagatacctttagcgtgtg

SEQ ID NO: 371522 - DNA, 25 bp, Artificial
  probe
  misc_feature (1)..(25): SEQ ID NO: 4052; WAN024GGW; Start 195; Stop 219
cttcaccaccgatagtaccaacttc

SEQ ID NO: 371523 - DNA, 25 bp, Artificial
  probe
  misc_feature (1)..(25): SEQ ID NO: 4052; WAN024GGW; Start 256; Stop 280
aacaacttctttagccaatttaagg

SEQ ID NO: 371524 - DNA, 25 bp, Artificial
  probe
  misc_feature (1)..(25): SEQ ID NO: 4052; WAN024GGW; Start 258; Stop 282
caacttctttagccaatttaaggtt

SEQ ID NO: 371525 - DNA, 25 bp, Artificial
  probe
  misc_feature (1)..(25): SEQ ID NO: 4052; WAN024GGW; Start 16; Stop 40
gaatcctggaagagcttctgtcaat

SEQ ID NO: 371526 - DNA, 25 bp, Artificial
  probe
  misc_feature (1)..(25): SEQ ID NO: 4052; WAN024GGW; Start 194; Stop 218
tcttcaccaccgatagtaccaactt

SEQ ID NO: 371527 - DNA, 25 bp, Artificial
  probe
  misc_feature (1)..(25): SEQ ID NO: 4052; WAN024GGW; Start 193; Stop 217
ttcttcaccaccgatagtaccaact

SEQ ID NO: 371528 - DNA, 25 bp, Artificial
  probe
  misc_feature (1)..(25): SEQ ID NO: 4052; WAN024GGW; Start 165; Stop 189
ccaattcacctttaccgatgattcc

SEQ ID NO: 371529 - DNA, 25 bp, Artificial
  probe
  misc_feature (1)..(25): SEQ ID NO: 4052; WAN024GGW; Start 254; Stop 278
tcaacaacttctttagccaatttaa

SEQ ID NO: 371530 - DNA, 25 bp, Artificial
  probe
  misc_feature (1)..(25): SEQ ID NO: 4052; WAN024GGW; Start 253; Stop 277
ttcaacaacttctttagccaattta

SEQ ID NO: 371531 - DNA, 25 bp, Artificial
  probe
  misc_feature (1)..(25): SEQ ID NO: 4052; WAN024GGW; Start 123; Stop 147
cgataccagtttcaaccattgcttt

SEQ ID NO: 371532 - DNA, 25 bp, Artificial
  probe
  misc_feature (1)..(25): SEQ ID NO: 4052; WAN024GGW; Start 126; Stop 150
taccagtttcaaccattgctttagc

SEQ ID NO: 371533 - DNA, 25 bp, Artificial
  probe
  misc_feature (1)..(25): SEQ ID NO: 4052; WAN024GGW; Start 259; Stop 283
aacttctttagccaatttaaggttt

SEQ ID NO: 371534 - DNA, 25 bp, Artificial
  probe
  misc_feature (1)..(25): SEQ ID NO: 4052; WAN024GGW; Start 196; Stop 220
ttcaccaccgatagtaccaacttca

SEQ ID NO: 371535 - DNA, 25 bp, Artificial
  probe
  misc_feature (1)..(25): SEQ ID NO: 4052; WAN024GGW; Start 255; Stop 279
caacaacttctttagccaatttaag

SEQ ID NO: 371536 - DNA, 25 bp, Artificial
  probe
  misc_feature (1)..(25): SEQ ID NO: 4052; WAN024GGW; Start 118; Stop 142
gaagtcgataccagtttcaaccatt

SEQ ID NO: 371537 - DNA, 25 bp, Artificial
  probe
  misc_feature (1)..(25): SEQ ID NO: 4052; WAN024GGW; Start 164; Stop 188
gccaattcacctttaccgatgattc

SEQ ID NO: 371538 - DNA, 25 bp, Artificial
  probe
  misc_feature (1)..(25): SEQ ID NO: 4052; WAN024GGW; Start 225; Stop 249
ctactgagatacctttagcgtgtgc

SEQ ID NO: 371539 - DNA, 25 bp, Artificial
  probe
  misc_feature (1)..(25): SEQ ID NO: 4052; WAN024GGW; Start 201; Stop 225
caccgatagtaccaacttcagcttc

SEQ ID NO: 371540 - DNA, 25 bp, Artificial
  probe
  misc_feature (1)..(25): SEQ ID NO: 4052; WAN024GGW; Start 132; Stop 156
tttcaaccattgctttagcgtcttc

SEQ ID NO: 371541 - DNA, 25 bp, Artificial
  probe
  misc_feature (1)..(25): SEQ ID NO: 4053; WAN024DWJ; Start 5; Stop 29
aattccctctttcaaacaagtttca

SEQ ID NO: 371542 - DNA, 25 bp, Artificial
  probe
  misc_feature (1)..(25): SEQ ID NO: 4053; WAN024DWJ; Start 6; Stop 30
attccctctttcaaacaagtttcat

SEQ ID NO: 371543 - DNA, 25 bp, Artificial
  probe
  misc_feature (1)..(25): SEQ ID NO: 4053; WAN024DWJ; Start 4; Stop 28
caattccctctttcaaacaagtttc

SEQ ID NO: 371544 - DNA, 25 bp, Artificial
  probe
  misc_feature (1)..(25): SEQ ID NO: 4053; WAN024DWJ; Start 3; Stop 27
gcaattccctctttcaaacaagttt

SEQ ID NO: 371545 - DNA, 25 bp, Artificial
  probe
  misc_feature (1)..(25): SEQ ID NO: 4053; WAN024DWJ; Start 7; Stop 31
ttccctctttcaaacaagtttcatg

SEQ ID NO: 371546 - DNA, 25 bp, Artificial
  probe
  misc_feature (1)..(25): SEQ ID NO: 4053; WAN024DWJ; Start 8; Stop 32
tccctctttcaaacaagtttcatgt

SEQ ID NO: 371547 - DNA, 25 bp, Artificial
  probe
  misc_feature (1)..(25): SEQ ID NO: 4053; WAN024DWJ; Start 2; Stop 26
tgcaattccctctttcaaacaagtt

SEQ ID NO: 371548 - DNA, 25 bp, Artificial
  probe
  misc_feature (1)..(25): SEQ ID NO: 4053; WAN024DWJ; Start 20; Stop 44
acaagtttcatgttcagtatatagc

SEQ ID NO: 371549 - DNA, 25 bp, Artificial
  probe
  misc_feature (1)..(25): SEQ ID NO: 4053; WAN024DWJ; Start 1; Stop 25
gtgcaattccctctttcaaacaagt

SEQ ID NO: 371550 - DNA, 25 bp, Artificial
  probe
  misc_feature (1)..(25): SEQ ID NO: 4053; WAN024DWJ; Start 21; Stop 45
caagtttcatgttcagtatatagct

SEQ ID NO: 371551 - DNA, 25 bp, Artificial
  probe
  misc_feature (1)..(25): SEQ ID NO: 4053; WAN024DWJ; Start 9; Stop 33
ccctctttcaaacaagtttcatgtt

SEQ ID NO: 371552 - DNA, 25 bp, Artificial
  probe
  misc_feature (1)..(25): SEQ ID NO: 4053; WAN024DWJ; Start 10; Stop 34
cctctttcaaacaagtttcatgttc

SEQ ID NO: 371553 - DNA, 25 bp, Artificial
  probe
  misc_feature (1)..(25): SEQ ID NO: 4053; WAN024DWJ; Start 13; Stop 37
ctttcaaacaagtttcatgttcagt

SEQ ID NO: 371554 - DNA, 25 bp, Artificial
  probe
  misc_feature (1)..(25): SEQ ID NO: 4053; WAN024DWJ; Start 12; Stop 36
tctttcaaacaagtttcatgttcag

SEQ ID NO: 371555 - DNA, 25 bp, Artificial
  probe
  misc_feature (1)..(25): SEQ ID NO: 4053; WAN024DWJ; Start 11; Stop 35
ctctttcaaacaagtttcatgttca

SEQ ID NO: 371556 - DNA, 25 bp, Artificial
  probe
  misc_feature (1)..(25): SEQ ID NO: 4053; WAN024DWJ; Start 23; Stop 47
agtttcatgttcagtatatagcttt

SEQ ID NO: 371557 - DNA, 25 bp, Artificial
  probe
  misc_feature (1)..(25): SEQ ID NO: 4053; WAN024DWJ; Start 22; Stop 46
aagtttcatgttcagtatatagctt

SEQ ID NO: 371558 - DNA, 25 bp, Artificial
  probe
  misc_feature (1)..(25): SEQ ID NO: 4053; WAN024DWJ; Start 43; Stop 67
gcttttgagacagaaaatacataca

SEQ ID NO: 371559 - DNA, 25 bp, Artificial
  probe
  misc_feature (1)..(25): SEQ ID NO: 4053; WAN024DWJ; Start 14; Stop 38
tttcaaacaagtttcatgttcagta

SEQ ID NO: 371560 - DNA, 25 bp, Artificial
  probe
  misc_feature (1)..(25): SEQ ID NO: 4053; WAN024DWJ; Start 15; Stop 39
ttcaaacaagtttcatgttcagtat

SEQ ID NO: 371561 - DNA, 25 bp, Artificial
  probe
  misc_feature (1)..(25): SEQ ID NO: 4053; WAN024DWJ; Start 48; Stop 72
tgagacagaaaatacatacacaaat

SEQ ID NO: 371562 - DNA, 25 bp, Artificial
  probe
  misc_feature (1)..(25): SEQ ID NO: 4053; WAN024DWJ; Start 47; Stop 71
ttgagacagaaaatacatacacaaa

SEQ ID NO: 371563 - DNA, 25 bp, Artificial
  probe
  misc_feature (1)..(25): SEQ ID NO: 4053; WAN024DWJ; Start 46; Stop 70
tttgagacagaaaatacatacacaa

SEQ ID NO: 371564 - DNA, 25 bp, Artificial
  probe
  misc_feature (1)..(25): SEQ ID NO: 4053; WAN024DWJ; Start 50; Stop 74
agacagaaaatacatacacaaatga

SEQ ID NO: 371565 - DNA, 25 bp, Artificial
  probe
  misc_feature (1)..(25): SEQ ID NO: 4053; WAN024DWJ; Start 49; Stop 73
gagacagaaaatacatacacaaatg

SEQ ID NO: 371566 - DNA, 25 bp, Artificial
  probe
  misc_feature (1)..(25): SEQ ID NO: 4053; WAN024DWJ; Start 30; Stop 54
tgttcagtatatagcttttgagaca

SEQ ID NO: 371567 - DNA, 25 bp, Artificial
  probe
  misc_feature (1)..(25): SEQ ID NO: 4053; WAN024DWJ; Start 16; Stop 40
tcaaacaagtttcatgttcagtata

SEQ ID NO: 371568 - DNA, 25 bp, Artificial
  probe
  misc_feature (1)..(25): SEQ ID NO: 4053; WAN024DWJ; Start 45; Stop 69
ttttgagacagaaaatacatacaca

SEQ ID NO: 371569 - DNA, 25 bp, Artificial
  probe
  misc_feature (1)..(25): SEQ ID NO: 4053; WAN024DWJ; Start 33; Stop 57
tcagtatatagcttttgagacagaa

SEQ ID NO: 371570 - DNA, 25 bp, Artificial
  probe
  misc_feature (1)..(25): SEQ ID NO: 4053; WAN024DWJ; Start 32; Stop 56
ttcagtatatagcttttgagacaga

SEQ ID NO: 371571 - DNA, 25 bp, Artificial
  probe
  misc_feature (1)..(25): SEQ ID NO: 4053; WAN024DWJ; Start 31; Stop 55
gttcagtatatagcttttgagacag

SEQ ID NO: 371572 - DNA, 25 bp, Artificial
  probe
  misc_feature (1)..(25): SEQ ID NO: 4053; WAN024DWJ; Start 42; Stop 66
agcttttgagacagaaaatacatac

SEQ ID NO: 371573 - DNA, 25 bp, Artificial
  probe
  misc_feature (1)..(25): SEQ ID NO: 4053; WAN024DWJ; Start 51; Stop 75
gacagaaaatacatacacaaatgat

SEQ ID NO: 371574 - DNA, 25 bp, Artificial
  probe
  misc_feature (1)..(25): SEQ ID NO: 4054; WAN024DWM; Start 298; Stop 322
gttgtgtccaccagtgataatagtc

SEQ ID NO: 371575 - DNA, 25 bp, Artificial
  probe
  misc_feature (1)..(25): SEQ ID NO: 4054; WAN024DWM; Start 301; Stop 325
gtgtccaccagtgataatagtcaag

SEQ ID NO: 371576 - DNA, 25 bp, Artificial
  probe
  misc_feature (1)..(25): SEQ ID NO: 4054; WAN024DWM; Start 300; Stop 324
tgtgtccaccagtgataatagtcaa

SEQ ID NO: 371577 - DNA, 25 bp, Artificial
  probe
  misc_feature (1)..(25): SEQ ID NO: 4054; WAN024DWM; Start 299; Stop 323
ttgtgtccaccagtgataatagtca

SEQ ID NO: 371578 - DNA, 25 bp, Artificial
  probe
  misc_feature (1)..(25): SEQ ID NO: 4054; WAN024DWM; Start 302; Stop 326
tgtccaccagtgataatagtcaagg

SEQ ID NO: 371579 - DNA, 25 bp, Artificial
  probe
  misc_feature (1)..(25): SEQ ID NO: 4054; WAN024DWM; Start 58; Stop 82
cttatcatgcaagcctgtgttaatg

SEQ ID NO: 371580 - DNA, 25 bp, Artificial
  probe
  misc_feature (1)..(25): SEQ ID NO: 4054; WAN024DWM; Start 46; Stop 70
gacagtatcgaccttatcatgcaag

SEQ ID NO: 371581 - DNA, 25 bp, Artificial
  probe
  misc_feature (1)..(25): SEQ ID NO: 4054; WAN024DWM; Start 223; Stop 247
gctacagccacagatactatcatgt

SEQ ID NO: 371582 - DNA, 25 bp, Artificial
  probe
  misc_feature (1)..(25): SEQ ID NO: 4054; WAN024DWM; Start 45; Stop 69
agacagtatcgaccttatcatgcaa

SEQ ID NO: 371583 - DNA, 25 bp, Artificial
  probe
  misc_feature (1)..(25): SEQ ID NO: 4054; WAN024DWM; Start 308; Stop 332
ccagtgataatagtcaagggttcta

SEQ ID NO: 371584 - DNA, 25 bp, Artificial
  probe
  misc_feature (1)..(25): SEQ ID NO: 4054; WAN024DWM; Start 89; Stop 113
aagagatagtcactttgagccttat

SEQ ID NO: 371585 - DNA, 25 bp, Artificial
  probe
  misc_feature (1)..(25): SEQ ID NO: 4054; WAN024DWM; Start 57; Stop 81
ccttatcatgcaagcctgtgttaat

SEQ ID NO: 371586 - DNA, 25 bp, Artificial
  probe
  misc_feature (1)..(25): SEQ ID NO: 4054; WAN024DWM; Start 94; Stop 118
atagtcactttgagccttatccgta

SEQ ID NO: 371587 - DNA, 25 bp, Artificial
  probe
  misc_feature (1)..(25): SEQ ID NO: 4054; WAN024DWM; Start 90; Stop 114
agagatagtcactttgagccttatc

SEQ ID NO: 371588 - DNA, 25 bp, Artificial
  probe
  misc_feature (1)..(25): SEQ ID NO: 4054; WAN024DWM; Start 91; Stop 115
gagatagtcactttgagccttatcc

SEQ ID NO: 371589 - DNA, 25 bp, Artificial
  probe
  misc_feature (1)..(25): SEQ ID NO: 4054; WAN024DWM; Start 297; Stop 321
ggttgtgtccaccagtgataatagt

SEQ ID NO: 371590 - DNA, 25 bp, Artificial
  probe
  misc_feature (1)..(25): SEQ ID NO: 4054; WAN024DWM; Start 222; Stop 246
cgctacagccacagatactatcatg

SEQ ID NO: 371591 - DNA, 25 bp, Artificial
  probe
  misc_feature (1)..(25): SEQ ID NO: 4054; WAN024DWM; Start 309; Stop 333
cagtgataatagtcaagggttctac

SEQ ID NO: 371592 - DNA, 25 bp, Artificial
  probe
  misc_feature (1)..(25): SEQ ID NO: 4054; WAN024DWM; Start 44; Stop 68
cagacagtatcgaccttatcatgca

SEQ ID NO: 371593 - DNA, 25 bp, Artificial
  probe
  misc_feature (1)..(25): SEQ ID NO: 4054; WAN024DWM; Start 42; Stop 66
tgcagacagtatcgaccttatcatg

SEQ ID NO: 371594 - DNA, 25 bp, Artificial
  probe
  misc_feature (1)..(25): SEQ ID NO: 4054; WAN024DWM; Start 41; Stop 65
gtgcagacagtatcgaccttatcat

SEQ ID NO: 371595 - DNA, 25 bp, Artificial
  probe
  misc_feature (1)..(25): SEQ ID NO: 4054; WAN024DWM; Start 101; Stop 125
ctttgagccttatccgtagcaattt

SEQ ID NO: 371596 - DNA, 25 bp, Artificial
  probe
  misc_feature (1)..(25): SEQ ID NO: 4054; WAN024DWM; Start 221; Stop 245
acgctacagccacagatactatcat

SEQ ID NO: 371597 - DNA, 25 bp, Artificial
  probe
  misc_feature (1)..(25): SEQ ID NO: 4054; WAN024DWM; Start 95; Stop 119
tagtcactttgagccttatccgtag

SEQ ID NO: 371598 - DNA, 25 bp, Artificial
  probe
  misc_feature (1)..(25): SEQ ID NO: 4054; WAN024DWM; Start 312; Stop 336
tgataatagtcaagggttctaccac

SEQ ID NO: 371599 - DNA, 25 bp, Artificial
  probe
  misc_feature (1)..(25): SEQ ID NO: 4054; WAN024DWM; Start 311; Stop 335
gtgataatagtcaagggttctacca

SEQ ID NO: 371600 - DNA, 25 bp, Artificial
  probe
  misc_feature (1)..(25): SEQ ID NO: 4054; WAN024DWM; Start 92; Stop 116
agatagtcactttgagccttatccg

SEQ ID NO: 371601 - DNA, 25 bp, Artificial
  probe
  misc_feature (1)..(25): SEQ ID NO: 4054; WAN024DWM; Start 313; Stop 337
gataatagtcaagggttctaccact

SEQ ID NO: 371602 - DNA, 25 bp, Artificial
  probe
  misc_feature (1)..(25): SEQ ID NO: 4054; WAN024DWM; Start 310; Stop 334
agtgataatagtcaagggttctacc

SEQ ID NO: 371603 - DNA, 25 bp, Artificial
  probe
  misc_feature (1)..(25): SEQ ID NO: 4054; WAN024DWM; Start 307; Stop 331
accagtgataatagtcaagggttct

SEQ ID NO: 371604 - DNA, 25 bp, Artificial
  probe
  misc_feature (1)..(25): SEQ ID NO: 4054; WAN024DWM; Start 306; Stop 330
caccagtgataatagtcaagggttc

SEQ ID NO: 371605 - DNA, 25 bp, Artificial
  probe
  misc_feature (1)..(25): SEQ ID NO: 4054; WAN024DWM; Start 56; Stop 80
accttatcatgcaagcctgtgttaa

SEQ ID NO: 371606 - DNA, 25 bp, Artificial
  probe
  misc_feature (1)..(25): SEQ ID NO: 4054; WAN024DWM; Start 93; Stop 117
gatagtcactttgagccttatccgt

SEQ ID NO: 371607 - DNA, 25 bp, Artificial
  probe
  misc_feature (1)..(25): SEQ ID NO: 4055; WAN024F8P; Start 35; Stop 59
tctgttcgcttgatattgtcataga

SEQ ID NO: 371608 - DNA, 25 bp, Artificial
  probe
  misc_feature (1)..(25): SEQ ID NO: 4055; WAN024F8P; Start 34; Stop 58
ttctgttcgcttgatattgtcatag

SEQ ID NO: 371609 - DNA, 25 bp, Artificial
  probe
  misc_feature (1)..(25): SEQ ID NO: 4055; WAN024F8P; Start 36; Stop 60
ctgttcgcttgatattgtcatagac

SEQ ID NO: 371610 - DNA, 25 bp, Artificial
  probe
  misc_feature (1)..(25): SEQ ID NO: 4055; WAN024F8P; Start 33; Stop 57
tttctgttcgcttgatattgtcata

SEQ ID NO: 371611 - DNA, 25 bp, Artificial
  probe
  misc_feature (1)..(25): SEQ ID NO: 4055; WAN024F8P; Start 104; Stop 128
ctgtaatcatcagcgtagtagagct

SEQ ID NO: 371612 - DNA, 25 bp, Artificial
  probe
  misc_feature (1)..(25): SEQ ID NO: 4055; WAN024F8P; Start 30; Stop 54
tcttttctgttcgcttgatattgtc

SEQ ID NO: 371613 - DNA, 25 bp, Artificial
  probe
  misc_feature (1)..(25): SEQ ID NO: 4055; WAN024F8P; Start 29; Stop 53
atcttttctgttcgcttgatattgt

SEQ ID NO: 371614 - DNA, 25 bp, Artificial
  probe
  misc_feature (1)..(25): SEQ ID NO: 4055; WAN024F8P; Start 31; Stop 55
cttttctgttcgcttgatattgtca

SEQ ID NO: 371615 - DNA, 25 bp, Artificial
  probe
  misc_feature (1)..(25): SEQ ID NO: 4055; WAN024F8P; Start 32; Stop 56
ttttctgttcgcttgatattgtcat

SEQ ID NO: 371616 - DNA, 25 bp, Artificial
  probe
  misc_feature (1)..(25): SEQ ID NO: 4055; WAN024F8P; Start 28; Stop 52
aatcttttctgttcgcttgatattg

SEQ ID NO: 371617 - DNA, 25 bp, Artificial
  probe
  misc_feature (1)..(25): SEQ ID NO: 4055; WAN024F8P; Start 38; Stop 62
gttcgcttgatattgtcatagacag

SEQ ID NO: 371618 - DNA, 25 bp, Artificial
  probe
  misc_feature (1)..(25): SEQ ID NO: 4055; WAN024F8P; Start 43; Stop 67
cttgatattgtcatagacagcctga

SEQ ID NO: 371619 - DNA, 25 bp, Artificial
  probe
  misc_feature (1)..(25): SEQ ID NO: 4055; WAN024F8P; Start 44; Stop 68
ttgatattgtcatagacagcctgac

SEQ ID NO: 371620 - DNA, 25 bp, Artificial
  probe
  misc_feature (1)..(25): SEQ ID NO: 4055; WAN024F8P; Start 37; Stop 61
tgttcgcttgatattgtcatagaca

SEQ ID NO: 371621 - DNA, 25 bp, Artificial
  probe
  misc_feature (1)..(25): SEQ ID NO: 4055; WAN024F8P; Start 27; Stop 51
gaatcttttctgttcgcttgatatt

SEQ ID NO: 371622 - DNA, 25 bp, Artificial
  probe
  misc_feature (1)..(25): SEQ ID NO: 4055; WAN024F8P; Start 39; Stop 63
ttcgcttgatattgtcatagacagc

SEQ ID NO: 371623 - DNA, 25 bp, Artificial
  probe
  misc_feature (1)..(25): SEQ ID NO: 4055; WAN024F8P; Start 42; Stop 66
gcttgatattgtcatagacagcctg

SEQ ID NO: 371624 - DNA, 25 bp, Artificial
  probe
  misc_feature (1)..(25): SEQ ID NO: 4055; WAN024F8P; Start 116; Stop 140
gcgtagtagagctcgatataattca

SEQ ID NO: 371625 - DNA, 25 bp, Artificial
  probe
  misc_feature (1)..(25): SEQ ID NO: 4055; WAN024F8P; Start 46; Stop 70
gatattgtcatagacagcctgacga

SEQ ID NO: 371626 - DNA, 25 bp, Artificial
  probe
  misc_feature (1)..(25): SEQ ID NO: 4055; WAN024F8P; Start 47; Stop 71
atattgtcatagacagcctgacgac

SEQ ID NO: 371627 - DNA, 25 bp, Artificial
  probe
  misc_feature (1)..(25): SEQ ID NO: 4055; WAN024F8P; Start 45; Stop 69
tgatattgtcatagacagcctgacg

SEQ ID NO: 371628 - DNA, 25 bp, Artificial
  probe
  misc_feature (1)..(25): SEQ ID NO: 4055; WAN024F8P; Start 126; Stop 150
gctcgatataattcatttgcttatc

SEQ ID NO: 371629 - DNA, 25 bp, Artificial
  probe
  misc_feature (1)..(25): SEQ ID NO: 4055; WAN024F8P; Start 171; Stop 195
attcaaagagcgcattcatacgatt

SEQ ID NO: 371630 - DNA, 25 bp, Artificial
  probe
  misc_feature (1)..(25): SEQ ID NO: 4055; WAN024F8P; Start 170; Stop 194
aattcaaagagcgcattcatacgat

SEQ ID NO: 371631 - DNA, 25 bp, Artificial
  probe
  misc_feature (1)..(25): SEQ ID NO: 4055; WAN024F8P; Start 41; Stop 65
cgcttgatattgtcatagacagcct

SEQ ID NO: 371632 - DNA, 25 bp, Artificial
  probe
  misc_feature (1)..(25): SEQ ID NO: 4055; WAN024F8P; Start 40; Stop 64
tcgcttgatattgtcatagacagcc

SEQ ID NO: 371633 - DNA, 25 bp, Artificial
  probe
  misc_feature (1)..(25): SEQ ID NO: 4055; WAN024F8P; Start 169; Stop 193
aaattcaaagagcgcattcatacga

SEQ ID NO: 371634 - DNA, 25 bp, Artificial
  probe
  misc_feature (1)..(25): SEQ ID NO: 4055; WAN024F8P; Start 129; Stop 153
cgatataattcatttgcttatctgt

SEQ ID NO: 371635 - DNA, 25 bp, Artificial
  probe
  misc_feature (1)..(25): SEQ ID NO: 4055; WAN024F8P; Start 117; Stop 141
cgtagtagagctcgatataattcat

SEQ ID NO: 371636 - DNA, 25 bp, Artificial
  probe
  misc_feature (1)..(25): SEQ ID NO: 4055; WAN024F8P; Start 111; Stop 135
catcagcgtagtagagctcgatata

SEQ ID NO: 371637 - DNA, 25 bp, Artificial
  probe
  misc_feature (1)..(25): SEQ ID NO: 4055; WAN024F8P; Start 26; Stop 50
agaatcttttctgttcgcttgatat

SEQ ID NO: 371638 - DNA, 25 bp, Artificial
  probe
  misc_feature (1)..(25): SEQ ID NO: 4055; WAN024F8P; Start 48; Stop 72
tattgtcatagacagcctgacgact

SEQ ID NO: 371639 - DNA, 25 bp, Artificial
  probe
  misc_feature (1)..(25): SEQ ID NO: 4055; WAN024F8P; Start 125; Stop 149
agctcgatataattcatttgcttat

SEQ ID NO: 371640 - DNA, 25 bp, Artificial
  probe
  misc_feature (1)..(25): SEQ ID NO: 4056; WAN024GNO; Start 660; Stop 684
agtcatcacaccttacatagtcaac

SEQ ID NO: 371641 - DNA, 25 bp, Artificial
  probe
  misc_feature (1)..(25): SEQ ID NO: 4056; WAN024GNO; Start 663; Stop 687
catcacaccttacatagtcaaccat

SEQ ID NO: 371642 - DNA, 25 bp, Artificial
  probe
  misc_feature (1)..(25): SEQ ID NO: 4056; WAN024GNO; Start 658; Stop 682
gaagtcatcacaccttacatagtca

SEQ ID NO: 371643 - DNA, 25 bp, Artificial
  probe
  misc_feature (1)..(25): SEQ ID NO: 4056; WAN024GNO; Start 659; Stop 683
aagtcatcacaccttacatagtcaa

SEQ ID NO: 371644 - DNA, 25 bp, Artificial
  probe
  misc_feature (1)..(25): SEQ ID NO: 4056; WAN024GNO; Start 661; Stop 685
gtcatcacaccttacatagtcaacc

SEQ ID NO: 371645 - DNA, 25 bp, Artificial
  probe
  misc_feature (1)..(25): SEQ ID NO: 4056; WAN024GNO; Start 662; Stop 686
tcatcacaccttacatagtcaacca

SEQ ID NO: 371646 - DNA, 25 bp, Artificial
  probe
  misc_feature (1)..(25): SEQ ID NO: 4056; WAN024GNO; Start 657; Stop 681
tgaagtcatcacaccttacatagtc

SEQ ID NO: 371647 - DNA, 25 bp, Artificial
  probe
  misc_feature (1)..(25): SEQ ID NO: 4056; WAN024GNO; Start 656; Stop 680
ctgaagtcatcacaccttacatagt

SEQ ID NO: 371648 - DNA, 25 bp, Artificial
  probe
  misc_feature (1)..(25): SEQ ID NO: 4056; WAN024GNO; Start 655; Stop 679
actgaagtcatcacaccttacatag

SEQ ID NO: 371649 - DNA, 25 bp, Artificial
  probe
  misc_feature (1)..(25): SEQ ID NO: 4056; WAN024GNO; Start 650; Stop 674
gctatactgaagtcatcacacctta

SEQ ID NO: 371650 - DNA, 25 bp, Artificial
  probe
  misc_feature (1)..(25): SEQ ID NO: 4056; WAN024GNO; Start 644; Stop 668
aagaaggctatactgaagtcatcac

SEQ ID NO: 371651 - DNA, 25 bp, Artificial
  probe
  misc_feature (1)..(25): SEQ ID NO: 4056; WAN024GNO; Start 653; Stop 677
atactgaagtcatcacaccttacat

SEQ ID NO: 371652 - DNA, 25 bp, Artificial
  probe
  misc_feature (1)..(25): SEQ ID NO: 4056; WAN024GNO; Start 646; Stop 670
gaaggctatactgaagtcatcacac

SEQ ID NO: 371653 - DNA, 25 bp, Artificial
  probe
  misc_feature (1)..(25): SEQ ID NO: 4056; WAN024GNO; Start 645; Stop 669
agaaggctatactgaagtcatcaca

SEQ ID NO: 371654 - DNA, 25 bp, Artificial
  probe
  misc_feature (1)..(25): SEQ ID NO: 4056; WAN024GNO; Start 654; Stop 678
tactgaagtcatcacaccttacata

SEQ ID NO: 371655 - DNA, 25 bp, Artificial
  probe
  misc_feature (1)..(25): SEQ ID NO: 4056; WAN024GNO; Start 652; Stop 676
tatactgaagtcatcacaccttaca

SEQ ID NO: 371656 - DNA, 25 bp, Artificial
  probe
  misc_feature (1)..(25): SEQ ID NO: 4056; WAN024GNO; Start 664; Stop 688
atcacaccttacatagtcaaccatg

SEQ ID NO: 371657 - DNA, 25 bp, Artificial
  probe
  misc_feature (1)..(25): SEQ ID NO: 4056; WAN024GNO; Start 651; Stop 675
ctatactgaagtcatcacaccttac

SEQ ID NO: 371658 - DNA, 25 bp, Artificial
  probe
  misc_feature (1)..(25): SEQ ID NO: 4056; WAN024GNO; Start 667; Stop 691
acaccttacatagtcaaccatgatt

SEQ ID NO: 371659 - DNA, 25 bp, Artificial
  probe
  misc_feature (1)..(25): SEQ ID NO: 4056; WAN024GNO; Start 668; Stop 692
caccttacatagtcaaccatgattc

SEQ ID NO: 371660 - DNA, 25 bp, Artificial
  probe
  misc_feature (1)..(25): SEQ ID NO: 4056; WAN024GNO; Start 669; Stop 693
accttacatagtcaaccatgattct

SEQ ID NO: 371661 - DNA, 25 bp, Artificial
  probe
  misc_feature (1)..(25): SEQ ID NO: 4056; WAN024GNO; Start 666; Stop 690
cacaccttacatagtcaaccatgat

SEQ ID NO: 371662 - DNA, 25 bp, Artificial
  probe
  misc_feature (1)..(25): SEQ ID NO: 4056; WAN024GNO; Start 649; Stop 673
ggctatactgaagtcatcacacctt

SEQ ID NO: 371663 - DNA, 25 bp, Artificial
  probe
  misc_feature (1)..(25): SEQ ID NO: 4056; WAN024GNO; Start 647; Stop 671
aaggctatactgaagtcatcacacc

SEQ ID NO: 371664 - DNA, 25 bp, Artificial
  probe
  misc_feature (1)..(25): SEQ ID NO: 4056; WAN024GNO; Start 665; Stop 689
tcacaccttacatagtcaaccatga

SEQ ID NO: 371665 - DNA, 25 bp, Artificial
  probe
  misc_feature (1)..(25): SEQ ID NO: 4056; WAN024GNO; Start 150; Stop 174
tgtagatgctgctgtcttgaatgaa

SEQ ID NO: 371666 - DNA, 25 bp, Artificial
  probe
  misc_feature (1)..(25): SEQ ID NO: 4056; WAN024GNO; Start 383; Stop 407
ttacaacgactcttccaaatatccc

SEQ ID NO: 371667 - DNA, 25 bp, Artificial
  probe
  misc_feature (1)..(25): SEQ ID NO: 4056; WAN024GNO; Start 382; Stop 406
tttacaacgactcttccaaatatcc

SEQ ID NO: 371668 - DNA, 25 bp, Artificial
  probe
  misc_feature (1)..(25): SEQ ID NO: 4056; WAN024GNO; Start 791; Stop 815
caaactactaccgtgatgaaatctt

SEQ ID NO: 371669 - DNA, 25 bp, Artificial
  probe
  misc_feature (1)..(25): SEQ ID NO: 4056; WAN024GNO; Start 670; Stop 694
ccttacatagtcaaccatgattcta

SEQ ID NO: 371670 - DNA, 25 bp, Artificial
  probe
  misc_feature (1)..(25): SEQ ID NO: 4056; WAN024GNO; Start 377; Stop 401
cagaatttacaacgactcttccaaa

SEQ ID NO: 371671 - DNA, 25 bp, Artificial
  probe
  misc_feature (1)..(25): SEQ ID NO: 4056; WAN024GNO; Start 749; Stop 773
ataccaactttgtcttgattccaac

SEQ ID NO: 371672 - DNA, 25 bp, Artificial
  probe
  misc_feature (1)..(25): SEQ ID NO: 4056; WAN024GNO; Start 152; Stop 176
tagatgctgctgtcttgaatgaaat

SEQ ID NO: 371673 - DNA, 25 bp, Artificial
  probe
  misc_feature (1)..(25): SEQ ID NO: 4057; WAN024AVJ; Start 4; Stop 28
cagagttatagtggcttgatgctgg

SEQ ID NO: 371674 - DNA, 25 bp, Artificial
  probe
  misc_feature (1)..(25): SEQ ID NO: 4057; WAN024AVJ; Start 9; Stop 33
ttatagtggcttgatgctgggaaag

SEQ ID NO: 371675 - DNA, 25 bp, Artificial
  probe
  misc_feature (1)..(25): SEQ ID NO: 4057; WAN024AVJ; Start 8; Stop 32
gttatagtggcttgatgctgggaaa

SEQ ID NO: 371676 - DNA, 25 bp, Artificial
  probe
  misc_feature (1)..(25): SEQ ID NO: 4057; WAN024AVJ; Start 27; Stop 51
gggaaagtacactgtgactgctaaa

SEQ ID NO: 371677 - DNA, 25 bp, Artificial
  probe
  misc_feature (1)..(25): SEQ ID NO: 4057; WAN024AVJ; Start 40; Stop 64
gtgactgctaaaacattcctagaag

SEQ ID NO: 371678 - DNA, 25 bp, Artificial
  probe
  misc_feature (1)..(25): SEQ ID NO: 4057; WAN024AVJ; Start 7; Stop 31
agttatagtggcttgatgctgggaa

SEQ ID NO: 371679 - DNA, 25 bp, Artificial
  probe
  misc_feature (1)..(25): SEQ ID NO: 4057; WAN024AVJ; Start 11; Stop 35
atagtggcttgatgctgggaaagta

SEQ ID NO: 371680 - DNA, 25 bp, Artificial
  probe
  misc_feature (1)..(25): SEQ ID NO: 4057; WAN024AVJ; Start 10; Stop 34
tatagtggcttgatgctgggaaagt

SEQ ID NO: 371681 - DNA, 25 bp, Artificial
  probe
  misc_feature (1)..(25): SEQ ID NO: 4057; WAN024AVJ; Start 39; Stop 63
tgtgactgctaaaacattcctagaa

SEQ ID NO: 371682 - DNA, 25 bp, Artificial
  probe
  misc_feature (1)..(25): SEQ ID NO: 4057; WAN024AVJ; Start 29; Stop 53
gaaagtacactgtgactgctaaaac

SEQ ID NO: 371683 - DNA, 25 bp, Artificial
  probe
  misc_feature (1)..(25): SEQ ID NO: 4057; WAN024AVJ; Start 38; Stop 62
ctgtgactgctaaaacattcctaga

SEQ ID NO: 371684 - DNA, 25 bp, Artificial
  probe
  misc_feature (1)..(25): SEQ ID NO: 4057; WAN024AVJ; Start 36; Stop 60
cactgtgactgctaaaacattccta

SEQ ID NO: 371685 - DNA, 25 bp, Artificial
  probe
  misc_feature (1)..(25): SEQ ID NO: 4057; WAN024AVJ; Start 37; Stop 61
actgtgactgctaaaacattcctag

SEQ ID NO: 371686 - DNA, 25 bp, Artificial
  probe
  misc_feature (1)..(25): SEQ ID NO: 4057; WAN024AVJ; Start 34; Stop 58
tacactgtgactgctaaaacattcc

SEQ ID NO: 371687 - DNA, 25 bp, Artificial
  probe
  misc_feature (1)..(25): SEQ ID NO: 4057; WAN024AVJ; Start 33; Stop 57
gtacactgtgactgctaaaacattc

SEQ ID NO: 371688 - DNA, 25 bp, Artificial
  probe
  misc_feature (1)..(25): SEQ ID NO: 4057; WAN024AVJ; Start 32; Stop 56
agtacactgtgactgctaaaacatt

SEQ ID NO: 371689 - DNA, 25 bp, Artificial
  probe
  misc_feature (1)..(25): SEQ ID NO: 4057; WAN024AVJ; Start 31; Stop 55
aagtacactgtgactgctaaaacat

SEQ ID NO: 371690 - DNA, 25 bp, Artificial
  probe
  misc_feature (1)..(25): SEQ ID NO: 4057; WAN024AVJ; Start 26; Stop 50
tgggaaagtacactgtgactgctaa

SEQ ID NO: 371691 - DNA, 25 bp, Artificial
  probe
  misc_feature (1)..(25): SEQ ID NO: 4057; WAN024AVJ; Start 28; Stop 52
ggaaagtacactgtgactgctaaaa

SEQ ID NO: 371692 - DNA, 25 bp, Artificial
  probe
  misc_feature (1)..(25): SEQ ID NO: 4057; WAN024AVJ; Start 6; Stop 30
gagttatagtggcttgatgctggga

SEQ ID NO: 371693 - DNA, 25 bp, Artificial
  probe
  misc_feature (1)..(25): SEQ ID NO: 4057; WAN024AVJ; Start 5; Stop 29
agagttatagtggcttgatgctggg

SEQ ID NO: 371694 - DNA, 25 bp, Artificial
  probe
  misc_feature (1)..(25): SEQ ID NO: 4057; WAN024AVJ; Start 30; Stop 54
aaagtacactgtgactgctaaaaca

SEQ ID NO: 371695 - DNA, 25 bp, Artificial
  probe
  misc_feature (1)..(25): SEQ ID NO: 4057; WAN024AVJ; Start 18; Stop 42
cttgatgctgggaaagtacactgtg

SEQ ID NO: 371696 - DNA, 25 bp, Artificial
  probe
  misc_feature (1)..(25): SEQ ID NO: 4057; WAN024AVJ; Start 3; Stop 27
gcagagttatagtggcttgatgctg

SEQ ID NO: 371697 - DNA, 25 bp, Artificial
  probe
  misc_feature (1)..(25): SEQ ID NO: 4057; WAN024AVJ; Start 19; Stop 43
ttgatgctgggaaagtacactgtga

SEQ ID NO: 371698 - DNA, 25 bp, Artificial
  probe
  misc_feature (1)..(25): SEQ ID NO: 4057; WAN024AVJ; Start 25; Stop 49
ctgggaaagtacactgtgactgcta

SEQ ID NO: 371699 - DNA, 25 bp, Artificial
  probe
  misc_feature (1)..(25): SEQ ID NO: 4057; WAN024AVJ; Start 35; Stop 59
acactgtgactgctaaaacattcct

SEQ ID NO: 371700 - DNA, 25 bp, Artificial
  probe
  misc_feature (1)..(25): SEQ ID NO: 4057; WAN024AVJ; Start 12; Stop 36
tagtggcttgatgctgggaaagtac

SEQ ID NO: 371701 - DNA, 25 bp, Artificial
  probe
  misc_feature (1)..(25): SEQ ID NO: 4057; WAN024AVJ; Start 21; Stop 45
gatgctgggaaagtacactgtgact

SEQ ID NO: 371702 - DNA, 25 bp, Artificial
  probe
  misc_feature (1)..(25): SEQ ID NO: 4057; WAN024AVJ; Start 20; Stop 44
tgatgctgggaaagtacactgtgac

SEQ ID NO: 371703 - DNA, 25 bp, Artificial
  probe
  misc_feature (1)..(25): SEQ ID NO: 4057; WAN024AVJ; Start 1; Stop 25
gtgcagagttatagtggcttgatgc

SEQ ID NO: 371704 - DNA, 25 bp, Artificial
  probe
  misc_feature (1)..(25): SEQ ID NO: 4057; WAN024AVJ; Start 2; Stop 26
tgcagagttatagtggcttgatgct

SEQ ID NO: 371705 - DNA, 25 bp, Artificial
  probe
  misc_feature (1)..(25): SEQ ID NO: 4057; WAN024AVJ; Start 22; Stop 46
atgctgggaaagtacactgtgactg

SEQ ID NO: 371706 - DNA, 25 bp, Artificial
  probe
  misc_feature (1)..(25): SEQ ID NO: 4058; WAN024DT6; Start 61; Stop 85
cctattttctatgctccaagagttg

SEQ ID NO: 371707 - DNA, 25 bp, Artificial
  probe
  misc_feature (1)..(25): SEQ ID NO: 4058; WAN024DT6; Start 62; Stop 86
ctattttctatgctccaagagttga

SEQ ID NO: 371708 - DNA, 25 bp, Artificial
  probe
  misc_feature (1)..(25): SEQ ID NO: 4058; WAN024DT6; Start 63; Stop 87
tattttctatgctccaagagttgat

SEQ ID NO: 371709 - DNA, 25 bp, Artificial
  probe
  misc_feature (1)..(25): SEQ ID NO: 4059; WAN024C7Z; Start 357; Stop 381
tggattatggtcttcagcaactatt

SEQ ID NO: 371710 - DNA, 25 bp, Artificial
  probe
  misc_feature (1)..(25): SEQ ID NO: 4059; WAN024C7Z; Start 360; Stop 384
attatggtcttcagcaactattggt

SEQ ID NO: 371711 - DNA, 25 bp, Artificial
  probe
  misc_feature (1)..(25): SEQ ID NO: 4059; WAN024C7Z; Start 359; Stop 383
gattatggtcttcagcaactattgg

SEQ ID NO: 371712 - DNA, 25 bp, Artificial
  probe
  misc_feature (1)..(25): SEQ ID NO: 4059; WAN024C7Z; Start 358; Stop 382
ggattatggtcttcagcaactattg

SEQ ID NO: 371713 - DNA, 25 bp, Artificial
  probe
  misc_feature (1)..(25): SEQ ID NO: 4059; WAN024C7Z; Start 361; Stop 385
ttatggtcttcagcaactattggtt

SEQ ID NO: 371714 - DNA, 25 bp, Artificial
  probe
  misc_feature (1)..(25): SEQ ID NO: 4059; WAN024C7Z; Start 304; Stop 328
gcaggaacaatcatggtaactaatc

SEQ ID NO: 371715 - DNA, 25 bp, Artificial
  probe
  misc_feature (1)..(25): SEQ ID NO: 4059; WAN024C7Z; Start 356; Stop 380
ctggattatggtcttcagcaactat

SEQ ID NO: 371716 - DNA, 25 bp, Artificial
  probe
  misc_feature (1)..(25): SEQ ID NO: 4059; WAN024C7Z; Start 303; Stop 327
ggcaggaacaatcatggtaactaat

SEQ ID NO: 371717 - DNA, 25 bp, Artificial
  probe
  misc_feature (1)..(25): SEQ ID NO: 4059; WAN024C7Z; Start 305; Stop 329
caggaacaatcatggtaactaatca

SEQ ID NO: 371718 - DNA, 25 bp, Artificial
  probe
  misc_feature (1)..(25): SEQ ID NO: 4059; WAN024C7Z; Start 306; Stop 330
aggaacaatcatggtaactaatcaa

SEQ ID NO: 371719 - DNA, 25 bp, Artificial
  probe
  misc_feature (1)..(25): SEQ ID NO: 4059; WAN024C7Z; Start 29; Stop 53
ccaaggtaaacgaggtaagagataa

SEQ ID NO: 371720 - DNA, 25 bp, Artificial
  probe
  misc_feature (1)..(25): SEQ ID NO: 4059; WAN024C7Z; Start 723; Stop 747
tgctggtgttatttatgttgaagag

SEQ ID NO: 371721 - DNA, 25 bp, Artificial
  probe
  misc_feature (1)..(25): SEQ ID NO: 4059; WAN024C7Z; Start 28; Stop 52
tccaaggtaaacgaggtaagagata

SEQ ID NO: 371722 - DNA, 25 bp, Artificial
  probe
  misc_feature (1)..(25): SEQ ID NO: 4059; WAN024C7Z; Start 724; Stop 748
gctggtgttatttatgttgaagaga

SEQ ID NO: 371723 - DNA, 25 bp, Artificial
  probe
  misc_feature (1)..(25): SEQ ID NO: 4059; WAN024C7Z; Start 722; Stop 746
ttgctggtgttatttatgttgaaga

SEQ ID NO: 371724 - DNA, 25 bp, Artificial
  probe
  misc_feature (1)..(25): SEQ ID NO: 4059; WAN024C7Z; Start 81; Stop 105
ttgggaaatacttcttaggtgcttt

SEQ ID NO: 371725 - DNA, 25 bp, Artificial
  probe
  misc_feature (1)..(25): SEQ ID NO: 4059; WAN024C7Z; Start 80; Stop 104
tttgggaaatacttcttaggtgctt

SEQ ID NO: 371726 - DNA, 25 bp, Artificial
  probe
  misc_feature (1)..(25): SEQ ID NO: 4059; WAN024C7Z; Start 192; Stop 216
tttgggaacttgtgttgtaatgatg

SEQ ID NO: 371727 - DNA, 25 bp, Artificial
  probe
  misc_feature (1)..(25): SEQ ID NO: 4059; WAN024C7Z; Start 191; Stop 215
gtttgggaacttgtgttgtaatgat

SEQ ID NO: 371728 - DNA, 25 bp, Artificial
  probe
  misc_feature (1)..(25): SEQ ID NO: 4059; WAN024C7Z; Start 188; Stop 212
tttgtttgggaacttgtgttgtaat

SEQ ID NO: 371729 - DNA, 25 bp, Artificial
  probe
  misc_feature (1)..(25): SEQ ID NO: 4059; WAN024C7Z; Start 27; Stop 51
ttccaaggtaaacgaggtaagagat

SEQ ID NO: 371730 - DNA, 25 bp, Artificial
  probe
  misc_feature (1)..(25): SEQ ID NO: 4059; WAN024C7Z; Start 189; Stop 213
ttgtttgggaacttgtgttgtaatg

SEQ ID NO: 371731 - DNA, 25 bp, Artificial
  probe
  misc_feature (1)..(25): SEQ ID NO: 4059; WAN024C7Z; Start 363; Stop 387
atggtcttcagcaactattggttta

SEQ ID NO: 371732 - DNA, 25 bp, Artificial
  probe
  misc_feature (1)..(25): SEQ ID NO: 4059; WAN024C7Z; Start 362; Stop 386
tatggtcttcagcaactattggttt

SEQ ID NO: 371733 - DNA, 25 bp, Artificial
  probe
  misc_feature (1)..(25): SEQ ID NO: 4059; WAN024C7Z; Start 193; Stop 217
ttgggaacttgtgttgtaatgatga

SEQ ID NO: 371734 - DNA, 25 bp, Artificial
  probe
  misc_feature (1)..(25): SEQ ID NO: 4059; WAN024C7Z; Start 187; Stop 211
gtttgtttgggaacttgtgttgtaa

SEQ ID NO: 371735 - DNA, 25 bp, Artificial
  probe
  misc_feature (1)..(25): SEQ ID NO: 4059; WAN024C7Z; Start 721; Stop 745
attgctggtgttatttatgttgaag

SEQ ID NO: 371736 - DNA, 25 bp, Artificial
  probe
  misc_feature (1)..(25): SEQ ID NO: 4059; WAN024C7Z; Start 364; Stop 388
tggtcttcagcaactattggtttag

SEQ ID NO: 371737 - DNA, 25 bp, Artificial
  probe
  misc_feature (1)..(25): SEQ ID NO: 4059; WAN024C7Z; Start 190; Stop 214
tgtttgggaacttgtgttgtaatga

SEQ ID NO: 371738 - DNA, 25 bp, Artificial
  probe
  misc_feature (1)..(25): SEQ ID NO: 4059; WAN024C7Z; Start 194; Stop 218
tgggaacttgtgttgtaatgatgac

SEQ ID NO: 371739 - DNA, 25 bp, Artificial
  probe
  misc_feature (1)..(25): SEQ ID NO: 4059; WAN024C7Z; Start 30; Stop 54
caaggtaaacgaggtaagagataat

SEQ ID NO: 371740 - DNA, 25 bp, Artificial
  probe
  misc_feature (1)..(25): SEQ ID NO: 4059; WAN024C7Z; Start 79; Stop 103
atttgggaaatacttcttaggtgct

SEQ ID NO: 371741 - DNA, 25 bp, Artificial
  probe
  misc_feature (1)..(25): SEQ ID NO: 4059; WAN024C7Z; Start 162; Stop 186
agcagggattagaacctacttacta

SEQ ID NO: 371742 - DNA, 25 bp, Artificial
  probe
  misc_feature (1)..(25): SEQ ID NO: 4060; WAN024CA7; Start 8; Stop 32
accaacacgctatcaagaataagaa

SEQ ID NO: 371743 - DNA, 25 bp, Artificial
  probe
  misc_feature (1)..(25): SEQ ID NO: 4060; WAN024CA7; Start 7; Stop 31
gaccaacacgctatcaagaataaga

SEQ ID NO: 371744 - DNA, 25 bp, Artificial
  probe
  misc_feature (1)..(25): SEQ ID NO: 4060; WAN024CA7; Start 6; Stop 30
ggaccaacacgctatcaagaataag

SEQ ID NO: 371745 - DNA, 25 bp, Artificial
  probe
  misc_feature (1)..(25): SEQ ID NO: 4060; WAN024CA7; Start 9; Stop 33
ccaacacgctatcaagaataagaaa

SEQ ID NO: 371746 - DNA, 25 bp, Artificial
  probe
  misc_feature (1)..(25): SEQ ID NO: 4060; WAN024CA7; Start 13; Stop 37
cacgctatcaagaataagaaaacga

SEQ ID NO: 371747 - DNA, 25 bp, Artificial
  probe
  misc_feature (1)..(25): SEQ ID NO: 4060; WAN024CA7; Start 12; Stop 36
acacgctatcaagaataagaaaacg

SEQ ID NO: 371748 - DNA, 25 bp, Artificial
  probe
  misc_feature (1)..(25): SEQ ID NO: 4060; WAN024CA7; Start 14; Stop 38
acgctatcaagaataagaaaacgat

SEQ ID NO: 371749 - DNA, 25 bp, Artificial
  probe
  misc_feature (1)..(25): SEQ ID NO: 4060; WAN024CA7; Start 11; Stop 35
aacacgctatcaagaataagaaaac

SEQ ID NO: 371750 - DNA, 25 bp, Artificial
  probe
  misc_feature (1)..(25): SEQ ID NO: 4060; WAN024CA7; Start 10; Stop 34
caacacgctatcaagaataagaaaa

SEQ ID NO: 371751 - DNA, 25 bp, Artificial
  probe
  misc_feature (1)..(25): SEQ ID NO: 4060; WAN024CA7; Start 26; Stop 50
ataagaaaacgataaaagcaactgc

SEQ ID NO: 371752 - DNA, 25 bp, Artificial
  probe
  misc_feature (1)..(25): SEQ ID NO: 4060; WAN024CA7; Start 27; Stop 51
taagaaaacgataaaagcaactgca

SEQ ID NO: 371753 - DNA, 25 bp, Artificial
  probe
  misc_feature (1)..(25): SEQ ID NO: 4060; WAN024CA7; Start 25; Stop 49
aataagaaaacgataaaagcaactg

SEQ ID NO: 371754 - DNA, 25 bp, Artificial
  probe
  misc_feature (1)..(25): SEQ ID NO: 4060; WAN024CA7; Start 15; Stop 39
cgctatcaagaataagaaaacgata

SEQ ID NO: 371755 - DNA, 25 bp, Artificial
  probe
  misc_feature (1)..(25): SEQ ID NO: 4060; WAN024CA7; Start 24; Stop 48
gaataagaaaacgataaaagcaact

SEQ ID NO: 371756 - DNA, 25 bp, Artificial
  probe
  misc_feature (1)..(25): SEQ ID NO: 4060; WAN024CA7; Start 23; Stop 47
agaataagaaaacgataaaagcaac

SEQ ID NO: 371757 - DNA, 25 bp, Artificial
  probe
  misc_feature (1)..(25): SEQ ID NO: 4060; WAN024CA7; Start 21; Stop 45
caagaataagaaaacgataaaagca

SEQ ID NO: 371758 - DNA, 25 bp, Artificial
  probe
  misc_feature (1)..(25): SEQ ID NO: 4060; WAN024CA7; Start 20; Stop 44
tcaagaataagaaaacgataaaagc

SEQ ID NO: 371759 - DNA, 25 bp, Artificial
  probe
  misc_feature (1)..(25): SEQ ID NO: 4060; WAN024CA7; Start 22; Stop 46
aagaataagaaaacgataaaagcaa

SEQ ID NO: 371760 - DNA, 25 bp, Artificial
  probe
  misc_feature (1)..(25): SEQ ID NO: 4060; WAN024CA7; Start 16; Stop 40
gctatcaagaataagaaaacgataa

SEQ ID NO: 371761 - DNA, 25 bp, Artificial
  probe
  misc_feature (1)..(25): SEQ ID NO: 4061; WAN024BFN; Start 94; Stop 118
ggcttgatgagtctctttgtttatg

SEQ ID NO: 371762 - DNA, 25 bp, Artificial
  probe
  misc_feature (1)..(25): SEQ ID NO: 4061; WAN024BFN; Start 97; Stop 121
ttgatgagtctctttgtttatgctg

SEQ ID NO: 371763 - DNA, 25 bp, Artificial
  probe
  misc_feature (1)..(25): SEQ ID NO: 4061; WAN024BFN; Start 96; Stop 120
cttgatgagtctctttgtttatgct

SEQ ID NO: 371764 - DNA, 25 bp, Artificial
  probe
  misc_feature (1)..(25): SEQ ID NO: 4061; WAN024BFN; Start 95; Stop 119
gcttgatgagtctctttgtttatgc

SEQ ID NO: 371765 - DNA, 25 bp, Artificial
  probe
  misc_feature (1)..(25): SEQ ID NO: 4061; WAN024BFN; Start 98; Stop 122
tgatgagtctctttgtttatgctgg

SEQ ID NO: 371766 - DNA, 25 bp, Artificial
  probe
  misc_feature (1)..(25): SEQ ID NO: 4061; WAN024BFN; Start 93; Stop 117
gggcttgatgagtctctttgtttat

SEQ ID NO: 371767 - DNA, 25 bp, Artificial
  probe
  misc_feature (1)..(25): SEQ ID NO: 4061; WAN024BFN; Start 99; Stop 123
gatgagtctctttgtttatgctggg

SEQ ID NO: 371768 - DNA, 25 bp, Artificial
  probe
  misc_feature (1)..(25): SEQ ID NO: 4061; WAN024BFN; Start 100; Stop 124
atgagtctctttgtttatgctggga

SEQ ID NO: 371769 - DNA, 25 bp, Artificial
  probe
  misc_feature (1)..(25): SEQ ID NO: 4061; WAN024BFN; Start 92; Stop 116
tgggcttgatgagtctctttgttta

SEQ ID NO: 371770 - DNA, 25 bp, Artificial
  probe
  misc_feature (1)..(25): SEQ ID NO: 4061; WAN024BFN; Start 91; Stop 115
atgggcttgatgagtctctttgttt

SEQ ID NO: 371771 - DNA, 25 bp, Artificial
  probe
  misc_feature (1)..(25): SEQ ID NO: 4061; WAN024BFN; Start 102; Stop 126
gagtctctttgtttatgctgggagt

SEQ ID NO: 371772 - DNA, 25 bp, Artificial
  probe
  misc_feature (1)..(25): SEQ ID NO: 4061; WAN024BFN; Start 101; Stop 125
tgagtctctttgtttatgctgggag

SEQ ID NO: 371773 - DNA, 25 bp, Artificial
  probe
  misc_feature (1)..(25): SEQ ID NO: 4061; WAN024BFN; Start 90; Stop 114
gatgggcttgatgagtctctttgtt

SEQ ID NO: 371774 - DNA, 25 bp, Artificial
  probe
  misc_feature (1)..(25): SEQ ID NO: 4061; WAN024BFN; Start 103; Stop 127
agtctctttgtttatgctgggagtg

SEQ ID NO: 371775 - DNA, 25 bp, Artificial
  probe
  misc_feature (1)..(25): SEQ ID NO: 4061; WAN024BFN; Start 596; Stop 620
tgtctcagtcactagctgttctgtt

SEQ ID NO: 371776 - DNA, 25 bp, Artificial
  probe
  misc_feature (1)..(25): SEQ ID NO: 4061; WAN024BFN; Start 139; Stop 163
atgttggcactgattgtggttcaag

SEQ ID NO: 371777 - DNA, 25 bp, Artificial
  probe
  misc_feature (1)..(25): SEQ ID NO: 4061; WAN024BFN; Start 598; Stop 622
tctcagtcactagctgttctgtttg

SEQ ID NO: 371778 - DNA, 25 bp, Artificial
  probe
  misc_feature (1)..(25): SEQ ID NO: 4061; WAN024BFN; Start 597; Stop 621
gtctcagtcactagctgttctgttt

SEQ ID NO: 371779 - DNA, 25 bp, Artificial
  probe
  misc_feature (1)..(25): SEQ ID NO: 4061; WAN024BFN; Start 89; Stop 113
agatgggcttgatgagtctctttgt

SEQ ID NO: 371780 - DNA, 25 bp, Artificial
  probe
  misc_feature (1)..(25): SEQ ID NO: 4061; WAN024BFN; Start 104; Stop 128
gtctctttgtttatgctgggagtgc

SEQ ID NO: 371781 - DNA, 25 bp, Artificial
  probe
  misc_feature (1)..(25): SEQ ID NO: 4061; WAN024BFN; Start 83; Stop 107
ctgttgagatgggcttgatgagtct

SEQ ID NO: 371782 - DNA, 25 bp, Artificial
  probe
  misc_feature (1)..(25): SEQ ID NO: 4061; WAN024BFN; Start 138; Stop 162
catgttggcactgattgtggttcaa

SEQ ID NO: 371783 - DNA, 25 bp, Artificial
  probe
  misc_feature (1)..(25): SEQ ID NO: 4061; WAN024BFN; Start 650; Stop 674
tggttttagatggtcagctaactaa

SEQ ID NO: 371784 - DNA, 25 bp, Artificial
  probe
  misc_feature (1)..(25): SEQ ID NO: 4061; WAN024BFN; Start 71; Stop 95
cctatgtgacacctgttgagatggg

SEQ ID NO: 371785 - DNA, 25 bp, Artificial
  probe
  misc_feature (1)..(25): SEQ ID NO: 4061; WAN024BFN; Start 70; Stop 94
ccctatgtgacacctgttgagatgg

SEQ ID NO: 371786 - DNA, 25 bp, Artificial
  probe
  misc_feature (1)..(25): SEQ ID NO: 4061; WAN024BFN; Start 651; Stop 675
ggttttagatggtcagctaactaat

SEQ ID NO: 371787 - DNA, 25 bp, Artificial
  probe
  misc_feature (1)..(25): SEQ ID NO: 4061; WAN024BFN; Start 599; Stop 623
ctcagtcactagctgttctgtttgc

SEQ ID NO: 371788 - DNA, 25 bp, Artificial
  probe
  misc_feature (1)..(25): SEQ ID NO: 4061; WAN024BFN; Start 88; Stop 112
gagatgggcttgatgagtctctttg

SEQ ID NO: 371789 - DNA, 25 bp, Artificial
  probe
  misc_feature (1)..(25): SEQ ID NO: 4061; WAN024BFN; Start 105; Stop 129
tctctttgtttatgctgggagtgcc

SEQ ID NO: 371790 - DNA, 25 bp, Artificial
  probe
  misc_feature (1)..(25): SEQ ID NO: 4061; WAN024BFN; Start 87; Stop 111
tgagatgggcttgatgagtctcttt

SEQ ID NO: 371791 - DNA, 25 bp, Artificial
  probe
  misc_feature (1)..(25): SEQ ID NO: 4061; WAN024BFN; Start 86; Stop 110
ttgagatgggcttgatgagtctctt

SEQ ID NO: 371792 - DNA, 25 bp, Artificial
  probe
  misc_feature (1)..(25): SEQ ID NO: 4061; WAN024BFN; Start 85; Stop 109
gttgagatgggcttgatgagtctct

SEQ ID NO: 371793 - DNA, 25 bp, Artificial
  probe
  misc_feature (1)..(25): SEQ ID NO: 4061; WAN024BFN; Start 461; Stop 485
attttgccctggttgggatgtttat

SEQ ID NO: 371794 - DNA, 25 bp, Artificial
  probe
  misc_feature (1)..(25): SEQ ID NO: 4062; WAN024FP9; Start 206; Stop 230
ttaatctctgtcaatggataatcgc

SEQ ID NO: 371795 - DNA, 25 bp, Artificial
  probe
  misc_feature (1)..(25): SEQ ID NO: 4062; WAN024FP9; Start 103; Stop 127
ctcttgataggcttgattccagttc

SEQ ID NO: 371796 - DNA, 25 bp, Artificial
  probe
  misc_feature (1)..(25): SEQ ID NO: 4062; WAN024FP9; Start 104; Stop 128
tcttgataggcttgattccagttct

SEQ ID NO: 371797 - DNA, 25 bp, Artificial
  probe
  misc_feature (1)..(25): SEQ ID NO: 4062; WAN024FP9; Start 105; Stop 129
cttgataggcttgattccagttctg

SEQ ID NO: 371798 - DNA, 25 bp, Artificial
  probe
  misc_feature (1)..(25): SEQ ID NO: 4062; WAN024FP9; Start 106; Stop 130
ttgataggcttgattccagttctga

SEQ ID NO: 371799 - DNA, 25 bp, Artificial
  probe
  misc_feature (1)..(25): SEQ ID NO: 4062; WAN024FP9; Start 107; Stop 131
tgataggcttgattccagttctgaa

SEQ ID NO: 371800 - DNA, 25 bp, Artificial
  probe
  misc_feature (1)..(25): SEQ ID NO: 4062; WAN024FP9; Start 109; Stop 133
ataggcttgattccagttctgaatt

SEQ ID NO: 371801 - DNA, 25 bp, Artificial
  probe
  misc_feature (1)..(25): SEQ ID NO: 4062; WAN024FP9; Start 108; Stop 132
gataggcttgattccagttctgaat

SEQ ID NO: 371802 - DNA, 25 bp, Artificial
  probe
  misc_feature (1)..(25): SEQ ID NO: 4062; WAN024FP9; Start 2; Stop 26
tgcagtccatcagttgtatattctt

SEQ ID NO: 371803 - DNA, 25 bp, Artificial
  probe
  misc_feature (1)..(25): SEQ ID NO: 4062; WAN024FP9; Start 102; Stop 126
gctcttgataggcttgattccagtt

SEQ ID NO: 371804 - DNA, 25 bp, Artificial
  probe
  misc_feature (1)..(25): SEQ ID NO: 4062; WAN024FP9; Start 51; Stop 75
tcaaacaatcaaatactggcacaaa

SEQ ID NO: 371805 - DNA, 25 bp, Artificial
  probe
  misc_feature (1)..(25): SEQ ID NO: 4062; WAN024FP9; Start 1; Stop 25
gtgcagtccatcagttgtatattct

SEQ ID NO: 371806 - DNA, 25 bp, Artificial
  probe
  misc_feature (1)..(25): SEQ ID NO: 4062; WAN024FP9; Start 237; Stop 261
cggattgaatgatagcttcgagatt

SEQ ID NO: 371807 - DNA, 25 bp, Artificial
  probe
  misc_feature (1)..(25): SEQ ID NO: 4062; WAN024FP9; Start 52; Stop 76
caaacaatcaaatactggcacaaat

SEQ ID NO: 371808 - DNA, 25 bp, Artificial
  probe
  misc_feature (1)..(25): SEQ ID NO: 4062; WAN024FP9; Start 50; Stop 74
gtcaaacaatcaaatactggcacaa

SEQ ID NO: 371809 - DNA, 25 bp, Artificial
  probe
  misc_feature (1)..(25): SEQ ID NO: 4062; WAN024FP9; Start 55; Stop 79
acaatcaaatactggcacaaattcc

SEQ ID NO: 371810 - DNA, 25 bp, Artificial
  probe
  misc_feature (1)..(25): SEQ ID NO: 4062; WAN024FP9; Start 3; Stop 27
gcagtccatcagttgtatattcttt

SEQ ID NO: 371811 - DNA, 25 bp, Artificial
  probe
  misc_feature (1)..(25): SEQ ID NO: 4062; WAN024FP9; Start 238; Stop 262
ggattgaatgatagcttcgagatta

SEQ ID NO: 371812 - DNA, 25 bp, Artificial
  probe
  misc_feature (1)..(25): SEQ ID NO: 4062; WAN024FP9; Start 195; Stop 219
tggaaagcaatttaatctctgtcaa

SEQ ID NO: 371813 - DNA, 25 bp, Artificial
  probe
  misc_feature (1)..(25): SEQ ID NO: 4062; WAN024FP9; Start 54; Stop 78
aacaatcaaatactggcacaaattc

SEQ ID NO: 371814 - DNA, 25 bp, Artificial
  probe
  misc_feature (1)..(25): SEQ ID NO: 4062; WAN024FP9; Start 199; Stop 223
aagcaatttaatctctgtcaatgga

SEQ ID NO: 371815 - DNA, 25 bp, Artificial
  probe
  misc_feature (1)..(25): SEQ ID NO: 4062; WAN024FP9; Start 194; Stop 218
atggaaagcaatttaatctctgtca

SEQ ID NO: 371816 - DNA, 25 bp, Artificial
  probe
  misc_feature (1)..(25): SEQ ID NO: 4062; WAN024FP9; Start 164; Stop 188
tggtactcctctctctcattgacag

SEQ ID NO: 371817 - DNA, 25 bp, Artificial
  probe
  misc_feature (1)..(25): SEQ ID NO: 4062; WAN024FP9; Start 163; Stop 187
ctggtactcctctctctcattgaca

SEQ ID NO: 371818 - DNA, 25 bp, Artificial
  probe
  misc_feature (1)..(25): SEQ ID NO: 4062; WAN024FP9; Start 245; Stop 269
atgatagcttcgagattattgagag

SEQ ID NO: 371819 - DNA, 25 bp, Artificial
  probe
  misc_feature (1)..(25): SEQ ID NO: 4062; WAN024FP9; Start 200; Stop 224
agcaatttaatctctgtcaatggat

SEQ ID NO: 371820 - DNA, 25 bp, Artificial
  probe
  misc_feature (1)..(25): SEQ ID NO: 4062; WAN024FP9; Start 53; Stop 77
aaacaatcaaatactggcacaaatt

SEQ ID NO: 371821 - DNA, 25 bp, Artificial
  probe
  misc_feature (1)..(25): SEQ ID NO: 4062; WAN024FP9; Start 242; Stop 266
tgaatgatagcttcgagattattga

SEQ ID NO: 371822 - DNA, 25 bp, Artificial
  probe
  misc_feature (1)..(25): SEQ ID NO: 4062; WAN024FP9; Start 236; Stop 260
acggattgaatgatagcttcgagat

SEQ ID NO: 371823 - DNA, 25 bp, Artificial
  probe
  misc_feature (1)..(25): SEQ ID NO: 4062; WAN024FP9; Start 87; Stop 111
tataggcagatgcaagctcttgata

SEQ ID NO: 371824 - DNA, 25 bp, Artificial
  probe
  misc_feature (1)..(25): SEQ ID NO: 4062; WAN024FP9; Start 235; Stop 259
aacggattgaatgatagcttcgaga

SEQ ID NO: 371825 - DNA, 25 bp, Artificial
  probe
  misc_feature (1)..(25): SEQ ID NO: 4062; WAN024FP9; Start 45; Stop 69
ggtctgtcaaacaatcaaatactgg

SEQ ID NO: 371826 - DNA, 25 bp, Artificial
  probe
  misc_feature (1)..(25): SEQ ID NO: 4062; WAN024FP9; Start 44; Stop 68
tggtctgtcaaacaatcaaatactg

SEQ ID NO: 371827 - DNA, 25 bp, Artificial
  probe
  misc_feature (1)..(25): SEQ ID NO: 4063; WAN024CBE; Start 51; Stop 75
aatgtctgagattgttgaaatgtct

SEQ ID NO: 371828 - DNA, 25 bp, Artificial
  probe
  misc_feature (1)..(25): SEQ ID NO: 4063; WAN024CBE; Start 50; Stop 74
aaatgtctgagattgttgaaatgtc

SEQ ID NO: 371829 - DNA, 25 bp, Artificial
  probe
  misc_feature (1)..(25): SEQ ID NO: 4063; WAN024CBE; Start 53; Stop 77
tgtctgagattgttgaaatgtctaa

SEQ ID NO: 371830 - DNA, 25 bp, Artificial
  probe
  misc_feature (1)..(25): SEQ ID NO: 4063; WAN024CBE; Start 52; Stop 76
atgtctgagattgttgaaatgtcta

SEQ ID NO: 371831 - DNA, 25 bp, Artificial
  probe
  misc_feature (1)..(25): SEQ ID NO: 4063; WAN024CBE; Start 150; Stop 174
tcttgataacataaatagtgtcccg

SEQ ID NO: 371832 - DNA, 25 bp, Artificial
  probe
  misc_feature (1)..(25): SEQ ID NO: 4063; WAN024CBE; Start 54; Stop 78
gtctgagattgttgaaatgtctaaa

SEQ ID NO: 371833 - DNA, 25 bp, Artificial
  probe
  misc_feature (1)..(25): SEQ ID NO: 4063; WAN024CBE; Start 23; Stop 47
ttggcattcatcctagatatccata

SEQ ID NO: 371834 - DNA, 25 bp, Artificial
  probe
  misc_feature (1)..(25): SEQ ID NO: 4063; WAN024CBE; Start 24; Stop 48
tggcattcatcctagatatccatat

SEQ ID NO: 371835 - DNA, 25 bp, Artificial
  probe
  misc_feature (1)..(25): SEQ ID NO: 4063; WAN024CBE; Start 298; Stop 322
aataagattgtaaatgggctgatac

SEQ ID NO: 371836 - DNA, 25 bp, Artificial
  probe
  misc_feature (1)..(25): SEQ ID NO: 4063; WAN024CBE; Start 435; Stop 459
tgtggaatttaatcagacacttagt

SEQ ID NO: 371837 - DNA, 25 bp, Artificial
  probe
  misc_feature (1)..(25): SEQ ID NO: 4063; WAN024CBE; Start 25; Stop 49
ggcattcatcctagatatccatata

SEQ ID NO: 371838 - DNA, 25 bp, Artificial
  probe
  misc_feature (1)..(25): SEQ ID NO: 4063; WAN024CBE; Start 332; Stop 356
aggagaatttagaggatgatattga

SEQ ID NO: 371839 - DNA, 25 bp, Artificial
  probe
  misc_feature (1)..(25): SEQ ID NO: 4063; WAN024CBE; Start 330; Stop 354
tgaggagaatttagaggatgatatt

SEQ ID NO: 371840 - DNA, 25 bp, Artificial
  probe
  misc_feature (1)..(25): SEQ ID NO: 4063; WAN024CBE; Start 329; Stop 353
ttgaggagaatttagaggatgatat

SEQ ID NO: 371841 - DNA, 25 bp, Artificial
  probe
  misc_feature (1)..(25): SEQ ID NO: 4063; WAN024CBE; Start 328; Stop 352
attgaggagaatttagaggatgata

SEQ ID NO: 371842 - DNA, 25 bp, Artificial
  probe
  misc_feature (1)..(25): SEQ ID NO: 4063; WAN024CBE; Start 327; Stop 351
tattgaggagaatttagaggatgat

SEQ ID NO: 371843 - DNA, 25 bp, Artificial
  probe
  misc_feature (1)..(25): SEQ ID NO: 4063; WAN024CBE; Start 326; Stop 350
atattgaggagaatttagaggatga

SEQ ID NO: 371844 - DNA, 25 bp, Artificial
  probe
  misc_feature (1)..(25): SEQ ID NO: 4063; WAN024CBE; Start 331; Stop 355
gaggagaatttagaggatgatattg

SEQ ID NO: 371845 - DNA, 25 bp, Artificial
  probe
  misc_feature (1)..(25): SEQ ID NO: 4063; WAN024CBE; Start 436; Stop 460
gtggaatttaatcagacacttagtg

SEQ ID NO: 371846 - DNA, 25 bp, Artificial
  probe
  misc_feature (1)..(25): SEQ ID NO: 4063; WAN024CBE; Start 126; Stop 150
tgagttgaggtttcaagatagtgtt

SEQ ID NO: 371847 - DNA, 25 bp, Artificial
  probe
  misc_feature (1)..(25): SEQ ID NO: 4063; WAN024CBE; Start 121; Stop 145
aactgtgagttgaggtttcaagata

SEQ ID NO: 371848 - DNA, 25 bp, Artificial
  probe
  misc_feature (1)..(25): SEQ ID NO: 4063; WAN024CBE; Start 296; Stop 320
ttaataagattgtaaatgggctgat

SEQ ID NO: 371849 - DNA, 25 bp, Artificial
  probe
  misc_feature (1)..(25): SEQ ID NO: 4063; WAN024CBE; Start 295; Stop 319
tttaataagattgtaaatgggctga

SEQ ID NO: 371850 - DNA, 25 bp, Artificial
  probe
  misc_feature (1)..(25): SEQ ID NO: 4063; WAN024CBE; Start 128; Stop 152
agttgaggtttcaagatagtgttct

SEQ ID NO: 371851 - DNA, 25 bp, Artificial
  probe
  misc_feature (1)..(25): SEQ ID NO: 4063; WAN024CBE; Start 437; Stop 461
tggaatttaatcagacacttagtga

SEQ ID NO: 371852 - DNA, 25 bp, Artificial
  probe
  misc_feature (1)..(25): SEQ ID NO: 4063; WAN024CBE; Start 127; Stop 151
gagttgaggtttcaagatagtgttc

SEQ ID NO: 371853 - DNA, 25 bp, Artificial
  probe
  misc_feature (1)..(25): SEQ ID NO: 4063; WAN024CBE; Start 123; Stop 147
ctgtgagttgaggtttcaagatagt

SEQ ID NO: 371854 - DNA, 25 bp, Artificial
  probe
  misc_feature (1)..(25): SEQ ID NO: 4063; WAN024CBE; Start 122; Stop 146
actgtgagttgaggtttcaagatag

SEQ ID NO: 371855 - DNA, 25 bp, Artificial
  probe
  misc_feature (1)..(25): SEQ ID NO: 4063; WAN024CBE; Start 432; Stop 456
tgatgtggaatttaatcagacactt

SEQ ID NO: 371856 - DNA, 25 bp, Artificial
  probe
  misc_feature (1)..(25): SEQ ID NO: 4063; WAN024CBE; Start 299; Stop 323
ataagattgtaaatgggctgataca

SEQ ID NO: 371857 - DNA, 25 bp, Artificial
  probe
  misc_feature (1)..(25): SEQ ID NO: 4063; WAN024CBE; Start 125; Stop 149
gtgagttgaggtttcaagatagtgt

SEQ ID NO: 371858 - DNA, 25 bp, Artificial
  probe
  misc_feature (1)..(25): SEQ ID NO: 4063; WAN024CBE; Start 124; Stop 148
tgtgagttgaggtttcaagatagtg

SEQ ID NO: 371859 - DNA, 25 bp, Artificial
  probe
  misc_feature (1)..(25): SEQ ID NO: 4063; WAN024CBE; Start 129; Stop 153
gttgaggtttcaagatagtgttctt

SEQ ID NO: 371860 - DNA, 25 bp, Artificial
  probe
  misc_feature (1)..(25): SEQ ID NO: 4064; WAN024CJ7; Start 198; Stop 222
gctgagaccacttagagatagaatt

SEQ ID NO: 371861 - DNA, 25 bp, Artificial
  probe
  misc_feature (1)..(25): SEQ ID NO: 4064; WAN024CJ7; Start 52; Stop 76
gattatatgcgagagcttaccagta

SEQ ID NO: 371862 - DNA, 25 bp, Artificial
  probe
  misc_feature (1)..(25): SEQ ID NO: 4064; WAN024CJ7; Start 197; Stop 221
agctgagaccacttagagatagaat

SEQ ID NO: 371863 - DNA, 25 bp, Artificial
  probe
  misc_feature (1)..(25): SEQ ID NO: 4064; WAN024CJ7; Start 154; Stop 178
gcaggcgaaccatatattaagcatt

SEQ ID NO: 371864 - DNA, 25 bp, Artificial
  probe
  misc_feature (1)..(25): SEQ ID NO: 4064; WAN024CJ7; Start 53; Stop 77
attatatgcgagagcttaccagtaa

SEQ ID NO: 371865 - DNA, 25 bp, Artificial
  probe
  misc_feature (1)..(25): SEQ ID NO: 4064; WAN024CJ7; Start 50; Stop 74
ttgattatatgcgagagcttaccag

SEQ ID NO: 371866 - DNA, 25 bp, Artificial
  probe
  misc_feature (1)..(25): SEQ ID NO: 4064; WAN024CJ7; Start 196; Stop 220
gagctgagaccacttagagatagaa

SEQ ID NO: 371867 - DNA, 25 bp, Artificial
  probe
  misc_feature (1)..(25): SEQ ID NO: 4064; WAN024CJ7; Start 51; Stop 75
tgattatatgcgagagcttaccagt

SEQ ID NO: 371868 - DNA, 25 bp, Artificial
  probe
  misc_feature (1)..(25): SEQ ID NO: 4064; WAN024CJ7; Start 223; Stop 247
ttatttgttgcttggatggatggta

SEQ ID NO: 371869 - DNA, 25 bp, Artificial
  probe
  misc_feature (1)..(25): SEQ ID NO: 4064; WAN024CJ7; Start 224; Stop 248
tatttgttgcttggatggatggtag

SEQ ID NO: 371870 - DNA, 25 bp, Artificial
  probe
  misc_feature (1)..(25): SEQ ID NO: 4064; WAN024CJ7; Start 79; Stop 103
aaagggaaagatagcagaattaagc

SEQ ID NO: 371871 - DNA, 25 bp, Artificial
  probe
  misc_feature (1)..(25): SEQ ID NO: 4064; WAN024CJ7; Start 222; Stop 246
tttatttgttgcttggatggatggt

SEQ ID NO: 371872 - DNA, 25 bp, Artificial
  probe
  misc_feature (1)..(25): SEQ ID NO: 4064; WAN024CJ7; Start 155; Stop 179
caggcgaaccatatattaagcattt

SEQ ID NO: 371873 - DNA, 25 bp, Artificial
  probe
  misc_feature (1)..(25): SEQ ID NO: 4064; WAN024CJ7; Start 195; Stop 219
ggagctgagaccacttagagataga

SEQ ID NO: 371874 - DNA, 25 bp, Artificial
  probe
  misc_feature (1)..(25): SEQ ID NO: 4064; WAN024CJ7; Start 117; Stop 141
tgattatattgagttgttaagccaa

SEQ ID NO: 371875 - DNA, 25 bp, Artificial
  probe
  misc_feature (1)..(25): SEQ ID NO: 4064; WAN024CJ7; Start 116; Stop 140
atgattatattgagttgttaagcca

SEQ ID NO: 371876 - DNA, 25 bp, Artificial
  probe
  misc_feature (1)..(25): SEQ ID NO: 4064; WAN024CJ7; Start 156; Stop 180
aggcgaaccatatattaagcattta

SEQ ID NO: 371877 - DNA, 25 bp, Artificial
  probe
  misc_feature (1)..(25): SEQ ID NO: 4064; WAN024CJ7; Start 157; Stop 181
ggcgaaccatatattaagcatttag

SEQ ID NO: 371878 - DNA, 25 bp, Artificial
  probe
  misc_feature (1)..(25): SEQ ID NO: 4064; WAN024CJ7; Start 49; Stop 73
tttgattatatgcgagagcttacca

SEQ ID NO: 371879 - DNA, 25 bp, Artificial
  probe
  misc_feature (1)..(25): SEQ ID NO: 4064; WAN024CJ7; Start 54; Stop 78
ttatatgcgagagcttaccagtaaa

SEQ ID NO: 371880 - DNA, 25 bp, Artificial
  probe
  misc_feature (1)..(25): SEQ ID NO: 4064; WAN024CJ7; Start 199; Stop 223
ctgagaccacttagagatagaattt

SEQ ID NO: 371881 - DNA, 25 bp, Artificial
  probe
  misc_feature (1)..(25): SEQ ID NO: 4064; WAN024CJ7; Start 225; Stop 249
atttgttgcttggatggatggtagt

SEQ ID NO: 371882 - DNA, 25 bp, Artificial
  probe
  misc_feature (1)..(25): SEQ ID NO: 4064; WAN024CJ7; Start 227; Stop 251
ttgttgcttggatggatggtagttt

SEQ ID NO: 371883 - DNA, 25 bp, Artificial
  probe
  misc_feature (1)..(25): SEQ ID NO: 4064; WAN024CJ7; Start 226; Stop 250
tttgttgcttggatggatggtagtt

SEQ ID NO: 371884 - DNA, 25 bp, Artificial
  probe
  misc_feature (1)..(25): SEQ ID NO: 4064; WAN024CJ7; Start 296; Stop 320
aaagagagattgagcaagctaaacg

SEQ ID NO: 371885 - DNA, 25 bp, Artificial
  probe
  misc_feature (1)..(25): SEQ ID NO: 4064; WAN024CJ7; Start 337; Stop 361
aaagaaagaggtttagacaatgaaa

SEQ ID NO: 371886 - DNA, 25 bp, Artificial
  probe
  misc_feature (1)..(25): SEQ ID NO: 4064; WAN024CJ7; Start 313; Stop 337
gctaaacgtgaacttgcagatttaa

SEQ ID NO: 371887 - DNA, 25 bp, Artificial
  probe
  misc_feature (1)..(25): SEQ ID NO: 4064; WAN024CJ7; Start 158; Stop 182
gcgaaccatatattaagcatttaga

SEQ ID NO: 371888 - DNA, 25 bp, Artificial
  probe
  misc_feature (1)..(25): SEQ ID NO: 4064; WAN024CJ7; Start 312; Stop 336
agctaaacgtgaacttgcagattta

SEQ ID NO: 371889 - DNA, 25 bp, Artificial
  probe
  misc_feature (1)..(25): SEQ ID NO: 4064; WAN024CJ7; Start 153; Stop 177
cgcaggcgaaccatatattaagcat

SEQ ID NO: 371890 - DNA, 25 bp, Artificial
  probe
  misc_feature (1)..(25): SEQ ID NO: 4064; WAN024CJ7; Start 122; Stop 146
atattgagttgttaagccaacatgg

SEQ ID NO: 371891 - DNA, 25 bp, Artificial
  probe
  misc_feature (1)..(25): SEQ ID NO: 4064; WAN024CJ7; Start 314; Stop 338
ctaaacgtgaacttgcagatttaaa

SEQ ID NO: 371892 - DNA, 25 bp, Artificial
  probe
  misc_feature (1)..(25): SEQ ID NO: 4064; WAN024CJ7; Start 123; Stop 147
tattgagttgttaagccaacatgga

SEQ ID NO: 371893 - DNA, 25 bp, Artificial
  probe
  misc_feature (1)..(25): SEQ ID NO: 4065; WAN024FZ7; Start 40; Stop 64
cgtatcttcaatagcatcataagcc

SEQ ID NO: 371894 - DNA, 25 bp, Artificial
  probe
  misc_feature (1)..(25): SEQ ID NO: 4065; WAN024FZ7; Start 39; Stop 63
ccgtatcttcaatagcatcataagc

SEQ ID NO: 371895 - DNA, 25 bp, Artificial
  probe
  misc_feature (1)..(25): SEQ ID NO: 4065; WAN024FZ7; Start 36; Stop 60
caaccgtatcttcaatagcatcata

SEQ ID NO: 371896 - DNA, 25 bp, Artificial
  probe
  misc_feature (1)..(25): SEQ ID NO: 4065; WAN024FZ7; Start 43; Stop 67
atcttcaatagcatcataagccacc

SEQ ID NO: 371897 - DNA, 25 bp, Artificial
  probe
  misc_feature (1)..(25): SEQ ID NO: 4065; WAN024FZ7; Start 35; Stop 59
gcaaccgtatcttcaatagcatcat

SEQ ID NO: 371898 - DNA, 25 bp, Artificial
  probe
  misc_feature (1)..(25): SEQ ID NO: 4065; WAN024FZ7; Start 42; Stop 66
tatcttcaatagcatcataagccac

SEQ ID NO: 371899 - DNA, 25 bp, Artificial
  probe
  misc_feature (1)..(25): SEQ ID NO: 4065; WAN024FZ7; Start 41; Stop 65
gtatcttcaatagcatcataagcca

SEQ ID NO: 371900 - DNA, 25 bp, Artificial
  probe
  misc_feature (1)..(25): SEQ ID NO: 4065; WAN024FZ7; Start 38; Stop 62
accgtatcttcaatagcatcataag

SEQ ID NO: 371901 - DNA, 25 bp, Artificial
  probe
  misc_feature (1)..(25): SEQ ID NO: 4065; WAN024FZ7; Start 37; Stop 61
aaccgtatcttcaatagcatcataa

SEQ ID NO: 371902 - DNA, 25 bp, Artificial
  probe
  misc_feature (1)..(25): SEQ ID NO: 4065; WAN024FZ7; Start 45; Stop 69
cttcaatagcatcataagccaccac

SEQ ID NO: 371903 - DNA, 25 bp, Artificial
  probe
  misc_feature (1)..(25): SEQ ID NO: 4065; WAN024FZ7; Start 44; Stop 68
tcttcaatagcatcataagccacca

SEQ ID NO: 371904 - DNA, 25 bp, Artificial
  probe
  misc_feature (1)..(25): SEQ ID NO: 4065; WAN024FZ7; Start 46; Stop 70
ttcaatagcatcataagccaccaca

SEQ ID NO: 371905 - DNA, 25 bp, Artificial
  probe
  misc_feature (1)..(25): SEQ ID NO: 4065; WAN024FZ7; Start 97; Stop 121
tctcataaagccatcaaatccacta

SEQ ID NO: 371906 - DNA, 25 bp, Artificial
  probe
  misc_feature (1)..(25): SEQ ID NO: 4065; WAN024FZ7; Start 90; Stop 114
caaactctctcataaagccatcaaa

SEQ ID NO: 371907 - DNA, 25 bp, Artificial
  probe
  misc_feature (1)..(25): SEQ ID NO: 4065; WAN024FZ7; Start 89; Stop 113
acaaactctctcataaagccatcaa

SEQ ID NO: 371908 - DNA, 25 bp, Artificial
  probe
  misc_feature (1)..(25): SEQ ID NO: 4065; WAN024FZ7; Start 88; Stop 112
aacaaactctctcataaagccatca

SEQ ID NO: 371909 - DNA, 25 bp, Artificial
  probe
  misc_feature (1)..(25): SEQ ID NO: 4065; WAN024FZ7; Start 87; Stop 111
aaacaaactctctcataaagccatc

SEQ ID NO: 371910 - DNA, 25 bp, Artificial
  probe
  misc_feature (1)..(25): SEQ ID NO: 4065; WAN024FZ7; Start 86; Stop 110
gaaacaaactctctcataaagccat

SEQ ID NO: 371911 - DNA, 25 bp, Artificial
  probe
  misc_feature (1)..(25): SEQ ID NO: 4065; WAN024FZ7; Start 94; Stop 118
ctctctcataaagccatcaaatcca

SEQ ID NO: 371912 - DNA, 25 bp, Artificial
  probe
  misc_feature (1)..(25): SEQ ID NO: 4065; WAN024FZ7; Start 93; Stop 117
actctctcataaagccatcaaatcc

SEQ ID NO: 371913 - DNA, 25 bp, Artificial
  probe
  misc_feature (1)..(25): SEQ ID NO: 4065; WAN024FZ7; Start 96; Stop 120
ctctcataaagccatcaaatccact

SEQ ID NO: 371914 - DNA, 25 bp, Artificial
  probe
  misc_feature (1)..(25): SEQ ID NO: 4065; WAN024FZ7; Start 95; Stop 119
tctctcataaagccatcaaatccac

SEQ ID NO: 371915 - DNA, 25 bp, Artificial
  probe
  misc_feature (1)..(25): SEQ ID NO: 4065; WAN024FZ7; Start 92; Stop 116
aactctctcataaagccatcaaatc

SEQ ID NO: 371916 - DNA, 25 bp, Artificial
  probe
  misc_feature (1)..(25): SEQ ID NO: 4065; WAN024FZ7; Start 85; Stop 109
agaaacaaactctctcataaagcca

SEQ ID NO: 371917 - DNA, 25 bp, Artificial
  probe
  misc_feature (1)..(25): SEQ ID NO: 4065; WAN024FZ7; Start 102; Stop 126
taaagccatcaaatccactagacaa

SEQ ID NO: 371918 - DNA, 25 bp, Artificial
  probe
  misc_feature (1)..(25): SEQ ID NO: 4065; WAN024FZ7; Start 101; Stop 125
ataaagccatcaaatccactagaca

SEQ ID NO: 371919 - DNA, 25 bp, Artificial
  probe
  misc_feature (1)..(25): SEQ ID NO: 4065; WAN024FZ7; Start 100; Stop 124
cataaagccatcaaatccactagac

SEQ ID NO: 371920 - DNA, 25 bp, Artificial
  probe
  misc_feature (1)..(25): SEQ ID NO: 4065; WAN024FZ7; Start 99; Stop 123
tcataaagccatcaaatccactaga

SEQ ID NO: 371921 - DNA, 25 bp, Artificial
  probe
  misc_feature (1)..(25): SEQ ID NO: 4065; WAN024FZ7; Start 91; Stop 115
aaactctctcataaagccatcaaat

SEQ ID NO: 371922 - DNA, 25 bp, Artificial
  probe
  misc_feature (1)..(25): SEQ ID NO: 4065; WAN024FZ7; Start 98; Stop 122
ctcataaagccatcaaatccactag

SEQ ID NO: 371923 - DNA, 25 bp, Artificial
  probe
  misc_feature (1)..(25): SEQ ID NO: 4065; WAN024FZ7; Start 47; Stop 71
tcaatagcatcataagccaccacac

SEQ ID NO: 371924 - DNA, 25 bp, Artificial
  probe
  misc_feature (1)..(25): SEQ ID NO: 4065; WAN024FZ7; Start 158; Stop 182
aattcttcatcactctgcataggag

SEQ ID NO: 371925 - DNA, 25 bp, Artificial
  probe
  misc_feature (1)..(25): SEQ ID NO: 4065; WAN024FZ7; Start 107; Stop 131
ccatcaaatccactagacaagaaat

SEQ ID NO: 371926 - DNA, 25 bp, Artificial
  probe
  misc_feature (1)..(25): SEQ ID NO: 4066; WAN024C9D; Start 87; Stop 111
taatatccatcccaaggcagaatac

SEQ ID NO: 371927 - DNA, 25 bp, Artificial
  probe
  misc_feature (1)..(25): SEQ ID NO: 4066; WAN024C9D; Start 86; Stop 110
ctaatatccatcccaaggcagaata

SEQ ID NO: 371928 - DNA, 25 bp, Artificial
  probe
  misc_feature (1)..(25): SEQ ID NO: 4066; WAN024C9D; Start 76; Stop 100
tttgccaattctaatatccatccca

SEQ ID NO: 371929 - DNA, 25 bp, Artificial
  probe
  misc_feature (1)..(25): SEQ ID NO: 4066; WAN024C9D; Start 82; Stop 106
aattctaatatccatcccaaggcag

SEQ ID NO: 371930 - DNA, 25 bp, Artificial
  probe
  misc_feature (1)..(25): SEQ ID NO: 4066; WAN024C9D; Start 81; Stop 105
caattctaatatccatcccaaggca

SEQ ID NO: 371931 - DNA, 25 bp, Artificial
  probe
  misc_feature (1)..(25): SEQ ID NO: 4066; WAN024C9D; Start 78; Stop 102
tgccaattctaatatccatcccaag

SEQ ID NO: 371932 - DNA, 25 bp, Artificial
  probe
  misc_feature (1)..(25): SEQ ID NO: 4066; WAN024C9D; Start 80; Stop 104
ccaattctaatatccatcccaaggc

SEQ ID NO: 371933 - DNA, 25 bp, Artificial
  probe
  misc_feature (1)..(25): SEQ ID NO: 4066; WAN024C9D; Start 79; Stop 103
gccaattctaatatccatcccaagg

SEQ ID NO: 371934 - DNA, 25 bp, Artificial
  probe
  misc_feature (1)..(25): SEQ ID NO: 4066; WAN024C9D; Start 77; Stop 101
ttgccaattctaatatccatcccaa

SEQ ID NO: 371935 - DNA, 25 bp, Artificial
  probe
  misc_feature (1)..(25): SEQ ID NO: 4066; WAN024C9D; Start 85; Stop 109
tctaatatccatcccaaggcagaat

SEQ ID NO: 371936 - DNA, 25 bp, Artificial
  probe
  misc_feature (1)..(25): SEQ ID NO: 4066; WAN024C9D; Start 83; Stop 107
attctaatatccatcccaaggcaga

SEQ ID NO: 371937 - DNA, 25 bp, Artificial
  probe
  misc_feature (1)..(25): SEQ ID NO: 4066; WAN024C9D; Start 88; Stop 112
aatatccatcccaaggcagaatacc

SEQ ID NO: 371938 - DNA, 25 bp, Artificial
  probe
  misc_feature (1)..(25): SEQ ID NO: 4066; WAN024C9D; Start 169; Stop 193
aatacggttcagtacctagaagctc

SEQ ID NO: 371939 - DNA, 25 bp, Artificial
  probe
  misc_feature (1)..(25): SEQ ID NO: 4066; WAN024C9D; Start 43; Stop 67
tatttgaccaagtatgcagatgtga

SEQ ID NO: 371940 - DNA, 25 bp, Artificial
  probe
  misc_feature (1)..(25): SEQ ID NO: 4066; WAN024C9D; Start 42; Stop 66
atatttgaccaagtatgcagatgtg

SEQ ID NO: 371941 - DNA, 25 bp, Artificial
  probe
  misc_feature (1)..(25): SEQ ID NO: 4066; WAN024C9D; Start 166; Stop 190
ggaaatacggttcagtacctagaag

SEQ ID NO: 371942 - DNA, 25 bp, Artificial
  probe
  misc_feature (1)..(25): SEQ ID NO: 4066; WAN024C9D; Start 165; Stop 189
aggaaatacggttcagtacctagaa

SEQ ID NO: 371943 - DNA, 25 bp, Artificial
  probe
  misc_feature (1)..(25): SEQ ID NO: 4066; WAN024C9D; Start 93; Stop 117
ccatcccaaggcagaataccataag

SEQ ID NO: 371944 - DNA, 25 bp, Artificial
  probe
  misc_feature (1)..(25): SEQ ID NO: 4066; WAN024C9D; Start 167; Stop 191
gaaatacggttcagtacctagaagc

SEQ ID NO: 371945 - DNA, 25 bp, Artificial
  probe
  misc_feature (1)..(25): SEQ ID NO: 4066; WAN024C9D; Start 91; Stop 115
atccatcccaaggcagaataccata

SEQ ID NO: 371946 - DNA, 25 bp, Artificial
  probe
  misc_feature (1)..(25): SEQ ID NO: 4066; WAN024C9D; Start 90; Stop 114
tatccatcccaaggcagaataccat

SEQ ID NO: 371947 - DNA, 25 bp, Artificial
  probe
  misc_feature (1)..(25): SEQ ID NO: 4066; WAN024C9D; Start 41; Stop 65
aatatttgaccaagtatgcagatgt

SEQ ID NO: 371948 - DNA, 25 bp, Artificial
  probe
  misc_feature (1)..(25): SEQ ID NO: 4066; WAN024C9D; Start 89; Stop 113
atatccatcccaaggcagaatacca

SEQ ID NO: 371949 - DNA, 25 bp, Artificial
  probe
  misc_feature (1)..(25): SEQ ID NO: 4066; WAN024C9D; Start 164; Stop 188
caggaaatacggttcagtacctaga

SEQ ID NO: 371950 - DNA, 25 bp, Artificial
  probe
  misc_feature (1)..(25): SEQ ID NO: 4066; WAN024C9D; Start 105; Stop 129
agaataccataagcgggtctatgtc

SEQ ID NO: 371951 - DNA, 25 bp, Artificial
  probe
  misc_feature (1)..(25): SEQ ID NO: 4066; WAN024C9D; Start 151; Stop 175
tttaatgagcggacaggaaatacgg

SEQ ID NO: 371952 - DNA, 25 bp, Artificial
  probe
  misc_feature (1)..(25): SEQ ID NO: 4066; WAN024C9D; Start 44; Stop 68
atttgaccaagtatgcagatgtgac

SEQ ID NO: 371953 - DNA, 25 bp, Artificial
  probe
  misc_feature (1)..(25): SEQ ID NO: 4066; WAN024C9D; Start 40; Stop 64
gaatatttgaccaagtatgcagatg

SEQ ID NO: 371954 - DNA, 25 bp, Artificial
  probe
  misc_feature (1)..(25): SEQ ID NO: 4066; WAN024C9D; Start 163; Stop 187
acaggaaatacggttcagtacctag

SEQ ID NO: 371955 - DNA, 25 bp, Artificial
  probe
  misc_feature (1)..(25): SEQ ID NO: 4066; WAN024C9D; Start 92; Stop 116
tccatcccaaggcagaataccataa

SEQ ID NO: 371956 - DNA, 25 bp, Artificial
  probe
  misc_feature (1)..(25): SEQ ID NO: 4066; WAN024C9D; Start 104; Stop 128
cagaataccataagcgggtctatgt

SEQ ID NO: 371957 - DNA, 25 bp, Artificial
  probe
  misc_feature (1)..(25): SEQ ID NO: 4066; WAN024C9D; Start 162; Stop 186
gacaggaaatacggttcagtaccta

SEQ ID NO: 371958 - DNA, 25 bp, Artificial
  probe
  misc_feature (1)..(25): SEQ ID NO: 4066; WAN024C9D; Start 39; Stop 63
agaatatttgaccaagtatgcagat

SEQ ID NO: 371959 - DNA, 25 bp, Artificial
  probe
  misc_feature (1)..(25): SEQ ID NO: 4067; WAN024F4L; Start 156; Stop 180
atatcaatcgtttcgtggagtaaga

SEQ ID NO: 371960 - DNA, 25 bp, Artificial
  probe
  misc_feature (1)..(25): SEQ ID NO: 4067; WAN024F4L; Start 155; Stop 179
catatcaatcgtttcgtggagtaag

SEQ ID NO: 371961 - DNA, 25 bp, Artificial
  probe
  misc_feature (1)..(25): SEQ ID NO: 4067; WAN024F4L; Start 84; Stop 108
aataaatactcgctatgtcctgctc

SEQ ID NO: 371962 - DNA, 25 bp, Artificial
  probe
  misc_feature (1)..(25): SEQ ID NO: 4067; WAN024F4L; Start 83; Stop 107
taataaatactcgctatgtcctgct

SEQ ID NO: 371963 - DNA, 25 bp, Artificial
  probe
  misc_feature (1)..(25): SEQ ID NO: 4067; WAN024F4L; Start 157; Stop 181
tatcaatcgtttcgtggagtaagac

SEQ ID NO: 371964 - DNA, 25 bp, Artificial
  probe
  misc_feature (1)..(25): SEQ ID NO: 4067; WAN024F4L; Start 82; Stop 106
ttaataaatactcgctatgtcctgc

SEQ ID NO: 371965 - DNA, 25 bp, Artificial
  probe
  misc_feature (1)..(25): SEQ ID NO: 4067; WAN024F4L; Start 154; Stop 178
gcatatcaatcgtttcgtggagtaa

SEQ ID NO: 371966 - DNA, 25 bp, Artificial
  probe
  misc_feature (1)..(25): SEQ ID NO: 4067; WAN024F4L; Start 171; Stop 195
tggagtaagaccgttacatgatgaa

SEQ ID NO: 371967 - DNA, 25 bp, Artificial
  probe
  misc_feature (1)..(25): SEQ ID NO: 4067; WAN024F4L; Start 85; Stop 109
ataaatactcgctatgtcctgctcc

SEQ ID NO: 371968 - DNA, 25 bp, Artificial
  probe
  misc_feature (1)..(25): SEQ ID NO: 4067; WAN024F4L; Start 153; Stop 177
agcatatcaatcgtttcgtggagta

SEQ ID NO: 371969 - DNA, 25 bp, Artificial
  probe
  misc_feature (1)..(25): SEQ ID NO: 4067; WAN024F4L; Start 170; Stop 194
gtggagtaagaccgttacatgatga

SEQ ID NO: 371970 - DNA, 25 bp, Artificial
  probe
  misc_feature (1)..(25): SEQ ID NO: 4067; WAN024F4L; Start 178; Stop 202
agaccgttacatgatgaaattcttt

SEQ ID NO: 371971 - DNA, 25 bp, Artificial
  probe
  misc_feature (1)..(25): SEQ ID NO: 4067; WAN024F4L; Start 151; Stop 175
caagcatatcaatcgtttcgtggag

SEQ ID NO: 371972 - DNA, 25 bp, Artificial
  probe
  misc_feature (1)..(25): SEQ ID NO: 4067; WAN024F4L; Start 80; Stop 104
acttaataaatactcgctatgtcct

SEQ ID NO: 371973 - DNA, 25 bp, Artificial
  probe
  misc_feature (1)..(25): SEQ ID NO: 4067; WAN024F4L; Start 176; Stop 200
taagaccgttacatgatgaaattct

SEQ ID NO: 371974 - DNA, 25 bp, Artificial
  probe
  misc_feature (1)..(25): SEQ ID NO: 4067; WAN024F4L; Start 20; Stop 44
attgtcaatggcattctgatcctgg

SEQ ID NO: 371975 - DNA, 25 bp, Artificial
  probe
  misc_feature (1)..(25): SEQ ID NO: 4067; WAN024F4L; Start 158; Stop 182
atcaatcgtttcgtggagtaagacc

SEQ ID NO: 371976 - DNA, 25 bp, Artificial
  probe
  misc_feature (1)..(25): SEQ ID NO: 4067; WAN024F4L; Start 152; Stop 176
aagcatatcaatcgtttcgtggagt

SEQ ID NO: 371977 - DNA, 25 bp, Artificial
  probe
  misc_feature (1)..(25): SEQ ID NO: 4067; WAN024F4L; Start 150; Stop 174
tcaagcatatcaatcgtttcgtgga

SEQ ID NO: 371978 - DNA, 25 bp, Artificial
  probe
  misc_feature (1)..(25): SEQ ID NO: 4067; WAN024F4L; Start 149; Stop 173
gtcaagcatatcaatcgtttcgtgg

SEQ ID NO: 371979 - DNA, 25 bp, Artificial
  probe
  misc_feature (1)..(25): SEQ ID NO: 4067; WAN024F4L; Start 81; Stop 105
cttaataaatactcgctatgtcctg

SEQ ID NO: 371980 - DNA, 25 bp, Artificial
  probe
  misc_feature (1)..(25): SEQ ID NO: 4067; WAN024F4L; Start 172; Stop 196
ggagtaagaccgttacatgatgaaa

SEQ ID NO: 371981 - DNA, 25 bp, Artificial
  probe
  misc_feature (1)..(25): SEQ ID NO: 4067; WAN024F4L; Start 173; Stop 197
gagtaagaccgttacatgatgaaat

SEQ ID NO: 371982 - DNA, 25 bp, Artificial
  probe
  misc_feature (1)..(25): SEQ ID NO: 4067; WAN024F4L; Start 148; Stop 172
cgtcaagcatatcaatcgtttcgtg

SEQ ID NO: 371983 - DNA, 25 bp, Artificial
  probe
  misc_feature (1)..(25): SEQ ID NO: 4067; WAN024F4L; Start 174; Stop 198
agtaagaccgttacatgatgaaatt

SEQ ID NO: 371984 - DNA, 25 bp, Artificial
  probe
  misc_feature (1)..(25): SEQ ID NO: 4067; WAN024F4L; Start 169; Stop 193
cgtggagtaagaccgttacatgatg

SEQ ID NO: 371985 - DNA, 25 bp, Artificial
  probe
  misc_feature (1)..(25): SEQ ID NO: 4067; WAN024F4L; Start 175; Stop 199
gtaagaccgttacatgatgaaattc

SEQ ID NO: 371986 - DNA, 25 bp, Artificial
  probe
  misc_feature (1)..(25): SEQ ID NO: 4067; WAN024F4L; Start 168; Stop 192
tcgtggagtaagaccgttacatgat

SEQ ID NO: 371987 - DNA, 25 bp, Artificial
  probe
  misc_feature (1)..(25): SEQ ID NO: 4067; WAN024F4L; Start 32; Stop 56
attctgatcctggtcaaaggcatag

SEQ ID NO: 371988 - DNA, 25 bp, Artificial
  probe
  misc_feature (1)..(25): SEQ ID NO: 4067; WAN024F4L; Start 177; Stop 201
aagaccgttacatgatgaaattctt

SEQ ID NO: 371989 - DNA, 25 bp, Artificial
  probe
  misc_feature (1)..(25): SEQ ID NO: 4067; WAN024F4L; Start 167; Stop 191
ttcgtggagtaagaccgttacatga

SEQ ID NO: 371990 - DNA, 25 bp, Artificial
  probe
  misc_feature (1)..(25): SEQ ID NO: 4067; WAN024F4L; Start 19; Stop 43
cattgtcaatggcattctgatcctg

SEQ ID NO: 371991 - DNA, 25 bp, Artificial
  probe
  misc_feature (1)..(25): SEQ ID NO: 4067; WAN024F4L; Start 31; Stop 55
cattctgatcctggtcaaaggcata

SEQ ID NO: 371992 - DNA, 25 bp, Artificial
  probe
  misc_feature (1)..(25): SEQ ID NO: 4068; WAN024CY4; Start 19; Stop 43
cctgattatgtcaacgaattagacc

SEQ ID NO: 371993 - DNA, 25 bp, Artificial
  probe
  misc_feature (1)..(25): SEQ ID NO: 4068; WAN024CY4; Start 18; Stop 42
tcctgattatgtcaacgaattagac

SEQ ID NO: 371994 - DNA, 25 bp, Artificial
  probe
  misc_feature (1)..(25): SEQ ID NO: 4068; WAN024CY4; Start 17; Stop 41
atcctgattatgtcaacgaattaga

SEQ ID NO: 371995 - DNA, 25 bp, Artificial
  probe
  misc_feature (1)..(25): SEQ ID NO: 4068; WAN024CY4; Start 59; Stop 83
tgctagtagaatttcacaagtcaca

SEQ ID NO: 371996 - DNA, 25 bp, Artificial
  probe
  misc_feature (1)..(25): SEQ ID NO: 4068; WAN024CY4; Start 60; Stop 84
gctagtagaatttcacaagtcacaa

SEQ ID NO: 371997 - DNA, 25 bp, Artificial
  probe
  misc_feature (1)..(25): SEQ ID NO: 4068; WAN024CY4; Start 62; Stop 86
tagtagaatttcacaagtcacaagg

SEQ ID NO: 371998 - DNA, 25 bp, Artificial
  probe
  misc_feature (1)..(25): SEQ ID NO: 4068; WAN024CY4; Start 58; Stop 82
atgctagtagaatttcacaagtcac

SEQ ID NO: 371999 - DNA, 25 bp, Artificial
  probe
  misc_feature (1)..(25): SEQ ID NO: 4068; WAN024CY4; Start 16; Stop 40
aatcctgattatgtcaacgaattag

SEQ ID NO: 372000 - DNA, 25 bp, Artificial
  probe
  misc_feature (1)..(25): SEQ ID NO: 4068; WAN024CY4; Start 63; Stop 87
agtagaatttcacaagtcacaaggc

SEQ ID NO: 372001 - DNA, 25 bp, Artificial
  probe
  misc_feature (1)..(25): SEQ ID NO: 4068; WAN024CY4; Start 12; Stop 36
gtcaaatcctgattatgtcaacgaa

SEQ ID NO: 372002 - DNA, 25 bp, Artificial
  probe
  misc_feature (1)..(25): SEQ ID NO: 4068; WAN024CY4; Start 5; Stop 29
cgaaatggtcaaatcctgattatgt

SEQ ID NO: 372003 - DNA, 25 bp, Artificial
  probe
  misc_feature (1)..(25): SEQ ID NO: 4068; WAN024CY4; Start 4; Stop 28
ccgaaatggtcaaatcctgattatg

SEQ ID NO: 372004 - DNA, 25 bp, Artificial
  probe
  misc_feature (1)..(25): SEQ ID NO: 4068; WAN024CY4; Start 65; Stop 89
tagaatttcacaagtcacaaggcac

SEQ ID NO: 372005 - DNA, 25 bp, Artificial
  probe
  misc_feature (1)..(25): SEQ ID NO: 4068; WAN024CY4; Start 64; Stop 88
gtagaatttcacaagtcacaaggca

SEQ ID NO: 372006 - DNA, 25 bp, Artificial
  probe
  misc_feature (1)..(25): SEQ ID NO: 4068; WAN024CY4; Start 9; Stop 33
atggtcaaatcctgattatgtcaac

SEQ ID NO: 372007 - DNA, 25 bp, Artificial
  probe
  misc_feature (1)..(25): SEQ ID NO: 4068; WAN024CY4; Start 21; Stop 45
tgattatgtcaacgaattagaccca

SEQ ID NO: 372008 - DNA, 25 bp, Artificial
  probe
  misc_feature (1)..(25): SEQ ID NO: 4068; WAN024CY4; Start 20; Stop 44
ctgattatgtcaacgaattagaccc

SEQ ID NO: 372009 - DNA, 25 bp, Artificial
  probe
  misc_feature (1)..(25): SEQ ID NO: 4068; WAN024CY4; Start 11; Stop 35
ggtcaaatcctgattatgtcaacga

SEQ ID NO: 372010 - DNA, 25 bp, Artificial
  probe
  misc_feature (1)..(25): SEQ ID NO: 4068; WAN024CY4; Start 13; Stop 37
tcaaatcctgattatgtcaacgaat

SEQ ID NO: 372011 - DNA, 25 bp, Artificial
  probe
  misc_feature (1)..(25): SEQ ID NO: 4068; WAN024CY4; Start 22; Stop 46
gattatgtcaacgaattagacccaa

SEQ ID NO: 372012 - DNA, 25 bp, Artificial
  probe
  misc_feature (1)..(25): SEQ ID NO: 4068; WAN024CY4; Start 8; Stop 32
aatggtcaaatcctgattatgtcaa

SEQ ID NO: 372013 - DNA, 25 bp, Artificial
  probe
  misc_feature (1)..(25): SEQ ID NO: 4068; WAN024CY4; Start 7; Stop 31
aaatggtcaaatcctgattatgtca

SEQ ID NO: 372014 - DNA, 25 bp, Artificial
  probe
  misc_feature (1)..(25): SEQ ID NO: 4068; WAN024CY4; Start 10; Stop 34
tggtcaaatcctgattatgtcaacg

SEQ ID NO: 372015 - DNA, 25 bp, Artificial
  probe
  misc_feature (1)..(25): SEQ ID NO: 4068; WAN024CY4; Start 23; Stop 47
attatgtcaacgaattagacccaaa

SEQ ID NO: 372016 - DNA, 25 bp, Artificial
  probe
  misc_feature (1)..(25): SEQ ID NO: 4068; WAN024CY4; Start 6; Stop 30
gaaatggtcaaatcctgattatgtc

SEQ ID NO: 372017 - DNA, 25 bp, Artificial
  probe
  misc_feature (1)..(25): SEQ ID NO: 4068; WAN024CY4; Start 3; Stop 27
gccgaaatggtcaaatcctgattat

SEQ ID NO: 372018 - DNA, 25 bp, Artificial
  probe
  misc_feature (1)..(25): SEQ ID NO: 4068; WAN024CY4; Start 57; Stop 81
tatgctagtagaatttcacaagtca

SEQ ID NO: 372019 - DNA, 25 bp, Artificial
  probe
  misc_feature (1)..(25): SEQ ID NO: 4068; WAN024CY4; Start 14; Stop 38
caaatcctgattatgtcaacgaatt

SEQ ID NO: 372020 - DNA, 25 bp, Artificial
  probe
  misc_feature (1)..(25): SEQ ID NO: 4068; WAN024CY4; Start 61; Stop 85
ctagtagaatttcacaagtcacaag

SEQ ID NO: 372021 - DNA, 25 bp, Artificial
  probe
  misc_feature (1)..(25): SEQ ID NO: 4068; WAN024CY4; Start 51; Stop 75
cgttgatatgctagtagaatttcac

SEQ ID NO: 372022 - DNA, 25 bp, Artificial
  probe
  misc_feature (1)..(25): SEQ ID NO: 4068; WAN024CY4; Start 50; Stop 74
tcgttgatatgctagtagaatttca

SEQ ID NO: 372023 - DNA, 25 bp, Artificial
  probe
  misc_feature (1)..(25): SEQ ID NO: 4068; WAN024CY4; Start 2; Stop 26
tgccgaaatggtcaaatcctgatta

SEQ ID NO: 372024 - DNA, 25 bp, Artificial
  probe
  misc_feature (1)..(25): SEQ ID NO: 4068; WAN024CY4; Start 49; Stop 73
atcgttgatatgctagtagaatttc

SEQ ID NO: 372025 - DNA, 25 bp, Artificial
  probe
  misc_feature (1)..(25): SEQ ID NO: 4069; WAN024FMG; Start 1041; Stop 1065
tattactaccgtgagaatgttgagg

SEQ ID NO: 372026 - DNA, 25 bp, Artificial
  probe
  misc_feature (1)..(25): SEQ ID NO: 4069; WAN024FMG; Start 605; Stop 629
gtgacggaacctacattaccaataa

SEQ ID NO: 372027 - DNA, 25 bp, Artificial
  probe
  misc_feature (1)..(25): SEQ ID NO: 4069; WAN024FMG; Start 1039; Stop 1063
actattactaccgtgagaatgttga

SEQ ID NO: 372028 - DNA, 25 bp, Artificial
  probe
  misc_feature (1)..(25): SEQ ID NO: 4069; WAN024FMG; Start 1037; Stop 1061
tgactattactaccgtgagaatgtt

SEQ ID NO: 372029 - DNA, 25 bp, Artificial
  probe
  misc_feature (1)..(25): SEQ ID NO: 4069; WAN024FMG; Start 1036; Stop 1060
ttgactattactaccgtgagaatgt

SEQ ID NO: 372030 - DNA, 25 bp, Artificial
  probe
  misc_feature (1)..(25): SEQ ID NO: 4069; WAN024FMG; Start 1038; Stop 1062
gactattactaccgtgagaatgttg

SEQ ID NO: 372031 - DNA, 25 bp, Artificial
  probe
  misc_feature (1)..(25): SEQ ID NO: 4069; WAN024FMG; Start 1035; Stop 1059
gttgactattactaccgtgagaatg

SEQ ID NO: 372032 - DNA, 25 bp, Artificial
  probe
  misc_feature (1)..(25): SEQ ID NO: 4069; WAN024FMG; Start 333; Stop 357
aagtcaccgtgttcagtataatctc

SEQ ID NO: 372033 - DNA, 25 bp, Artificial
  probe
  misc_feature (1)..(25): SEQ ID NO: 4069; WAN024FMG; Start 1042; Stop 1066
attactaccgtgagaatgttgagga

SEQ ID NO: 372034 - DNA, 25 bp, Artificial
  probe
  misc_feature (1)..(25): SEQ ID NO: 4069; WAN024FMG; Start 1040; Stop 1064
ctattactaccgtgagaatgttgag

SEQ ID NO: 372035 - DNA, 25 bp, Artificial
  probe
  misc_feature (1)..(25): SEQ ID NO: 4069; WAN024FMG; Start 604; Stop 628
agtgacggaacctacattaccaata

SEQ ID NO: 372036 - DNA, 25 bp, Artificial
  probe
  misc_feature (1)..(25): SEQ ID NO: 4069; WAN024FMG; Start 501; Stop 525
agaattggcagaactaatctcagaa

SEQ ID NO: 372037 - DNA, 25 bp, Artificial
  probe
  misc_feature (1)..(25): SEQ ID NO: 4069; WAN024FMG; Start 495; Stop 519
aacctcagaattggcagaactaatc

SEQ ID NO: 372038 - DNA, 25 bp, Artificial
  probe
  misc_feature (1)..(25): SEQ ID NO: 4069; WAN024FMG; Start 1043; Stop 1067
ttactaccgtgagaatgttgaggaa

SEQ ID NO: 372039 - DNA, 25 bp, Artificial
  probe
  misc_feature (1)..(25): SEQ ID NO: 4069; WAN024FMG; Start 500; Stop 524
cagaattggcagaactaatctcaga

SEQ ID NO: 372040 - DNA, 25 bp, Artificial
  probe
  misc_feature (1)..(25): SEQ ID NO: 4069; WAN024FMG; Start 499; Stop 523
tcagaattggcagaactaatctcag

SEQ ID NO: 372041 - DNA, 25 bp, Artificial
  probe
  misc_feature (1)..(25): SEQ ID NO: 4069; WAN024FMG; Start 498; Stop 522
ctcagaattggcagaactaatctca

SEQ ID NO: 372042 - DNA, 25 bp, Artificial
  probe
  misc_feature (1)..(25): SEQ ID NO: 4069; WAN024FMG; Start 1033; Stop 1057
cagttgactattactaccgtgagaa

SEQ ID NO: 372043 - DNA, 25 bp, Artificial
  probe
  misc_feature (1)..(25): SEQ ID NO: 4069; WAN024FMG; Start 1031; Stop 1055
aacagttgactattactaccgtgag

SEQ ID NO: 372044 - DNA, 25 bp, Artificial
  probe
  misc_feature (1)..(25): SEQ ID NO: 4069; WAN024FMG; Start 953; Stop 977
aagaagaccgagttatcacaaggaa

SEQ ID NO: 372045 - DNA, 25 bp, Artificial
  probe
  misc_feature (1)..(25): SEQ ID NO: 4069; WAN024FMG; Start 1032; Stop 1056
acagttgactattactaccgtgaga

SEQ ID NO: 372046 - DNA, 25 bp, Artificial
  probe
  misc_feature (1)..(25): SEQ ID NO: 4069; WAN024FMG; Start 497; Stop 521
cctcagaattggcagaactaatctc

SEQ ID NO: 372047 - DNA, 25 bp, Artificial
  probe
  misc_feature (1)..(25): SEQ ID NO: 4069; WAN024FMG; Start 1034; Stop 1058
agttgactattactaccgtgagaat

SEQ ID NO: 372048 - DNA, 25 bp, Artificial
  probe
  misc_feature (1)..(25): SEQ ID NO: 4069; WAN024FMG; Start 752; Stop 776
atattgtaagcgaaggtagaacagt

SEQ ID NO: 372049 - DNA, 25 bp, Artificial
  probe
  misc_feature (1)..(25): SEQ ID NO: 4069; WAN024FMG; Start 603; Stop 627
aagtgacggaacctacattaccaat

SEQ ID NO: 372050 - DNA, 25 bp, Artificial
  probe
  misc_feature (1)..(25): SEQ ID NO: 4069; WAN024FMG; Start 753; Stop 777
tattgtaagcgaaggtagaacagtg

SEQ ID NO: 372051 - DNA, 25 bp, Artificial
  probe
  misc_feature (1)..(25): SEQ ID NO: 4069; WAN024FMG; Start 1091; Stop 1115
ctctactgagacgaagactataact

SEQ ID NO: 372052 - DNA, 25 bp, Artificial
  probe
  misc_feature (1)..(25): SEQ ID NO: 4069; WAN024FMG; Start 496; Stop 520
acctcagaattggcagaactaatct

SEQ ID NO: 372053 - DNA, 25 bp, Artificial
  probe
  misc_feature (1)..(25): SEQ ID NO: 4069; WAN024FMG; Start 334; Stop 358
agtcaccgtgttcagtataatctcc

SEQ ID NO: 372054 - DNA, 25 bp, Artificial
  probe
  misc_feature (1)..(25): SEQ ID NO: 4069; WAN024FMG; Start 749; Stop 773
ggaatattgtaagcgaaggtagaac

SEQ ID NO: 372055 - DNA, 25 bp, Artificial
  probe
  misc_feature (1)..(25): SEQ ID NO: 4069; WAN024FMG; Start 1030; Stop 1054
caacagttgactattactaccgtga

SEQ ID NO: 372056 - DNA, 25 bp, Artificial
  probe
  misc_feature (1)..(25): SEQ ID NO: 4069; WAN024FMG; Start 1092; Stop 1116
tctactgagacgaagactataacta

SEQ ID NO: 372057 - DNA, 25 bp, Artificial
  probe
  misc_feature (1)..(25): SEQ ID NO: 4069; WAN024FMG; Start 754; Stop 778
attgtaagcgaaggtagaacagtga

SEQ ID NO: 372058 - DNA, 25 bp, Artificial
  probe
  misc_feature (1)..(25): SEQ ID NO: 4070; WAN024C5K; Start 817; Stop 841
gaatacttcaatagcagcgaatcaa

SEQ ID NO: 372059 - DNA, 25 bp, Artificial
  probe
  misc_feature (1)..(25): SEQ ID NO: 4070; WAN024C5K; Start 815; Stop 839
gagaatacttcaatagcagcgaatc

SEQ ID NO: 372060 - DNA, 25 bp, Artificial
  probe
  misc_feature (1)..(25): SEQ ID NO: 4070; WAN024C5K; Start 816; Stop 840
agaatacttcaatagcagcgaatca

SEQ ID NO: 372061 - DNA, 25 bp, Artificial
  probe
  misc_feature (1)..(25): SEQ ID NO: 4070; WAN024C5K; Start 1073; Stop 1097
ttgttagtattgctcagagttcatt

SEQ ID NO: 372062 - DNA, 25 bp, Artificial
  probe
  misc_feature (1)..(25): SEQ ID NO: 4070; WAN024C5K; Start 1072; Stop 1096
attgttagtattgctcagagttcat

SEQ ID NO: 372063 - DNA, 25 bp, Artificial
  probe
  misc_feature (1)..(25): SEQ ID NO: 4070; WAN024C5K; Start 1071; Stop 1095
tattgttagtattgctcagagttca

SEQ ID NO: 372064 - DNA, 25 bp, Artificial
  probe
  misc_feature (1)..(25): SEQ ID NO: 4070; WAN024C5K; Start 371; Stop 395
atggtagtaagagtttgttagggac

SEQ ID NO: 372065 - DNA, 25 bp, Artificial
  probe
  misc_feature (1)..(25): SEQ ID NO: 4070; WAN024C5K; Start 369; Stop 393
ggatggtagtaagagtttgttaggg

SEQ ID NO: 372066 - DNA, 25 bp, Artificial
  probe
  misc_feature (1)..(25): SEQ ID NO: 4070; WAN024C5K; Start 734; Stop 758
atcaaggtaactatgaaccaggatc

SEQ ID NO: 372067 - DNA, 25 bp, Artificial
  probe
  misc_feature (1)..(25): SEQ ID NO: 4070; WAN024C5K; Start 732; Stop 756
ttatcaaggtaactatgaaccagga

SEQ ID NO: 372068 - DNA, 25 bp, Artificial
  probe
  misc_feature (1)..(25): SEQ ID NO: 4070; WAN024C5K; Start 370; Stop 394
gatggtagtaagagtttgttaggga

SEQ ID NO: 372069 - DNA, 25 bp, Artificial
  probe
  misc_feature (1)..(25): SEQ ID NO: 4070; WAN024C5K; Start 368; Stop 392
aggatggtagtaagagtttgttagg

SEQ ID NO: 372070 - DNA, 25 bp, Artificial
  probe
  misc_feature (1)..(25): SEQ ID NO: 4070; WAN024C5K; Start 365; Stop 389
atgaggatggtagtaagagtttgtt

SEQ ID NO: 372071 - DNA, 25 bp, Artificial
  probe
  misc_feature (1)..(25): SEQ ID NO: 4070; WAN024C5K; Start 364; Stop 388
aatgaggatggtagtaagagtttgt

SEQ ID NO: 372072 - DNA, 25 bp, Artificial
  probe
  misc_feature (1)..(25): SEQ ID NO: 4070; WAN024C5K; Start 1094; Stop 1118
catttggacaagggatttcagtaac

SEQ ID NO: 372073 - DNA, 25 bp, Artificial
  probe
  misc_feature (1)..(25): SEQ ID NO: 4070; WAN024C5K; Start 1093; Stop 1117
tcatttggacaagggatttcagtaa

SEQ ID NO: 372074 - DNA, 25 bp, Artificial
  probe
  misc_feature (1)..(25): SEQ ID NO: 4070; WAN024C5K; Start 1092; Stop 1116
ttcatttggacaagggatttcagta

SEQ ID NO: 372075 - DNA, 25 bp, Artificial
  probe
  misc_feature (1)..(25): SEQ ID NO: 4070; WAN024C5K; Start 736; Stop 760
caaggtaactatgaaccaggatcag

SEQ ID NO: 372076 - DNA, 25 bp, Artificial
  probe
  misc_feature (1)..(25): SEQ ID NO: 4070; WAN024C5K; Start 1095; Stop 1119
atttggacaagggatttcagtaact

SEQ ID NO: 372077 - DNA, 25 bp, Artificial
  probe
  misc_feature (1)..(25): SEQ ID NO: 4070; WAN024C5K; Start 1077; Stop 1101
tagtattgctcagagttcatttgga

SEQ ID NO: 372078 - DNA, 25 bp, Artificial
  probe
  misc_feature (1)..(25): SEQ ID NO: 4070; WAN024C5K; Start 771; Stop 795
catgacgttagcttcttctattgat

SEQ ID NO: 372079 - DNA, 25 bp, Artificial
  probe
  misc_feature (1)..(25): SEQ ID NO: 4070; WAN024C5K; Start 733; Stop 757
tatcaaggtaactatgaaccaggat

SEQ ID NO: 372080 - DNA, 25 bp, Artificial
  probe
  misc_feature (1)..(25): SEQ ID NO: 4070; WAN024C5K; Start 657; Stop 681
tactacccaacgacctacctttaat

SEQ ID NO: 372081 - DNA, 25 bp, Artificial
  probe
  misc_feature (1)..(25): SEQ ID NO: 4070; WAN024C5K; Start 735; Stop 759
tcaaggtaactatgaaccaggatca

SEQ ID NO: 372082 - DNA, 25 bp, Artificial
  probe
  misc_feature (1)..(25): SEQ ID NO: 4070; WAN024C5K; Start 366; Stop 390
tgaggatggtagtaagagtttgtta

SEQ ID NO: 372083 - DNA, 25 bp, Artificial
  probe
  misc_feature (1)..(25): SEQ ID NO: 4070; WAN024C5K; Start 1096; Stop 1120
tttggacaagggatttcagtaactc

SEQ ID NO: 372084 - DNA, 25 bp, Artificial
  probe
  misc_feature (1)..(25): SEQ ID NO: 4070; WAN024C5K; Start 818; Stop 842
aatacttcaatagcagcgaatcaaa

SEQ ID NO: 372085 - DNA, 25 bp, Artificial
  probe
  misc_feature (1)..(25): SEQ ID NO: 4070; WAN024C5K; Start 1076; Stop 1100
ttagtattgctcagagttcatttgg

SEQ ID NO: 372086 - DNA, 25 bp, Artificial
  probe
  misc_feature (1)..(25): SEQ ID NO: 4070; WAN024C5K; Start 1078; Stop 1102
agtattgctcagagttcatttggac

SEQ ID NO: 372087 - DNA, 25 bp, Artificial
  probe
  misc_feature (1)..(25): SEQ ID NO: 4070; WAN024C5K; Start 1100; Stop 1124
gacaagggatttcagtaactcagac

SEQ ID NO: 372088 - DNA, 25 bp, Artificial
  probe
  misc_feature (1)..(25): SEQ ID NO: 4070; WAN024C5K; Start 656; Stop 680
ctactacccaacgacctacctttaa

SEQ ID NO: 372089 - DNA, 25 bp, Artificial
  probe
  misc_feature (1)..(25): SEQ ID NO: 4070; WAN024C5K; Start 512; Stop 536
ctgtagacggcaaggatgtttatac

SEQ ID NO: 372090 - DNA, 25 bp, Artificial
  probe
  misc_feature (1)..(25): SEQ ID NO: 4070; WAN024C5K; Start 1079; Stop 1103
gtattgctcagagttcatttggaca

SEQ ID NO: 372091 - DNA, 25 bp, Artificial
  probe
  misc_feature (1)..(25): SEQ ID NO: 4071; WAN024G87; Start 1512; Stop 1536
aacaagagcgacaggatatactatg

SEQ ID NO: 372092 - DNA, 25 bp, Artificial
  probe
  misc_feature (1)..(25): SEQ ID NO: 4071; WAN024G87; Start 1648; Stop 1672
ggagtagatggagtgattacagatg

SEQ ID NO: 372093 - DNA, 25 bp, Artificial
  probe
  misc_feature (1)..(25): SEQ ID NO: 4071; WAN024G87; Start 1647; Stop 1671
aggagtagatggagtgattacagat

SEQ ID NO: 372094 - DNA, 25 bp, Artificial
  probe
  misc_feature (1)..(25): SEQ ID NO: 4071; WAN024G87; Start 187; Stop 211
gtcttagccatccttactcattctc

SEQ ID NO: 372095 - DNA, 25 bp, Artificial
  probe
  misc_feature (1)..(25): SEQ ID NO: 4071; WAN024G87; Start 1646; Stop 1670
taggagtagatggagtgattacaga

SEQ ID NO: 372096 - DNA, 25 bp, Artificial
  probe
  misc_feature (1)..(25): SEQ ID NO: 4071; WAN024G87; Start 1649; Stop 1673
gagtagatggagtgattacagatga

SEQ ID NO: 372097 - DNA, 25 bp, Artificial
  probe
  misc_feature (1)..(25): SEQ ID NO: 4071; WAN024G87; Start 1596; Stop 1620
ttatgtctggactgtcaatgattca

SEQ ID NO: 372098 - DNA, 25 bp, Artificial
  probe
  misc_feature (1)..(25): SEQ ID NO: 4071; WAN024G87; Start 185; Stop 209
atgtcttagccatccttactcattc

SEQ ID NO: 372099 - DNA, 25 bp, Artificial
  probe
  misc_feature (1)..(25): SEQ ID NO: 4071; WAN024G87; Start 191; Stop 215
tagccatccttactcattctccatt

SEQ ID NO: 372100 - DNA, 25 bp, Artificial
  probe
  misc_feature (1)..(25): SEQ ID NO: 4071; WAN024G87; Start 190; Stop 214
ttagccatccttactcattctccat

SEQ ID NO: 372101 - DNA, 25 bp, Artificial
  probe
  misc_feature (1)..(25): SEQ ID NO: 4071; WAN024G87; Start 186; Stop 210
tgtcttagccatccttactcattct

SEQ ID NO: 372102 - DNA, 25 bp, Artificial
  probe
  misc_feature (1)..(25): SEQ ID NO: 4071; WAN024G87; Start 183; Stop 207
caatgtcttagccatccttactcat

SEQ ID NO: 372103 - DNA, 25 bp, Artificial
  probe
  misc_feature (1)..(25): SEQ ID NO: 4071; WAN024G87; Start 1515; Stop 1539
aagagcgacaggatatactatggag

SEQ ID NO: 372104 - DNA, 25 bp, Artificial
  probe
  misc_feature (1)..(25): SEQ ID NO: 4071; WAN024G87; Start 176; Stop 200
cctataacaatgtcttagccatcct

SEQ ID NO: 372105 - DNA, 25 bp, Artificial
  probe
  misc_feature (1)..(25): SEQ ID NO: 4071; WAN024G87; Start 175; Stop 199
tcctataacaatgtcttagccatcc

SEQ ID NO: 372106 - DNA, 25 bp, Artificial
  probe
  misc_feature (1)..(25): SEQ ID NO: 4071; WAN024G87; Start 1645; Stop 1669
ttaggagtagatggagtgattacag

SEQ ID NO: 372107 - DNA, 25 bp, Artificial
  probe
  misc_feature (1)..(25): SEQ ID NO: 4071; WAN024G87; Start 1644; Stop 1668
cttaggagtagatggagtgattaca

SEQ ID NO: 372108 - DNA, 25 bp, Artificial
  probe
  misc_feature (1)..(25): SEQ ID NO: 4071; WAN024G87; Start 188; Stop 212
tcttagccatccttactcattctcc

SEQ ID NO: 372109 - DNA, 25 bp, Artificial
  probe
  misc_feature (1)..(25): SEQ ID NO: 4071; WAN024G87; Start 1514; Stop 1538
caagagcgacaggatatactatgga

SEQ ID NO: 372110 - DNA, 25 bp, Artificial
  probe
  misc_feature (1)..(25): SEQ ID NO: 4071; WAN024G87; Start 181; Stop 205
aacaatgtcttagccatccttactc

SEQ ID NO: 372111 - DNA, 25 bp, Artificial
  probe
  misc_feature (1)..(25): SEQ ID NO: 4071; WAN024G87; Start 180; Stop 204
taacaatgtcttagccatccttact

SEQ ID NO: 372112 - DNA, 25 bp, Artificial
  probe
  misc_feature (1)..(25): SEQ ID NO: 4071; WAN024G87; Start 194; Stop 218
ccatccttactcattctccattgat

SEQ ID NO: 372113 - DNA, 25 bp, Artificial
  probe
  misc_feature (1)..(25): SEQ ID NO: 4071; WAN024G87; Start 1513; Stop 1537
acaagagcgacaggatatactatgg

SEQ ID NO: 372114 - DNA, 25 bp, Artificial
  probe
  misc_feature (1)..(25): SEQ ID NO: 4071; WAN024G87; Start 1650; Stop 1674
agtagatggagtgattacagatgat

SEQ ID NO: 372115 - DNA, 25 bp, Artificial
  probe
  misc_feature (1)..(25): SEQ ID NO: 4071; WAN024G87; Start 189; Stop 213
cttagccatccttactcattctcca

SEQ ID NO: 372116 - DNA, 25 bp, Artificial
  probe
  misc_feature (1)..(25): SEQ ID NO: 4071; WAN024G87; Start 1636; Stop 1660
tctcttcacttaggagtagatggag

SEQ ID NO: 372117 - DNA, 25 bp, Artificial
  probe
  misc_feature (1)..(25): SEQ ID NO: 4071; WAN024G87; Start 1637; Stop 1661
ctcttcacttaggagtagatggagt

SEQ ID NO: 372118 - DNA, 25 bp, Artificial
  probe
  misc_feature (1)..(25): SEQ ID NO: 4071; WAN024G87; Start 182; Stop 206
acaatgtcttagccatccttactca

SEQ ID NO: 372119 - DNA, 25 bp, Artificial
  probe
  misc_feature (1)..(25): SEQ ID NO: 4071; WAN024G87; Start 179; Stop 203
ataacaatgtcttagccatccttac

SEQ ID NO: 372120 - DNA, 25 bp, Artificial
  probe
  misc_feature (1)..(25): SEQ ID NO: 4071; WAN024G87; Start 1643; Stop 1667
acttaggagtagatggagtgattac

SEQ ID NO: 372121 - DNA, 25 bp, Artificial
  probe
  misc_feature (1)..(25): SEQ ID NO: 4071; WAN024G87; Start 177; Stop 201
ctataacaatgtcttagccatcctt

SEQ ID NO: 372122 - DNA, 25 bp, Artificial
  probe
  misc_feature (1)..(25): SEQ ID NO: 4071; WAN024G87; Start 174; Stop 198
ttcctataacaatgtcttagccatc

SEQ ID NO: 372123 - DNA, 25 bp, Artificial
  probe
  misc_feature (1)..(25): SEQ ID NO: 4071; WAN024G87; Start 235; Stop 259
gccttgattgtaattaaccttctgg

SEQ ID NO: 372124 - DNA, 25 bp, Artificial
  probe
  misc_feature (1)..(25): SEQ ID NO: 4072; WAN024DPQ; Start 36; Stop 60
cggtttctctagtttagtatttgcc

SEQ ID NO: 372125 - DNA, 25 bp, Artificial
  probe
  misc_feature (1)..(25): SEQ ID NO: 4072; WAN024DPQ; Start 11; Stop 35
atatgggaactaagggctggtttat

SEQ ID NO: 372126 - DNA, 25 bp, Artificial
  probe
  misc_feature (1)..(25): SEQ ID NO: 4072; WAN024DPQ; Start 35; Stop 59
tcggtttctctagtttagtatttgc

SEQ ID NO: 372127 - DNA, 25 bp, Artificial
  probe
  misc_feature (1)..(25): SEQ ID NO: 4072; WAN024DPQ; Start 26; Stop 50
gctggtttatcggtttctctagttt

SEQ ID NO: 372128 - DNA, 25 bp, Artificial
  probe
  misc_feature (1)..(25): SEQ ID NO: 4072; WAN024DPQ; Start 10; Stop 34
aatatgggaactaagggctggttta

SEQ ID NO: 372129 - DNA, 25 bp, Artificial
  probe
  misc_feature (1)..(25): SEQ ID NO: 4072; WAN024DPQ; Start 37; Stop 61
ggtttctctagtttagtatttgcct

SEQ ID NO: 372130 - DNA, 25 bp, Artificial
  probe
  misc_feature (1)..(25): SEQ ID NO: 4072; WAN024DPQ; Start 29; Stop 53
ggtttatcggtttctctagtttagt

SEQ ID NO: 372131 - DNA, 25 bp, Artificial
  probe
  misc_feature (1)..(25): SEQ ID NO: 4072; WAN024DPQ; Start 28; Stop 52
tggtttatcggtttctctagtttag

SEQ ID NO: 372132 - DNA, 25 bp, Artificial
  probe
  misc_feature (1)..(25): SEQ ID NO: 4072; WAN024DPQ; Start 27; Stop 51
ctggtttatcggtttctctagttta

SEQ ID NO: 372133 - DNA, 25 bp, Artificial
  probe
  misc_feature (1)..(25): SEQ ID NO: 4072; WAN024DPQ; Start 12; Stop 36
tatgggaactaagggctggtttatc

SEQ ID NO: 372134 - DNA, 25 bp, Artificial
  probe
  misc_feature (1)..(25): SEQ ID NO: 4072; WAN024DPQ; Start 9; Stop 33
aaatatgggaactaagggctggttt

SEQ ID NO: 372135 - DNA, 25 bp, Artificial
  probe
  misc_feature (1)..(25): SEQ ID NO: 4072; WAN024DPQ; Start 25; Stop 49
ggctggtttatcggtttctctagtt

SEQ ID NO: 372136 - DNA, 25 bp, Artificial
  probe
  misc_feature (1)..(25): SEQ ID NO: 4072; WAN024DPQ; Start 20; Stop 44
ctaagggctggtttatcggtttctc

SEQ ID NO: 372137 - DNA, 25 bp, Artificial
  probe
  misc_feature (1)..(25): SEQ ID NO: 4072; WAN024DPQ; Start 38; Stop 62
gtttctctagtttagtatttgcctt

SEQ ID NO: 372138 - DNA, 25 bp, Artificial
  probe
  misc_feature (1)..(25): SEQ ID NO: 4072; WAN024DPQ; Start 18; Stop 42
aactaagggctggtttatcggtttc

SEQ ID NO: 372139 - DNA, 25 bp, Artificial
  probe
  misc_feature (1)..(25): SEQ ID NO: 4072; WAN024DPQ; Start 17; Stop 41
gaactaagggctggtttatcggttt

SEQ ID NO: 372140 - DNA, 25 bp, Artificial
  probe
  misc_feature (1)..(25): SEQ ID NO: 4072; WAN024DPQ; Start 66; Stop 90
caaagtgatcttaaatgcctttctc

SEQ ID NO: 372141 - DNA, 25 bp, Artificial
  probe
  misc_feature (1)..(25): SEQ ID NO: 4072; WAN024DPQ; Start 22; Stop 46
aagggctggtttatcggtttctcta

SEQ ID NO: 372142 - DNA, 25 bp, Artificial
  probe
  misc_feature (1)..(25): SEQ ID NO: 4072; WAN024DPQ; Start 21; Stop 45
taagggctggtttatcggtttctct

SEQ ID NO: 372143 - DNA, 25 bp, Artificial
  probe
  misc_feature (1)..(25): SEQ ID NO: 4072; WAN024DPQ; Start 34; Stop 58
atcggtttctctagtttagtatttg

SEQ ID NO: 372144 - DNA, 25 bp, Artificial
  probe
  misc_feature (1)..(25): SEQ ID NO: 4072; WAN024DPQ; Start 65; Stop 89
gcaaagtgatcttaaatgcctttct

SEQ ID NO: 372145 - DNA, 25 bp, Artificial
  probe
  misc_feature (1)..(25): SEQ ID NO: 4072; WAN024DPQ; Start 5; Stop 29
ctgaaaatatgggaactaagggctg

SEQ ID NO: 372146 - DNA, 25 bp, Artificial
  probe
  misc_feature (1)..(25): SEQ ID NO: 4072; WAN024DPQ; Start 19; Stop 43
actaagggctggtttatcggtttct

SEQ ID NO: 372147 - DNA, 25 bp, Artificial
  probe
  misc_feature (1)..(25): SEQ ID NO: 4072; WAN024DPQ; Start 39; Stop 63
tttctctagtttagtatttgccttt

SEQ ID NO: 372148 - DNA, 25 bp, Artificial
  probe
  misc_feature (1)..(25): SEQ ID NO: 4072; WAN024DPQ; Start 42; Stop 66
ctctagtttagtatttgccttttgc

SEQ ID NO: 372149 - DNA, 25 bp, Artificial
  probe
  misc_feature (1)..(25): SEQ ID NO: 4072; WAN024DPQ; Start 30; Stop 54
gtttatcggtttctctagtttagta

SEQ ID NO: 372150 - DNA, 25 bp, Artificial
  probe
  misc_feature (1)..(25): SEQ ID NO: 4072; WAN024DPQ; Start 23; Stop 47
agggctggtttatcggtttctctag

SEQ ID NO: 372151 - DNA, 25 bp, Artificial
  probe
  misc_feature (1)..(25): SEQ ID NO: 4072; WAN024DPQ; Start 8; Stop 32
aaaatatgggaactaagggctggtt

SEQ ID NO: 372152 - DNA, 25 bp, Artificial
  probe
  misc_feature (1)..(25): SEQ ID NO: 4072; WAN024DPQ; Start 7; Stop 31
gaaaatatgggaactaagggctggt

SEQ ID NO: 372153 - DNA, 25 bp, Artificial
  probe
  misc_feature (1)..(25): SEQ ID NO: 4072; WAN024DPQ; Start 6; Stop 30
tgaaaatatgggaactaagggctgg

SEQ ID NO: 372154 - DNA, 25 bp, Artificial
  probe
  misc_feature (1)..(25): SEQ ID NO: 4072; WAN024DPQ; Start 24; Stop 48
gggctggtttatcggtttctctagt

SEQ ID NO: 372155 - DNA, 25 bp, Artificial
  probe
  misc_feature (1)..(25): SEQ ID NO: 4072; WAN024DPQ; Start 64; Stop 88
tgcaaagtgatcttaaatgcctttc

SEQ ID NO: 372156 - DNA, 25 bp, Artificial
  probe
  misc_feature (1)..(25): SEQ ID NO: 4072; WAN024DPQ; Start 1; Stop 25
gtgcctgaaaatatgggaactaagg

SEQ ID NO: 372157 - DNA, 25 bp, Artificial
  probe
  misc_feature (1)..(25): SEQ ID NO: 4073; WAN024BEL; Start 3; Stop 27
gcctggcaataagaataatactctt

SEQ ID NO: 372158 - DNA, 25 bp, Artificial
  probe
  misc_feature (1)..(25): SEQ ID NO: 4073; WAN024BEL; Start 141; Stop 165
tagcttcctagtttggtctttgatt

SEQ ID NO: 372159 - DNA, 25 bp, Artificial
  probe
  misc_feature (1)..(25): SEQ ID NO: 4073; WAN024BEL; Start 142; Stop 166
agcttcctagtttggtctttgattt

SEQ ID NO: 372160 - DNA, 25 bp, Artificial
  probe
  misc_feature (1)..(25): SEQ ID NO: 4073; WAN024BEL; Start 5; Stop 29
ctggcaataagaataatactcttcg

SEQ ID NO: 372161 - DNA, 25 bp, Artificial
  probe
  misc_feature (1)..(25): SEQ ID NO: 4073; WAN024BEL; Start 4; Stop 28
cctggcaataagaataatactcttc

SEQ ID NO: 372162 - DNA, 25 bp, Artificial
  probe
  misc_feature (1)..(25): SEQ ID NO: 4073; WAN024BEL; Start 6; Stop 30
tggcaataagaataatactcttcga

SEQ ID NO: 372163 - DNA, 25 bp, Artificial
  probe
  misc_feature (1)..(25): SEQ ID NO: 4073; WAN024BEL; Start 140; Stop 164
ctagcttcctagtttggtctttgat

SEQ ID NO: 372164 - DNA, 25 bp, Artificial
  probe
  misc_feature (1)..(25): SEQ ID NO: 4073; WAN024BEL; Start 2; Stop 26
tgcctggcaataagaataatactct

SEQ ID NO: 372165 - DNA, 25 bp, Artificial
  probe
  misc_feature (1)..(25): SEQ ID NO: 4073; WAN024BEL; Start 1; Stop 25
gtgcctggcaataagaataatactc

SEQ ID NO: 372166 - DNA, 25 bp, Artificial
  probe
  misc_feature (1)..(25): SEQ ID NO: 4073; WAN024BEL; Start 143; Stop 167
gcttcctagtttggtctttgatttt

SEQ ID NO: 372167 - DNA, 25 bp, Artificial
  probe
  misc_feature (1)..(25): SEQ ID NO: 4073; WAN024BEL; Start 151; Stop 175
gtttggtctttgattttcattgagt

SEQ ID NO: 372168 - DNA, 25 bp, Artificial
  probe
  misc_feature (1)..(25): SEQ ID NO: 4073; WAN024BEL; Start 150; Stop 174
agtttggtctttgattttcattgag

SEQ ID NO: 372169 - DNA, 25 bp, Artificial
  probe
  misc_feature (1)..(25): SEQ ID NO: 4073; WAN024BEL; Start 145; Stop 169
ttcctagtttggtctttgattttca

SEQ ID NO: 372170 - DNA, 25 bp, Artificial
  probe
  misc_feature (1)..(25): SEQ ID NO: 4073; WAN024BEL; Start 146; Stop 170
tcctagtttggtctttgattttcat

SEQ ID NO: 372171 - DNA, 25 bp, Artificial
  probe
  misc_feature (1)..(25): SEQ ID NO: 4073; WAN024BEL; Start 165; Stop 189
tttcattgagtataagaagtccttt

SEQ ID NO: 372172 - DNA, 25 bp, Artificial
  probe
  misc_feature (1)..(25): SEQ ID NO: 4073; WAN024BEL; Start 170; Stop 194
ttgagtataagaagtccttttcctt

SEQ ID NO: 372173 - DNA, 25 bp, Artificial
  probe
  misc_feature (1)..(25): SEQ ID NO: 4073; WAN024BEL; Start 208; Stop 232
ttttacttgcttttctgctgcttcc

SEQ ID NO: 372174 - DNA, 25 bp, Artificial
  probe
  misc_feature (1)..(25): SEQ ID NO: 4073; WAN024BEL; Start 147; Stop 171
cctagtttggtctttgattttcatt

SEQ ID NO: 372175 - DNA, 25 bp, Artificial
  probe
  misc_feature (1)..(25): SEQ ID NO: 4073; WAN024BEL; Start 169; Stop 193
attgagtataagaagtccttttcct

SEQ ID NO: 372176 - DNA, 25 bp, Artificial
  probe
  misc_feature (1)..(25): SEQ ID NO: 4073; WAN024BEL; Start 168; Stop 192
cattgagtataagaagtccttttcc

SEQ ID NO: 372177 - DNA, 25 bp, Artificial
  probe
  misc_feature (1)..(25): SEQ ID NO: 4073; WAN024BEL; Start 217; Stop 241
cttttctgctgcttcctcatttgtc

SEQ ID NO: 372178 - DNA, 25 bp, Artificial
  probe
  misc_feature (1)..(25): SEQ ID NO: 4073; WAN024BEL; Start 152; Stop 176
tttggtctttgattttcattgagta

SEQ ID NO: 372179 - DNA, 25 bp, Artificial
  probe
  misc_feature (1)..(25): SEQ ID NO: 4073; WAN024BEL; Start 149; Stop 173
tagtttggtctttgattttcattga

SEQ ID NO: 372180 - DNA, 25 bp, Artificial
  probe
  misc_feature (1)..(25): SEQ ID NO: 4073; WAN024BEL; Start 229; Stop 253
ttcctcatttgtcctgaagcctttt

SEQ ID NO: 372181 - DNA, 25 bp, Artificial
  probe
  misc_feature (1)..(25): SEQ ID NO: 4073; WAN024BEL; Start 153; Stop 177
ttggtctttgattttcattgagtat

SEQ ID NO: 372182 - DNA, 25 bp, Artificial
  probe
  misc_feature (1)..(25): SEQ ID NO: 4073; WAN024BEL; Start 219; Stop 243
tttctgctgcttcctcatttgtcct

SEQ ID NO: 372183 - DNA, 25 bp, Artificial
  probe
  misc_feature (1)..(25): SEQ ID NO: 4073; WAN024BEL; Start 209; Stop 233
tttacttgcttttctgctgcttcct

SEQ ID NO: 372184 - DNA, 25 bp, Artificial
  probe
  misc_feature (1)..(25): SEQ ID NO: 4073; WAN024BEL; Start 148; Stop 172
ctagtttggtctttgattttcattg

SEQ ID NO: 372185 - DNA, 25 bp, Artificial
  probe
  misc_feature (1)..(25): SEQ ID NO: 4073; WAN024BEL; Start 53; Stop 77
cttcatccacaacctcaaaacagtg

SEQ ID NO: 372186 - DNA, 25 bp, Artificial
  probe
  misc_feature (1)..(25): SEQ ID NO: 4073; WAN024BEL; Start 228; Stop 252
cttcctcatttgtcctgaagccttt

SEQ ID NO: 372187 - DNA, 25 bp, Artificial
  probe
  misc_feature (1)..(25): SEQ ID NO: 4073; WAN024BEL; Start 167; Stop 191
tcattgagtataagaagtccttttc

SEQ ID NO: 372188 - DNA, 25 bp, Artificial
  probe
  misc_feature (1)..(25): SEQ ID NO: 4073; WAN024BEL; Start 210; Stop 234
ttacttgcttttctgctgcttcctc

SEQ ID NO: 372189 - DNA, 25 bp, Artificial
  probe
  misc_feature (1)..(25): SEQ ID NO: 4073; WAN024BEL; Start 214; Stop 238
ttgcttttctgctgcttcctcattt

SEQ ID NO: 372190 - DNA, 25 bp, Artificial
  probe
  misc_feature (1)..(25): SEQ ID NO: 4074; WAN024G7F; Start 64; Stop 88
aacctttctgtcttagtttgtcttt

SEQ ID NO: 372191 - DNA, 25 bp, Artificial
  probe
  misc_feature (1)..(25): SEQ ID NO: 4074; WAN024G7F; Start 65; Stop 89
acctttctgtcttagtttgtcttta

SEQ ID NO: 372192 - DNA, 25 bp, Artificial
  probe
  misc_feature (1)..(25): SEQ ID NO: 4074; WAN024G7F; Start 137; Stop 161
cttaccactgctttccatgtatctg

SEQ ID NO: 372193 - DNA, 25 bp, Artificial
  probe
  misc_feature (1)..(25): SEQ ID NO: 4074; WAN024G7F; Start 136; Stop 160
tcttaccactgctttccatgtatct

SEQ ID NO: 372194 - DNA, 25 bp, Artificial
  probe
  misc_feature (1)..(25): SEQ ID NO: 4074; WAN024G7F; Start 135; Stop 159
gtcttaccactgctttccatgtatc

SEQ ID NO: 372195 - DNA, 25 bp, Artificial
  probe
  misc_feature (1)..(25): SEQ ID NO: 4074; WAN024G7F; Start 127; Stop 151
tttgataggtcttaccactgctttc

SEQ ID NO: 372196 - DNA, 25 bp, Artificial
  probe
  misc_feature (1)..(25): SEQ ID NO: 4074; WAN024G7F; Start 221; Stop 245
ttcttctttgcttaaccttacattt

SEQ ID NO: 372197 - DNA, 25 bp, Artificial
  probe
  misc_feature (1)..(25): SEQ ID NO: 4074; WAN024G7F; Start 79; Stop 103
gtttgtctttatcttcttcatacca

SEQ ID NO: 372198 - DNA, 25 bp, Artificial
  probe
  misc_feature (1)..(25): SEQ ID NO: 4074; WAN024G7F; Start 220; Stop 244
attcttctttgcttaaccttacatt

SEQ ID NO: 372199 - DNA, 25 bp, Artificial
  probe
  misc_feature (1)..(25): SEQ ID NO: 4074; WAN024G7F; Start 66; Stop 90
cctttctgtcttagtttgtctttat

SEQ ID NO: 372200 - DNA, 25 bp, Artificial
  probe
  misc_feature (1)..(25): SEQ ID NO: 4074; WAN024G7F; Start 78; Stop 102
agtttgtctttatcttcttcatacc

SEQ ID NO: 372201 - DNA, 25 bp, Artificial
  probe
  misc_feature (1)..(25): SEQ ID NO: 4074; WAN024G7F; Start 130; Stop 154
gataggtcttaccactgctttccat

SEQ ID NO: 372202 - DNA, 25 bp, Artificial
  probe
  misc_feature (1)..(25): SEQ ID NO: 4074; WAN024G7F; Start 70; Stop 94
tctgtcttagtttgtctttatcttc

SEQ ID NO: 372203 - DNA, 25 bp, Artificial
  probe
  misc_feature (1)..(25): SEQ ID NO: 4074; WAN024G7F; Start 128; Stop 152
ttgataggtcttaccactgctttcc

SEQ ID NO: 372204 - DNA, 25 bp, Artificial
  probe
  misc_feature (1)..(25): SEQ ID NO: 4074; WAN024G7F; Start 63; Stop 87
aaacctttctgtcttagtttgtctt

SEQ ID NO: 372205 - DNA, 25 bp, Artificial
  probe
  misc_feature (1)..(25): SEQ ID NO: 4074; WAN024G7F; Start 172; Stop 196
ttatcattatatctgtgtgtgagtt

SEQ ID NO: 372206 - DNA, 25 bp, Artificial
  probe
  misc_feature (1)..(25): SEQ ID NO: 4074; WAN024G7F; Start 71; Stop 95
ctgtcttagtttgtctttatcttct

SEQ ID NO: 372207 - DNA, 25 bp, Artificial
  probe
  misc_feature (1)..(25): SEQ ID NO: 4074; WAN024G7F; Start 219; Stop 243
tattcttctttgcttaaccttacat

SEQ ID NO: 372208 - DNA, 25 bp, Artificial
  probe
  misc_feature (1)..(25): SEQ ID NO: 4074; WAN024G7F; Start 218; Stop 242
atattcttctttgcttaaccttaca

SEQ ID NO: 372209 - DNA, 25 bp, Artificial
  probe
  misc_feature (1)..(25): SEQ ID NO: 4074; WAN024G7F; Start 29; Stop 53
agattctcctacatcataattcatt

SEQ ID NO: 372210 - DNA, 25 bp, Artificial
  probe
  misc_feature (1)..(25): SEQ ID NO: 4074; WAN024G7F; Start 28; Stop 52
aagattctcctacatcataattcat

SEQ ID NO: 372211 - DNA, 25 bp, Artificial
  probe
  misc_feature (1)..(25): SEQ ID NO: 4074; WAN024G7F; Start 117; Stop 141
acatagtggttttgataggtcttac

SEQ ID NO: 372212 - DNA, 25 bp, Artificial
  probe
  misc_feature (1)..(25): SEQ ID NO: 4074; WAN024G7F; Start 131; Stop 155
ataggtcttaccactgctttccatg

SEQ ID NO: 372213 - DNA, 25 bp, Artificial
  probe
  misc_feature (1)..(25): SEQ ID NO: 4074; WAN024G7F; Start 62; Stop 86
taaacctttctgtcttagtttgtct

SEQ ID NO: 372214 - DNA, 25 bp, Artificial
  probe
  misc_feature (1)..(25): SEQ ID NO: 4074; WAN024G7F; Start 82; Stop 106
tgtctttatcttcttcataccattt

SEQ ID NO: 372215 - DNA, 25 bp, Artificial
  probe
  misc_feature (1)..(25): SEQ ID NO: 4074; WAN024G7F; Start 81; Stop 105
ttgtctttatcttcttcataccatt

SEQ ID NO: 372216 - DNA, 25 bp, Artificial
  probe
  misc_feature (1)..(25): SEQ ID NO: 4074; WAN024G7F; Start 80; Stop 104
tttgtctttatcttcttcataccat

SEQ ID NO: 372217 - DNA, 25 bp, Artificial
  probe
  misc_feature (1)..(25): SEQ ID NO: 4074; WAN024G7F; Start 138; Stop 162
ttaccactgctttccatgtatctgg

SEQ ID NO: 372218 - DNA, 25 bp, Artificial
  probe
  misc_feature (1)..(25): SEQ ID NO: 4074; WAN024G7F; Start 134; Stop 158
ggtcttaccactgctttccatgtat

SEQ ID NO: 372219 - DNA, 25 bp, Artificial
  probe
  misc_feature (1)..(25): SEQ ID NO: 4074; WAN024G7F; Start 72; Stop 96
tgtcttagtttgtctttatcttctt

SEQ ID NO: 372220 - DNA, 25 bp, Artificial
  probe
  misc_feature (1)..(25): SEQ ID NO: 4074; WAN024G7F; Start 69; Stop 93
ttctgtcttagtttgtctttatctt

SEQ ID NO: 372221 - DNA, 25 bp, Artificial
  probe
  misc_feature (1)..(25): SEQ ID NO: 4074; WAN024G7F; Start 68; Stop 92
tttctgtcttagtttgtctttatct

SEQ ID NO: 372222 - DNA, 25 bp, Artificial
  probe
  misc_feature (1)..(25): SEQ ID NO: 4074; WAN024G7F; Start 112; Stop 136
ttgtcacatagtggttttgataggt

SEQ ID NO: 372223 - DNA, 25 bp, Artificial
  probe
  misc_feature (1)..(25): SEQ ID NO: 4075; WAN024BFA; Start 78; Stop 102
acgtcagctctatctgcaatctcaa

SEQ ID NO: 372224 - DNA, 25 bp, Artificial
  probe
  misc_feature (1)..(25): SEQ ID NO: 4075; WAN024BFA; Start 79; Stop 103
cgtcagctctatctgcaatctcaaa

SEQ ID NO: 372225 - DNA, 25 bp, Artificial
  probe
  misc_feature (1)..(25): SEQ ID NO: 4075; WAN024BFA; Start 77; Stop 101
cacgtcagctctatctgcaatctca

SEQ ID NO: 372226 - DNA, 25 bp, Artificial
  probe
  misc_feature (1)..(25): SEQ ID NO: 4075; WAN024BFA; Start 81; Stop 105
tcagctctatctgcaatctcaaaac

SEQ ID NO: 372227 - DNA, 25 bp, Artificial
  probe
  misc_feature (1)..(25): SEQ ID NO: 4075; WAN024BFA; Start 80; Stop 104
gtcagctctatctgcaatctcaaaa

SEQ ID NO: 372228 - DNA, 25 bp, Artificial
  probe
  misc_feature (1)..(25): SEQ ID NO: 4075; WAN024BFA; Start 82; Stop 106
cagctctatctgcaatctcaaaaca

SEQ ID NO: 372229 - DNA, 25 bp, Artificial
  probe
  misc_feature (1)..(25): SEQ ID NO: 4075; WAN024BFA; Start 26; Stop 50
tgacggattttcatgatttcaaatt

SEQ ID NO: 372230 - DNA, 25 bp, Artificial
  probe
  misc_feature (1)..(25): SEQ ID NO: 4075; WAN024BFA; Start 27; Stop 51
gacggattttcatgatttcaaattt

SEQ ID NO: 372231 - DNA, 25 bp, Artificial
  probe
  misc_feature (1)..(25): SEQ ID NO: 4075; WAN024BFA; Start 23; Stop 47
gtttgacggattttcatgatttcaa

SEQ ID NO: 372232 - DNA, 25 bp, Artificial
  probe
  misc_feature (1)..(25): SEQ ID NO: 4075; WAN024BFA; Start 22; Stop 46
cgtttgacggattttcatgatttca

SEQ ID NO: 372233 - DNA, 25 bp, Artificial
  probe
  misc_feature (1)..(25): SEQ ID NO: 4075; WAN024BFA; Start 25; Stop 49
ttgacggattttcatgatttcaaat

SEQ ID NO: 372234 - DNA, 25 bp, Artificial
  probe
  misc_feature (1)..(25): SEQ ID NO: 4075; WAN024BFA; Start 28; Stop 52
acggattttcatgatttcaaattta

SEQ ID NO: 372235 - DNA, 25 bp, Artificial
  probe
  misc_feature (1)..(25): SEQ ID NO: 4075; WAN024BFA; Start 5; Stop 29
gagacaaaacaaccacccgtttgac

SEQ ID NO: 372236 - DNA, 25 bp, Artificial
  probe
  misc_feature (1)..(25): SEQ ID NO: 4075; WAN024BFA; Start 29; Stop 53
cggattttcatgatttcaaatttat

SEQ ID NO: 372237 - DNA, 25 bp, Artificial
  probe
  misc_feature (1)..(25): SEQ ID NO: 4075; WAN024BFA; Start 24; Stop 48
tttgacggattttcatgatttcaaa

SEQ ID NO: 372238 - DNA, 25 bp, Artificial
  probe
  misc_feature (1)..(25): SEQ ID NO: 4076; WAN024EZE; Start 124; Stop 148
gtaaccctacatcttgaatctaagt

SEQ ID NO: 372239 - DNA, 25 bp, Artificial
  probe
  misc_feature (1)..(25): SEQ ID NO: 4076; WAN024EZE; Start 123; Stop 147
agtaaccctacatcttgaatctaag

SEQ ID NO: 372240 - DNA, 25 bp, Artificial
  probe
  misc_feature (1)..(25): SEQ ID NO: 4076; WAN024EZE; Start 98; Stop 122
taaagtattgtcccaaggaaagaaa

SEQ ID NO: 372241 - DNA, 25 bp, Artificial
  probe
  misc_feature (1)..(25): SEQ ID NO: 4076; WAN024EZE; Start 97; Stop 121
ttaaagtattgtcccaaggaaagaa

SEQ ID NO: 372242 - DNA, 25 bp, Artificial
  probe
  misc_feature (1)..(25): SEQ ID NO: 4076; WAN024EZE; Start 122; Stop 146
aagtaaccctacatcttgaatctaa

SEQ ID NO: 372243 - DNA, 25 bp, Artificial
  probe
  misc_feature (1)..(25): SEQ ID NO: 4076; WAN024EZE; Start 121; Stop 145
aaagtaaccctacatcttgaatcta

SEQ ID NO: 372244 - DNA, 25 bp, Artificial
  probe
  misc_feature (1)..(25): SEQ ID NO: 4076; WAN024EZE; Start 75; Stop 99
ccatccagacaagattgaggtttta

SEQ ID NO: 372245 - DNA, 25 bp, Artificial
  probe
  misc_feature (1)..(25): SEQ ID NO: 4076; WAN024EZE; Start 76; Stop 100
catccagacaagattgaggttttaa

SEQ ID NO: 372246 - DNA, 25 bp, Artificial
  probe
  misc_feature (1)..(25): SEQ ID NO: 4076; WAN024EZE; Start 96; Stop 120
tttaaagtattgtcccaaggaaaga

SEQ ID NO: 372247 - DNA, 25 bp, Artificial
  probe
  misc_feature (1)..(25): SEQ ID NO: 4076; WAN024EZE; Start 125; Stop 149
taaccctacatcttgaatctaagta

SEQ ID NO: 372248 - DNA, 25 bp, Artificial
  probe
  misc_feature (1)..(25): SEQ ID NO: 4076; WAN024EZE; Start 126; Stop 150
aaccctacatcttgaatctaagtag

SEQ ID NO: 372249 - DNA, 25 bp, Artificial
  probe
  misc_feature (1)..(25): SEQ ID NO: 4076; WAN024EZE; Start 110; Stop 134
ccaaggaaagaaaagtaaccctaca

SEQ ID NO: 372250 - DNA, 25 bp, Artificial
  probe
  misc_feature (1)..(25): SEQ ID NO: 4076; WAN024EZE; Start 113; Stop 137
aggaaagaaaagtaaccctacatct

SEQ ID NO: 372251 - DNA, 25 bp, Artificial
  probe
  misc_feature (1)..(25): SEQ ID NO: 4076; WAN024EZE; Start 120; Stop 144
aaaagtaaccctacatcttgaatct

SEQ ID NO: 372252 - DNA, 25 bp, Artificial
  probe
  misc_feature (1)..(25): SEQ ID NO: 4076; WAN024EZE; Start 104; Stop 128
attgtcccaaggaaagaaaagtaac

SEQ ID NO: 372253 - DNA, 25 bp, Artificial
  probe
  misc_feature (1)..(25): SEQ ID NO: 4076; WAN024EZE; Start 101; Stop 125
agtattgtcccaaggaaagaaaagt

SEQ ID NO: 372254 - DNA, 25 bp, Artificial
  probe
  misc_feature (1)..(25): SEQ ID NO: 4076; WAN024EZE; Start 118; Stop 142
agaaaagtaaccctacatcttgaat

SEQ ID NO: 372255 - DNA, 25 bp, Artificial
  probe
  misc_feature (1)..(25): SEQ ID NO: 4076; WAN024EZE; Start 119; Stop 143
gaaaagtaaccctacatcttgaatc

SEQ ID NO: 372256 - DNA, 25 bp, Artificial
  probe
  misc_feature (1)..(25): SEQ ID NO: 4076; WAN024EZE; Start 111; Stop 135
caaggaaagaaaagtaaccctacat

SEQ ID NO: 372257 - DNA, 25 bp, Artificial
  probe
  misc_feature (1)..(25): SEQ ID NO: 4076; WAN024EZE; Start 100; Stop 124
aagtattgtcccaaggaaagaaaag

SEQ ID NO: 372258 - DNA, 25 bp, Artificial
  probe
  misc_feature (1)..(25): SEQ ID NO: 4076; WAN024EZE; Start 79; Stop 103
ccagacaagattgaggttttaaagt

SEQ ID NO: 372259 - DNA, 25 bp, Artificial
  probe
  misc_feature (1)..(25): SEQ ID NO: 4076; WAN024EZE; Start 109; Stop 133
cccaaggaaagaaaagtaaccctac

SEQ ID NO: 372260 - DNA, 25 bp, Artificial
  probe
  misc_feature (1)..(25): SEQ ID NO: 4076; WAN024EZE; Start 78; Stop 102
tccagacaagattgaggttttaaag

SEQ ID NO: 372261 - DNA, 25 bp, Artificial
  probe
  misc_feature (1)..(25): SEQ ID NO: 4076; WAN024EZE; Start 112; Stop 136
aaggaaagaaaagtaaccctacatc

SEQ ID NO: 372262 - DNA, 25 bp, Artificial
  probe
  misc_feature (1)..(25): SEQ ID NO: 4076; WAN024EZE; Start 99; Stop 123
aaagtattgtcccaaggaaagaaaa

SEQ ID NO: 372263 - DNA, 25 bp, Artificial
  probe
  misc_feature (1)..(25): SEQ ID NO: 4076; WAN024EZE; Start 102; Stop 126
gtattgtcccaaggaaagaaaagta

SEQ ID NO: 372264 - DNA, 25 bp, Artificial
  probe
  misc_feature (1)..(25): SEQ ID NO: 4076; WAN024EZE; Start 91; Stop 115
gaggttttaaagtattgtcccaagg

SEQ ID NO: 372265 - DNA, 25 bp, Artificial
  probe
  misc_feature (1)..(25): SEQ ID NO: 4076; WAN024EZE; Start 108; Stop 132
tcccaaggaaagaaaagtaacccta

SEQ ID NO: 372266 - DNA, 25 bp, Artificial
  probe
  misc_feature (1)..(25): SEQ ID NO: 4076; WAN024EZE; Start 105; Stop 129
ttgtcccaaggaaagaaaagtaacc

SEQ ID NO: 372267 - DNA, 25 bp, Artificial
  probe
  misc_feature (1)..(25): SEQ ID NO: 4076; WAN024EZE; Start 88; Stop 112
attgaggttttaaagtattgtccca

SEQ ID NO: 372268 - DNA, 25 bp, Artificial
  probe
  misc_feature (1)..(25): SEQ ID NO: 4076; WAN024EZE; Start 90; Stop 114
tgaggttttaaagtattgtcccaag

SEQ ID NO: 372269 - DNA, 25 bp, Artificial
  probe
  misc_feature (1)..(25): SEQ ID NO: 4076; WAN024EZE; Start 77; Stop 101
atccagacaagattgaggttttaaa

SEQ ID NO: 372270 - DNA, 25 bp, Artificial
  probe
  misc_feature (1)..(25): SEQ ID NO: 4076; WAN024EZE; Start 89; Stop 113
ttgaggttttaaagtattgtcccaa

SEQ ID NO: 372271 - DNA, 25 bp, Artificial
  probe
  misc_feature (1)..(25): SEQ ID NO: 4077; WAN024D3U; Start 129; Stop 153
catcattggcatattcatcaagtcc

SEQ ID NO: 372272 - DNA, 25 bp, Artificial
  probe
  misc_feature (1)..(25): SEQ ID NO: 4077; WAN024D3U; Start 128; Stop 152
gcatcattggcatattcatcaagtc

SEQ ID NO: 372273 - DNA, 25 bp, Artificial
  probe
  misc_feature (1)..(25): SEQ ID NO: 4077; WAN024D3U; Start 132; Stop 156
cattggcatattcatcaagtccgat

SEQ ID NO: 372274 - DNA, 25 bp, Artificial
  probe
  misc_feature (1)..(25): SEQ ID NO: 4077; WAN024D3U; Start 130; Stop 154
atcattggcatattcatcaagtccg

SEQ ID NO: 372275 - DNA, 25 bp, Artificial
  probe
  misc_feature (1)..(25): SEQ ID NO: 4077; WAN024D3U; Start 126; Stop 150
tcgcatcattggcatattcatcaag

SEQ ID NO: 372276 - DNA, 25 bp, Artificial
  probe
  misc_feature (1)..(25): SEQ ID NO: 4077; WAN024D3U; Start 123; Stop 147
ctgtcgcatcattggcatattcatc

SEQ ID NO: 372277 - DNA, 25 bp, Artificial
  probe
  misc_feature (1)..(25): SEQ ID NO: 4077; WAN024D3U; Start 120; Stop 144
catctgtcgcatcattggcatattc

SEQ ID NO: 372278 - DNA, 25 bp, Artificial
  probe
  misc_feature (1)..(25): SEQ ID NO: 4077; WAN024D3U; Start 131; Stop 155
tcattggcatattcatcaagtccga

SEQ ID NO: 372279 - DNA, 25 bp, Artificial
  probe
  misc_feature (1)..(25): SEQ ID NO: 4077; WAN024D3U; Start 127; Stop 151
cgcatcattggcatattcatcaagt

SEQ ID NO: 372280 - DNA, 25 bp, Artificial
  probe
  misc_feature (1)..(25): SEQ ID NO: 4077; WAN024D3U; Start 125; Stop 149
gtcgcatcattggcatattcatcaa

SEQ ID NO: 372281 - DNA, 25 bp, Artificial
  probe
  misc_feature (1)..(25): SEQ ID NO: 4077; WAN024D3U; Start 183; Stop 207
aataagcagcatacttgtcgataag

SEQ ID NO: 372282 - DNA, 25 bp, Artificial
  probe
  misc_feature (1)..(25): SEQ ID NO: 4077; WAN024D3U; Start 184; Stop 208
ataagcagcatacttgtcgataagg

SEQ ID NO: 372283 - DNA, 25 bp, Artificial
  probe
  misc_feature (1)..(25): SEQ ID NO: 4077; WAN024D3U; Start 66; Stop 90
ggtagccttcgtttggatagtattt

SEQ ID NO: 372284 - DNA, 25 bp, Artificial
  probe
  misc_feature (1)..(25): SEQ ID NO: 4077; WAN024D3U; Start 122; Stop 146
tctgtcgcatcattggcatattcat

SEQ ID NO: 372285 - DNA, 25 bp, Artificial
  probe
  misc_feature (1)..(25): SEQ ID NO: 4077; WAN024D3U; Start 121; Stop 145
atctgtcgcatcattggcatattca

SEQ ID NO: 372286 - DNA, 25 bp, Artificial
  probe
  misc_feature (1)..(25): SEQ ID NO: 4077; WAN024D3U; Start 67; Stop 91
gtagccttcgtttggatagtattta

SEQ ID NO: 372287 - DNA, 25 bp, Artificial
  probe
  misc_feature (1)..(25): SEQ ID NO: 4077; WAN024D3U; Start 124; Stop 148
tgtcgcatcattggcatattcatca

SEQ ID NO: 372288 - DNA, 25 bp, Artificial
  probe
  misc_feature (1)..(25): SEQ ID NO: 4077; WAN024D3U; Start 65; Stop 89
gggtagccttcgtttggatagtatt

SEQ ID NO: 372289 - DNA, 25 bp, Artificial
  probe
  misc_feature (1)..(25): SEQ ID NO: 4077; WAN024D3U; Start 70; Stop 94
gccttcgtttggatagtatttatca

SEQ ID NO: 372290 - DNA, 25 bp, Artificial
  probe
  misc_feature (1)..(25): SEQ ID NO: 4077; WAN024D3U; Start 69; Stop 93
agccttcgtttggatagtatttatc

SEQ ID NO: 372291 - DNA, 25 bp, Artificial
  probe
  misc_feature (1)..(25): SEQ ID NO: 4077; WAN024D3U; Start 68; Stop 92
tagccttcgtttggatagtatttat

SEQ ID NO: 372292 - DNA, 25 bp, Artificial
  probe
  misc_feature (1)..(25): SEQ ID NO: 4077; WAN024D3U; Start 140; Stop 164
tattcatcaagtccgatgttgaaga

SEQ ID NO: 372293 - DNA, 25 bp, Artificial
  probe
  misc_feature (1)..(25): SEQ ID NO: 4077; WAN024D3U; Start 138; Stop 162
catattcatcaagtccgatgttgaa

SEQ ID NO: 372294 - DNA, 25 bp, Artificial
  probe
  misc_feature (1)..(25): SEQ ID NO: 4077; WAN024D3U; Start 141; Stop 165
attcatcaagtccgatgttgaagat

SEQ ID NO: 372295 - DNA, 25 bp, Artificial
  probe
  misc_feature (1)..(25): SEQ ID NO: 4077; WAN024D3U; Start 142; Stop 166
ttcatcaagtccgatgttgaagatt

SEQ ID NO: 372296 - DNA, 25 bp, Artificial
  probe
  misc_feature (1)..(25): SEQ ID NO: 4077; WAN024D3U; Start 139; Stop 163
atattcatcaagtccgatgttgaag

SEQ ID NO: 372297 - DNA, 25 bp, Artificial
  probe
  misc_feature (1)..(25): SEQ ID NO: 4077; WAN024D3U; Start 181; Stop 205
gaaataagcagcatacttgtcgata

SEQ ID NO: 372298 - DNA, 25 bp, Artificial
  probe
  misc_feature (1)..(25): SEQ ID NO: 4077; WAN024D3U; Start 72; Stop 96
cttcgtttggatagtatttatcagc

SEQ ID NO: 372299 - DNA, 25 bp, Artificial
  probe
  misc_feature (1)..(25): SEQ ID NO: 4077; WAN024D3U; Start 182; Stop 206
aaataagcagcatacttgtcgataa

SEQ ID NO: 372300 - DNA, 25 bp, Artificial
  probe
  misc_feature (1)..(25): SEQ ID NO: 4077; WAN024D3U; Start 137; Stop 161
gcatattcatcaagtccgatgttga

SEQ ID NO: 372301 - DNA, 25 bp, Artificial
  probe
  misc_feature (1)..(25): SEQ ID NO: 4077; WAN024D3U; Start 133; Stop 157
attggcatattcatcaagtccgatg

SEQ ID NO: 372302 - DNA, 25 bp, Artificial
  probe
  misc_feature (1)..(25): SEQ ID NO: 4077; WAN024D3U; Start 111; Stop 135
aacctttagcatctgtcgcatcatt

SEQ ID NO: 372303 - DNA, 25 bp, Artificial
  probe
  misc_feature (1)..(25): SEQ ID NO: 4077; WAN024D3U; Start 71; Stop 95
ccttcgtttggatagtatttatcag

SEQ ID NO: 372304 - DNA, 25 bp, Artificial
  probe
  misc_feature (1)..(25): SEQ ID NO: 4078; WAN024EZC; Start 823; Stop 847
gtcaatccagaagcaacttatatcg

SEQ ID NO: 372305 - DNA, 25 bp, Artificial
  probe
  misc_feature (1)..(25): SEQ ID NO: 4078; WAN024EZC; Start 1415; Stop 1439
ttcctcatcatcctaagaaccagta

SEQ ID NO: 372306 - DNA, 25 bp, Artificial
  probe
  misc_feature (1)..(25): SEQ ID NO: 4078; WAN024EZC; Start 617; Stop 641
atatcaataccaataacgctcaagg

SEQ ID NO: 372307 - DNA, 25 bp, Artificial
  probe
  misc_feature (1)..(25): SEQ ID NO: 4078; WAN024EZC; Start 618; Stop 642
tatcaataccaataacgctcaaggc

SEQ ID NO: 372308 - DNA, 25 bp, Artificial
  probe
  misc_feature (1)..(25): SEQ ID NO: 4078; WAN024EZC; Start 1319; Stop 1343
ttggtgctggttcaactattactaa

SEQ ID NO: 372309 - DNA, 25 bp, Artificial
  probe
  misc_feature (1)..(25): SEQ ID NO: 4078; WAN024EZC; Start 637; Stop 661
caaggcgaatactatattacagacg

SEQ ID NO: 372310 - DNA, 25 bp, Artificial
  probe
  misc_feature (1)..(25): SEQ ID NO: 4078; WAN024EZC; Start 634; Stop 658
gctcaaggcgaatactatattacag

SEQ ID NO: 372311 - DNA, 25 bp, Artificial
  probe
  misc_feature (1)..(25): SEQ ID NO: 4078; WAN024EZC; Start 822; Stop 846
tgtcaatccagaagcaacttatatc

SEQ ID NO: 372312 - DNA, 25 bp, Artificial
  probe
  misc_feature (1)..(25): SEQ ID NO: 4078; WAN024EZC; Start 1414; Stop 1438
cttcctcatcatcctaagaaccagt

SEQ ID NO: 372313 - DNA, 25 bp, Artificial
  probe
  misc_feature (1)..(25): SEQ ID NO: 4078; WAN024EZC; Start 496; Stop 520
aatgctgaggttcttcgtattgttg

SEQ ID NO: 372314 - DNA, 25 bp, Artificial
  probe
  misc_feature (1)..(25): SEQ ID NO: 4078; WAN024EZC; Start 821; Stop 845
ttgtcaatccagaagcaacttatat

SEQ ID NO: 372315 - DNA, 25 bp, Artificial
  probe
  misc_feature (1)..(25): SEQ ID NO: 4078; WAN024EZC; Start 1193; Stop 1217
gtgctggaactattacagtcaacta

SEQ ID NO: 372316 - DNA, 25 bp, Artificial
  probe
  misc_feature (1)..(25): SEQ ID NO: 4078; WAN024EZC; Start 1194; Stop 1218
tgctggaactattacagtcaactat

SEQ ID NO: 372317 - DNA, 25 bp, Artificial
  probe
  misc_feature (1)..(25): SEQ ID NO: 4078; WAN024EZC; Start 1195; Stop 1219
gctggaactattacagtcaactatg

SEQ ID NO: 372318 - DNA, 25 bp, Artificial
  probe
  misc_feature (1)..(25): SEQ ID NO: 4078; WAN024EZC; Start 636; Stop 660
tcaaggcgaatactatattacagac

SEQ ID NO: 372319 - DNA, 25 bp, Artificial
  probe
  misc_feature (1)..(25): SEQ ID NO: 4078; WAN024EZC; Start 488; Stop 512
gtaatgacaatgctgaggttcttcg

SEQ ID NO: 372320 - DNA, 25 bp, Artificial
  probe
  misc_feature (1)..(25): SEQ ID NO: 4078; WAN024EZC; Start 487; Stop 511
cgtaatgacaatgctgaggttcttc

SEQ ID NO: 372321 - DNA, 25 bp, Artificial
  probe
  misc_feature (1)..(25): SEQ ID NO: 4078; WAN024EZC; Start 491; Stop 515
atgacaatgctgaggttcttcgtat

SEQ ID NO: 372322 - DNA, 25 bp, Artificial
  probe
  misc_feature (1)..(25): SEQ ID NO: 4078; WAN024EZC; Start 484; Stop 508
gttcgtaatgacaatgctgaggttc

SEQ ID NO: 372323 - DNA, 25 bp, Artificial
  probe
  misc_feature (1)..(25): SEQ ID NO: 4078; WAN024EZC; Start 199; Stop 223
aagacagtaacagttgtaggacaca

SEQ ID NO: 372324 - DNA, 25 bp, Artificial
  probe
  misc_feature (1)..(25): SEQ ID NO: 4078; WAN024EZC; Start 616; Stop 640
aatatcaataccaataacgctcaag

SEQ ID NO: 372325 - DNA, 25 bp, Artificial
  probe
  misc_feature (1)..(25): SEQ ID NO: 4078; WAN024EZC; Start 635; Stop 659
ctcaaggcgaatactatattacaga

SEQ ID NO: 372326 - DNA, 25 bp, Artificial
  probe
  misc_feature (1)..(25): SEQ ID NO: 4078; WAN024EZC; Start 497; Stop 521
atgctgaggttcttcgtattgttga

SEQ ID NO: 372327 - DNA, 25 bp, Artificial
  probe
  misc_feature (1)..(25): SEQ ID NO: 4078; WAN024EZC; Start 492; Stop 516
tgacaatgctgaggttcttcgtatt

SEQ ID NO: 372328 - DNA, 25 bp, Artificial
  probe
  misc_feature (1)..(25): SEQ ID NO: 4078; WAN024EZC; Start 490; Stop 514
aatgacaatgctgaggttcttcgta

SEQ ID NO: 372329 - DNA, 25 bp, Artificial
  probe
  misc_feature (1)..(25): SEQ ID NO: 4078; WAN024EZC; Start 489; Stop 513
taatgacaatgctgaggttcttcgt

SEQ ID NO: 372330 - DNA, 25 bp, Artificial
  probe
  misc_feature (1)..(25): SEQ ID NO: 4078; WAN024EZC; Start 486; Stop 510
tcgtaatgacaatgctgaggttctt

SEQ ID NO: 372331 - DNA, 25 bp, Artificial
  probe
  misc_feature (1)..(25): SEQ ID NO: 4078; WAN024EZC; Start 485; Stop 509
ttcgtaatgacaatgctgaggttct

SEQ ID NO: 372332 - DNA, 25 bp, Artificial
  probe
  misc_feature (1)..(25): SEQ ID NO: 4078; WAN024EZC; Start 824; Stop 848
tcaatccagaagcaacttatatcga

SEQ ID NO: 372333 - DNA, 25 bp, Artificial
  probe
  misc_feature (1)..(25): SEQ ID NO: 4078; WAN024EZC; Start 551; Stop 575
aaatcaaggaaatcaacactggaac

SEQ ID NO: 372334 - DNA, 25 bp, Artificial
  probe
  misc_feature (1)..(25): SEQ ID NO: 4078; WAN024EZC; Start 550; Stop 574
caaatcaaggaaatcaacactggaa

SEQ ID NO: 372335 - DNA, 25 bp, Artificial
  probe
  misc_feature (1)..(25): SEQ ID NO: 4078; WAN024EZC; Start 546; Stop 570
aaagcaaatcaaggaaatcaacact

SEQ ID NO: 372336 - DNA, 25 bp, Artificial
  probe
  misc_feature (1)..(25): SEQ ID NO: 4078; WAN024EZC; Start 995; Stop 1019
ctatgattgaggaaagtagtgttgc

SEQ ID NO: 372337 - DNA, 25 bp, Artificial
  probe
  misc_feature (1)..(25): SEQ ID NO: 4079; WAN024G9W; Start 121; Stop 145
aacatatcgtcagttgaagatggag

SEQ ID NO: 372338 - DNA, 25 bp, Artificial
  probe
  misc_feature (1)..(25): SEQ ID NO: 4079; WAN024G9W; Start 120; Stop 144
gaacatatcgtcagttgaagatgga

SEQ ID NO: 372339 - DNA, 25 bp, Artificial
  probe
  misc_feature (1)..(25): SEQ ID NO: 4079; WAN024G9W; Start 124; Stop 148
atatcgtcagttgaagatggagcat

SEQ ID NO: 372340 - DNA, 25 bp, Artificial
  probe
  misc_feature (1)..(25): SEQ ID NO: 4079; WAN024G9W; Start 204; Stop 228
gtcaaatgtcaatgctaagatgtca

SEQ ID NO: 372341 - DNA, 25 bp, Artificial
  probe
  misc_feature (1)..(25): SEQ ID NO: 4079; WAN024G9W; Start 201; Stop 225
ttcgtcaaatgtcaatgctaagatg

SEQ ID NO: 372342 - DNA, 25 bp, Artificial
  probe
  misc_feature (1)..(25): SEQ ID NO: 4079; WAN024G9W; Start 205; Stop 229
tcaaatgtcaatgctaagatgtcag

SEQ ID NO: 372343 - DNA, 25 bp, Artificial
  probe
  misc_feature (1)..(25): SEQ ID NO: 4079; WAN024G9W; Start 200; Stop 224
attcgtcaaatgtcaatgctaagat

SEQ ID NO: 372344 - DNA, 25 bp, Artificial
  probe
  misc_feature (1)..(25): SEQ ID NO: 4079; WAN024G9W; Start 226; Stop 250
tcagcatttggacggtatttagaaa

SEQ ID NO: 372345 - DNA, 25 bp, Artificial
  probe
  misc_feature (1)..(25): SEQ ID NO: 4079; WAN024G9W; Start 203; Stop 227
cgtcaaatgtcaatgctaagatgtc

SEQ ID NO: 372346 - DNA, 25 bp, Artificial
  probe
  misc_feature (1)..(25): SEQ ID NO: 4079; WAN024G9W; Start 123; Stop 147
catatcgtcagttgaagatggagca

SEQ ID NO: 372347 - DNA, 25 bp, Artificial
  probe
  misc_feature (1)..(25): SEQ ID NO: 4079; WAN024G9W; Start 122; Stop 146
acatatcgtcagttgaagatggagc

SEQ ID NO: 372348 - DNA, 25 bp, Artificial
  probe
  misc_feature (1)..(25): SEQ ID NO: 4079; WAN024G9W; Start 197; Stop 221
tcaattcgtcaaatgtcaatgctaa

SEQ ID NO: 372349 - DNA, 25 bp, Artificial
  probe
  misc_feature (1)..(25): SEQ ID NO: 4079; WAN024G9W; Start 192; Stop 216
ttctgtcaattcgtcaaatgtcaat

SEQ ID NO: 372350 - DNA, 25 bp, Artificial
  probe
  misc_feature (1)..(25): SEQ ID NO: 4079; WAN024G9W; Start 199; Stop 223
aattcgtcaaatgtcaatgctaaga

SEQ ID NO: 372351 - DNA, 25 bp, Artificial
  probe
  misc_feature (1)..(25): SEQ ID NO: 4079; WAN024G9W; Start 198; Stop 222
caattcgtcaaatgtcaatgctaag

SEQ ID NO: 372352 - DNA, 25 bp, Artificial
  probe
  misc_feature (1)..(25): SEQ ID NO: 4079; WAN024G9W; Start 196; Stop 220
gtcaattcgtcaaatgtcaatgcta

SEQ ID NO: 372353 - DNA, 25 bp, Artificial
  probe
  misc_feature (1)..(25): SEQ ID NO: 4079; WAN024G9W; Start 193; Stop 217
tctgtcaattcgtcaaatgtcaatg

SEQ ID NO: 372354 - DNA, 25 bp, Artificial
  probe
  misc_feature (1)..(25): SEQ ID NO: 4079; WAN024G9W; Start 191; Stop 215
gttctgtcaattcgtcaaatgtcaa

SEQ ID NO: 372355 - DNA, 25 bp, Artificial
  probe
  misc_feature (1)..(25): SEQ ID NO: 4079; WAN024G9W; Start 202; Stop 226
tcgtcaaatgtcaatgctaagatgt

SEQ ID NO: 372356 - DNA, 25 bp, Artificial
  probe
  misc_feature (1)..(25): SEQ ID NO: 4079; WAN024G9W; Start 233; Stop 257
ttggacggtatttagaaatcaaacg

SEQ ID NO: 372357 - DNA, 25 bp, Artificial
  probe
  misc_feature (1)..(25): SEQ ID NO: 4079; WAN024G9W; Start 229; Stop 253
gcatttggacggtatttagaaatca

SEQ ID NO: 372358 - DNA, 25 bp, Artificial
  probe
  misc_feature (1)..(25): SEQ ID NO: 4079; WAN024G9W; Start 227; Stop 251
cagcatttggacggtatttagaaat

SEQ ID NO: 372359 - DNA, 25 bp, Artificial
  probe
  misc_feature (1)..(25): SEQ ID NO: 4079; WAN024G9W; Start 228; Stop 252
agcatttggacggtatttagaaatc

SEQ ID NO: 372360 - DNA, 25 bp, Artificial
  probe
  misc_feature (1)..(25): SEQ ID NO: 4079; WAN024G9W; Start 194; Stop 218
ctgtcaattcgtcaaatgtcaatgc

SEQ ID NO: 372361 - DNA, 25 bp, Artificial
  probe
  misc_feature (1)..(25): SEQ ID NO: 4079; WAN024G9W; Start 143; Stop 167
gagcatctgtcaacattgggataac

SEQ ID NO: 372362 - DNA, 25 bp, Artificial
  probe
  misc_feature (1)..(25): SEQ ID NO: 4079; WAN024G9W; Start 195; Stop 219
tgtcaattcgtcaaatgtcaatgct

SEQ ID NO: 372363 - DNA, 25 bp, Artificial
  probe
  misc_feature (1)..(25): SEQ ID NO: 4079; WAN024G9W; Start 119; Stop 143
cgaacatatcgtcagttgaagatgg

SEQ ID NO: 372364 - DNA, 25 bp, Artificial
  probe
  misc_feature (1)..(25): SEQ ID NO: 4079; WAN024G9W; Start 190; Stop 214
cgttctgtcaattcgtcaaatgtca

SEQ ID NO: 372365 - DNA, 25 bp, Artificial
  probe
  misc_feature (1)..(25): SEQ ID NO: 4079; WAN024G9W; Start 225; Stop 249
gtcagcatttggacggtatttagaa

SEQ ID NO: 372366 - DNA, 25 bp, Artificial
  probe
  misc_feature (1)..(25): SEQ ID NO: 4079; WAN024G9W; Start 223; Stop 247
atgtcagcatttggacggtatttag

SEQ ID NO: 372367 - DNA, 25 bp, Artificial
  probe
  misc_feature (1)..(25): SEQ ID NO: 4079; WAN024G9W; Start 222; Stop 246
gatgtcagcatttggacggtattta

SEQ ID NO: 372368 - DNA, 25 bp, Artificial
  probe
  misc_feature (1)..(25): SEQ ID NO: 4079; WAN024G9W; Start 146; Stop 170
catctgtcaacattgggataacacc

SEQ ID NO: 372369 - DNA, 25 bp, Artificial
  probe
  misc_feature (1)..(25): SEQ ID NO: 4079; WAN024G9W; Start 47; Stop 71
caccagcaacgataacgatatcatc

SEQ ID NO: 372370 - DNA, 25 bp, Artificial
  probe
  misc_feature (1)..(25): SEQ ID NO: 4080; WAN024DCU; Start 188; Stop 212
acgctaatgttgacctagtattgat

SEQ ID NO: 372371 - DNA, 25 bp, Artificial
  probe
  misc_feature (1)..(25): SEQ ID NO: 4080; WAN024DCU; Start 189; Stop 213
cgctaatgttgacctagtattgatt

SEQ ID NO: 372372 - DNA, 25 bp, Artificial
  probe
  misc_feature (1)..(25): SEQ ID NO: 4080; WAN024DCU; Start 187; Stop 211
aacgctaatgttgacctagtattga

SEQ ID NO: 372373 - DNA, 25 bp, Artificial
  probe
  misc_feature (1)..(25): SEQ ID NO: 4080; WAN024DCU; Start 182; Stop 206
ctgataacgctaatgttgacctagt

SEQ ID NO: 372374 - DNA, 25 bp, Artificial
  probe
  misc_feature (1)..(25): SEQ ID NO: 4080; WAN024DCU; Start 183; Stop 207
tgataacgctaatgttgacctagta

SEQ ID NO: 372375 - DNA, 25 bp, Artificial
  probe
  misc_feature (1)..(25): SEQ ID NO: 4080; WAN024DCU; Start 186; Stop 210
taacgctaatgttgacctagtattg

SEQ ID NO: 372376 - DNA, 25 bp, Artificial
  probe
  misc_feature (1)..(25): SEQ ID NO: 4080; WAN024DCU; Start 181; Stop 205
gctgataacgctaatgttgacctag

SEQ ID NO: 372377 - DNA, 25 bp, Artificial
  probe
  misc_feature (1)..(25): SEQ ID NO: 4080; WAN024DCU; Start 184; Stop 208
gataacgctaatgttgacctagtat

SEQ ID NO: 372378 - DNA, 25 bp, Artificial
  probe
  misc_feature (1)..(25): SEQ ID NO: 4080; WAN024DCU; Start 185; Stop 209
ataacgctaatgttgacctagtatt

SEQ ID NO: 372379 - DNA, 25 bp, Artificial
  probe
  misc_feature (1)..(25): SEQ ID NO: 4080; WAN024DCU; Start 190; Stop 214
gctaatgttgacctagtattgattc

SEQ ID NO: 372380 - DNA, 25 bp, Artificial
  probe
  misc_feature (1)..(25): SEQ ID NO: 4080; WAN024DCU; Start 498; Stop 522
aactcaagatattgccatcatcgaa

SEQ ID NO: 372381 - DNA, 25 bp, Artificial
  probe
  misc_feature (1)..(25): SEQ ID NO: 4080; WAN024DCU; Start 421; Stop 445
gtatctattcgctttaagggtcgta

SEQ ID NO: 372382 - DNA, 25 bp, Artificial
  probe
  misc_feature (1)..(25): SEQ ID NO: 4080; WAN024DCU; Start 427; Stop 451
attcgctttaagggtcgtatgatta

SEQ ID NO: 372383 - DNA, 25 bp, Artificial
  probe
  misc_feature (1)..(25): SEQ ID NO: 4080; WAN024DCU; Start 426; Stop 450
tattcgctttaagggtcgtatgatt

SEQ ID NO: 372384 - DNA, 25 bp, Artificial
  probe
  misc_feature (1)..(25): SEQ ID NO: 4080; WAN024DCU; Start 502; Stop 526
caagatattgccatcatcgaacaac

SEQ ID NO: 372385 - DNA, 25 bp, Artificial
  probe
  misc_feature (1)..(25): SEQ ID NO: 4080; WAN024DCU; Start 501; Stop 525
tcaagatattgccatcatcgaacaa

SEQ ID NO: 372386 - DNA, 25 bp, Artificial
  probe
  misc_feature (1)..(25): SEQ ID NO: 4080; WAN024DCU; Start 425; Stop 449
ctattcgctttaagggtcgtatgat

SEQ ID NO: 372387 - DNA, 25 bp, Artificial
  probe
  misc_feature (1)..(25): SEQ ID NO: 4080; WAN024DCU; Start 423; Stop 447
atctattcgctttaagggtcgtatg

SEQ ID NO: 372388 - DNA, 25 bp, Artificial
  probe
  misc_feature (1)..(25): SEQ ID NO: 4080; WAN024DCU; Start 180; Stop 204
ggctgataacgctaatgttgaccta

SEQ ID NO: 372389 - DNA, 25 bp, Artificial
  probe
  misc_feature (1)..(25): SEQ ID NO: 4080; WAN024DCU; Start 63; Stop 87
aaccatagcaaagcaagacttattc

SEQ ID NO: 372390 - DNA, 25 bp, Artificial
  probe
  misc_feature (1)..(25): SEQ ID NO: 4080; WAN024DCU; Start 422; Stop 446
tatctattcgctttaagggtcgtat

SEQ ID NO: 372391 - DNA, 25 bp, Artificial
  probe
  misc_feature (1)..(25): SEQ ID NO: 4080; WAN024DCU; Start 65; Stop 89
ccatagcaaagcaagacttattcat

SEQ ID NO: 372392 - DNA, 25 bp, Artificial
  probe
  misc_feature (1)..(25): SEQ ID NO: 4080; WAN024DCU; Start 418; Stop 442
aaggtatctattcgctttaagggtc

SEQ ID NO: 372393 - DNA, 25 bp, Artificial
  probe
  misc_feature (1)..(25): SEQ ID NO: 4080; WAN024DCU; Start 500; Stop 524
ctcaagatattgccatcatcgaaca

SEQ ID NO: 372394 - DNA, 25 bp, Artificial
  probe
  misc_feature (1)..(25): SEQ ID NO: 4080; WAN024DCU; Start 499; Stop 523
actcaagatattgccatcatcgaac

SEQ ID NO: 372395 - DNA, 25 bp, Artificial
  probe
  misc_feature (1)..(25): SEQ ID NO: 4080; WAN024DCU; Start 497; Stop 521
caactcaagatattgccatcatcga

SEQ ID NO: 372396 - DNA, 25 bp, Artificial
  probe
  misc_feature (1)..(25): SEQ ID NO: 4080; WAN024DCU; Start 62; Stop 86
aaaccatagcaaagcaagacttatt

SEQ ID NO: 372397 - DNA, 25 bp, Artificial
  probe
  misc_feature (1)..(25): SEQ ID NO: 4080; WAN024DCU; Start 64; Stop 88
accatagcaaagcaagacttattca

SEQ ID NO: 372398 - DNA, 25 bp, Artificial
  probe
  misc_feature (1)..(25): SEQ ID NO: 4080; WAN024DCU; Start 428; Stop 452
ttcgctttaagggtcgtatgattac

SEQ ID NO: 372399 - DNA, 25 bp, Artificial
  probe
  misc_feature (1)..(25): SEQ ID NO: 4080; WAN024DCU; Start 68; Stop 92
tagcaaagcaagacttattcatcaa

SEQ ID NO: 372400 - DNA, 25 bp, Artificial
  probe
  misc_feature (1)..(25): SEQ ID NO: 4080; WAN024DCU; Start 417; Stop 441
taaggtatctattcgctttaagggt

SEQ ID NO: 372401 - DNA, 25 bp, Artificial
  probe
  misc_feature (1)..(25): SEQ ID NO: 4080; WAN024DCU; Start 315; Stop 339
tgttactgtgaaagaagttcgtcta

SEQ ID NO: 372402 - DNA, 25 bp, Artificial
  probe
  misc_feature (1)..(25): SEQ ID NO: 4080; WAN024DCU; Start 424; Stop 448
tctattcgctttaagggtcgtatga

SEQ ID NO: 372403 - DNA, 25 bp, Artificial
  probe
  misc_feature (1)..(25): SEQ ID NO: 4081; WAN024GIK; Start 5; Stop 29
gtacaatcttgtccataggagttcc

SEQ ID NO: 372404 - DNA, 25 bp, Artificial
  probe
  misc_feature (1)..(25): SEQ ID NO: 4081; WAN024GIK; Start 4; Stop 28
cgtacaatcttgtccataggagttc

SEQ ID NO: 372405 - DNA, 25 bp, Artificial
  probe
  misc_feature (1)..(25): SEQ ID NO: 4081; WAN024GIK; Start 112; Stop 136
aactccactagaatttccaagactt

SEQ ID NO: 372406 - DNA, 25 bp, Artificial
  probe
  misc_feature (1)..(25): SEQ ID NO: 4081; WAN024GIK; Start 6; Stop 30
tacaatcttgtccataggagttcct

SEQ ID NO: 372407 - DNA, 25 bp, Artificial
  probe
  misc_feature (1)..(25): SEQ ID NO: 4081; WAN024GIK; Start 111; Stop 135
caactccactagaatttccaagact

SEQ ID NO: 372408 - DNA, 25 bp, Artificial
  probe
  misc_feature (1)..(25): SEQ ID NO: 4081; WAN024GIK; Start 113; Stop 137
actccactagaatttccaagacttc

SEQ ID NO: 372409 - DNA, 25 bp, Artificial
  probe
  misc_feature (1)..(25): SEQ ID NO: 4081; WAN024GIK; Start 110; Stop 134
ccaactccactagaatttccaagac

SEQ ID NO: 372410 - DNA, 25 bp, Artificial
  probe
  misc_feature (1)..(25): SEQ ID NO: 4081; WAN024GIK; Start 35; Stop 59
gcttagaaccctgtttaagtgatac

SEQ ID NO: 372411 - DNA, 25 bp, Artificial
  probe
  misc_feature (1)..(25): SEQ ID NO: 4081; WAN024GIK; Start 183; Stop 207
gatattgtccatgacgacctccatt

SEQ ID NO: 372412 - DNA, 25 bp, Artificial
  probe
  misc_feature (1)..(25): SEQ ID NO: 4081; WAN024GIK; Start 55; Stop 79
gatactttacgaccaactgtattgc

SEQ ID NO: 372413 - DNA, 25 bp, Artificial
  probe
  misc_feature (1)..(25): SEQ ID NO: 4081; WAN024GIK; Start 52; Stop 76
agtgatactttacgaccaactgtat

SEQ ID NO: 372414 - DNA, 25 bp, Artificial
  probe
  misc_feature (1)..(25): SEQ ID NO: 4081; WAN024GIK; Start 7; Stop 31
acaatcttgtccataggagttcctg

SEQ ID NO: 372415 - DNA, 25 bp, Artificial
  probe
  misc_feature (1)..(25): SEQ ID NO: 4081; WAN024GIK; Start 107; Stop 131
aacccaactccactagaatttccaa

SEQ ID NO: 372416 - DNA, 25 bp, Artificial
  probe
  misc_feature (1)..(25): SEQ ID NO: 4081; WAN024GIK; Start 106; Stop 130
aaacccaactccactagaatttcca

SEQ ID NO: 372417 - DNA, 25 bp, Artificial
  probe
  misc_feature (1)..(25): SEQ ID NO: 4081; WAN024GIK; Start 184; Stop 208
atattgtccatgacgacctccattg

SEQ ID NO: 372418 - DNA, 25 bp, Artificial
  probe
  misc_feature (1)..(25): SEQ ID NO: 4081; WAN024GIK; Start 109; Stop 133
cccaactccactagaatttccaaga

SEQ ID NO: 372419 - DNA, 25 bp, Artificial
  probe
  misc_feature (1)..(25): SEQ ID NO: 4081; WAN024GIK; Start 54; Stop 78
tgatactttacgaccaactgtattg

SEQ ID NO: 372420 - DNA, 25 bp, Artificial
  probe
  misc_feature (1)..(25): SEQ ID NO: 4081; WAN024GIK; Start 53; Stop 77
gtgatactttacgaccaactgtatt

SEQ ID NO: 372421 - DNA, 25 bp, Artificial
  probe
  misc_feature (1)..(25): SEQ ID NO: 4081; WAN024GIK; Start 3; Stop 27
gcgtacaatcttgtccataggagtt

SEQ ID NO: 372422 - DNA, 25 bp, Artificial
  probe
  misc_feature (1)..(25): SEQ ID NO: 4081; WAN024GIK; Start 180; Stop 204
gatgatattgtccatgacgacctcc

SEQ ID NO: 372423 - DNA, 25 bp, Artificial
  probe
  misc_feature (1)..(25): SEQ ID NO: 4081; WAN024GIK; Start 56; Stop 80
atactttacgaccaactgtattgcg

SEQ ID NO: 372424 - DNA, 25 bp, Artificial
  probe
  misc_feature (1)..(25): SEQ ID NO: 4081; WAN024GIK; Start 108; Stop 132
acccaactccactagaatttccaag

SEQ ID NO: 372425 - DNA, 25 bp, Artificial
  probe
  misc_feature (1)..(25): SEQ ID NO: 4081; WAN024GIK; Start 10; Stop 34
atcttgtccataggagttcctgcta

SEQ ID NO: 372426 - DNA, 25 bp, Artificial
  probe
  misc_feature (1)..(25): SEQ ID NO: 4081; WAN024GIK; Start 36; Stop 60
cttagaaccctgtttaagtgatact

SEQ ID NO: 372427 - DNA, 25 bp, Artificial
  probe
  misc_feature (1)..(25): SEQ ID NO: 4081; WAN024GIK; Start 179; Stop 203
cgatgatattgtccatgacgacctc

SEQ ID NO: 372428 - DNA, 25 bp, Artificial
  probe
  misc_feature (1)..(25): SEQ ID NO: 4081; WAN024GIK; Start 32; Stop 56
ctagcttagaaccctgtttaagtga

SEQ ID NO: 372429 - DNA, 25 bp, Artificial
  probe
  misc_feature (1)..(25): SEQ ID NO: 4081; WAN024GIK; Start 34; Stop 58
agcttagaaccctgtttaagtgata

SEQ ID NO: 372430 - DNA, 25 bp, Artificial
  probe
  misc_feature (1)..(25): SEQ ID NO: 4081; WAN024GIK; Start 33; Stop 57
tagcttagaaccctgtttaagtgat

SEQ ID NO: 372431 - DNA, 25 bp, Artificial
  probe
  misc_feature (1)..(25): SEQ ID NO: 4081; WAN024GIK; Start 182; Stop 206
tgatattgtccatgacgacctccat

SEQ ID NO: 372432 - DNA, 25 bp, Artificial
  probe
  misc_feature (1)..(25): SEQ ID NO: 4081; WAN024GIK; Start 181; Stop 205
atgatattgtccatgacgacctcca

SEQ ID NO: 372433 - DNA, 25 bp, Artificial
  probe
  misc_feature (1)..(25): SEQ ID NO: 4081; WAN024GIK; Start 155; Stop 179
cttctgcaacaggaattgacacatc

SEQ ID NO: 372434 - DNA, 25 bp, Artificial
  probe
  misc_feature (1)..(25): SEQ ID NO: 4081; WAN024GIK; Start 114; Stop 138
ctccactagaatttccaagacttct

SEQ ID NO: 372435 - DNA, 25 bp, Artificial
  probe
  misc_feature (1)..(25): SEQ ID NO: 4081; WAN024GIK; Start 115; Stop 139
tccactagaatttccaagacttctg

SEQ ID NO: 372436 - DNA, 25 bp, Artificial
  probe
  misc_feature (1)..(25): SEQ ID NO: 4082; WAN024FH3; Start 75; Stop 99
tgttgctactgtcttctcatcatta

SEQ ID NO: 372437 - DNA, 25 bp, Artificial
  probe
  misc_feature (1)..(25): SEQ ID NO: 4082; WAN024FH3; Start 67; Stop 91
ctattggatgttgctactgtcttct

SEQ ID NO: 372438 - DNA, 25 bp, Artificial
  probe
  misc_feature (1)..(25): SEQ ID NO: 4082; WAN024FH3; Start 68; Stop 92
tattggatgttgctactgtcttctc

SEQ ID NO: 372439 - DNA, 25 bp, Artificial
  probe
  misc_feature (1)..(25): SEQ ID NO: 4082; WAN024FH3; Start 78; Stop 102
tgctactgtcttctcatcattactt

SEQ ID NO: 372440 - DNA, 25 bp, Artificial
  probe
  misc_feature (1)..(25): SEQ ID NO: 4082; WAN024FH3; Start 77; Stop 101
ttgctactgtcttctcatcattact

SEQ ID NO: 372441 - DNA, 25 bp, Artificial
  probe
  misc_feature (1)..(25): SEQ ID NO: 4082; WAN024FH3; Start 76; Stop 100
gttgctactgtcttctcatcattac

SEQ ID NO: 372442 - DNA, 25 bp, Artificial
  probe
  misc_feature (1)..(25): SEQ ID NO: 4082; WAN024FH3; Start 66; Stop 90
actattggatgttgctactgtcttc

SEQ ID NO: 372443 - DNA, 25 bp, Artificial
  probe
  misc_feature (1)..(25): SEQ ID NO: 4082; WAN024FH3; Start 79; Stop 103
gctactgtcttctcatcattacttg

SEQ ID NO: 372444 - DNA, 25 bp, Artificial
  probe
  misc_feature (1)..(25): SEQ ID NO: 4082; WAN024FH3; Start 82; Stop 106
actgtcttctcatcattacttgttg

SEQ ID NO: 372445 - DNA, 25 bp, Artificial
  probe
  misc_feature (1)..(25): SEQ ID NO: 4082; WAN024FH3; Start 74; Stop 98
atgttgctactgtcttctcatcatt

SEQ ID NO: 372446 - DNA, 25 bp, Artificial
  probe
  misc_feature (1)..(25): SEQ ID NO: 4082; WAN024FH3; Start 65; Stop 89
aactattggatgttgctactgtctt

SEQ ID NO: 372447 - DNA, 25 bp, Artificial
  probe
  misc_feature (1)..(25): SEQ ID NO: 4082; WAN024FH3; Start 62; Stop 86
ttgaactattggatgttgctactgt

SEQ ID NO: 372448 - DNA, 25 bp, Artificial
  probe
  misc_feature (1)..(25): SEQ ID NO: 4082; WAN024FH3; Start 64; Stop 88
gaactattggatgttgctactgtct

SEQ ID NO: 372449 - DNA, 25 bp, Artificial
  probe
  misc_feature (1)..(25): SEQ ID NO: 4082; WAN024FH3; Start 63; Stop 87
tgaactattggatgttgctactgtc

SEQ ID NO: 372450 - DNA, 25 bp, Artificial
  probe
  misc_feature (1)..(25): SEQ ID NO: 4082; WAN024FH3; Start 80; Stop 104
ctactgtcttctcatcattacttgt

SEQ ID NO: 372451 - DNA, 25 bp, Artificial
  probe
  misc_feature (1)..(25): SEQ ID NO: 4082; WAN024FH3; Start 69; Stop 93
attggatgttgctactgtcttctca

SEQ ID NO: 372452 - DNA, 25 bp, Artificial
  probe
  misc_feature (1)..(25): SEQ ID NO: 4082; WAN024FH3; Start 83; Stop 107
ctgtcttctcatcattacttgttga

SEQ ID NO: 372453 - DNA, 25 bp, Artificial
  probe
  misc_feature (1)..(25): SEQ ID NO: 4082; WAN024FH3; Start 70; Stop 94
ttggatgttgctactgtcttctcat

SEQ ID NO: 372454 - DNA, 25 bp, Artificial
  probe
  misc_feature (1)..(25): SEQ ID NO: 4082; WAN024FH3; Start 84; Stop 108
tgtcttctcatcattacttgttgaa

SEQ ID NO: 372455 - DNA, 25 bp, Artificial
  probe
  misc_feature (1)..(25): SEQ ID NO: 4082; WAN024FH3; Start 81; Stop 105
tactgtcttctcatcattacttgtt

SEQ ID NO: 372456 - DNA, 25 bp, Artificial
  probe
  misc_feature (1)..(25): SEQ ID NO: 4082; WAN024FH3; Start 11; Stop 35
attcaatcgcatcgtctgttacaac

SEQ ID NO: 372457 - DNA, 25 bp, Artificial
  probe
  misc_feature (1)..(25): SEQ ID NO: 4082; WAN024FH3; Start 10; Stop 34
gattcaatcgcatcgtctgttacaa

SEQ ID NO: 372458 - DNA, 25 bp, Artificial
  probe
  misc_feature (1)..(25): SEQ ID NO: 4082; WAN024FH3; Start 8; Stop 32
ttgattcaatcgcatcgtctgttac

SEQ ID NO: 372459 - DNA, 25 bp, Artificial
  probe
  misc_feature (1)..(25): SEQ ID NO: 4082; WAN024FH3; Start 61; Stop 85
tttgaactattggatgttgctactg

SEQ ID NO: 372460 - DNA, 25 bp, Artificial
  probe
  misc_feature (1)..(25): SEQ ID NO: 4082; WAN024FH3; Start 9; Stop 33
tgattcaatcgcatcgtctgttaca

SEQ ID NO: 372461 - DNA, 25 bp, Artificial
  probe
  misc_feature (1)..(25): SEQ ID NO: 4082; WAN024FH3; Start 154; Stop 178
gataatagagctactcctataccga

SEQ ID NO: 372462 - DNA, 25 bp, Artificial
  probe
  misc_feature (1)..(25): SEQ ID NO: 4082; WAN024FH3; Start 153; Stop 177
agataatagagctactcctataccg

SEQ ID NO: 372463 - DNA, 25 bp, Artificial
  probe
  misc_feature (1)..(25): SEQ ID NO: 4082; WAN024FH3; Start 157; Stop 181
aatagagctactcctataccgataa

SEQ ID NO: 372464 - DNA, 25 bp, Artificial
  probe
  misc_feature (1)..(25): SEQ ID NO: 4082; WAN024FH3; Start 73; Stop 97
gatgttgctactgtcttctcatcat

SEQ ID NO: 372465 - DNA, 25 bp, Artificial
  probe
  misc_feature (1)..(25): SEQ ID NO: 4082; WAN024FH3; Start 7; Stop 31
attgattcaatcgcatcgtctgtta

SEQ ID NO: 372466 - DNA, 25 bp, Artificial
  probe
  misc_feature (1)..(25): SEQ ID NO: 4082; WAN024FH3; Start 6; Stop 30
tattgattcaatcgcatcgtctgtt

SEQ ID NO: 372467 - DNA, 25 bp, Artificial
  probe
  misc_feature (1)..(25): SEQ ID NO: 4082; WAN024FH3; Start 126; Stop 150
tgttccacatgcaactagaagagaa

SEQ ID NO: 372468 - DNA, 25 bp, Artificial
  probe
  misc_feature (1)..(25): SEQ ID NO: 4082; WAN024FH3; Start 155; Stop 179
ataatagagctactcctataccgat

SEQ ID NO: 372469 - DNA, 25 bp, Artificial
  probe
  misc_feature (1)..(25): SEQ ID NO: 4083; WAN024CLG; Start 124; Stop 148
ttaatggtaggttatggaatcttgg

SEQ ID NO: 372470 - DNA, 25 bp, Artificial
  probe
  misc_feature (1)..(25): SEQ ID NO: 4083; WAN024CLG; Start 125; Stop 149
taatggtaggttatggaatcttggg

SEQ ID NO: 372471 - DNA, 25 bp, Artificial
  probe
  misc_feature (1)..(25): SEQ ID NO: 4083; WAN024CLG; Start 119; Stop 143
tcggtttaatggtaggttatggaat

SEQ ID NO: 372472 - DNA, 25 bp, Artificial
  probe
  misc_feature (1)..(25): SEQ ID NO: 4083; WAN024CLG; Start 118; Stop 142
atcggtttaatggtaggttatggaa

SEQ ID NO: 372473 - DNA, 25 bp, Artificial
  probe
  misc_feature (1)..(25): SEQ ID NO: 4083; WAN024CLG; Start 117; Stop 141
aatcggtttaatggtaggttatgga

SEQ ID NO: 372474 - DNA, 25 bp, Artificial
  probe
  misc_feature (1)..(25): SEQ ID NO: 4083; WAN024CLG; Start 120; Stop 144
cggtttaatggtaggttatggaatc

SEQ ID NO: 372475 - DNA, 25 bp, Artificial
  probe
  misc_feature (1)..(25): SEQ ID NO: 4083; WAN024CLG; Start 116; Stop 140
gaatcggtttaatggtaggttatgg

SEQ ID NO: 372476 - DNA, 25 bp, Artificial
  probe
  misc_feature (1)..(25): SEQ ID NO: 4083; WAN024CLG; Start 115; Stop 139
ggaatcggtttaatggtaggttatg

SEQ ID NO: 372477 - DNA, 25 bp, Artificial
  probe
  misc_feature (1)..(25): SEQ ID NO: 4083; WAN024CLG; Start 114; Stop 138
aggaatcggtttaatggtaggttat

SEQ ID NO: 372478 - DNA, 25 bp, Artificial
  probe
  misc_feature (1)..(25): SEQ ID NO: 4083; WAN024CLG; Start 113; Stop 137
taggaatcggtttaatggtaggtta

SEQ ID NO: 372479 - DNA, 25 bp, Artificial
  probe
  misc_feature (1)..(25): SEQ ID NO: 4083; WAN024CLG; Start 97; Stop 121
ttaggtactctggctctaggaatcg

SEQ ID NO: 372480 - DNA, 25 bp, Artificial
  probe
  misc_feature (1)..(25): SEQ ID NO: 4083; WAN024CLG; Start 112; Stop 136
ctaggaatcggtttaatggtaggtt

SEQ ID NO: 372481 - DNA, 25 bp, Artificial
  probe
  misc_feature (1)..(25): SEQ ID NO: 4083; WAN024CLG; Start 110; Stop 134
ctctaggaatcggtttaatggtagg

SEQ ID NO: 372482 - DNA, 25 bp, Artificial
  probe
  misc_feature (1)..(25): SEQ ID NO: 4083; WAN024CLG; Start 111; Stop 135
tctaggaatcggtttaatggtaggt

SEQ ID NO: 372483 - DNA, 25 bp, Artificial
  probe
  misc_feature (1)..(25): SEQ ID NO: 4083; WAN024CLG; Start 109; Stop 133
gctctaggaatcggtttaatggtag

SEQ ID NO: 372484 - DNA, 25 bp, Artificial
  probe
  misc_feature (1)..(25): SEQ ID NO: 4083; WAN024CLG; Start 96; Stop 120
tttaggtactctggctctaggaatc

SEQ ID NO: 372485 - DNA, 25 bp, Artificial
  probe
  misc_feature (1)..(25): SEQ ID NO: 4083; WAN024CLG; Start 121; Stop 145
ggtttaatggtaggttatggaatct

SEQ ID NO: 372486 - DNA, 25 bp, Artificial
  probe
  misc_feature (1)..(25): SEQ ID NO: 4083; WAN024CLG; Start 108; Stop 132
ggctctaggaatcggtttaatggta

SEQ ID NO: 372487 - DNA, 25 bp, Artificial
  probe
  misc_feature (1)..(25): SEQ ID NO: 4083; WAN024CLG; Start 104; Stop 128
ctctggctctaggaatcggtttaat

SEQ ID NO: 372488 - DNA, 25 bp, Artificial
  probe
  misc_feature (1)..(25): SEQ ID NO: 4083; WAN024CLG; Start 105; Stop 129
tctggctctaggaatcggtttaatg

SEQ ID NO: 372489 - DNA, 25 bp, Artificial
  probe
  misc_feature (1)..(25): SEQ ID NO: 4083; WAN024CLG; Start 126; Stop 150
aatggtaggttatggaatcttgggc

SEQ ID NO: 372490 - DNA, 25 bp, Artificial
  probe
  misc_feature (1)..(25): SEQ ID NO: 4083; WAN024CLG; Start 102; Stop 126
tactctggctctaggaatcggttta

SEQ ID NO: 372491 - DNA, 25 bp, Artificial
  probe
  misc_feature (1)..(25): SEQ ID NO: 4083; WAN024CLG; Start 106; Stop 130
ctggctctaggaatcggtttaatgg

SEQ ID NO: 372492 - DNA, 25 bp, Artificial
  probe
  misc_feature (1)..(25): SEQ ID NO: 4083; WAN024CLG; Start 123; Stop 147
tttaatggtaggttatggaatcttg

SEQ ID NO: 372493 - DNA, 25 bp, Artificial
  probe
  misc_feature (1)..(25): SEQ ID NO: 4083; WAN024CLG; Start 122; Stop 146
gtttaatggtaggttatggaatctt

SEQ ID NO: 372494 - DNA, 25 bp, Artificial
  probe
  misc_feature (1)..(25): SEQ ID NO: 4083; WAN024CLG; Start 103; Stop 127
actctggctctaggaatcggtttaa

SEQ ID NO: 372495 - DNA, 25 bp, Artificial
  probe
  misc_feature (1)..(25): SEQ ID NO: 4083; WAN024CLG; Start 98; Stop 122
taggtactctggctctaggaatcgg

SEQ ID NO: 372496 - DNA, 25 bp, Artificial
  probe
  misc_feature (1)..(25): SEQ ID NO: 4083; WAN024CLG; Start 35; Stop 59
agatgaataagaaatcaagctacgt

SEQ ID NO: 372497 - DNA, 25 bp, Artificial
  probe
  misc_feature (1)..(25): SEQ ID NO: 4083; WAN024CLG; Start 127; Stop 151
atggtaggttatggaatcttgggca

SEQ ID NO: 372498 - DNA, 25 bp, Artificial
  probe
  misc_feature (1)..(25): SEQ ID NO: 4083; WAN024CLG; Start 61; Stop 85
gtcaagcgtttacttttagtcatca

SEQ ID NO: 372499 - DNA, 25 bp, Artificial
  probe
  misc_feature (1)..(25): SEQ ID NO: 4083; WAN024CLG; Start 30; Stop 54
gatgaagatgaataagaaatcaagc

SEQ ID NO: 372500 - DNA, 25 bp, Artificial
  probe
  misc_feature (1)..(25): SEQ ID NO: 4083; WAN024CLG; Start 57; Stop 81
cgtagtcaagcgtttacttttagtc

SEQ ID NO: 372501 - DNA, 25 bp, Artificial
  probe
  misc_feature (1)..(25): SEQ ID NO: 4083; WAN024CLG; Start 128; Stop 152
tggtaggttatggaatcttgggcaa

SEQ ID NO: 372502 - DNA, 25 bp, Artificial
  probe
  misc_feature (1)..(25): SEQ ID NO: 4084; WAN024GKC; Start 21; Stop 45
gaggagtgatgagatggttacagag

SEQ ID NO: 372503 - DNA, 25 bp, Artificial
  probe
  misc_feature (1)..(25): SEQ ID NO: 4084; WAN024GKC; Start 19; Stop 43
gagaggagtgatgagatggttacag

SEQ ID NO: 372504 - DNA, 25 bp, Artificial
  probe
  misc_feature (1)..(25): SEQ ID NO: 4084; WAN024GKC; Start 17; Stop 41
cagagaggagtgatgagatggttac

SEQ ID NO: 372505 - DNA, 25 bp, Artificial
  probe
  misc_feature (1)..(25): SEQ ID NO: 4084; WAN024GKC; Start 897; Stop 921
tagtaagttcctcattccttatcgg

SEQ ID NO: 372506 - DNA, 25 bp, Artificial
  probe
  misc_feature (1)..(25): SEQ ID NO: 4084; WAN024GKC; Start 20; Stop 44
agaggagtgatgagatggttacaga

SEQ ID NO: 372507 - DNA, 25 bp, Artificial
  probe
  misc_feature (1)..(25): SEQ ID NO: 4084; WAN024GKC; Start 18; Stop 42
agagaggagtgatgagatggttaca

SEQ ID NO: 372508 - DNA, 25 bp, Artificial
  probe
  misc_feature (1)..(25): SEQ ID NO: 4084; WAN024GKC; Start 16; Stop 40
acagagaggagtgatgagatggtta

SEQ ID NO: 372509 - DNA, 25 bp, Artificial
  probe
  misc_feature (1)..(25): SEQ ID NO: 4084; WAN024GKC; Start 755; Stop 779
ccaatctagcagcctatcagttctt

SEQ ID NO: 372510 - DNA, 25 bp, Artificial
  probe
  misc_feature (1)..(25): SEQ ID NO: 4084; WAN024GKC; Start 896; Stop 920
gtagtaagttcctcattccttatcg

SEQ ID NO: 372511 - DNA, 25 bp, Artificial
  probe
  misc_feature (1)..(25): SEQ ID NO: 4084; WAN024GKC; Start 634; Stop 658
cagattatccagcgttactttacaa

SEQ ID NO: 372512 - DNA, 25 bp, Artificial
  probe
  misc_feature (1)..(25): SEQ ID NO: 4084; WAN024GKC; Start 325; Stop 349
ttcttcaaattggaggatattctgc

SEQ ID NO: 372513 - DNA, 25 bp, Artificial
  probe
  misc_feature (1)..(25): SEQ ID NO: 4084; WAN024GKC; Start 638; Stop 662
ttatccagcgttactttacaacaac

SEQ ID NO: 372514 - DNA, 25 bp, Artificial
  probe
  misc_feature (1)..(25): SEQ ID NO: 4084; WAN024GKC; Start 633; Stop 657
gcagattatccagcgttactttaca

SEQ ID NO: 372515 - DNA, 25 bp, Artificial
  probe
  misc_feature (1)..(25): SEQ ID NO: 4084; WAN024GKC; Start 653; Stop 677
ttacaacaacggataatgtcatcga

SEQ ID NO: 372516 - DNA, 25 bp, Artificial
  probe
  misc_feature (1)..(25): SEQ ID NO: 4084; WAN024GKC; Start 636; Stop 660
gattatccagcgttactttacaaca

SEQ ID NO: 372517 - DNA, 25 bp, Artificial
  probe
  misc_feature (1)..(25): SEQ ID NO: 4084; WAN024GKC; Start 129; Stop 153
tattaactctagcagtgcaaccatt

SEQ ID NO: 372518 - DNA, 25 bp, Artificial
  probe
  misc_feature (1)..(25): SEQ ID NO: 4084; WAN024GKC; Start 125; Stop 149
agtctattaactctagcagtgcaac

SEQ ID NO: 372519 - DNA, 25 bp, Artificial
  probe
  misc_feature (1)..(25): SEQ ID NO: 4084; WAN024GKC; Start 757; Stop 781
aatctagcagcctatcagttctttg

SEQ ID NO: 372520 - DNA, 25 bp, Artificial
  probe
  misc_feature (1)..(25): SEQ ID NO: 4084; WAN024GKC; Start 756; Stop 780
caatctagcagcctatcagttcttt

SEQ ID NO: 372521 - DNA, 25 bp, Artificial
  probe
  misc_feature (1)..(25): SEQ ID NO: 4084; WAN024GKC; Start 635; Stop 659
agattatccagcgttactttacaac

SEQ ID NO: 372522 - DNA, 25 bp, Artificial
  probe
  misc_feature (1)..(25): SEQ ID NO: 4084; WAN024GKC; Start 128; Stop 152
ctattaactctagcagtgcaaccat

SEQ ID NO: 372523 - DNA, 25 bp, Artificial
  probe
  misc_feature (1)..(25): SEQ ID NO: 4084; WAN024GKC; Start 637; Stop 661
attatccagcgttactttacaacaa

SEQ ID NO: 372524 - DNA, 25 bp, Artificial
  probe
  misc_feature (1)..(25): SEQ ID NO: 4084; WAN024GKC; Start 12; Stop 36
tcagacagagaggagtgatgagatg

SEQ ID NO: 372525 - DNA, 25 bp, Artificial
  probe
  misc_feature (1)..(25): SEQ ID NO: 4084; WAN024GKC; Start 288; Stop 312
tgaggtatatgagattgtcaaagcc

SEQ ID NO: 372526 - DNA, 25 bp, Artificial
  probe
  misc_feature (1)..(25): SEQ ID NO: 4084; WAN024GKC; Start 126; Stop 150
gtctattaactctagcagtgcaacc

SEQ ID NO: 372527 - DNA, 25 bp, Artificial
  probe
  misc_feature (1)..(25): SEQ ID NO: 4084; WAN024GKC; Start 15; Stop 39
gacagagaggagtgatgagatggtt

SEQ ID NO: 372528 - DNA, 25 bp, Artificial
  probe
  misc_feature (1)..(25): SEQ ID NO: 4084; WAN024GKC; Start 130; Stop 154
attaactctagcagtgcaaccattc

SEQ ID NO: 372529 - DNA, 25 bp, Artificial
  probe
  misc_feature (1)..(25): SEQ ID NO: 4084; WAN024GKC; Start 652; Stop 676
tttacaacaacggataatgtcatcg

SEQ ID NO: 372530 - DNA, 25 bp, Artificial
  probe
  misc_feature (1)..(25): SEQ ID NO: 4084; WAN024GKC; Start 690; Stop 714
catctttaaggaaatgttcaacgaa

SEQ ID NO: 372531 - DNA, 25 bp, Artificial
  probe
  misc_feature (1)..(25): SEQ ID NO: 4084; WAN024GKC; Start 895; Stop 919
agtagtaagttcctcattccttatc

SEQ ID NO: 372532 - DNA, 25 bp, Artificial
  probe
  misc_feature (1)..(25): SEQ ID NO: 4084; WAN024GKC; Start 127; Stop 151
tctattaactctagcagtgcaacca

SEQ ID NO: 372533 - DNA, 25 bp, Artificial
  probe
  misc_feature (1)..(25): SEQ ID NO: 4084; WAN024GKC; Start 951; Stop 975
agttaatctggattaccaacagcta

SEQ ID NO: 372534 - DNA, 25 bp, Artificial
  probe
  misc_feature (1)..(25): SEQ ID NO: 4084; WAN024GKC; Start 678; Stop 702
tctctttgaacacatctttaaggaa

SEQ ID NO: 372535 - DNA, 25 bp, Artificial
  probe
  misc_feature (1)..(25): SEQ ID NO: 4085; WAN0249LY; Start 83; Stop 107
tcaataaagtgatgaggtgaagtaa

SEQ ID NO: 372536 - DNA, 25 bp, Artificial
  probe
  misc_feature (1)..(25): SEQ ID NO: 4085; WAN0249LY; Start 52; Stop 76
ttggaaagcgatttcaggtgataaa

SEQ ID NO: 372537 - DNA, 25 bp, Artificial
  probe
  misc_feature (1)..(25): SEQ ID NO: 4085; WAN0249LY; Start 51; Stop 75
tttggaaagcgatttcaggtgataa

SEQ ID NO: 372538 - DNA, 25 bp, Artificial
  probe
  misc_feature (1)..(25): SEQ ID NO: 4085; WAN0249LY; Start 2; Stop 26
tgctacctcctacctaacattttac

SEQ ID NO: 372539 - DNA, 25 bp, Artificial
  probe
  misc_feature (1)..(25): SEQ ID NO: 4085; WAN0249LY; Start 1; Stop 25
gtgctacctcctacctaacatttta

SEQ ID NO: 372540 - DNA, 25 bp, Artificial
  probe
  misc_feature (1)..(25): SEQ ID NO: 4085; WAN0249LY; Start 3; Stop 27
gctacctcctacctaacattttacc

SEQ ID NO: 372541 - DNA, 25 bp, Artificial
  probe
  misc_feature (1)..(25): SEQ ID NO: 4085; WAN0249LY; Start 4; Stop 28
ctacctcctacctaacattttacca

SEQ ID NO: 372542 - DNA, 25 bp, Artificial
  probe
  misc_feature (1)..(25): SEQ ID NO: 4085; WAN0249LY; Start 6; Stop 30
acctcctacctaacattttaccata

SEQ ID NO: 372543 - DNA, 25 bp, Artificial
  probe
  misc_feature (1)..(25): SEQ ID NO: 4085; WAN0249LY; Start 5; Stop 29
tacctcctacctaacattttaccat

SEQ ID NO: 372544 - DNA, 25 bp, Artificial
  probe
  misc_feature (1)..(25): SEQ ID NO: 4085; WAN0249LY; Start 81; Stop 105
aatcaataaagtgatgaggtgaagt

SEQ ID NO: 372545 - DNA, 25 bp, Artificial
  probe
  misc_feature (1)..(25): SEQ ID NO: 4085; WAN0249LY; Start 82; Stop 106
atcaataaagtgatgaggtgaagta

SEQ ID NO: 372546 - DNA, 25 bp, Artificial
  probe
  misc_feature (1)..(25): SEQ ID NO: 4085; WAN0249LY; Start 7; Stop 31
cctcctacctaacattttaccatat

SEQ ID NO: 372547 - DNA, 25 bp, Artificial
  probe
  misc_feature (1)..(25): SEQ ID NO: 4085; WAN0249LY; Start 54; Stop 78
ggaaagcgatttcaggtgataaaat

SEQ ID NO: 372548 - DNA, 25 bp, Artificial
  probe
  misc_feature (1)..(25): SEQ ID NO: 4085; WAN0249LY; Start 45; Stop 69
ttctattttggaaagcgatttcagg

SEQ ID NO: 372549 - DNA, 25 bp, Artificial
  probe
  misc_feature (1)..(25): SEQ ID NO: 4085; WAN0249LY; Start 47; Stop 71
ctattttggaaagcgatttcaggtg

SEQ ID NO: 372550 - DNA, 25 bp, Artificial
  probe
  misc_feature (1)..(25): SEQ ID NO: 4085; WAN0249LY; Start 80; Stop 104
taatcaataaagtgatgaggtgaag

SEQ ID NO: 372551 - DNA, 25 bp, Artificial
  probe
  misc_feature (1)..(25): SEQ ID NO: 4085; WAN0249LY; Start 46; Stop 70
tctattttggaaagcgatttcaggt

SEQ ID NO: 372552 - DNA, 25 bp, Artificial
  probe
  misc_feature (1)..(25): SEQ ID NO: 4085; WAN0249LY; Start 56; Stop 80
aaagcgatttcaggtgataaaatat

SEQ ID NO: 372553 - DNA, 25 bp, Artificial
  probe
  misc_feature (1)..(25): SEQ ID NO: 4085; WAN0249LY; Start 53; Stop 77
tggaaagcgatttcaggtgataaaa

SEQ ID NO: 372554 - DNA, 25 bp, Artificial
  probe
  misc_feature (1)..(25): SEQ ID NO: 4085; WAN0249LY; Start 50; Stop 74
ttttggaaagcgatttcaggtgata

SEQ ID NO: 372555 - DNA, 25 bp, Artificial
  probe
  misc_feature (1)..(25): SEQ ID NO: 4085; WAN0249LY; Start 48; Stop 72
tattttggaaagcgatttcaggtga

SEQ ID NO: 372556 - DNA, 25 bp, Artificial
  probe
  misc_feature (1)..(25): SEQ ID NO: 4085; WAN0249LY; Start 44; Stop 68
tttctattttggaaagcgatttcag

SEQ ID NO: 372557 - DNA, 25 bp, Artificial
  probe
  misc_feature (1)..(25): SEQ ID NO: 4085; WAN0249LY; Start 17; Stop 41
aacattttaccatattcttgagaca

SEQ ID NO: 372558 - DNA, 25 bp, Artificial
  probe
  misc_feature (1)..(25): SEQ ID NO: 4085; WAN0249LY; Start 49; Stop 73
attttggaaagcgatttcaggtgat

SEQ ID NO: 372559 - DNA, 25 bp, Artificial
  probe
  misc_feature (1)..(25): SEQ ID NO: 4085; WAN0249LY; Start 43; Stop 67
ttttctattttggaaagcgatttca

SEQ ID NO: 372560 - DNA, 25 bp, Artificial
  probe
  misc_feature (1)..(25): SEQ ID NO: 4085; WAN0249LY; Start 18; Stop 42
acattttaccatattcttgagacat

SEQ ID NO: 372561 - DNA, 25 bp, Artificial
  probe
  misc_feature (1)..(25): SEQ ID NO: 4085; WAN0249LY; Start 55; Stop 79
gaaagcgatttcaggtgataaaata

SEQ ID NO: 372562 - DNA, 25 bp, Artificial
  probe
  misc_feature (1)..(25): SEQ ID NO: 4085; WAN0249LY; Start 58; Stop 82
agcgatttcaggtgataaaatataa

SEQ ID NO: 372563 - DNA, 25 bp, Artificial
  probe
  misc_feature (1)..(25): SEQ ID NO: 4085; WAN0249LY; Start 57; Stop 81
aagcgatttcaggtgataaaatata

SEQ ID NO: 372564 - DNA, 25 bp, Artificial
  probe
  misc_feature (1)..(25): SEQ ID NO: 4085; WAN0249LY; Start 13; Stop 37
acctaacattttaccatattcttga

SEQ ID NO: 372565 - DNA, 25 bp, Artificial
  probe
  misc_feature (1)..(25): SEQ ID NO: 4085; WAN0249LY; Start 79; Stop 103
ataatcaataaagtgatgaggtgaa

SEQ ID NO: 372566 - DNA, 25 bp, Artificial
  probe
  misc_feature (1)..(25): SEQ ID NO: 4085; WAN0249LY; Start 10; Stop 34
cctacctaacattttaccatattct

SEQ ID NO: 372567 - DNA, 25 bp, Artificial
  probe
  misc_feature (1)..(25): SEQ ID NO: 4085; WAN0249LY; Start 9; Stop 33
tcctacctaacattttaccatattc

SEQ ID NO: 372568 - DNA, 25 bp, Artificial
  probe
  misc_feature (1)..(25): SEQ ID NO: 4086; WAN024CV7; Start 93; Stop 117
gattgtccttctttcgctaactaat

SEQ ID NO: 372569 - DNA, 25 bp, Artificial
  probe
  misc_feature (1)..(25): SEQ ID NO: 4086; WAN024CV7; Start 92; Stop 116
agattgtccttctttcgctaactaa

SEQ ID NO: 372570 - DNA, 25 bp, Artificial
  probe
  misc_feature (1)..(25): SEQ ID NO: 4086; WAN024CV7; Start 91; Stop 115
cagattgtccttctttcgctaacta

SEQ ID NO: 372571 - DNA, 25 bp, Artificial
  probe
  misc_feature (1)..(25): SEQ ID NO: 4086; WAN024CV7; Start 88; Stop 112
atacagattgtccttctttcgctaa

SEQ ID NO: 372572 - DNA, 25 bp, Artificial
  probe
  misc_feature (1)..(25): SEQ ID NO: 4086; WAN024CV7; Start 87; Stop 111
gatacagattgtccttctttcgcta

SEQ ID NO: 372573 - DNA, 25 bp, Artificial
  probe
  misc_feature (1)..(25): SEQ ID NO: 4086; WAN024CV7; Start 89; Stop 113
tacagattgtccttctttcgctaac

SEQ ID NO: 372574 - DNA, 25 bp, Artificial
  probe
  misc_feature (1)..(25): SEQ ID NO: 4086; WAN024CV7; Start 16; Stop 40
aaacaaacaggattcccagaaatgc

SEQ ID NO: 372575 - DNA, 25 bp, Artificial
  probe
  misc_feature (1)..(25): SEQ ID NO: 4086; WAN024CV7; Start 90; Stop 114
acagattgtccttctttcgctaact

SEQ ID NO: 372576 - DNA, 25 bp, Artificial
  probe
  misc_feature (1)..(25): SEQ ID NO: 4086; WAN024CV7; Start 15; Stop 39
aaaacaaacaggattcccagaaatg

SEQ ID NO: 372577 - DNA, 25 bp, Artificial
  probe
  misc_feature (1)..(25): SEQ ID NO: 4086; WAN024CV7; Start 14; Stop 38
caaaacaaacaggattcccagaaat

SEQ ID NO: 372578 - DNA, 25 bp, Artificial
  probe
  misc_feature (1)..(25): SEQ ID NO: 4086; WAN024CV7; Start 13; Stop 37
acaaaacaaacaggattcccagaaa

SEQ ID NO: 372579 - DNA, 25 bp, Artificial
  probe
  misc_feature (1)..(25): SEQ ID NO: 4086; WAN024CV7; Start 27; Stop 51
attcccagaaatgccagtaccacta

SEQ ID NO: 372580 - DNA, 25 bp, Artificial
  probe
  misc_feature (1)..(25): SEQ ID NO: 4086; WAN024CV7; Start 21; Stop 45
aacaggattcccagaaatgccagta

SEQ ID NO: 372581 - DNA, 25 bp, Artificial
  probe
  misc_feature (1)..(25): SEQ ID NO: 4086; WAN024CV7; Start 17; Stop 41
aacaaacaggattcccagaaatgcc

SEQ ID NO: 372582 - DNA, 25 bp, Artificial
  probe
  misc_feature (1)..(25): SEQ ID NO: 4086; WAN024CV7; Start 12; Stop 36
cacaaaacaaacaggattcccagaa

SEQ ID NO: 372583 - DNA, 25 bp, Artificial
  probe
  misc_feature (1)..(25): SEQ ID NO: 4086; WAN024CV7; Start 86; Stop 110
cgatacagattgtccttctttcgct

SEQ ID NO: 372584 - DNA, 25 bp, Artificial
  probe
  misc_feature (1)..(25): SEQ ID NO: 4086; WAN024CV7; Start 28; Stop 52
ttcccagaaatgccagtaccactag

SEQ ID NO: 372585 - DNA, 25 bp, Artificial
  probe
  misc_feature (1)..(25): SEQ ID NO: 4086; WAN024CV7; Start 19; Stop 43
caaacaggattcccagaaatgccag

SEQ ID NO: 372586 - DNA, 25 bp, Artificial
  probe
  misc_feature (1)..(25): SEQ ID NO: 4086; WAN024CV7; Start 20; Stop 44
aaacaggattcccagaaatgccagt

SEQ ID NO: 372587 - DNA, 25 bp, Artificial
  probe
  misc_feature (1)..(25): SEQ ID NO: 4086; WAN024CV7; Start 5; Stop 29
tagcttccacaaaacaaacaggatt

SEQ ID NO: 372588 - DNA, 25 bp, Artificial
  probe
  misc_feature (1)..(25): SEQ ID NO: 4086; WAN024CV7; Start 22; Stop 46
acaggattcccagaaatgccagtac

SEQ ID NO: 372589 - DNA, 25 bp, Artificial
  probe
  misc_feature (1)..(25): SEQ ID NO: 4086; WAN024CV7; Start 8; Stop 32
cttccacaaaacaaacaggattccc

SEQ ID NO: 372590 - DNA, 25 bp, Artificial
  probe
  misc_feature (1)..(25): SEQ ID NO: 4086; WAN024CV7; Start 4; Stop 28
ctagcttccacaaaacaaacaggat

SEQ ID NO: 372591 - DNA, 25 bp, Artificial
  probe
  misc_feature (1)..(25): SEQ ID NO: 4086; WAN024CV7; Start 26; Stop 50
gattcccagaaatgccagtaccact

SEQ ID NO: 372592 - DNA, 25 bp, Artificial
  probe
  misc_feature (1)..(25): SEQ ID NO: 4086; WAN024CV7; Start 18; Stop 42
acaaacaggattcccagaaatgcca

SEQ ID NO: 372593 - DNA, 25 bp, Artificial
  probe
  misc_feature (1)..(25): SEQ ID NO: 4086; WAN024CV7; Start 11; Stop 35
ccacaaaacaaacaggattcccaga

SEQ ID NO: 372594 - DNA, 25 bp, Artificial
  probe
  misc_feature (1)..(25): SEQ ID NO: 4086; WAN024CV7; Start 9; Stop 33
ttccacaaaacaaacaggattccca

SEQ ID NO: 372595 - DNA, 25 bp, Artificial
  probe
  misc_feature (1)..(25): SEQ ID NO: 4086; WAN024CV7; Start 7; Stop 31
gcttccacaaaacaaacaggattcc

SEQ ID NO: 372596 - DNA, 25 bp, Artificial
  probe
  misc_feature (1)..(25): SEQ ID NO: 4086; WAN024CV7; Start 6; Stop 30
agcttccacaaaacaaacaggattc

SEQ ID NO: 372597 - DNA, 25 bp, Artificial
  probe
  misc_feature (1)..(25): SEQ ID NO: 4086; WAN024CV7; Start 10; Stop 34
tccacaaaacaaacaggattcccag

SEQ ID NO: 372598 - DNA, 25 bp, Artificial
  probe
  misc_feature (1)..(25): SEQ ID NO: 4086; WAN024CV7; Start 83; Stop 107
acgcgatacagattgtccttctttc

SEQ ID NO: 372599 - DNA, 25 bp, Artificial
  probe
  misc_feature (1)..(25): SEQ ID NO: 4086; WAN024CV7; Start 79; Stop 103
caacacgcgatacagattgtccttc

SEQ ID NO: 372600 - DNA, 25 bp, Artificial
  probe
  misc_feature (1)..(25): SEQ ID NO: 4086; WAN024CV7; Start 81; Stop 105
acacgcgatacagattgtccttctt

SEQ ID NO: 372601 - DNA, 25 bp, Artificial
  probe
  misc_feature (1)..(25): SEQ ID NO: 4087; WAN024BIP; Start 42; Stop 66
aattcaagtcatcaagataccaagc

SEQ ID NO: 372602 - DNA, 25 bp, Artificial
  probe
  misc_feature (1)..(25): SEQ ID NO: 4087; WAN024BIP; Start 43; Stop 67
attcaagtcatcaagataccaagcc

SEQ ID NO: 372603 - DNA, 25 bp, Artificial
  probe
  misc_feature (1)..(25): SEQ ID NO: 4087; WAN024BIP; Start 244; Stop 268
tgctttactaactctctcgtcaaat

SEQ ID NO: 372604 - DNA, 25 bp, Artificial
  probe
  misc_feature (1)..(25): SEQ ID NO: 4087; WAN024BIP; Start 243; Stop 267
atgctttactaactctctcgtcaaa

SEQ ID NO: 372605 - DNA, 25 bp, Artificial
  probe
  misc_feature (1)..(25): SEQ ID NO: 4087; WAN024BIP; Start 242; Stop 266
aatgctttactaactctctcgtcaa

SEQ ID NO: 372606 - DNA, 25 bp, Artificial
  probe
  misc_feature (1)..(25): SEQ ID NO: 4087; WAN024BIP; Start 241; Stop 265
aaatgctttactaactctctcgtca

SEQ ID NO: 372607 - DNA, 25 bp, Artificial
  probe
  misc_feature (1)..(25): SEQ ID NO: 4087; WAN024BIP; Start 238; Stop 262
gctaaatgctttactaactctctcg

SEQ ID NO: 372608 - DNA, 25 bp, Artificial
  probe
  misc_feature (1)..(25): SEQ ID NO: 4087; WAN024BIP; Start 44; Stop 68
ttcaagtcatcaagataccaagccg

SEQ ID NO: 372609 - DNA, 25 bp, Artificial
  probe
  misc_feature (1)..(25): SEQ ID NO: 4087; WAN024BIP; Start 245; Stop 269
gctttactaactctctcgtcaaata

SEQ ID NO: 372610 - DNA, 25 bp, Artificial
  probe
  misc_feature (1)..(25): SEQ ID NO: 4087; WAN024BIP; Start 240; Stop 264
taaatgctttactaactctctcgtc

SEQ ID NO: 372611 - DNA, 25 bp, Artificial
  probe
  misc_feature (1)..(25): SEQ ID NO: 4087; WAN024BIP; Start 239; Stop 263
ctaaatgctttactaactctctcgt

SEQ ID NO: 372612 - DNA, 25 bp, Artificial
  probe
  misc_feature (1)..(25): SEQ ID NO: 4087; WAN024BIP; Start 139; Stop 163
cacagagttgtaggcaagttcagtt

SEQ ID NO: 372613 - DNA, 25 bp, Artificial
  probe
  misc_feature (1)..(25): SEQ ID NO: 4087; WAN024BIP; Start 49; Stop 73
gtcatcaagataccaagccgtcaag

SEQ ID NO: 372614 - DNA, 25 bp, Artificial
  probe
  misc_feature (1)..(25): SEQ ID NO: 4087; WAN024BIP; Start 46; Stop 70
caagtcatcaagataccaagccgtc

SEQ ID NO: 372615 - DNA, 25 bp, Artificial
  probe
  misc_feature (1)..(25): SEQ ID NO: 4087; WAN024BIP; Start 41; Stop 65
aaattcaagtcatcaagataccaag

SEQ ID NO: 372616 - DNA, 25 bp, Artificial
  probe
  misc_feature (1)..(25): SEQ ID NO: 4087; WAN024BIP; Start 250; Stop 274
actaactctctcgtcaaataactaa

SEQ ID NO: 372617 - DNA, 25 bp, Artificial
  probe
  misc_feature (1)..(25): SEQ ID NO: 4087; WAN024BIP; Start 248; Stop 272
ttactaactctctcgtcaaataact

SEQ ID NO: 372618 - DNA, 25 bp, Artificial
  probe
  misc_feature (1)..(25): SEQ ID NO: 4087; WAN024BIP; Start 48; Stop 72
agtcatcaagataccaagccgtcaa

SEQ ID NO: 372619 - DNA, 25 bp, Artificial
  probe
  misc_feature (1)..(25): SEQ ID NO: 4087; WAN024BIP; Start 47; Stop 71
aagtcatcaagataccaagccgtca

SEQ ID NO: 372620 - DNA, 25 bp, Artificial
  probe
  misc_feature (1)..(25): SEQ ID NO: 4087; WAN024BIP; Start 45; Stop 69
tcaagtcatcaagataccaagccgt

SEQ ID NO: 372621 - DNA, 25 bp, Artificial
  probe
  misc_feature (1)..(25): SEQ ID NO: 4087; WAN024BIP; Start 140; Stop 164
acagagttgtaggcaagttcagttt

SEQ ID NO: 372622 - DNA, 25 bp, Artificial
  probe
  misc_feature (1)..(25): SEQ ID NO: 4087; WAN024BIP; Start 247; Stop 271
tttactaactctctcgtcaaataac

SEQ ID NO: 372623 - DNA, 25 bp, Artificial
  probe
  misc_feature (1)..(25): SEQ ID NO: 4087; WAN024BIP; Start 151; Stop 175
ggcaagttcagttttcaagatacat

SEQ ID NO: 372624 - DNA, 25 bp, Artificial
  probe
  misc_feature (1)..(25): SEQ ID NO: 4087; WAN024BIP; Start 149; Stop 173
taggcaagttcagttttcaagatac

SEQ ID NO: 372625 - DNA, 25 bp, Artificial
  probe
  misc_feature (1)..(25): SEQ ID NO: 4087; WAN024BIP; Start 148; Stop 172
gtaggcaagttcagttttcaagata

SEQ ID NO: 372626 - DNA, 25 bp, Artificial
  probe
  misc_feature (1)..(25): SEQ ID NO: 4087; WAN024BIP; Start 249; Stop 273
tactaactctctcgtcaaataacta

SEQ ID NO: 372627 - DNA, 25 bp, Artificial
  probe
  misc_feature (1)..(25): SEQ ID NO: 4087; WAN024BIP; Start 150; Stop 174
aggcaagttcagttttcaagataca

SEQ ID NO: 372628 - DNA, 25 bp, Artificial
  probe
  misc_feature (1)..(25): SEQ ID NO: 4087; WAN024BIP; Start 147; Stop 171
tgtaggcaagttcagttttcaagat

SEQ ID NO: 372629 - DNA, 25 bp, Artificial
  probe
  misc_feature (1)..(25): SEQ ID NO: 4087; WAN024BIP; Start 136; Stop 160
ttccacagagttgtaggcaagttca

SEQ ID NO: 372630 - DNA, 25 bp, Artificial
  probe
  misc_feature (1)..(25): SEQ ID NO: 4087; WAN024BIP; Start 152; Stop 176
gcaagttcagttttcaagatacatc

SEQ ID NO: 372631 - DNA, 25 bp, Artificial
  probe
  misc_feature (1)..(25): SEQ ID NO: 4087; WAN024BIP; Start 246; Stop 270
ctttactaactctctcgtcaaataa

SEQ ID NO: 372632 - DNA, 25 bp, Artificial
  probe
  misc_feature (1)..(25): SEQ ID NO: 4087; WAN024BIP; Start 135; Stop 159
tttccacagagttgtaggcaagttc

SEQ ID NO: 372633 - DNA, 25 bp, Artificial
  probe
  misc_feature (1)..(25): SEQ ID NO: 4087; WAN024BIP; Start 146; Stop 170
ttgtaggcaagttcagttttcaaga

SEQ ID NO: 372634 - DNA, 25 bp, Artificial
  probe
  misc_feature (1)..(25): SEQ ID NO: 4088; WAN024D9N; Start 18; Stop 42
aagagtacatcagatcaaggaggat

SEQ ID NO: 372635 - DNA, 25 bp, Artificial
  probe
  misc_feature (1)..(25): SEQ ID NO: 4088; WAN024D9N; Start 123; Stop 147
agatgatattcgactacaagagctg

SEQ ID NO: 372636 - DNA, 25 bp, Artificial
  probe
  misc_feature (1)..(25): SEQ ID NO: 4088; WAN024D9N; Start 122; Stop 146
cagatgatattcgactacaagagct

SEQ ID NO: 372637 - DNA, 25 bp, Artificial
  probe
  misc_feature (1)..(25): SEQ ID NO: 4088; WAN024D9N; Start 127; Stop 151
gatattcgactacaagagctgctaa

SEQ ID NO: 372638 - DNA, 25 bp, Artificial
  probe
  misc_feature (1)..(25): SEQ ID NO: 4088; WAN024D9N; Start 120; Stop 144
ggcagatgatattcgactacaagag

SEQ ID NO: 372639 - DNA, 25 bp, Artificial
  probe
  misc_feature (1)..(25): SEQ ID NO: 4088; WAN024D9N; Start 330; Stop 354
cgtactaagtctctatggacctgtt

SEQ ID NO: 372640 - DNA, 25 bp, Artificial
  probe
  misc_feature (1)..(25): SEQ ID NO: 4088; WAN024D9N; Start 126; Stop 150
tgatattcgactacaagagctgcta

SEQ ID NO: 372641 - DNA, 25 bp, Artificial
  probe
  misc_feature (1)..(25): SEQ ID NO: 4088; WAN024D9N; Start 124; Stop 148
gatgatattcgactacaagagctgc

SEQ ID NO: 372642 - DNA, 25 bp, Artificial
  probe
  misc_feature (1)..(25): SEQ ID NO: 4088; WAN024D9N; Start 121; Stop 145
gcagatgatattcgactacaagagc

SEQ ID NO: 372643 - DNA, 25 bp, Artificial
  probe
  misc_feature (1)..(25): SEQ ID NO: 4088; WAN024D9N; Start 117; Stop 141
tacggcagatgatattcgactacaa

SEQ ID NO: 372644 - DNA, 25 bp, Artificial
  probe
  misc_feature (1)..(25): SEQ ID NO: 4088; WAN024D9N; Start 52; Stop 76
gaagacaagaaactcattcaactcc

SEQ ID NO: 372645 - DNA, 25 bp, Artificial
  probe
  misc_feature (1)..(25): SEQ ID NO: 4088; WAN024D9N; Start 51; Stop 75
ggaagacaagaaactcattcaactc

SEQ ID NO: 372646 - DNA, 25 bp, Artificial
  probe
  misc_feature (1)..(25): SEQ ID NO: 4088; WAN024D9N; Start 53; Stop 77
aagacaagaaactcattcaactcct

SEQ ID NO: 372647 - DNA, 25 bp, Artificial
  probe
  misc_feature (1)..(25): SEQ ID NO: 4088; WAN024D9N; Start 49; Stop 73
atggaagacaagaaactcattcaac

SEQ ID NO: 372648 - DNA, 25 bp, Artificial
  probe
  misc_feature (1)..(25): SEQ ID NO: 4088; WAN024D9N; Start 59; Stop 83
agaaactcattcaactcctatccaa

SEQ ID NO: 372649 - DNA, 25 bp, Artificial
  probe
  misc_feature (1)..(25): SEQ ID NO: 4088; WAN024D9N; Start 58; Stop 82
aagaaactcattcaactcctatcca

SEQ ID NO: 372650 - DNA, 25 bp, Artificial
  probe
  misc_feature (1)..(25): SEQ ID NO: 4088; WAN024D9N; Start 54; Stop 78
agacaagaaactcattcaactccta

SEQ ID NO: 372651 - DNA, 25 bp, Artificial
  probe
  misc_feature (1)..(25): SEQ ID NO: 4088; WAN024D9N; Start 50; Stop 74
tggaagacaagaaactcattcaact

SEQ ID NO: 372652 - DNA, 25 bp, Artificial
  probe
  misc_feature (1)..(25): SEQ ID NO: 4088; WAN024D9N; Start 60; Stop 84
gaaactcattcaactcctatccaag

SEQ ID NO: 372653 - DNA, 25 bp, Artificial
  probe
  misc_feature (1)..(25): SEQ ID NO: 4088; WAN024D9N; Start 57; Stop 81
caagaaactcattcaactcctatcc

SEQ ID NO: 372654 - DNA, 25 bp, Artificial
  probe
  misc_feature (1)..(25): SEQ ID NO: 4088; WAN024D9N; Start 125; Stop 149
atgatattcgactacaagagctgct

SEQ ID NO: 372655 - DNA, 25 bp, Artificial
  probe
  misc_feature (1)..(25): SEQ ID NO: 4088; WAN024D9N; Start 61; Stop 85
aaactcattcaactcctatccaagt

SEQ ID NO: 372656 - DNA, 25 bp, Artificial
  probe
  misc_feature (1)..(25): SEQ ID NO: 4088; WAN024D9N; Start 56; Stop 80
acaagaaactcattcaactcctatc

SEQ ID NO: 372657 - DNA, 25 bp, Artificial
  probe
  misc_feature (1)..(25): SEQ ID NO: 4088; WAN024D9N; Start 55; Stop 79
gacaagaaactcattcaactcctat

SEQ ID NO: 372658 - DNA, 25 bp, Artificial
  probe
  misc_feature (1)..(25): SEQ ID NO: 4088; WAN024D9N; Start 16; Stop 40
gaaagagtacatcagatcaaggagg

SEQ ID NO: 372659 - DNA, 25 bp, Artificial
  probe
  misc_feature (1)..(25): SEQ ID NO: 4088; WAN024D9N; Start 15; Stop 39
ggaaagagtacatcagatcaaggag

SEQ ID NO: 372660 - DNA, 25 bp, Artificial
  probe
  misc_feature (1)..(25): SEQ ID NO: 4088; WAN024D9N; Start 116; Stop 140
gtacggcagatgatattcgactaca

SEQ ID NO: 372661 - DNA, 25 bp, Artificial
  probe
  misc_feature (1)..(25): SEQ ID NO: 4088; WAN024D9N; Start 17; Stop 41
aaagagtacatcagatcaaggagga

SEQ ID NO: 372662 - DNA, 25 bp, Artificial
  probe
  misc_feature (1)..(25): SEQ ID NO: 4088; WAN024D9N; Start 12; Stop 36
tagggaaagagtacatcagatcaag

SEQ ID NO: 372663 - DNA, 25 bp, Artificial
  probe
  misc_feature (1)..(25): SEQ ID NO: 4088; WAN024D9N; Start 282; Stop 306
cactgcttggcgaaactatgataaa

SEQ ID NO: 372664 - DNA, 25 bp, Artificial
  probe
  misc_feature (1)..(25): SEQ ID NO: 4088; WAN024D9N; Start 119; Stop 143
cggcagatgatattcgactacaaga

SEQ ID NO: 372665 - DNA, 25 bp, Artificial
  probe
  misc_feature (1)..(25): SEQ ID NO: 4088; WAN024D9N; Start 48; Stop 72
catggaagacaagaaactcattcaa

SEQ ID NO: 372666 - DNA, 25 bp, Artificial
  probe
  misc_feature (1)..(25): SEQ ID NO: 4088; WAN024D9N; Start 46; Stop 70
cacatggaagacaagaaactcattc

SEQ ID NO: 372667 - DNA, 25 bp, Artificial
  probe
  misc_feature (1)..(25): SEQ ID NO: 4089; WAN024EZU; Start 84; Stop 108
aatagataaccgtcgcttgattgag

SEQ ID NO: 372668 - DNA, 25 bp, Artificial
  probe
  misc_feature (1)..(25): SEQ ID NO: 4089; WAN024EZU; Start 792; Stop 816
tgaggaacatatctactacgcacat

SEQ ID NO: 372669 - DNA, 25 bp, Artificial
  probe
  misc_feature (1)..(25): SEQ ID NO: 4089; WAN024EZU; Start 791; Stop 815
ctgaggaacatatctactacgcaca

SEQ ID NO: 372670 - DNA, 25 bp, Artificial
  probe
  misc_feature (1)..(25): SEQ ID NO: 4089; WAN024EZU; Start 800; Stop 824
atatctactacgcacatgcttactc

SEQ ID NO: 372671 - DNA, 25 bp, Artificial
  probe
  misc_feature (1)..(25): SEQ ID NO: 4089; WAN024EZU; Start 797; Stop 821
aacatatctactacgcacatgctta

SEQ ID NO: 372672 - DNA, 25 bp, Artificial
  probe
  misc_feature (1)..(25): SEQ ID NO: 4089; WAN024EZU; Start 801; Stop 825
tatctactacgcacatgcttactct

SEQ ID NO: 372673 - DNA, 25 bp, Artificial
  probe
  misc_feature (1)..(25): SEQ ID NO: 4089; WAN024EZU; Start 799; Stop 823
catatctactacgcacatgcttact

SEQ ID NO: 372674 - DNA, 25 bp, Artificial
  probe
  misc_feature (1)..(25): SEQ ID NO: 4089; WAN024EZU; Start 584; Stop 608
ttgataccgtcctactgactaagat

SEQ ID NO: 372675 - DNA, 25 bp, Artificial
  probe
  misc_feature (1)..(25): SEQ ID NO: 4089; WAN024EZU; Start 583; Stop 607
attgataccgtcctactgactaaga

SEQ ID NO: 372676 - DNA, 25 bp, Artificial
  probe
  misc_feature (1)..(25): SEQ ID NO: 4089; WAN024EZU; Start 582; Stop 606
aattgataccgtcctactgactaag

SEQ ID NO: 372677 - DNA, 25 bp, Artificial
  probe
  misc_feature (1)..(25): SEQ ID NO: 4089; WAN024EZU; Start 585; Stop 609
tgataccgtcctactgactaagata

SEQ ID NO: 372678 - DNA, 25 bp, Artificial
  probe
  misc_feature (1)..(25): SEQ ID NO: 4089; WAN024EZU; Start 798; Stop 822
acatatctactacgcacatgcttac

SEQ ID NO: 372679 - DNA, 25 bp, Artificial
  probe
  misc_feature (1)..(25): SEQ ID NO: 4089; WAN024EZU; Start 793; Stop 817
gaggaacatatctactacgcacatg

SEQ ID NO: 372680 - DNA, 25 bp, Artificial
  probe
  misc_feature (1)..(25): SEQ ID NO: 4089; WAN024EZU; Start 796; Stop 820
gaacatatctactacgcacatgctt

SEQ ID NO: 372681 - DNA, 25 bp, Artificial
  probe
  misc_feature (1)..(25): SEQ ID NO: 4089; WAN024EZU; Start 614; Stop 638
attattgcctgttagtcttaaccga

SEQ ID NO: 372682 - DNA, 25 bp, Artificial
  probe
  misc_feature (1)..(25): SEQ ID NO: 4089; WAN024EZU; Start 586; Stop 610
gataccgtcctactgactaagataa

SEQ ID NO: 372683 - DNA, 25 bp, Artificial
  probe
  misc_feature (1)..(25): SEQ ID NO: 4089; WAN024EZU; Start 81; Stop 105
gacaatagataaccgtcgcttgatt

SEQ ID NO: 372684 - DNA, 25 bp, Artificial
  probe
  misc_feature (1)..(25): SEQ ID NO: 4089; WAN024EZU; Start 802; Stop 826
atctactacgcacatgcttactctt

SEQ ID NO: 372685 - DNA, 25 bp, Artificial
  probe
  misc_feature (1)..(25): SEQ ID NO: 4089; WAN024EZU; Start 613; Stop 637
aattattgcctgttagtcttaaccg

SEQ ID NO: 372686 - DNA, 25 bp, Artificial
  probe
  misc_feature (1)..(25): SEQ ID NO: 4089; WAN024EZU; Start 790; Stop 814
cctgaggaacatatctactacgcac

SEQ ID NO: 372687 - DNA, 25 bp, Artificial
  probe
  misc_feature (1)..(25): SEQ ID NO: 4089; WAN024EZU; Start 615; Stop 639
ttattgcctgttagtcttaaccgac

SEQ ID NO: 372688 - DNA, 25 bp, Artificial
  probe
  misc_feature (1)..(25): SEQ ID NO: 4089; WAN024EZU; Start 805; Stop 829
tactacgcacatgcttactcttcat

SEQ ID NO: 372689 - DNA, 25 bp, Artificial
  probe
  misc_feature (1)..(25): SEQ ID NO: 4089; WAN024EZU; Start 860; Stop 884
gattaattcggagatggttacctaa

SEQ ID NO: 372690 - DNA, 25 bp, Artificial
  probe
  misc_feature (1)..(25): SEQ ID NO: 4089; WAN024EZU; Start 803; Stop 827
tctactacgcacatgcttactcttc

SEQ ID NO: 372691 - DNA, 25 bp, Artificial
  probe
  misc_feature (1)..(25): SEQ ID NO: 4089; WAN024EZU; Start 39; Stop 63
cacagagatgcaagaacattatacc

SEQ ID NO: 372692 - DNA, 25 bp, Artificial
  probe
  misc_feature (1)..(25): SEQ ID NO: 4089; WAN024EZU; Start 80; Stop 104
tgacaatagataaccgtcgcttgat

SEQ ID NO: 372693 - DNA, 25 bp, Artificial
  probe
  misc_feature (1)..(25): SEQ ID NO: 4089; WAN024EZU; Start 543; Stop 567
tgacgttattaatcttcgcttggaa

SEQ ID NO: 372694 - DNA, 25 bp, Artificial
  probe
  misc_feature (1)..(25): SEQ ID NO: 4089; WAN024EZU; Start 542; Stop 566
ctgacgttattaatcttcgcttgga

SEQ ID NO: 372695 - DNA, 25 bp, Artificial
  probe
  misc_feature (1)..(25): SEQ ID NO: 4089; WAN024EZU; Start 540; Stop 564
tcctgacgttattaatcttcgcttg

SEQ ID NO: 372696 - DNA, 25 bp, Artificial
  probe
  misc_feature (1)..(25): SEQ ID NO: 4089; WAN024EZU; Start 539; Stop 563
gtcctgacgttattaatcttcgctt

SEQ ID NO: 372697 - DNA, 25 bp, Artificial
  probe
  misc_feature (1)..(25): SEQ ID NO: 4089; WAN024EZU; Start 804; Stop 828
ctactacgcacatgcttactcttca

SEQ ID NO: 372698 - DNA, 25 bp, Artificial
  probe
  misc_feature (1)..(25): SEQ ID NO: 4089; WAN024EZU; Start 863; Stop 887
taattcggagatggttacctaaagg

SEQ ID NO: 372699 - DNA, 25 bp, Artificial
  probe
  misc_feature (1)..(25): SEQ ID NO: 4089; WAN024EZU; Start 410; Stop 434
tctactactggtttcataatggtca

SEQ ID NO: 372700 - DNA, 25 bp, Artificial
  probe
  misc_feature (1)..(25): SEQ ID NO: 4090; WAN024F2H; Start 114; Stop 138
ccttgaagtaccagatgtgagatac

SEQ ID NO: 372701 - DNA, 25 bp, Artificial
  probe
  misc_feature (1)..(25): SEQ ID NO: 4090; WAN024F2H; Start 116; Stop 140
ttgaagtaccagatgtgagatacag

SEQ ID NO: 372702 - DNA, 25 bp, Artificial
  probe
  misc_feature (1)..(25): SEQ ID NO: 4090; WAN024F2H; Start 115; Stop 139
cttgaagtaccagatgtgagataca

SEQ ID NO: 372703 - DNA, 25 bp, Artificial
  probe
  misc_feature (1)..(25): SEQ ID NO: 4090; WAN024F2H; Start 119; Stop 143
aagtaccagatgtgagatacaggag

SEQ ID NO: 372704 - DNA, 25 bp, Artificial
  probe
  misc_feature (1)..(25): SEQ ID NO: 4090; WAN024F2H; Start 118; Stop 142
gaagtaccagatgtgagatacagga

SEQ ID NO: 372705 - DNA, 25 bp, Artificial
  probe
  misc_feature (1)..(25): SEQ ID NO: 4090; WAN024F2H; Start 117; Stop 141
tgaagtaccagatgtgagatacagg

SEQ ID NO: 372706 - DNA, 25 bp, Artificial
  probe
  misc_feature (1)..(25): SEQ ID NO: 4090; WAN024F2H; Start 19; Stop 43
cttaggatcaatcaccacataagcc

SEQ ID NO: 372707 - DNA, 25 bp, Artificial
  probe
  misc_feature (1)..(25): SEQ ID NO: 4090; WAN024F2H; Start 18; Stop 42
ccttaggatcaatcaccacataagc

SEQ ID NO: 372708 - DNA, 25 bp, Artificial
  probe
  misc_feature (1)..(25): SEQ ID NO: 4090; WAN024F2H; Start 17; Stop 41
tccttaggatcaatcaccacataag

SEQ ID NO: 372709 - DNA, 25 bp, Artificial
  probe
  misc_feature (1)..(25): SEQ ID NO: 4090; WAN024F2H; Start 20; Stop 44
ttaggatcaatcaccacataagccg

SEQ ID NO: 372710 - DNA, 25 bp, Artificial
  probe
  misc_feature (1)..(25): SEQ ID NO: 4090; WAN024F2H; Start 287; Stop 311
atcacttcatcaaagagtccttcac

SEQ ID NO: 372711 - DNA, 25 bp, Artificial
  probe
  misc_feature (1)..(25): SEQ ID NO: 4090; WAN024F2H; Start 312; Stop 336
gttctggtttcaaggtacgataatt

SEQ ID NO: 372712 - DNA, 25 bp, Artificial
  probe
  misc_feature (1)..(25): SEQ ID NO: 4090; WAN024F2H; Start 279; Stop 303
gaccaaagatcacttcatcaaagag

SEQ ID NO: 372713 - DNA, 25 bp, Artificial
  probe
  misc_feature (1)..(25): SEQ ID NO: 4090; WAN024F2H; Start 276; Stop 300
taggaccaaagatcacttcatcaaa

SEQ ID NO: 372714 - DNA, 25 bp, Artificial
  probe
  misc_feature (1)..(25): SEQ ID NO: 4090; WAN024F2H; Start 275; Stop 299
gtaggaccaaagatcacttcatcaa

SEQ ID NO: 372715 - DNA, 25 bp, Artificial
  probe
  misc_feature (1)..(25): SEQ ID NO: 4090; WAN024F2H; Start 34; Stop 58
cacataagccgcaaagtagataact

SEQ ID NO: 372716 - DNA, 25 bp, Artificial
  probe
  misc_feature (1)..(25): SEQ ID NO: 4090; WAN024F2H; Start 33; Stop 57
ccacataagccgcaaagtagataac

SEQ ID NO: 372717 - DNA, 25 bp, Artificial
  probe
  misc_feature (1)..(25): SEQ ID NO: 4090; WAN024F2H; Start 273; Stop 297
ttgtaggaccaaagatcacttcatc

SEQ ID NO: 372718 - DNA, 25 bp, Artificial
  probe
  misc_feature (1)..(25): SEQ ID NO: 4090; WAN024F2H; Start 278; Stop 302
ggaccaaagatcacttcatcaaaga

SEQ ID NO: 372719 - DNA, 25 bp, Artificial
  probe
  misc_feature (1)..(25): SEQ ID NO: 4090; WAN024F2H; Start 277; Stop 301
aggaccaaagatcacttcatcaaag

SEQ ID NO: 372720 - DNA, 25 bp, Artificial
  probe
  misc_feature (1)..(25): SEQ ID NO: 4090; WAN024F2H; Start 113; Stop 137
cccttgaagtaccagatgtgagata

SEQ ID NO: 372721 - DNA, 25 bp, Artificial
  probe
  misc_feature (1)..(25): SEQ ID NO: 4090; WAN024F2H; Start 284; Stop 308
aagatcacttcatcaaagagtcctt

SEQ ID NO: 372722 - DNA, 25 bp, Artificial
  probe
  misc_feature (1)..(25): SEQ ID NO: 4090; WAN024F2H; Start 283; Stop 307
aaagatcacttcatcaaagagtcct

SEQ ID NO: 372723 - DNA, 25 bp, Artificial
  probe
  misc_feature (1)..(25): SEQ ID NO: 4090; WAN024F2H; Start 282; Stop 306
caaagatcacttcatcaaagagtcc

SEQ ID NO: 372724 - DNA, 25 bp, Artificial
  probe
  misc_feature (1)..(25): SEQ ID NO: 4090; WAN024F2H; Start 281; Stop 305
ccaaagatcacttcatcaaagagtc

SEQ ID NO: 372725 - DNA, 25 bp, Artificial
  probe
  misc_feature (1)..(25): SEQ ID NO: 4090; WAN024F2H; Start 212; Stop 236
tcacaaacaattcctctgtaacgaa

SEQ ID NO: 372726 - DNA, 25 bp, Artificial
  probe
  misc_feature (1)..(25): SEQ ID NO: 4090; WAN024F2H; Start 313; Stop 337
ttctggtttcaaggtacgataattg

SEQ ID NO: 372727 - DNA, 25 bp, Artificial
  probe
  misc_feature (1)..(25): SEQ ID NO: 4090; WAN024F2H; Start 285; Stop 309
agatcacttcatcaaagagtccttc

SEQ ID NO: 372728 - DNA, 25 bp, Artificial
  probe
  misc_feature (1)..(25): SEQ ID NO: 4090; WAN024F2H; Start 280; Stop 304
accaaagatcacttcatcaaagagt

SEQ ID NO: 372729 - DNA, 25 bp, Artificial
  probe
  misc_feature (1)..(25): SEQ ID NO: 4090; WAN024F2H; Start 286; Stop 310
gatcacttcatcaaagagtccttca

SEQ ID NO: 372730 - DNA, 25 bp, Artificial
  probe
  misc_feature (1)..(25): SEQ ID NO: 4090; WAN024F2H; Start 325; Stop 349
ggtacgataattgattgtttcaggt

SEQ ID NO: 372731 - DNA, 25 bp, Artificial
  probe
  misc_feature (1)..(25): SEQ ID NO: 4090; WAN024F2H; Start 324; Stop 348
aggtacgataattgattgtttcagg

SEQ ID NO: 372732 - DNA, 25 bp, Artificial
  probe
  misc_feature (1)..(25): SEQ ID NO: 4090; WAN024F2H; Start 274; Stop 298
tgtaggaccaaagatcacttcatca

SEQ ID NO: 372733 - DNA, 25 bp, Artificial
  probe
  misc_feature (1)..(25): SEQ ID NO: 4091; WAN024FIU; Start 285; Stop 309
actcttggttagcataagttccatc

SEQ ID NO: 372734 - DNA, 25 bp, Artificial
  probe
  misc_feature (1)..(25): SEQ ID NO: 4091; WAN024FIU; Start 284; Stop 308
cactcttggttagcataagttccat

SEQ ID NO: 372735 - DNA, 25 bp, Artificial
  probe
  misc_feature (1)..(25): SEQ ID NO: 4091; WAN024FIU; Start 37; Stop 61
ggttcccacttgttcttctctatta

SEQ ID NO: 372736 - DNA, 25 bp, Artificial
  probe
  misc_feature (1)..(25): SEQ ID NO: 4091; WAN024FIU; Start 204; Stop 228
aatagtagttgccttgccactcatt

SEQ ID NO: 372737 - DNA, 25 bp, Artificial
  probe
  misc_feature (1)..(25): SEQ ID NO: 4091; WAN024FIU; Start 157; Stop 181
accatccataatcacttcgtcagtc

SEQ ID NO: 372738 - DNA, 25 bp, Artificial
  probe
  misc_feature (1)..(25): SEQ ID NO: 4091; WAN024FIU; Start 286; Stop 310
ctcttggttagcataagttccatcg

SEQ ID NO: 372739 - DNA, 25 bp, Artificial
  probe
  misc_feature (1)..(25): SEQ ID NO: 4091; WAN024FIU; Start 205; Stop 229
atagtagttgccttgccactcattc

SEQ ID NO: 372740 - DNA, 25 bp, Artificial
  probe
  misc_feature (1)..(25): SEQ ID NO: 4091; WAN024FIU; Start 194; Stop 218
cttccagtcaaatagtagttgcctt

SEQ ID NO: 372741 - DNA, 25 bp, Artificial
  probe
  misc_feature (1)..(25): SEQ ID NO: 4091; WAN024FIU; Start 190; Stop 214
accacttccagtcaaatagtagttg

SEQ ID NO: 372742 - DNA, 25 bp, Artificial
  probe
  misc_feature (1)..(25): SEQ ID NO: 4091; WAN024FIU; Start 189; Stop 213
caccacttccagtcaaatagtagtt

SEQ ID NO: 372743 - DNA, 25 bp, Artificial
  probe
  misc_feature (1)..(25): SEQ ID NO: 4091; WAN024FIU; Start 195; Stop 219
ttccagtcaaatagtagttgccttg

SEQ ID NO: 372744 - DNA, 25 bp, Artificial
  probe
  misc_feature (1)..(25): SEQ ID NO: 4091; WAN024FIU; Start 38; Stop 62
gttcccacttgttcttctctattat

SEQ ID NO: 372745 - DNA, 25 bp, Artificial
  probe
  misc_feature (1)..(25): SEQ ID NO: 4091; WAN024FIU; Start 290; Stop 314
tggttagcataagttccatcggatt

SEQ ID NO: 372746 - DNA, 25 bp, Artificial
  probe
  misc_feature (1)..(25): SEQ ID NO: 4091; WAN024FIU; Start 289; Stop 313
ttggttagcataagttccatcggat

SEQ ID NO: 372747 - DNA, 25 bp, Artificial
  probe
  misc_feature (1)..(25): SEQ ID NO: 4091; WAN024FIU; Start 193; Stop 217
acttccagtcaaatagtagttgcct

SEQ ID NO: 372748 - DNA, 25 bp, Artificial
  probe
  misc_feature (1)..(25): SEQ ID NO: 4091; WAN024FIU; Start 192; Stop 216
cacttccagtcaaatagtagttgcc

SEQ ID NO: 372749 - DNA, 25 bp, Artificial
  probe
  misc_feature (1)..(25): SEQ ID NO: 4091; WAN024FIU; Start 191; Stop 215
ccacttccagtcaaatagtagttgc

SEQ ID NO: 372750 - DNA, 25 bp, Artificial
  probe
  misc_feature (1)..(25): SEQ ID NO: 4091; WAN024FIU; Start 283; Stop 307
ccactcttggttagcataagttcca

SEQ ID NO: 372751 - DNA, 25 bp, Artificial
  probe
  misc_feature (1)..(25): SEQ ID NO: 4091; WAN024FIU; Start 158; Stop 182
ccatccataatcacttcgtcagtcg

SEQ ID NO: 372752 - DNA, 25 bp, Artificial
  probe
  misc_feature (1)..(25): SEQ ID NO: 4091; WAN024FIU; Start 247; Stop 271
cttcttgaaatagtaccatttgccg

SEQ ID NO: 372753 - DNA, 25 bp, Artificial
  probe
  misc_feature (1)..(25): SEQ ID NO: 4091; WAN024FIU; Start 246; Stop 270
acttcttgaaatagtaccatttgcc

SEQ ID NO: 372754 - DNA, 25 bp, Artificial
  probe
  misc_feature (1)..(25): SEQ ID NO: 4091; WAN024FIU; Start 288; Stop 312
cttggttagcataagttccatcgga

SEQ ID NO: 372755 - DNA, 25 bp, Artificial
  probe
  misc_feature (1)..(25): SEQ ID NO: 4091; WAN024FIU; Start 287; Stop 311
tcttggttagcataagttccatcgg

SEQ ID NO: 372756 - DNA, 25 bp, Artificial
  probe
  misc_feature (1)..(25): SEQ ID NO: 4091; WAN024FIU; Start 39; Stop 63
ttcccacttgttcttctctattatt

SEQ ID NO: 372757 - DNA, 25 bp, Artificial
  probe
  misc_feature (1)..(25): SEQ ID NO: 4091; WAN024FIU; Start 36; Stop 60
cggttcccacttgttcttctctatt

SEQ ID NO: 372758 - DNA, 25 bp, Artificial
  probe
  misc_feature (1)..(25): SEQ ID NO: 4091; WAN024FIU; Start 243; Stop 267
cccacttcttgaaatagtaccattt

SEQ ID NO: 372759 - DNA, 25 bp, Artificial
  probe
  misc_feature (1)..(25): SEQ ID NO: 4091; WAN024FIU; Start 245; Stop 269
cacttcttgaaatagtaccatttgc

SEQ ID NO: 372760 - DNA, 25 bp, Artificial
  probe
  misc_feature (1)..(25): SEQ ID NO: 4091; WAN024FIU; Start 291; Stop 315
ggttagcataagttccatcggattt

SEQ ID NO: 372761 - DNA, 25 bp, Artificial
  probe
  misc_feature (1)..(25): SEQ ID NO: 4091; WAN024FIU; Start 203; Stop 227
aaatagtagttgccttgccactcat

SEQ ID NO: 372762 - DNA, 25 bp, Artificial
  probe
  misc_feature (1)..(25): SEQ ID NO: 4091; WAN024FIU; Start 188; Stop 212
gcaccacttccagtcaaatagtagt

SEQ ID NO: 372763 - DNA, 25 bp, Artificial
  probe
  misc_feature (1)..(25): SEQ ID NO: 4091; WAN024FIU; Start 244; Stop 268
ccacttcttgaaatagtaccatttg

SEQ ID NO: 372764 - DNA, 25 bp, Artificial
  probe
  misc_feature (1)..(25): SEQ ID NO: 4091; WAN024FIU; Start 159; Stop 183
catccataatcacttcgtcagtcgc

SEQ ID NO: 372765 - DNA, 25 bp, Artificial
  probe
  misc_feature (1)..(25): SEQ ID NO: 4091; WAN024FIU; Start 40; Stop 64
tcccacttgttcttctctattatta

SEQ ID NO: 372766 - DNA, 25 bp, Artificial
  probe
  misc_feature (1)..(25): SEQ ID NO: 4092; WAN024GLT; Start 71; Stop 95
ccgttaccaaggataccaatgatat

SEQ ID NO: 372767 - DNA, 25 bp, Artificial
  probe
  misc_feature (1)..(25): SEQ ID NO: 4092; WAN024GLT; Start 110; Stop 134
atatgattgagaacagcttcgtctt

SEQ ID NO: 372768 - DNA, 25 bp, Artificial
  probe
  misc_feature (1)..(25): SEQ ID NO: 4092; WAN024GLT; Start 109; Stop 133
aatatgattgagaacagcttcgtct

SEQ ID NO: 372769 - DNA, 25 bp, Artificial
  probe
  misc_feature (1)..(25): SEQ ID NO: 4092; WAN024GLT; Start 111; Stop 135
tatgattgagaacagcttcgtcttg

SEQ ID NO: 372770 - DNA, 25 bp, Artificial
  probe
  misc_feature (1)..(25): SEQ ID NO: 4092; WAN024GLT; Start 102; Stop 126
gactgacaatatgattgagaacagc

SEQ ID NO: 372771 - DNA, 25 bp, Artificial
  probe
  misc_feature (1)..(25): SEQ ID NO: 4092; WAN024GLT; Start 101; Stop 125
cgactgacaatatgattgagaacag

SEQ ID NO: 372772 - DNA, 25 bp, Artificial
  probe
  misc_feature (1)..(25): SEQ ID NO: 4092; WAN024GLT; Start 98; Stop 122
aagcgactgacaatatgattgagaa

SEQ ID NO: 372773 - DNA, 25 bp, Artificial
  probe
  misc_feature (1)..(25): SEQ ID NO: 4092; WAN024GLT; Start 99; Stop 123
agcgactgacaatatgattgagaac

SEQ ID NO: 372774 - DNA, 25 bp, Artificial
  probe
  misc_feature (1)..(25): SEQ ID NO: 4092; WAN024GLT; Start 100; Stop 124
gcgactgacaatatgattgagaaca

SEQ ID NO: 372775 - DNA, 25 bp, Artificial
  probe
  misc_feature (1)..(25): SEQ ID NO: 4092; WAN024GLT; Start 70; Stop 94
cccgttaccaaggataccaatgata

SEQ ID NO: 372776 - DNA, 25 bp, Artificial
  probe
  misc_feature (1)..(25): SEQ ID NO: 4092; WAN024GLT; Start 72; Stop 96
cgttaccaaggataccaatgatatc

SEQ ID NO: 372777 - DNA, 25 bp, Artificial
  probe
  misc_feature (1)..(25): SEQ ID NO: 4092; WAN024GLT; Start 103; Stop 127
actgacaatatgattgagaacagct

SEQ ID NO: 372778 - DNA, 25 bp, Artificial
  probe
  misc_feature (1)..(25): SEQ ID NO: 4092; WAN024GLT; Start 108; Stop 132
caatatgattgagaacagcttcgtc

SEQ ID NO: 372779 - DNA, 25 bp, Artificial
  probe
  misc_feature (1)..(25): SEQ ID NO: 4092; WAN024GLT; Start 106; Stop 130
gacaatatgattgagaacagcttcg

SEQ ID NO: 372780 - DNA, 25 bp, Artificial
  probe
  misc_feature (1)..(25): SEQ ID NO: 4092; WAN024GLT; Start 105; Stop 129
tgacaatatgattgagaacagcttc

SEQ ID NO: 372781 - DNA, 25 bp, Artificial
  probe
  misc_feature (1)..(25): SEQ ID NO: 4092; WAN024GLT; Start 104; Stop 128
ctgacaatatgattgagaacagctt

SEQ ID NO: 372782 - DNA, 25 bp, Artificial
  probe
  misc_feature (1)..(25): SEQ ID NO: 4092; WAN024GLT; Start 107; Stop 131
acaatatgattgagaacagcttcgt

SEQ ID NO: 372783 - DNA, 25 bp, Artificial
  probe
  misc_feature (1)..(25): SEQ ID NO: 4092; WAN024GLT; Start 97; Stop 121
aaagcgactgacaatatgattgaga

SEQ ID NO: 372784 - DNA, 25 bp, Artificial
  probe
  misc_feature (1)..(25): SEQ ID NO: 4092; WAN024GLT; Start 96; Stop 120
caaagcgactgacaatatgattgag

SEQ ID NO: 372785 - DNA, 25 bp, Artificial
  probe
  misc_feature (1)..(25): SEQ ID NO: 4092; WAN024GLT; Start 91; Stop 115
gatatcaaagcgactgacaatatga

SEQ ID NO: 372786 - DNA, 25 bp, Artificial
  probe
  misc_feature (1)..(25): SEQ ID NO: 4092; WAN024GLT; Start 94; Stop 118
atcaaagcgactgacaatatgattg

SEQ ID NO: 372787 - DNA, 25 bp, Artificial
  probe
  misc_feature (1)..(25): SEQ ID NO: 4092; WAN024GLT; Start 9; Stop 33
tcagggcgataaagatatcacaatc

SEQ ID NO: 372788 - DNA, 25 bp, Artificial
  probe
  misc_feature (1)..(25): SEQ ID NO: 4092; WAN024GLT; Start 2; Stop 26
tgctcagtcagggcgataaagatat

SEQ ID NO: 372789 - DNA, 25 bp, Artificial
  probe
  misc_feature (1)..(25): SEQ ID NO: 4092; WAN024GLT; Start 8; Stop 32
gtcagggcgataaagatatcacaat

SEQ ID NO: 372790 - DNA, 25 bp, Artificial
  probe
  misc_feature (1)..(25): SEQ ID NO: 4092; WAN024GLT; Start 23; Stop 47
atatcacaatcttggacgctggctt

SEQ ID NO: 372791 - DNA, 25 bp, Artificial
  probe
  misc_feature (1)..(25): SEQ ID NO: 4092; WAN024GLT; Start 93; Stop 117
tatcaaagcgactgacaatatgatt

SEQ ID NO: 372792 - DNA, 25 bp, Artificial
  probe
  misc_feature (1)..(25): SEQ ID NO: 4092; WAN024GLT; Start 95; Stop 119
tcaaagcgactgacaatatgattga

SEQ ID NO: 372793 - DNA, 25 bp, Artificial
  probe
  misc_feature (1)..(25): SEQ ID NO: 4092; WAN024GLT; Start 112; Stop 136
atgattgagaacagcttcgtcttgc

SEQ ID NO: 372794 - DNA, 25 bp, Artificial
  probe
  misc_feature (1)..(25): SEQ ID NO: 4092; WAN024GLT; Start 92; Stop 116
atatcaaagcgactgacaatatgat

SEQ ID NO: 372795 - DNA, 25 bp, Artificial
  probe
  misc_feature (1)..(25): SEQ ID NO: 4092; WAN024GLT; Start 7; Stop 31
agtcagggcgataaagatatcacaa

SEQ ID NO: 372796 - DNA, 25 bp, Artificial
  probe
  misc_feature (1)..(25): SEQ ID NO: 4092; WAN024GLT; Start 4; Stop 28
ctcagtcagggcgataaagatatca

SEQ ID NO: 372797 - DNA, 25 bp, Artificial
  probe
  misc_feature (1)..(25): SEQ ID NO: 4092; WAN024GLT; Start 5; Stop 29
tcagtcagggcgataaagatatcac

SEQ ID NO: 372798 - DNA, 25 bp, Artificial
  probe
  misc_feature (1)..(25): SEQ ID NO: 4092; WAN024GLT; Start 10; Stop 34
cagggcgataaagatatcacaatct

SEQ ID NO: 372799 - DNA, 25 bp, Artificial
  probe
  misc_feature (1)..(25): SEQ ID NO: 4093; WAN024F5N; Start 8; Stop 32
tactcaggctggataaagatttctc

SEQ ID NO: 372800 - DNA, 25 bp, Artificial
  probe
  misc_feature (1)..(25): SEQ ID NO: 4093; WAN024F5N; Start 4; Stop 28
ctcatactcaggctggataaagatt

SEQ ID NO: 372801 - DNA, 25 bp, Artificial
  probe
  misc_feature (1)..(25): SEQ ID NO: 4093; WAN024F5N; Start 5; Stop 29
tcatactcaggctggataaagattt

SEQ ID NO: 372802 - DNA, 25 bp, Artificial
  probe
  misc_feature (1)..(25): SEQ ID NO: 4093; WAN024F5N; Start 6; Stop 30
catactcaggctggataaagatttc

SEQ ID NO: 372803 - DNA, 25 bp, Artificial
  probe
  misc_feature (1)..(25): SEQ ID NO: 4093; WAN024F5N; Start 7; Stop 31
atactcaggctggataaagatttct

SEQ ID NO: 372804 - DNA, 25 bp, Artificial
  probe
  misc_feature (1)..(25): SEQ ID NO: 4093; WAN024F5N; Start 158; Stop 182
tgttggaaataagtgaactgagtga

SEQ ID NO: 372805 - DNA, 25 bp, Artificial
  probe
  misc_feature (1)..(25): SEQ ID NO: 4093; WAN024F5N; Start 157; Stop 181
ttgttggaaataagtgaactgagtg

SEQ ID NO: 372806 - DNA, 25 bp, Artificial
  probe
  misc_feature (1)..(25): SEQ ID NO: 4093; WAN024F5N; Start 156; Stop 180
cttgttggaaataagtgaactgagt

SEQ ID NO: 372807 - DNA, 25 bp, Artificial
  probe
  misc_feature (1)..(25): SEQ ID NO: 4093; WAN024F5N; Start 159; Stop 183
gttggaaataagtgaactgagtgat

SEQ ID NO: 372808 - DNA, 25 bp, Artificial
  probe
  misc_feature (1)..(25): SEQ ID NO: 4093; WAN024F5N; Start 167; Stop 191
taagtgaactgagtgatttccattc

SEQ ID NO: 372809 - DNA, 25 bp, Artificial
  probe
  misc_feature (1)..(25): SEQ ID NO: 4093; WAN024F5N; Start 160; Stop 184
ttggaaataagtgaactgagtgatt

SEQ ID NO: 372810 - DNA, 25 bp, Artificial
  probe
  misc_feature (1)..(25): SEQ ID NO: 4093; WAN024F5N; Start 168; Stop 192
aagtgaactgagtgatttccattcc

SEQ ID NO: 372811 - DNA, 25 bp, Artificial
  probe
  misc_feature (1)..(25): SEQ ID NO: 4093; WAN024F5N; Start 166; Stop 190
ataagtgaactgagtgatttccatt

SEQ ID NO: 372812 - DNA, 25 bp, Artificial
  probe
  misc_feature (1)..(25): SEQ ID NO: 4093; WAN024F5N; Start 165; Stop 189
aataagtgaactgagtgatttccat

SEQ ID NO: 372813 - DNA, 25 bp, Artificial
  probe
  misc_feature (1)..(25): SEQ ID NO: 4093; WAN024F5N; Start 3; Stop 27
gctcatactcaggctggataaagat

SEQ ID NO: 372814 - DNA, 25 bp, Artificial
  probe
  misc_feature (1)..(25): SEQ ID NO: 4093; WAN024F5N; Start 164; Stop 188
aaataagtgaactgagtgatttcca

SEQ ID NO: 372815 - DNA, 25 bp, Artificial
  probe
  misc_feature (1)..(25): SEQ ID NO: 4093; WAN024F5N; Start 161; Stop 185
tggaaataagtgaactgagtgattt

SEQ ID NO: 372816 - DNA, 25 bp, Artificial
  probe
  misc_feature (1)..(25): SEQ ID NO: 4093; WAN024F5N; Start 14; Stop 38
ggctggataaagatttctccgtatt

SEQ ID NO: 372817 - DNA, 25 bp, Artificial
  probe
  misc_feature (1)..(25): SEQ ID NO: 4093; WAN024F5N; Start 15; Stop 39
gctggataaagatttctccgtattt

SEQ ID NO: 372818 - DNA, 25 bp, Artificial
  probe
  misc_feature (1)..(25): SEQ ID NO: 4093; WAN024F5N; Start 13; Stop 37
aggctggataaagatttctccgtat

SEQ ID NO: 372819 - DNA, 25 bp, Artificial
  probe
  misc_feature (1)..(25): SEQ ID NO: 4093; WAN024F5N; Start 173; Stop 197
aactgagtgatttccattccgtcaa

SEQ ID NO: 372820 - DNA, 25 bp, Artificial
  probe
  misc_feature (1)..(25): SEQ ID NO: 4093; WAN024F5N; Start 2; Stop 26
tgctcatactcaggctggataaaga

SEQ ID NO: 372821 - DNA, 25 bp, Artificial
  probe
  misc_feature (1)..(25): SEQ ID NO: 4093; WAN024F5N; Start 1; Stop 25
gtgctcatactcaggctggataaag

SEQ ID NO: 372822 - DNA, 25 bp, Artificial
  probe
  misc_feature (1)..(25): SEQ ID NO: 4093; WAN024F5N; Start 9; Stop 33
actcaggctggataaagatttctcc

SEQ ID NO: 372823 - DNA, 25 bp, Artificial
  probe
  misc_feature (1)..(25): SEQ ID NO: 4093; WAN024F5N; Start 171; Stop 195
tgaactgagtgatttccattccgtc

SEQ ID NO: 372824 - DNA, 25 bp, Artificial
  probe
  misc_feature (1)..(25): SEQ ID NO: 4093; WAN024F5N; Start 169; Stop 193
agtgaactgagtgatttccattccg

SEQ ID NO: 372825 - DNA, 25 bp, Artificial
  probe
  misc_feature (1)..(25): SEQ ID NO: 4093; WAN024F5N; Start 12; Stop 36
caggctggataaagatttctccgta

SEQ ID NO: 372826 - DNA, 25 bp, Artificial
  probe
  misc_feature (1)..(25): SEQ ID NO: 4093; WAN024F5N; Start 174; Stop 198
actgagtgatttccattccgtcaag

SEQ ID NO: 372827 - DNA, 25 bp, Artificial
  probe
  misc_feature (1)..(25): SEQ ID NO: 4093; WAN024F5N; Start 172; Stop 196
gaactgagtgatttccattccgtca

SEQ ID NO: 372828 - DNA, 25 bp, Artificial
  probe
  misc_feature (1)..(25): SEQ ID NO: 4093; WAN024F5N; Start 170; Stop 194
gtgaactgagtgatttccattccgt

SEQ ID NO: 372829 - DNA, 25 bp, Artificial
  probe
  misc_feature (1)..(25): SEQ ID NO: 4093; WAN024F5N; Start 26; Stop 50
atttctccgtattttacaccatcag

SEQ ID NO: 372830 - DNA, 25 bp, Artificial
  probe
  misc_feature (1)..(25): SEQ ID NO: 4093; WAN024F5N; Start 25; Stop 49
gatttctccgtattttacaccatca

SEQ ID NO: 372831 - DNA, 25 bp, Artificial
  probe
  misc_feature (1)..(25): SEQ ID NO: 4093; WAN024F5N; Start 24; Stop 48
agatttctccgtattttacaccatc

SEQ ID NO: 372832 - DNA, 25 bp, Artificial
  probe
  misc_feature (1)..(25): SEQ ID NO: 4094; WAN024AFZ; Start 119; Stop 143
cttcctaagaaatgacttccatcca

SEQ ID NO: 372833 - DNA, 25 bp, Artificial
  probe
  misc_feature (1)..(25): SEQ ID NO: 4094; WAN024AFZ; Start 118; Stop 142
gcttcctaagaaatgacttccatcc

SEQ ID NO: 372834 - DNA, 25 bp, Artificial
  probe
  misc_feature (1)..(25): SEQ ID NO: 4094; WAN024AFZ; Start 117; Stop 141
cgcttcctaagaaatgacttccatc

SEQ ID NO: 372835 - DNA, 25 bp, Artificial
  probe
  misc_feature (1)..(25): SEQ ID NO: 4094; WAN024AFZ; Start 116; Stop 140
ccgcttcctaagaaatgacttccat

SEQ ID NO: 372836 - DNA, 25 bp, Artificial
  probe
  misc_feature (1)..(25): SEQ ID NO: 4094; WAN024AFZ; Start 77; Stop 101
aaatgactttgtctcaactcttaaa

SEQ ID NO: 372837 - DNA, 25 bp, Artificial
  probe
  misc_feature (1)..(25): SEQ ID NO: 4094; WAN024AFZ; Start 2; Stop 26
tgctcttcctttcagagtcttattt

SEQ ID NO: 372838 - DNA, 25 bp, Artificial
  probe
  misc_feature (1)..(25): SEQ ID NO: 4094; WAN024AFZ; Start 1; Stop 25
gtgctcttcctttcagagtcttatt

SEQ ID NO: 372839 - DNA, 25 bp, Artificial
  probe
  misc_feature (1)..(25): SEQ ID NO: 4094; WAN024AFZ; Start 45; Stop 69
tagtttgtctagtagcaagctttac

SEQ ID NO: 372840 - DNA, 25 bp, Artificial
  probe
  misc_feature (1)..(25): SEQ ID NO: 4094; WAN024AFZ; Start 46; Stop 70
agtttgtctagtagcaagctttact

SEQ ID NO: 372841 - DNA, 25 bp, Artificial
  probe
  misc_feature (1)..(25): SEQ ID NO: 4094; WAN024AFZ; Start 78; Stop 102
aatgactttgtctcaactcttaaaa

SEQ ID NO: 372842 - DNA, 25 bp, Artificial
  probe
  misc_feature (1)..(25): SEQ ID NO: 4094; WAN024AFZ; Start 76; Stop 100
aaaatgactttgtctcaactcttaa

SEQ ID NO: 372843 - DNA, 25 bp, Artificial
  probe
  misc_feature (1)..(25): SEQ ID NO: 4094; WAN024AFZ; Start 115; Stop 139
gccgcttcctaagaaatgacttcca

SEQ ID NO: 372844 - DNA, 25 bp, Artificial
  probe
  misc_feature (1)..(25): SEQ ID NO: 4094; WAN024AFZ; Start 44; Stop 68
ctagtttgtctagtagcaagcttta

SEQ ID NO: 372845 - DNA, 25 bp, Artificial
  probe
  misc_feature (1)..(25): SEQ ID NO: 4094; WAN024AFZ; Start 75; Stop 99
caaaatgactttgtctcaactctta

SEQ ID NO: 372846 - DNA, 25 bp, Artificial
  probe
  misc_feature (1)..(25): SEQ ID NO: 4094; WAN024AFZ; Start 3; Stop 27
gctcttcctttcagagtcttatttt

SEQ ID NO: 372847 - DNA, 25 bp, Artificial
  probe
  misc_feature (1)..(25): SEQ ID NO: 4094; WAN024AFZ; Start 5; Stop 29
tcttcctttcagagtcttattttat

SEQ ID NO: 372848 - DNA, 25 bp, Artificial
  probe
  misc_feature (1)..(25): SEQ ID NO: 4094; WAN024AFZ; Start 9; Stop 33
cctttcagagtcttattttatttca

SEQ ID NO: 372849 - DNA, 25 bp, Artificial
  probe
  misc_feature (1)..(25): SEQ ID NO: 4094; WAN024AFZ; Start 112; Stop 136
ttggccgcttcctaagaaatgactt

SEQ ID NO: 372850 - DNA, 25 bp, Artificial
  probe
  misc_feature (1)..(25): SEQ ID NO: 4094; WAN024AFZ; Start 8; Stop 32
tcctttcagagtcttattttatttc

SEQ ID NO: 372851 - DNA, 25 bp, Artificial
  probe
  misc_feature (1)..(25): SEQ ID NO: 4094; WAN024AFZ; Start 43; Stop 67
gctagtttgtctagtagcaagcttt

SEQ ID NO: 372852 - DNA, 25 bp, Artificial
  probe
  misc_feature (1)..(25): SEQ ID NO: 4094; WAN024AFZ; Start 6; Stop 30
cttcctttcagagtcttattttatt

SEQ ID NO: 372853 - DNA, 25 bp, Artificial
  probe
  misc_feature (1)..(25): SEQ ID NO: 4094; WAN024AFZ; Start 113; Stop 137
tggccgcttcctaagaaatgacttc

SEQ ID NO: 372854 - DNA, 25 bp, Artificial
  probe
  misc_feature (1)..(25): SEQ ID NO: 4094; WAN024AFZ; Start 111; Stop 135
cttggccgcttcctaagaaatgact

SEQ ID NO: 372855 - DNA, 25 bp, Artificial
  probe
  misc_feature (1)..(25): SEQ ID NO: 4094; WAN024AFZ; Start 4; Stop 28
ctcttcctttcagagtcttatttta

SEQ ID NO: 372856 - DNA, 25 bp, Artificial
  probe
  misc_feature (1)..(25): SEQ ID NO: 4094; WAN024AFZ; Start 36; Stop 60
aaaacttgctagtttgtctagtagc

SEQ ID NO: 372857 - DNA, 25 bp, Artificial
  probe
  misc_feature (1)..(25): SEQ ID NO: 4094; WAN024AFZ; Start 30; Stop 54
ttcaataaaacttgctagtttgtct

SEQ ID NO: 372858 - DNA, 25 bp, Artificial
  probe
  misc_feature (1)..(25): SEQ ID NO: 4094; WAN024AFZ; Start 29; Stop 53
tttcaataaaacttgctagtttgtc

SEQ ID NO: 372859 - DNA, 25 bp, Artificial
  probe
  misc_feature (1)..(25): SEQ ID NO: 4094; WAN024AFZ; Start 33; Stop 57
aataaaacttgctagtttgtctagt

SEQ ID NO: 372860 - DNA, 25 bp, Artificial
  probe
  misc_feature (1)..(25): SEQ ID NO: 4094; WAN024AFZ; Start 31; Stop 55
tcaataaaacttgctagtttgtcta

SEQ ID NO: 372861 - DNA, 25 bp, Artificial
  probe
  misc_feature (1)..(25): SEQ ID NO: 4094; WAN024AFZ; Start 35; Stop 59
taaaacttgctagtttgtctagtag

SEQ ID NO: 372862 - DNA, 25 bp, Artificial
  probe
  misc_feature (1)..(25): SEQ ID NO: 4094; WAN024AFZ; Start 32; Stop 56
caataaaacttgctagtttgtctag

SEQ ID NO: 372863 - DNA, 25 bp, Artificial
  probe
  misc_feature (1)..(25): SEQ ID NO: 4094; WAN024AFZ; Start 28; Stop 52
atttcaataaaacttgctagtttgt

SEQ ID NO: 372864 - DNA, 25 bp, Artificial
  probe
  misc_feature (1)..(25): SEQ ID NO: 4094; WAN024AFZ; Start 34; Stop 58
ataaaacttgctagtttgtctagta

SEQ ID NO: 372865 - DNA, 25 bp, Artificial
  probe
  misc_feature (1)..(25): SEQ ID NO: 4095; WAN024CC8; Start 447; Stop 471
tgttaatggatggagaatgtcagat

SEQ ID NO: 372866 - DNA, 25 bp, Artificial
  probe
  misc_feature (1)..(25): SEQ ID NO: 4095; WAN024CC8; Start 446; Stop 470
atgttaatggatggagaatgtcaga

SEQ ID NO: 372867 - DNA, 25 bp, Artificial
  probe
  misc_feature (1)..(25): SEQ ID NO: 4095; WAN024CC8; Start 277; Stop 301
tatggtgatgaatatgcttctcgtt

SEQ ID NO: 372868 - DNA, 25 bp, Artificial
  probe
  misc_feature (1)..(25): SEQ ID NO: 4095; WAN024CC8; Start 276; Stop 300
ttatggtgatgaatatgcttctcgt

SEQ ID NO: 372869 - DNA, 25 bp, Artificial
  probe
  misc_feature (1)..(25): SEQ ID NO: 4095; WAN024CC8; Start 275; Stop 299
gttatggtgatgaatatgcttctcg

SEQ ID NO: 372870 - DNA, 25 bp, Artificial
  probe
  misc_feature (1)..(25): SEQ ID NO: 4095; WAN024CC8; Start 274; Stop 298
cgttatggtgatgaatatgcttctc

SEQ ID NO: 372871 - DNA, 25 bp, Artificial
  probe
  misc_feature (1)..(25): SEQ ID NO: 4095; WAN024CC8; Start 445; Stop 469
aatgttaatggatggagaatgtcag

SEQ ID NO: 372872 - DNA, 25 bp, Artificial
  probe
  misc_feature (1)..(25): SEQ ID NO: 4095; WAN024CC8; Start 753; Stop 777
agatgataagcaagccattatgaga

SEQ ID NO: 372873 - DNA, 25 bp, Artificial
  probe
  misc_feature (1)..(25): SEQ ID NO: 4095; WAN024CC8; Start 752; Stop 776
gagatgataagcaagccattatgag

SEQ ID NO: 372874 - DNA, 25 bp, Artificial
  probe
  misc_feature (1)..(25): SEQ ID NO: 4095; WAN024CC8; Start 755; Stop 779
atgataagcaagccattatgagatg

SEQ ID NO: 372875 - DNA, 25 bp, Artificial
  probe
  misc_feature (1)..(25): SEQ ID NO: 4095; WAN024CC8; Start 751; Stop 775
ggagatgataagcaagccattatga

SEQ ID NO: 372876 - DNA, 25 bp, Artificial
  probe
  misc_feature (1)..(25): SEQ ID NO: 4095; WAN024CC8; Start 754; Stop 778
gatgataagcaagccattatgagat

SEQ ID NO: 372877 - DNA, 25 bp, Artificial
  probe
  misc_feature (1)..(25): SEQ ID NO: 4095; WAN024CC8; Start 353; Stop 377
gagatgttctacctgaggatatacg

SEQ ID NO: 372878 - DNA, 25 bp, Artificial
  probe
  misc_feature (1)..(25): SEQ ID NO: 4095; WAN024CC8; Start 453; Stop 477
tggatggagaatgtcagatataaga

SEQ ID NO: 372879 - DNA, 25 bp, Artificial
  probe
  misc_feature (1)..(25): SEQ ID NO: 4095; WAN024CC8; Start 739; Stop 763
ttaacagcagttggagatgataagc

SEQ ID NO: 372880 - DNA, 25 bp, Artificial
  probe
  misc_feature (1)..(25): SEQ ID NO: 4095; WAN024CC8; Start 738; Stop 762
attaacagcagttggagatgataag

SEQ ID NO: 372881 - DNA, 25 bp, Artificial
  probe
  misc_feature (1)..(25): SEQ ID NO: 4095; WAN024CC8; Start 448; Stop 472
gttaatggatggagaatgtcagata

SEQ ID NO: 372882 - DNA, 25 bp, Artificial
  probe
  misc_feature (1)..(25): SEQ ID NO: 4095; WAN024CC8; Start 737; Stop 761
aattaacagcagttggagatgataa

SEQ ID NO: 372883 - DNA, 25 bp, Artificial
  probe
  misc_feature (1)..(25): SEQ ID NO: 4095; WAN024CC8; Start 444; Stop 468
taatgttaatggatggagaatgtca

SEQ ID NO: 372884 - DNA, 25 bp, Artificial
  probe
  misc_feature (1)..(25): SEQ ID NO: 4095; WAN024CC8; Start 352; Stop 376
agagatgttctacctgaggatatac

SEQ ID NO: 372885 - DNA, 25 bp, Artificial
  probe
  misc_feature (1)..(25): SEQ ID NO: 4095; WAN024CC8; Start 1538; Stop 1562
aaggtgaatggctagatacagtctc

SEQ ID NO: 372886 - DNA, 25 bp, Artificial
  probe
  misc_feature (1)..(25): SEQ ID NO: 4095; WAN024CC8; Start 740; Stop 764
taacagcagttggagatgataagca

SEQ ID NO: 372887 - DNA, 25 bp, Artificial
  probe
  misc_feature (1)..(25): SEQ ID NO: 4095; WAN024CC8; Start 454; Stop 478
ggatggagaatgtcagatataagaa

SEQ ID NO: 372888 - DNA, 25 bp, Artificial
  probe
  misc_feature (1)..(25): SEQ ID NO: 4095; WAN024CC8; Start 452; Stop 476
atggatggagaatgtcagatataag

SEQ ID NO: 372889 - DNA, 25 bp, Artificial
  probe
  misc_feature (1)..(25): SEQ ID NO: 4095; WAN024CC8; Start 1537; Stop 1561
caaggtgaatggctagatacagtct

SEQ ID NO: 372890 - DNA, 25 bp, Artificial
  probe
  misc_feature (1)..(25): SEQ ID NO: 4095; WAN024CC8; Start 1536; Stop 1560
acaaggtgaatggctagatacagtc

SEQ ID NO: 372891 - DNA, 25 bp, Artificial
  probe
  misc_feature (1)..(25): SEQ ID NO: 4095; WAN024CC8; Start 913; Stop 937
agtaatcacagttctattcagacaa

SEQ ID NO: 372892 - DNA, 25 bp, Artificial
  probe
  misc_feature (1)..(25): SEQ ID NO: 4095; WAN024CC8; Start 749; Stop 773
ttggagatgataagcaagccattat

SEQ ID NO: 372893 - DNA, 25 bp, Artificial
  probe
  misc_feature (1)..(25): SEQ ID NO: 4095; WAN024CC8; Start 1540; Stop 1564
ggtgaatggctagatacagtctcta

SEQ ID NO: 372894 - DNA, 25 bp, Artificial
  probe
  misc_feature (1)..(25): SEQ ID NO: 4095; WAN024CC8; Start 1539; Stop 1563
aggtgaatggctagatacagtctct

SEQ ID NO: 372895 - DNA, 25 bp, Artificial
  probe
  misc_feature (1)..(25): SEQ ID NO: 4095; WAN024CC8; Start 451; Stop 475
aatggatggagaatgtcagatataa

SEQ ID NO: 372896 - DNA, 25 bp, Artificial
  probe
  misc_feature (1)..(25): SEQ ID NO: 4095; WAN024CC8; Start 449; Stop 473
ttaatggatggagaatgtcagatat

SEQ ID NO: 372897 - DNA, 25 bp, Artificial
  probe
  misc_feature (1)..(25): SEQ ID NO: 4095; WAN024CC8; Start 1580; Stop 1604
actcaattccaattatgactatcca

SEQ ID NO: 372898 - DNA, 25 bp, Artificial
  probe
  misc_feature (1)..(25): SEQ ID NO: 4096; WAN024G88; Start 15; Stop 39
tagtcaagtcttgttcaatctggaa

SEQ ID NO: 372899 - DNA, 25 bp, Artificial
  probe
  misc_feature (1)..(25): SEQ ID NO: 4096; WAN024G88; Start 14; Stop 38
ctagtcaagtcttgttcaatctgga

SEQ ID NO: 372900 - DNA, 25 bp, Artificial
  probe
  misc_feature (1)..(25): SEQ ID NO: 4096; WAN024G88; Start 13; Stop 37
gctagtcaagtcttgttcaatctgg

SEQ ID NO: 372901 - DNA, 25 bp, Artificial
  probe
  misc_feature (1)..(25): SEQ ID NO: 4096; WAN024G88; Start 12; Stop 36
agctagtcaagtcttgttcaatctg

SEQ ID NO: 372902 - DNA, 25 bp, Artificial
  probe
  misc_feature (1)..(25): SEQ ID NO: 4096; WAN024G88; Start 72; Stop 96
accattctttcagtccataagtcag

SEQ ID NO: 372903 - DNA, 25 bp, Artificial
  probe
  misc_feature (1)..(25): SEQ ID NO: 4096; WAN024G88; Start 111; Stop 135
tttgataggcttctgcttgttcttt

SEQ ID NO: 372904 - DNA, 25 bp, Artificial
  probe
  misc_feature (1)..(25): SEQ ID NO: 4096; WAN024G88; Start 71; Stop 95
taccattctttcagtccataagtca

SEQ ID NO: 372905 - DNA, 25 bp, Artificial
  probe
  misc_feature (1)..(25): SEQ ID NO: 4096; WAN024G88; Start 115; Stop 139
ataggcttctgcttgttctttcatc

SEQ ID NO: 372906 - DNA, 25 bp, Artificial
  probe
  misc_feature (1)..(25): SEQ ID NO: 4096; WAN024G88; Start 114; Stop 138
gataggcttctgcttgttctttcat

SEQ ID NO: 372907 - DNA, 25 bp, Artificial
  probe
  misc_feature (1)..(25): SEQ ID NO: 4096; WAN024G88; Start 73; Stop 97
ccattctttcagtccataagtcagg

SEQ ID NO: 372908 - DNA, 25 bp, Artificial
  probe
  misc_feature (1)..(25): SEQ ID NO: 4096; WAN024G88; Start 112; Stop 136
ttgataggcttctgcttgttctttc

SEQ ID NO: 372909 - DNA, 25 bp, Artificial
  probe
  misc_feature (1)..(25): SEQ ID NO: 4096; WAN024G88; Start 70; Stop 94
ataccattctttcagtccataagtc

SEQ ID NO: 372910 - DNA, 25 bp, Artificial
  probe
  misc_feature (1)..(25): SEQ ID NO: 4096; WAN024G88; Start 69; Stop 93
gataccattctttcagtccataagt

SEQ ID NO: 372911 - DNA, 25 bp, Artificial
  probe
  misc_feature (1)..(25): SEQ ID NO: 4096; WAN024G88; Start 16; Stop 40
agtcaagtcttgttcaatctggaaa

SEQ ID NO: 372912 - DNA, 25 bp, Artificial
  probe
  misc_feature (1)..(25): SEQ ID NO: 4096; WAN024G88; Start 74; Stop 98
cattctttcagtccataagtcagga

SEQ ID NO: 372913 - DNA, 25 bp, Artificial
  probe
  misc_feature (1)..(25): SEQ ID NO: 4096; WAN024G88; Start 75; Stop 99
attctttcagtccataagtcaggat

SEQ ID NO: 372914 - DNA, 25 bp, Artificial
  probe
  misc_feature (1)..(25): SEQ ID NO: 4096; WAN024G88; Start 185; Stop 209
atgtccttgtcctcagaaactgtaa

SEQ ID NO: 372915 - DNA, 25 bp, Artificial
  probe
  misc_feature (1)..(25): SEQ ID NO: 4096; WAN024G88; Start 59; Stop 83
cgaatttgtggataccattctttca

SEQ ID NO: 372916 - DNA, 25 bp, Artificial
  probe
  misc_feature (1)..(25): SEQ ID NO: 4096; WAN024G88; Start 11; Stop 35
tagctagtcaagtcttgttcaatct

SEQ ID NO: 372917 - DNA, 25 bp, Artificial
  probe
  misc_feature (1)..(25): SEQ ID NO: 4096; WAN024G88; Start 68; Stop 92
ggataccattctttcagtccataag

SEQ ID NO: 372918 - DNA, 25 bp, Artificial
  probe
  misc_feature (1)..(25): SEQ ID NO: 4096; WAN024G88; Start 186; Stop 210
tgtccttgtcctcagaaactgtaaa

SEQ ID NO: 372919 - DNA, 25 bp, Artificial
  probe
  misc_feature (1)..(25): SEQ ID NO: 4096; WAN024G88; Start 76; Stop 100
ttctttcagtccataagtcaggata

SEQ ID NO: 372920 - DNA, 25 bp, Artificial
  probe
  misc_feature (1)..(25): SEQ ID NO: 4096; WAN024G88; Start 62; Stop 86
atttgtggataccattctttcagtc

SEQ ID NO: 372921 - DNA, 25 bp, Artificial
  probe
  misc_feature (1)..(25): SEQ ID NO: 4096; WAN024G88; Start 119; Stop 143
gcttctgcttgttctttcatccaaa

SEQ ID NO: 372922 - DNA, 25 bp, Artificial
  probe
  misc_feature (1)..(25): SEQ ID NO: 4096; WAN024G88; Start 77; Stop 101
tctttcagtccataagtcaggatat

SEQ ID NO: 372923 - DNA, 25 bp, Artificial
  probe
  misc_feature (1)..(25): SEQ ID NO: 4096; WAN024G88; Start 184; Stop 208
gatgtccttgtcctcagaaactgta

SEQ ID NO: 372924 - DNA, 25 bp, Artificial
  probe
  misc_feature (1)..(25): SEQ ID NO: 4096; WAN024G88; Start 63; Stop 87
tttgtggataccattctttcagtcc

SEQ ID NO: 372925 - DNA, 25 bp, Artificial
  probe
  misc_feature (1)..(25): SEQ ID NO: 4096; WAN024G88; Start 113; Stop 137
tgataggcttctgcttgttctttca

SEQ ID NO: 372926 - DNA, 25 bp, Artificial
  probe
  misc_feature (1)..(25): SEQ ID NO: 4096; WAN024G88; Start 61; Stop 85
aatttgtggataccattctttcagt

SEQ ID NO: 372927 - DNA, 25 bp, Artificial
  probe
  misc_feature (1)..(25): SEQ ID NO: 4096; WAN024G88; Start 10; Stop 34
atagctagtcaagtcttgttcaatc

SEQ ID NO: 372928 - DNA, 25 bp, Artificial
  probe
  misc_feature (1)..(25): SEQ ID NO: 4096; WAN024G88; Start 116; Stop 140
taggcttctgcttgttctttcatcc

SEQ ID NO: 372929 - DNA, 25 bp, Artificial
  probe
  misc_feature (1)..(25): SEQ ID NO: 4096; WAN024G88; Start 60; Stop 84
gaatttgtggataccattctttcag

SEQ ID NO: 372930 - DNA, 25 bp, Artificial
  probe
  misc_feature (1)..(25): SEQ ID NO: 4096; WAN024G88; Start 78; Stop 102
ctttcagtccataagtcaggatatt

SEQ ID NO: 372931 - DNA, 25 bp, Artificial
  probe
  misc_feature (1)..(25): SEQ ID NO: 4097; WAN024G4J; Start 340; Stop 364
ctcagacatagcaaggataatggtg

SEQ ID NO: 372932 - DNA, 25 bp, Artificial
  probe
  misc_feature (1)..(25): SEQ ID NO: 4097; WAN024G4J; Start 121; Stop 145
aataacagagaagtccatgaaggtc

SEQ ID NO: 372933 - DNA, 25 bp, Artificial
  probe
  misc_feature (1)..(25): SEQ ID NO: 4097; WAN024G4J; Start 120; Stop 144
caataacagagaagtccatgaaggt

SEQ ID NO: 372934 - DNA, 25 bp, Artificial
  probe
  misc_feature (1)..(25): SEQ ID NO: 4097; WAN024G4J; Start 341; Stop 365
tcagacatagcaaggataatggtgt

SEQ ID NO: 372935 - DNA, 25 bp, Artificial
  probe
  misc_feature (1)..(25): SEQ ID NO: 4097; WAN024G4J; Start 119; Stop 143
gcaataacagagaagtccatgaagg

SEQ ID NO: 372936 - DNA, 25 bp, Artificial
  probe
  misc_feature (1)..(25): SEQ ID NO: 4097; WAN024G4J; Start 118; Stop 142
ggcaataacagagaagtccatgaag

SEQ ID NO: 372937 - DNA, 25 bp, Artificial
  probe
  misc_feature (1)..(25): SEQ ID NO: 4097; WAN024G4J; Start 122; Stop 146
ataacagagaagtccatgaaggtca

SEQ ID NO: 372938 - DNA, 25 bp, Artificial
  probe
  misc_feature (1)..(25): SEQ ID NO: 4097; WAN024G4J; Start 339; Stop 363
cctcagacatagcaaggataatggt

SEQ ID NO: 372939 - DNA, 25 bp, Artificial
  probe
  misc_feature (1)..(25): SEQ ID NO: 4097; WAN024G4J; Start 257; Stop 281
attccaacagaagtaccgaagtctc

SEQ ID NO: 372940 - DNA, 25 bp, Artificial
  probe
  misc_feature (1)..(25): SEQ ID NO: 4097; WAN024G4J; Start 256; Stop 280
cattccaacagaagtaccgaagtct

SEQ ID NO: 372941 - DNA, 25 bp, Artificial
  probe
  misc_feature (1)..(25): SEQ ID NO: 4097; WAN024G4J; Start 243; Stop 267
caaattcttcaagcattccaacaga

SEQ ID NO: 372942 - DNA, 25 bp, Artificial
  probe
  misc_feature (1)..(25): SEQ ID NO: 4097; WAN024G4J; Start 242; Stop 266
ccaaattcttcaagcattccaacag

SEQ ID NO: 372943 - DNA, 25 bp, Artificial
  probe
  misc_feature (1)..(25): SEQ ID NO: 4097; WAN024G4J; Start 240; Stop 264
gaccaaattcttcaagcattccaac

SEQ ID NO: 372944 - DNA, 25 bp, Artificial
  probe
  misc_feature (1)..(25): SEQ ID NO: 4097; WAN024G4J; Start 235; Stop 259
ttctggaccaaattcttcaagcatt

SEQ ID NO: 372945 - DNA, 25 bp, Artificial
  probe
  misc_feature (1)..(25): SEQ ID NO: 4097; WAN024G4J; Start 241; Stop 265
accaaattcttcaagcattccaaca

SEQ ID NO: 372946 - DNA, 25 bp, Artificial
  probe
  misc_feature (1)..(25): SEQ ID NO: 4097; WAN024G4J; Start 236; Stop 260
tctggaccaaattcttcaagcattc

SEQ ID NO: 372947 - DNA, 25 bp, Artificial
  probe
  misc_feature (1)..(25): SEQ ID NO: 4097; WAN024G4J; Start 345; Stop 369
acatagcaaggataatggtgtcacg

SEQ ID NO: 372948 - DNA, 25 bp, Artificial
  probe
  misc_feature (1)..(25): SEQ ID NO: 4097; WAN024G4J; Start 126; Stop 150
cagagaagtccatgaaggtcatatc

SEQ ID NO: 372949 - DNA, 25 bp, Artificial
  probe
  misc_feature (1)..(25): SEQ ID NO: 4097; WAN024G4J; Start 234; Stop 258
gttctggaccaaattcttcaagcat

SEQ ID NO: 372950 - DNA, 25 bp, Artificial
  probe
  misc_feature (1)..(25): SEQ ID NO: 4097; WAN024G4J; Start 347; Stop 371
atagcaaggataatggtgtcacgga

SEQ ID NO: 372951 - DNA, 25 bp, Artificial
  probe
  misc_feature (1)..(25): SEQ ID NO: 4097; WAN024G4J; Start 125; Stop 149
acagagaagtccatgaaggtcatat

SEQ ID NO: 372952 - DNA, 25 bp, Artificial
  probe
  misc_feature (1)..(25): SEQ ID NO: 4097; WAN024G4J; Start 253; Stop 277
aagcattccaacagaagtaccgaag

SEQ ID NO: 372953 - DNA, 25 bp, Artificial
  probe
  misc_feature (1)..(25): SEQ ID NO: 4097; WAN024G4J; Start 124; Stop 148
aacagagaagtccatgaaggtcata

SEQ ID NO: 372954 - DNA, 25 bp, Artificial
  probe
  misc_feature (1)..(25): SEQ ID NO: 4097; WAN024G4J; Start 123; Stop 147
taacagagaagtccatgaaggtcat

SEQ ID NO: 372955 - DNA, 25 bp, Artificial
  probe
  misc_feature (1)..(25): SEQ ID NO: 4097; WAN024G4J; Start 117; Stop 141
tggcaataacagagaagtccatgaa

SEQ ID NO: 372956 - DNA, 25 bp, Artificial
  probe
  misc_feature (1)..(25): SEQ ID NO: 4097; WAN024G4J; Start 89; Stop 113
ttagcagcttggttgacgatattgt

SEQ ID NO: 372957 - DNA, 25 bp, Artificial
  probe
  misc_feature (1)..(25): SEQ ID NO: 4097; WAN024G4J; Start 346; Stop 370
catagcaaggataatggtgtcacgg

SEQ ID NO: 372958 - DNA, 25 bp, Artificial
  probe
  misc_feature (1)..(25): SEQ ID NO: 4097; WAN024G4J; Start 245; Stop 269
aattcttcaagcattccaacagaag

SEQ ID NO: 372959 - DNA, 25 bp, Artificial
  probe
  misc_feature (1)..(25): SEQ ID NO: 4097; WAN024G4J; Start 247; Stop 271
ttcttcaagcattccaacagaagta

SEQ ID NO: 372960 - DNA, 25 bp, Artificial
  probe
  misc_feature (1)..(25): SEQ ID NO: 4097; WAN024G4J; Start 348; Stop 372
tagcaaggataatggtgtcacggaa

SEQ ID NO: 372961 - DNA, 25 bp, Artificial
  probe
  misc_feature (1)..(25): SEQ ID NO: 4097; WAN024G4J; Start 246; Stop 270
attcttcaagcattccaacagaagt

SEQ ID NO: 372962 - DNA, 25 bp, Artificial
  probe
  misc_feature (1)..(25): SEQ ID NO: 4097; WAN024G4J; Start 127; Stop 151
agagaagtccatgaaggtcatatcg

SEQ ID NO: 372963 - DNA, 25 bp, Artificial
  probe
  misc_feature (1)..(25): SEQ ID NO: 4097; WAN024G4J; Start 248; Stop 272
tcttcaagcattccaacagaagtac

SEQ ID NO: 372964 - DNA, 25 bp, Artificial
  probe
  misc_feature (1)..(25): SEQ ID NO: 4098; WAN024DKD; Start 41; Stop 65
ttaagttggctatgaagcgtggttt

SEQ ID NO: 372965 - DNA, 25 bp, Artificial
  probe
  misc_feature (1)..(25): SEQ ID NO: 4098; WAN024DKD; Start 40; Stop 64
tttaagttggctatgaagcgtggtt

SEQ ID NO: 372966 - DNA, 25 bp, Artificial
  probe
  misc_feature (1)..(25): SEQ ID NO: 4098; WAN024DKD; Start 2; Stop 26
tgcttaagattcgttatcataaaca

SEQ ID NO: 372967 - DNA, 25 bp, Artificial
  probe
  misc_feature (1)..(25): SEQ ID NO: 4098; WAN024DKD; Start 35; Stop 59
aagattttaagttggctatgaagcg

SEQ ID NO: 372968 - DNA, 25 bp, Artificial
  probe
  misc_feature (1)..(25): SEQ ID NO: 4098; WAN024DKD; Start 1; Stop 25
gtgcttaagattcgttatcataaac

SEQ ID NO: 372969 - DNA, 25 bp, Artificial
  probe
  misc_feature (1)..(25): SEQ ID NO: 4098; WAN024DKD; Start 233; Stop 257
tgattttaaatttgctgaggacagg

SEQ ID NO: 372970 - DNA, 25 bp, Artificial
  probe
  misc_feature (1)..(25): SEQ ID NO: 4098; WAN024DKD; Start 37; Stop 61
gattttaagttggctatgaagcgtg

SEQ ID NO: 372971 - DNA, 25 bp, Artificial
  probe
  misc_feature (1)..(25): SEQ ID NO: 4098; WAN024DKD; Start 36; Stop 60
agattttaagttggctatgaagcgt

SEQ ID NO: 372972 - DNA, 25 bp, Artificial
  probe
  misc_feature (1)..(25): SEQ ID NO: 4098; WAN024DKD; Start 231; Stop 255
attgattttaaatttgctgaggaca

SEQ ID NO: 372973 - DNA, 25 bp, Artificial
  probe
  misc_feature (1)..(25): SEQ ID NO: 4098; WAN024DKD; Start 3; Stop 27
gcttaagattcgttatcataaacag

SEQ ID NO: 372974 - DNA, 25 bp, Artificial
  probe
  misc_feature (1)..(25): SEQ ID NO: 4098; WAN024DKD; Start 34; Stop 58
aaagattttaagttggctatgaagc

SEQ ID NO: 372975 - DNA, 25 bp, Artificial
  probe
  misc_feature (1)..(25): SEQ ID NO: 4098; WAN024DKD; Start 232; Stop 256
ttgattttaaatttgctgaggacag

SEQ ID NO: 372976 - DNA, 25 bp, Artificial
  probe
  misc_feature (1)..(25): SEQ ID NO: 4098; WAN024DKD; Start 42; Stop 66
taagttggctatgaagcgtggtttg

SEQ ID NO: 372977 - DNA, 25 bp, Artificial
  probe
  misc_feature (1)..(25): SEQ ID NO: 4098; WAN024DKD; Start 152; Stop 176
catccaagcattttcaaggagttcg

SEQ ID NO: 372978 - DNA, 25 bp, Artificial
  probe
  misc_feature (1)..(25): SEQ ID NO: 4098; WAN024DKD; Start 38; Stop 62
attttaagttggctatgaagcgtgg

SEQ ID NO: 372979 - DNA, 25 bp, Artificial
  probe
  misc_feature (1)..(25): SEQ ID NO: 4098; WAN024DKD; Start 33; Stop 57
aaaagattttaagttggctatgaag

SEQ ID NO: 372980 - DNA, 25 bp, Artificial
  probe
  misc_feature (1)..(25): SEQ ID NO: 4098; WAN024DKD; Start 151; Stop 175
gcatccaagcattttcaaggagttc

SEQ ID NO: 372981 - DNA, 25 bp, Artificial
  probe
  misc_feature (1)..(25): SEQ ID NO: 4098; WAN024DKD; Start 153; Stop 177
atccaagcattttcaaggagttcgt

SEQ ID NO: 372982 - DNA, 25 bp, Artificial
  probe
  misc_feature (1)..(25): SEQ ID NO: 4098; WAN024DKD; Start 155; Stop 179
ccaagcattttcaaggagttcgtga

SEQ ID NO: 372983 - DNA, 25 bp, Artificial
  probe
  misc_feature (1)..(25): SEQ ID NO: 4098; WAN024DKD; Start 70; Stop 94
gcagaattattagaagaagttttga

SEQ ID NO: 372984 - DNA, 25 bp, Artificial
  probe
  misc_feature (1)..(25): SEQ ID NO: 4098; WAN024DKD; Start 230; Stop 254
aattgattttaaatttgctgaggac

SEQ ID NO: 372985 - DNA, 25 bp, Artificial
  probe
  misc_feature (1)..(25): SEQ ID NO: 4098; WAN024DKD; Start 229; Stop 253
gaattgattttaaatttgctgagga

SEQ ID NO: 372986 - DNA, 25 bp, Artificial
  probe
  misc_feature (1)..(25): SEQ ID NO: 4098; WAN024DKD; Start 39; Stop 63
ttttaagttggctatgaagcgtggt

SEQ ID NO: 372987 - DNA, 25 bp, Artificial
  probe
  misc_feature (1)..(25): SEQ ID NO: 4098; WAN024DKD; Start 154; Stop 178
tccaagcattttcaaggagttcgtg

SEQ ID NO: 372988 - DNA, 25 bp, Artificial
  probe
  misc_feature (1)..(25): SEQ ID NO: 4098; WAN024DKD; Start 4; Stop 28
cttaagattcgttatcataaacagt

SEQ ID NO: 372989 - DNA, 25 bp, Artificial
  probe
  misc_feature (1)..(25): SEQ ID NO: 4098; WAN024DKD; Start 193; Stop 217
ccagattggcttttggtttataaag

SEQ ID NO: 372990 - DNA, 25 bp, Artificial
  probe
  misc_feature (1)..(25): SEQ ID NO: 4098; WAN024DKD; Start 150; Stop 174
ggcatccaagcattttcaaggagtt

SEQ ID NO: 372991 - DNA, 25 bp, Artificial
  probe
  misc_feature (1)..(25): SEQ ID NO: 4098; WAN024DKD; Start 194; Stop 218
cagattggcttttggtttataaagt

SEQ ID NO: 372992 - DNA, 25 bp, Artificial
  probe
  misc_feature (1)..(25): SEQ ID NO: 4098; WAN024DKD; Start 144; Stop 168
attgacggcatccaagcattttcaa

SEQ ID NO: 372993 - DNA, 25 bp, Artificial
  probe
  misc_feature (1)..(25): SEQ ID NO: 4098; WAN024DKD; Start 197; Stop 221
attggcttttggtttataaagtaga

SEQ ID NO: 372994 - DNA, 25 bp, Artificial
  probe
  misc_feature (1)..(25): SEQ ID NO: 4098; WAN024DKD; Start 195; Stop 219
agattggcttttggtttataaagta

SEQ ID NO: 372995 - DNA, 25 bp, Artificial
  probe
  misc_feature (1)..(25): SEQ ID NO: 4098; WAN024DKD; Start 196; Stop 220
gattggcttttggtttataaagtag

SEQ ID NO: 372996 - DNA, 25 bp, Artificial
  probe
  misc_feature (1)..(25): SEQ ID NO: 4098; WAN024DKD; Start 145; Stop 169
ttgacggcatccaagcattttcaag

SEQ ID NO: 372997 - DNA, 25 bp, Artificial
  probe
  misc_feature (1)..(25): SEQ ID NO: 4099; WAN024C7V; Start 20; Stop 44
cagaagtagcaagaacaacaatcaa

SEQ ID NO: 372998 - DNA, 25 bp, Artificial
  probe
  misc_feature (1)..(25): SEQ ID NO: 4099; WAN024C7V; Start 1009; Stop 1033
aataaggttcgcagtcaatcacata

SEQ ID NO: 372999 - DNA, 25 bp, Artificial
  probe
  misc_feature (1)..(25): SEQ ID NO: 4099; WAN024C7V; Start 18; Stop 42
tacagaagtagcaagaacaacaatc

SEQ ID NO: 373000 - DNA, 25 bp, Artificial
  probe
  misc_feature (1)..(25): SEQ ID NO: 4099; WAN024C7V; Start 1155; Stop 1179
tctaccgcaacctaatctaactgta

SEQ ID NO: 373001 - DNA, 25 bp, Artificial
  probe
  misc_feature (1)..(25): SEQ ID NO: 4099; WAN024C7V; Start 19; Stop 43
acagaagtagcaagaacaacaatca

SEQ ID NO: 373002 - DNA, 25 bp, Artificial
  probe
  misc_feature (1)..(25): SEQ ID NO: 4099; WAN024C7V; Start 1817; Stop 1841
gagaagaaggtaaggtcattcaaga

SEQ ID NO: 373003 - DNA, 25 bp, Artificial
  probe
  misc_feature (1)..(25): SEQ ID NO: 4099; WAN024C7V; Start 1153; Stop 1177
catctaccgcaacctaatctaactg

SEQ ID NO: 373004 - DNA, 25 bp, Artificial
  probe
  misc_feature (1)..(25): SEQ ID NO: 4099; WAN024C7V; Start 1818; Stop 1842
agaagaaggtaaggtcattcaagaa

SEQ ID NO: 373005 - DNA, 25 bp, Artificial
  probe
  misc_feature (1)..(25): SEQ ID NO: 4099; WAN024C7V; Start 1310; Stop 1334
aagatgatgcttatgattacagtgc

SEQ ID NO: 373006 - DNA, 25 bp, Artificial
  probe
  misc_feature (1)..(25): SEQ ID NO: 4099; WAN024C7V; Start 1298; Stop 1322
aaggagtattggaagatgatgctta

SEQ ID NO: 373007 - DNA, 25 bp, Artificial
  probe
  misc_feature (1)..(25): SEQ ID NO: 4099; WAN024C7V; Start 1896; Stop 1920
attggttactgctgcttatgacatt

SEQ ID NO: 373008 - DNA, 25 bp, Artificial
  probe
  misc_feature (1)..(25): SEQ ID NO: 4099; WAN024C7V; Start 16; Stop 40
aatacagaagtagcaagaacaacaa

SEQ ID NO: 373009 - DNA, 25 bp, Artificial
  probe
  misc_feature (1)..(25): SEQ ID NO: 4099; WAN024C7V; Start 1300; Stop 1324
ggagtattggaagatgatgcttatg

SEQ ID NO: 373010 - DNA, 25 bp, Artificial
  probe
  misc_feature (1)..(25): SEQ ID NO: 4099; WAN024C7V; Start 1299; Stop 1323
aggagtattggaagatgatgcttat

SEQ ID NO: 373011 - DNA, 25 bp, Artificial
  probe
  misc_feature (1)..(25): SEQ ID NO: 4099; WAN024C7V; Start 1010; Stop 1034
ataaggttcgcagtcaatcacatac

SEQ ID NO: 373012 - DNA, 25 bp, Artificial
  probe
  misc_feature (1)..(25): SEQ ID NO: 4099; WAN024C7V; Start 1816; Stop 1840
ggagaagaaggtaaggtcattcaag

SEQ ID NO: 373013 - DNA, 25 bp, Artificial
  probe
  misc_feature (1)..(25): SEQ ID NO: 4099; WAN024C7V; Start 1623; Stop 1647
agcattgactgatgattgtattggt

SEQ ID NO: 373014 - DNA, 25 bp, Artificial
  probe
  misc_feature (1)..(25): SEQ ID NO: 4099; WAN024C7V; Start 493; Stop 517
ttcggtatggaaggtaagatgaatt

SEQ ID NO: 373015 - DNA, 25 bp, Artificial
  probe
  misc_feature (1)..(25): SEQ ID NO: 4099; WAN024C7V; Start 1154; Stop 1178
atctaccgcaacctaatctaactgt

SEQ ID NO: 373016 - DNA, 25 bp, Artificial
  probe
  misc_feature (1)..(25): SEQ ID NO: 4099; WAN024C7V; Start 1895; Stop 1919
aattggttactgctgcttatgacat

SEQ ID NO: 373017 - DNA, 25 bp, Artificial
  probe
  misc_feature (1)..(25): SEQ ID NO: 4099; WAN024C7V; Start 17; Stop 41
atacagaagtagcaagaacaacaat

SEQ ID NO: 373018 - DNA, 25 bp, Artificial
  probe
  misc_feature (1)..(25): SEQ ID NO: 4099; WAN024C7V; Start 1870; Stop 1894
ggtaatgatgatgattatgctgaca

SEQ ID NO: 373019 - DNA, 25 bp, Artificial
  probe
  misc_feature (1)..(25): SEQ ID NO: 4099; WAN024C7V; Start 1869; Stop 1893
tggtaatgatgatgattatgctgac

SEQ ID NO: 373020 - DNA, 25 bp, Artificial
  probe
  misc_feature (1)..(25): SEQ ID NO: 4099; WAN024C7V; Start 1211; Stop 1235
tgaatgagtgtattgaagtgatgaa

SEQ ID NO: 373021 - DNA, 25 bp, Artificial
  probe
  misc_feature (1)..(25): SEQ ID NO: 4099; WAN024C7V; Start 1308; Stop 1332
ggaagatgatgcttatgattacagt

SEQ ID NO: 373022 - DNA, 25 bp, Artificial
  probe
  misc_feature (1)..(25): SEQ ID NO: 4099; WAN024C7V; Start 1307; Stop 1331
tggaagatgatgcttatgattacag

SEQ ID NO: 373023 - DNA, 25 bp, Artificial
  probe
  misc_feature (1)..(25): SEQ ID NO: 4099; WAN024C7V; Start 1412; Stop 1436
aggttctacttatcacgatgaatga

SEQ ID NO: 373024 - DNA, 25 bp, Artificial
  probe
  misc_feature (1)..(25): SEQ ID NO: 4099; WAN024C7V; Start 446; Stop 470
gtgccttattacctgaagaagtgtc

SEQ ID NO: 373025 - DNA, 25 bp, Artificial
  probe
  misc_feature (1)..(25): SEQ ID NO: 4099; WAN024C7V; Start 1210; Stop 1234
atgaatgagtgtattgaagtgatga

SEQ ID NO: 373026 - DNA, 25 bp, Artificial
  probe
  misc_feature (1)..(25): SEQ ID NO: 4099; WAN024C7V; Start 1301; Stop 1325
gagtattggaagatgatgcttatga

SEQ ID NO: 373027 - DNA, 25 bp, Artificial
  probe
  misc_feature (1)..(25): SEQ ID NO: 4099; WAN024C7V; Start 2093; Stop 2117
catcacataatatggatcaacacgg

SEQ ID NO: 373028 - DNA, 25 bp, Artificial
  probe
  misc_feature (1)..(25): SEQ ID NO: 4099; WAN024C7V; Start 1156; Stop 1180
ctaccgcaacctaatctaactgtac

SEQ ID NO: 373029 - DNA, 25 bp, Artificial
  probe
  misc_feature (1)..(25): SEQ ID NO: 4099; WAN024C7V; Start 1152; Stop 1176
ccatctaccgcaacctaatctaact

SEQ ID NO: 373030 - DNA, 25 bp, Artificial
  probe
  misc_feature (1)..(25): SEQ ID NO: 4100; WAN024ACZ; Start 6; Stop 30
tctcgtttctctttacttggcttta

SEQ ID NO: 373031 - DNA, 25 bp, Artificial
  probe
  misc_feature (1)..(25): SEQ ID NO: 4100; WAN024ACZ; Start 7; Stop 31
ctcgtttctctttacttggctttat

SEQ ID NO: 373032 - DNA, 25 bp, Artificial
  probe
  misc_feature (1)..(25): SEQ ID NO: 4100; WAN024ACZ; Start 5; Stop 29
ttctcgtttctctttacttggcttt

SEQ ID NO: 373033 - DNA, 25 bp, Artificial
  probe
  misc_feature (1)..(25): SEQ ID NO: 4100; WAN024ACZ; Start 8; Stop 32
tcgtttctctttacttggctttatt

SEQ ID NO: 373034 - DNA, 25 bp, Artificial
  probe
  misc_feature (1)..(25): SEQ ID NO: 4100; WAN024ACZ; Start 4; Stop 28
cttctcgtttctctttacttggctt

SEQ ID NO: 373035 - DNA, 25 bp, Artificial
  probe
  misc_feature (1)..(25): SEQ ID NO: 4100; WAN024ACZ; Start 1; Stop 25
gtgcttctcgtttctctttacttgg

SEQ ID NO: 373036 - DNA, 25 bp, Artificial
  probe
  misc_feature (1)..(25): SEQ ID NO: 4100; WAN024ACZ; Start 9; Stop 33
cgtttctctttacttggctttatta

SEQ ID NO: 373037 - DNA, 25 bp, Artificial
  probe
  misc_feature (1)..(25): SEQ ID NO: 4100; WAN024ACZ; Start 24; Stop 48
ggctttattataccacatttccatg

SEQ ID NO: 373038 - DNA, 25 bp, Artificial
  probe
  misc_feature (1)..(25): SEQ ID NO: 4100; WAN024ACZ; Start 22; Stop 46
ttggctttattataccacatttcca

SEQ ID NO: 373039 - DNA, 25 bp, Artificial
  probe
  misc_feature (1)..(25): SEQ ID NO: 4100; WAN024ACZ; Start 23; Stop 47
tggctttattataccacatttccat

SEQ ID NO: 373040 - DNA, 25 bp, Artificial
  probe
  misc_feature (1)..(25): SEQ ID NO: 4100; WAN024ACZ; Start 21; Stop 45
cttggctttattataccacatttcc

SEQ ID NO: 373041 - DNA, 25 bp, Artificial
  probe
  misc_feature (1)..(25): SEQ ID NO: 4100; WAN024ACZ; Start 3; Stop 27
gcttctcgtttctctttacttggct

SEQ ID NO: 373042 - DNA, 25 bp, Artificial
  probe
  misc_feature (1)..(25): SEQ ID NO: 4100; WAN024ACZ; Start 25; Stop 49
gctttattataccacatttccatga

SEQ ID NO: 373043 - DNA, 25 bp, Artificial
  probe
  misc_feature (1)..(25): SEQ ID NO: 4100; WAN024ACZ; Start 2; Stop 26
tgcttctcgtttctctttacttggc

SEQ ID NO: 373044 - DNA, 25 bp, Artificial
  probe
  misc_feature (1)..(25): SEQ ID NO: 4100; WAN024ACZ; Start 20; Stop 44
acttggctttattataccacatttc

SEQ ID NO: 373045 - DNA, 25 bp, Artificial
  probe
  misc_feature (1)..(25): SEQ ID NO: 4100; WAN024ACZ; Start 13; Stop 37
tctctttacttggctttattatacc

SEQ ID NO: 373046 - DNA, 25 bp, Artificial
  probe
  misc_feature (1)..(25): SEQ ID NO: 4100; WAN024ACZ; Start 16; Stop 40
ctttacttggctttattataccaca

SEQ ID NO: 373047 - DNA, 25 bp, Artificial
  probe
  misc_feature (1)..(25): SEQ ID NO: 4100; WAN024ACZ; Start 15; Stop 39
tctttacttggctttattataccac

SEQ ID NO: 373048 - DNA, 25 bp, Artificial
  probe
  misc_feature (1)..(25): SEQ ID NO: 4100; WAN024ACZ; Start 14; Stop 38
ctctttacttggctttattatacca

SEQ ID NO: 373049 - DNA, 25 bp, Artificial
  probe
  misc_feature (1)..(25): SEQ ID NO: 4100; WAN024ACZ; Start 19; Stop 43
tacttggctttattataccacattt

SEQ ID NO: 373050 - DNA, 25 bp, Artificial
  probe
  misc_feature (1)..(25): SEQ ID NO: 4100; WAN024ACZ; Start 18; Stop 42
ttacttggctttattataccacatt

SEQ ID NO: 373051 - DNA, 25 bp, Artificial
  probe
  misc_feature (1)..(25): SEQ ID NO: 4100; WAN024ACZ; Start 17; Stop 41
tttacttggctttattataccacat

SEQ ID NO: 373052 - DNA, 25 bp, Artificial
  probe
  misc_feature (1)..(25): SEQ ID NO: 4100; WAN024ACZ; Start 10; Stop 34
gtttctctttacttggctttattat

SEQ ID NO: 373053 - DNA, 25 bp, Artificial
  probe
  misc_feature (1)..(25): SEQ ID NO: 4100; WAN024ACZ; Start 35; Stop 59
accacatttccatgattttattcta

SEQ ID NO: 373054 - DNA, 25 bp, Artificial
  probe
  misc_feature (1)..(25): SEQ ID NO: 4100; WAN024ACZ; Start 34; Stop 58
taccacatttccatgattttattct

SEQ ID NO: 373055 - DNA, 25 bp, Artificial
  probe
  misc_feature (1)..(25): SEQ ID NO: 4100; WAN024ACZ; Start 26; Stop 50
ctttattataccacatttccatgat

SEQ ID NO: 373056 - DNA, 25 bp, Artificial
  probe
  misc_feature (1)..(25): SEQ ID NO: 4100; WAN024ACZ; Start 37; Stop 61
cacatttccatgattttattctacc

SEQ ID NO: 373057 - DNA, 25 bp, Artificial
  probe
  misc_feature (1)..(25): SEQ ID NO: 4100; WAN024ACZ; Start 36; Stop 60
ccacatttccatgattttattctac

SEQ ID NO: 373058 - DNA, 25 bp, Artificial
  probe
  misc_feature (1)..(25): SEQ ID NO: 4100; WAN024ACZ; Start 38; Stop 62
acatttccatgattttattctacct

SEQ ID NO: 373059 - DNA, 25 bp, Artificial
  probe
  misc_feature (1)..(25): SEQ ID NO: 4100; WAN024ACZ; Start 33; Stop 57
ataccacatttccatgattttattc

SEQ ID NO: 373060 - DNA, 25 bp, Artificial
  probe
  misc_feature (1)..(25): SEQ ID NO: 4100; WAN024ACZ; Start 39; Stop 63
catttccatgattttattctacctt

SEQ ID NO: 373061 - DNA, 25 bp, Artificial
  probe
  misc_feature (1)..(25): SEQ ID NO: 4100; WAN024ACZ; Start 41; Stop 65
tttccatgattttattctacctttt

SEQ ID NO: 373062 - DNA, 25 bp, Artificial
  probe
  misc_feature (1)..(25): SEQ ID NO: 4101; WAN024F7X; Start 108; Stop 132
aaatcaaagagcaaacctaactaat

SEQ ID NO: 373063 - DNA, 25 bp, Artificial
  probe
  misc_feature (1)..(25): SEQ ID NO: 4101; WAN024F7X; Start 101; Stop 125
tcaatgaaaatcaaagagcaaacct

SEQ ID NO: 373064 - DNA, 25 bp, Artificial
  probe
  misc_feature (1)..(25): SEQ ID NO: 4101; WAN024F7X; Start 105; Stop 129
tgaaaatcaaagagcaaacctaact

SEQ ID NO: 373065 - DNA, 25 bp, Artificial
  probe
  misc_feature (1)..(25): SEQ ID NO: 4101; WAN024F7X; Start 1; Stop 25
gtgcttgatatgatgcgttttatta

SEQ ID NO: 373066 - DNA, 25 bp, Artificial
  probe
  misc_feature (1)..(25): SEQ ID NO: 4101; WAN024F7X; Start 100; Stop 124
ctcaatgaaaatcaaagagcaaacc

SEQ ID NO: 373067 - DNA, 25 bp, Artificial
  probe
  misc_feature (1)..(25): SEQ ID NO: 4101; WAN024F7X; Start 104; Stop 128
atgaaaatcaaagagcaaacctaac

SEQ ID NO: 373068 - DNA, 25 bp, Artificial
  probe
  misc_feature (1)..(25): SEQ ID NO: 4101; WAN024F7X; Start 102; Stop 126
caatgaaaatcaaagagcaaaccta

SEQ ID NO: 373069 - DNA, 25 bp, Artificial
  probe
  misc_feature (1)..(25): SEQ ID NO: 4101; WAN024F7X; Start 106; Stop 130
gaaaatcaaagagcaaacctaacta

SEQ ID NO: 373070 - DNA, 25 bp, Artificial
  probe
  misc_feature (1)..(25): SEQ ID NO: 4101; WAN024F7X; Start 2; Stop 26
tgcttgatatgatgcgttttattat

SEQ ID NO: 373071 - DNA, 25 bp, Artificial
  probe
  misc_feature (1)..(25): SEQ ID NO: 4101; WAN024F7X; Start 103; Stop 127
aatgaaaatcaaagagcaaacctaa

SEQ ID NO: 373072 - DNA, 25 bp, Artificial
  probe
  misc_feature (1)..(25): SEQ ID NO: 4101; WAN024F7X; Start 3; Stop 27
gcttgatatgatgcgttttattatg

SEQ ID NO: 373073 - DNA, 25 bp, Artificial
  probe
  misc_feature (1)..(25): SEQ ID NO: 4101; WAN024F7X; Start 107; Stop 131
aaaatcaaagagcaaacctaactaa

SEQ ID NO: 373074 - DNA, 25 bp, Artificial
  probe
  misc_feature (1)..(25): SEQ ID NO: 4101; WAN024F7X; Start 4; Stop 28
cttgatatgatgcgttttattatga

SEQ ID NO: 373075 - DNA, 25 bp, Artificial
  probe
  misc_feature (1)..(25): SEQ ID NO: 4102; WAN024FHJ; Start 153; Stop 177
aaggagtggtaagacaggtgtgata

SEQ ID NO: 373076 - DNA, 25 bp, Artificial
  probe
  misc_feature (1)..(25): SEQ ID NO: 4102; WAN024FHJ; Start 152; Stop 176
taaggagtggtaagacaggtgtgat

SEQ ID NO: 373077 - DNA, 25 bp, Artificial
  probe
  misc_feature (1)..(25): SEQ ID NO: 4102; WAN024FHJ; Start 151; Stop 175
ttaaggagtggtaagacaggtgtga

SEQ ID NO: 373078 - DNA, 25 bp, Artificial
  probe
  misc_feature (1)..(25): SEQ ID NO: 4102; WAN024FHJ; Start 154; Stop 178
aggagtggtaagacaggtgtgatac

SEQ ID NO: 373079 - DNA, 25 bp, Artificial
  probe
  misc_feature (1)..(25): SEQ ID NO: 4102; WAN024FHJ; Start 28; Stop 52
ttgattctagcatccataaagtctg

SEQ ID NO: 373080 - DNA, 25 bp, Artificial
  probe
  misc_feature (1)..(25): SEQ ID NO: 4102; WAN024FHJ; Start 299; Stop 323
ggtcttcaatttcctggtctaaatc

SEQ ID NO: 373081 - DNA, 25 bp, Artificial
  probe
  misc_feature (1)..(25): SEQ ID NO: 4102; WAN024FHJ; Start 300; Stop 324
gtcttcaatttcctggtctaaatca

SEQ ID NO: 373082 - DNA, 25 bp, Artificial
  probe
  misc_feature (1)..(25): SEQ ID NO: 4102; WAN024FHJ; Start 257; Stop 281
cttcttcacctgctaaccacttgtc

SEQ ID NO: 373083 - DNA, 25 bp, Artificial
  probe
  misc_feature (1)..(25): SEQ ID NO: 4102; WAN024FHJ; Start 25; Stop 49
acattgattctagcatccataaagt

SEQ ID NO: 373084 - DNA, 25 bp, Artificial
  probe
  misc_feature (1)..(25): SEQ ID NO: 4102; WAN024FHJ; Start 304; Stop 328
tcaatttcctggtctaaatcaacaa

SEQ ID NO: 373085 - DNA, 25 bp, Artificial
  probe
  misc_feature (1)..(25): SEQ ID NO: 4102; WAN024FHJ; Start 303; Stop 327
ttcaatttcctggtctaaatcaaca

SEQ ID NO: 373086 - DNA, 25 bp, Artificial
  probe
  misc_feature (1)..(25): SEQ ID NO: 4102; WAN024FHJ; Start 149; Stop 173
ctttaaggagtggtaagacaggtgt

SEQ ID NO: 373087 - DNA, 25 bp, Artificial
  probe
  misc_feature (1)..(25): SEQ ID NO: 4102; WAN024FHJ; Start 298; Stop 322
aggtcttcaatttcctggtctaaat

SEQ ID NO: 373088 - DNA, 25 bp, Artificial
  probe
  misc_feature (1)..(25): SEQ ID NO: 4102; WAN024FHJ; Start 150; Stop 174
tttaaggagtggtaagacaggtgtg

SEQ ID NO: 373089 - DNA, 25 bp, Artificial
  probe
  misc_feature (1)..(25): SEQ ID NO: 4102; WAN024FHJ; Start 255; Stop 279
cacttcttcacctgctaaccacttg

SEQ ID NO: 373090 - DNA, 25 bp, Artificial
  probe
  misc_feature (1)..(25): SEQ ID NO: 4102; WAN024FHJ; Start 22; Stop 46
agaacattgattctagcatccataa

SEQ ID NO: 373091 - DNA, 25 bp, Artificial
  probe
  misc_feature (1)..(25): SEQ ID NO: 4102; WAN024FHJ; Start 302; Stop 326
cttcaatttcctggtctaaatcaac

SEQ ID NO: 373092 - DNA, 25 bp, Artificial
  probe
  misc_feature (1)..(25): SEQ ID NO: 4102; WAN024FHJ; Start 26; Stop 50
cattgattctagcatccataaagtc

SEQ ID NO: 373093 - DNA, 25 bp, Artificial
  probe
  misc_feature (1)..(25): SEQ ID NO: 4102; WAN024FHJ; Start 301; Stop 325
tcttcaatttcctggtctaaatcaa

SEQ ID NO: 373094 - DNA, 25 bp, Artificial
  probe
  misc_feature (1)..(25): SEQ ID NO: 4102; WAN024FHJ; Start 258; Stop 282
ttcttcacctgctaaccacttgtct

SEQ ID NO: 373095 - DNA, 25 bp, Artificial
  probe
  misc_feature (1)..(25): SEQ ID NO: 4102; WAN024FHJ; Start 305; Stop 329
caatttcctggtctaaatcaacaaa

SEQ ID NO: 373096 - DNA, 25 bp, Artificial
  probe
  misc_feature (1)..(25): SEQ ID NO: 4102; WAN024FHJ; Start 27; Stop 51
attgattctagcatccataaagtct

SEQ ID NO: 373097 - DNA, 25 bp, Artificial
  probe
  misc_feature (1)..(25): SEQ ID NO: 4102; WAN024FHJ; Start 29; Stop 53
tgattctagcatccataaagtctgg

SEQ ID NO: 373098 - DNA, 25 bp, Artificial
  probe
  misc_feature (1)..(25): SEQ ID NO: 4102; WAN024FHJ; Start 256; Stop 280
acttcttcacctgctaaccacttgt

SEQ ID NO: 373099 - DNA, 25 bp, Artificial
  probe
  misc_feature (1)..(25): SEQ ID NO: 4102; WAN024FHJ; Start 24; Stop 48
aacattgattctagcatccataaag

SEQ ID NO: 373100 - DNA, 25 bp, Artificial
  probe
  misc_feature (1)..(25): SEQ ID NO: 4102; WAN024FHJ; Start 23; Stop 47
gaacattgattctagcatccataaa

SEQ ID NO: 373101 - DNA, 25 bp, Artificial
  probe
  misc_feature (1)..(25): SEQ ID NO: 4102; WAN024FHJ; Start 239; Stop 263
agatagcatcctcaggcacttcttc

SEQ ID NO: 373102 - DNA, 25 bp, Artificial
  probe
  misc_feature (1)..(25): SEQ ID NO: 4102; WAN024FHJ; Start 30; Stop 54
gattctagcatccataaagtctggc

SEQ ID NO: 373103 - DNA, 25 bp, Artificial
  probe
  misc_feature (1)..(25): SEQ ID NO: 4102; WAN024FHJ; Start 175; Stop 199
ataccgtcagcttctctcttgtcaa

SEQ ID NO: 373104 - DNA, 25 bp, Artificial
  probe
  misc_feature (1)..(25): SEQ ID NO: 4102; WAN024FHJ; Start 146; Stop 170
attctttaaggagtggtaagacagg

SEQ ID NO: 373105 - DNA, 25 bp, Artificial
  probe
  misc_feature (1)..(25): SEQ ID NO: 4102; WAN024FHJ; Start 240; Stop 264
gatagcatcctcaggcacttcttca

SEQ ID NO: 373106 - DNA, 25 bp, Artificial
  probe
  misc_feature (1)..(25): SEQ ID NO: 4102; WAN024FHJ; Start 210; Stop 234
taggcggtggtatttgacaaagttt

SEQ ID NO: 373107 - DNA, 25 bp, Artificial
  probe
  misc_feature (1)..(25): SEQ ID NO: 4102; WAN024FHJ; Start 237; Stop 261
caagatagcatcctcaggcacttct

SEQ ID NO: 373108 - DNA, 25 bp, Artificial
  probe
  misc_feature (1)..(25): SEQ ID NO: 4103; WAN024FHQ; Start 112; Stop 136
ggaaccttgtggaatgaatatcttg

SEQ ID NO: 373109 - DNA, 25 bp, Artificial
  probe
  misc_feature (1)..(25): SEQ ID NO: 4103; WAN024FHQ; Start 111; Stop 135
tggaaccttgtggaatgaatatctt

SEQ ID NO: 373110 - DNA, 25 bp, Artificial
  probe
  misc_feature (1)..(25): SEQ ID NO: 4103; WAN024FHQ; Start 110; Stop 134
atggaaccttgtggaatgaatatct

SEQ ID NO: 373111 - DNA, 25 bp, Artificial
  probe
  misc_feature (1)..(25): SEQ ID NO: 4103; WAN024FHQ; Start 113; Stop 137
gaaccttgtggaatgaatatcttgc

SEQ ID NO: 373112 - DNA, 25 bp, Artificial
  probe
  misc_feature (1)..(25): SEQ ID NO: 4103; WAN024FHQ; Start 106; Stop 130
gataatggaaccttgtggaatgaat

SEQ ID NO: 373113 - DNA, 25 bp, Artificial
  probe
  misc_feature (1)..(25): SEQ ID NO: 4103; WAN024FHQ; Start 115; Stop 139
accttgtggaatgaatatcttgctt

SEQ ID NO: 373114 - DNA, 25 bp, Artificial
  probe
  misc_feature (1)..(25): SEQ ID NO: 4103; WAN024FHQ; Start 114; Stop 138
aaccttgtggaatgaatatcttgct

SEQ ID NO: 373115 - DNA, 25 bp, Artificial
  probe
  misc_feature (1)..(25): SEQ ID NO: 4103; WAN024FHQ; Start 109; Stop 133
aatggaaccttgtggaatgaatatc

SEQ ID NO: 373116 - DNA, 25 bp, Artificial
  probe
  misc_feature (1)..(25): SEQ ID NO: 4103; WAN024FHQ; Start 116; Stop 140
ccttgtggaatgaatatcttgcttc

SEQ ID NO: 373117 - DNA, 25 bp, Artificial
  probe
  misc_feature (1)..(25): SEQ ID NO: 4103; WAN024FHQ; Start 117; Stop 141
cttgtggaatgaatatcttgcttct

SEQ ID NO: 373118 - DNA, 25 bp, Artificial
  probe
  misc_feature (1)..(25): SEQ ID NO: 4103; WAN024FHQ; Start 98; Stop 122
atcataccgataatggaaccttgtg

SEQ ID NO: 373119 - DNA, 25 bp, Artificial
  probe
  misc_feature (1)..(25): SEQ ID NO: 4103; WAN024FHQ; Start 97; Stop 121
catcataccgataatggaaccttgt

SEQ ID NO: 373120 - DNA, 25 bp, Artificial
  probe
  misc_feature (1)..(25): SEQ ID NO: 4103; WAN024FHQ; Start 105; Stop 129
cgataatggaaccttgtggaatgaa

SEQ ID NO: 373121 - DNA, 25 bp, Artificial
  probe
  misc_feature (1)..(25): SEQ ID NO: 4103; WAN024FHQ; Start 102; Stop 126
taccgataatggaaccttgtggaat

SEQ ID NO: 373122 - DNA, 25 bp, Artificial
  probe
  misc_feature (1)..(25): SEQ ID NO: 4103; WAN024FHQ; Start 101; Stop 125
ataccgataatggaaccttgtggaa

SEQ ID NO: 373123 - DNA, 25 bp, Artificial
  probe
  misc_feature (1)..(25): SEQ ID NO: 4103; WAN024FHQ; Start 107; Stop 131
ataatggaaccttgtggaatgaata

SEQ ID NO: 373124 - DNA, 25 bp, Artificial
  probe
  misc_feature (1)..(25): SEQ ID NO: 4103; WAN024FHQ; Start 108; Stop 132
taatggaaccttgtggaatgaatat

SEQ ID NO: 373125 - DNA, 25 bp, Artificial
  probe
  misc_feature (1)..(25): SEQ ID NO: 4103; WAN024FHQ; Start 118; Stop 142
ttgtggaatgaatatcttgcttcta

SEQ ID NO: 373126 - DNA, 25 bp, Artificial
  probe
  misc_feature (1)..(25): SEQ ID NO: 4103; WAN024FHQ; Start 96; Stop 120
gcatcataccgataatggaaccttg

SEQ ID NO: 373127 - DNA, 25 bp, Artificial
  probe
  misc_feature (1)..(25): SEQ ID NO: 4103; WAN024FHQ; Start 119; Stop 143
tgtggaatgaatatcttgcttctat

SEQ ID NO: 373128 - DNA, 25 bp, Artificial
  probe
  misc_feature (1)..(25): SEQ ID NO: 4103; WAN024FHQ; Start 95; Stop 119
agcatcataccgataatggaacctt

SEQ ID NO: 373129 - DNA, 25 bp, Artificial
  probe
  misc_feature (1)..(25): SEQ ID NO: 4103; WAN024FHQ; Start 100; Stop 124
cataccgataatggaaccttgtgga

SEQ ID NO: 373130 - DNA, 25 bp, Artificial
  probe
  misc_feature (1)..(25): SEQ ID NO: 4103; WAN024FHQ; Start 99; Stop 123
tcataccgataatggaaccttgtgg

SEQ ID NO: 373131 - DNA, 25 bp, Artificial
  probe
  misc_feature (1)..(25): SEQ ID NO: 4103; WAN024FHQ; Start 120; Stop 144
gtggaatgaatatcttgcttctatc

SEQ ID NO: 373132 - DNA, 25 bp, Artificial
  probe
  misc_feature (1)..(25): SEQ ID NO: 4103; WAN024FHQ; Start 94; Stop 118
cagcatcataccgataatggaacct

SEQ ID NO: 373133 - DNA, 25 bp, Artificial
  probe
  misc_feature (1)..(25): SEQ ID NO: 4103; WAN024FHQ; Start 104; Stop 128
ccgataatggaaccttgtggaatga

SEQ ID NO: 373134 - DNA, 25 bp, Artificial
  probe
  misc_feature (1)..(25): SEQ ID NO: 4103; WAN024FHQ; Start 122; Stop 146
ggaatgaatatcttgcttctatcca

SEQ ID NO: 373135 - DNA, 25 bp, Artificial
  probe
  misc_feature (1)..(25): SEQ ID NO: 4103; WAN024FHQ; Start 121; Stop 145
tggaatgaatatcttgcttctatcc

SEQ ID NO: 373136 - DNA, 25 bp, Artificial
  probe
  misc_feature (1)..(25): SEQ ID NO: 4103; WAN024FHQ; Start 130; Stop 154
tatcttgcttctatccattatcctt

SEQ ID NO: 373137 - DNA, 25 bp, Artificial
  probe
  misc_feature (1)..(25): SEQ ID NO: 4103; WAN024FHQ; Start 103; Stop 127
accgataatggaaccttgtggaatg

SEQ ID NO: 373138 - DNA, 25 bp, Artificial
  probe
  misc_feature (1)..(25): SEQ ID NO: 4103; WAN024FHQ; Start 87; Stop 111
gaatttccagcatcataccgataat

SEQ ID NO: 373139 - DNA, 25 bp, Artificial
  probe
  misc_feature (1)..(25): SEQ ID NO: 4103; WAN024FHQ; Start 88; Stop 112
aatttccagcatcataccgataatg

SEQ ID NO: 373140 - DNA, 25 bp, Artificial
  probe
  misc_feature (1)..(25): SEQ ID NO: 4103; WAN024FHQ; Start 133; Stop 157
cttgcttctatccattatcctttga

SEQ ID NO: 373141 - DNA, 25 bp, Artificial
  probe
  misc_feature (1)..(25): SEQ ID NO: 4104; WAN024DB2; Start 56; Stop 80
cgataacaaaggctaagaaaggtgc

SEQ ID NO: 373142 - DNA, 25 bp, Artificial
  probe
  misc_feature (1)..(25): SEQ ID NO: 4104; WAN024DB2; Start 55; Stop 79
tcgataacaaaggctaagaaaggtg

SEQ ID NO: 373143 - DNA, 25 bp, Artificial
  probe
  misc_feature (1)..(25): SEQ ID NO: 4104; WAN024DB2; Start 54; Stop 78
gtcgataacaaaggctaagaaaggt

SEQ ID NO: 373144 - DNA, 25 bp, Artificial
  probe
  misc_feature (1)..(25): SEQ ID NO: 4104; WAN024DB2; Start 58; Stop 82
ataacaaaggctaagaaaggtgcaa

SEQ ID NO: 373145 - DNA, 25 bp, Artificial
  probe
  misc_feature (1)..(25): SEQ ID NO: 4104; WAN024DB2; Start 59; Stop 83
taacaaaggctaagaaaggtgcaaa

SEQ ID NO: 373146 - DNA, 25 bp, Artificial
  probe
  misc_feature (1)..(25): SEQ ID NO: 4104; WAN024DB2; Start 6; Stop 30
ttcgctgggaaattacctttctaaa

SEQ ID NO: 373147 - DNA, 25 bp, Artificial
  probe
  misc_feature (1)..(25): SEQ ID NO: 4104; WAN024DB2; Start 57; Stop 81
gataacaaaggctaagaaaggtgca

SEQ ID NO: 373148 - DNA, 25 bp, Artificial
  probe
  misc_feature (1)..(25): SEQ ID NO: 4104; WAN024DB2; Start 53; Stop 77
tgtcgataacaaaggctaagaaagg

SEQ ID NO: 373149 - DNA, 25 bp, Artificial
  probe
  misc_feature (1)..(25): SEQ ID NO: 4104; WAN024DB2; Start 40; Stop 64
ctagaacaatgcttgtcgataacaa

SEQ ID NO: 373150 - DNA, 25 bp, Artificial
  probe
  misc_feature (1)..(25): SEQ ID NO: 4104; WAN024DB2; Start 37; Stop 61
gagctagaacaatgcttgtcgataa

SEQ ID NO: 373151 - DNA, 25 bp, Artificial
  probe
  misc_feature (1)..(25): SEQ ID NO: 4104; WAN024DB2; Start 38; Stop 62
agctagaacaatgcttgtcgataac

SEQ ID NO: 373152 - DNA, 25 bp, Artificial
  probe
  misc_feature (1)..(25): SEQ ID NO: 4104; WAN024DB2; Start 39; Stop 63
gctagaacaatgcttgtcgataaca

SEQ ID NO: 373153 - DNA, 25 bp, Artificial
  probe
  misc_feature (1)..(25): SEQ ID NO: 4104; WAN024DB2; Start 36; Stop 60
ggagctagaacaatgcttgtcgata

SEQ ID NO: 373154 - DNA, 25 bp, Artificial
  probe
  misc_feature (1)..(25): SEQ ID NO: 4104; WAN024DB2; Start 52; Stop 76
ttgtcgataacaaaggctaagaaag

SEQ ID NO: 373155 - DNA, 25 bp, Artificial
  probe
  misc_feature (1)..(25): SEQ ID NO: 4104; WAN024DB2; Start 51; Stop 75
cttgtcgataacaaaggctaagaaa

SEQ ID NO: 373156 - DNA, 25 bp, Artificial
  probe
  misc_feature (1)..(25): SEQ ID NO: 4104; WAN024DB2; Start 42; Stop 66
agaacaatgcttgtcgataacaaag

SEQ ID NO: 373157 - DNA, 25 bp, Artificial
  probe
  misc_feature (1)..(25): SEQ ID NO: 4104; WAN024DB2; Start 41; Stop 65
tagaacaatgcttgtcgataacaaa

SEQ ID NO: 373158 - DNA, 25 bp, Artificial
  probe
  misc_feature (1)..(25): SEQ ID NO: 4104; WAN024DB2; Start 43; Stop 67
gaacaatgcttgtcgataacaaagg

SEQ ID NO: 373159 - DNA, 25 bp, Artificial
  probe
  misc_feature (1)..(25): SEQ ID NO: 4104; WAN024DB2; Start 47; Stop 71
aatgcttgtcgataacaaaggctaa

SEQ ID NO: 373160 - DNA, 25 bp, Artificial
  probe
  misc_feature (1)..(25): SEQ ID NO: 4104; WAN024DB2; Start 7; Stop 31
tcgctgggaaattacctttctaaaa

SEQ ID NO: 373161 - DNA, 25 bp, Artificial
  probe
  misc_feature (1)..(25): SEQ ID NO: 4104; WAN024DB2; Start 50; Stop 74
gcttgtcgataacaaaggctaagaa

SEQ ID NO: 373162 - DNA, 25 bp, Artificial
  probe
  misc_feature (1)..(25): SEQ ID NO: 4104; WAN024DB2; Start 48; Stop 72
atgcttgtcgataacaaaggctaag

SEQ ID NO: 373163 - DNA, 25 bp, Artificial
  probe
  misc_feature (1)..(25): SEQ ID NO: 4104; WAN024DB2; Start 46; Stop 70
caatgcttgtcgataacaaaggcta

SEQ ID NO: 373164 - DNA, 25 bp, Artificial
  probe
  misc_feature (1)..(25): SEQ ID NO: 4104; WAN024DB2; Start 60; Stop 84
aacaaaggctaagaaaggtgcaaaa

SEQ ID NO: 373165 - DNA, 25 bp, Artificial
  probe
  misc_feature (1)..(25): SEQ ID NO: 4104; WAN024DB2; Start 30; Stop 54
aaacaaggagctagaacaatgcttg

SEQ ID NO: 373166 - DNA, 25 bp, Artificial
  probe
  misc_feature (1)..(25): SEQ ID NO: 4104; WAN024DB2; Start 49; Stop 73
tgcttgtcgataacaaaggctaaga

SEQ ID NO: 373167 - DNA, 25 bp, Artificial
  probe
  misc_feature (1)..(25): SEQ ID NO: 4104; WAN024DB2; Start 44; Stop 68
aacaatgcttgtcgataacaaaggc

SEQ ID NO: 373168 - DNA, 25 bp, Artificial
  probe
  misc_feature (1)..(25): SEQ ID NO: 4104; WAN024DB2; Start 35; Stop 59
aggagctagaacaatgcttgtcgat

SEQ ID NO: 373169 - DNA, 25 bp, Artificial
  probe
  misc_feature (1)..(25): SEQ ID NO: 4104; WAN024DB2; Start 29; Stop 53
aaaacaaggagctagaacaatgctt

SEQ ID NO: 373170 - DNA, 25 bp, Artificial
  probe
  misc_feature (1)..(25): SEQ ID NO: 4104; WAN024DB2; Start 34; Stop 58
aaggagctagaacaatgcttgtcga

SEQ ID NO: 373171 - DNA, 25 bp, Artificial
  probe
  misc_feature (1)..(25): SEQ ID NO: 4104; WAN024DB2; Start 33; Stop 57
caaggagctagaacaatgcttgtcg

SEQ ID NO: 373172 - DNA, 25 bp, Artificial
  probe
  misc_feature (1)..(25): SEQ ID NO: 4104; WAN024DB2; Start 45; Stop 69
acaatgcttgtcgataacaaaggct

SEQ ID NO: 373173 - DNA, 25 bp, Artificial
  probe
  misc_feature (1)..(25): SEQ ID NO: 4105; WAN024FJL; Start 261; Stop 285
cttggtaggtgtgagatcaactaag

SEQ ID NO: 373174 - DNA, 25 bp, Artificial
  probe
  misc_feature (1)..(25): SEQ ID NO: 4105; WAN024FJL; Start 270; Stop 294
tgtgagatcaactaagcgttatgaa

SEQ ID NO: 373175 - DNA, 25 bp, Artificial
  probe
  misc_feature (1)..(25): SEQ ID NO: 4105; WAN024FJL; Start 269; Stop 293
gtgtgagatcaactaagcgttatga

SEQ ID NO: 373176 - DNA, 25 bp, Artificial
  probe
  misc_feature (1)..(25): SEQ ID NO: 4105; WAN024FJL; Start 266; Stop 290
taggtgtgagatcaactaagcgtta

SEQ ID NO: 373177 - DNA, 25 bp, Artificial
  probe
  misc_feature (1)..(25): SEQ ID NO: 4105; WAN024FJL; Start 268; Stop 292
ggtgtgagatcaactaagcgttatg

SEQ ID NO: 373178 - DNA, 25 bp, Artificial
  probe
  misc_feature (1)..(25): SEQ ID NO: 4105; WAN024FJL; Start 267; Stop 291
aggtgtgagatcaactaagcgttat

SEQ ID NO: 373179 - DNA, 25 bp, Artificial
  probe
  misc_feature (1)..(25): SEQ ID NO: 4105; WAN024FJL; Start 262; Stop 286
ttggtaggtgtgagatcaactaagc

SEQ ID NO: 373180 - DNA, 25 bp, Artificial
  probe
  misc_feature (1)..(25): SEQ ID NO: 4105; WAN024FJL; Start 167; Stop 191
ttatctttaatcttggcttggttcc

SEQ ID NO: 373181 - DNA, 25 bp, Artificial
  probe
  misc_feature (1)..(25): SEQ ID NO: 4105; WAN024FJL; Start 260; Stop 284
ccttggtaggtgtgagatcaactaa

SEQ ID NO: 373182 - DNA, 25 bp, Artificial
  probe
  misc_feature (1)..(25): SEQ ID NO: 4105; WAN024FJL; Start 265; Stop 289
gtaggtgtgagatcaactaagcgtt

SEQ ID NO: 373183 - DNA, 25 bp, Artificial
  probe
  misc_feature (1)..(25): SEQ ID NO: 4105; WAN024FJL; Start 273; Stop 297
gagatcaactaagcgttatgaaacc

SEQ ID NO: 373184 - DNA, 25 bp, Artificial
  probe
  misc_feature (1)..(25): SEQ ID NO: 4105; WAN024FJL; Start 275; Stop 299
gatcaactaagcgttatgaaaccat

SEQ ID NO: 373185 - DNA, 25 bp, Artificial
  probe
  misc_feature (1)..(25): SEQ ID NO: 4105; WAN024FJL; Start 259; Stop 283
tccttggtaggtgtgagatcaacta

SEQ ID NO: 373186 - DNA, 25 bp, Artificial
  probe
  misc_feature (1)..(25): SEQ ID NO: 4105; WAN024FJL; Start 274; Stop 298
agatcaactaagcgttatgaaacca

SEQ ID NO: 373187 - DNA, 25 bp, Artificial
  probe
  misc_feature (1)..(25): SEQ ID NO: 4105; WAN024FJL; Start 272; Stop 296
tgagatcaactaagcgttatgaaac

SEQ ID NO: 373188 - DNA, 25 bp, Artificial
  probe
  misc_feature (1)..(25): SEQ ID NO: 4105; WAN024FJL; Start 271; Stop 295
gtgagatcaactaagcgttatgaaa

SEQ ID NO: 373189 - DNA, 25 bp, Artificial
  probe
  misc_feature (1)..(25): SEQ ID NO: 4105; WAN024FJL; Start 328; Stop 352
caggaacagaccattaccttgacag

SEQ ID NO: 373190 - DNA, 25 bp, Artificial
  probe
  misc_feature (1)..(25): SEQ ID NO: 4105; WAN024FJL; Start 276; Stop 300
atcaactaagcgttatgaaaccata

SEQ ID NO: 373191 - DNA, 25 bp, Artificial
  probe
  misc_feature (1)..(25): SEQ ID NO: 4105; WAN024FJL; Start 166; Stop 190
attatctttaatcttggcttggttc

SEQ ID NO: 373192 - DNA, 25 bp, Artificial
  probe
  misc_feature (1)..(25): SEQ ID NO: 4105; WAN024FJL; Start 256; Stop 280
ttgtccttggtaggtgtgagatcaa

SEQ ID NO: 373193 - DNA, 25 bp, Artificial
  probe
  misc_feature (1)..(25): SEQ ID NO: 4105; WAN024FJL; Start 264; Stop 288
ggtaggtgtgagatcaactaagcgt

SEQ ID NO: 373194 - DNA, 25 bp, Artificial
  probe
  misc_feature (1)..(25): SEQ ID NO: 4105; WAN024FJL; Start 263; Stop 287
tggtaggtgtgagatcaactaagcg

SEQ ID NO: 373195 - DNA, 25 bp, Artificial
  probe
  misc_feature (1)..(25): SEQ ID NO: 4105; WAN024FJL; Start 83; Stop 107
gagatttgcaggatacactcttagc

SEQ ID NO: 373196 - DNA, 25 bp, Artificial
  probe
  misc_feature (1)..(25): SEQ ID NO: 4105; WAN024FJL; Start 66; Stop 90
ggacctttatcttgccagagatttg

SEQ ID NO: 373197 - DNA, 25 bp, Artificial
  probe
  misc_feature (1)..(25): SEQ ID NO: 4105; WAN024FJL; Start 65; Stop 89
aggacctttatcttgccagagattt

SEQ ID NO: 373198 - DNA, 25 bp, Artificial
  probe
  misc_feature (1)..(25): SEQ ID NO: 4105; WAN024FJL; Start 329; Stop 353
aggaacagaccattaccttgacagg

SEQ ID NO: 373199 - DNA, 25 bp, Artificial
  probe
  misc_feature (1)..(25): SEQ ID NO: 4105; WAN024FJL; Start 258; Stop 282
gtccttggtaggtgtgagatcaact

SEQ ID NO: 373200 - DNA, 25 bp, Artificial
  probe
  misc_feature (1)..(25): SEQ ID NO: 4105; WAN024FJL; Start 64; Stop 88
gaggacctttatcttgccagagatt

SEQ ID NO: 373201 - DNA, 25 bp, Artificial
  probe
  misc_feature (1)..(25): SEQ ID NO: 4105; WAN024FJL; Start 289; Stop 313
tatgaaaccataaggcttgcctatc

SEQ ID NO: 373202 - DNA, 25 bp, Artificial
  probe
  misc_feature (1)..(25): SEQ ID NO: 4105; WAN024FJL; Start 67; Stop 91
gacctttatcttgccagagatttgc

SEQ ID NO: 373203 - DNA, 25 bp, Artificial
  probe
  misc_feature (1)..(25): SEQ ID NO: 4105; WAN024FJL; Start 257; Stop 281
tgtccttggtaggtgtgagatcaac

SEQ ID NO: 373204 - DNA, 25 bp, Artificial
  probe
  misc_feature (1)..(25): SEQ ID NO: 4105; WAN024FJL; Start 332; Stop 356
aacagaccattaccttgacaggctt

SEQ ID NO: 373205 - DNA, 25 bp, Artificial
  probe
  misc_feature (1)..(25): SEQ ID NO: 4105; WAN024FJL; Start 202; Stop 226
tttaacccagtgcttctgtcctttg

SEQ ID NO: 373206 - DNA, 25 bp, Artificial
  probe
  misc_feature (1)..(25): SEQ ID NO: 4106; WAN024CW3; Start 1023; Stop 1047
aatacagacagcaattcgtgatatg

SEQ ID NO: 373207 - DNA, 25 bp, Artificial
  probe
  misc_feature (1)..(25): SEQ ID NO: 4106; WAN024CW3; Start 1024; Stop 1048
atacagacagcaattcgtgatatgg

SEQ ID NO: 373208 - DNA, 25 bp, Artificial
  probe
  misc_feature (1)..(25): SEQ ID NO: 4106; WAN024CW3; Start 1027; Stop 1051
cagacagcaattcgtgatatggtag

SEQ ID NO: 373209 - DNA, 25 bp, Artificial
  probe
  misc_feature (1)..(25): SEQ ID NO: 4106; WAN024CW3; Start 600; Stop 624
tacaattactgaacctagcatgaca

SEQ ID NO: 373210 - DNA, 25 bp, Artificial
  probe
  misc_feature (1)..(25): SEQ ID NO: 4106; WAN024CW3; Start 596; Stop 620
ctcttacaattactgaacctagcat

SEQ ID NO: 373211 - DNA, 25 bp, Artificial
  probe
  misc_feature (1)..(25): SEQ ID NO: 4106; WAN024CW3; Start 593; Stop 617
atgctcttacaattactgaacctag

SEQ ID NO: 373212 - DNA, 25 bp, Artificial
  probe
  misc_feature (1)..(25): SEQ ID NO: 4106; WAN024CW3; Start 762; Stop 786
tgcctcagaacaagatattaagatt

SEQ ID NO: 373213 - DNA, 25 bp, Artificial
  probe
  misc_feature (1)..(25): SEQ ID NO: 4106; WAN024CW3; Start 782; Stop 806
agattataggtattagacacggaga

SEQ ID NO: 373214 - DNA, 25 bp, Artificial
  probe
  misc_feature (1)..(25): SEQ ID NO: 4106; WAN024CW3; Start 601; Stop 625
acaattactgaacctagcatgacac

SEQ ID NO: 373215 - DNA, 25 bp, Artificial
  probe
  misc_feature (1)..(25): SEQ ID NO: 4106; WAN024CW3; Start 599; Stop 623
ttacaattactgaacctagcatgac

SEQ ID NO: 373216 - DNA, 25 bp, Artificial
  probe
  misc_feature (1)..(25): SEQ ID NO: 4106; WAN024CW3; Start 592; Stop 616
aatgctcttacaattactgaaccta

SEQ ID NO: 373217 - DNA, 25 bp, Artificial
  probe
  misc_feature (1)..(25): SEQ ID NO: 4106; WAN024CW3; Start 1026; Stop 1050
acagacagcaattcgtgatatggta

SEQ ID NO: 373218 - DNA, 25 bp, Artificial
  probe
  misc_feature (1)..(25): SEQ ID NO: 4106; WAN024CW3; Start 1025; Stop 1049
tacagacagcaattcgtgatatggt

SEQ ID NO: 373219 - DNA, 25 bp, Artificial
  probe
  misc_feature (1)..(25): SEQ ID NO: 4106; WAN024CW3; Start 598; Stop 622
cttacaattactgaacctagcatga

SEQ ID NO: 373220 - DNA, 25 bp, Artificial
  probe
  misc_feature (1)..(25): SEQ ID NO: 4106; WAN024CW3; Start 597; Stop 621
tcttacaattactgaacctagcatg

SEQ ID NO: 373221 - DNA, 25 bp, Artificial
  probe
  misc_feature (1)..(25): SEQ ID NO: 4106; WAN024CW3; Start 761; Stop 785
ttgcctcagaacaagatattaagat

SEQ ID NO: 373222 - DNA, 25 bp, Artificial
  probe
  misc_feature (1)..(25): SEQ ID NO: 4106; WAN024CW3; Start 783; Stop 807
gattataggtattagacacggagaa

SEQ ID NO: 373223 - DNA, 25 bp, Artificial
  probe
  misc_feature (1)..(25): SEQ ID NO: 4106; WAN024CW3; Start 781; Stop 805
aagattataggtattagacacggag

SEQ ID NO: 373224 - DNA, 25 bp, Artificial
  probe
  misc_feature (1)..(25): SEQ ID NO: 4106; WAN024CW3; Start 602; Stop 626
caattactgaacctagcatgacacg

SEQ ID NO: 373225 - DNA, 25 bp, Artificial
  probe
  misc_feature (1)..(25): SEQ ID NO: 4106; WAN024CW3; Start 875; Stop 899
gagttcctagtgataatcgtaatct

SEQ ID NO: 373226 - DNA, 25 bp, Artificial
  probe
  misc_feature (1)..(25): SEQ ID NO: 4106; WAN024CW3; Start 874; Stop 898
agagttcctagtgataatcgtaatc

SEQ ID NO: 373227 - DNA, 25 bp, Artificial
  probe
  misc_feature (1)..(25): SEQ ID NO: 4106; WAN024CW3; Start 967; Stop 991
aataccgatttgatggatgtagagc

SEQ ID NO: 373228 - DNA, 25 bp, Artificial
  probe
  misc_feature (1)..(25): SEQ ID NO: 4106; WAN024CW3; Start 488; Stop 512
cggtaaatcctgagcatacaaagat

SEQ ID NO: 373229 - DNA, 25 bp, Artificial
  probe
  misc_feature (1)..(25): SEQ ID NO: 4106; WAN024CW3; Start 1021; Stop 1045
gaaatacagacagcaattcgtgata

SEQ ID NO: 373230 - DNA, 25 bp, Artificial
  probe
  misc_feature (1)..(25): SEQ ID NO: 4106; WAN024CW3; Start 1031; Stop 1055
cagcaattcgtgatatggtagcaga

SEQ ID NO: 373231 - DNA, 25 bp, Artificial
  probe
  misc_feature (1)..(25): SEQ ID NO: 4106; WAN024CW3; Start 1028; Stop 1052
agacagcaattcgtgatatggtagc

SEQ ID NO: 373232 - DNA, 25 bp, Artificial
  probe
  misc_feature (1)..(25): SEQ ID NO: 4106; WAN024CW3; Start 1022; Stop 1046
aaatacagacagcaattcgtgatat

SEQ ID NO: 373233 - DNA, 25 bp, Artificial
  probe
  misc_feature (1)..(25): SEQ ID NO: 4106; WAN024CW3; Start 1016; Stop 1040
tagatgaaatacagacagcaattcg

SEQ ID NO: 373234 - DNA, 25 bp, Artificial
  probe
  misc_feature (1)..(25): SEQ ID NO: 4106; WAN024CW3; Start 1018; Stop 1042
gatgaaatacagacagcaattcgtg

SEQ ID NO: 373235 - DNA, 25 bp, Artificial
  probe
  misc_feature (1)..(25): SEQ ID NO: 4106; WAN024CW3; Start 1017; Stop 1041
agatgaaatacagacagcaattcgt

SEQ ID NO: 373236 - DNA, 25 bp, Artificial
  probe
  misc_feature (1)..(25): SEQ ID NO: 4106; WAN024CW3; Start 569; Stop 593
ggattgagcaaattaagcaaggaaa

SEQ ID NO: 373237 - DNA, 25 bp, Artificial
  probe
  misc_feature (1)..(25): SEQ ID NO: 4106; WAN024CW3; Start 876; Stop 900
agttcctagtgataatcgtaatctt

SEQ ID NO: 373238 - DNA, 25 bp, Artificial
  probe
  misc_feature (1)..(25): SEQ ID NO: 4106; WAN024CW3; Start 591; Stop 615
aaatgctcttacaattactgaacct

SEQ ID NO: 373239 - DNA, 25 bp, Artificial
  probe
  misc_feature (1)..(25): SEQ ID NO: 4107; WAN024C4X; Start 15; Stop 39
aaatccgaagaaggccaaatatctt

SEQ ID NO: 373240 - DNA, 25 bp, Artificial
  probe
  misc_feature (1)..(25): SEQ ID NO: 4107; WAN024C4X; Start 22; Stop 46
aagaaggccaaatatcttcggattt

SEQ ID NO: 373241 - DNA, 25 bp, Artificial
  probe
  misc_feature (1)..(25): SEQ ID NO: 4107; WAN024C4X; Start 14; Stop 38
aaaatccgaagaaggccaaatatct

SEQ ID NO: 373242 - DNA, 25 bp, Artificial
  probe
  misc_feature (1)..(25): SEQ ID NO: 4107; WAN024C4X; Start 23; Stop 47
agaaggccaaatatcttcggatttt

SEQ ID NO: 373243 - DNA, 25 bp, Artificial
  probe
  misc_feature (1)..(25): SEQ ID NO: 4108; WAN024E2W; Start 229; Stop 253
caatatacaggtggcttcaacaatg

SEQ ID NO: 373244 - DNA, 25 bp, Artificial
  probe
  misc_feature (1)..(25): SEQ ID NO: 4108; WAN024E2W; Start 230; Stop 254
aatatacaggtggcttcaacaatgg

SEQ ID NO: 373245 - DNA, 25 bp, Artificial
  probe
  misc_feature (1)..(25): SEQ ID NO: 4108; WAN024E2W; Start 345; Stop 369
actaacaacagaacaagaagtcgtt

SEQ ID NO: 373246 - DNA, 25 bp, Artificial
  probe
  misc_feature (1)..(25): SEQ ID NO: 4108; WAN024E2W; Start 344; Stop 368
aactaacaacagaacaagaagtcgt

SEQ ID NO: 373247 - DNA, 25 bp, Artificial
  probe
  misc_feature (1)..(25): SEQ ID NO: 4108; WAN024E2W; Start 231; Stop 255
atatacaggtggcttcaacaatgga

SEQ ID NO: 373248 - DNA, 25 bp, Artificial
  probe
  misc_feature (1)..(25): SEQ ID NO: 4108; WAN024E2W; Start 232; Stop 256
tatacaggtggcttcaacaatggag

SEQ ID NO: 373249 - DNA, 25 bp, Artificial
  probe
  misc_feature (1)..(25): SEQ ID NO: 4108; WAN024E2W; Start 340; Stop 364
gggaaactaacaacagaacaagaag

SEQ ID NO: 373250 - DNA, 25 bp, Artificial
  probe
  misc_feature (1)..(25): SEQ ID NO: 4108; WAN024E2W; Start 337; Stop 361
aaagggaaactaacaacagaacaag

SEQ ID NO: 373251 - DNA, 25 bp, Artificial
  probe
  misc_feature (1)..(25): SEQ ID NO: 4108; WAN024E2W; Start 339; Stop 363
agggaaactaacaacagaacaagaa

SEQ ID NO: 373252 - DNA, 25 bp, Artificial
  probe
  misc_feature (1)..(25): SEQ ID NO: 4108; WAN024E2W; Start 338; Stop 362
aagggaaactaacaacagaacaaga

SEQ ID NO: 373253 - DNA, 25 bp, Artificial
  probe
  misc_feature (1)..(25): SEQ ID NO: 4108; WAN024E2W; Start 156; Stop 180
gattgtttatgatggcagtcttgtc

SEQ ID NO: 373254 - DNA, 25 bp, Artificial
  probe
  misc_feature (1)..(25): SEQ ID NO: 4108; WAN024E2W; Start 228; Stop 252
ccaatatacaggtggcttcaacaat

SEQ ID NO: 373255 - DNA, 25 bp, Artificial
  probe
  misc_feature (1)..(25): SEQ ID NO: 4108; WAN024E2W; Start 356; Stop 380
aacaagaagtcgtttatgaaggaac

SEQ ID NO: 373256 - DNA, 25 bp, Artificial
  probe
  misc_feature (1)..(25): SEQ ID NO: 4108; WAN024E2W; Start 354; Stop 378
agaacaagaagtcgtttatgaagga

SEQ ID NO: 373257 - DNA, 25 bp, Artificial
  probe
  misc_feature (1)..(25): SEQ ID NO: 4108; WAN024E2W; Start 353; Stop 377
cagaacaagaagtcgtttatgaagg

SEQ ID NO: 373258 - DNA, 25 bp, Artificial
  probe
  misc_feature (1)..(25): SEQ ID NO: 4108; WAN024E2W; Start 350; Stop 374
caacagaacaagaagtcgtttatga

SEQ ID NO: 373259 - DNA, 25 bp, Artificial
  probe
  misc_feature (1)..(25): SEQ ID NO: 4108; WAN024E2W; Start 349; Stop 373
acaacagaacaagaagtcgtttatg

SEQ ID NO: 373260 - DNA, 25 bp, Artificial
  probe
  misc_feature (1)..(25): SEQ ID NO: 4108; WAN024E2W; Start 346; Stop 370
ctaacaacagaacaagaagtcgttt

SEQ ID NO: 373261 - DNA, 25 bp, Artificial
  probe
  misc_feature (1)..(25): SEQ ID NO: 4108; WAN024E2W; Start 147; Stop 171
taatggaacgattgtttatgatggc

SEQ ID NO: 373262 - DNA, 25 bp, Artificial
  probe
  misc_feature (1)..(25): SEQ ID NO: 4108; WAN024E2W; Start 352; Stop 376
acagaacaagaagtcgtttatgaag

SEQ ID NO: 373263 - DNA, 25 bp, Artificial
  probe
  misc_feature (1)..(25): SEQ ID NO: 4108; WAN024E2W; Start 355; Stop 379
gaacaagaagtcgtttatgaaggaa

SEQ ID NO: 373264 - DNA, 25 bp, Artificial
  probe
  misc_feature (1)..(25): SEQ ID NO: 4108; WAN024E2W; Start 348; Stop 372
aacaacagaacaagaagtcgtttat

SEQ ID NO: 373265 - DNA, 25 bp, Artificial
  probe
  misc_feature (1)..(25): SEQ ID NO: 4108; WAN024E2W; Start 351; Stop 375
aacagaacaagaagtcgtttatgaa

SEQ ID NO: 373266 - DNA, 25 bp, Artificial
  probe
  misc_feature (1)..(25): SEQ ID NO: 4108; WAN024E2W; Start 343; Stop 367
aaactaacaacagaacaagaagtcg

SEQ ID NO: 373267 - DNA, 25 bp, Artificial
  probe
  misc_feature (1)..(25): SEQ ID NO: 4108; WAN024E2W; Start 357; Stop 381
acaagaagtcgtttatgaaggaact

SEQ ID NO: 373268 - DNA, 25 bp, Artificial
  probe
  misc_feature (1)..(25): SEQ ID NO: 4108; WAN024E2W; Start 341; Stop 365
ggaaactaacaacagaacaagaagt

SEQ ID NO: 373269 - DNA, 25 bp, Artificial
  probe
  misc_feature (1)..(25): SEQ ID NO: 4108; WAN024E2W; Start 347; Stop 371
taacaacagaacaagaagtcgttta

SEQ ID NO: 373270 - DNA, 25 bp, Artificial
  probe
  misc_feature (1)..(25): SEQ ID NO: 4108; WAN024E2W; Start 157; Stop 181
attgtttatgatggcagtcttgtcc

SEQ ID NO: 373271 - DNA, 25 bp, Artificial
  probe
  misc_feature (1)..(25): SEQ ID NO: 4108; WAN024E2W; Start 153; Stop 177
aacgattgtttatgatggcagtctt

SEQ ID NO: 373272 - DNA, 25 bp, Artificial
  probe
  misc_feature (1)..(25): SEQ ID NO: 4108; WAN024E2W; Start 148; Stop 172
aatggaacgattgtttatgatggca

SEQ ID NO: 373273 - DNA, 25 bp, Artificial
  probe
  misc_feature (1)..(25): SEQ ID NO: 4108; WAN024E2W; Start 155; Stop 179
cgattgtttatgatggcagtcttgt

SEQ ID NO: 373274 - DNA, 25 bp, Artificial
  probe
  misc_feature (1)..(25): SEQ ID NO: 4108; WAN024E2W; Start 154; Stop 178
acgattgtttatgatggcagtcttg

SEQ ID NO: 373275 - DNA, 25 bp, Artificial
  probe
  misc_feature (1)..(25): SEQ ID NO: 4108; WAN024E2W; Start 152; Stop 176
gaacgattgtttatgatggcagtct

SEQ ID NO: 373276 - DNA, 25 bp, Artificial
  probe
  misc_feature (1)..(25): SEQ ID NO: 4109; WAN024FEX; Start 163; Stop 187
ggtctgagctacattgtcattatta

SEQ ID NO: 373277 - DNA, 25 bp, Artificial
  probe
  misc_feature (1)..(25): SEQ ID NO: 4109; WAN024FEX; Start 101; Stop 125
tagacaccatttacataaggagttg

SEQ ID NO: 373278 - DNA, 25 bp, Artificial
  probe
  misc_feature (1)..(25): SEQ ID NO: 4109; WAN024FEX; Start 272; Stop 296
tatttggcaatatcactggcaatga

SEQ ID NO: 373279 - DNA, 25 bp, Artificial
  probe
  misc_feature (1)..(25): SEQ ID NO: 4109; WAN024FEX; Start 102; Stop 126
agacaccatttacataaggagttgt

SEQ ID NO: 373280 - DNA, 25 bp, Artificial
  probe
  misc_feature (1)..(25): SEQ ID NO: 4109; WAN024FEX; Start 279; Stop 303
caatatcactggcaatgaccaagac

SEQ ID NO: 373281 - DNA, 25 bp, Artificial
  probe
  misc_feature (1)..(25): SEQ ID NO: 4109; WAN024FEX; Start 104; Stop 128
acaccatttacataaggagttgtcg

SEQ ID NO: 373282 - DNA, 25 bp, Artificial
  probe
  misc_feature (1)..(25): SEQ ID NO: 4109; WAN024FEX; Start 212; Stop 236
gtaatcaacatagctacacttccag

SEQ ID NO: 373283 - DNA, 25 bp, Artificial
  probe
  misc_feature (1)..(25): SEQ ID NO: 4109; WAN024FEX; Start 115; Stop 139
ataaggagttgtcgagtaatttggt

SEQ ID NO: 373284 - DNA, 25 bp, Artificial
  probe
  misc_feature (1)..(25): SEQ ID NO: 4109; WAN024FEX; Start 114; Stop 138
cataaggagttgtcgagtaatttgg

SEQ ID NO: 373285 - DNA, 25 bp, Artificial
  probe
  misc_feature (1)..(25): SEQ ID NO: 4109; WAN024FEX; Start 83; Stop 107
aagtattgttgggtagaatagacac

SEQ ID NO: 373286 - DNA, 25 bp, Artificial
  probe
  misc_feature (1)..(25): SEQ ID NO: 4109; WAN024FEX; Start 82; Stop 106
caagtattgttgggtagaatagaca

SEQ ID NO: 373287 - DNA, 25 bp, Artificial
  probe
  misc_feature (1)..(25): SEQ ID NO: 4109; WAN024FEX; Start 116; Stop 140
taaggagttgtcgagtaatttggtc

SEQ ID NO: 373288 - DNA, 25 bp, Artificial
  probe
  misc_feature (1)..(25): SEQ ID NO: 4109; WAN024FEX; Start 100; Stop 124
atagacaccatttacataaggagtt

SEQ ID NO: 373289 - DNA, 25 bp, Artificial
  probe
  misc_feature (1)..(25): SEQ ID NO: 4109; WAN024FEX; Start 99; Stop 123
aatagacaccatttacataaggagt

SEQ ID NO: 373290 - DNA, 25 bp, Artificial
  probe
  misc_feature (1)..(25): SEQ ID NO: 4109; WAN024FEX; Start 88; Stop 112
ttgttgggtagaatagacaccattt

SEQ ID NO: 373291 - DNA, 25 bp, Artificial
  probe
  misc_feature (1)..(25): SEQ ID NO: 4109; WAN024FEX; Start 87; Stop 111
attgttgggtagaatagacaccatt

SEQ ID NO: 373292 - DNA, 25 bp, Artificial
  probe
  misc_feature (1)..(25): SEQ ID NO: 4109; WAN024FEX; Start 85; Stop 109
gtattgttgggtagaatagacacca

SEQ ID NO: 373293 - DNA, 25 bp, Artificial
  probe
  misc_feature (1)..(25): SEQ ID NO: 4109; WAN024FEX; Start 84; Stop 108
agtattgttgggtagaatagacacc

SEQ ID NO: 373294 - DNA, 25 bp, Artificial
  probe
  misc_feature (1)..(25): SEQ ID NO: 4109; WAN024FEX; Start 368; Stop 392
caggcttctttaatctcgaaactac

SEQ ID NO: 373295 - DNA, 25 bp, Artificial
  probe
  misc_feature (1)..(25): SEQ ID NO: 4109; WAN024FEX; Start 91; Stop 115
ttgggtagaatagacaccatttaca

SEQ ID NO: 373296 - DNA, 25 bp, Artificial
  probe
  misc_feature (1)..(25): SEQ ID NO: 4109; WAN024FEX; Start 89; Stop 113
tgttgggtagaatagacaccattta

SEQ ID NO: 373297 - DNA, 25 bp, Artificial
  probe
  misc_feature (1)..(25): SEQ ID NO: 4109; WAN024FEX; Start 92; Stop 116
tgggtagaatagacaccatttacat

SEQ ID NO: 373298 - DNA, 25 bp, Artificial
  probe
  misc_feature (1)..(25): SEQ ID NO: 4109; WAN024FEX; Start 90; Stop 114
gttgggtagaatagacaccatttac

SEQ ID NO: 373299 - DNA, 25 bp, Artificial
  probe
  misc_feature (1)..(25): SEQ ID NO: 4109; WAN024FEX; Start 86; Stop 110
tattgttgggtagaatagacaccat

SEQ ID NO: 373300 - DNA, 25 bp, Artificial
  probe
  misc_feature (1)..(25): SEQ ID NO: 4109; WAN024FEX; Start 369; Stop 393
aggcttctttaatctcgaaactacg

SEQ ID NO: 373301 - DNA, 25 bp, Artificial
  probe
  misc_feature (1)..(25): SEQ ID NO: 4109; WAN024FEX; Start 97; Stop 121
agaatagacaccatttacataagga

SEQ ID NO: 373302 - DNA, 25 bp, Artificial
  probe
  misc_feature (1)..(25): SEQ ID NO: 4109; WAN024FEX; Start 280; Stop 304
aatatcactggcaatgaccaagacc

SEQ ID NO: 373303 - DNA, 25 bp, Artificial
  probe
  misc_feature (1)..(25): SEQ ID NO: 4109; WAN024FEX; Start 273; Stop 297
atttggcaatatcactggcaatgac

SEQ ID NO: 373304 - DNA, 25 bp, Artificial
  probe
  misc_feature (1)..(25): SEQ ID NO: 4109; WAN024FEX; Start 162; Stop 186
gggtctgagctacattgtcattatt

SEQ ID NO: 373305 - DNA, 25 bp, Artificial
  probe
  misc_feature (1)..(25): SEQ ID NO: 4109; WAN024FEX; Start 111; Stop 135
ttacataaggagttgtcgagtaatt

SEQ ID NO: 373306 - DNA, 25 bp, Artificial
  probe
  misc_feature (1)..(25): SEQ ID NO: 4109; WAN024FEX; Start 367; Stop 391
gcaggcttctttaatctcgaaacta

SEQ ID NO: 373307 - DNA, 25 bp, Artificial
  probe
  misc_feature (1)..(25): SEQ ID NO: 4109; WAN024FEX; Start 365; Stop 389
tagcaggcttctttaatctcgaaac

SEQ ID NO: 373308 - DNA, 25 bp, Artificial
  probe
  misc_feature (1)..(25): SEQ ID NO: 4109; WAN024FEX; Start 168; Stop 192
gagctacattgtcattattaaaggc

SEQ ID NO: 373309 - DNA, 25 bp, Artificial
  probe
  misc_feature (1)..(25): SEQ ID NO: 4110; WAN024EVW; Start 205; Stop 229
gccaatgagaagaatgtcctctaca

SEQ ID NO: 373310 - DNA, 25 bp, Artificial
  probe
  misc_feature (1)..(25): SEQ ID NO: 4110; WAN024EVW; Start 131; Stop 155
atattgaccttgcgagtcttcagtt

SEQ ID NO: 373311 - DNA, 25 bp, Artificial
  probe
  misc_feature (1)..(25): SEQ ID NO: 4110; WAN024EVW; Start 130; Stop 154
gatattgaccttgcgagtcttcagt

SEQ ID NO: 373312 - DNA, 25 bp, Artificial
  probe
  misc_feature (1)..(25): SEQ ID NO: 4110; WAN024EVW; Start 209; Stop 233
atgagaagaatgtcctctacatcac

SEQ ID NO: 373313 - DNA, 25 bp, Artificial
  probe
  misc_feature (1)..(25): SEQ ID NO: 4110; WAN024EVW; Start 206; Stop 230
ccaatgagaagaatgtcctctacat

SEQ ID NO: 373314 - DNA, 25 bp, Artificial
  probe
  misc_feature (1)..(25): SEQ ID NO: 4110; WAN024EVW; Start 204; Stop 228
cgccaatgagaagaatgtcctctac

SEQ ID NO: 373315 - DNA, 25 bp, Artificial
  probe
  misc_feature (1)..(25): SEQ ID NO: 4110; WAN024EVW; Start 208; Stop 232
aatgagaagaatgtcctctacatca

SEQ ID NO: 373316 - DNA, 25 bp, Artificial
  probe
  misc_feature (1)..(25): SEQ ID NO: 4110; WAN024EVW; Start 207; Stop 231
caatgagaagaatgtcctctacatc

SEQ ID NO: 373317 - DNA, 25 bp, Artificial
  probe
  misc_feature (1)..(25): SEQ ID NO: 4110; WAN024EVW; Start 203; Stop 227
tcgccaatgagaagaatgtcctcta

SEQ ID NO: 373318 - DNA, 25 bp, Artificial
  probe
  misc_feature (1)..(25): SEQ ID NO: 4110; WAN024EVW; Start 1; Stop 25
gtggaaaccatatttgtcagcaata

SEQ ID NO: 373319 - DNA, 25 bp, Artificial
  probe
  misc_feature (1)..(25): SEQ ID NO: 4110; WAN024EVW; Start 9; Stop 33
catatttgtcagcaatatccagcac

SEQ ID NO: 373320 - DNA, 25 bp, Artificial
  probe
  misc_feature (1)..(25): SEQ ID NO: 4110; WAN024EVW; Start 6; Stop 30
aaccatatttgtcagcaatatccag

SEQ ID NO: 373321 - DNA, 25 bp, Artificial
  probe
  misc_feature (1)..(25): SEQ ID NO: 4110; WAN024EVW; Start 210; Stop 234
tgagaagaatgtcctctacatcacg

SEQ ID NO: 373322 - DNA, 25 bp, Artificial
  probe
  misc_feature (1)..(25): SEQ ID NO: 4110; WAN024EVW; Start 129; Stop 153
cgatattgaccttgcgagtcttcag

SEQ ID NO: 373323 - DNA, 25 bp, Artificial
  probe
  misc_feature (1)..(25): SEQ ID NO: 4110; WAN024EVW; Start 5; Stop 29
aaaccatatttgtcagcaatatcca

SEQ ID NO: 373324 - DNA, 25 bp, Artificial
  probe
  misc_feature (1)..(25): SEQ ID NO: 4110; WAN024EVW; Start 2; Stop 26
tggaaaccatatttgtcagcaatat

SEQ ID NO: 373325 - DNA, 25 bp, Artificial
  probe
  misc_feature (1)..(25): SEQ ID NO: 4110; WAN024EVW; Start 8; Stop 32
ccatatttgtcagcaatatccagca

SEQ ID NO: 373326 - DNA, 25 bp, Artificial
  probe
  misc_feature (1)..(25): SEQ ID NO: 4110; WAN024EVW; Start 7; Stop 31
accatatttgtcagcaatatccagc

SEQ ID NO: 373327 - DNA, 25 bp, Artificial
  probe
  misc_feature (1)..(25): SEQ ID NO: 4110; WAN024EVW; Start 4; Stop 28
gaaaccatatttgtcagcaatatcc

SEQ ID NO: 373328 - DNA, 25 bp, Artificial
  probe
  misc_feature (1)..(25): SEQ ID NO: 4110; WAN024EVW; Start 3; Stop 27
ggaaaccatatttgtcagcaatatc

SEQ ID NO: 373329 - DNA, 25 bp, Artificial
  probe
  misc_feature (1)..(25): SEQ ID NO: 4110; WAN024EVW; Start 133; Stop 157
attgaccttgcgagtcttcagttta

SEQ ID NO: 373330 - DNA, 25 bp, Artificial
  probe
  misc_feature (1)..(25): SEQ ID NO: 4110; WAN024EVW; Start 132; Stop 156
tattgaccttgcgagtcttcagttt

SEQ ID NO: 373331 - DNA, 25 bp, Artificial
  probe
  misc_feature (1)..(25): SEQ ID NO: 4110; WAN024EVW; Start 66; Stop 90
gatccacaacaccgttcagaatcag

SEQ ID NO: 373332 - DNA, 25 bp, Artificial
  probe
  misc_feature (1)..(25): SEQ ID NO: 4110; WAN024EVW; Start 213; Stop 237
gaagaatgtcctctacatcacggag

SEQ ID NO: 373333 - DNA, 25 bp, Artificial
  probe
  misc_feature (1)..(25): SEQ ID NO: 4110; WAN024EVW; Start 211; Stop 235
gagaagaatgtcctctacatcacgg

SEQ ID NO: 373334 - DNA, 25 bp, Artificial
  probe
  misc_feature (1)..(25): SEQ ID NO: 4110; WAN024EVW; Start 202; Stop 226
ttcgccaatgagaagaatgtcctct

SEQ ID NO: 373335 - DNA, 25 bp, Artificial
  probe
  misc_feature (1)..(25): SEQ ID NO: 4110; WAN024EVW; Start 10; Stop 34
atatttgtcagcaatatccagcacg

SEQ ID NO: 373336 - DNA, 25 bp, Artificial
  probe
  misc_feature (1)..(25): SEQ ID NO: 4110; WAN024EVW; Start 70; Stop 94
cacaacaccgttcagaatcaggtag

SEQ ID NO: 373337 - DNA, 25 bp, Artificial
  probe
  misc_feature (1)..(25): SEQ ID NO: 4110; WAN024EVW; Start 212; Stop 236
agaagaatgtcctctacatcacgga

SEQ ID NO: 373338 - DNA, 25 bp, Artificial
  probe
  misc_feature (1)..(25): SEQ ID NO: 4110; WAN024EVW; Start 189; Stop 213
cataaaccttttcttcgccaatgag

SEQ ID NO: 373339 - DNA, 25 bp, Artificial
  probe
  misc_feature (1)..(25): SEQ ID NO: 4110; WAN024EVW; Start 190; Stop 214
ataaaccttttcttcgccaatgaga

SEQ ID NO: 373340 - DNA, 25 bp, Artificial
  probe
  misc_feature (1)..(25): SEQ ID NO: 4110; WAN024EVW; Start 187; Stop 211
gtcataaaccttttcttcgccaatg

SEQ ID NO: 373341 - DNA, 25 bp, Artificial
  probe
  misc_feature (1)..(25): SEQ ID NO: 4110; WAN024EVW; Start 134; Stop 158
ttgaccttgcgagtcttcagtttag

SEQ ID NO: 373342 - DNA, 25 bp, Artificial
  probe
  misc_feature (1)..(25): SEQ ID NO: 4111; WAN024FXW; Start 223; Stop 247
ctgcttattaggataggtatggtca

SEQ ID NO: 373343 - DNA, 25 bp, Artificial
  probe
  misc_feature (1)..(25): SEQ ID NO: 4111; WAN024FXW; Start 224; Stop 248
tgcttattaggataggtatggtcaa

SEQ ID NO: 373344 - DNA, 25 bp, Artificial
  probe
  misc_feature (1)..(25): SEQ ID NO: 4111; WAN024FXW; Start 222; Stop 246
cctgcttattaggataggtatggtc

SEQ ID NO: 373345 - DNA, 25 bp, Artificial
  probe
  misc_feature (1)..(25): SEQ ID NO: 4111; WAN024FXW; Start 225; Stop 249
gcttattaggataggtatggtcaat

SEQ ID NO: 373346 - DNA, 25 bp, Artificial
  probe
  misc_feature (1)..(25): SEQ ID NO: 4111; WAN024FXW; Start 231; Stop 255
taggataggtatggtcaatgacact

SEQ ID NO: 373347 - DNA, 25 bp, Artificial
  probe
  misc_feature (1)..(25): SEQ ID NO: 4111; WAN024FXW; Start 230; Stop 254
ttaggataggtatggtcaatgacac

SEQ ID NO: 373348 - DNA, 25 bp, Artificial
  probe
  misc_feature (1)..(25): SEQ ID NO: 4111; WAN024FXW; Start 229; Stop 253
attaggataggtatggtcaatgaca

SEQ ID NO: 373349 - DNA, 25 bp, Artificial
  probe
  misc_feature (1)..(25): SEQ ID NO: 4111; WAN024FXW; Start 232; Stop 256
aggataggtatggtcaatgacactg

SEQ ID NO: 373350 - DNA, 25 bp, Artificial
  probe
  misc_feature (1)..(25): SEQ ID NO: 4111; WAN024FXW; Start 227; Stop 251
ttattaggataggtatggtcaatga

SEQ ID NO: 373351 - DNA, 25 bp, Artificial
  probe
  misc_feature (1)..(25): SEQ ID NO: 4111; WAN024FXW; Start 233; Stop 257
ggataggtatggtcaatgacactgg

SEQ ID NO: 373352 - DNA, 25 bp, Artificial
  probe
  misc_feature (1)..(25): SEQ ID NO: 4111; WAN024FXW; Start 226; Stop 250
cttattaggataggtatggtcaatg

SEQ ID NO: 373353 - DNA, 25 bp, Artificial
  probe
  misc_feature (1)..(25): SEQ ID NO: 4111; WAN024FXW; Start 228; Stop 252
tattaggataggtatggtcaatgac

SEQ ID NO: 373354 - DNA, 25 bp, Artificial
  probe
  misc_feature (1)..(25): SEQ ID NO: 4111; WAN024FXW; Start 234; Stop 258
gataggtatggtcaatgacactggc

SEQ ID NO: 373355 - DNA, 25 bp, Artificial
  probe
  misc_feature (1)..(25): SEQ ID NO: 4111; WAN024FXW; Start 195; Stop 219
caatctgactagaaatgagctgcac

SEQ ID NO: 373356 - DNA, 25 bp, Artificial
  probe
  misc_feature (1)..(25): SEQ ID NO: 4111; WAN024FXW; Start 194; Stop 218
tcaatctgactagaaatgagctgca

SEQ ID NO: 373357 - DNA, 25 bp, Artificial
  probe
  misc_feature (1)..(25): SEQ ID NO: 4111; WAN024FXW; Start 95; Stop 119
ataggacgaatgactcggaggattc

SEQ ID NO: 373358 - DNA, 25 bp, Artificial
  probe
  misc_feature (1)..(25): SEQ ID NO: 4111; WAN024FXW; Start 94; Stop 118
gataggacgaatgactcggaggatt

SEQ ID NO: 373359 - DNA, 25 bp, Artificial
  probe
  misc_feature (1)..(25): SEQ ID NO: 4111; WAN024FXW; Start 111; Stop 135
ggaggattcgagtcaggtcaaattc

SEQ ID NO: 373360 - DNA, 25 bp, Artificial
  probe
  misc_feature (1)..(25): SEQ ID NO: 4111; WAN024FXW; Start 219; Stop 243
cgacctgcttattaggataggtatg

SEQ ID NO: 373361 - DNA, 25 bp, Artificial
  probe
  misc_feature (1)..(25): SEQ ID NO: 4111; WAN024FXW; Start 221; Stop 245
acctgcttattaggataggtatggt

SEQ ID NO: 373362 - DNA, 25 bp, Artificial
  probe
  misc_feature (1)..(25): SEQ ID NO: 4111; WAN024FXW; Start 220; Stop 244
gacctgcttattaggataggtatgg

SEQ ID NO: 373363 - DNA, 25 bp, Artificial
  probe
  misc_feature (1)..(25): SEQ ID NO: 4111; WAN024FXW; Start 214; Stop 238
ctgcacgacctgcttattaggatag

SEQ ID NO: 373364 - DNA, 25 bp, Artificial
  probe
  misc_feature (1)..(25): SEQ ID NO: 4111; WAN024FXW; Start 218; Stop 242
acgacctgcttattaggataggtat

SEQ ID NO: 373365 - DNA, 25 bp, Artificial
  probe
  misc_feature (1)..(25): SEQ ID NO: 4111; WAN024FXW; Start 196; Stop 220
aatctgactagaaatgagctgcacg

SEQ ID NO: 373366 - DNA, 25 bp, Artificial
  probe
  misc_feature (1)..(25): SEQ ID NO: 4111; WAN024FXW; Start 217; Stop 241
cacgacctgcttattaggataggta

SEQ ID NO: 373367 - DNA, 25 bp, Artificial
  probe
  misc_feature (1)..(25): SEQ ID NO: 4111; WAN024FXW; Start 112; Stop 136
gaggattcgagtcaggtcaaattcc

SEQ ID NO: 373368 - DNA, 25 bp, Artificial
  probe
  misc_feature (1)..(25): SEQ ID NO: 4111; WAN024FXW; Start 175; Stop 199
atagtccatgcgatctgcgtcaatc

SEQ ID NO: 373369 - DNA, 25 bp, Artificial
  probe
  misc_feature (1)..(25): SEQ ID NO: 4111; WAN024FXW; Start 174; Stop 198
gatagtccatgcgatctgcgtcaat

SEQ ID NO: 373370 - DNA, 25 bp, Artificial
  probe
  misc_feature (1)..(25): SEQ ID NO: 4111; WAN024FXW; Start 186; Stop 210
gatctgcgtcaatctgactagaaat

SEQ ID NO: 373371 - DNA, 25 bp, Artificial
  probe
  misc_feature (1)..(25): SEQ ID NO: 4111; WAN024FXW; Start 187; Stop 211
atctgcgtcaatctgactagaaatg

SEQ ID NO: 373372 - DNA, 25 bp, Artificial
  probe
  misc_feature (1)..(25): SEQ ID NO: 4111; WAN024FXW; Start 197; Stop 221
atctgactagaaatgagctgcacga

SEQ ID NO: 373373 - DNA, 25 bp, Artificial
  probe
  misc_feature (1)..(25): SEQ ID NO: 4111; WAN024FXW; Start 189; Stop 213
ctgcgtcaatctgactagaaatgag

SEQ ID NO: 373374 - DNA, 25 bp, Artificial
  probe
  misc_feature (1)..(25): SEQ ID NO: 4111; WAN024FXW; Start 215; Stop 239
tgcacgacctgcttattaggatagg

SEQ ID NO: 373375 - DNA, 25 bp, Artificial
  probe
  misc_feature (1)..(25): SEQ ID NO: 4112; WAN024GDI; Start 52; Stop 76
ttacaagtggaacgattcgcaatta

SEQ ID NO: 373376 - DNA, 25 bp, Artificial
  probe
  misc_feature (1)..(25): SEQ ID NO: 4112; WAN024GDI; Start 56; Stop 80
aagtggaacgattcgcaattagtag

SEQ ID NO: 373377 - DNA, 25 bp, Artificial
  probe
  misc_feature (1)..(25): SEQ ID NO: 4112; WAN024GDI; Start 55; Stop 79
caagtggaacgattcgcaattagta

SEQ ID NO: 373378 - DNA, 25 bp, Artificial
  probe
  misc_feature (1)..(25): SEQ ID NO: 4112; WAN024GDI; Start 53; Stop 77
tacaagtggaacgattcgcaattag

SEQ ID NO: 373379 - DNA, 25 bp, Artificial
  probe
  misc_feature (1)..(25): SEQ ID NO: 4112; WAN024GDI; Start 58; Stop 82
gtggaacgattcgcaattagtagag

SEQ ID NO: 373380 - DNA, 25 bp, Artificial
  probe
  misc_feature (1)..(25): SEQ ID NO: 4112; WAN024GDI; Start 57; Stop 81
agtggaacgattcgcaattagtaga

SEQ ID NO: 373381 - DNA, 25 bp, Artificial
  probe
  misc_feature (1)..(25): SEQ ID NO: 4112; WAN024GDI; Start 61; Stop 85
gaacgattcgcaattagtagagctt

SEQ ID NO: 373382 - DNA, 25 bp, Artificial
  probe
  misc_feature (1)..(25): SEQ ID NO: 4112; WAN024GDI; Start 62; Stop 86
aacgattcgcaattagtagagcttg

SEQ ID NO: 373383 - DNA, 25 bp, Artificial
  probe
  misc_feature (1)..(25): SEQ ID NO: 4112; WAN024GDI; Start 59; Stop 83
tggaacgattcgcaattagtagagc

SEQ ID NO: 373384 - DNA, 25 bp, Artificial
  probe
  misc_feature (1)..(25): SEQ ID NO: 4112; WAN024GDI; Start 54; Stop 78
acaagtggaacgattcgcaattagt

SEQ ID NO: 373385 - DNA, 25 bp, Artificial
  probe
  misc_feature (1)..(25): SEQ ID NO: 4112; WAN024GDI; Start 51; Stop 75
tttacaagtggaacgattcgcaatt

SEQ ID NO: 373386 - DNA, 25 bp, Artificial
  probe
  misc_feature (1)..(25): SEQ ID NO: 4112; WAN024GDI; Start 60; Stop 84
ggaacgattcgcaattagtagagct

SEQ ID NO: 373387 - DNA, 25 bp, Artificial
  probe
  misc_feature (1)..(25): SEQ ID NO: 4112; WAN024GDI; Start 162; Stop 186
tggtaaacctaaatctgcaatcttt

SEQ ID NO: 373388 - DNA, 25 bp, Artificial
  probe
  misc_feature (1)..(25): SEQ ID NO: 4112; WAN024GDI; Start 161; Stop 185
atggtaaacctaaatctgcaatctt

SEQ ID NO: 373389 - DNA, 25 bp, Artificial
  probe
  misc_feature (1)..(25): SEQ ID NO: 4112; WAN024GDI; Start 160; Stop 184
aatggtaaacctaaatctgcaatct

SEQ ID NO: 373390 - DNA, 25 bp, Artificial
  probe
  misc_feature (1)..(25): SEQ ID NO: 4112; WAN024GDI; Start 195; Stop 219
taccttcatgccatccttgatccat

SEQ ID NO: 373391 - DNA, 25 bp, Artificial
  probe
  misc_feature (1)..(25): SEQ ID NO: 4112; WAN024GDI; Start 63; Stop 87
acgattcgcaattagtagagcttgg

SEQ ID NO: 373392 - DNA, 25 bp, Artificial
  probe
  misc_feature (1)..(25): SEQ ID NO: 4112; WAN024GDI; Start 50; Stop 74
gtttacaagtggaacgattcgcaat

SEQ ID NO: 373393 - DNA, 25 bp, Artificial
  probe
  misc_feature (1)..(25): SEQ ID NO: 4112; WAN024GDI; Start 159; Stop 183
aaatggtaaacctaaatctgcaatc

SEQ ID NO: 373394 - DNA, 25 bp, Artificial
  probe
  misc_feature (1)..(25): SEQ ID NO: 4112; WAN024GDI; Start 119; Stop 143
tttcagtcatctcttttctcctttt

SEQ ID NO: 373395 - DNA, 25 bp, Artificial
  probe
  misc_feature (1)..(25): SEQ ID NO: 4112; WAN024GDI; Start 118; Stop 142
ttttcagtcatctcttttctccttt

SEQ ID NO: 373396 - DNA, 25 bp, Artificial
  probe
  misc_feature (1)..(25): SEQ ID NO: 4112; WAN024GDI; Start 217; Stop 241
cattttagaaggacagagacgatgg

SEQ ID NO: 373397 - DNA, 25 bp, Artificial
  probe
  misc_feature (1)..(25): SEQ ID NO: 4112; WAN024GDI; Start 216; Stop 240
ccattttagaaggacagagacgatg

SEQ ID NO: 373398 - DNA, 25 bp, Artificial
  probe
  misc_feature (1)..(25): SEQ ID NO: 4112; WAN024GDI; Start 202; Stop 226
atgccatccttgatccattttagaa

SEQ ID NO: 373399 - DNA, 25 bp, Artificial
  probe
  misc_feature (1)..(25): SEQ ID NO: 4112; WAN024GDI; Start 196; Stop 220
accttcatgccatccttgatccatt

SEQ ID NO: 373400 - DNA, 25 bp, Artificial
  probe
  misc_feature (1)..(25): SEQ ID NO: 4112; WAN024GDI; Start 203; Stop 227
tgccatccttgatccattttagaag

SEQ ID NO: 373401 - DNA, 25 bp, Artificial
  probe
  misc_feature (1)..(25): SEQ ID NO: 4112; WAN024GDI; Start 194; Stop 218
gtaccttcatgccatccttgatcca

SEQ ID NO: 373402 - DNA, 25 bp, Artificial
  probe
  misc_feature (1)..(25): SEQ ID NO: 4112; WAN024GDI; Start 197; Stop 221
ccttcatgccatccttgatccattt

SEQ ID NO: 373403 - DNA, 25 bp, Artificial
  probe
  misc_feature (1)..(25): SEQ ID NO: 4112; WAN024GDI; Start 201; Stop 225
catgccatccttgatccattttaga

SEQ ID NO: 373404 - DNA, 25 bp, Artificial
  probe
  misc_feature (1)..(25): SEQ ID NO: 4112; WAN024GDI; Start 199; Stop 223
ttcatgccatccttgatccatttta

SEQ ID NO: 373405 - DNA, 25 bp, Artificial
  probe
  misc_feature (1)..(25): SEQ ID NO: 4112; WAN024GDI; Start 11; Stop 35
ccttattatcttttaccagaatcgc

SEQ ID NO: 373406 - DNA, 25 bp, Artificial
  probe
  misc_feature (1)..(25): SEQ ID NO: 4112; WAN024GDI; Start 200; Stop 224
tcatgccatccttgatccattttag

SEQ ID NO: 373407 - DNA, 25 bp, Artificial
  probe
  misc_feature (1)..(25): SEQ ID NO: 4112; WAN024GDI; Start 218; Stop 242
attttagaaggacagagacgatggc

SEQ ID NO: 373408 - DNA, 25 bp, Artificial
  probe
  misc_feature (1)..(25): SEQ ID NO: 4113; WAN024G5G; Start 125; Stop 149
ccgttaataccaatacctaccgtaa

SEQ ID NO: 373409 - DNA, 25 bp, Artificial
  probe
  misc_feature (1)..(25): SEQ ID NO: 4113; WAN024G5G; Start 121; Stop 145
atctccgttaataccaatacctacc

SEQ ID NO: 373410 - DNA, 25 bp, Artificial
  probe
  misc_feature (1)..(25): SEQ ID NO: 4113; WAN024G5G; Start 252; Stop 276
gaatactctctctccaattaagcca

SEQ ID NO: 373411 - DNA, 25 bp, Artificial
  probe
  misc_feature (1)..(25): SEQ ID NO: 4113; WAN024G5G; Start 124; Stop 148
tccgttaataccaatacctaccgta

SEQ ID NO: 373412 - DNA, 25 bp, Artificial
  probe
  misc_feature (1)..(25): SEQ ID NO: 4113; WAN024G5G; Start 253; Stop 277
aatactctctctccaattaagccaa

SEQ ID NO: 373413 - DNA, 25 bp, Artificial
  probe
  misc_feature (1)..(25): SEQ ID NO: 4113; WAN024G5G; Start 245; Stop 269
taagccagaatactctctctccaat

SEQ ID NO: 373414 - DNA, 25 bp, Artificial
  probe
  misc_feature (1)..(25): SEQ ID NO: 4113; WAN024G5G; Start 244; Stop 268
ataagccagaatactctctctccaa

SEQ ID NO: 373415 - DNA, 25 bp, Artificial
  probe
  misc_feature (1)..(25): SEQ ID NO: 4113; WAN024G5G; Start 248; Stop 272
gccagaatactctctctccaattaa

SEQ ID NO: 373416 - DNA, 25 bp, Artificial
  probe
  misc_feature (1)..(25): SEQ ID NO: 4113; WAN024G5G; Start 251; Stop 275
agaatactctctctccaattaagcc

SEQ ID NO: 373417 - DNA, 25 bp, Artificial
  probe
  misc_feature (1)..(25): SEQ ID NO: 4113; WAN024G5G; Start 247; Stop 271
agccagaatactctctctccaatta

SEQ ID NO: 373418 - DNA, 25 bp, Artificial
  probe
  misc_feature (1)..(25): SEQ ID NO: 4113; WAN024G5G; Start 243; Stop 267
gataagccagaatactctctctcca

SEQ ID NO: 373419 - DNA, 25 bp, Artificial
  probe
  misc_feature (1)..(25): SEQ ID NO: 4113; WAN024G5G; Start 122; Stop 146
tctccgttaataccaatacctaccg

SEQ ID NO: 373420 - DNA, 25 bp, Artificial
  probe
  misc_feature (1)..(25): SEQ ID NO: 4113; WAN024G5G; Start 117; Stop 141
caggatctccgttaataccaatacc

SEQ ID NO: 373421 - DNA, 25 bp, Artificial
  probe
  misc_feature (1)..(25): SEQ ID NO: 4113; WAN024G5G; Start 116; Stop 140
ccaggatctccgttaataccaatac

SEQ ID NO: 373422 - DNA, 25 bp, Artificial
  probe
  misc_feature (1)..(25): SEQ ID NO: 4113; WAN024G5G; Start 250; Stop 274
cagaatactctctctccaattaagc

SEQ ID NO: 373423 - DNA, 25 bp, Artificial
  probe
  misc_feature (1)..(25): SEQ ID NO: 4113; WAN024G5G; Start 246; Stop 270
aagccagaatactctctctccaatt

SEQ ID NO: 373424 - DNA, 25 bp, Artificial
  probe
  misc_feature (1)..(25): SEQ ID NO: 4113; WAN024G5G; Start 119; Stop 143
ggatctccgttaataccaataccta

SEQ ID NO: 373425 - DNA, 25 bp, Artificial
  probe
  misc_feature (1)..(25): SEQ ID NO: 4113; WAN024G5G; Start 115; Stop 139
accaggatctccgttaataccaata

SEQ ID NO: 373426 - DNA, 25 bp, Artificial
  probe
  misc_feature (1)..(25): SEQ ID NO: 4113; WAN024G5G; Start 114; Stop 138
taccaggatctccgttaataccaat

SEQ ID NO: 373427 - DNA, 25 bp, Artificial
  probe
  misc_feature (1)..(25): SEQ ID NO: 4113; WAN024G5G; Start 123; Stop 147
ctccgttaataccaatacctaccgt

SEQ ID NO: 373428 - DNA, 25 bp, Artificial
  probe
  misc_feature (1)..(25): SEQ ID NO: 4113; WAN024G5G; Start 33; Stop 57
ttgtcgtgtcagtaacattggtata

SEQ ID NO: 373429 - DNA, 25 bp, Artificial
  probe
  misc_feature (1)..(25): SEQ ID NO: 4113; WAN024G5G; Start 36; Stop 60
tcgtgtcagtaacattggtatagtt

SEQ ID NO: 373430 - DNA, 25 bp, Artificial
  probe
  misc_feature (1)..(25): SEQ ID NO: 4113; WAN024G5G; Start 35; Stop 59
gtcgtgtcagtaacattggtatagt

SEQ ID NO: 373431 - DNA, 25 bp, Artificial
  probe
  misc_feature (1)..(25): SEQ ID NO: 4113; WAN024G5G; Start 34; Stop 58
tgtcgtgtcagtaacattggtatag

SEQ ID NO: 373432 - DNA, 25 bp, Artificial
  probe
  misc_feature (1)..(25): SEQ ID NO: 4113; WAN024G5G; Start 239; Stop 263
aacggataagccagaatactctctc

SEQ ID NO: 373433 - DNA, 25 bp, Artificial
  probe
  misc_feature (1)..(25): SEQ ID NO: 4113; WAN024G5G; Start 241; Stop 265
cggataagccagaatactctctctc

SEQ ID NO: 373434 - DNA, 25 bp, Artificial
  probe
  misc_feature (1)..(25): SEQ ID NO: 4113; WAN024G5G; Start 288; Stop 312
cattaattggatcgcctataactgc

SEQ ID NO: 373435 - DNA, 25 bp, Artificial
  probe
  misc_feature (1)..(25): SEQ ID NO: 4113; WAN024G5G; Start 249; Stop 273
ccagaatactctctctccaattaag

SEQ ID NO: 373436 - DNA, 25 bp, Artificial
  probe
  misc_feature (1)..(25): SEQ ID NO: 4113; WAN024G5G; Start 120; Stop 144
gatctccgttaataccaatacctac

SEQ ID NO: 373437 - DNA, 25 bp, Artificial
  probe
  misc_feature (1)..(25): SEQ ID NO: 4113; WAN024G5G; Start 113; Stop 137
gtaccaggatctccgttaataccaa

SEQ ID NO: 373438 - DNA, 25 bp, Artificial
  probe
  misc_feature (1)..(25): SEQ ID NO: 4113; WAN024G5G; Start 240; Stop 264
acggataagccagaatactctctct

SEQ ID NO: 373439 - DNA, 25 bp, Artificial
  probe
  misc_feature (1)..(25): SEQ ID NO: 4113; WAN024G5G; Start 118; Stop 142
aggatctccgttaataccaatacct

SEQ ID NO: 373440 - DNA, 25 bp, Artificial
  probe
  misc_feature (1)..(25): SEQ ID NO: 4113; WAN024G5G; Start 291; Stop 315
taattggatcgcctataactgcata

SEQ ID NO: 373441 - DNA, 25 bp, Artificial
  probe
  misc_feature (1)..(25): SEQ ID NO: 4114; WAN024FIX; Start 1453; Stop 1477
tggcaatatacctcttctgaataca

SEQ ID NO: 373442 - DNA, 25 bp, Artificial
  probe
  misc_feature (1)..(25): SEQ ID NO: 4114; WAN024FIX; Start 932; Stop 956
atattagtgagcacaatggtcgtat

SEQ ID NO: 373443 - DNA, 25 bp, Artificial
  probe
  misc_feature (1)..(25): SEQ ID NO: 4114; WAN024FIX; Start 933; Stop 957
tattagtgagcacaatggtcgtatc

SEQ ID NO: 373444 - DNA, 25 bp, Artificial
  probe
  misc_feature (1)..(25): SEQ ID NO: 4114; WAN024FIX; Start 931; Stop 955
gatattagtgagcacaatggtcgta

SEQ ID NO: 373445 - DNA, 25 bp, Artificial
  probe
  misc_feature (1)..(25): SEQ ID NO: 4114; WAN024FIX; Start 997; Stop 1021
ggtgtcattgttcgtctaggttata

SEQ ID NO: 373446 - DNA, 25 bp, Artificial
  probe
  misc_feature (1)..(25): SEQ ID NO: 4114; WAN024FIX; Start 999; Stop 1023
tgtcattgttcgtctaggttatagc

SEQ ID NO: 373447 - DNA, 25 bp, Artificial
  probe
  misc_feature (1)..(25): SEQ ID NO: 4114; WAN024FIX; Start 296; Stop 320
ttgacaactactataaggcttggtt

SEQ ID NO: 373448 - DNA, 25 bp, Artificial
  probe
  misc_feature (1)..(25): SEQ ID NO: 4114; WAN024FIX; Start 1088; Stop 1112
gtgtctatctctatacctatgctga

SEQ ID NO: 373449 - DNA, 25 bp, Artificial
  probe
  misc_feature (1)..(25): SEQ ID NO: 4114; WAN024FIX; Start 998; Stop 1022
gtgtcattgttcgtctaggttatag

SEQ ID NO: 373450 - DNA, 25 bp, Artificial
  probe
  misc_feature (1)..(25): SEQ ID NO: 4114; WAN024FIX; Start 403; Stop 427
aacgagtggatctatgacagtaatt

SEQ ID NO: 373451 - DNA, 25 bp, Artificial
  probe
  misc_feature (1)..(25): SEQ ID NO: 4114; WAN024FIX; Start 1003; Stop 1027
attgttcgtctaggttatagcggta

SEQ ID NO: 373452 - DNA, 25 bp, Artificial
  probe
  misc_feature (1)..(25): SEQ ID NO: 4114; WAN024FIX; Start 1452; Stop 1476
ttggcaatatacctcttctgaatac

SEQ ID NO: 373453 - DNA, 25 bp, Artificial
  probe
  misc_feature (1)..(25): SEQ ID NO: 4114; WAN024FIX; Start 1451; Stop 1475
gttggcaatatacctcttctgaata

SEQ ID NO: 373454 - DNA, 25 bp, Artificial
  probe
  misc_feature (1)..(25): SEQ ID NO: 4114; WAN024FIX; Start 1004; Stop 1028
ttgttcgtctaggttatagcggtaa

SEQ ID NO: 373455 - DNA, 25 bp, Artificial
  probe
  misc_feature (1)..(25): SEQ ID NO: 4114; WAN024FIX; Start 1454; Stop 1478
ggcaatatacctcttctgaatacat

SEQ ID NO: 373456 - DNA, 25 bp, Artificial
  probe
  misc_feature (1)..(25): SEQ ID NO: 4114; WAN024FIX; Start 1000; Stop 1024
gtcattgttcgtctaggttatagcg

SEQ ID NO: 373457 - DNA, 25 bp, Artificial
  probe
  misc_feature (1)..(25): SEQ ID NO: 4114; WAN024FIX; Start 929; Stop 953
ttgatattagtgagcacaatggtcg

SEQ ID NO: 373458 - DNA, 25 bp, Artificial
  probe
  misc_feature (1)..(25): SEQ ID NO: 4114; WAN024FIX; Start 996; Stop 1020
tggtgtcattgttcgtctaggttat

SEQ ID NO: 373459 - DNA, 25 bp, Artificial
  probe
  misc_feature (1)..(25): SEQ ID NO: 4114; WAN024FIX; Start 1089; Stop 1113
tgtctatctctatacctatgctgaa

SEQ ID NO: 373460 - DNA, 25 bp, Artificial
  probe
  misc_feature (1)..(25): SEQ ID NO: 4114; WAN024FIX; Start 995; Stop 1019
atggtgtcattgttcgtctaggtta

SEQ ID NO: 373461 - DNA, 25 bp, Artificial
  probe
  misc_feature (1)..(25): SEQ ID NO: 4114; WAN024FIX; Start 404; Stop 428
acgagtggatctatgacagtaatta

SEQ ID NO: 373462 - DNA, 25 bp, Artificial
  probe
  misc_feature (1)..(25): SEQ ID NO: 4114; WAN024FIX; Start 940; Stop 964
gagcacaatggtcgtatcaatgatt

SEQ ID NO: 373463 - DNA, 25 bp, Artificial
  probe
  misc_feature (1)..(25): SEQ ID NO: 4114; WAN024FIX; Start 930; Stop 954
tgatattagtgagcacaatggtcgt

SEQ ID NO: 373464 - DNA, 25 bp, Artificial
  probe
  misc_feature (1)..(25): SEQ ID NO: 4114; WAN024FIX; Start 1001; Stop 1025
tcattgttcgtctaggttatagcgg

SEQ ID NO: 373465 - DNA, 25 bp, Artificial
  probe
  misc_feature (1)..(25): SEQ ID NO: 4114; WAN024FIX; Start 1086; Stop 1110
tggtgtctatctctatacctatgct

SEQ ID NO: 373466 - DNA, 25 bp, Artificial
  probe
  misc_feature (1)..(25): SEQ ID NO: 4114; WAN024FIX; Start 1450; Stop 1474
ggttggcaatatacctcttctgaat

SEQ ID NO: 373467 - DNA, 25 bp, Artificial
  probe
  misc_feature (1)..(25): SEQ ID NO: 4114; WAN024FIX; Start 1087; Stop 1111
ggtgtctatctctatacctatgctg

SEQ ID NO: 373468 - DNA, 25 bp, Artificial
  probe
  misc_feature (1)..(25): SEQ ID NO: 4114; WAN024FIX; Start 936; Stop 960
tagtgagcacaatggtcgtatcaat

SEQ ID NO: 373469 - DNA, 25 bp, Artificial
  probe
  misc_feature (1)..(25): SEQ ID NO: 4114; WAN024FIX; Start 934; Stop 958
attagtgagcacaatggtcgtatca

SEQ ID NO: 373470 - DNA, 25 bp, Artificial
  probe
  misc_feature (1)..(25): SEQ ID NO: 4114; WAN024FIX; Start 637; Stop 661
gatggaacttatgctaaccaagagt

SEQ ID NO: 373471 - DNA, 25 bp, Artificial
  probe
  misc_feature (1)..(25): SEQ ID NO: 4114; WAN024FIX; Start 1002; Stop 1026
cattgttcgtctaggttatagcggt

SEQ ID NO: 373472 - DNA, 25 bp, Artificial
  probe
  misc_feature (1)..(25): SEQ ID NO: 4114; WAN024FIX; Start 638; Stop 662
atggaacttatgctaaccaagagtg

SEQ ID NO: 373473 - DNA, 25 bp, Artificial
  probe
  misc_feature (1)..(25): SEQ ID NO: 4114; WAN024FIX; Start 935; Stop 959
ttagtgagcacaatggtcgtatcaa

SEQ ID NO: 373474 - DNA, 25 bp, Artificial
  probe
  misc_feature (1)..(25): SEQ ID NO: 4115; WAN024CFS; Start 11; Stop 35
taaagattgatagagccttgttcca

SEQ ID NO: 373475 - DNA, 25 bp, Artificial
  probe
  misc_feature (1)..(25): SEQ ID NO: 4115; WAN024CFS; Start 10; Stop 34
gtaaagattgatagagccttgttcc

SEQ ID NO: 373476 - DNA, 25 bp, Artificial
  probe
  misc_feature (1)..(25): SEQ ID NO: 4115; WAN024CFS; Start 195; Stop 219
ccttagaaccaaagtttcctgttac

SEQ ID NO: 373477 - DNA, 25 bp, Artificial
  probe
  misc_feature (1)..(25): SEQ ID NO: 4115; WAN024CFS; Start 201; Stop 225
aaccaaagtttcctgttacaaagag

SEQ ID NO: 373478 - DNA, 25 bp, Artificial
  probe
  misc_feature (1)..(25): SEQ ID NO: 4115; WAN024CFS; Start 200; Stop 224
gaaccaaagtttcctgttacaaaga

SEQ ID NO: 373479 - DNA, 25 bp, Artificial
  probe
  misc_feature (1)..(25): SEQ ID NO: 4115; WAN024CFS; Start 199; Stop 223
agaaccaaagtttcctgttacaaag

SEQ ID NO: 373480 - DNA, 25 bp, Artificial
  probe
  misc_feature (1)..(25): SEQ ID NO: 4115; WAN024CFS; Start 13; Stop 37
aagattgatagagccttgttccaaa

SEQ ID NO: 373481 - DNA, 25 bp, Artificial
  probe
  misc_feature (1)..(25): SEQ ID NO: 4115; WAN024CFS; Start 12; Stop 36
aaagattgatagagccttgttccaa

SEQ ID NO: 373482 - DNA, 25 bp, Artificial
  probe
  misc_feature (1)..(25): SEQ ID NO: 4115; WAN024CFS; Start 9; Stop 33
tgtaaagattgatagagccttgttc

SEQ ID NO: 373483 - DNA, 25 bp, Artificial
  probe
  misc_feature (1)..(25): SEQ ID NO: 4115; WAN024CFS; Start 194; Stop 218
gccttagaaccaaagtttcctgtta

SEQ ID NO: 373484 - DNA, 25 bp, Artificial
  probe
  misc_feature (1)..(25): SEQ ID NO: 4115; WAN024CFS; Start 196; Stop 220
cttagaaccaaagtttcctgttaca

SEQ ID NO: 373485 - DNA, 25 bp, Artificial
  probe
  misc_feature (1)..(25): SEQ ID NO: 4115; WAN024CFS; Start 198; Stop 222
tagaaccaaagtttcctgttacaaa

SEQ ID NO: 373486 - DNA, 25 bp, Artificial
  probe
  misc_feature (1)..(25): SEQ ID NO: 4115; WAN024CFS; Start 197; Stop 221
ttagaaccaaagtttcctgttacaa

SEQ ID NO: 373487 - DNA, 25 bp, Artificial
  probe
  misc_feature (1)..(25): SEQ ID NO: 4115; WAN024CFS; Start 138; Stop 162
gccatttcttaccatgttcatcaaa

SEQ ID NO: 373488 - DNA, 25 bp, Artificial
  probe
  misc_feature (1)..(25): SEQ ID NO: 4115; WAN024CFS; Start 8; Stop 32
atgtaaagattgatagagccttgtt

SEQ ID NO: 373489 - DNA, 25 bp, Artificial
  probe
  misc_feature (1)..(25): SEQ ID NO: 4115; WAN024CFS; Start 204; Stop 228
caaagtttcctgttacaaagaggtc

SEQ ID NO: 373490 - DNA, 25 bp, Artificial
  probe
  misc_feature (1)..(25): SEQ ID NO: 4115; WAN024CFS; Start 7; Stop 31
catgtaaagattgatagagccttgt

SEQ ID NO: 373491 - DNA, 25 bp, Artificial
  probe
  misc_feature (1)..(25): SEQ ID NO: 4115; WAN024CFS; Start 139; Stop 163
ccatttcttaccatgttcatcaaag

SEQ ID NO: 373492 - DNA, 25 bp, Artificial
  probe
  misc_feature (1)..(25): SEQ ID NO: 4115; WAN024CFS; Start 205; Stop 229
aaagtttcctgttacaaagaggtcc

SEQ ID NO: 373493 - DNA, 25 bp, Artificial
  probe
  misc_feature (1)..(25): SEQ ID NO: 4115; WAN024CFS; Start 203; Stop 227
ccaaagtttcctgttacaaagaggt

SEQ ID NO: 373494 - DNA, 25 bp, Artificial
  probe
  misc_feature (1)..(25): SEQ ID NO: 4115; WAN024CFS; Start 202; Stop 226
accaaagtttcctgttacaaagagg

SEQ ID NO: 373495 - DNA, 25 bp, Artificial
  probe
  misc_feature (1)..(25): SEQ ID NO: 4115; WAN024CFS; Start 206; Stop 230
aagtttcctgttacaaagaggtcct

SEQ ID NO: 373496 - DNA, 25 bp, Artificial
  probe
  misc_feature (1)..(25): SEQ ID NO: 4115; WAN024CFS; Start 193; Stop 217
tgccttagaaccaaagtttcctgtt

SEQ ID NO: 373497 - DNA, 25 bp, Artificial
  probe
  misc_feature (1)..(25): SEQ ID NO: 4115; WAN024CFS; Start 182; Stop 206
aagttgtaaggtgccttagaaccaa

SEQ ID NO: 373498 - DNA, 25 bp, Artificial
  probe
  misc_feature (1)..(25): SEQ ID NO: 4115; WAN024CFS; Start 108; Stop 132
aaccatcccagaactccatacacat

SEQ ID NO: 373499 - DNA, 25 bp, Artificial
  probe
  misc_feature (1)..(25): SEQ ID NO: 4115; WAN024CFS; Start 192; Stop 216
gtgccttagaaccaaagtttcctgt

SEQ ID NO: 373500 - DNA, 25 bp, Artificial
  probe
  misc_feature (1)..(25): SEQ ID NO: 4115; WAN024CFS; Start 151; Stop 175
atgttcatcaaagaattcctgcatc

SEQ ID NO: 373501 - DNA, 25 bp, Artificial
  probe
  misc_feature (1)..(25): SEQ ID NO: 4115; WAN024CFS; Start 150; Stop 174
catgttcatcaaagaattcctgcat

SEQ ID NO: 373502 - DNA, 25 bp, Artificial
  probe
  misc_feature (1)..(25): SEQ ID NO: 4115; WAN024CFS; Start 147; Stop 171
taccatgttcatcaaagaattcctg

SEQ ID NO: 373503 - DNA, 25 bp, Artificial
  probe
  misc_feature (1)..(25): SEQ ID NO: 4115; WAN024CFS; Start 15; Stop 39
gattgatagagccttgttccaaaac

SEQ ID NO: 373504 - DNA, 25 bp, Artificial
  probe
  misc_feature (1)..(25): SEQ ID NO: 4115; WAN024CFS; Start 14; Stop 38
agattgatagagccttgttccaaaa

SEQ ID NO: 373505 - DNA, 25 bp, Artificial
  probe
  misc_feature (1)..(25): SEQ ID NO: 4115; WAN024CFS; Start 188; Stop 212
taaggtgccttagaaccaaagtttc

SEQ ID NO: 373506 - DNA, 25 bp, Artificial
  probe
  misc_feature (1)..(25): SEQ ID NO: 4115; WAN024CFS; Start 111; Stop 135
catcccagaactccatacacatgag

SEQ ID NO: 373507 - DNA, 25 bp, Artificial
  probe
  misc_feature (1)..(25): SEQ ID NO: 4116; WAN024F2G; Start 203; Stop 227
gccttgtcttctgtaatcaattcat

SEQ ID NO: 373508 - DNA, 25 bp, Artificial
  probe
  misc_feature (1)..(25): SEQ ID NO: 4116; WAN024F2G; Start 202; Stop 226
cgccttgtcttctgtaatcaattca

SEQ ID NO: 373509 - DNA, 25 bp, Artificial
  probe
  misc_feature (1)..(25): SEQ ID NO: 4116; WAN024F2G; Start 204; Stop 228
ccttgtcttctgtaatcaattcatt

SEQ ID NO: 373510 - DNA, 25 bp, Artificial
  probe
  misc_feature (1)..(25): SEQ ID NO: 4116; WAN024F2G; Start 153; Stop 177
atacagaacggatagtcacttcttc

SEQ ID NO: 373511 - DNA, 25 bp, Artificial
  probe
  misc_feature (1)..(25): SEQ ID NO: 4116; WAN024F2G; Start 152; Stop 176
aatacagaacggatagtcacttctt

SEQ ID NO: 373512 - DNA, 25 bp, Artificial
  probe
  misc_feature (1)..(25): SEQ ID NO: 4116; WAN024F2G; Start 149; Stop 173
gtaaatacagaacggatagtcactt

SEQ ID NO: 373513 - DNA, 25 bp, Artificial
  probe
  misc_feature (1)..(25): SEQ ID NO: 4116; WAN024F2G; Start 211; Stop 235
ttctgtaatcaattcatttggacca

SEQ ID NO: 373514 - DNA, 25 bp, Artificial
  probe
  misc_feature (1)..(25): SEQ ID NO: 4116; WAN024F2G; Start 150; Stop 174
taaatacagaacggatagtcacttc

SEQ ID NO: 373515 - DNA, 25 bp, Artificial
  probe
  misc_feature (1)..(25): SEQ ID NO: 4116; WAN024F2G; Start 210; Stop 234
cttctgtaatcaattcatttggacc

SEQ ID NO: 373516 - DNA, 25 bp, Artificial
  probe
  misc_feature (1)..(25): SEQ ID NO: 4116; WAN024F2G; Start 154; Stop 178
tacagaacggatagtcacttcttcc

SEQ ID NO: 373517 - DNA, 25 bp, Artificial
  probe
  misc_feature (1)..(25): SEQ ID NO: 4116; WAN024F2G; Start 172; Stop 196
ttcttccacaccagcattgacaatt

SEQ ID NO: 373518 - DNA, 25 bp, Artificial
  probe
  misc_feature (1)..(25): SEQ ID NO: 4116; WAN024F2G; Start 148; Stop 172
tgtaaatacagaacggatagtcact

SEQ ID NO: 373519 - DNA, 25 bp, Artificial
  probe
  misc_feature (1)..(25): SEQ ID NO: 4116; WAN024F2G; Start 56; Stop 80
attgtaccaactgcttcaccaactt

SEQ ID NO: 373520 - DNA, 25 bp, Artificial
  probe
  misc_feature (1)..(25): SEQ ID NO: 4116; WAN024F2G; Start 60; Stop 84
taccaactgcttcaccaacttcaac

SEQ ID NO: 373521 - DNA, 25 bp, Artificial
  probe
  misc_feature (1)..(25): SEQ ID NO: 4116; WAN024F2G; Start 272; Stop 296
ttcttagtgtaacgaccgttgagac

SEQ ID NO: 373522 - DNA, 25 bp, Artificial
  probe
  misc_feature (1)..(25): SEQ ID NO: 4116; WAN024F2G; Start 222; Stop 246
attcatttggaccaataatcactgc

SEQ ID NO: 373523 - DNA, 25 bp, Artificial
  probe
  misc_feature (1)..(25): SEQ ID NO: 4116; WAN024F2G; Start 164; Stop 188
atagtcacttcttccacaccagcat

SEQ ID NO: 373524 - DNA, 25 bp, Artificial
  probe
  misc_feature (1)..(25): SEQ ID NO: 4116; WAN024F2G; Start 147; Stop 171
atgtaaatacagaacggatagtcac

SEQ ID NO: 373525 - DNA, 25 bp, Artificial
  probe
  misc_feature (1)..(25): SEQ ID NO: 4116; WAN024F2G; Start 207; Stop 231
tgtcttctgtaatcaattcatttgg

SEQ ID NO: 373526 - DNA, 25 bp, Artificial
  probe
  misc_feature (1)..(25): SEQ ID NO: 4116; WAN024F2G; Start 212; Stop 236
tctgtaatcaattcatttggaccaa

SEQ ID NO: 373527 - DNA, 25 bp, Artificial
  probe
  misc_feature (1)..(25): SEQ ID NO: 4116; WAN024F2G; Start 165; Stop 189
tagtcacttcttccacaccagcatt

SEQ ID NO: 373528 - DNA, 25 bp, Artificial
  probe
  misc_feature (1)..(25): SEQ ID NO: 4116; WAN024F2G; Start 55; Stop 79
gattgtaccaactgcttcaccaact

SEQ ID NO: 373529 - DNA, 25 bp, Artificial
  probe
  misc_feature (1)..(25): SEQ ID NO: 4116; WAN024F2G; Start 171; Stop 195
cttcttccacaccagcattgacaat

SEQ ID NO: 373530 - DNA, 25 bp, Artificial
  probe
  misc_feature (1)..(25): SEQ ID NO: 4116; WAN024F2G; Start 158; Stop 182
gaacggatagtcacttcttccacac

SEQ ID NO: 373531 - DNA, 25 bp, Artificial
  probe
  misc_feature (1)..(25): SEQ ID NO: 4116; WAN024F2G; Start 59; Stop 83
gtaccaactgcttcaccaacttcaa

SEQ ID NO: 373532 - DNA, 25 bp, Artificial
  probe
  misc_feature (1)..(25): SEQ ID NO: 4116; WAN024F2G; Start 209; Stop 233
tcttctgtaatcaattcatttggac

SEQ ID NO: 373533 - DNA, 25 bp, Artificial
  probe
  misc_feature (1)..(25): SEQ ID NO: 4116; WAN024F2G; Start 208; Stop 232
gtcttctgtaatcaattcatttgga

SEQ ID NO: 373534 - DNA, 25 bp, Artificial
  probe
  misc_feature (1)..(25): SEQ ID NO: 4116; WAN024F2G; Start 4; Stop 28
gaaggtacgcattgtaagctgtgta

SEQ ID NO: 373535 - DNA, 25 bp, Artificial
  probe
  misc_feature (1)..(25): SEQ ID NO: 4116; WAN024F2G; Start 98; Stop 122
gccaagttgataccgtaacagtgac

SEQ ID NO: 373536 - DNA, 25 bp, Artificial
  probe
  misc_feature (1)..(25): SEQ ID NO: 4116; WAN024F2G; Start 146; Stop 170
catgtaaatacagaacggatagtca

SEQ ID NO: 373537 - DNA, 25 bp, Artificial
  probe
  misc_feature (1)..(25): SEQ ID NO: 4116; WAN024F2G; Start 57; Stop 81
ttgtaccaactgcttcaccaacttc

SEQ ID NO: 373538 - DNA, 25 bp, Artificial
  probe
  misc_feature (1)..(25): SEQ ID NO: 4116; WAN024F2G; Start 221; Stop 245
aattcatttggaccaataatcactg

SEQ ID NO: 373539 - DNA, 25 bp, Artificial
  probe
  misc_feature (1)..(25): SEQ ID NO: 4116; WAN024F2G; Start 220; Stop 244
caattcatttggaccaataatcact

SEQ ID NO: 373540 - DNA, 25 bp, Artificial
  probe
  misc_feature (1)..(25): SEQ ID NO: 4117; WAN024F8Q; Start 284; Stop 308
gcagtatcaatcaagacatagtcgt

SEQ ID NO: 373541 - DNA, 25 bp, Artificial
  probe
  misc_feature (1)..(25): SEQ ID NO: 4117; WAN024F8Q; Start 184; Stop 208
aatcatagcatcaacgacaagcaag

SEQ ID NO: 373542 - DNA, 25 bp, Artificial
  probe
  misc_feature (1)..(25): SEQ ID NO: 4117; WAN024F8Q; Start 187; Stop 211
catagcatcaacgacaagcaagatt

SEQ ID NO: 373543 - DNA, 25 bp, Artificial
  probe
  misc_feature (1)..(25): SEQ ID NO: 4117; WAN024F8Q; Start 174; Stop 198
cttcctgaccaatcatagcatcaac

SEQ ID NO: 373544 - DNA, 25 bp, Artificial
  probe
  misc_feature (1)..(25): SEQ ID NO: 4117; WAN024F8Q; Start 180; Stop 204
gaccaatcatagcatcaacgacaag

SEQ ID NO: 373545 - DNA, 25 bp, Artificial
  probe
  misc_feature (1)..(25): SEQ ID NO: 4117; WAN024F8Q; Start 183; Stop 207
caatcatagcatcaacgacaagcaa

SEQ ID NO: 373546 - DNA, 25 bp, Artificial
  probe
  misc_feature (1)..(25): SEQ ID NO: 4117; WAN024F8Q; Start 285; Stop 309
cagtatcaatcaagacatagtcgtt

SEQ ID NO: 373547 - DNA, 25 bp, Artificial
  probe
  misc_feature (1)..(25): SEQ ID NO: 4117; WAN024F8Q; Start 282; Stop 306
ccgcagtatcaatcaagacatagtc

SEQ ID NO: 373548 - DNA, 25 bp, Artificial
  probe
  misc_feature (1)..(25): SEQ ID NO: 4117; WAN024F8Q; Start 283; Stop 307
cgcagtatcaatcaagacatagtcg

SEQ ID NO: 373549 - DNA, 25 bp, Artificial
  probe
  misc_feature (1)..(25): SEQ ID NO: 4117; WAN024F8Q; Start 302; Stop 326
tagtcgttatgattagtttgggctt

SEQ ID NO: 373550 - DNA, 25 bp, Artificial
  probe
  misc_feature (1)..(25): SEQ ID NO: 4117; WAN024F8Q; Start 301; Stop 325
atagtcgttatgattagtttgggct

SEQ ID NO: 373551 - DNA, 25 bp, Artificial
  probe
  misc_feature (1)..(25): SEQ ID NO: 4117; WAN024F8Q; Start 185; Stop 209
atcatagcatcaacgacaagcaaga

SEQ ID NO: 373552 - DNA, 25 bp, Artificial
  probe
  misc_feature (1)..(25): SEQ ID NO: 4117; WAN024F8Q; Start 474; Stop 498
tttcttctttcttgagtttgttggc

SEQ ID NO: 373553 - DNA, 25 bp, Artificial
  probe
  misc_feature (1)..(25): SEQ ID NO: 4117; WAN024F8Q; Start 186; Stop 210
tcatagcatcaacgacaagcaagat

SEQ ID NO: 373554 - DNA, 25 bp, Artificial
  probe
  misc_feature (1)..(25): SEQ ID NO: 4117; WAN024F8Q; Start 193; Stop 217
atcaacgacaagcaagatttcattt

SEQ ID NO: 373555 - DNA, 25 bp, Artificial
  probe
  misc_feature (1)..(25): SEQ ID NO: 4117; WAN024F8Q; Start 96; Stop 120
gagtatcgccatcaatcttggtaag

SEQ ID NO: 373556 - DNA, 25 bp, Artificial
  probe
  misc_feature (1)..(25): SEQ ID NO: 4117; WAN024F8Q; Start 4; Stop 28
gaaggtttcaatgtccgtaatcttt

SEQ ID NO: 373557 - DNA, 25 bp, Artificial
  probe
  misc_feature (1)..(25): SEQ ID NO: 4117; WAN024F8Q; Start 192; Stop 216
catcaacgacaagcaagatttcatt

SEQ ID NO: 373558 - DNA, 25 bp, Artificial
  probe
  misc_feature (1)..(25): SEQ ID NO: 4117; WAN024F8Q; Start 289; Stop 313
atcaatcaagacatagtcgttatga

SEQ ID NO: 373559 - DNA, 25 bp, Artificial
  probe
  misc_feature (1)..(25): SEQ ID NO: 4117; WAN024F8Q; Start 99; Stop 123
tatcgccatcaatcttggtaaggat

SEQ ID NO: 373560 - DNA, 25 bp, Artificial
  probe
  misc_feature (1)..(25): SEQ ID NO: 4117; WAN024F8Q; Start 303; Stop 327
agtcgttatgattagtttgggcttg

SEQ ID NO: 373561 - DNA, 25 bp, Artificial
  probe
  misc_feature (1)..(25): SEQ ID NO: 4117; WAN024F8Q; Start 179; Stop 203
tgaccaatcatagcatcaacgacaa

SEQ ID NO: 373562 - DNA, 25 bp, Artificial
  probe
  misc_feature (1)..(25): SEQ ID NO: 4117; WAN024F8Q; Start 200; Stop 224
acaagcaagatttcatttggttgag

SEQ ID NO: 373563 - DNA, 25 bp, Artificial
  probe
  misc_feature (1)..(25): SEQ ID NO: 4117; WAN024F8Q; Start 199; Stop 223
gacaagcaagatttcatttggttga

SEQ ID NO: 373564 - DNA, 25 bp, Artificial
  probe
  misc_feature (1)..(25): SEQ ID NO: 4117; WAN024F8Q; Start 188; Stop 212
atagcatcaacgacaagcaagattt

SEQ ID NO: 373565 - DNA, 25 bp, Artificial
  probe
  misc_feature (1)..(25): SEQ ID NO: 4117; WAN024F8Q; Start 194; Stop 218
tcaacgacaagcaagatttcatttg

SEQ ID NO: 373566 - DNA, 25 bp, Artificial
  probe
  misc_feature (1)..(25): SEQ ID NO: 4117; WAN024F8Q; Start 57; Stop 81
ttccagtaatgtgacgaacagacag

SEQ ID NO: 373567 - DNA, 25 bp, Artificial
  probe
  misc_feature (1)..(25): SEQ ID NO: 4117; WAN024F8Q; Start 286; Stop 310
agtatcaatcaagacatagtcgtta

SEQ ID NO: 373568 - DNA, 25 bp, Artificial
  probe
  misc_feature (1)..(25): SEQ ID NO: 4117; WAN024F8Q; Start 294; Stop 318
tcaagacatagtcgttatgattagt

SEQ ID NO: 373569 - DNA, 25 bp, Artificial
  probe
  misc_feature (1)..(25): SEQ ID NO: 4117; WAN024F8Q; Start 178; Stop 202
ctgaccaatcatagcatcaacgaca

SEQ ID NO: 373570 - DNA, 25 bp, Artificial
  probe
  misc_feature (1)..(25): SEQ ID NO: 4117; WAN024F8Q; Start 175; Stop 199
ttcctgaccaatcatagcatcaacg

SEQ ID NO: 373571 - DNA, 25 bp, Artificial
  probe
  misc_feature (1)..(25): SEQ ID NO: 4117; WAN024F8Q; Start 391; Stop 415
atcaatctgttgtcccaaggtctta

SEQ ID NO: 373572 - DNA, 25 bp, Artificial
  probe
  misc_feature (1)..(25): SEQ ID NO: 4117; WAN024F8Q; Start 132; Stop 156
tcacttccaactgagcattaaactc

SEQ ID NO: 373573 - DNA, 25 bp, Artificial
  probe
  misc_feature (1)..(25): SEQ ID NO: 4118; WAN024FIA; Start 52; Stop 76
ttcttcgttgtttccatttccatag

SEQ ID NO: 373574 - DNA, 25 bp, Artificial
  probe
  misc_feature (1)..(25): SEQ ID NO: 4118; WAN024FIA; Start 54; Stop 78
cttcgttgtttccatttccatagac

SEQ ID NO: 373575 - DNA, 25 bp, Artificial
  probe
  misc_feature (1)..(25): SEQ ID NO: 4118; WAN024FIA; Start 51; Stop 75
tttcttcgttgtttccatttccata

SEQ ID NO: 373576 - DNA, 25 bp, Artificial
  probe
  misc_feature (1)..(25): SEQ ID NO: 4118; WAN024FIA; Start 133; Stop 157
ttcaaatccatagtaggtttcatcg

SEQ ID NO: 373577 - DNA, 25 bp, Artificial
  probe
  misc_feature (1)..(25): SEQ ID NO: 4118; WAN024FIA; Start 53; Stop 77
tcttcgttgtttccatttccataga

SEQ ID NO: 373578 - DNA, 25 bp, Artificial
  probe
  misc_feature (1)..(25): SEQ ID NO: 4118; WAN024FIA; Start 55; Stop 79
ttcgttgtttccatttccatagaca

SEQ ID NO: 373579 - DNA, 25 bp, Artificial
  probe
  misc_feature (1)..(25): SEQ ID NO: 4118; WAN024FIA; Start 61; Stop 85
gtttccatttccatagacaacctgt

SEQ ID NO: 373580 - DNA, 25 bp, Artificial
  probe
  misc_feature (1)..(25): SEQ ID NO: 4118; WAN024FIA; Start 60; Stop 84
tgtttccatttccatagacaacctg

SEQ ID NO: 373581 - DNA, 25 bp, Artificial
  probe
  misc_feature (1)..(25): SEQ ID NO: 4118; WAN024FIA; Start 196; Stop 220
gttattggtctggttgagcgtgtag

SEQ ID NO: 373582 - DNA, 25 bp, Artificial
  probe
  misc_feature (1)..(25): SEQ ID NO: 4118; WAN024FIA; Start 160; Stop 184
atcttcattgtgaatcttgatgtca

SEQ ID NO: 373583 - DNA, 25 bp, Artificial
  probe
  misc_feature (1)..(25): SEQ ID NO: 4118; WAN024FIA; Start 134; Stop 158
tcaaatccatagtaggtttcatcga

SEQ ID NO: 373584 - DNA, 25 bp, Artificial
  probe
  misc_feature (1)..(25): SEQ ID NO: 4118; WAN024FIA; Start 197; Stop 221
ttattggtctggttgagcgtgtagt

SEQ ID NO: 373585 - DNA, 25 bp, Artificial
  probe
  misc_feature (1)..(25): SEQ ID NO: 4118; WAN024FIA; Start 135; Stop 159
caaatccatagtaggtttcatcgaa

SEQ ID NO: 373586 - DNA, 25 bp, Artificial
  probe
  misc_feature (1)..(25): SEQ ID NO: 4118; WAN024FIA; Start 132; Stop 156
tttcaaatccatagtaggtttcatc

SEQ ID NO: 373587 - DNA, 25 bp, Artificial
  probe
  misc_feature (1)..(25): SEQ ID NO: 4118; WAN024FIA; Start 2; Stop 26
tggaagtaggaaccaaagacattct

SEQ ID NO: 373588 - DNA, 25 bp, Artificial
  probe
  misc_feature (1)..(25): SEQ ID NO: 4118; WAN024FIA; Start 1; Stop 25
gtggaagtaggaaccaaagacattc

SEQ ID NO: 373589 - DNA, 25 bp, Artificial
  probe
  misc_feature (1)..(25): SEQ ID NO: 4118; WAN024FIA; Start 159; Stop 183
aatcttcattgtgaatcttgatgtc

SEQ ID NO: 373590 - DNA, 25 bp, Artificial
  probe
  misc_feature (1)..(25): SEQ ID NO: 4118; WAN024FIA; Start 3; Stop 27
ggaagtaggaaccaaagacattctt

SEQ ID NO: 373591 - DNA, 25 bp, Artificial
  probe
  misc_feature (1)..(25): SEQ ID NO: 4118; WAN024FIA; Start 50; Stop 74
ttttcttcgttgtttccatttccat

SEQ ID NO: 373592 - DNA, 25 bp, Artificial
  probe
  misc_feature (1)..(25): SEQ ID NO: 4118; WAN024FIA; Start 49; Stop 73
cttttcttcgttgtttccatttcca

SEQ ID NO: 373593 - DNA, 25 bp, Artificial
  probe
  misc_feature (1)..(25): SEQ ID NO: 4118; WAN024FIA; Start 47; Stop 71
accttttcttcgttgtttccatttc

SEQ ID NO: 373594 - DNA, 25 bp, Artificial
  probe
  misc_feature (1)..(25): SEQ ID NO: 4118; WAN024FIA; Start 46; Stop 70
gaccttttcttcgttgtttccattt

SEQ ID NO: 373595 - DNA, 25 bp, Artificial
  probe
  misc_feature (1)..(25): SEQ ID NO: 4118; WAN024FIA; Start 171; Stop 195
gaatcttgatgtcaccgataaaacg

SEQ ID NO: 373596 - DNA, 25 bp, Artificial
  probe
  misc_feature (1)..(25): SEQ ID NO: 4118; WAN024FIA; Start 187; Stop 211
gataaaacggttattggtctggttg

SEQ ID NO: 373597 - DNA, 25 bp, Artificial
  probe
  misc_feature (1)..(25): SEQ ID NO: 4118; WAN024FIA; Start 4; Stop 28
gaagtaggaaccaaagacattctta

SEQ ID NO: 373598 - DNA, 25 bp, Artificial
  probe
  misc_feature (1)..(25): SEQ ID NO: 4118; WAN024FIA; Start 198; Stop 222
tattggtctggttgagcgtgtagtg

SEQ ID NO: 373599 - DNA, 25 bp, Artificial
  probe
  misc_feature (1)..(25): SEQ ID NO: 4118; WAN024FIA; Start 48; Stop 72
ccttttcttcgttgtttccatttcc

SEQ ID NO: 373600 - DNA, 25 bp, Artificial
  probe
  misc_feature (1)..(25): SEQ ID NO: 4118; WAN024FIA; Start 188; Stop 212
ataaaacggttattggtctggttga

SEQ ID NO: 373601 - DNA, 25 bp, Artificial
  probe
  misc_feature (1)..(25): SEQ ID NO: 4118; WAN024FIA; Start 170; Stop 194
tgaatcttgatgtcaccgataaaac

SEQ ID NO: 373602 - DNA, 25 bp, Artificial
  probe
  misc_feature (1)..(25): SEQ ID NO: 4118; WAN024FIA; Start 148; Stop 172
ggtttcatcgaaatcttcattgtga

SEQ ID NO: 373603 - DNA, 25 bp, Artificial
  probe
  misc_feature (1)..(25): SEQ ID NO: 4118; WAN024FIA; Start 147; Stop 171
aggtttcatcgaaatcttcattgtg

SEQ ID NO: 373604 - DNA, 25 bp, Artificial
  probe
  misc_feature (1)..(25): SEQ ID NO: 4118; WAN024FIA; Start 189; Stop 213
taaaacggttattggtctggttgag

SEQ ID NO: 373605 - DNA, 25 bp, Artificial
  probe
  misc_feature (1)..(25): SEQ ID NO: 4118; WAN024FIA; Start 139; Stop 163
tccatagtaggtttcatcgaaatct

SEQ ID NO: 373606 - DNA, 25 bp, Artificial
  probe
  misc_feature (1)..(25): SEQ ID NO: 4119; WAN024BIY; Start 107; Stop 131
tttctaatcccaagaccattatgcg

SEQ ID NO: 373607 - DNA, 25 bp, Artificial
  probe
  misc_feature (1)..(25): SEQ ID NO: 4119; WAN024BIY; Start 74; Stop 98
aatttcatggtcaagaactggtgat

SEQ ID NO: 373608 - DNA, 25 bp, Artificial
  probe
  misc_feature (1)..(25): SEQ ID NO: 4119; WAN024BIY; Start 184; Stop 208
caggaatttatcattcaaacgagcc

SEQ ID NO: 373609 - DNA, 25 bp, Artificial
  probe
  misc_feature (1)..(25): SEQ ID NO: 4119; WAN024BIY; Start 75; Stop 99
atttcatggtcaagaactggtgatg

SEQ ID NO: 373610 - DNA, 25 bp, Artificial
  probe
  misc_feature (1)..(25): SEQ ID NO: 4119; WAN024BIY; Start 72; Stop 96
taaatttcatggtcaagaactggtg

SEQ ID NO: 373611 - DNA, 25 bp, Artificial
  probe
  misc_feature (1)..(25): SEQ ID NO: 4119; WAN024BIY; Start 183; Stop 207
gcaggaatttatcattcaaacgagc

SEQ ID NO: 373612 - DNA, 25 bp, Artificial
  probe
  misc_feature (1)..(25): SEQ ID NO: 4119; WAN024BIY; Start 71; Stop 95
ttaaatttcatggtcaagaactggt

SEQ ID NO: 373613 - DNA, 25 bp, Artificial
  probe
  misc_feature (1)..(25): SEQ ID NO: 4119; WAN024BIY; Start 73; Stop 97
aaatttcatggtcaagaactggtga

SEQ ID NO: 373614 - DNA, 25 bp, Artificial
  probe
  misc_feature (1)..(25): SEQ ID NO: 4119; WAN024BIY; Start 185; Stop 209
aggaatttatcattcaaacgagccg

SEQ ID NO: 373615 - DNA, 25 bp, Artificial
  probe
  misc_feature (1)..(25): SEQ ID NO: 4119; WAN024BIY; Start 244; Stop 268
tatcaactacaaaatcaagaggggc

SEQ ID NO: 373616 - DNA, 25 bp, Artificial
  probe
  misc_feature (1)..(25): SEQ ID NO: 4119; WAN024BIY; Start 77; Stop 101
ttcatggtcaagaactggtgatgag

SEQ ID NO: 373617 - DNA, 25 bp, Artificial
  probe
  misc_feature (1)..(25): SEQ ID NO: 4119; WAN024BIY; Start 70; Stop 94
attaaatttcatggtcaagaactgg

SEQ ID NO: 373618 - DNA, 25 bp, Artificial
  probe
  misc_feature (1)..(25): SEQ ID NO: 4119; WAN024BIY; Start 243; Stop 267
ttatcaactacaaaatcaagagggg

SEQ ID NO: 373619 - DNA, 25 bp, Artificial
  probe
  misc_feature (1)..(25): SEQ ID NO: 4119; WAN024BIY; Start 106; Stop 130
ttttctaatcccaagaccattatgc

SEQ ID NO: 373620 - DNA, 25 bp, Artificial
  probe
  misc_feature (1)..(25): SEQ ID NO: 4119; WAN024BIY; Start 182; Stop 206
tgcaggaatttatcattcaaacgag

SEQ ID NO: 373621 - DNA, 25 bp, Artificial
  probe
  misc_feature (1)..(25): SEQ ID NO: 4119; WAN024BIY; Start 181; Stop 205
atgcaggaatttatcattcaaacga

SEQ ID NO: 373622 - DNA, 25 bp, Artificial
  probe
  misc_feature (1)..(25): SEQ ID NO: 4119; WAN024BIY; Start 180; Stop 204
catgcaggaatttatcattcaaacg

SEQ ID NO: 373623 - DNA, 25 bp, Artificial
  probe
  misc_feature (1)..(25): SEQ ID NO: 4119; WAN024BIY; Start 214; Stop 238
caagttgataggcaaaagattgagc

SEQ ID NO: 373624 - DNA, 25 bp, Artificial
  probe
  misc_feature (1)..(25): SEQ ID NO: 4119; WAN024BIY; Start 135; Stop 159
tttaaaggatagtgatagtttggcc

SEQ ID NO: 373625 - DNA, 25 bp, Artificial
  probe
  misc_feature (1)..(25): SEQ ID NO: 4119; WAN024BIY; Start 241; Stop 265
gcttatcaactacaaaatcaagagg

SEQ ID NO: 373626 - DNA, 25 bp, Artificial
  probe
  misc_feature (1)..(25): SEQ ID NO: 4119; WAN024BIY; Start 247; Stop 271
caactacaaaatcaagaggggcatc

SEQ ID NO: 373627 - DNA, 25 bp, Artificial
  probe
  misc_feature (1)..(25): SEQ ID NO: 4119; WAN024BIY; Start 148; Stop 172
gatagtttggcctatattcctaccc

SEQ ID NO: 373628 - DNA, 25 bp, Artificial
  probe
  misc_feature (1)..(25): SEQ ID NO: 4119; WAN024BIY; Start 147; Stop 171
tgatagtttggcctatattcctacc

SEQ ID NO: 373629 - DNA, 25 bp, Artificial
  probe
  misc_feature (1)..(25): SEQ ID NO: 4119; WAN024BIY; Start 90; Stop 114
actggtgatgagccgattttctaat

SEQ ID NO: 373630 - DNA, 25 bp, Artificial
  probe
  misc_feature (1)..(25): SEQ ID NO: 4119; WAN024BIY; Start 246; Stop 270
tcaactacaaaatcaagaggggcat

SEQ ID NO: 373631 - DNA, 25 bp, Artificial
  probe
  misc_feature (1)..(25): SEQ ID NO: 4119; WAN024BIY; Start 245; Stop 269
atcaactacaaaatcaagaggggca

SEQ ID NO: 373632 - DNA, 25 bp, Artificial
  probe
  misc_feature (1)..(25): SEQ ID NO: 4119; WAN024BIY; Start 29; Stop 53
gctatttactctttcataatgagga

SEQ ID NO: 373633 - DNA, 25 bp, Artificial
  probe
  misc_feature (1)..(25): SEQ ID NO: 4119; WAN024BIY; Start 242; Stop 266
cttatcaactacaaaatcaagaggg

SEQ ID NO: 373634 - DNA, 25 bp, Artificial
  probe
  misc_feature (1)..(25): SEQ ID NO: 4119; WAN024BIY; Start 89; Stop 113
aactggtgatgagccgattttctaa

SEQ ID NO: 373635 - DNA, 25 bp, Artificial
  probe
  misc_feature (1)..(25): SEQ ID NO: 4119; WAN024BIY; Start 136; Stop 160
ttaaaggatagtgatagtttggcct

SEQ ID NO: 373636 - DNA, 25 bp, Artificial
  probe
  misc_feature (1)..(25): SEQ ID NO: 4119; WAN024BIY; Start 186; Stop 210
ggaatttatcattcaaacgagccgt

SEQ ID NO: 373637 - DNA, 25 bp, Artificial
  probe
  misc_feature (1)..(25): SEQ ID NO: 4119; WAN024BIY; Start 138; Stop 162
aaaggatagtgatagtttggcctat

SEQ ID NO: 373638 - DNA, 25 bp, Artificial
  probe
  misc_feature (1)..(25): SEQ ID NO: 4119; WAN024BIY; Start 146; Stop 170
gtgatagtttggcctatattcctac

SEQ ID NO: 373639 - DNA, 25 bp, Artificial
  probe
  misc_feature (1)..(25): SEQ ID NO: 4120; WAN024AII; Start 46; Stop 70
actaacaagtaaagagaggagaagt

SEQ ID NO: 373640 - DNA, 25 bp, Artificial
  probe
  misc_feature (1)..(25): SEQ ID NO: 4120; WAN024AII; Start 49; Stop 73
aacaagtaaagagaggagaagtaaa

SEQ ID NO: 373641 - DNA, 25 bp, Artificial
  probe
  misc_feature (1)..(25): SEQ ID NO: 4120; WAN024AII; Start 50; Stop 74
acaagtaaagagaggagaagtaaat

SEQ ID NO: 373642 - DNA, 25 bp, Artificial
  probe
  misc_feature (1)..(25): SEQ ID NO: 4120; WAN024AII; Start 47; Stop 71
ctaacaagtaaagagaggagaagta

SEQ ID NO: 373643 - DNA, 25 bp, Artificial
  probe
  misc_feature (1)..(25): SEQ ID NO: 4120; WAN024AII; Start 48; Stop 72
taacaagtaaagagaggagaagtaa

SEQ ID NO: 373644 - DNA, 25 bp, Artificial
  probe
  misc_feature (1)..(25): SEQ ID NO: 4120; WAN024AII; Start 9; Stop 33
acgattttgcttgatatttcttggt

SEQ ID NO: 373645 - DNA, 25 bp, Artificial
  probe
  misc_feature (1)..(25): SEQ ID NO: 4120; WAN024AII; Start 10; Stop 34
cgattttgcttgatatttcttggtg

SEQ ID NO: 373646 - DNA, 25 bp, Artificial
  probe
  misc_feature (1)..(25): SEQ ID NO: 4120; WAN024AII; Start 11; Stop 35
gattttgcttgatatttcttggtgt

SEQ ID NO: 373647 - DNA, 25 bp, Artificial
  probe
  misc_feature (1)..(25): SEQ ID NO: 4120; WAN024AII; Start 14; Stop 38
tttgcttgatatttcttggtgtttt

SEQ ID NO: 373648 - DNA, 25 bp, Artificial
  probe
  misc_feature (1)..(25): SEQ ID NO: 4120; WAN024AII; Start 13; Stop 37
ttttgcttgatatttcttggtgttt

SEQ ID NO: 373649 - DNA, 25 bp, Artificial
  probe
  misc_feature (1)..(25): SEQ ID NO: 4120; WAN024AII; Start 45; Stop 69
tactaacaagtaaagagaggagaag

SEQ ID NO: 373650 - DNA, 25 bp, Artificial
  probe
  misc_feature (1)..(25): SEQ ID NO: 4120; WAN024AII; Start 12; Stop 36
attttgcttgatatttcttggtgtt

SEQ ID NO: 373651 - DNA, 25 bp, Artificial
  probe
  misc_feature (1)..(25): SEQ ID NO: 4120; WAN024AII; Start 8; Stop 32
tacgattttgcttgatatttcttgg

SEQ ID NO: 373652 - DNA, 25 bp, Artificial
  probe
  misc_feature (1)..(25): SEQ ID NO: 4120; WAN024AII; Start 1; Stop 25
gtggaattacgattttgcttgatat

SEQ ID NO: 373653 - DNA, 25 bp, Artificial
  probe
  misc_feature (1)..(25): SEQ ID NO: 4120; WAN024AII; Start 15; Stop 39
ttgcttgatatttcttggtgtttta

SEQ ID NO: 373654 - DNA, 25 bp, Artificial
  probe
  misc_feature (1)..(25): SEQ ID NO: 4120; WAN024AII; Start 16; Stop 40
tgcttgatatttcttggtgttttat

SEQ ID NO: 373655 - DNA, 25 bp, Artificial
  probe
  misc_feature (1)..(25): SEQ ID NO: 4120; WAN024AII; Start 2; Stop 26
tggaattacgattttgcttgatatt

SEQ ID NO: 373656 - DNA, 25 bp, Artificial
  probe
  misc_feature (1)..(25): SEQ ID NO: 4120; WAN024AII; Start 7; Stop 31
ttacgattttgcttgatatttcttg

SEQ ID NO: 373657 - DNA, 25 bp, Artificial
  probe
  misc_feature (1)..(25): SEQ ID NO: 4120; WAN024AII; Start 3; Stop 27
ggaattacgattttgcttgatattt

SEQ ID NO: 373658 - DNA, 25 bp, Artificial
  probe
  misc_feature (1)..(25): SEQ ID NO: 4120; WAN024AII; Start 17; Stop 41
gcttgatatttcttggtgttttatt

SEQ ID NO: 373659 - DNA, 25 bp, Artificial
  probe
  misc_feature (1)..(25): SEQ ID NO: 4120; WAN024AII; Start 6; Stop 30
attacgattttgcttgatatttctt

SEQ ID NO: 373660 - DNA, 25 bp, Artificial
  probe
  misc_feature (1)..(25): SEQ ID NO: 4120; WAN024AII; Start 5; Stop 29
aattacgattttgcttgatatttct

SEQ ID NO: 373661 - DNA, 25 bp, Artificial
  probe
  misc_feature (1)..(25): SEQ ID NO: 4120; WAN024AII; Start 4; Stop 28
gaattacgattttgcttgatatttc

SEQ ID NO: 373662 - DNA, 25 bp, Artificial
  probe
  misc_feature (1)..(25): SEQ ID NO: 4120; WAN024AII; Start 44; Stop 68
ttactaacaagtaaagagaggagaa

SEQ ID NO: 373663 - DNA, 25 bp, Artificial
  probe
  misc_feature (1)..(25): SEQ ID NO: 4120; WAN024AII; Start 43; Stop 67
attactaacaagtaaagagaggaga

SEQ ID NO: 373664 - DNA, 25 bp, Artificial
  probe
  misc_feature (1)..(25): SEQ ID NO: 4120; WAN024AII; Start 42; Stop 66
aattactaacaagtaaagagaggag

SEQ ID NO: 373665 - DNA, 25 bp, Artificial
  probe
  misc_feature (1)..(25): SEQ ID NO: 4121; WAN024CKS; Start 303; Stop 327
taacacgaagacattgagaagtagc

SEQ ID NO: 373666 - DNA, 25 bp, Artificial
  probe
  misc_feature (1)..(25): SEQ ID NO: 4121; WAN024CKS; Start 302; Stop 326
ttaacacgaagacattgagaagtag

SEQ ID NO: 373667 - DNA, 25 bp, Artificial
  probe
  misc_feature (1)..(25): SEQ ID NO: 4121; WAN024CKS; Start 549; Stop 573
aggtattagttgctatgaggtaagt

SEQ ID NO: 373668 - DNA, 25 bp, Artificial
  probe
  misc_feature (1)..(25): SEQ ID NO: 4121; WAN024CKS; Start 557; Stop 581
gttgctatgaggtaagtaattgtga

SEQ ID NO: 373669 - DNA, 25 bp, Artificial
  probe
  misc_feature (1)..(25): SEQ ID NO: 4121; WAN024CKS; Start 556; Stop 580
agttgctatgaggtaagtaattgtg

SEQ ID NO: 373670 - DNA, 25 bp, Artificial
  probe
  misc_feature (1)..(25): SEQ ID NO: 4121; WAN024CKS; Start 548; Stop 572
caggtattagttgctatgaggtaag

SEQ ID NO: 373671 - DNA, 25 bp, Artificial
  probe
  misc_feature (1)..(25): SEQ ID NO: 4121; WAN024CKS; Start 301; Stop 325
cttaacacgaagacattgagaagta

SEQ ID NO: 373672 - DNA, 25 bp, Artificial
  probe
  misc_feature (1)..(25): SEQ ID NO: 4121; WAN024CKS; Start 545; Stop 569
aatcaggtattagttgctatgaggt

SEQ ID NO: 373673 - DNA, 25 bp, Artificial
  probe
  misc_feature (1)..(25): SEQ ID NO: 4121; WAN024CKS; Start 1192; Stop 1216
cttggaatcacattgtatgctagaa

SEQ ID NO: 373674 - DNA, 25 bp, Artificial
  probe
  misc_feature (1)..(25): SEQ ID NO: 4121; WAN024CKS; Start 217; Stop 241
tgtagaattagagaggaatggagaa

SEQ ID NO: 373675 - DNA, 25 bp, Artificial
  probe
  misc_feature (1)..(25): SEQ ID NO: 4121; WAN024CKS; Start 1191; Stop 1215
gcttggaatcacattgtatgctaga

SEQ ID NO: 373676 - DNA, 25 bp, Artificial
  probe
  misc_feature (1)..(25): SEQ ID NO: 4121; WAN024CKS; Start 547; Stop 571
tcaggtattagttgctatgaggtaa

SEQ ID NO: 373677 - DNA, 25 bp, Artificial
  probe
  misc_feature (1)..(25): SEQ ID NO: 4121; WAN024CKS; Start 558; Stop 582
ttgctatgaggtaagtaattgtgaa

SEQ ID NO: 373678 - DNA, 25 bp, Artificial
  probe
  misc_feature (1)..(25): SEQ ID NO: 4121; WAN024CKS; Start 216; Stop 240
atgtagaattagagaggaatggaga

SEQ ID NO: 373679 - DNA, 25 bp, Artificial
  probe
  misc_feature (1)..(25): SEQ ID NO: 4121; WAN024CKS; Start 214; Stop 238
gcatgtagaattagagaggaatgga

SEQ ID NO: 373680 - DNA, 25 bp, Artificial
  probe
  misc_feature (1)..(25): SEQ ID NO: 4121; WAN024CKS; Start 546; Stop 570
atcaggtattagttgctatgaggta

SEQ ID NO: 373681 - DNA, 25 bp, Artificial
  probe
  misc_feature (1)..(25): SEQ ID NO: 4121; WAN024CKS; Start 559; Stop 583
tgctatgaggtaagtaattgtgaat

SEQ ID NO: 373682 - DNA, 25 bp, Artificial
  probe
  misc_feature (1)..(25): SEQ ID NO: 4121; WAN024CKS; Start 95; Stop 119
aacttaatgatataaggcgagcgtt

SEQ ID NO: 373683 - DNA, 25 bp, Artificial
  probe
  misc_feature (1)..(25): SEQ ID NO: 4121; WAN024CKS; Start 564; Stop 588
tgaggtaagtaattgtgaattggat

SEQ ID NO: 373684 - DNA, 25 bp, Artificial
  probe
  misc_feature (1)..(25): SEQ ID NO: 4121; WAN024CKS; Start 563; Stop 587
atgaggtaagtaattgtgaattgga

SEQ ID NO: 373685 - DNA, 25 bp, Artificial
  probe
  misc_feature (1)..(25): SEQ ID NO: 4121; WAN024CKS; Start 550; Stop 574
ggtattagttgctatgaggtaagta

SEQ ID NO: 373686 - DNA, 25 bp, Artificial
  probe
  misc_feature (1)..(25): SEQ ID NO: 4121; WAN024CKS; Start 555; Stop 579
tagttgctatgaggtaagtaattgt

SEQ ID NO: 373687 - DNA, 25 bp, Artificial
  probe
  misc_feature (1)..(25): SEQ ID NO: 4121; WAN024CKS; Start 215; Stop 239
catgtagaattagagaggaatggag

SEQ ID NO: 373688 - DNA, 25 bp, Artificial
  probe
  misc_feature (1)..(25): SEQ ID NO: 4121; WAN024CKS; Start 943; Stop 967
aatctaagcctctatgaatactgtt

SEQ ID NO: 373689 - DNA, 25 bp, Artificial
  probe
  misc_feature (1)..(25): SEQ ID NO: 4121; WAN024CKS; Start 946; Stop 970
ctaagcctctatgaatactgtttgc

SEQ ID NO: 373690 - DNA, 25 bp, Artificial
  probe
  misc_feature (1)..(25): SEQ ID NO: 4121; WAN024CKS; Start 213; Stop 237
tgcatgtagaattagagaggaatgg

SEQ ID NO: 373691 - DNA, 25 bp, Artificial
  probe
  misc_feature (1)..(25): SEQ ID NO: 4121; WAN024CKS; Start 825; Stop 849
aatgggattagaattgacaaatggg

SEQ ID NO: 373692 - DNA, 25 bp, Artificial
  probe
  misc_feature (1)..(25): SEQ ID NO: 4121; WAN024CKS; Start 951; Stop 975
cctctatgaatactgtttgcttgat

SEQ ID NO: 373693 - DNA, 25 bp, Artificial
  probe
  misc_feature (1)..(25): SEQ ID NO: 4121; WAN024CKS; Start 950; Stop 974
gcctctatgaatactgtttgcttga

SEQ ID NO: 373694 - DNA, 25 bp, Artificial
  probe
  misc_feature (1)..(25): SEQ ID NO: 4121; WAN024CKS; Start 304; Stop 328
aacacgaagacattgagaagtagcc

SEQ ID NO: 373695 - DNA, 25 bp, Artificial
  probe
  misc_feature (1)..(25): SEQ ID NO: 4121; WAN024CKS; Start 388; Stop 412
gatggctttgtttccttcaatactt

SEQ ID NO: 373696 - DNA, 25 bp, Artificial
  probe
  misc_feature (1)..(25): SEQ ID NO: 4121; WAN024CKS; Start 1222; Stop 1246
tttgggtttcggaatctaacagtag

SEQ ID NO: 373697 - DNA, 25 bp, Artificial
  probe
  misc_feature (1)..(25): SEQ ID NO: 4121; WAN024CKS; Start 389; Stop 413
atggctttgtttccttcaatacttt

SEQ ID NO: 373698 - DNA, 25 bp, Artificial
  probe
  misc_feature (1)..(25): SEQ ID NO: 4122; WAN024B89; Start 200; Stop 224
ggactagaagagaagataacggtat

SEQ ID NO: 373699 - DNA, 25 bp, Artificial
  probe
  misc_feature (1)..(25): SEQ ID NO: 4122; WAN024B89; Start 222; Stop 246
tatcacctggttgtaattgtacttg

SEQ ID NO: 373700 - DNA, 25 bp, Artificial
  probe
  misc_feature (1)..(25): SEQ ID NO: 4122; WAN024B89; Start 221; Stop 245
gtatcacctggttgtaattgtactt

SEQ ID NO: 373701 - DNA, 25 bp, Artificial
  probe
  misc_feature (1)..(25): SEQ ID NO: 4122; WAN024B89; Start 223; Stop 247
atcacctggttgtaattgtacttga

SEQ ID NO: 373702 - DNA, 25 bp, Artificial
  probe
  misc_feature (1)..(25): SEQ ID NO: 4122; WAN024B89; Start 215; Stop 239
ataacggtatcacctggttgtaatt

SEQ ID NO: 373703 - DNA, 25 bp, Artificial
  probe
  misc_feature (1)..(25): SEQ ID NO: 4122; WAN024B89; Start 214; Stop 238
gataacggtatcacctggttgtaat

SEQ ID NO: 373704 - DNA, 25 bp, Artificial
  probe
  misc_feature (1)..(25): SEQ ID NO: 4122; WAN024B89; Start 206; Stop 230
gaagagaagataacggtatcacctg

SEQ ID NO: 373705 - DNA, 25 bp, Artificial
  probe
  misc_feature (1)..(25): SEQ ID NO: 4122; WAN024B89; Start 205; Stop 229
agaagagaagataacggtatcacct

SEQ ID NO: 373706 - DNA, 25 bp, Artificial
  probe
  misc_feature (1)..(25): SEQ ID NO: 4122; WAN024B89; Start 202; Stop 226
actagaagagaagataacggtatca

SEQ ID NO: 373707 - DNA, 25 bp, Artificial
  probe
  misc_feature (1)..(25): SEQ ID NO: 4122; WAN024B89; Start 216; Stop 240
taacggtatcacctggttgtaattg

SEQ ID NO: 373708 - DNA, 25 bp, Artificial
  probe
  misc_feature (1)..(25): SEQ ID NO: 4122; WAN024B89; Start 204; Stop 228
tagaagagaagataacggtatcacc

SEQ ID NO: 373709 - DNA, 25 bp, Artificial
  probe
  misc_feature (1)..(25): SEQ ID NO: 4122; WAN024B89; Start 203; Stop 227
ctagaagagaagataacggtatcac

SEQ ID NO: 373710 - DNA, 25 bp, Artificial
  probe
  misc_feature (1)..(25): SEQ ID NO: 4122; WAN024B89; Start 220; Stop 244
ggtatcacctggttgtaattgtact

SEQ ID NO: 373711 - DNA, 25 bp, Artificial
  probe
  misc_feature (1)..(25): SEQ ID NO: 4122; WAN024B89; Start 213; Stop 237
agataacggtatcacctggttgtaa

SEQ ID NO: 373712 - DNA, 25 bp, Artificial
  probe
  misc_feature (1)..(25): SEQ ID NO: 4122; WAN024B89; Start 212; Stop 236
aagataacggtatcacctggttgta

SEQ ID NO: 373713 - DNA, 25 bp, Artificial
  probe
  misc_feature (1)..(25): SEQ ID NO: 4122; WAN024B89; Start 201; Stop 225
gactagaagagaagataacggtatc

SEQ ID NO: 373714 - DNA, 25 bp, Artificial
  probe
  misc_feature (1)..(25): SEQ ID NO: 4122; WAN024B89; Start 98; Stop 122
ccagatgtatggatattgttcactt

SEQ ID NO: 373715 - DNA, 25 bp, Artificial
  probe
  misc_feature (1)..(25): SEQ ID NO: 4122; WAN024B89; Start 104; Stop 128
gtatggatattgttcactttaccgt

SEQ ID NO: 373716 - DNA, 25 bp, Artificial
  probe
  misc_feature (1)..(25): SEQ ID NO: 4122; WAN024B89; Start 103; Stop 127
tgtatggatattgttcactttaccg

SEQ ID NO: 373717 - DNA, 25 bp, Artificial
  probe
  misc_feature (1)..(25): SEQ ID NO: 4122; WAN024B89; Start 207; Stop 231
aagagaagataacggtatcacctgg

SEQ ID NO: 373718 - DNA, 25 bp, Artificial
  probe
  misc_feature (1)..(25): SEQ ID NO: 4122; WAN024B89; Start 196; Stop 220
gatgggactagaagagaagataacg

SEQ ID NO: 373719 - DNA, 25 bp, Artificial
  probe
  misc_feature (1)..(25): SEQ ID NO: 4122; WAN024B89; Start 195; Stop 219
ggatgggactagaagagaagataac

SEQ ID NO: 373720 - DNA, 25 bp, Artificial
  probe
  misc_feature (1)..(25): SEQ ID NO: 4122; WAN024B89; Start 194; Stop 218
gggatgggactagaagagaagataa

SEQ ID NO: 373721 - DNA, 25 bp, Artificial
  probe
  misc_feature (1)..(25): SEQ ID NO: 4122; WAN024B89; Start 218; Stop 242
acggtatcacctggttgtaattgta

SEQ ID NO: 373722 - DNA, 25 bp, Artificial
  probe
  misc_feature (1)..(25): SEQ ID NO: 4122; WAN024B89; Start 199; Stop 223
gggactagaagagaagataacggta

SEQ ID NO: 373723 - DNA, 25 bp, Artificial
  probe
  misc_feature (1)..(25): SEQ ID NO: 4122; WAN024B89; Start 219; Stop 243
cggtatcacctggttgtaattgtac

SEQ ID NO: 373724 - DNA, 25 bp, Artificial
  probe
  misc_feature (1)..(25): SEQ ID NO: 4122; WAN024B89; Start 209; Stop 233
gagaagataacggtatcacctggtt

SEQ ID NO: 373725 - DNA, 25 bp, Artificial
  probe
  misc_feature (1)..(25): SEQ ID NO: 4122; WAN024B89; Start 197; Stop 221
atgggactagaagagaagataacgg

SEQ ID NO: 373726 - DNA, 25 bp, Artificial
  probe
  misc_feature (1)..(25): SEQ ID NO: 4122; WAN024B89; Start 193; Stop 217
agggatgggactagaagagaagata

SEQ ID NO: 373727 - DNA, 25 bp, Artificial
  probe
  misc_feature (1)..(25): SEQ ID NO: 4122; WAN024B89; Start 210; Stop 234
agaagataacggtatcacctggttg

SEQ ID NO: 373728 - DNA, 25 bp, Artificial
  probe
  misc_feature (1)..(25): SEQ ID NO: 4122; WAN024B89; Start 211; Stop 235
gaagataacggtatcacctggttgt

SEQ ID NO: 373729 - DNA, 25 bp, Artificial
  probe
  misc_feature (1)..(25): SEQ ID NO: 4122; WAN024B89; Start 217; Stop 241
aacggtatcacctggttgtaattgt

SEQ ID NO: 373730 - DNA, 25 bp, Artificial
  probe
  misc_feature (1)..(25): SEQ ID NO: 4122; WAN024B89; Start 112; Stop 136
attgttcactttaccgtggataact

SEQ ID NO: 373731 - DNA, 25 bp, Artificial
  probe
  misc_feature (1)..(25): SEQ ID NO: 4123; WAN024FZA; Start 431; Stop 455
ttccttatgccaactatgaatctgt

SEQ ID NO: 373732 - DNA, 25 bp, Artificial
  probe
  misc_feature (1)..(25): SEQ ID NO: 4123; WAN024FZA; Start 432; Stop 456
tccttatgccaactatgaatctgtt

SEQ ID NO: 373733 - DNA, 25 bp, Artificial
  probe
  misc_feature (1)..(25): SEQ ID NO: 4123; WAN024FZA; Start 355; Stop 379
tctgctaaggaattaagaggagaat

SEQ ID NO: 373734 - DNA, 25 bp, Artificial
  probe
  misc_feature (1)..(25): SEQ ID NO: 4123; WAN024FZA; Start 433; Stop 457
ccttatgccaactatgaatctgtta

SEQ ID NO: 373735 - DNA, 25 bp, Artificial
  probe
  misc_feature (1)..(25): SEQ ID NO: 4123; WAN024FZA; Start 436; Stop 460
tatgccaactatgaatctgttagaa

SEQ ID NO: 373736 - DNA, 25 bp, Artificial
  probe
  misc_feature (1)..(25): SEQ ID NO: 4123; WAN024FZA; Start 435; Stop 459
ttatgccaactatgaatctgttaga

SEQ ID NO: 373737 - DNA, 25 bp, Artificial
  probe
  misc_feature (1)..(25): SEQ ID NO: 4123; WAN024FZA; Start 356; Stop 380
ctgctaaggaattaagaggagaatt

SEQ ID NO: 373738 - DNA, 25 bp, Artificial
  probe
  misc_feature (1)..(25): SEQ ID NO: 4123; WAN024FZA; Start 434; Stop 458
cttatgccaactatgaatctgttag

SEQ ID NO: 373739 - DNA, 25 bp, Artificial
  probe
  misc_feature (1)..(25): SEQ ID NO: 4123; WAN024FZA; Start 565; Stop 589
cgactttatttgattgactgggaat

SEQ ID NO: 373740 - DNA, 25 bp, Artificial
  probe
  misc_feature (1)..(25): SEQ ID NO: 4123; WAN024FZA; Start 430; Stop 454
attccttatgccaactatgaatctg

SEQ ID NO: 373741 - DNA, 25 bp, Artificial
  probe
  misc_feature (1)..(25): SEQ ID NO: 4123; WAN024FZA; Start 405; Stop 429
atacgaatccttgattgaagaacaa

SEQ ID NO: 373742 - DNA, 25 bp, Artificial
  probe
  misc_feature (1)..(25): SEQ ID NO: 4123; WAN024FZA; Start 404; Stop 428
aatacgaatccttgattgaagaaca

SEQ ID NO: 373743 - DNA, 25 bp, Artificial
  probe
  misc_feature (1)..(25): SEQ ID NO: 4123; WAN024FZA; Start 564; Stop 588
acgactttatttgattgactgggaa

SEQ ID NO: 373744 - DNA, 25 bp, Artificial
  probe
  misc_feature (1)..(25): SEQ ID NO: 4123; WAN024FZA; Start 560; Stop 584
aaggacgactttatttgattgactg

SEQ ID NO: 373745 - DNA, 25 bp, Artificial
  probe
  misc_feature (1)..(25): SEQ ID NO: 4123; WAN024FZA; Start 563; Stop 587
gacgactttatttgattgactggga

SEQ ID NO: 373746 - DNA, 25 bp, Artificial
  probe
  misc_feature (1)..(25): SEQ ID NO: 4123; WAN024FZA; Start 561; Stop 585
aggacgactttatttgattgactgg

SEQ ID NO: 373747 - DNA, 25 bp, Artificial
  probe
  misc_feature (1)..(25): SEQ ID NO: 4123; WAN024FZA; Start 421; Stop 445
gaagaacaaattccttatgccaact

SEQ ID NO: 373748 - DNA, 25 bp, Artificial
  probe
  misc_feature (1)..(25): SEQ ID NO: 4123; WAN024FZA; Start 420; Stop 444
tgaagaacaaattccttatgccaac

SEQ ID NO: 373749 - DNA, 25 bp, Artificial
  probe
  misc_feature (1)..(25): SEQ ID NO: 4123; WAN024FZA; Start 830; Stop 854
ttaaaggtttggcttcttatggagg

SEQ ID NO: 373750 - DNA, 25 bp, Artificial
  probe
  misc_feature (1)..(25): SEQ ID NO: 4123; WAN024FZA; Start 559; Stop 583
caaggacgactttatttgattgact

SEQ ID NO: 373751 - DNA, 25 bp, Artificial
  probe
  misc_feature (1)..(25): SEQ ID NO: 4123; WAN024FZA; Start 551; Stop 575
aatcacctcaaggacgactttattt

SEQ ID NO: 373752 - DNA, 25 bp, Artificial
  probe
  misc_feature (1)..(25): SEQ ID NO: 4123; WAN024FZA; Start 429; Stop 453
aattccttatgccaactatgaatct

SEQ ID NO: 373753 - DNA, 25 bp, Artificial
  probe
  misc_feature (1)..(25): SEQ ID NO: 4123; WAN024FZA; Start 425; Stop 449
aacaaattccttatgccaactatga

SEQ ID NO: 373754 - DNA, 25 bp, Artificial
  probe
  misc_feature (1)..(25): SEQ ID NO: 4123; WAN024FZA; Start 419; Stop 443
ttgaagaacaaattccttatgccaa

SEQ ID NO: 373755 - DNA, 25 bp, Artificial
  probe
  misc_feature (1)..(25): SEQ ID NO: 4123; WAN024FZA; Start 550; Stop 574
gaatcacctcaaggacgactttatt

SEQ ID NO: 373756 - DNA, 25 bp, Artificial
  probe
  misc_feature (1)..(25): SEQ ID NO: 4123; WAN024FZA; Start 418; Stop 442
attgaagaacaaattccttatgcca

SEQ ID NO: 373757 - DNA, 25 bp, Artificial
  probe
  misc_feature (1)..(25): SEQ ID NO: 4123; WAN024FZA; Start 426; Stop 450
acaaattccttatgccaactatgaa

SEQ ID NO: 373758 - DNA, 25 bp, Artificial
  probe
  misc_feature (1)..(25): SEQ ID NO: 4123; WAN024FZA; Start 422; Stop 446
aagaacaaattccttatgccaacta

SEQ ID NO: 373759 - DNA, 25 bp, Artificial
  probe
  misc_feature (1)..(25): SEQ ID NO: 4123; WAN024FZA; Start 412; Stop 436
tccttgattgaagaacaaattcctt

SEQ ID NO: 373760 - DNA, 25 bp, Artificial
  probe
  misc_feature (1)..(25): SEQ ID NO: 4123; WAN024FZA; Start 417; Stop 441
gattgaagaacaaattccttatgcc

SEQ ID NO: 373761 - DNA, 25 bp, Artificial
  probe
  misc_feature (1)..(25): SEQ ID NO: 4123; WAN024FZA; Start 424; Stop 448
gaacaaattccttatgccaactatg

SEQ ID NO: 373762 - DNA, 25 bp, Artificial
  probe
  misc_feature (1)..(25): SEQ ID NO: 4123; WAN024FZA; Start 423; Stop 447
agaacaaattccttatgccaactat

SEQ ID NO: 373763 - DNA, 25 bp, Artificial
  probe
  misc_feature (1)..(25): SEQ ID NO: 4123; WAN024FZA; Start 411; Stop 435
atccttgattgaagaacaaattcct

SEQ ID NO: 373764 - DNA, 25 bp, Artificial
  probe
  misc_feature (1)..(25): SEQ ID NO: 4124; WAN024G8R; Start 195; Stop 219
atctctcacacttgcttcaatgttg

SEQ ID NO: 373765 - DNA, 25 bp, Artificial
  probe
  misc_feature (1)..(25): SEQ ID NO: 4124; WAN024G8R; Start 194; Stop 218
catctctcacacttgcttcaatgtt

SEQ ID NO: 373766 - DNA, 25 bp, Artificial
  probe
  misc_feature (1)..(25): SEQ ID NO: 4124; WAN024G8R; Start 196; Stop 220
tctctcacacttgcttcaatgttga

SEQ ID NO: 373767 - DNA, 25 bp, Artificial
  probe
  misc_feature (1)..(25): SEQ ID NO: 4124; WAN024G8R; Start 114; Stop 138
catttgtttgaccatctcatctgtc

SEQ ID NO: 373768 - DNA, 25 bp, Artificial
  probe
  misc_feature (1)..(25): SEQ ID NO: 4124; WAN024G8R; Start 179; Stop 203
caatcaccacatcagcatctctcac

SEQ ID NO: 373769 - DNA, 25 bp, Artificial
  probe
  misc_feature (1)..(25): SEQ ID NO: 4124; WAN024G8R; Start 123; Stop 147
gaccatctcatctgtcaccaattcc

SEQ ID NO: 373770 - DNA, 25 bp, Artificial
  probe
  misc_feature (1)..(25): SEQ ID NO: 4124; WAN024G8R; Start 113; Stop 137
gcatttgtttgaccatctcatctgt

SEQ ID NO: 373771 - DNA, 25 bp, Artificial
  probe
  misc_feature (1)..(25): SEQ ID NO: 4124; WAN024G8R; Start 180; Stop 204
aatcaccacatcagcatctctcaca

SEQ ID NO: 373772 - DNA, 25 bp, Artificial
  probe
  misc_feature (1)..(25): SEQ ID NO: 4124; WAN024G8R; Start 202; Stop 226
acacttgcttcaatgttgaatgaat

SEQ ID NO: 373773 - DNA, 25 bp, Artificial
  probe
  misc_feature (1)..(25): SEQ ID NO: 4124; WAN024G8R; Start 203; Stop 227
cacttgcttcaatgttgaatgaatt

SEQ ID NO: 373774 - DNA, 25 bp, Artificial
  probe
  misc_feature (1)..(25): SEQ ID NO: 4124; WAN024G8R; Start 201; Stop 225
cacacttgcttcaatgttgaatgaa

SEQ ID NO: 373775 - DNA, 25 bp, Artificial
  probe
  misc_feature (1)..(25): SEQ ID NO: 4124; WAN024G8R; Start 215; Stop 239
tgttgaatgaattagacataagagt

SEQ ID NO: 373776 - DNA, 25 bp, Artificial
  probe
  misc_feature (1)..(25): SEQ ID NO: 4124; WAN024G8R; Start 199; Stop 223
ctcacacttgcttcaatgttgaatg

SEQ ID NO: 373777 - DNA, 25 bp, Artificial
  probe
  misc_feature (1)..(25): SEQ ID NO: 4124; WAN024G8R; Start 198; Stop 222
tctcacacttgcttcaatgttgaat

SEQ ID NO: 373778 - DNA, 25 bp, Artificial
  probe
  misc_feature (1)..(25): SEQ ID NO: 4124; WAN024G8R; Start 112; Stop 136
cgcatttgtttgaccatctcatctg

SEQ ID NO: 373779 - DNA, 25 bp, Artificial
  probe
  misc_feature (1)..(25): SEQ ID NO: 4124; WAN024G8R; Start 110; Stop 134
gacgcatttgtttgaccatctcatc

SEQ ID NO: 373780 - DNA, 25 bp, Artificial
  probe
  misc_feature (1)..(25): SEQ ID NO: 4124; WAN024G8R; Start 177; Stop 201
tccaatcaccacatcagcatctctc

SEQ ID NO: 373781 - DNA, 25 bp, Artificial
  probe
  misc_feature (1)..(25): SEQ ID NO: 4124; WAN024G8R; Start 176; Stop 200
ctccaatcaccacatcagcatctct

SEQ ID NO: 373782 - DNA, 25 bp, Artificial
  probe
  misc_feature (1)..(25): SEQ ID NO: 4124; WAN024G8R; Start 208; Stop 232
gcttcaatgttgaatgaattagaca

SEQ ID NO: 373783 - DNA, 25 bp, Artificial
  probe
  misc_feature (1)..(25): SEQ ID NO: 4124; WAN024G8R; Start 207; Stop 231
tgcttcaatgttgaatgaattagac

SEQ ID NO: 373784 - DNA, 25 bp, Artificial
  probe
  misc_feature (1)..(25): SEQ ID NO: 4124; WAN024G8R; Start 200; Stop 224
tcacacttgcttcaatgttgaatga

SEQ ID NO: 373785 - DNA, 25 bp, Artificial
  probe
  misc_feature (1)..(25): SEQ ID NO: 4124; WAN024G8R; Start 197; Stop 221
ctctcacacttgcttcaatgttgaa

SEQ ID NO: 373786 - DNA, 25 bp, Artificial
  probe
  misc_feature (1)..(25): SEQ ID NO: 4124; WAN024G8R; Start 181; Stop 205
atcaccacatcagcatctctcacac

SEQ ID NO: 373787 - DNA, 25 bp, Artificial
  probe
  misc_feature (1)..(25): SEQ ID NO: 4124; WAN024G8R; Start 178; Stop 202
ccaatcaccacatcagcatctctca

SEQ ID NO: 373788 - DNA, 25 bp, Artificial
  probe
  misc_feature (1)..(25): SEQ ID NO: 4124; WAN024G8R; Start 204; Stop 228
acttgcttcaatgttgaatgaatta

SEQ ID NO: 373789 - DNA, 25 bp, Artificial
  probe
  misc_feature (1)..(25): SEQ ID NO: 4124; WAN024G8R; Start 111; Stop 135
acgcatttgtttgaccatctcatct

SEQ ID NO: 373790 - DNA, 25 bp, Artificial
  probe
  misc_feature (1)..(25): SEQ ID NO: 4124; WAN024G8R; Start 124; Stop 148
accatctcatctgtcaccaattccg

SEQ ID NO: 373791 - DNA, 25 bp, Artificial
  probe
  misc_feature (1)..(25): SEQ ID NO: 4124; WAN024G8R; Start 206; Stop 230
ttgcttcaatgttgaatgaattaga

SEQ ID NO: 373792 - DNA, 25 bp, Artificial
  probe
  misc_feature (1)..(25): SEQ ID NO: 4124; WAN024G8R; Start 205; Stop 229
cttgcttcaatgttgaatgaattag

SEQ ID NO: 373793 - DNA, 25 bp, Artificial
  probe
  misc_feature (1)..(25): SEQ ID NO: 4124; WAN024G8R; Start 184; Stop 208
accacatcagcatctctcacacttg

SEQ ID NO: 373794 - DNA, 25 bp, Artificial
  probe
  misc_feature (1)..(25): SEQ ID NO: 4124; WAN024G8R; Start 183; Stop 207
caccacatcagcatctctcacactt

SEQ ID NO: 373795 - DNA, 25 bp, Artificial
  probe
  misc_feature (1)..(25): SEQ ID NO: 4124; WAN024G8R; Start 216; Stop 240
gttgaatgaattagacataagagtt

SEQ ID NO: 373796 - DNA, 25 bp, Artificial
  probe
  misc_feature (1)..(25): SEQ ID NO: 4124; WAN024G8R; Start 166; Stop 190
atgagaatggctccaatcaccacat

SEQ ID NO: 373797 - DNA, 25 bp, Artificial
  probe
  misc_feature (1)..(25): SEQ ID NO: 4125; WAN024DYY; Start 134; Stop 158
ctaattctgctaggataggatgctc

SEQ ID NO: 373798 - DNA, 25 bp, Artificial
  probe
  misc_feature (1)..(25): SEQ ID NO: 4125; WAN024DYY; Start 135; Stop 159
taattctgctaggataggatgctct

SEQ ID NO: 373799 - DNA, 25 bp, Artificial
  probe
  misc_feature (1)..(25): SEQ ID NO: 4125; WAN024DYY; Start 78; Stop 102
ctctactaagacattcataacctgc

SEQ ID NO: 373800 - DNA, 25 bp, Artificial
  probe
  misc_feature (1)..(25): SEQ ID NO: 4125; WAN024DYY; Start 136; Stop 160
aattctgctaggataggatgctctt

SEQ ID NO: 373801 - DNA, 25 bp, Artificial
  probe
  misc_feature (1)..(25): SEQ ID NO: 4125; WAN024DYY; Start 137; Stop 161
attctgctaggataggatgctcttc

SEQ ID NO: 373802 - DNA, 25 bp, Artificial
  probe
  misc_feature (1)..(25): SEQ ID NO: 4125; WAN024DYY; Start 133; Stop 157
gctaattctgctaggataggatgct

SEQ ID NO: 373803 - DNA, 25 bp, Artificial
  probe
  misc_feature (1)..(25): SEQ ID NO: 4125; WAN024DYY; Start 138; Stop 162
ttctgctaggataggatgctcttct

SEQ ID NO: 373804 - DNA, 25 bp, Artificial
  probe
  misc_feature (1)..(25): SEQ ID NO: 4125; WAN024DYY; Start 16; Stop 40
agaagtctccttgatacagctagat

SEQ ID NO: 373805 - DNA, 25 bp, Artificial
  probe
  misc_feature (1)..(25): SEQ ID NO: 4125; WAN024DYY; Start 77; Stop 101
actctactaagacattcataacctg

SEQ ID NO: 373806 - DNA, 25 bp, Artificial
  probe
  misc_feature (1)..(25): SEQ ID NO: 4125; WAN024DYY; Start 17; Stop 41
gaagtctccttgatacagctagatt

SEQ ID NO: 373807 - DNA, 25 bp, Artificial
  probe
  misc_feature (1)..(25): SEQ ID NO: 4125; WAN024DYY; Start 15; Stop 39
aagaagtctccttgatacagctaga

SEQ ID NO: 373808 - DNA, 25 bp, Artificial
  probe
  misc_feature (1)..(25): SEQ ID NO: 4125; WAN024DYY; Start 20; Stop 44
gtctccttgatacagctagattaac

SEQ ID NO: 373809 - DNA, 25 bp, Artificial
  probe
  misc_feature (1)..(25): SEQ ID NO: 4125; WAN024DYY; Start 21; Stop 45
tctccttgatacagctagattaact

SEQ ID NO: 373810 - DNA, 25 bp, Artificial
  probe
  misc_feature (1)..(25): SEQ ID NO: 4125; WAN024DYY; Start 19; Stop 43
agtctccttgatacagctagattaa

SEQ ID NO: 373811 - DNA, 25 bp, Artificial
  probe
  misc_feature (1)..(25): SEQ ID NO: 4125; WAN024DYY; Start 18; Stop 42
aagtctccttgatacagctagatta

SEQ ID NO: 373812 - DNA, 25 bp, Artificial
  probe
  misc_feature (1)..(25): SEQ ID NO: 4125; WAN024DYY; Start 79; Stop 103
tctactaagacattcataacctgca

SEQ ID NO: 373813 - DNA, 25 bp, Artificial
  probe
  misc_feature (1)..(25): SEQ ID NO: 4125; WAN024DYY; Start 139; Stop 163
tctgctaggataggatgctcttctg

SEQ ID NO: 373814 - DNA, 25 bp, Artificial
  probe
  misc_feature (1)..(25): SEQ ID NO: 4125; WAN024DYY; Start 82; Stop 106
actaagacattcataacctgcatag

SEQ ID NO: 373815 - DNA, 25 bp, Artificial
  probe
  misc_feature (1)..(25): SEQ ID NO: 4125; WAN024DYY; Start 80; Stop 104
ctactaagacattcataacctgcat

SEQ ID NO: 373816 - DNA, 25 bp, Artificial
  probe
  misc_feature (1)..(25): SEQ ID NO: 4125; WAN024DYY; Start 164; Stop 188
ccctatcaaagagtgaaatctgttc

SEQ ID NO: 373817 - DNA, 25 bp, Artificial
  probe
  misc_feature (1)..(25): SEQ ID NO: 4125; WAN024DYY; Start 159; Stop 183
ttctgccctatcaaagagtgaaatc

SEQ ID NO: 373818 - DNA, 25 bp, Artificial
  probe
  misc_feature (1)..(25): SEQ ID NO: 4125; WAN024DYY; Start 158; Stop 182
cttctgccctatcaaagagtgaaat

SEQ ID NO: 373819 - DNA, 25 bp, Artificial
  probe
  misc_feature (1)..(25): SEQ ID NO: 4125; WAN024DYY; Start 76; Stop 100
aactctactaagacattcataacct

SEQ ID NO: 373820 - DNA, 25 bp, Artificial
  probe
  misc_feature (1)..(25): SEQ ID NO: 4125; WAN024DYY; Start 163; Stop 187
gccctatcaaagagtgaaatctgtt

SEQ ID NO: 373821 - DNA, 25 bp, Artificial
  probe
  misc_feature (1)..(25): SEQ ID NO: 4125; WAN024DYY; Start 161; Stop 185
ctgccctatcaaagagtgaaatctg

SEQ ID NO: 373822 - DNA, 25 bp, Artificial
  probe
  misc_feature (1)..(25): SEQ ID NO: 4125; WAN024DYY; Start 160; Stop 184
tctgccctatcaaagagtgaaatct

SEQ ID NO: 373823 - DNA, 25 bp, Artificial
  probe
  misc_feature (1)..(25): SEQ ID NO: 4125; WAN024DYY; Start 83; Stop 107
ctaagacattcataacctgcatagg

SEQ ID NO: 373824 - DNA, 25 bp, Artificial
  probe
  misc_feature (1)..(25): SEQ ID NO: 4125; WAN024DYY; Start 162; Stop 186
tgccctatcaaagagtgaaatctgt

SEQ ID NO: 373825 - DNA, 25 bp, Artificial
  probe
  misc_feature (1)..(25): SEQ ID NO: 4125; WAN024DYY; Start 22; Stop 46
ctccttgatacagctagattaacta

SEQ ID NO: 373826 - DNA, 25 bp, Artificial
  probe
  misc_feature (1)..(25): SEQ ID NO: 4125; WAN024DYY; Start 14; Stop 38
aaagaagtctccttgatacagctag

SEQ ID NO: 373827 - DNA, 25 bp, Artificial
  probe
  misc_feature (1)..(25): SEQ ID NO: 4125; WAN024DYY; Start 81; Stop 105
tactaagacattcataacctgcata

SEQ ID NO: 373828 - DNA, 25 bp, Artificial
  probe
  misc_feature (1)..(25): SEQ ID NO: 4125; WAN024DYY; Start 13; Stop 37
caaagaagtctccttgatacagcta

SEQ ID NO: 373829 - DNA, 25 bp, Artificial
  probe
  misc_feature (1)..(25): SEQ ID NO: 4125; WAN024DYY; Start 132; Stop 156
agctaattctgctaggataggatgc

SEQ ID NO: 373830 - DNA, 25 bp, Artificial
  probe
  misc_feature (1)..(25): SEQ ID NO: 4126; WAN024CUC; Start 398; Stop 422
caggtagcattagtcatcaagtcat

SEQ ID NO: 373831 - DNA, 25 bp, Artificial
  probe
  misc_feature (1)..(25): SEQ ID NO: 4126; WAN024CUC; Start 735; Stop 759
tgatgatagttatgtccaagttcct

SEQ ID NO: 373832 - DNA, 25 bp, Artificial
  probe
  misc_feature (1)..(25): SEQ ID NO: 4126; WAN024CUC; Start 734; Stop 758
gtgatgatagttatgtccaagttcc

SEQ ID NO: 373833 - DNA, 25 bp, Artificial
  probe
  misc_feature (1)..(25): SEQ ID NO: 4126; WAN024CUC; Start 731; Stop 755
tgagtgatgatagttatgtccaagt

SEQ ID NO: 373834 - DNA, 25 bp, Artificial
  probe
  misc_feature (1)..(25): SEQ ID NO: 4126; WAN024CUC; Start 721; Stop 745
gcagaagtcttgagtgatgatagtt

SEQ ID NO: 373835 - DNA, 25 bp, Artificial
  probe
  misc_feature (1)..(25): SEQ ID NO: 4126; WAN024CUC; Start 728; Stop 752
tcttgagtgatgatagttatgtcca

SEQ ID NO: 373836 - DNA, 25 bp, Artificial
  probe
  misc_feature (1)..(25): SEQ ID NO: 4126; WAN024CUC; Start 727; Stop 751
gtcttgagtgatgatagttatgtcc

SEQ ID NO: 373837 - DNA, 25 bp, Artificial
  probe
  misc_feature (1)..(25): SEQ ID NO: 4126; WAN024CUC; Start 733; Stop 757
agtgatgatagttatgtccaagttc

SEQ ID NO: 373838 - DNA, 25 bp, Artificial
  probe
  misc_feature (1)..(25): SEQ ID NO: 4126; WAN024CUC; Start 732; Stop 756
gagtgatgatagttatgtccaagtt

SEQ ID NO: 373839 - DNA, 25 bp, Artificial
  probe
  misc_feature (1)..(25): SEQ ID NO: 4126; WAN024CUC; Start 736; Stop 760
gatgatagttatgtccaagttcctt

SEQ ID NO: 373840 - DNA, 25 bp, Artificial
  probe
  misc_feature (1)..(25): SEQ ID NO: 4126; WAN024CUC; Start 399; Stop 423
aggtagcattagtcatcaagtcatg

SEQ ID NO: 373841 - DNA, 25 bp, Artificial
  probe
  misc_feature (1)..(25): SEQ ID NO: 4126; WAN024CUC; Start 2195; Stop 2219
ttagttctgtatctgttctgaccag

SEQ ID NO: 373842 - DNA, 25 bp, Artificial
  probe
  misc_feature (1)..(25): SEQ ID NO: 4126; WAN024CUC; Start 730; Stop 754
ttgagtgatgatagttatgtccaag

SEQ ID NO: 373843 - DNA, 25 bp, Artificial
  probe
  misc_feature (1)..(25): SEQ ID NO: 4126; WAN024CUC; Start 729; Stop 753
cttgagtgatgatagttatgtccaa

SEQ ID NO: 373844 - DNA, 25 bp, Artificial
  probe
  misc_feature (1)..(25): SEQ ID NO: 4126; WAN024CUC; Start 726; Stop 750
agtcttgagtgatgatagttatgtc

SEQ ID NO: 373845 - DNA, 25 bp, Artificial
  probe
  misc_feature (1)..(25): SEQ ID NO: 4126; WAN024CUC; Start 2196; Stop 2220
tagttctgtatctgttctgaccagt

SEQ ID NO: 373846 - DNA, 25 bp, Artificial
  probe
  misc_feature (1)..(25): SEQ ID NO: 4126; WAN024CUC; Start 722; Stop 746
cagaagtcttgagtgatgatagtta

SEQ ID NO: 373847 - DNA, 25 bp, Artificial
  probe
  misc_feature (1)..(25): SEQ ID NO: 4126; WAN024CUC; Start 839; Stop 863
gtgtctctagtattgacgaatccat

SEQ ID NO: 373848 - DNA, 25 bp, Artificial
  probe
  misc_feature (1)..(25): SEQ ID NO: 4126; WAN024CUC; Start 836; Stop 860
aaggtgtctctagtattgacgaatc

SEQ ID NO: 373849 - DNA, 25 bp, Artificial
  probe
  misc_feature (1)..(25): SEQ ID NO: 4126; WAN024CUC; Start 835; Stop 859
gaaggtgtctctagtattgacgaat

SEQ ID NO: 373850 - DNA, 25 bp, Artificial
  probe
  misc_feature (1)..(25): SEQ ID NO: 4126; WAN024CUC; Start 2198; Stop 2222
gttctgtatctgttctgaccagttc

SEQ ID NO: 373851 - DNA, 25 bp, Artificial
  probe
  misc_feature (1)..(25): SEQ ID NO: 4126; WAN024CUC; Start 834; Stop 858
agaaggtgtctctagtattgacgaa

SEQ ID NO: 373852 - DNA, 25 bp, Artificial
  probe
  misc_feature (1)..(25): SEQ ID NO: 4126; WAN024CUC; Start 359; Stop 383
ttactgtgcctcttgtgattctcat

SEQ ID NO: 373853 - DNA, 25 bp, Artificial
  probe
  misc_feature (1)..(25): SEQ ID NO: 4126; WAN024CUC; Start 2197; Stop 2221
agttctgtatctgttctgaccagtt

SEQ ID NO: 373854 - DNA, 25 bp, Artificial
  probe
  misc_feature (1)..(25): SEQ ID NO: 4126; WAN024CUC; Start 720; Stop 744
cgcagaagtcttgagtgatgatagt

SEQ ID NO: 373855 - DNA, 25 bp, Artificial
  probe
  misc_feature (1)..(25): SEQ ID NO: 4126; WAN024CUC; Start 833; Stop 857
tagaaggtgtctctagtattgacga

SEQ ID NO: 373856 - DNA, 25 bp, Artificial
  probe
  misc_feature (1)..(25): SEQ ID NO: 4126; WAN024CUC; Start 832; Stop 856
gtagaaggtgtctctagtattgacg

SEQ ID NO: 373857 - DNA, 25 bp, Artificial
  probe
  misc_feature (1)..(25): SEQ ID NO: 4126; WAN024CUC; Start 826; Stop 850
gtcgtagtagaaggtgtctctagta

SEQ ID NO: 373858 - DNA, 25 bp, Artificial
  probe
  misc_feature (1)..(25): SEQ ID NO: 4126; WAN024CUC; Start 725; Stop 749
aagtcttgagtgatgatagttatgt

SEQ ID NO: 373859 - DNA, 25 bp, Artificial
  probe
  misc_feature (1)..(25): SEQ ID NO: 4126; WAN024CUC; Start 840; Stop 864
tgtctctagtattgacgaatccatg

SEQ ID NO: 373860 - DNA, 25 bp, Artificial
  probe
  misc_feature (1)..(25): SEQ ID NO: 4126; WAN024CUC; Start 827; Stop 851
tcgtagtagaaggtgtctctagtat

SEQ ID NO: 373861 - DNA, 25 bp, Artificial
  probe
  misc_feature (1)..(25): SEQ ID NO: 4126; WAN024CUC; Start 815; Stop 839
ctgttgatggtgtcgtagtagaagg

SEQ ID NO: 373862 - DNA, 25 bp, Artificial
  probe
  misc_feature (1)..(25): SEQ ID NO: 4126; WAN024CUC; Start 837; Stop 861
aggtgtctctagtattgacgaatcc

SEQ ID NO: 373863 - DNA, 25 bp, Artificial
  probe
  misc_feature (1)..(25): SEQ ID NO: 4127; WAN024FWV; Start 3; Stop 27
ggagagtagggtaaatatagttgcc

SEQ ID NO: 373864 - DNA, 25 bp, Artificial
  probe
  misc_feature (1)..(25): SEQ ID NO: 4127; WAN024FWV; Start 4; Stop 28
gagagtagggtaaatatagttgcca

SEQ ID NO: 373865 - DNA, 25 bp, Artificial
  probe
  misc_feature (1)..(25): SEQ ID NO: 4127; WAN024FWV; Start 2; Stop 26
tggagagtagggtaaatatagttgc

SEQ ID NO: 373866 - DNA, 25 bp, Artificial
  probe
  misc_feature (1)..(25): SEQ ID NO: 4127; WAN024FWV; Start 5; Stop 29
agagtagggtaaatatagttgccat

SEQ ID NO: 373867 - DNA, 25 bp, Artificial
  probe
  misc_feature (1)..(25): SEQ ID NO: 4127; WAN024FWV; Start 8; Stop 32
gtagggtaaatatagttgccattga

SEQ ID NO: 373868 - DNA, 25 bp, Artificial
  probe
  misc_feature (1)..(25): SEQ ID NO: 4127; WAN024FWV; Start 7; Stop 31
agtagggtaaatatagttgccattg

SEQ ID NO: 373869 - DNA, 25 bp, Artificial
  probe
  misc_feature (1)..(25): SEQ ID NO: 4127; WAN024FWV; Start 11; Stop 35
gggtaaatatagttgccattgatcc

SEQ ID NO: 373870 - DNA, 25 bp, Artificial
  probe
  misc_feature (1)..(25): SEQ ID NO: 4127; WAN024FWV; Start 12; Stop 36
ggtaaatatagttgccattgatcca

SEQ ID NO: 373871 - DNA, 25 bp, Artificial
  probe
  misc_feature (1)..(25): SEQ ID NO: 4127; WAN024FWV; Start 6; Stop 30
gagtagggtaaatatagttgccatt

SEQ ID NO: 373872 - DNA, 25 bp, Artificial
  probe
  misc_feature (1)..(25): SEQ ID NO: 4127; WAN024FWV; Start 1; Stop 25
gtggagagtagggtaaatatagttg

SEQ ID NO: 373873 - DNA, 25 bp, Artificial
  probe
  misc_feature (1)..(25): SEQ ID NO: 4127; WAN024FWV; Start 10; Stop 34
agggtaaatatagttgccattgatc

SEQ ID NO: 373874 - DNA, 25 bp, Artificial
  probe
  misc_feature (1)..(25): SEQ ID NO: 4127; WAN024FWV; Start 9; Stop 33
tagggtaaatatagttgccattgat

SEQ ID NO: 373875 - DNA, 25 bp, Artificial
  probe
  misc_feature (1)..(25): SEQ ID NO: 4127; WAN024FWV; Start 13; Stop 37
gtaaatatagttgccattgatccaa

SEQ ID NO: 373876 - DNA, 25 bp, Artificial
  probe
  misc_feature (1)..(25): SEQ ID NO: 4127; WAN024FWV; Start 59; Stop 83
aatacgacagtaatacacagattat

SEQ ID NO: 373877 - DNA, 25 bp, Artificial
  probe
  misc_feature (1)..(25): SEQ ID NO: 4127; WAN024FWV; Start 58; Stop 82
aaatacgacagtaatacacagatta

SEQ ID NO: 373878 - DNA, 25 bp, Artificial
  probe
  misc_feature (1)..(25): SEQ ID NO: 4127; WAN024FWV; Start 61; Stop 85
tacgacagtaatacacagattatat

SEQ ID NO: 373879 - DNA, 25 bp, Artificial
  probe
  misc_feature (1)..(25): SEQ ID NO: 4127; WAN024FWV; Start 60; Stop 84
atacgacagtaatacacagattata

SEQ ID NO: 373880 - DNA, 25 bp, Artificial
  probe
  misc_feature (1)..(25): SEQ ID NO: 4127; WAN024FWV; Start 62; Stop 86
acgacagtaatacacagattatata

SEQ ID NO: 373881 - DNA, 25 bp, Artificial
  probe
  misc_feature (1)..(25): SEQ ID NO: 4127; WAN024FWV; Start 57; Stop 81
aaaatacgacagtaatacacagatt

SEQ ID NO: 373882 - DNA, 25 bp, Artificial
  probe
  misc_feature (1)..(25): SEQ ID NO: 4127; WAN024FWV; Start 14; Stop 38
taaatatagttgccattgatccaac

SEQ ID NO: 373883 - DNA, 25 bp, Artificial
  probe
  misc_feature (1)..(25): SEQ ID NO: 4128; WAN024CCP; Start 164; Stop 188
atacctggaatatcttgatgaacga

SEQ ID NO: 373884 - DNA, 25 bp, Artificial
  probe
  misc_feature (1)..(25): SEQ ID NO: 4128; WAN024CCP; Start 167; Stop 191
cctggaatatcttgatgaacgatga

SEQ ID NO: 373885 - DNA, 25 bp, Artificial
  probe
  misc_feature (1)..(25): SEQ ID NO: 4128; WAN024CCP; Start 165; Stop 189
tacctggaatatcttgatgaacgat

SEQ ID NO: 373886 - DNA, 25 bp, Artificial
  probe
  misc_feature (1)..(25): SEQ ID NO: 4128; WAN024CCP; Start 166; Stop 190
acctggaatatcttgatgaacgatg

SEQ ID NO: 373887 - DNA, 25 bp, Artificial
  probe
  misc_feature (1)..(25): SEQ ID NO: 4128; WAN024CCP; Start 169; Stop 193
tggaatatcttgatgaacgatgatg

SEQ ID NO: 373888 - DNA, 25 bp, Artificial
  probe
  misc_feature (1)..(25): SEQ ID NO: 4128; WAN024CCP; Start 163; Stop 187
catacctggaatatcttgatgaacg

SEQ ID NO: 373889 - DNA, 25 bp, Artificial
  probe
  misc_feature (1)..(25): SEQ ID NO: 4128; WAN024CCP; Start 170; Stop 194
ggaatatcttgatgaacgatgatga

SEQ ID NO: 373890 - DNA, 25 bp, Artificial
  probe
  misc_feature (1)..(25): SEQ ID NO: 4128; WAN024CCP; Start 168; Stop 192
ctggaatatcttgatgaacgatgat

SEQ ID NO: 373891 - DNA, 25 bp, Artificial
  probe
  misc_feature (1)..(25): SEQ ID NO: 4128; WAN024CCP; Start 198; Stop 222
tcggtgtattcatattgagagagac

SEQ ID NO: 373892 - DNA, 25 bp, Artificial
  probe
  misc_feature (1)..(25): SEQ ID NO: 4128; WAN024CCP; Start 197; Stop 221
gtcggtgtattcatattgagagaga

SEQ ID NO: 373893 - DNA, 25 bp, Artificial
  probe
  misc_feature (1)..(25): SEQ ID NO: 4128; WAN024CCP; Start 196; Stop 220
agtcggtgtattcatattgagagag

SEQ ID NO: 373894 - DNA, 25 bp, Artificial
  probe
  misc_feature (1)..(25): SEQ ID NO: 4128; WAN024CCP; Start 175; Stop 199
atcttgatgaacgatgatgatagtc

SEQ ID NO: 373895 - DNA, 25 bp, Artificial
  probe
  misc_feature (1)..(25): SEQ ID NO: 4128; WAN024CCP; Start 230; Stop 254
ccattgagttcggttacctgaatat

SEQ ID NO: 373896 - DNA, 25 bp, Artificial
  probe
  misc_feature (1)..(25): SEQ ID NO: 4128; WAN024CCP; Start 157; Stop 181
ggcaatcatacctggaatatcttga

SEQ ID NO: 373897 - DNA, 25 bp, Artificial
  probe
  misc_feature (1)..(25): SEQ ID NO: 4128; WAN024CCP; Start 203; Stop 227
gtattcatattgagagagacggcaa

SEQ ID NO: 373898 - DNA, 25 bp, Artificial
  probe
  misc_feature (1)..(25): SEQ ID NO: 4128; WAN024CCP; Start 200; Stop 224
ggtgtattcatattgagagagacgg

SEQ ID NO: 373899 - DNA, 25 bp, Artificial
  probe
  misc_feature (1)..(25): SEQ ID NO: 4128; WAN024CCP; Start 353; Stop 377
tgaatggtccagacaatcttgatac

SEQ ID NO: 373900 - DNA, 25 bp, Artificial
  probe
  misc_feature (1)..(25): SEQ ID NO: 4128; WAN024CCP; Start 199; Stop 223
cggtgtattcatattgagagagacg

SEQ ID NO: 373901 - DNA, 25 bp, Artificial
  probe
  misc_feature (1)..(25): SEQ ID NO: 4128; WAN024CCP; Start 201; Stop 225
gtgtattcatattgagagagacggc

SEQ ID NO: 373902 - DNA, 25 bp, Artificial
  probe
  misc_feature (1)..(25): SEQ ID NO: 4128; WAN024CCP; Start 202; Stop 226
tgtattcatattgagagagacggca

SEQ ID NO: 373903 - DNA, 25 bp, Artificial
  probe
  misc_feature (1)..(25): SEQ ID NO: 4128; WAN024CCP; Start 195; Stop 219
tagtcggtgtattcatattgagaga

SEQ ID NO: 373904 - DNA, 25 bp, Artificial
  probe
  misc_feature (1)..(25): SEQ ID NO: 4128; WAN024CCP; Start 352; Stop 376
ctgaatggtccagacaatcttgata

SEQ ID NO: 373905 - DNA, 25 bp, Artificial
  probe
  misc_feature (1)..(25): SEQ ID NO: 4128; WAN024CCP; Start 192; Stop 216
tgatagtcggtgtattcatattgag

SEQ ID NO: 373906 - DNA, 25 bp, Artificial
  probe
  misc_feature (1)..(25): SEQ ID NO: 4128; WAN024CCP; Start 231; Stop 255
cattgagttcggttacctgaatatt

SEQ ID NO: 373907 - DNA, 25 bp, Artificial
  probe
  misc_feature (1)..(25): SEQ ID NO: 4128; WAN024CCP; Start 54; Stop 78
tgtcaacttcgataatcataatggc

SEQ ID NO: 373908 - DNA, 25 bp, Artificial
  probe
  misc_feature (1)..(25): SEQ ID NO: 4128; WAN024CCP; Start 55; Stop 79
gtcaacttcgataatcataatggct

SEQ ID NO: 373909 - DNA, 25 bp, Artificial
  probe
  misc_feature (1)..(25): SEQ ID NO: 4128; WAN024CCP; Start 194; Stop 218
atagtcggtgtattcatattgagag

SEQ ID NO: 373910 - DNA, 25 bp, Artificial
  probe
  misc_feature (1)..(25): SEQ ID NO: 4128; WAN024CCP; Start 193; Stop 217
gatagtcggtgtattcatattgaga

SEQ ID NO: 373911 - DNA, 25 bp, Artificial
  probe
  misc_feature (1)..(25): SEQ ID NO: 4128; WAN024CCP; Start 354; Stop 378
gaatggtccagacaatcttgatacc

SEQ ID NO: 373912 - DNA, 25 bp, Artificial
  probe
  misc_feature (1)..(25): SEQ ID NO: 4128; WAN024CCP; Start 171; Stop 195
gaatatcttgatgaacgatgatgat

SEQ ID NO: 373913 - DNA, 25 bp, Artificial
  probe
  misc_feature (1)..(25): SEQ ID NO: 4128; WAN024CCP; Start 56; Stop 80
tcaacttcgataatcataatggctt

SEQ ID NO: 373914 - DNA, 25 bp, Artificial
  probe
  misc_feature (1)..(25): SEQ ID NO: 4128; WAN024CCP; Start 117; Stop 141
cgatattgataccatagcgggaaag

SEQ ID NO: 373915 - DNA, 25 bp, Artificial
  probe
  misc_feature (1)..(25): SEQ ID NO: 4128; WAN024CCP; Start 229; Stop 253
accattgagttcggttacctgaata

SEQ ID NO: 373916 - DNA, 25 bp, Artificial
  probe
  misc_feature (1)..(25): SEQ ID NO: 4129; WAN024G2Z; Start 1294; Stop 1318
cgagatggtcaagtagaattagagg

SEQ ID NO: 373917 - DNA, 25 bp, Artificial
  probe
  misc_feature (1)..(25): SEQ ID NO: 4129; WAN024G2Z; Start 1291; Stop 1315
atgcgagatggtcaagtagaattag

SEQ ID NO: 373918 - DNA, 25 bp, Artificial
  probe
  misc_feature (1)..(25): SEQ ID NO: 4129; WAN024G2Z; Start 1290; Stop 1314
gatgcgagatggtcaagtagaatta

SEQ ID NO: 373919 - DNA, 25 bp, Artificial
  probe
  misc_feature (1)..(25): SEQ ID NO: 4129; WAN024G2Z; Start 1295; Stop 1319
gagatggtcaagtagaattagaggt

SEQ ID NO: 373920 - DNA, 25 bp, Artificial
  probe
  misc_feature (1)..(25): SEQ ID NO: 4129; WAN024G2Z; Start 1293; Stop 1317
gcgagatggtcaagtagaattagag

SEQ ID NO: 373921 - DNA, 25 bp, Artificial
  probe
  misc_feature (1)..(25): SEQ ID NO: 4129; WAN024G2Z; Start 1296; Stop 1320
agatggtcaagtagaattagaggtt

SEQ ID NO: 373922 - DNA, 25 bp, Artificial
  probe
  misc_feature (1)..(25): SEQ ID NO: 4129; WAN024G2Z; Start 1292; Stop 1316
tgcgagatggtcaagtagaattaga

SEQ ID NO: 373923 - DNA, 25 bp, Artificial
  probe
  misc_feature (1)..(25): SEQ ID NO: 4129; WAN024G2Z; Start 1019; Stop 1043
ttcaagcaagaactcatcaattagt

SEQ ID NO: 373924 - DNA, 25 bp, Artificial
  probe
  misc_feature (1)..(25): SEQ ID NO: 4129; WAN024G2Z; Start 216; Stop 240
ggaagaaggaatgaagatcaatgtg

SEQ ID NO: 373925 - DNA, 25 bp, Artificial
  probe
  misc_feature (1)..(25): SEQ ID NO: 4129; WAN024G2Z; Start 215; Stop 239
tggaagaaggaatgaagatcaatgt

SEQ ID NO: 373926 - DNA, 25 bp, Artificial
  probe
  misc_feature (1)..(25): SEQ ID NO: 4129; WAN024G2Z; Start 214; Stop 238
ctggaagaaggaatgaagatcaatg

SEQ ID NO: 373927 - DNA, 25 bp, Artificial
  probe
  misc_feature (1)..(25): SEQ ID NO: 4129; WAN024G2Z; Start 217; Stop 241
gaagaaggaatgaagatcaatgtga

SEQ ID NO: 373928 - DNA, 25 bp, Artificial
  probe
  misc_feature (1)..(25): SEQ ID NO: 4129; WAN024G2Z; Start 1020; Stop 1044
tcaagcaagaactcatcaattagta

SEQ ID NO: 373929 - DNA, 25 bp, Artificial
  probe
  misc_feature (1)..(25): SEQ ID NO: 4129; WAN024G2Z; Start 440; Stop 464
gtggagccgttattcgagatattat

SEQ ID NO: 373930 - DNA, 25 bp, Artificial
  probe
  misc_feature (1)..(25): SEQ ID NO: 4129; WAN024G2Z; Start 1297; Stop 1321
gatggtcaagtagaattagaggtta

SEQ ID NO: 373931 - DNA, 25 bp, Artificial
  probe
  misc_feature (1)..(25): SEQ ID NO: 4129; WAN024G2Z; Start 1023; Stop 1047
agcaagaactcatcaattagtacaa

SEQ ID NO: 373932 - DNA, 25 bp, Artificial
  probe
  misc_feature (1)..(25): SEQ ID NO: 4129; WAN024G2Z; Start 1022; Stop 1046
aagcaagaactcatcaattagtaca

SEQ ID NO: 373933 - DNA, 25 bp, Artificial
  probe
  misc_feature (1)..(25): SEQ ID NO: 4129; WAN024G2Z; Start 442; Stop 466
ggagccgttattcgagatattatca

SEQ ID NO: 373934 - DNA, 25 bp, Artificial
  probe
  misc_feature (1)..(25): SEQ ID NO: 4129; WAN024G2Z; Start 441; Stop 465
tggagccgttattcgagatattatc

SEQ ID NO: 373935 - DNA, 25 bp, Artificial
  probe
  misc_feature (1)..(25): SEQ ID NO: 4129; WAN024G2Z; Start 213; Stop 237
cctggaagaaggaatgaagatcaat

SEQ ID NO: 373936 - DNA, 25 bp, Artificial
  probe
  misc_feature (1)..(25): SEQ ID NO: 4129; WAN024G2Z; Start 1289; Stop 1313
tgatgcgagatggtcaagtagaatt

SEQ ID NO: 373937 - DNA, 25 bp, Artificial
  probe
  misc_feature (1)..(25): SEQ ID NO: 4129; WAN024G2Z; Start 443; Stop 467
gagccgttattcgagatattatcac

SEQ ID NO: 373938 - DNA, 25 bp, Artificial
  probe
  misc_feature (1)..(25): SEQ ID NO: 4129; WAN024G2Z; Start 1021; Stop 1045
caagcaagaactcatcaattagtac

SEQ ID NO: 373939 - DNA, 25 bp, Artificial
  probe
  misc_feature (1)..(25): SEQ ID NO: 4129; WAN024G2Z; Start 209; Stop 233
ttgacctggaagaaggaatgaagat

SEQ ID NO: 373940 - DNA, 25 bp, Artificial
  probe
  misc_feature (1)..(25): SEQ ID NO: 4129; WAN024G2Z; Start 439; Stop 463
agtggagccgttattcgagatatta

SEQ ID NO: 373941 - DNA, 25 bp, Artificial
  probe
  misc_feature (1)..(25): SEQ ID NO: 4129; WAN024G2Z; Start 438; Stop 462
tagtggagccgttattcgagatatt

SEQ ID NO: 373942 - DNA, 25 bp, Artificial
  probe
  misc_feature (1)..(25): SEQ ID NO: 4129; WAN024G2Z; Start 673; Stop 697
gaatctcgtttgccagttatctcta

SEQ ID NO: 373943 - DNA, 25 bp, Artificial
  probe
  misc_feature (1)..(25): SEQ ID NO: 4129; WAN024G2Z; Start 584; Stop 608
atttggatttgctcattattggtcg

SEQ ID NO: 373944 - DNA, 25 bp, Artificial
  probe
  misc_feature (1)..(25): SEQ ID NO: 4129; WAN024G2Z; Start 73; Stop 97
tacttggaacgggtctatttaactg

SEQ ID NO: 373945 - DNA, 25 bp, Artificial
  probe
  misc_feature (1)..(25): SEQ ID NO: 4129; WAN024G2Z; Start 611; Stop 635
gaggtggttctattgaggatctctg

SEQ ID NO: 373946 - DNA, 25 bp, Artificial
  probe
  misc_feature (1)..(25): SEQ ID NO: 4129; WAN024G2Z; Start 72; Stop 96
atacttggaacgggtctatttaact

SEQ ID NO: 373947 - DNA, 25 bp, Artificial
  probe
  misc_feature (1)..(25): SEQ ID NO: 4129; WAN024G2Z; Start 71; Stop 95
catacttggaacgggtctatttaac

SEQ ID NO: 373948 - DNA, 25 bp, Artificial
  probe
  misc_feature (1)..(25): SEQ ID NO: 4129; WAN024G2Z; Start 990; Stop 1014
aactcggatttctgataacaaacaa

SEQ ID NO: 373949 - DNA, 25 bp, Artificial
  probe
  misc_feature (1)..(25): SEQ ID NO: 4130; WAN024CT8; Start 102; Stop 126
ctcagaatatgctagacgaactact

SEQ ID NO: 373950 - DNA, 25 bp, Artificial
  probe
  misc_feature (1)..(25): SEQ ID NO: 4130; WAN024CT8; Start 114; Stop 138
tagacgaactactactagatcctgg

SEQ ID NO: 373951 - DNA, 25 bp, Artificial
  probe
  misc_feature (1)..(25): SEQ ID NO: 4130; WAN024CT8; Start 116; Stop 140
gacgaactactactagatcctggta

SEQ ID NO: 373952 - DNA, 25 bp, Artificial
  probe
  misc_feature (1)..(25): SEQ ID NO: 4130; WAN024CT8; Start 117; Stop 141
acgaactactactagatcctggtat

SEQ ID NO: 373953 - DNA, 25 bp, Artificial
  probe
  misc_feature (1)..(25): SEQ ID NO: 4130; WAN024CT8; Start 101; Stop 125
tctcagaatatgctagacgaactac

SEQ ID NO: 373954 - DNA, 25 bp, Artificial
  probe
  misc_feature (1)..(25): SEQ ID NO: 4130; WAN024CT8; Start 118; Stop 142
cgaactactactagatcctggtatg

SEQ ID NO: 373955 - DNA, 25 bp, Artificial
  probe
  misc_feature (1)..(25): SEQ ID NO: 4130; WAN024CT8; Start 104; Stop 128
cagaatatgctagacgaactactac

SEQ ID NO: 373956 - DNA, 25 bp, Artificial
  probe
  misc_feature (1)..(25): SEQ ID NO: 4130; WAN024CT8; Start 105; Stop 129
agaatatgctagacgaactactact

SEQ ID NO: 373957 - DNA, 25 bp, Artificial
  probe
  misc_feature (1)..(25): SEQ ID NO: 4130; WAN024CT8; Start 103; Stop 127
tcagaatatgctagacgaactacta

SEQ ID NO: 373958 - DNA, 25 bp, Artificial
  probe
  misc_feature (1)..(25): SEQ ID NO: 4130; WAN024CT8; Start 100; Stop 124
ttctcagaatatgctagacgaacta

SEQ ID NO: 373959 - DNA, 25 bp, Artificial
  probe
  misc_feature (1)..(25): SEQ ID NO: 4130; WAN024CT8; Start 115; Stop 139
agacgaactactactagatcctggt

SEQ ID NO: 373960 - DNA, 25 bp, Artificial
  probe
  misc_feature (1)..(25): SEQ ID NO: 4130; WAN024CT8; Start 119; Stop 143
gaactactactagatcctggtatga

SEQ ID NO: 373961 - DNA, 25 bp, Artificial
  probe
  misc_feature (1)..(25): SEQ ID NO: 4130; WAN024CT8; Start 120; Stop 144
aactactactagatcctggtatgaa

SEQ ID NO: 373962 - DNA, 25 bp, Artificial
  probe
  misc_feature (1)..(25): SEQ ID NO: 4130; WAN024CT8; Start 290; Stop 314
gaagagttaatagtagaagtggaga

SEQ ID NO: 373963 - DNA, 25 bp, Artificial
  probe
  misc_feature (1)..(25): SEQ ID NO: 4130; WAN024CT8; Start 289; Stop 313
agaagagttaatagtagaagtggag

SEQ ID NO: 373964 - DNA, 25 bp, Artificial
  probe
  misc_feature (1)..(25): SEQ ID NO: 4130; WAN024CT8; Start 121; Stop 145
actactactagatcctggtatgaat

SEQ ID NO: 373965 - DNA, 25 bp, Artificial
  probe
  misc_feature (1)..(25): SEQ ID NO: 4130; WAN024CT8; Start 112; Stop 136
gctagacgaactactactagatcct

SEQ ID NO: 373966 - DNA, 25 bp, Artificial
  probe
  misc_feature (1)..(25): SEQ ID NO: 4130; WAN024CT8; Start 111; Stop 135
tgctagacgaactactactagatcc

SEQ ID NO: 373967 - DNA, 25 bp, Artificial
  probe
  misc_feature (1)..(25): SEQ ID NO: 4130; WAN024CT8; Start 84; Stop 108
aagtaactgcttatcattctcagaa

SEQ ID NO: 373968 - DNA, 25 bp, Artificial
  probe
  misc_feature (1)..(25): SEQ ID NO: 4130; WAN024CT8; Start 113; Stop 137
ctagacgaactactactagatcctg

SEQ ID NO: 373969 - DNA, 25 bp, Artificial
  probe
  misc_feature (1)..(25): SEQ ID NO: 4130; WAN024CT8; Start 106; Stop 130
gaatatgctagacgaactactacta

SEQ ID NO: 373970 - DNA, 25 bp, Artificial
  probe
  misc_feature (1)..(25): SEQ ID NO: 4130; WAN024CT8; Start 110; Stop 134
atgctagacgaactactactagatc

SEQ ID NO: 373971 - DNA, 25 bp, Artificial
  probe
  misc_feature (1)..(25): SEQ ID NO: 4130; WAN024CT8; Start 99; Stop 123
attctcagaatatgctagacgaact

SEQ ID NO: 373972 - DNA, 25 bp, Artificial
  probe
  misc_feature (1)..(25): SEQ ID NO: 4130; WAN024CT8; Start 98; Stop 122
cattctcagaatatgctagacgaac

SEQ ID NO: 373973 - DNA, 25 bp, Artificial
  probe
  misc_feature (1)..(25): SEQ ID NO: 4130; WAN024CT8; Start 97; Stop 121
tcattctcagaatatgctagacgaa

SEQ ID NO: 373974 - DNA, 25 bp, Artificial
  probe
  misc_feature (1)..(25): SEQ ID NO: 4130; WAN024CT8; Start 96; Stop 120
atcattctcagaatatgctagacga

SEQ ID NO: 373975 - DNA, 25 bp, Artificial
  probe
  misc_feature (1)..(25): SEQ ID NO: 4130; WAN024CT8; Start 89; Stop 113
actgcttatcattctcagaatatgc

SEQ ID NO: 373976 - DNA, 25 bp, Artificial
  probe
  misc_feature (1)..(25): SEQ ID NO: 4130; WAN024CT8; Start 291; Stop 315
aagagttaatagtagaagtggagaa

SEQ ID NO: 373977 - DNA, 25 bp, Artificial
  probe
  misc_feature (1)..(25): SEQ ID NO: 4130; WAN024CT8; Start 90; Stop 114
ctgcttatcattctcagaatatgct

SEQ ID NO: 373978 - DNA, 25 bp, Artificial
  probe
  misc_feature (1)..(25): SEQ ID NO: 4130; WAN024CT8; Start 109; Stop 133
tatgctagacgaactactactagat

SEQ ID NO: 373979 - DNA, 25 bp, Artificial
  probe
  misc_feature (1)..(25): SEQ ID NO: 4130; WAN024CT8; Start 108; Stop 132
atatgctagacgaactactactaga

SEQ ID NO: 373980 - DNA, 25 bp, Artificial
  probe
  misc_feature (1)..(25): SEQ ID NO: 4130; WAN024CT8; Start 220; Stop 244
aatagccagaagcataaattattcg

SEQ ID NO: 373981 - DNA, 25 bp, Artificial
  probe
  misc_feature (1)..(25): SEQ ID NO: 4130; WAN024CT8; Start 122; Stop 146
ctactactagatcctggtatgaatt

SEQ ID NO: 373982 - DNA, 25 bp, Artificial
  probe
  misc_feature (1)..(25): SEQ ID NO: 4131; WAN024CR4; Start 271; Stop 295
actcaccagatgaagcgaagttata

SEQ ID NO: 373983 - DNA, 25 bp, Artificial
  probe
  misc_feature (1)..(25): SEQ ID NO: 4131; WAN024CR4; Start 272; Stop 296
ctcaccagatgaagcgaagttataa

SEQ ID NO: 373984 - DNA, 25 bp, Artificial
  probe
  misc_feature (1)..(25): SEQ ID NO: 4131; WAN024CR4; Start 270; Stop 294
cactcaccagatgaagcgaagttat

SEQ ID NO: 373985 - DNA, 25 bp, Artificial
  probe
  misc_feature (1)..(25): SEQ ID NO: 4131; WAN024CR4; Start 72; Stop 96
tctatcactctccagtaggtttctt

SEQ ID NO: 373986 - DNA, 25 bp, Artificial
  probe
  misc_feature (1)..(25): SEQ ID NO: 4131; WAN024CR4; Start 71; Stop 95
atctatcactctccagtaggtttct

SEQ ID NO: 373987 - DNA, 25 bp, Artificial
  probe
  misc_feature (1)..(25): SEQ ID NO: 4131; WAN024CR4; Start 70; Stop 94
catctatcactctccagtaggtttc

SEQ ID NO: 373988 - DNA, 25 bp, Artificial
  probe
  misc_feature (1)..(25): SEQ ID NO: 4131; WAN024CR4; Start 73; Stop 97
ctatcactctccagtaggtttcttt

SEQ ID NO: 373989 - DNA, 25 bp, Artificial
  probe
  misc_feature (1)..(25): SEQ ID NO: 4131; WAN024CR4; Start 69; Stop 93
ccatctatcactctccagtaggttt

SEQ ID NO: 373990 - DNA, 25 bp, Artificial
  probe
  misc_feature (1)..(25): SEQ ID NO: 4131; WAN024CR4; Start 65; Stop 89
cttcccatctatcactctccagtag

SEQ ID NO: 373991 - DNA, 25 bp, Artificial
  probe
  misc_feature (1)..(25): SEQ ID NO: 4131; WAN024CR4; Start 11; Stop 35
tatatattgccagccgacaaccatc

SEQ ID NO: 373992 - DNA, 25 bp, Artificial
  probe
  misc_feature (1)..(25): SEQ ID NO: 4131; WAN024CR4; Start 62; Stop 86
gtacttcccatctatcactctccag

SEQ ID NO: 373993 - DNA, 25 bp, Artificial
  probe
  misc_feature (1)..(25): SEQ ID NO: 4131; WAN024CR4; Start 274; Stop 298
caccagatgaagcgaagttataaac

SEQ ID NO: 373994 - DNA, 25 bp, Artificial
  probe
  misc_feature (1)..(25): SEQ ID NO: 4131; WAN024CR4; Start 64; Stop 88
acttcccatctatcactctccagta

SEQ ID NO: 373995 - DNA, 25 bp, Artificial
  probe
  misc_feature (1)..(25): SEQ ID NO: 4131; WAN024CR4; Start 63; Stop 87
tacttcccatctatcactctccagt

SEQ ID NO: 373996 - DNA, 25 bp, Artificial
  probe
  misc_feature (1)..(25): SEQ ID NO: 4131; WAN024CR4; Start 10; Stop 34
gtatatattgccagccgacaaccat

SEQ ID NO: 373997 - DNA, 25 bp, Artificial
  probe
  misc_feature (1)..(25): SEQ ID NO: 4131; WAN024CR4; Start 273; Stop 297
tcaccagatgaagcgaagttataaa

SEQ ID NO: 373998 - DNA, 25 bp, Artificial
  probe
  misc_feature (1)..(25): SEQ ID NO: 4131; WAN024CR4; Start 66; Stop 90
ttcccatctatcactctccagtagg

SEQ ID NO: 373999 - DNA, 25 bp, Artificial
  probe
  misc_feature (1)..(25): SEQ ID NO: 4131; WAN024CR4; Start 68; Stop 92
cccatctatcactctccagtaggtt

SEQ ID NO: 374000 - DNA, 25 bp, Artificial
  probe
  misc_feature (1)..(25): SEQ ID NO: 4131; WAN024CR4; Start 7; Stop 31
caggtatatattgccagccgacaac

SEQ ID NO: 374001 - DNA, 25 bp, Artificial
  probe
  misc_feature (1)..(25): SEQ ID NO: 4131; WAN024CR4; Start 140; Stop 164
aaactgccatccttcagaatcatct

SEQ ID NO: 374002 - DNA, 25 bp, Artificial
  probe
  misc_feature (1)..(25): SEQ ID NO: 4131; WAN024CR4; Start 139; Stop 163
caaactgccatccttcagaatcatc

SEQ ID NO: 374003 - DNA, 25 bp, Artificial
  probe
  misc_feature (1)..(25): SEQ ID NO: 4131; WAN024CR4; Start 138; Stop 162
acaaactgccatccttcagaatcat

SEQ ID NO: 374004 - DNA, 25 bp, Artificial
  probe
  misc_feature (1)..(25): SEQ ID NO: 4131; WAN024CR4; Start 67; Stop 91
tcccatctatcactctccagtaggt

SEQ ID NO: 374005 - DNA, 25 bp, Artificial
  probe
  misc_feature (1)..(25): SEQ ID NO: 4131; WAN024CR4; Start 12; Stop 36
atatattgccagccgacaaccatct

SEQ ID NO: 374006 - DNA, 25 bp, Artificial
  probe
  misc_feature (1)..(25): SEQ ID NO: 4131; WAN024CR4; Start 77; Stop 101
cactctccagtaggtttcttttaga

SEQ ID NO: 374007 - DNA, 25 bp, Artificial
  probe
  misc_feature (1)..(25): SEQ ID NO: 4131; WAN024CR4; Start 76; Stop 100
tcactctccagtaggtttcttttag

SEQ ID NO: 374008 - DNA, 25 bp, Artificial
  probe
  misc_feature (1)..(25): SEQ ID NO: 4131; WAN024CR4; Start 75; Stop 99
atcactctccagtaggtttctttta

SEQ ID NO: 374009 - DNA, 25 bp, Artificial
  probe
  misc_feature (1)..(25): SEQ ID NO: 4131; WAN024CR4; Start 74; Stop 98
tatcactctccagtaggtttctttt

SEQ ID NO: 374010 - DNA, 25 bp, Artificial
  probe
  misc_feature (1)..(25): SEQ ID NO: 4131; WAN024CR4; Start 275; Stop 299
accagatgaagcgaagttataaact

SEQ ID NO: 374011 - DNA, 25 bp, Artificial
  probe
  misc_feature (1)..(25): SEQ ID NO: 4131; WAN024CR4; Start 137; Stop 161
gacaaactgccatccttcagaatca

SEQ ID NO: 374012 - DNA, 25 bp, Artificial
  probe
  misc_feature (1)..(25): SEQ ID NO: 4131; WAN024CR4; Start 269; Stop 293
ccactcaccagatgaagcgaagtta

SEQ ID NO: 374013 - DNA, 25 bp, Artificial
  probe
  misc_feature (1)..(25): SEQ ID NO: 4131; WAN024CR4; Start 60; Stop 84
tagtacttcccatctatcactctcc

SEQ ID NO: 374014 - DNA, 25 bp, Artificial
  probe
  misc_feature (1)..(25): SEQ ID NO: 4131; WAN024CR4; Start 13; Stop 37
tatattgccagccgacaaccatctc

SEQ ID NO: 374015 - DNA, 25 bp, Artificial
  probe
  misc_feature (1)..(25): SEQ ID NO: 4132; WAN024GIZ; Start 9; Stop 33
gcttgatttgaacgtttatcctctt

SEQ ID NO: 374016 - DNA, 25 bp, Artificial
  probe
  misc_feature (1)..(25): SEQ ID NO: 4132; WAN024GIZ; Start 11; Stop 35
ttgatttgaacgtttatcctcttgc

SEQ ID NO: 374017 - DNA, 25 bp, Artificial
  probe
  misc_feature (1)..(25): SEQ ID NO: 4132; WAN024GIZ; Start 13; Stop 37
gatttgaacgtttatcctcttgctg

SEQ ID NO: 374018 - DNA, 25 bp, Artificial
  probe
  misc_feature (1)..(25): SEQ ID NO: 4132; WAN024GIZ; Start 14; Stop 38
atttgaacgtttatcctcttgctga

SEQ ID NO: 374019 - DNA, 25 bp, Artificial
  probe
  misc_feature (1)..(25): SEQ ID NO: 4132; WAN024GIZ; Start 12; Stop 36
tgatttgaacgtttatcctcttgct

SEQ ID NO: 374020 - DNA, 25 bp, Artificial
  probe
  misc_feature (1)..(25): SEQ ID NO: 4132; WAN024GIZ; Start 10; Stop 34
cttgatttgaacgtttatcctcttg

SEQ ID NO: 374021 - DNA, 25 bp, Artificial
  probe
  misc_feature (1)..(25): SEQ ID NO: 4132; WAN024GIZ; Start 15; Stop 39
tttgaacgtttatcctcttgctgac

SEQ ID NO: 374022 - DNA, 25 bp, Artificial
  probe
  misc_feature (1)..(25): SEQ ID NO: 4132; WAN024GIZ; Start 8; Stop 32
cgcttgatttgaacgtttatcctct

SEQ ID NO: 374023 - DNA, 25 bp, Artificial
  probe
  misc_feature (1)..(25): SEQ ID NO: 4132; WAN024GIZ; Start 7; Stop 31
ccgcttgatttgaacgtttatcctc

SEQ ID NO: 374024 - DNA, 25 bp, Artificial
  probe
  misc_feature (1)..(25): SEQ ID NO: 4132; WAN024GIZ; Start 4; Stop 28
gagccgcttgatttgaacgtttatc

SEQ ID NO: 374025 - DNA, 25 bp, Artificial
  probe
  misc_feature (1)..(25): SEQ ID NO: 4132; WAN024GIZ; Start 3; Stop 27
ggagccgcttgatttgaacgtttat

SEQ ID NO: 374026 - DNA, 25 bp, Artificial
  probe
  misc_feature (1)..(25): SEQ ID NO: 4132; WAN024GIZ; Start 6; Stop 30
gccgcttgatttgaacgtttatcct

SEQ ID NO: 374027 - DNA, 25 bp, Artificial
  probe
  misc_feature (1)..(25): SEQ ID NO: 4132; WAN024GIZ; Start 5; Stop 29
agccgcttgatttgaacgtttatcc

SEQ ID NO: 374028 - DNA, 25 bp, Artificial
  probe
  misc_feature (1)..(25): SEQ ID NO: 4132; WAN024GIZ; Start 16; Stop 40
ttgaacgtttatcctcttgctgacg

SEQ ID NO: 374029 - DNA, 25 bp, Artificial
  probe
  misc_feature (1)..(25): SEQ ID NO: 4132; WAN024GIZ; Start 17; Stop 41
tgaacgtttatcctcttgctgacgg

SEQ ID NO: 374030 - DNA, 25 bp, Artificial
  probe
  misc_feature (1)..(25): SEQ ID NO: 4133; WAN024DC7; Start 70; Stop 94
gctcttgctaaggaagtaacggaag

SEQ ID NO: 374031 - DNA, 25 bp, Artificial
  probe
  misc_feature (1)..(25): SEQ ID NO: 4133; WAN024DC7; Start 4; Stop 28
gaggaagctattatgccatttgtac

SEQ ID NO: 374032 - DNA, 25 bp, Artificial
  probe
  misc_feature (1)..(25): SEQ ID NO: 4133; WAN024DC7; Start 3; Stop 27
ggaggaagctattatgccatttgta

SEQ ID NO: 374033 - DNA, 25 bp, Artificial
  probe
  misc_feature (1)..(25): SEQ ID NO: 4133; WAN024DC7; Start 5; Stop 29
aggaagctattatgccatttgtacg

SEQ ID NO: 374034 - DNA, 25 bp, Artificial
  probe
  misc_feature (1)..(25): SEQ ID NO: 4133; WAN024DC7; Start 6; Stop 30
ggaagctattatgccatttgtacgc

SEQ ID NO: 374035 - DNA, 25 bp, Artificial
  probe
  misc_feature (1)..(25): SEQ ID NO: 4133; WAN024DC7; Start 143; Stop 167
tcaacgacatgccagaaggaactta

SEQ ID NO: 374036 - DNA, 25 bp, Artificial
  probe
  misc_feature (1)..(25): SEQ ID NO: 4133; WAN024DC7; Start 71; Stop 95
ctcttgctaaggaagtaacggaagc

SEQ ID NO: 374037 - DNA, 25 bp, Artificial
  probe
  misc_feature (1)..(25): SEQ ID NO: 4133; WAN024DC7; Start 64; Stop 88
aagaaagctcttgctaaggaagtaa

SEQ ID NO: 374038 - DNA, 25 bp, Artificial
  probe
  misc_feature (1)..(25): SEQ ID NO: 4133; WAN024DC7; Start 63; Stop 87
aaagaaagctcttgctaaggaagta

SEQ ID NO: 374039 - DNA, 25 bp, Artificial
  probe
  misc_feature (1)..(25): SEQ ID NO: 4133; WAN024DC7; Start 65; Stop 89
agaaagctcttgctaaggaagtaac

SEQ ID NO: 374040 - DNA, 25 bp, Artificial
  probe
  misc_feature (1)..(25): SEQ ID NO: 4133; WAN024DC7; Start 1; Stop 25
gtggaggaagctattatgccatttg

SEQ ID NO: 374041 - DNA, 25 bp, Artificial
  probe
  misc_feature (1)..(25): SEQ ID NO: 4133; WAN024DC7; Start 2; Stop 26
tggaggaagctattatgccatttgt

SEQ ID NO: 374042 - DNA, 25 bp, Artificial
  probe
  misc_feature (1)..(25): SEQ ID NO: 4133; WAN024DC7; Start 139; Stop 163
atcatcaacgacatgccagaaggaa

SEQ ID NO: 374043 - DNA, 25 bp, Artificial
  probe
  misc_feature (1)..(25): SEQ ID NO: 4133; WAN024DC7; Start 136; Stop 160
gtcatcatcaacgacatgccagaag

SEQ ID NO: 374044 - DNA, 25 bp, Artificial
  probe
  misc_feature (1)..(25): SEQ ID NO: 4133; WAN024DC7; Start 23; Stop 47
ttgtacgcatcgatttatttgaagg

SEQ ID NO: 374045 - DNA, 25 bp, Artificial
  probe
  misc_feature (1)..(25): SEQ ID NO: 4133; WAN024DC7; Start 19; Stop 43
ccatttgtacgcatcgatttatttg

SEQ ID NO: 374046 - DNA, 25 bp, Artificial
  probe
  misc_feature (1)..(25): SEQ ID NO: 4133; WAN024DC7; Start 25; Stop 49
gtacgcatcgatttatttgaaggac

SEQ ID NO: 374047 - DNA, 25 bp, Artificial
  probe
  misc_feature (1)..(25): SEQ ID NO: 4133; WAN024DC7; Start 142; Stop 166
atcaacgacatgccagaaggaactt

SEQ ID NO: 374048 - DNA, 25 bp, Artificial
  probe
  misc_feature (1)..(25): SEQ ID NO: 4133; WAN024DC7; Start 66; Stop 90
gaaagctcttgctaaggaagtaacg

SEQ ID NO: 374049 - DNA, 25 bp, Artificial
  probe
  misc_feature (1)..(25): SEQ ID NO: 4133; WAN024DC7; Start 24; Stop 48
tgtacgcatcgatttatttgaagga

SEQ ID NO: 374050 - DNA, 25 bp, Artificial
  probe
  misc_feature (1)..(25): SEQ ID NO: 4133; WAN024DC7; Start 20; Stop 44
catttgtacgcatcgatttatttga

SEQ ID NO: 374051 - DNA, 25 bp, Artificial
  probe
  misc_feature (1)..(25): SEQ ID NO: 4133; WAN024DC7; Start 18; Stop 42
gccatttgtacgcatcgatttattt

SEQ ID NO: 374052 - DNA, 25 bp, Artificial
  probe
  misc_feature (1)..(25): SEQ ID NO: 4133; WAN024DC7; Start 22; Stop 46
tttgtacgcatcgatttatttgaag

SEQ ID NO: 374053 - DNA, 25 bp, Artificial
  probe
  misc_feature (1)..(25): SEQ ID NO: 4133; WAN024DC7; Start 69; Stop 93
agctcttgctaaggaagtaacggaa

SEQ ID NO: 374054 - DNA, 25 bp, Artificial
  probe
  misc_feature (1)..(25): SEQ ID NO: 4133; WAN024DC7; Start 68; Stop 92
aagctcttgctaaggaagtaacgga

SEQ ID NO: 374055 - DNA, 25 bp, Artificial
  probe
  misc_feature (1)..(25): SEQ ID NO: 4133; WAN024DC7; Start 26; Stop 50
tacgcatcgatttatttgaaggacg

SEQ ID NO: 374056 - DNA, 25 bp, Artificial
  probe
  misc_feature (1)..(25): SEQ ID NO: 4133; WAN024DC7; Start 21; Stop 45
atttgtacgcatcgatttatttgaa

SEQ ID NO: 374057 - DNA, 25 bp, Artificial
  probe
  misc_feature (1)..(25): SEQ ID NO: 4133; WAN024DC7; Start 7; Stop 31
gaagctattatgccatttgtacgca

SEQ ID NO: 374058 - DNA, 25 bp, Artificial
  probe
  misc_feature (1)..(25): SEQ ID NO: 4133; WAN024DC7; Start 67; Stop 91
aaagctcttgctaaggaagtaacgg

SEQ ID NO: 374059 - DNA, 25 bp, Artificial
  probe
  misc_feature (1)..(25): SEQ ID NO: 4133; WAN024DC7; Start 34; Stop 58
gatttatttgaaggacgcacgctcg

SEQ ID NO: 374060 - DNA, 25 bp, Artificial
  probe
  misc_feature (1)..(25): SEQ ID NO: 4133; WAN024DC7; Start 33; Stop 57
cgatttatttgaaggacgcacgctc

SEQ ID NO: 374061 - DNA, 25 bp, Artificial
  probe
  misc_feature (1)..(25): SEQ ID NO: 4133; WAN024DC7; Start 61; Stop 85
caaaagaaagctcttgctaaggaag

SEQ ID NO: 374062 - DNA, 25 bp, Artificial
  probe
  misc_feature (1)..(25): SEQ ID NO: 4133; WAN024DC7; Start 62; Stop 86
aaaagaaagctcttgctaaggaagt

SEQ ID NO: 374063 - DNA, 25 bp, Artificial
  probe
  misc_feature (1)..(25): SEQ ID NO: 4134; WAN024DUY; Start 561; Stop 585
gattgtcggtatcggtctatcacta

SEQ ID NO: 374064 - DNA, 25 bp, Artificial
  probe
  misc_feature (1)..(25): SEQ ID NO: 4134; WAN024DUY; Start 562; Stop 586
attgtcggtatcggtctatcactag

SEQ ID NO: 374065 - DNA, 25 bp, Artificial
  probe
  misc_feature (1)..(25): SEQ ID NO: 4134; WAN024DUY; Start 164; Stop 188
gttggattgtgattactatgggttg

SEQ ID NO: 374066 - DNA, 25 bp, Artificial
  probe
  misc_feature (1)..(25): SEQ ID NO: 4134; WAN024DUY; Start 303; Stop 327
tttgccttatatcttagcccagttc

SEQ ID NO: 374067 - DNA, 25 bp, Artificial
  probe
  misc_feature (1)..(25): SEQ ID NO: 4134; WAN024DUY; Start 165; Stop 189
ttggattgtgattactatgggttgg

SEQ ID NO: 374068 - DNA, 25 bp, Artificial
  probe
  misc_feature (1)..(25): SEQ ID NO: 4134; WAN024DUY; Start 163; Stop 187
ggttggattgtgattactatgggtt

SEQ ID NO: 374069 - DNA, 25 bp, Artificial
  probe
  misc_feature (1)..(25): SEQ ID NO: 4134; WAN024DUY; Start 161; Stop 185
caggttggattgtgattactatggg

SEQ ID NO: 374070 - DNA, 25 bp, Artificial
  probe
  misc_feature (1)..(25): SEQ ID NO: 4134; WAN024DUY; Start 557; Stop 581
ctttgattgtcggtatcggtctatc

SEQ ID NO: 374071 - DNA, 25 bp, Artificial
  probe
  misc_feature (1)..(25): SEQ ID NO: 4134; WAN024DUY; Start 162; Stop 186
aggttggattgtgattactatgggt

SEQ ID NO: 374072 - DNA, 25 bp, Artificial
  probe
  misc_feature (1)..(25): SEQ ID NO: 4134; WAN024DUY; Start 563; Stop 587
ttgtcggtatcggtctatcactagg

SEQ ID NO: 374073 - DNA, 25 bp, Artificial
  probe
  misc_feature (1)..(25): SEQ ID NO: 4134; WAN024DUY; Start 98; Stop 122
tgattcttctaggaaatggtgttgt

SEQ ID NO: 374074 - DNA, 25 bp, Artificial
  probe
  misc_feature (1)..(25): SEQ ID NO: 4134; WAN024DUY; Start 97; Stop 121
ctgattcttctaggaaatggtgttg

SEQ ID NO: 374075 - DNA, 25 bp, Artificial
  probe
  misc_feature (1)..(25): SEQ ID NO: 4134; WAN024DUY; Start 100; Stop 124
attcttctaggaaatggtgttgttg

SEQ ID NO: 374076 - DNA, 25 bp, Artificial
  probe
  misc_feature (1)..(25): SEQ ID NO: 4134; WAN024DUY; Start 556; Stop 580
actttgattgtcggtatcggtctat

SEQ ID NO: 374077 - DNA, 25 bp, Artificial
  probe
  misc_feature (1)..(25): SEQ ID NO: 4134; WAN024DUY; Start 99; Stop 123
gattcttctaggaaatggtgttgtt

SEQ ID NO: 374078 - DNA, 25 bp, Artificial
  probe
  misc_feature (1)..(25): SEQ ID NO: 4134; WAN024DUY; Start 555; Stop 579
aactttgattgtcggtatcggtcta

SEQ ID NO: 374079 - DNA, 25 bp, Artificial
  probe
  misc_feature (1)..(25): SEQ ID NO: 4134; WAN024DUY; Start 486; Stop 510
tttggtgttgacaatctttgctttg

SEQ ID NO: 374080 - DNA, 25 bp, Artificial
  probe
  misc_feature (1)..(25): SEQ ID NO: 4134; WAN024DUY; Start 495; Stop 519
gacaatctttgctttgggtctttac

SEQ ID NO: 374081 - DNA, 25 bp, Artificial
  probe
  misc_feature (1)..(25): SEQ ID NO: 4134; WAN024DUY; Start 37; Stop 61
tttaatggagacagaaagatgatga

SEQ ID NO: 374082 - DNA, 25 bp, Artificial
  probe
  misc_feature (1)..(25): SEQ ID NO: 4134; WAN024DUY; Start 430; Stop 454
ccagccatcaaggatactgtatcaa

SEQ ID NO: 374083 - DNA, 25 bp, Artificial
  probe
  misc_feature (1)..(25): SEQ ID NO: 4134; WAN024DUY; Start 101; Stop 125
ttcttctaggaaatggtgttgttgc

SEQ ID NO: 374084 - DNA, 25 bp, Artificial
  probe
  misc_feature (1)..(25): SEQ ID NO: 4134; WAN024DUY; Start 166; Stop 190
tggattgtgattactatgggttggg

SEQ ID NO: 374085 - DNA, 25 bp, Artificial
  probe
  misc_feature (1)..(25): SEQ ID NO: 4134; WAN024DUY; Start 494; Stop 518
tgacaatctttgctttgggtcttta

SEQ ID NO: 374086 - DNA, 25 bp, Artificial
  probe
  misc_feature (1)..(25): SEQ ID NO: 4134; WAN024DUY; Start 497; Stop 521
caatctttgctttgggtctttacga

SEQ ID NO: 374087 - DNA, 25 bp, Artificial
  probe
  misc_feature (1)..(25): SEQ ID NO: 4134; WAN024DUY; Start 96; Stop 120
cctgattcttctaggaaatggtgtt

SEQ ID NO: 374088 - DNA, 25 bp, Artificial
  probe
  misc_feature (1)..(25): SEQ ID NO: 4134; WAN024DUY; Start 304; Stop 328
ttgccttatatcttagcccagttcg

SEQ ID NO: 374089 - DNA, 25 bp, Artificial
  probe
  misc_feature (1)..(25): SEQ ID NO: 4134; WAN024DUY; Start 496; Stop 520
acaatctttgctttgggtctttacg

SEQ ID NO: 374090 - DNA, 25 bp, Artificial
  probe
  misc_feature (1)..(25): SEQ ID NO: 4134; WAN024DUY; Start 428; Stop 452
gaccagccatcaaggatactgtatc

SEQ ID NO: 374091 - DNA, 25 bp, Artificial
  probe
  misc_feature (1)..(25): SEQ ID NO: 4134; WAN024DUY; Start 493; Stop 517
ttgacaatctttgctttgggtcttt

SEQ ID NO: 374092 - DNA, 25 bp, Artificial
  probe
  misc_feature (1)..(25): SEQ ID NO: 4134; WAN024DUY; Start 452; Stop 476
caaacttgattagcgaaatccttgg

SEQ ID NO: 374093 - DNA, 25 bp, Artificial
  probe
  misc_feature (1)..(25): SEQ ID NO: 4134; WAN024DUY; Start 454; Stop 478
aacttgattagcgaaatccttggaa

SEQ ID NO: 374094 - DNA, 25 bp, Artificial
  probe
  misc_feature (1)..(25): SEQ ID NO: 4134; WAN024DUY; Start 453; Stop 477
aaacttgattagcgaaatccttgga

SEQ ID NO: 374095 - DNA, 25 bp, Artificial
  probe
  misc_feature (1)..(25): SEQ ID NO: 4134; WAN024DUY; Start 451; Stop 475
tcaaacttgattagcgaaatccttg

SEQ ID NO: 374096 - DNA, 25 bp, Artificial
  probe
  misc_feature (1)..(25): SEQ ID NO: 4135; WAN024FYG; Start 1067; Stop 1091
tgctgtcaacaataattcctgctat

SEQ ID NO: 374097 - DNA, 25 bp, Artificial
  probe
  misc_feature (1)..(25): SEQ ID NO: 4135; WAN024FYG; Start 1066; Stop 1090
atgctgtcaacaataattcctgcta

SEQ ID NO: 374098 - DNA, 25 bp, Artificial
  probe
  misc_feature (1)..(25): SEQ ID NO: 4135; WAN024FYG; Start 1065; Stop 1089
tatgctgtcaacaataattcctgct

SEQ ID NO: 374099 - DNA, 25 bp, Artificial
  probe
  misc_feature (1)..(25): SEQ ID NO: 4135; WAN024FYG; Start 1068; Stop 1092
gctgtcaacaataattcctgctatt

SEQ ID NO: 374100 - DNA, 25 bp, Artificial
  probe
  misc_feature (1)..(25): SEQ ID NO: 4135; WAN024FYG; Start 1064; Stop 1088
ttatgctgtcaacaataattcctgc

SEQ ID NO: 374101 - DNA, 25 bp, Artificial
  probe
  misc_feature (1)..(25): SEQ ID NO: 4135; WAN024FYG; Start 702; Stop 726
agcctcaataagagatgttggaatt

SEQ ID NO: 374102 - DNA, 25 bp, Artificial
  probe
  misc_feature (1)..(25): SEQ ID NO: 4135; WAN024FYG; Start 701; Stop 725
tagcctcaataagagatgttggaat

SEQ ID NO: 374103 - DNA, 25 bp, Artificial
  probe
  misc_feature (1)..(25): SEQ ID NO: 4135; WAN024FYG; Start 700; Stop 724
ctagcctcaataagagatgttggaa

SEQ ID NO: 374104 - DNA, 25 bp, Artificial
  probe
  misc_feature (1)..(25): SEQ ID NO: 4135; WAN024FYG; Start 699; Stop 723
tctagcctcaataagagatgttgga

SEQ ID NO: 374105 - DNA, 25 bp, Artificial
  probe
  misc_feature (1)..(25): SEQ ID NO: 4135; WAN024FYG; Start 72; Stop 96
cttaccgattattaccactccctac

SEQ ID NO: 374106 - DNA, 25 bp, Artificial
  probe
  misc_feature (1)..(25): SEQ ID NO: 4135; WAN024FYG; Start 71; Stop 95
tcttaccgattattaccactcccta

SEQ ID NO: 374107 - DNA, 25 bp, Artificial
  probe
  misc_feature (1)..(25): SEQ ID NO: 4135; WAN024FYG; Start 171; Stop 195
gctggctactttaggaataggaaat

SEQ ID NO: 374108 - DNA, 25 bp, Artificial
  probe
  misc_feature (1)..(25): SEQ ID NO: 4135; WAN024FYG; Start 274; Stop 298
gcatctctattctccactttccttt

SEQ ID NO: 374109 - DNA, 25 bp, Artificial
  probe
  misc_feature (1)..(25): SEQ ID NO: 4135; WAN024FYG; Start 70; Stop 94
atcttaccgattattaccactccct

SEQ ID NO: 374110 - DNA, 25 bp, Artificial
  probe
  misc_feature (1)..(25): SEQ ID NO: 4135; WAN024FYG; Start 1079; Stop 1103
taattcctgctattgttagtgtagg

SEQ ID NO: 374111 - DNA, 25 bp, Artificial
  probe
  misc_feature (1)..(25): SEQ ID NO: 4135; WAN024FYG; Start 35; Stop 59
acgcttacaatctttcatatcagtt

SEQ ID NO: 374112 - DNA, 25 bp, Artificial
  probe
  misc_feature (1)..(25): SEQ ID NO: 4135; WAN024FYG; Start 273; Stop 297
agcatctctattctccactttcctt

SEQ ID NO: 374113 - DNA, 25 bp, Artificial
  probe
  misc_feature (1)..(25): SEQ ID NO: 4135; WAN024FYG; Start 611; Stop 635
aacaacatttgaagccagttatctt

SEQ ID NO: 374114 - DNA, 25 bp, Artificial
  probe
  misc_feature (1)..(25): SEQ ID NO: 4135; WAN024FYG; Start 610; Stop 634
aaacaacatttgaagccagttatct

SEQ ID NO: 374115 - DNA, 25 bp, Artificial
  probe
  misc_feature (1)..(25): SEQ ID NO: 4135; WAN024FYG; Start 170; Stop 194
tgctggctactttaggaataggaaa

SEQ ID NO: 374116 - DNA, 25 bp, Artificial
  probe
  misc_feature (1)..(25): SEQ ID NO: 4135; WAN024FYG; Start 169; Stop 193
ttgctggctactttaggaataggaa

SEQ ID NO: 374117 - DNA, 25 bp, Artificial
  probe
  misc_feature (1)..(25): SEQ ID NO: 4135; WAN024FYG; Start 168; Stop 192
tttgctggctactttaggaatagga

SEQ ID NO: 374118 - DNA, 25 bp, Artificial
  probe
  misc_feature (1)..(25): SEQ ID NO: 4135; WAN024FYG; Start 73; Stop 97
ttaccgattattaccactccctacg

SEQ ID NO: 374119 - DNA, 25 bp, Artificial
  probe
  misc_feature (1)..(25): SEQ ID NO: 4135; WAN024FYG; Start 113; Stop 137
gttcggataatctagggacttatgg

SEQ ID NO: 374120 - DNA, 25 bp, Artificial
  probe
  misc_feature (1)..(25): SEQ ID NO: 4135; WAN024FYG; Start 115; Stop 139
tcggataatctagggacttatggtt

SEQ ID NO: 374121 - DNA, 25 bp, Artificial
  probe
  misc_feature (1)..(25): SEQ ID NO: 4135; WAN024FYG; Start 114; Stop 138
ttcggataatctagggacttatggt

SEQ ID NO: 374122 - DNA, 25 bp, Artificial
  probe
  misc_feature (1)..(25): SEQ ID NO: 4135; WAN024FYG; Start 612; Stop 636
acaacatttgaagccagttatctta

SEQ ID NO: 374123 - DNA, 25 bp, Artificial
  probe
  misc_feature (1)..(25): SEQ ID NO: 4135; WAN024FYG; Start 703; Stop 727
gcctcaataagagatgttggaattt

SEQ ID NO: 374124 - DNA, 25 bp, Artificial
  probe
  misc_feature (1)..(25): SEQ ID NO: 4135; WAN024FYG; Start 687; Stop 711
tatgcttggttctctagcctcaata

SEQ ID NO: 374125 - DNA, 25 bp, Artificial
  probe
  misc_feature (1)..(25): SEQ ID NO: 4135; WAN024FYG; Start 261; Stop 285
tatacaactgggagcatctctattc

SEQ ID NO: 374126 - DNA, 25 bp, Artificial
  probe
  misc_feature (1)..(25): SEQ ID NO: 4135; WAN024FYG; Start 571; Stop 595
gaatttattgggaaaccgcactttg

SEQ ID NO: 374127 - DNA, 25 bp, Artificial
  probe
  misc_feature (1)..(25): SEQ ID NO: 4135; WAN024FYG; Start 287; Stop 311
ccactttcctttatgttattgtctg

SEQ ID NO: 374128 - DNA, 25 bp, Artificial
  probe
  misc_feature (1)..(25): SEQ ID NO: 4135; WAN024FYG; Start 34; Stop 58
tacgcttacaatctttcatatcagt

SEQ ID NO: 374129 - DNA, 25 bp, Artificial
  probe
  misc_feature (1)..(25): SEQ ID NO: 4136; WAN024AAE; Start 38; Stop 62
cttggaacgaaaggaataatagact

SEQ ID NO: 374130 - DNA, 25 bp, Artificial
  probe
  misc_feature (1)..(25): SEQ ID NO: 4136; WAN024AAE; Start 39; Stop 63
ttggaacgaaaggaataatagactt

SEQ ID NO: 374131 - DNA, 25 bp, Artificial
  probe
  misc_feature (1)..(25): SEQ ID NO: 4136; WAN024AAE; Start 50; Stop 74
ggaataatagactttctgcgaaaca

SEQ ID NO: 374132 - DNA, 25 bp, Artificial
  probe
  misc_feature (1)..(25): SEQ ID NO: 4136; WAN024AAE; Start 49; Stop 73
aggaataatagactttctgcgaaac

SEQ ID NO: 374133 - DNA, 25 bp, Artificial
  probe
  misc_feature (1)..(25): SEQ ID NO: 4136; WAN024AAE; Start 48; Stop 72
aaggaataatagactttctgcgaaa

SEQ ID NO: 374134 - DNA, 25 bp, Artificial
  probe
  misc_feature (1)..(25): SEQ ID NO: 4136; WAN024AAE; Start 47; Stop 71
aaaggaataatagactttctgcgaa

SEQ ID NO: 374135 - DNA, 25 bp, Artificial
  probe
  misc_feature (1)..(25): SEQ ID NO: 4136; WAN024AAE; Start 40; Stop 64
tggaacgaaaggaataatagacttt

SEQ ID NO: 374136 - DNA, 25 bp, Artificial
  probe
  misc_feature (1)..(25): SEQ ID NO: 4136; WAN024AAE; Start 51; Stop 75
gaataatagactttctgcgaaacaa

SEQ ID NO: 374137 - DNA, 25 bp, Artificial
  probe
  misc_feature (1)..(25): SEQ ID NO: 4136; WAN024AAE; Start 52; Stop 76
aataatagactttctgcgaaacaaa

SEQ ID NO: 374138 - DNA, 25 bp, Artificial
  probe
  misc_feature (1)..(25): SEQ ID NO: 4136; WAN024AAE; Start 36; Stop 60
accttggaacgaaaggaataataga

SEQ ID NO: 374139 - DNA, 25 bp, Artificial
  probe
  misc_feature (1)..(25): SEQ ID NO: 4136; WAN024AAE; Start 37; Stop 61
ccttggaacgaaaggaataatagac

SEQ ID NO: 374140 - DNA, 25 bp, Artificial
  probe
  misc_feature (1)..(25): SEQ ID NO: 4136; WAN024AAE; Start 35; Stop 59
aaccttggaacgaaaggaataatag

SEQ ID NO: 374141 - DNA, 25 bp, Artificial
  probe
  misc_feature (1)..(25): SEQ ID NO: 4136; WAN024AAE; Start 34; Stop 58
aaaccttggaacgaaaggaataata

SEQ ID NO: 374142 - DNA, 25 bp, Artificial
  probe
  misc_feature (1)..(25): SEQ ID NO: 4136; WAN024AAE; Start 53; Stop 77
ataatagactttctgcgaaacaaaa

SEQ ID NO: 374143 - DNA, 25 bp, Artificial
  probe
  misc_feature (1)..(25): SEQ ID NO: 4136; WAN024AAE; Start 1; Stop 25
gtggagtgtgtaagcttgttgctaa

SEQ ID NO: 374144 - DNA, 25 bp, Artificial
  probe
  misc_feature (1)..(25): SEQ ID NO: 4136; WAN024AAE; Start 33; Stop 57
aaaaccttggaacgaaaggaataat

SEQ ID NO: 374145 - DNA, 25 bp, Artificial
  probe
  misc_feature (1)..(25): SEQ ID NO: 4136; WAN024AAE; Start 2; Stop 26
tggagtgtgtaagcttgttgctaaa

SEQ ID NO: 374146 - DNA, 25 bp, Artificial
  probe
  misc_feature (1)..(25): SEQ ID NO: 4136; WAN024AAE; Start 4; Stop 28
gagtgtgtaagcttgttgctaaaag

SEQ ID NO: 374147 - DNA, 25 bp, Artificial
  probe
  misc_feature (1)..(25): SEQ ID NO: 4136; WAN024AAE; Start 3; Stop 27
ggagtgtgtaagcttgttgctaaaa

SEQ ID NO: 374148 - DNA, 25 bp, Artificial
  probe
  misc_feature (1)..(25): SEQ ID NO: 4136; WAN024AAE; Start 11; Stop 35
taagcttgttgctaaaagcgtaaaa

SEQ ID NO: 374149 - DNA, 25 bp, Artificial
  probe
  misc_feature (1)..(25): SEQ ID NO: 4136; WAN024AAE; Start 10; Stop 34
gtaagcttgttgctaaaagcgtaaa

SEQ ID NO: 374150 - DNA, 25 bp, Artificial
  probe
  misc_feature (1)..(25): SEQ ID NO: 4136; WAN024AAE; Start 9; Stop 33
tgtaagcttgttgctaaaagcgtaa

SEQ ID NO: 374151 - DNA, 25 bp, Artificial
  probe
  misc_feature (1)..(25): SEQ ID NO: 4136; WAN024AAE; Start 8; Stop 32
gtgtaagcttgttgctaaaagcgta

SEQ ID NO: 374152 - DNA, 25 bp, Artificial
  probe
  misc_feature (1)..(25): SEQ ID NO: 4136; WAN024AAE; Start 5; Stop 29
agtgtgtaagcttgttgctaaaagc

SEQ ID NO: 374153 - DNA, 25 bp, Artificial
  probe
  misc_feature (1)..(25): SEQ ID NO: 4136; WAN024AAE; Start 6; Stop 30
gtgtgtaagcttgttgctaaaagcg

SEQ ID NO: 374154 - DNA, 25 bp, Artificial
  probe
  misc_feature (1)..(25): SEQ ID NO: 4136; WAN024AAE; Start 7; Stop 31
tgtgtaagcttgttgctaaaagcgt

SEQ ID NO: 374155 - DNA, 25 bp, Artificial
  probe
  misc_feature (1)..(25): SEQ ID NO: 4137; WAN024DTY; Start 167; Stop 191
cggatcaaacccattatcaactact

SEQ ID NO: 374156 - DNA, 25 bp, Artificial
  probe
  misc_feature (1)..(25): SEQ ID NO: 4137; WAN024DTY; Start 34; Stop 58
cactatattccaattgaagacgttc

SEQ ID NO: 374157 - DNA, 25 bp, Artificial
  probe
  misc_feature (1)..(25): SEQ ID NO: 4137; WAN024DTY; Start 33; Stop 57
tcactatattccaattgaagacgtt

SEQ ID NO: 374158 - DNA, 25 bp, Artificial
  probe
  misc_feature (1)..(25): SEQ ID NO: 4137; WAN024DTY; Start 32; Stop 56
atcactatattccaattgaagacgt

SEQ ID NO: 374159 - DNA, 25 bp, Artificial
  probe
  misc_feature (1)..(25): SEQ ID NO: 4137; WAN024DTY; Start 216; Stop 240
acaagttccaaaatctgagaggtta

SEQ ID NO: 374160 - DNA, 25 bp, Artificial
  probe
  misc_feature (1)..(25): SEQ ID NO: 4137; WAN024DTY; Start 215; Stop 239
tacaagttccaaaatctgagaggtt

SEQ ID NO: 374161 - DNA, 25 bp, Artificial
  probe
  misc_feature (1)..(25): SEQ ID NO: 4137; WAN024DTY; Start 214; Stop 238
ttacaagttccaaaatctgagaggt

SEQ ID NO: 374162 - DNA, 25 bp, Artificial
  probe
  misc_feature (1)..(25): SEQ ID NO: 4137; WAN024DTY; Start 217; Stop 241
caagttccaaaatctgagaggttag

SEQ ID NO: 374163 - DNA, 25 bp, Artificial
  probe
  misc_feature (1)..(25): SEQ ID NO: 4137; WAN024DTY; Start 213; Stop 237
tttacaagttccaaaatctgagagg

SEQ ID NO: 374164 - DNA, 25 bp, Artificial
  probe
  misc_feature (1)..(25): SEQ ID NO: 4137; WAN024DTY; Start 218; Stop 242
aagttccaaaatctgagaggttagc

SEQ ID NO: 374165 - DNA, 25 bp, Artificial
  probe
  misc_feature (1)..(25): SEQ ID NO: 4137; WAN024DTY; Start 152; Stop 176
aatttcaaataaggccggatcaaac

SEQ ID NO: 374166 - DNA, 25 bp, Artificial
  probe
  misc_feature (1)..(25): SEQ ID NO: 4137; WAN024DTY; Start 151; Stop 175
caatttcaaataaggccggatcaaa

SEQ ID NO: 374167 - DNA, 25 bp, Artificial
  probe
  misc_feature (1)..(25): SEQ ID NO: 4137; WAN024DTY; Start 147; Stop 171
ttctcaatttcaaataaggccggat

SEQ ID NO: 374168 - DNA, 25 bp, Artificial
  probe
  misc_feature (1)..(25): SEQ ID NO: 4137; WAN024DTY; Start 150; Stop 174
tcaatttcaaataaggccggatcaa

SEQ ID NO: 374169 - DNA, 25 bp, Artificial
  probe
  misc_feature (1)..(25): SEQ ID NO: 4137; WAN024DTY; Start 146; Stop 170
tttctcaatttcaaataaggccgga

SEQ ID NO: 374170 - DNA, 25 bp, Artificial
  probe
  misc_feature (1)..(25): SEQ ID NO: 4137; WAN024DTY; Start 220; Stop 244
gttccaaaatctgagaggttagcac

SEQ ID NO: 374171 - DNA, 25 bp, Artificial
  probe
  misc_feature (1)..(25): SEQ ID NO: 4137; WAN024DTY; Start 70; Stop 94
acaatttatccaattctttatgtgc

SEQ ID NO: 374172 - DNA, 25 bp, Artificial
  probe
  misc_feature (1)..(25): SEQ ID NO: 4137; WAN024DTY; Start 166; Stop 190
ccggatcaaacccattatcaactac

SEQ ID NO: 374173 - DNA, 25 bp, Artificial
  probe
  misc_feature (1)..(25): SEQ ID NO: 4137; WAN024DTY; Start 31; Stop 55
aatcactatattccaattgaagacg

SEQ ID NO: 374174 - DNA, 25 bp, Artificial
  probe
  misc_feature (1)..(25): SEQ ID NO: 4137; WAN024DTY; Start 219; Stop 243
agttccaaaatctgagaggttagca

SEQ ID NO: 374175 - DNA, 25 bp, Artificial
  probe
  misc_feature (1)..(25): SEQ ID NO: 4137; WAN024DTY; Start 148; Stop 172
tctcaatttcaaataaggccggatc

SEQ ID NO: 374176 - DNA, 25 bp, Artificial
  probe
  misc_feature (1)..(25): SEQ ID NO: 4137; WAN024DTY; Start 149; Stop 173
ctcaatttcaaataaggccggatca

SEQ ID NO: 374177 - DNA, 25 bp, Artificial
  probe
  misc_feature (1)..(25): SEQ ID NO: 4137; WAN024DTY; Start 40; Stop 64
attccaattgaagacgttcatcatg

SEQ ID NO: 374178 - DNA, 25 bp, Artificial
  probe
  misc_feature (1)..(25): SEQ ID NO: 4137; WAN024DTY; Start 1; Stop 25
gtggagtttcagctaaaatacgatt

SEQ ID NO: 374179 - DNA, 25 bp, Artificial
  probe
  misc_feature (1)..(25): SEQ ID NO: 4137; WAN024DTY; Start 39; Stop 63
tattccaattgaagacgttcatcat

SEQ ID NO: 374180 - DNA, 25 bp, Artificial
  probe
  misc_feature (1)..(25): SEQ ID NO: 4137; WAN024DTY; Start 38; Stop 62
atattccaattgaagacgttcatca

SEQ ID NO: 374181 - DNA, 25 bp, Artificial
  probe
  misc_feature (1)..(25): SEQ ID NO: 4137; WAN024DTY; Start 153; Stop 177
atttcaaataaggccggatcaaacc

SEQ ID NO: 374182 - DNA, 25 bp, Artificial
  probe
  misc_feature (1)..(25): SEQ ID NO: 4137; WAN024DTY; Start 42; Stop 66
tccaattgaagacgttcatcatgaa

SEQ ID NO: 374183 - DNA, 25 bp, Artificial
  probe
  misc_feature (1)..(25): SEQ ID NO: 4137; WAN024DTY; Start 41; Stop 65
ttccaattgaagacgttcatcatga

SEQ ID NO: 374184 - DNA, 25 bp, Artificial
  probe
  misc_feature (1)..(25): SEQ ID NO: 4137; WAN024DTY; Start 35; Stop 59
actatattccaattgaagacgttca

SEQ ID NO: 374185 - DNA, 25 bp, Artificial
  probe
  misc_feature (1)..(25): SEQ ID NO: 4137; WAN024DTY; Start 158; Stop 182
aaataaggccggatcaaacccatta

SEQ ID NO: 374186 - DNA, 25 bp, Artificial
  probe
  misc_feature (1)..(25): SEQ ID NO: 4137; WAN024DTY; Start 159; Stop 183
aataaggccggatcaaacccattat

SEQ ID NO: 374187 - DNA, 25 bp, Artificial
  probe
  misc_feature (1)..(25): SEQ ID NO: 4137; WAN024DTY; Start 221; Stop 245
ttccaaaatctgagaggttagcacg

SEQ ID NO: 374188 - DNA, 25 bp, Artificial
  probe
  misc_feature (1)..(25): SEQ ID NO: 4138; WAN024CIR; Start 40; Stop 64
cccattatagtcatttcgtgtctct

SEQ ID NO: 374189 - DNA, 25 bp, Artificial
  probe
  misc_feature (1)..(25): SEQ ID NO: 4138; WAN024CIR; Start 34; Stop 58
ttgtcacccattatagtcatttcgt

SEQ ID NO: 374190 - DNA, 25 bp, Artificial
  probe
  misc_feature (1)..(25): SEQ ID NO: 4138; WAN024CIR; Start 39; Stop 63
acccattatagtcatttcgtgtctc

SEQ ID NO: 374191 - DNA, 25 bp, Artificial
  probe
  misc_feature (1)..(25): SEQ ID NO: 4138; WAN024CIR; Start 30; Stop 54
cccattgtcacccattatagtcatt

SEQ ID NO: 374192 - DNA, 25 bp, Artificial
  probe
  misc_feature (1)..(25): SEQ ID NO: 4138; WAN024CIR; Start 33; Stop 57
attgtcacccattatagtcatttcg

SEQ ID NO: 374193 - DNA, 25 bp, Artificial
  probe
  misc_feature (1)..(25): SEQ ID NO: 4138; WAN024CIR; Start 31; Stop 55
ccattgtcacccattatagtcattt

SEQ ID NO: 374194 - DNA, 25 bp, Artificial
  probe
  misc_feature (1)..(25): SEQ ID NO: 4138; WAN024CIR; Start 127; Stop 151
gtatctcaaacctctctactctccc

SEQ ID NO: 374195 - DNA, 25 bp, Artificial
  probe
  misc_feature (1)..(25): SEQ ID NO: 4138; WAN024CIR; Start 41; Stop 65
ccattatagtcatttcgtgtctctt

SEQ ID NO: 374196 - DNA, 25 bp, Artificial
  probe
  misc_feature (1)..(25): SEQ ID NO: 4138; WAN024CIR; Start 32; Stop 56
cattgtcacccattatagtcatttc

SEQ ID NO: 374197 - DNA, 25 bp, Artificial
  probe
  misc_feature (1)..(25): SEQ ID NO: 4138; WAN024CIR; Start 38; Stop 62
cacccattatagtcatttcgtgtct

SEQ ID NO: 374198 - DNA, 25 bp, Artificial
  probe
  misc_feature (1)..(25): SEQ ID NO: 4138; WAN024CIR; Start 37; Stop 61
tcacccattatagtcatttcgtgtc

SEQ ID NO: 374199 - DNA, 25 bp, Artificial
  probe
  misc_feature (1)..(25): SEQ ID NO: 4138; WAN024CIR; Start 91; Stop 115
ttactctccttagatgataatccaa

SEQ ID NO: 374200 - DNA, 25 bp, Artificial
  probe
  misc_feature (1)..(25): SEQ ID NO: 4138; WAN024CIR; Start 36; Stop 60
gtcacccattatagtcatttcgtgt

SEQ ID NO: 374201 - DNA, 25 bp, Artificial
  probe
  misc_feature (1)..(25): SEQ ID NO: 4138; WAN024CIR; Start 35; Stop 59
tgtcacccattatagtcatttcgtg

SEQ ID NO: 374202 - DNA, 25 bp, Artificial
  probe
  misc_feature (1)..(25): SEQ ID NO: 4138; WAN024CIR; Start 42; Stop 66
cattatagtcatttcgtgtctcttt

SEQ ID NO: 374203 - DNA, 25 bp, Artificial
  probe
  misc_feature (1)..(25): SEQ ID NO: 4138; WAN024CIR; Start 90; Stop 114
attactctccttagatgataatcca

SEQ ID NO: 374204 - DNA, 25 bp, Artificial
  probe
  misc_feature (1)..(25): SEQ ID NO: 4138; WAN024CIR; Start 126; Stop 150
ggtatctcaaacctctctactctcc

SEQ ID NO: 374205 - DNA, 25 bp, Artificial
  probe
  misc_feature (1)..(25): SEQ ID NO: 4138; WAN024CIR; Start 84; Stop 108
agggaaattactctccttagatgat

SEQ ID NO: 374206 - DNA, 25 bp, Artificial
  probe
  misc_feature (1)..(25): SEQ ID NO: 4138; WAN024CIR; Start 6; Stop 30
taaaatctcttgtctatcccttccc

SEQ ID NO: 374207 - DNA, 25 bp, Artificial
  probe
  misc_feature (1)..(25): SEQ ID NO: 4138; WAN024CIR; Start 76; Stop 100
ttaatgcaagggaaattactctcct

SEQ ID NO: 374208 - DNA, 25 bp, Artificial
  probe
  misc_feature (1)..(25): SEQ ID NO: 4138; WAN024CIR; Start 75; Stop 99
tttaatgcaagggaaattactctcc

SEQ ID NO: 374209 - DNA, 25 bp, Artificial
  probe
  misc_feature (1)..(25): SEQ ID NO: 4138; WAN024CIR; Start 92; Stop 116
tactctccttagatgataatccaaa

SEQ ID NO: 374210 - DNA, 25 bp, Artificial
  probe
  misc_feature (1)..(25): SEQ ID NO: 4138; WAN024CIR; Start 7; Stop 31
aaaatctcttgtctatcccttcccc

SEQ ID NO: 374211 - DNA, 25 bp, Artificial
  probe
  misc_feature (1)..(25): SEQ ID NO: 4138; WAN024CIR; Start 85; Stop 109
gggaaattactctccttagatgata

SEQ ID NO: 374212 - DNA, 25 bp, Artificial
  probe
  misc_feature (1)..(25): SEQ ID NO: 4138; WAN024CIR; Start 95; Stop 119
tctccttagatgataatccaaaagc

SEQ ID NO: 374213 - DNA, 25 bp, Artificial
  probe
  misc_feature (1)..(25): SEQ ID NO: 4138; WAN024CIR; Start 89; Stop 113
aattactctccttagatgataatcc

SEQ ID NO: 374214 - DNA, 25 bp, Artificial
  probe
  misc_feature (1)..(25): SEQ ID NO: 4138; WAN024CIR; Start 29; Stop 53
ccccattgtcacccattatagtcat

SEQ ID NO: 374215 - DNA, 25 bp, Artificial
  probe
  misc_feature (1)..(25): SEQ ID NO: 4138; WAN024CIR; Start 5; Stop 29
ataaaatctcttgtctatcccttcc

SEQ ID NO: 374216 - DNA, 25 bp, Artificial
  probe
  misc_feature (1)..(25): SEQ ID NO: 4138; WAN024CIR; Start 111; Stop 135
tccaaaagctagaaaggtatctcaa

SEQ ID NO: 374217 - DNA, 25 bp, Artificial
  probe
  misc_feature (1)..(25): SEQ ID NO: 4138; WAN024CIR; Start 110; Stop 134
atccaaaagctagaaaggtatctca

SEQ ID NO: 374218 - DNA, 25 bp, Artificial
  probe
  misc_feature (1)..(25): SEQ ID NO: 4138; WAN024CIR; Start 112; Stop 136
ccaaaagctagaaaggtatctcaaa

SEQ ID NO: 374219 - DNA, 25 bp, Artificial
  probe
  misc_feature (1)..(25): SEQ ID NO: 4138; WAN024CIR; Start 109; Stop 133
aatccaaaagctagaaaggtatctc

SEQ ID NO: 374220 - DNA, 25 bp, Artificial
  probe
  misc_feature (1)..(25): SEQ ID NO: 4138; WAN024CIR; Start 104; Stop 128
atgataatccaaaagctagaaaggt

SEQ ID NO: 374221 - DNA, 25 bp, Artificial
  probe
  misc_feature (1)..(25): SEQ ID NO: 4139; WAN024F7Q; Start 80; Stop 104
atcattcaccatttcacaacctaac

SEQ ID NO: 374222 - DNA, 25 bp, Artificial
  probe
  misc_feature (1)..(25): SEQ ID NO: 4139; WAN024F7Q; Start 76; Stop 100
gagtatcattcaccatttcacaacc

SEQ ID NO: 374223 - DNA, 25 bp, Artificial
  probe
  misc_feature (1)..(25): SEQ ID NO: 4139; WAN024F7Q; Start 77; Stop 101
agtatcattcaccatttcacaacct

SEQ ID NO: 374224 - DNA, 25 bp, Artificial
  probe
  misc_feature (1)..(25): SEQ ID NO: 4139; WAN024F7Q; Start 81; Stop 105
tcattcaccatttcacaacctaact

SEQ ID NO: 374225 - DNA, 25 bp, Artificial
  probe
  misc_feature (1)..(25): SEQ ID NO: 4139; WAN024F7Q; Start 75; Stop 99
agagtatcattcaccatttcacaac

SEQ ID NO: 374226 - DNA, 25 bp, Artificial
  probe
  misc_feature (1)..(25): SEQ ID NO: 4139; WAN024F7Q; Start 82; Stop 106
cattcaccatttcacaacctaacta

SEQ ID NO: 374227 - DNA, 25 bp, Artificial
  probe
  misc_feature (1)..(25): SEQ ID NO: 4139; WAN024F7Q; Start 78; Stop 102
gtatcattcaccatttcacaaccta

SEQ ID NO: 374228 - DNA, 25 bp, Artificial
  probe
  misc_feature (1)..(25): SEQ ID NO: 4139; WAN024F7Q; Start 74; Stop 98
aagagtatcattcaccatttcacaa

SEQ ID NO: 374229 - DNA, 25 bp, Artificial
  probe
  misc_feature (1)..(25): SEQ ID NO: 4139; WAN024F7Q; Start 73; Stop 97
gaagagtatcattcaccatttcaca

SEQ ID NO: 374230 - DNA, 25 bp, Artificial
  probe
  misc_feature (1)..(25): SEQ ID NO: 4139; WAN024F7Q; Start 84; Stop 108
ttcaccatttcacaacctaactaat

SEQ ID NO: 374231 - DNA, 25 bp, Artificial
  probe
  misc_feature (1)..(25): SEQ ID NO: 4139; WAN024F7Q; Start 83; Stop 107
attcaccatttcacaacctaactaa

SEQ ID NO: 374232 - DNA, 25 bp, Artificial
  probe
  misc_feature (1)..(25): SEQ ID NO: 4139; WAN024F7Q; Start 79; Stop 103
tatcattcaccatttcacaacctaa

SEQ ID NO: 374233 - DNA, 25 bp, Artificial
  probe
  misc_feature (1)..(25): SEQ ID NO: 4139; WAN024F7Q; Start 72; Stop 96
tgaagagtatcattcaccatttcac

SEQ ID NO: 374234 - DNA, 25 bp, Artificial
  probe
  misc_feature (1)..(25): SEQ ID NO: 4139; WAN024F7Q; Start 71; Stop 95
ttgaagagtatcattcaccatttca

SEQ ID NO: 374235 - DNA, 25 bp, Artificial
  probe
  misc_feature (1)..(25): SEQ ID NO: 4139; WAN024F7Q; Start 14; Stop 38
acgaagtcagtaaccatacccatga

SEQ ID NO: 374236 - DNA, 25 bp, Artificial
  probe
  misc_feature (1)..(25): SEQ ID NO: 4139; WAN024F7Q; Start 70; Stop 94
tttgaagagtatcattcaccatttc

SEQ ID NO: 374237 - DNA, 25 bp, Artificial
  probe
  misc_feature (1)..(25): SEQ ID NO: 4139; WAN024F7Q; Start 20; Stop 44
tcagtaaccatacccatgacaagcc

SEQ ID NO: 374238 - DNA, 25 bp, Artificial
  probe
  misc_feature (1)..(25): SEQ ID NO: 4139; WAN024F7Q; Start 17; Stop 41
aagtcagtaaccatacccatgacaa

SEQ ID NO: 374239 - DNA, 25 bp, Artificial
  probe
  misc_feature (1)..(25): SEQ ID NO: 4139; WAN024F7Q; Start 18; Stop 42
agtcagtaaccatacccatgacaag

SEQ ID NO: 374240 - DNA, 25 bp, Artificial
  probe
  misc_feature (1)..(25): SEQ ID NO: 4139; WAN024F7Q; Start 16; Stop 40
gaagtcagtaaccatacccatgaca

SEQ ID NO: 374241 - DNA, 25 bp, Artificial
  probe
  misc_feature (1)..(25): SEQ ID NO: 4139; WAN024F7Q; Start 47; Stop 71
cgctgacgtggtttgaagaaatttt

SEQ ID NO: 374242 - DNA, 25 bp, Artificial
  probe
  misc_feature (1)..(25): SEQ ID NO: 4139; WAN024F7Q; Start 15; Stop 39
cgaagtcagtaaccatacccatgac

SEQ ID NO: 374243 - DNA, 25 bp, Artificial
  probe
  misc_feature (1)..(25): SEQ ID NO: 4139; WAN024F7Q; Start 69; Stop 93
ttttgaagagtatcattcaccattt

SEQ ID NO: 374244 - DNA, 25 bp, Artificial
  probe
  misc_feature (1)..(25): SEQ ID NO: 4139; WAN024F7Q; Start 19; Stop 43
gtcagtaaccatacccatgacaagc

SEQ ID NO: 374245 - DNA, 25 bp, Artificial
  probe
  misc_feature (1)..(25): SEQ ID NO: 4139; WAN024F7Q; Start 46; Stop 70
acgctgacgtggtttgaagaaattt

SEQ ID NO: 374246 - DNA, 25 bp, Artificial
  probe
  misc_feature (1)..(25): SEQ ID NO: 4139; WAN024F7Q; Start 45; Stop 69
gacgctgacgtggtttgaagaaatt

SEQ ID NO: 374247 - DNA, 25 bp, Artificial
  probe
  misc_feature (1)..(25): SEQ ID NO: 4140; WAN024BE3; Start 44; Stop 68
tgaaactgacgtggtttgaagagat

SEQ ID NO: 374248 - DNA, 25 bp, Artificial
  probe
  misc_feature (1)..(25): SEQ ID NO: 4140; WAN024BE3; Start 93; Stop 117
atttgtaaatatcatgagccttctc

SEQ ID NO: 374249 - DNA, 25 bp, Artificial
  probe
  misc_feature (1)..(25): SEQ ID NO: 4140; WAN024BE3; Start 92; Stop 116
aatttgtaaatatcatgagccttct

SEQ ID NO: 374250 - DNA, 25 bp, Artificial
  probe
  misc_feature (1)..(25): SEQ ID NO: 4140; WAN024BE3; Start 43; Stop 67
gtgaaactgacgtggtttgaagaga

SEQ ID NO: 374251 - DNA, 25 bp, Artificial
  probe
  misc_feature (1)..(25): SEQ ID NO: 4140; WAN024BE3; Start 91; Stop 115
aaatttgtaaatatcatgagccttc

SEQ ID NO: 374252 - DNA, 25 bp, Artificial
  probe
  misc_feature (1)..(25): SEQ ID NO: 4140; WAN024BE3; Start 40; Stop 64
aaggtgaaactgacgtggtttgaag

SEQ ID NO: 374253 - DNA, 25 bp, Artificial
  probe
  misc_feature (1)..(25): SEQ ID NO: 4140; WAN024BE3; Start 39; Stop 63
caaggtgaaactgacgtggtttgaa

SEQ ID NO: 374254 - DNA, 25 bp, Artificial
  probe
  misc_feature (1)..(25): SEQ ID NO: 4140; WAN024BE3; Start 42; Stop 66
ggtgaaactgacgtggtttgaagag

SEQ ID NO: 374255 - DNA, 25 bp, Artificial
  probe
  misc_feature (1)..(25): SEQ ID NO: 4140; WAN024BE3; Start 41; Stop 65
aggtgaaactgacgtggtttgaaga

SEQ ID NO: 374256 - DNA, 25 bp, Artificial
  probe
  misc_feature (1)..(25): SEQ ID NO: 4140; WAN024BE3; Start 23; Stop 47
gtaaccatacctacggcaaggtgaa

SEQ ID NO: 374257 - DNA, 25 bp, Artificial
  probe
  misc_feature (1)..(25): SEQ ID NO: 4140; WAN024BE3; Start 24; Stop 48
taaccatacctacggcaaggtgaaa

SEQ ID NO: 374258 - DNA, 25 bp, Artificial
  probe
  misc_feature (1)..(25): SEQ ID NO: 4140; WAN024BE3; Start 21; Stop 45
cagtaaccatacctacggcaaggtg

SEQ ID NO: 374259 - DNA, 25 bp, Artificial
  probe
  misc_feature (1)..(25): SEQ ID NO: 4140; WAN024BE3; Start 22; Stop 46
agtaaccatacctacggcaaggtga

SEQ ID NO: 374260 - DNA, 25 bp, Artificial
  probe
  misc_feature (1)..(25): SEQ ID NO: 4140; WAN024BE3; Start 20; Stop 44
tcagtaaccatacctacggcaaggt

SEQ ID NO: 374261 - DNA, 25 bp, Artificial
  probe
  misc_feature (1)..(25): SEQ ID NO: 4140; WAN024BE3; Start 29; Stop 53
atacctacggcaaggtgaaactgac

SEQ ID NO: 374262 - DNA, 25 bp, Artificial
  probe
  misc_feature (1)..(25): SEQ ID NO: 4140; WAN024BE3; Start 28; Stop 52
catacctacggcaaggtgaaactga

SEQ ID NO: 374263 - DNA, 25 bp, Artificial
  probe
  misc_feature (1)..(25): SEQ ID NO: 4140; WAN024BE3; Start 25; Stop 49
aaccatacctacggcaaggtgaaac

SEQ ID NO: 374264 - DNA, 25 bp, Artificial
  probe
  misc_feature (1)..(25): SEQ ID NO: 4141; WAN024F57; Start 139; Stop 163
aatacagagaaaccagcaaagacaa

SEQ ID NO: 374265 - DNA, 25 bp, Artificial
  probe
  misc_feature (1)..(25): SEQ ID NO: 4141; WAN024F57; Start 138; Stop 162
aaatacagagaaaccagcaaagaca

SEQ ID NO: 374266 - DNA, 25 bp, Artificial
  probe
  misc_feature (1)..(25): SEQ ID NO: 4141; WAN024F57; Start 140; Stop 164
atacagagaaaccagcaaagacaag

SEQ ID NO: 374267 - DNA, 25 bp, Artificial
  probe
  misc_feature (1)..(25): SEQ ID NO: 4141; WAN024F57; Start 111; Stop 135
ggttaagatggcattcttggaatta

SEQ ID NO: 374268 - DNA, 25 bp, Artificial
  probe
  misc_feature (1)..(25): SEQ ID NO: 4141; WAN024F57; Start 110; Stop 134
tggttaagatggcattcttggaatt

SEQ ID NO: 374269 - DNA, 25 bp, Artificial
  probe
  misc_feature (1)..(25): SEQ ID NO: 4141; WAN024F57; Start 109; Stop 133
ctggttaagatggcattcttggaat

SEQ ID NO: 374270 - DNA, 25 bp, Artificial
  probe
  misc_feature (1)..(25): SEQ ID NO: 4141; WAN024F57; Start 11; Stop 35
attatttctcagatgacctggcttt

SEQ ID NO: 374271 - DNA, 25 bp, Artificial
  probe
  misc_feature (1)..(25): SEQ ID NO: 4141; WAN024F57; Start 10; Stop 34
aattatttctcagatgacctggctt

SEQ ID NO: 374272 - DNA, 25 bp, Artificial
  probe
  misc_feature (1)..(25): SEQ ID NO: 4141; WAN024F57; Start 107; Stop 131
atctggttaagatggcattcttgga

SEQ ID NO: 374273 - DNA, 25 bp, Artificial
  probe
  misc_feature (1)..(25): SEQ ID NO: 4141; WAN024F57; Start 112; Stop 136
gttaagatggcattcttggaattaa

SEQ ID NO: 374274 - DNA, 25 bp, Artificial
  probe
  misc_feature (1)..(25): SEQ ID NO: 4141; WAN024F57; Start 108; Stop 132
tctggttaagatggcattcttggaa

SEQ ID NO: 374275 - DNA, 25 bp, Artificial
  probe
  misc_feature (1)..(25): SEQ ID NO: 4141; WAN024F57; Start 62; Stop 86
caacaggtgaggtattggcgattac

SEQ ID NO: 374276 - DNA, 25 bp, Artificial
  probe
  misc_feature (1)..(25): SEQ ID NO: 4141; WAN024F57; Start 55; Stop 79
gaagacacaacaggtgaggtattgg

SEQ ID NO: 374277 - DNA, 25 bp, Artificial
  probe
  misc_feature (1)..(25): SEQ ID NO: 4141; WAN024F57; Start 9; Stop 33
taattatttctcagatgacctggct

SEQ ID NO: 374278 - DNA, 25 bp, Artificial
  probe
  misc_feature (1)..(25): SEQ ID NO: 4141; WAN024F57; Start 8; Stop 32
gtaattatttctcagatgacctggc

SEQ ID NO: 374279 - DNA, 25 bp, Artificial
  probe
  misc_feature (1)..(25): SEQ ID NO: 4141; WAN024F57; Start 141; Stop 165
tacagagaaaccagcaaagacaagg

SEQ ID NO: 374280 - DNA, 25 bp, Artificial
  probe
  misc_feature (1)..(25): SEQ ID NO: 4141; WAN024F57; Start 54; Stop 78
cgaagacacaacaggtgaggtattg

SEQ ID NO: 374281 - DNA, 25 bp, Artificial
  probe
  misc_feature (1)..(25): SEQ ID NO: 4141; WAN024F57; Start 61; Stop 85
acaacaggtgaggtattggcgatta

SEQ ID NO: 374282 - DNA, 25 bp, Artificial
  probe
  misc_feature (1)..(25): SEQ ID NO: 4141; WAN024F57; Start 137; Stop 161
aaaatacagagaaaccagcaaagac

SEQ ID NO: 374283 - DNA, 25 bp, Artificial
  probe
  misc_feature (1)..(25): SEQ ID NO: 4141; WAN024F57; Start 7; Stop 31
agtaattatttctcagatgacctgg

SEQ ID NO: 374284 - DNA, 25 bp, Artificial
  probe
  misc_feature (1)..(25): SEQ ID NO: 4141; WAN024F57; Start 12; Stop 36
ttatttctcagatgacctggctttt

SEQ ID NO: 374285 - DNA, 25 bp, Artificial
  probe
  misc_feature (1)..(25): SEQ ID NO: 4141; WAN024F57; Start 13; Stop 37
tatttctcagatgacctggcttttc

SEQ ID NO: 374286 - DNA, 25 bp, Artificial
  probe
  misc_feature (1)..(25): SEQ ID NO: 4141; WAN024F57; Start 113; Stop 137
ttaagatggcattcttggaattaaa

SEQ ID NO: 374287 - DNA, 25 bp, Artificial
  probe
  misc_feature (1)..(25): SEQ ID NO: 4141; WAN024F57; Start 81; Stop 105
gattaccaacaatggacaggaaaac

SEQ ID NO: 374288 - DNA, 25 bp, Artificial
  probe
  misc_feature (1)..(25): SEQ ID NO: 4141; WAN024F57; Start 70; Stop 94
gaggtattggcgattaccaacaatg

SEQ ID NO: 374289 - DNA, 25 bp, Artificial
  probe
  misc_feature (1)..(25): SEQ ID NO: 4141; WAN024F57; Start 73; Stop 97
gtattggcgattaccaacaatggac

SEQ ID NO: 374290 - DNA, 25 bp, Artificial
  probe
  misc_feature (1)..(25): SEQ ID NO: 4141; WAN024F57; Start 69; Stop 93
tgaggtattggcgattaccaacaat

SEQ ID NO: 374291 - DNA, 25 bp, Artificial
  probe
  misc_feature (1)..(25): SEQ ID NO: 4141; WAN024F57; Start 82; Stop 106
attaccaacaatggacaggaaaacc

SEQ ID NO: 374292 - DNA, 25 bp, Artificial
  probe
  misc_feature (1)..(25): SEQ ID NO: 4141; WAN024F57; Start 79; Stop 103
gcgattaccaacaatggacaggaaa

SEQ ID NO: 374293 - DNA, 25 bp, Artificial
  probe
  misc_feature (1)..(25): SEQ ID NO: 4141; WAN024F57; Start 80; Stop 104
cgattaccaacaatggacaggaaaa

SEQ ID NO: 374294 - DNA, 25 bp, Artificial
  probe
  misc_feature (1)..(25): SEQ ID NO: 4141; WAN024F57; Start 14; Stop 38
atttctcagatgacctggcttttca

SEQ ID NO: 374295 - DNA, 25 bp, Artificial
  probe
  misc_feature (1)..(25): SEQ ID NO: 4141; WAN024F57; Start 74; Stop 98
tattggcgattaccaacaatggaca

SEQ ID NO: 374296 - DNA, 25 bp, Artificial
  probe
  misc_feature (1)..(25): SEQ ID NO: 4141; WAN024F57; Start 56; Stop 80
aagacacaacaggtgaggtattggc

SEQ ID NO: 374297 - DNA, 25 bp, Artificial
  probe
  misc_feature (1)..(25): SEQ ID NO: 4142; WAN024CD7; Start 182; Stop 206
gctttccaaagagttcaatctatgt

SEQ ID NO: 374298 - DNA, 25 bp, Artificial
  probe
  misc_feature (1)..(25): SEQ ID NO: 4142; WAN024CD7; Start 137; Stop 161
ctgtaagacacaaaggtttcattcc

SEQ ID NO: 374299 - DNA, 25 bp, Artificial
  probe
  misc_feature (1)..(25): SEQ ID NO: 4142; WAN024CD7; Start 136; Stop 160
gctgtaagacacaaaggtttcattc

SEQ ID NO: 374300 - DNA, 25 bp, Artificial
  probe
  misc_feature (1)..(25): SEQ ID NO: 4142; WAN024CD7; Start 138; Stop 162
tgtaagacacaaaggtttcattcct

SEQ ID NO: 374301 - DNA, 25 bp, Artificial
  probe
  misc_feature (1)..(25): SEQ ID NO: 4142; WAN024CD7; Start 181; Stop 205
agctttccaaagagttcaatctatg

SEQ ID NO: 374302 - DNA, 25 bp, Artificial
  probe
  misc_feature (1)..(25): SEQ ID NO: 4142; WAN024CD7; Start 158; Stop 182
ttccttgggatgatatggatctaag

SEQ ID NO: 374303 - DNA, 25 bp, Artificial
  probe
  misc_feature (1)..(25): SEQ ID NO: 4142; WAN024CD7; Start 156; Stop 180
cattccttgggatgatatggatcta

SEQ ID NO: 374304 - DNA, 25 bp, Artificial
  probe
  misc_feature (1)..(25): SEQ ID NO: 4142; WAN024CD7; Start 160; Stop 184
ccttgggatgatatggatctaagct

SEQ ID NO: 374305 - DNA, 25 bp, Artificial
  probe
  misc_feature (1)..(25): SEQ ID NO: 4142; WAN024CD7; Start 157; Stop 181
attccttgggatgatatggatctaa

SEQ ID NO: 374306 - DNA, 25 bp, Artificial
  probe
  misc_feature (1)..(25): SEQ ID NO: 4142; WAN024CD7; Start 128; Stop 152
tattaggagctgtaagacacaaagg

SEQ ID NO: 374307 - DNA, 25 bp, Artificial
  probe
  misc_feature (1)..(25): SEQ ID NO: 4142; WAN024CD7; Start 183; Stop 207
ctttccaaagagttcaatctatgtt

SEQ ID NO: 374308 - DNA, 25 bp, Artificial
  probe
  misc_feature (1)..(25): SEQ ID NO: 4142; WAN024CD7; Start 159; Stop 183
tccttgggatgatatggatctaagc

SEQ ID NO: 374309 - DNA, 25 bp, Artificial
  probe
  misc_feature (1)..(25): SEQ ID NO: 4142; WAN024CD7; Start 126; Stop 150
tctattaggagctgtaagacacaaa

SEQ ID NO: 374310 - DNA, 25 bp, Artificial
  probe
  misc_feature (1)..(25): SEQ ID NO: 4142; WAN024CD7; Start 127; Stop 151
ctattaggagctgtaagacacaaag

SEQ ID NO: 374311 - DNA, 25 bp, Artificial
  probe
  misc_feature (1)..(25): SEQ ID NO: 4142; WAN024CD7; Start 135; Stop 159
agctgtaagacacaaaggtttcatt

SEQ ID NO: 374312 - DNA, 25 bp, Artificial
  probe
  misc_feature (1)..(25): SEQ ID NO: 4142; WAN024CD7; Start 134; Stop 158
gagctgtaagacacaaaggtttcat

SEQ ID NO: 374313 - DNA, 25 bp, Artificial
  probe
  misc_feature (1)..(25): SEQ ID NO: 4142; WAN024CD7; Start 129; Stop 153
attaggagctgtaagacacaaaggt

SEQ ID NO: 374314 - DNA, 25 bp, Artificial
  probe
  misc_feature (1)..(25): SEQ ID NO: 4142; WAN024CD7; Start 153; Stop 177
tttcattccttgggatgatatggat

SEQ ID NO: 374315 - DNA, 25 bp, Artificial
  probe
  misc_feature (1)..(25): SEQ ID NO: 4142; WAN024CD7; Start 154; Stop 178
ttcattccttgggatgatatggatc

SEQ ID NO: 374316 - DNA, 25 bp, Artificial
  probe
  misc_feature (1)..(25): SEQ ID NO: 4142; WAN024CD7; Start 152; Stop 176
gtttcattccttgggatgatatgga

SEQ ID NO: 374317 - DNA, 25 bp, Artificial
  probe
  misc_feature (1)..(25): SEQ ID NO: 4142; WAN024CD7; Start 150; Stop 174
aggtttcattccttgggatgatatg

SEQ ID NO: 374318 - DNA, 25 bp, Artificial
  probe
  misc_feature (1)..(25): SEQ ID NO: 4142; WAN024CD7; Start 131; Stop 155
taggagctgtaagacacaaaggttt

SEQ ID NO: 374319 - DNA, 25 bp, Artificial
  probe
  misc_feature (1)..(25): SEQ ID NO: 4142; WAN024CD7; Start 130; Stop 154
ttaggagctgtaagacacaaaggtt

SEQ ID NO: 374320 - DNA, 25 bp, Artificial
  probe
  misc_feature (1)..(25): SEQ ID NO: 4142; WAN024CD7; Start 155; Stop 179
tcattccttgggatgatatggatct

SEQ ID NO: 374321 - DNA, 25 bp, Artificial
  probe
  misc_feature (1)..(25): SEQ ID NO: 4142; WAN024CD7; Start 125; Stop 149
gtctattaggagctgtaagacacaa

SEQ ID NO: 374322 - DNA, 25 bp, Artificial
  probe
  misc_feature (1)..(25): SEQ ID NO: 4142; WAN024CD7; Start 124; Stop 148
agtctattaggagctgtaagacaca

SEQ ID NO: 374323 - DNA, 25 bp, Artificial
  probe
  misc_feature (1)..(25): SEQ ID NO: 4142; WAN024CD7; Start 151; Stop 175
ggtttcattccttgggatgatatgg

SEQ ID NO: 374324 - DNA, 25 bp, Artificial
  probe
  misc_feature (1)..(25): SEQ ID NO: 4142; WAN024CD7; Start 132; Stop 156
aggagctgtaagacacaaaggtttc

SEQ ID NO: 374325 - DNA, 25 bp, Artificial
  probe
  misc_feature (1)..(25): SEQ ID NO: 4142; WAN024CD7; Start 133; Stop 157
ggagctgtaagacacaaaggtttca

SEQ ID NO: 374326 - DNA, 25 bp, Artificial
  probe
  misc_feature (1)..(25): SEQ ID NO: 4142; WAN024CD7; Start 163; Stop 187
tgggatgatatggatctaagctttc

SEQ ID NO: 374327 - DNA, 25 bp, Artificial
  probe
  misc_feature (1)..(25): SEQ ID NO: 4142; WAN024CD7; Start 162; Stop 186
ttgggatgatatggatctaagcttt

SEQ ID NO: 374328 - DNA, 25 bp, Artificial
  probe
  misc_feature (1)..(25): SEQ ID NO: 4142; WAN024CD7; Start 161; Stop 185
cttgggatgatatggatctaagctt

SEQ ID NO: 374329 - DNA, 25 bp, Artificial
  probe
  misc_feature (1)..(25): SEQ ID NO: 4142; WAN024CD7; Start 98; Stop 122
aaattaagtattttgctcttggagg

SEQ ID NO: 374330 - DNA, 25 bp, Artificial
  probe
  misc_feature (1)..(25): SEQ ID NO: 4143; WAN024CQM; Start 1362; Stop 1386
taatagtgtaaccgttcctgtgatt

SEQ ID NO: 374331 - DNA, 25 bp, Artificial
  probe
  misc_feature (1)..(25): SEQ ID NO: 4143; WAN024CQM; Start 1361; Stop 1385
gtaatagtgtaaccgttcctgtgat

SEQ ID NO: 374332 - DNA, 25 bp, Artificial
  probe
  misc_feature (1)..(25): SEQ ID NO: 4143; WAN024CQM; Start 1363; Stop 1387
aatagtgtaaccgttcctgtgattg

SEQ ID NO: 374333 - DNA, 25 bp, Artificial
  probe
  misc_feature (1)..(25): SEQ ID NO: 4143; WAN024CQM; Start 334; Stop 358
ggaagacgattgggatttgaagata

SEQ ID NO: 374334 - DNA, 25 bp, Artificial
  probe
  misc_feature (1)..(25): SEQ ID NO: 4143; WAN024CQM; Start 241; Stop 265
atacgagatgtttcagatgacgaat

SEQ ID NO: 374335 - DNA, 25 bp, Artificial
  probe
  misc_feature (1)..(25): SEQ ID NO: 4143; WAN024CQM; Start 242; Stop 266
tacgagatgtttcagatgacgaatt

SEQ ID NO: 374336 - DNA, 25 bp, Artificial
  probe
  misc_feature (1)..(25): SEQ ID NO: 4143; WAN024CQM; Start 244; Stop 268
cgagatgtttcagatgacgaattta

SEQ ID NO: 374337 - DNA, 25 bp, Artificial
  probe
  misc_feature (1)..(25): SEQ ID NO: 4143; WAN024CQM; Start 559; Stop 583
agagagagggtgtttattatcggac

SEQ ID NO: 374338 - DNA, 25 bp, Artificial
  probe
  misc_feature (1)..(25): SEQ ID NO: 4143; WAN024CQM; Start 558; Stop 582
cagagagagggtgtttattatcgga

SEQ ID NO: 374339 - DNA, 25 bp, Artificial
  probe
  misc_feature (1)..(25): SEQ ID NO: 4143; WAN024CQM; Start 1364; Stop 1388
atagtgtaaccgttcctgtgattgc

SEQ ID NO: 374340 - DNA, 25 bp, Artificial
  probe
  misc_feature (1)..(25): SEQ ID NO: 4143; WAN024CQM; Start 240; Stop 264
catacgagatgtttcagatgacgaa

SEQ ID NO: 374341 - DNA, 25 bp, Artificial
  probe
  misc_feature (1)..(25): SEQ ID NO: 4143; WAN024CQM; Start 243; Stop 267
acgagatgtttcagatgacgaattt

SEQ ID NO: 374342 - DNA, 25 bp, Artificial
  probe
  misc_feature (1)..(25): SEQ ID NO: 4143; WAN024CQM; Start 1360; Stop 1384
ggtaatagtgtaaccgttcctgtga

SEQ ID NO: 374343 - DNA, 25 bp, Artificial
  probe
  misc_feature (1)..(25): SEQ ID NO: 4143; WAN024CQM; Start 1358; Stop 1382
ctggtaatagtgtaaccgttcctgt

SEQ ID NO: 374344 - DNA, 25 bp, Artificial
  probe
  misc_feature (1)..(25): SEQ ID NO: 4143; WAN024CQM; Start 564; Stop 588
gagggtgtttattatcggacattct

SEQ ID NO: 374345 - DNA, 25 bp, Artificial
  probe
  misc_feature (1)..(25): SEQ ID NO: 4143; WAN024CQM; Start 563; Stop 587
agagggtgtttattatcggacattc

SEQ ID NO: 374346 - DNA, 25 bp, Artificial
  probe
  misc_feature (1)..(25): SEQ ID NO: 4143; WAN024CQM; Start 562; Stop 586
gagagggtgtttattatcggacatt

SEQ ID NO: 374347 - DNA, 25 bp, Artificial
  probe
  misc_feature (1)..(25): SEQ ID NO: 4143; WAN024CQM; Start 565; Stop 589
agggtgtttattatcggacattcta

SEQ ID NO: 374348 - DNA, 25 bp, Artificial
  probe
  misc_feature (1)..(25): SEQ ID NO: 4143; WAN024CQM; Start 333; Stop 357
aggaagacgattgggatttgaagat

SEQ ID NO: 374349 - DNA, 25 bp, Artificial
  probe
  misc_feature (1)..(25): SEQ ID NO: 4143; WAN024CQM; Start 1359; Stop 1383
tggtaatagtgtaaccgttcctgtg

SEQ ID NO: 374350 - DNA, 25 bp, Artificial
  probe
  misc_feature (1)..(25): SEQ ID NO: 4143; WAN024CQM; Start 561; Stop 585
agagagggtgtttattatcggacat

SEQ ID NO: 374351 - DNA, 25 bp, Artificial
  probe
  misc_feature (1)..(25): SEQ ID NO: 4143; WAN024CQM; Start 38; Stop 62
gtgacactttggatattgatagtcg

SEQ ID NO: 374352 - DNA, 25 bp, Artificial
  probe
  misc_feature (1)..(25): SEQ ID NO: 4143; WAN024CQM; Start 566; Stop 590
gggtgtttattatcggacattctag

SEQ ID NO: 374353 - DNA, 25 bp, Artificial
  probe
  misc_feature (1)..(25): SEQ ID NO: 4143; WAN024CQM; Start 560; Stop 584
gagagagggtgtttattatcggaca

SEQ ID NO: 374354 - DNA, 25 bp, Artificial
  probe
  misc_feature (1)..(25): SEQ ID NO: 4143; WAN024CQM; Start 557; Stop 581
acagagagagggtgtttattatcgg

SEQ ID NO: 374355 - DNA, 25 bp, Artificial
  probe
  misc_feature (1)..(25): SEQ ID NO: 4143; WAN024CQM; Start 1354; Stop 1378
caagctggtaatagtgtaaccgttc

SEQ ID NO: 374356 - DNA, 25 bp, Artificial
  probe
  misc_feature (1)..(25): SEQ ID NO: 4143; WAN024CQM; Start 37; Stop 61
tgtgacactttggatattgatagtc

SEQ ID NO: 374357 - DNA, 25 bp, Artificial
  probe
  misc_feature (1)..(25): SEQ ID NO: 4143; WAN024CQM; Start 245; Stop 269
gagatgtttcagatgacgaatttaa

SEQ ID NO: 374358 - DNA, 25 bp, Artificial
  probe
  misc_feature (1)..(25): SEQ ID NO: 4143; WAN024CQM; Start 332; Stop 356
caggaagacgattgggatttgaaga

SEQ ID NO: 374359 - DNA, 25 bp, Artificial
  probe
  misc_feature (1)..(25): SEQ ID NO: 4143; WAN024CQM; Start 1326; Stop 1350
agtctctagtaatagtcagctctat

SEQ ID NO: 374360 - DNA, 25 bp, Artificial
  probe
  misc_feature (1)..(25): SEQ ID NO: 4143; WAN024CQM; Start 1353; Stop 1377
acaagctggtaatagtgtaaccgtt

SEQ ID NO: 374361 - DNA, 25 bp, Artificial
  probe
  misc_feature (1)..(25): SEQ ID NO: 4143; WAN024CQM; Start 1352; Stop 1376
aacaagctggtaatagtgtaaccgt

SEQ ID NO: 374362 - DNA, 25 bp, Artificial
  probe
  misc_feature (1)..(25): SEQ ID NO: 4143; WAN024CQM; Start 1357; Stop 1381
gctggtaatagtgtaaccgttcctg

SEQ ID NO: 374363 - DNA, 25 bp, Artificial
  probe
  misc_feature (1)..(25): SEQ ID NO: 4144; WAN024B4T; Start 11; Stop 35
cattcatttccaagttcgtcatagg

SEQ ID NO: 374364 - DNA, 25 bp, Artificial
  probe
  misc_feature (1)..(25): SEQ ID NO: 4144; WAN024B4T; Start 10; Stop 34
ccattcatttccaagttcgtcatag

SEQ ID NO: 374365 - DNA, 25 bp, Artificial
  probe
  misc_feature (1)..(25): SEQ ID NO: 4144; WAN024B4T; Start 9; Stop 33
tccattcatttccaagttcgtcata

SEQ ID NO: 374366 - DNA, 25 bp, Artificial
  probe
  misc_feature (1)..(25): SEQ ID NO: 4144; WAN024B4T; Start 8; Stop 32
atccattcatttccaagttcgtcat

SEQ ID NO: 374367 - DNA, 25 bp, Artificial
  probe
  misc_feature (1)..(25): SEQ ID NO: 4144; WAN024B4T; Start 5; Stop 29
atcatccattcatttccaagttcgt

SEQ ID NO: 374368 - DNA, 25 bp, Artificial
  probe
  misc_feature (1)..(25): SEQ ID NO: 4144; WAN024B4T; Start 12; Stop 36
attcatttccaagttcgtcataggc

SEQ ID NO: 374369 - DNA, 25 bp, Artificial
  probe
  misc_feature (1)..(25): SEQ ID NO: 4144; WAN024B4T; Start 6; Stop 30
tcatccattcatttccaagttcgtc

SEQ ID NO: 374370 - DNA, 25 bp, Artificial
  probe
  misc_feature (1)..(25): SEQ ID NO: 4144; WAN024B4T; Start 4; Stop 28
gatcatccattcatttccaagttcg

SEQ ID NO: 374371 - DNA, 25 bp, Artificial
  probe
  misc_feature (1)..(25): SEQ ID NO: 4144; WAN024B4T; Start 7; Stop 31
catccattcatttccaagttcgtca

SEQ ID NO: 374372 - DNA, 25 bp, Artificial
  probe
  misc_feature (1)..(25): SEQ ID NO: 4144; WAN024B4T; Start 27; Stop 51
cgtcataggcgataatttcataatg

SEQ ID NO: 374373 - DNA, 25 bp, Artificial
  probe
  misc_feature (1)..(25): SEQ ID NO: 4144; WAN024B4T; Start 201; Stop 225
attcgaccaagtagtcctcaatcat

SEQ ID NO: 374374 - DNA, 25 bp, Artificial
  probe
  misc_feature (1)..(25): SEQ ID NO: 4144; WAN024B4T; Start 200; Stop 224
aattcgaccaagtagtcctcaatca

SEQ ID NO: 374375 - DNA, 25 bp, Artificial
  probe
  misc_feature (1)..(25): SEQ ID NO: 4144; WAN024B4T; Start 19; Stop 43
tccaagttcgtcataggcgataatt

SEQ ID NO: 374376 - DNA, 25 bp, Artificial
  probe
  misc_feature (1)..(25): SEQ ID NO: 4144; WAN024B4T; Start 18; Stop 42
ttccaagttcgtcataggcgataat

SEQ ID NO: 374377 - DNA, 25 bp, Artificial
  probe
  misc_feature (1)..(25): SEQ ID NO: 4144; WAN024B4T; Start 202; Stop 226
ttcgaccaagtagtcctcaatcatg

SEQ ID NO: 374378 - DNA, 25 bp, Artificial
  probe
  misc_feature (1)..(25): SEQ ID NO: 4144; WAN024B4T; Start 3; Stop 27
ggatcatccattcatttccaagttc

SEQ ID NO: 374379 - DNA, 25 bp, Artificial
  probe
  misc_feature (1)..(25): SEQ ID NO: 4144; WAN024B4T; Start 80; Stop 104
ttaacttggagcttgccttcttcag

SEQ ID NO: 374380 - DNA, 25 bp, Artificial
  probe
  misc_feature (1)..(25): SEQ ID NO: 4144; WAN024B4T; Start 79; Stop 103
cttaacttggagcttgccttcttca

SEQ ID NO: 374381 - DNA, 25 bp, Artificial
  probe
  misc_feature (1)..(25): SEQ ID NO: 4144; WAN024B4T; Start 142; Stop 166
ctcaacaggttcatttggcttcatc

SEQ ID NO: 374382 - DNA, 25 bp, Artificial
  probe
  misc_feature (1)..(25): SEQ ID NO: 4144; WAN024B4T; Start 197; Stop 221
ttaaattcgaccaagtagtcctcaa

SEQ ID NO: 374383 - DNA, 25 bp, Artificial
  probe
  misc_feature (1)..(25): SEQ ID NO: 4144; WAN024B4T; Start 198; Stop 222
taaattcgaccaagtagtcctcaat

SEQ ID NO: 374384 - DNA, 25 bp, Artificial
  probe
  misc_feature (1)..(25): SEQ ID NO: 4144; WAN024B4T; Start 196; Stop 220
gttaaattcgaccaagtagtcctca

SEQ ID NO: 374385 - DNA, 25 bp, Artificial
  probe
  misc_feature (1)..(25): SEQ ID NO: 4144; WAN024B4T; Start 21; Stop 45
caagttcgtcataggcgataatttc

SEQ ID NO: 374386 - DNA, 25 bp, Artificial
  probe
  misc_feature (1)..(25): SEQ ID NO: 4144; WAN024B4T; Start 199; Stop 223
aaattcgaccaagtagtcctcaatc

SEQ ID NO: 374387 - DNA, 25 bp, Artificial
  probe
  misc_feature (1)..(25): SEQ ID NO: 4144; WAN024B4T; Start 23; Stop 47
agttcgtcataggcgataatttcat

SEQ ID NO: 374388 - DNA, 25 bp, Artificial
  probe
  misc_feature (1)..(25): SEQ ID NO: 4144; WAN024B4T; Start 22; Stop 46
aagttcgtcataggcgataatttca

SEQ ID NO: 374389 - DNA, 25 bp, Artificial
  probe
  misc_feature (1)..(25): SEQ ID NO: 4144; WAN024B4T; Start 124; Stop 148
ctctggacgaataacgacctcaaca

SEQ ID NO: 374390 - DNA, 25 bp, Artificial
  probe
  misc_feature (1)..(25): SEQ ID NO: 4144; WAN024B4T; Start 24; Stop 48
gttcgtcataggcgataatttcata

SEQ ID NO: 374391 - DNA, 25 bp, Artificial
  probe
  misc_feature (1)..(25): SEQ ID NO: 4144; WAN024B4T; Start 78; Stop 102
ccttaacttggagcttgccttcttc

SEQ ID NO: 374392 - DNA, 25 bp, Artificial
  probe
  misc_feature (1)..(25): SEQ ID NO: 4144; WAN024B4T; Start 195; Stop 219
cgttaaattcgaccaagtagtcctc

SEQ ID NO: 374393 - DNA, 25 bp, Artificial
  probe
  misc_feature (1)..(25): SEQ ID NO: 4144; WAN024B4T; Start 190; Stop 214
tttgccgttaaattcgaccaagtag

SEQ ID NO: 374394 - DNA, 25 bp, Artificial
  probe
  misc_feature (1)..(25): SEQ ID NO: 4144; WAN024B4T; Start 71; Stop 95
gtatcgaccttaacttggagcttgc

SEQ ID NO: 374395 - DNA, 25 bp, Artificial
  probe
  misc_feature (1)..(25): SEQ ID NO: 4144; WAN024B4T; Start 25; Stop 49
ttcgtcataggcgataatttcataa

SEQ ID NO: 374396 - DNA, 25 bp, Artificial
  probe
  misc_feature (1)..(25): SEQ ID NO: 4145; WAN024BEK; Start 61; Stop 85
aacttcacattgccgactaaattac

SEQ ID NO: 374397 - DNA, 25 bp, Artificial
  probe
  misc_feature (1)..(25): SEQ ID NO: 4145; WAN024BEK; Start 63; Stop 87
cttcacattgccgactaaattacag

SEQ ID NO: 374398 - DNA, 25 bp, Artificial
  probe
  misc_feature (1)..(25): SEQ ID NO: 4145; WAN024BEK; Start 62; Stop 86
acttcacattgccgactaaattaca

SEQ ID NO: 374399 - DNA, 25 bp, Artificial
  probe
  misc_feature (1)..(25): SEQ ID NO: 4145; WAN024BEK; Start 60; Stop 84
caacttcacattgccgactaaatta

SEQ ID NO: 374400 - DNA, 25 bp, Artificial
  probe
  misc_feature (1)..(25): SEQ ID NO: 4145; WAN024BEK; Start 59; Stop 83
tcaacttcacattgccgactaaatt

SEQ ID NO: 374401 - DNA, 25 bp, Artificial
  probe
  misc_feature (1)..(25): SEQ ID NO: 4145; WAN024BEK; Start 64; Stop 88
ttcacattgccgactaaattacagc

SEQ ID NO: 374402 - DNA, 25 bp, Artificial
  probe
  misc_feature (1)..(25): SEQ ID NO: 4145; WAN024BEK; Start 3; Stop 27
ggatgaagctggcgaaatattatta

SEQ ID NO: 374403 - DNA, 25 bp, Artificial
  probe
  misc_feature (1)..(25): SEQ ID NO: 4145; WAN024BEK; Start 2; Stop 26
tggatgaagctggcgaaatattatt

SEQ ID NO: 374404 - DNA, 25 bp, Artificial
  probe
  misc_feature (1)..(25): SEQ ID NO: 4145; WAN024BEK; Start 1; Stop 25
gtggatgaagctggcgaaatattat

SEQ ID NO: 374405 - DNA, 25 bp, Artificial
  probe
  misc_feature (1)..(25): SEQ ID NO: 4145; WAN024BEK; Start 4; Stop 28
gatgaagctggcgaaatattattaa

SEQ ID NO: 374406 - DNA, 25 bp, Artificial
  probe
  misc_feature (1)..(25): SEQ ID NO: 4145; WAN024BEK; Start 66; Stop 90
cacattgccgactaaattacagcct

SEQ ID NO: 374407 - DNA, 25 bp, Artificial
  probe
  misc_feature (1)..(25): SEQ ID NO: 4145; WAN024BEK; Start 65; Stop 89
tcacattgccgactaaattacagcc

SEQ ID NO: 374408 - DNA, 25 bp, Artificial
  probe
  misc_feature (1)..(25): SEQ ID NO: 4145; WAN024BEK; Start 5; Stop 29
atgaagctggcgaaatattattaat

SEQ ID NO: 374409 - DNA, 25 bp, Artificial
  probe
  misc_feature (1)..(25): SEQ ID NO: 4145; WAN024BEK; Start 67; Stop 91
acattgccgactaaattacagcctg

SEQ ID NO: 374410 - DNA, 25 bp, Artificial
  probe
  misc_feature (1)..(25): SEQ ID NO: 4145; WAN024BEK; Start 97; Stop 121
ggcttcctagtttgcactttgattt

SEQ ID NO: 374411 - DNA, 25 bp, Artificial
  probe
  misc_feature (1)..(25): SEQ ID NO: 4145; WAN024BEK; Start 96; Stop 120
tggcttcctagtttgcactttgatt

SEQ ID NO: 374412 - DNA, 25 bp, Artificial
  probe
  misc_feature (1)..(25): SEQ ID NO: 4145; WAN024BEK; Start 95; Stop 119
ctggcttcctagtttgcactttgat

SEQ ID NO: 374413 - DNA, 25 bp, Artificial
  probe
  misc_feature (1)..(25): SEQ ID NO: 4145; WAN024BEK; Start 8; Stop 32
aagctggcgaaatattattaatact

SEQ ID NO: 374414 - DNA, 25 bp, Artificial
  probe
  misc_feature (1)..(25): SEQ ID NO: 4145; WAN024BEK; Start 6; Stop 30
tgaagctggcgaaatattattaata

SEQ ID NO: 374415 - DNA, 25 bp, Artificial
  probe
  misc_feature (1)..(25): SEQ ID NO: 4145; WAN024BEK; Start 7; Stop 31
gaagctggcgaaatattattaatac

SEQ ID NO: 374416 - DNA, 25 bp, Artificial
  probe
  misc_feature (1)..(25): SEQ ID NO: 4145; WAN024BEK; Start 146; Stop 170
ctttaaatcaagcagttctaactaa

SEQ ID NO: 374417 - DNA, 25 bp, Artificial
  probe
  misc_feature (1)..(25): SEQ ID NO: 4145; WAN024BEK; Start 9; Stop 33
agctggcgaaatattattaatacta

SEQ ID NO: 374418 - DNA, 25 bp, Artificial
  probe
  misc_feature (1)..(25): SEQ ID NO: 4145; WAN024BEK; Start 144; Stop 168
agctttaaatcaagcagttctaact

SEQ ID NO: 374419 - DNA, 25 bp, Artificial
  probe
  misc_feature (1)..(25): SEQ ID NO: 4145; WAN024BEK; Start 147; Stop 171
tttaaatcaagcagttctaactaat

SEQ ID NO: 374420 - DNA, 25 bp, Artificial
  probe
  misc_feature (1)..(25): SEQ ID NO: 4145; WAN024BEK; Start 145; Stop 169
gctttaaatcaagcagttctaacta

SEQ ID NO: 374421 - DNA, 25 bp, Artificial
  probe
  misc_feature (1)..(25): SEQ ID NO: 4145; WAN024BEK; Start 10; Stop 34
gctggcgaaatattattaatactat

SEQ ID NO: 374422 - DNA, 25 bp, Artificial
  probe
  misc_feature (1)..(25): SEQ ID NO: 4145; WAN024BEK; Start 143; Stop 167
aagctttaaatcaagcagttctaac

SEQ ID NO: 374423 - DNA, 25 bp, Artificial
  probe
  misc_feature (1)..(25): SEQ ID NO: 4146; WAN024CO3; Start 52; Stop 76
gtactactgagccggaatatatcac

SEQ ID NO: 374424 - DNA, 25 bp, Artificial
  probe
  misc_feature (1)..(25): SEQ ID NO: 4146; WAN024CO3; Start 53; Stop 77
tactactgagccggaatatatcaca

SEQ ID NO: 374425 - DNA, 25 bp, Artificial
  probe
  misc_feature (1)..(25): SEQ ID NO: 4146; WAN024CO3; Start 65; Stop 89
ggaatatatcacaggcaaagaagct

SEQ ID NO: 374426 - DNA, 25 bp, Artificial
  probe
  misc_feature (1)..(25): SEQ ID NO: 4146; WAN024CO3; Start 64; Stop 88
cggaatatatcacaggcaaagaagc

SEQ ID NO: 374427 - DNA, 25 bp, Artificial
  probe
  misc_feature (1)..(25): SEQ ID NO: 4146; WAN024CO3; Start 51; Stop 75
ggtactactgagccggaatatatca

SEQ ID NO: 374428 - DNA, 25 bp, Artificial
  probe
  misc_feature (1)..(25): SEQ ID NO: 4146; WAN024CO3; Start 66; Stop 90
gaatatatcacaggcaaagaagctg

SEQ ID NO: 374429 - DNA, 25 bp, Artificial
  probe
  misc_feature (1)..(25): SEQ ID NO: 4146; WAN024CO3; Start 54; Stop 78
actactgagccggaatatatcacag

SEQ ID NO: 374430 - DNA, 25 bp, Artificial
  probe
  misc_feature (1)..(25): SEQ ID NO: 4146; WAN024CO3; Start 55; Stop 79
ctactgagccggaatatatcacagg

SEQ ID NO: 374431 - DNA, 25 bp, Artificial
  probe
  misc_feature (1)..(25): SEQ ID NO: 4146; WAN024CO3; Start 63; Stop 87
ccggaatatatcacaggcaaagaag

SEQ ID NO: 374432 - DNA, 25 bp, Artificial
  probe
  misc_feature (1)..(25): SEQ ID NO: 4146; WAN024CO3; Start 67; Stop 91
aatatatcacaggcaaagaagctgc

SEQ ID NO: 374433 - DNA, 25 bp, Artificial
  probe
  misc_feature (1)..(25): SEQ ID NO: 4146; WAN024CO3; Start 80; Stop 104
caaagaagctgctagtcgaatcttg

SEQ ID NO: 374434 - DNA, 25 bp, Artificial
  probe
  misc_feature (1)..(25): SEQ ID NO: 4146; WAN024CO3; Start 69; Stop 93
tatatcacaggcaaagaagctgcta

SEQ ID NO: 374435 - DNA, 25 bp, Artificial
  probe
  misc_feature (1)..(25): SEQ ID NO: 4146; WAN024CO3; Start 81; Stop 105
aaagaagctgctagtcgaatcttga

SEQ ID NO: 374436 - DNA, 25 bp, Artificial
  probe
  misc_feature (1)..(25): SEQ ID NO: 4146; WAN024CO3; Start 38; Stop 62
ctttacctggaacggtactactgag

SEQ ID NO: 374437 - DNA, 25 bp, Artificial
  probe
  misc_feature (1)..(25): SEQ ID NO: 4146; WAN024CO3; Start 68; Stop 92
atatatcacaggcaaagaagctgct

SEQ ID NO: 374438 - DNA, 25 bp, Artificial
  probe
  misc_feature (1)..(25): SEQ ID NO: 4146; WAN024CO3; Start 50; Stop 74
cggtactactgagccggaatatatc

SEQ ID NO: 374439 - DNA, 25 bp, Artificial
  probe
  misc_feature (1)..(25): SEQ ID NO: 4146; WAN024CO3; Start 11; Stop 35
ctatcattgcaactggtgtgactca

SEQ ID NO: 374440 - DNA, 25 bp, Artificial
  probe
  misc_feature (1)..(25): SEQ ID NO: 4146; WAN024CO3; Start 10; Stop 34
actatcattgcaactggtgtgactc

SEQ ID NO: 374441 - DNA, 25 bp, Artificial
  probe
  misc_feature (1)..(25): SEQ ID NO: 4146; WAN024CO3; Start 9; Stop 33
gactatcattgcaactggtgtgact

SEQ ID NO: 374442 - DNA, 25 bp, Artificial
  probe
  misc_feature (1)..(25): SEQ ID NO: 4146; WAN024CO3; Start 70; Stop 94
atatcacaggcaaagaagctgctag

SEQ ID NO: 374443 - DNA, 25 bp, Artificial
  probe
  misc_feature (1)..(25): SEQ ID NO: 4146; WAN024CO3; Start 49; Stop 73
acggtactactgagccggaatatat

SEQ ID NO: 374444 - DNA, 25 bp, Artificial
  probe
  misc_feature (1)..(25): SEQ ID NO: 4146; WAN024CO3; Start 37; Stop 61
cctttacctggaacggtactactga

SEQ ID NO: 374445 - DNA, 25 bp, Artificial
  probe
  misc_feature (1)..(25): SEQ ID NO: 4146; WAN024CO3; Start 12; Stop 36
tatcattgcaactggtgtgactcag

SEQ ID NO: 374446 - DNA, 25 bp, Artificial
  probe
  misc_feature (1)..(25): SEQ ID NO: 4146; WAN024CO3; Start 48; Stop 72
aacggtactactgagccggaatata

SEQ ID NO: 374447 - DNA, 25 bp, Artificial
  probe
  misc_feature (1)..(25): SEQ ID NO: 4146; WAN024CO3; Start 39; Stop 63
tttacctggaacggtactactgagc

SEQ ID NO: 374448 - DNA, 25 bp, Artificial
  probe
  misc_feature (1)..(25): SEQ ID NO: 4146; WAN024CO3; Start 79; Stop 103
gcaaagaagctgctagtcgaatctt

SEQ ID NO: 374449 - DNA, 25 bp, Artificial
  probe
  misc_feature (1)..(25): SEQ ID NO: 4146; WAN024CO3; Start 8; Stop 32
cgactatcattgcaactggtgtgac

SEQ ID NO: 374450 - DNA, 25 bp, Artificial
  probe
  misc_feature (1)..(25): SEQ ID NO: 4146; WAN024CO3; Start 71; Stop 95
tatcacaggcaaagaagctgctagt

SEQ ID NO: 374451 - DNA, 25 bp, Artificial
  probe
  misc_feature (1)..(25): SEQ ID NO: 4146; WAN024CO3; Start 47; Stop 71
gaacggtactactgagccggaatat

SEQ ID NO: 374452 - DNA, 25 bp, Artificial
  probe
  misc_feature (1)..(25): SEQ ID NO: 4146; WAN024CO3; Start 56; Stop 80
tactgagccggaatatatcacaggc

SEQ ID NO: 374453 - DNA, 25 bp, Artificial
  probe
  misc_feature (1)..(25): SEQ ID NO: 4146; WAN024CO3; Start 36; Stop 60
gcctttacctggaacggtactactg

SEQ ID NO: 374454 - DNA, 25 bp, Artificial
  probe
  misc_feature (1)..(25): SEQ ID NO: 4146; WAN024CO3; Start 34; Stop 58
cagcctttacctggaacggtactac

SEQ ID NO: 374455 - DNA, 25 bp, Artificial
  probe
  misc_feature (1)..(25): SEQ ID NO: 4146; WAN024CO3; Start 35; Stop 59
agcctttacctggaacggtactact

SEQ ID NO: 374456 - DNA, 25 bp, Artificial
  probe
  misc_feature (1)..(25): SEQ ID NO: 4147; WAN024CMR; Start 119; Stop 143
ttgcttcatctgttcctctaactaa

SEQ ID NO: 374457 - DNA, 25 bp, Artificial
  probe
  misc_feature (1)..(25): SEQ ID NO: 4147; WAN024CMR; Start 120; Stop 144
tgcttcatctgttcctctaactaat

SEQ ID NO: 374458 - DNA, 25 bp, Artificial
  probe
  misc_feature (1)..(25): SEQ ID NO: 4147; WAN024CMR; Start 75; Stop 99
aacggacttactcattgactcttca

SEQ ID NO: 374459 - DNA, 25 bp, Artificial
  probe
  misc_feature (1)..(25): SEQ ID NO: 4147; WAN024CMR; Start 4; Stop 28
gatggacgtgtaataacctcttctt

SEQ ID NO: 374460 - DNA, 25 bp, Artificial
  probe
  misc_feature (1)..(25): SEQ ID NO: 4147; WAN024CMR; Start 74; Stop 98
aaacggacttactcattgactcttc

SEQ ID NO: 374461 - DNA, 25 bp, Artificial
  probe
  misc_feature (1)..(25): SEQ ID NO: 4147; WAN024CMR; Start 73; Stop 97
gaaacggacttactcattgactctt

SEQ ID NO: 374462 - DNA, 25 bp, Artificial
  probe
  misc_feature (1)..(25): SEQ ID NO: 4147; WAN024CMR; Start 118; Stop 142
tttgcttcatctgttcctctaacta

SEQ ID NO: 374463 - DNA, 25 bp, Artificial
  probe
  misc_feature (1)..(25): SEQ ID NO: 4147; WAN024CMR; Start 71; Stop 95
cagaaacggacttactcattgactc

SEQ ID NO: 374464 - DNA, 25 bp, Artificial
  probe
  misc_feature (1)..(25): SEQ ID NO: 4147; WAN024CMR; Start 3; Stop 27
ggatggacgtgtaataacctcttct

SEQ ID NO: 374465 - DNA, 25 bp, Artificial
  probe
  misc_feature (1)..(25): SEQ ID NO: 4147; WAN024CMR; Start 72; Stop 96
agaaacggacttactcattgactct

SEQ ID NO: 374466 - DNA, 25 bp, Artificial
  probe
  misc_feature (1)..(25): SEQ ID NO: 4147; WAN024CMR; Start 2; Stop 26
tggatggacgtgtaataacctcttc

SEQ ID NO: 374467 - DNA, 25 bp, Artificial
  probe
  misc_feature (1)..(25): SEQ ID NO: 4147; WAN024CMR; Start 1; Stop 25
gtggatggacgtgtaataacctctt

SEQ ID NO: 374468 - DNA, 25 bp, Artificial
  probe
  misc_feature (1)..(25): SEQ ID NO: 4147; WAN024CMR; Start 70; Stop 94
ccagaaacggacttactcattgact

SEQ ID NO: 374469 - DNA, 25 bp, Artificial
  probe
  misc_feature (1)..(25): SEQ ID NO: 4147; WAN024CMR; Start 76; Stop 100
acggacttactcattgactcttcaa

SEQ ID NO: 374470 - DNA, 25 bp, Artificial
  probe
  misc_feature (1)..(25): SEQ ID NO: 4147; WAN024CMR; Start 5; Stop 29
atggacgtgtaataacctcttcttt

SEQ ID NO: 374471 - DNA, 25 bp, Artificial
  probe
  misc_feature (1)..(25): SEQ ID NO: 4147; WAN024CMR; Start 6; Stop 30
tggacgtgtaataacctcttctttc

SEQ ID NO: 374472 - DNA, 25 bp, Artificial
  probe
  misc_feature (1)..(25): SEQ ID NO: 4147; WAN024CMR; Start 8; Stop 32
gacgtgtaataacctcttctttcga

SEQ ID NO: 374473 - DNA, 25 bp, Artificial
  probe
  misc_feature (1)..(25): SEQ ID NO: 4147; WAN024CMR; Start 7; Stop 31
ggacgtgtaataacctcttctttcg

SEQ ID NO: 374474 - DNA, 25 bp, Artificial
  probe
  misc_feature (1)..(25): SEQ ID NO: 4147; WAN024CMR; Start 9; Stop 33
acgtgtaataacctcttctttcgag

SEQ ID NO: 374475 - DNA, 25 bp, Artificial
  probe
  misc_feature (1)..(25): SEQ ID NO: 4147; WAN024CMR; Start 69; Stop 93
cccagaaacggacttactcattgac

SEQ ID NO: 374476 - DNA, 25 bp, Artificial
  probe
  misc_feature (1)..(25): SEQ ID NO: 4147; WAN024CMR; Start 115; Stop 139
gattttgcttcatctgttcctctaa

SEQ ID NO: 374477 - DNA, 25 bp, Artificial
  probe
  misc_feature (1)..(25): SEQ ID NO: 4147; WAN024CMR; Start 99; Stop 123
aaagatttggggagaagattttgct

SEQ ID NO: 374478 - DNA, 25 bp, Artificial
  probe
  misc_feature (1)..(25): SEQ ID NO: 4147; WAN024CMR; Start 117; Stop 141
ttttgcttcatctgttcctctaact

SEQ ID NO: 374479 - DNA, 25 bp, Artificial
  probe
  misc_feature (1)..(25): SEQ ID NO: 4147; WAN024CMR; Start 116; Stop 140
attttgcttcatctgttcctctaac

SEQ ID NO: 374480 - DNA, 25 bp, Artificial
  probe
  misc_feature (1)..(25): SEQ ID NO: 4147; WAN024CMR; Start 85; Stop 109
ctcattgactcttcaaagatttggg

SEQ ID NO: 374481 - DNA, 25 bp, Artificial
  probe
  misc_feature (1)..(25): SEQ ID NO: 4147; WAN024CMR; Start 84; Stop 108
actcattgactcttcaaagatttgg

SEQ ID NO: 374482 - DNA, 25 bp, Artificial
  probe
  misc_feature (1)..(25): SEQ ID NO: 4147; WAN024CMR; Start 78; Stop 102
ggacttactcattgactcttcaaag

SEQ ID NO: 374483 - DNA, 25 bp, Artificial
  probe
  misc_feature (1)..(25): SEQ ID NO: 4147; WAN024CMR; Start 100; Stop 124
aagatttggggagaagattttgctt

SEQ ID NO: 374484 - DNA, 25 bp, Artificial
  probe
  misc_feature (1)..(25): SEQ ID NO: 4147; WAN024CMR; Start 77; Stop 101
cggacttactcattgactcttcaaa

SEQ ID NO: 374485 - DNA, 25 bp, Artificial
  probe
  misc_feature (1)..(25): SEQ ID NO: 4147; WAN024CMR; Start 79; Stop 103
gacttactcattgactcttcaaaga

SEQ ID NO: 374486 - DNA, 25 bp, Artificial
  probe
  misc_feature (1)..(25): SEQ ID NO: 4147; WAN024CMR; Start 96; Stop 120
ttcaaagatttggggagaagatttt

SEQ ID NO: 374487 - DNA, 25 bp, Artificial
  probe
  misc_feature (1)..(25): SEQ ID NO: 4147; WAN024CMR; Start 80; Stop 104
acttactcattgactcttcaaagat

SEQ ID NO: 374488 - DNA, 25 bp, Artificial
  probe
  misc_feature (1)..(25): SEQ ID NO: 4147; WAN024CMR; Start 90; Stop 114
tgactcttcaaagatttggggagaa

SEQ ID NO: 374489 - DNA, 25 bp, Artificial
  probe
  misc_feature (1)..(25): SEQ ID NO: 4148; WAN024F2J; Start 66; Stop 90
gaagagccttaccatcaatcaagac

SEQ ID NO: 374490 - DNA, 25 bp, Artificial
  probe
  misc_feature (1)..(25): SEQ ID NO: 4148; WAN024F2J; Start 67; Stop 91
aagagccttaccatcaatcaagact

SEQ ID NO: 374491 - DNA, 25 bp, Artificial
  probe
  misc_feature (1)..(25): SEQ ID NO: 4148; WAN024F2J; Start 68; Stop 92
agagccttaccatcaatcaagactg

SEQ ID NO: 374492 - DNA, 25 bp, Artificial
  probe
  misc_feature (1)..(25): SEQ ID NO: 4148; WAN024F2J; Start 65; Stop 89
cgaagagccttaccatcaatcaaga

SEQ ID NO: 374493 - DNA, 25 bp, Artificial
  probe
  misc_feature (1)..(25): SEQ ID NO: 4148; WAN024F2J; Start 275; Stop 299
ttaaagagttcaatcgccatttcac

SEQ ID NO: 374494 - DNA, 25 bp, Artificial
  probe
  misc_feature (1)..(25): SEQ ID NO: 4148; WAN024F2J; Start 152; Stop 176
tgttctttaatcacttcttcaagga

SEQ ID NO: 374495 - DNA, 25 bp, Artificial
  probe
  misc_feature (1)..(25): SEQ ID NO: 4148; WAN024F2J; Start 276; Stop 300
taaagagttcaatcgccatttcacg

SEQ ID NO: 374496 - DNA, 25 bp, Artificial
  probe
  misc_feature (1)..(25): SEQ ID NO: 4148; WAN024F2J; Start 148; Stop 172
tgggtgttctttaatcacttcttca

SEQ ID NO: 374497 - DNA, 25 bp, Artificial
  probe
  misc_feature (1)..(25): SEQ ID NO: 4148; WAN024F2J; Start 147; Stop 171
ctgggtgttctttaatcacttcttc

SEQ ID NO: 374498 - DNA, 25 bp, Artificial
  probe
  misc_feature (1)..(25): SEQ ID NO: 4148; WAN024F2J; Start 146; Stop 170
actgggtgttctttaatcacttctt

SEQ ID NO: 374499 - DNA, 25 bp, Artificial
  probe
  misc_feature (1)..(25): SEQ ID NO: 4148; WAN024F2J; Start 149; Stop 173
gggtgttctttaatcacttcttcaa

SEQ ID NO: 374500 - DNA, 25 bp, Artificial
  probe
  misc_feature (1)..(25): SEQ ID NO: 4148; WAN024F2J; Start 145; Stop 169
cactgggtgttctttaatcacttct

SEQ ID NO: 374501 - DNA, 25 bp, Artificial
  probe
  misc_feature (1)..(25): SEQ ID NO: 4148; WAN024F2J; Start 274; Stop 298
tttaaagagttcaatcgccatttca

SEQ ID NO: 374502 - DNA, 25 bp, Artificial
  probe
  misc_feature (1)..(25): SEQ ID NO: 4148; WAN024F2J; Start 267; Stop 291
caaatggtttaaagagttcaatcgc

SEQ ID NO: 374503 - DNA, 25 bp, Artificial
  probe
  misc_feature (1)..(25): SEQ ID NO: 4148; WAN024F2J; Start 273; Stop 297
gtttaaagagttcaatcgccatttc

SEQ ID NO: 374504 - DNA, 25 bp, Artificial
  probe
  misc_feature (1)..(25): SEQ ID NO: 4148; WAN024F2J; Start 272; Stop 296
ggtttaaagagttcaatcgccattt

SEQ ID NO: 374505 - DNA, 25 bp, Artificial
  probe
  misc_feature (1)..(25): SEQ ID NO: 4148; WAN024F2J; Start 268; Stop 292
aaatggtttaaagagttcaatcgcc

SEQ ID NO: 374506 - DNA, 25 bp, Artificial
  probe
  misc_feature (1)..(25): SEQ ID NO: 4148; WAN024F2J; Start 254; Stop 278
atttcacgcatgacaaatggtttaa

SEQ ID NO: 374507 - DNA, 25 bp, Artificial
  probe
  misc_feature (1)..(25): SEQ ID NO: 4148; WAN024F2J; Start 261; Stop 285
gcatgacaaatggtttaaagagttc

SEQ ID NO: 374508 - DNA, 25 bp, Artificial
  probe
  misc_feature (1)..(25): SEQ ID NO: 4148; WAN024F2J; Start 253; Stop 277
gatttcacgcatgacaaatggttta

SEQ ID NO: 374509 - DNA, 25 bp, Artificial
  probe
  misc_feature (1)..(25): SEQ ID NO: 4148; WAN024F2J; Start 260; Stop 284
cgcatgacaaatggtttaaagagtt

SEQ ID NO: 374510 - DNA, 25 bp, Artificial
  probe
  misc_feature (1)..(25): SEQ ID NO: 4148; WAN024F2J; Start 151; Stop 175
gtgttctttaatcacttcttcaagg

SEQ ID NO: 374511 - DNA, 25 bp, Artificial
  probe
  misc_feature (1)..(25): SEQ ID NO: 4148; WAN024F2J; Start 150; Stop 174
ggtgttctttaatcacttcttcaag

SEQ ID NO: 374512 - DNA, 25 bp, Artificial
  probe
  misc_feature (1)..(25): SEQ ID NO: 4148; WAN024F2J; Start 266; Stop 290
acaaatggtttaaagagttcaatcg

SEQ ID NO: 374513 - DNA, 25 bp, Artificial
  probe
  misc_feature (1)..(25): SEQ ID NO: 4148; WAN024F2J; Start 255; Stop 279
tttcacgcatgacaaatggtttaaa

SEQ ID NO: 374514 - DNA, 25 bp, Artificial
  probe
  misc_feature (1)..(25): SEQ ID NO: 4148; WAN024F2J; Start 64; Stop 88
gcgaagagccttaccatcaatcaag

SEQ ID NO: 374515 - DNA, 25 bp, Artificial
  probe
  misc_feature (1)..(25): SEQ ID NO: 4148; WAN024F2J; Start 61; Stop 85
caagcgaagagccttaccatcaatc

SEQ ID NO: 374516 - DNA, 25 bp, Artificial
  probe
  misc_feature (1)..(25): SEQ ID NO: 4148; WAN024F2J; Start 153; Stop 177
gttctttaatcacttcttcaaggat

SEQ ID NO: 374517 - DNA, 25 bp, Artificial
  probe
  misc_feature (1)..(25): SEQ ID NO: 4148; WAN024F2J; Start 258; Stop 282
cacgcatgacaaatggtttaaagag

SEQ ID NO: 374518 - DNA, 25 bp, Artificial
  probe
  misc_feature (1)..(25): SEQ ID NO: 4148; WAN024F2J; Start 72; Stop 96
ccttaccatcaatcaagactggctc

SEQ ID NO: 374519 - DNA, 25 bp, Artificial
  probe
  misc_feature (1)..(25): SEQ ID NO: 4148; WAN024F2J; Start 69; Stop 93
gagccttaccatcaatcaagactgg

SEQ ID NO: 374520 - DNA, 25 bp, Artificial
  probe
  misc_feature (1)..(25): SEQ ID NO: 4148; WAN024F2J; Start 256; Stop 280
ttcacgcatgacaaatggtttaaag

SEQ ID NO: 374521 - DNA, 25 bp, Artificial
  probe
  misc_feature (1)..(25): SEQ ID NO: 4148; WAN024F2J; Start 259; Stop 283
acgcatgacaaatggtttaaagagt

SEQ ID NO: 374522 - DNA, 25 bp, Artificial
  probe
  misc_feature (1)..(25): SEQ ID NO: 4149; WAN024GGS; Start 998; Stop 1022
ctatctatgaagaagccaagaccat

SEQ ID NO: 374523 - DNA, 25 bp, Artificial
  probe
  misc_feature (1)..(25): SEQ ID NO: 4149; WAN024GGS; Start 14; Stop 38
tgataacacctacttatgaatggca

SEQ ID NO: 374524 - DNA, 25 bp, Artificial
  probe
  misc_feature (1)..(25): SEQ ID NO: 4149; WAN024GGS; Start 730; Stop 754
cgtatcttagttcaatatggtctgg

SEQ ID NO: 374525 - DNA, 25 bp, Artificial
  probe
  misc_feature (1)..(25): SEQ ID NO: 4149; WAN024GGS; Start 994; Stop 1018
cagtctatctatgaagaagccaaga

SEQ ID NO: 374526 - DNA, 25 bp, Artificial
  probe
  misc_feature (1)..(25): SEQ ID NO: 4149; WAN024GGS; Start 997; Stop 1021
tctatctatgaagaagccaagacca

SEQ ID NO: 374527 - DNA, 25 bp, Artificial
  probe
  misc_feature (1)..(25): SEQ ID NO: 4149; WAN024GGS; Start 15; Stop 39
gataacacctacttatgaatggcag

SEQ ID NO: 374528 - DNA, 25 bp, Artificial
  probe
  misc_feature (1)..(25): SEQ ID NO: 4149; WAN024GGS; Start 17; Stop 41
taacacctacttatgaatggcagtt

SEQ ID NO: 374529 - DNA, 25 bp, Artificial
  probe
  misc_feature (1)..(25): SEQ ID NO: 4149; WAN024GGS; Start 16; Stop 40
ataacacctacttatgaatggcagt

SEQ ID NO: 374530 - DNA, 25 bp, Artificial
  probe
  misc_feature (1)..(25): SEQ ID NO: 4149; WAN024GGS; Start 993; Stop 1017
tcagtctatctatgaagaagccaag

SEQ ID NO: 374531 - DNA, 25 bp, Artificial
  probe
  misc_feature (1)..(25): SEQ ID NO: 4149; WAN024GGS; Start 2030; Stop 2054
tgctggtcaagatgattcaagtatt

SEQ ID NO: 374532 - DNA, 25 bp, Artificial
  probe
  misc_feature (1)..(25): SEQ ID NO: 4149; WAN024GGS; Start 2029; Stop 2053
ttgctggtcaagatgattcaagtat

SEQ ID NO: 374533 - DNA, 25 bp, Artificial
  probe
  misc_feature (1)..(25): SEQ ID NO: 4149; WAN024GGS; Start 13; Stop 37
ttgataacacctacttatgaatggc

SEQ ID NO: 374534 - DNA, 25 bp, Artificial
  probe
  misc_feature (1)..(25): SEQ ID NO: 4149; WAN024GGS; Start 555; Stop 579
ttatgctattgtccatcctgaacat

SEQ ID NO: 374535 - DNA, 25 bp, Artificial
  probe
  misc_feature (1)..(25): SEQ ID NO: 4149; WAN024GGS; Start 174; Stop 198
cttggaggacttacatgatgcttat

SEQ ID NO: 374536 - DNA, 25 bp, Artificial
  probe
  misc_feature (1)..(25): SEQ ID NO: 4149; WAN024GGS; Start 556; Stop 580
tatgctattgtccatcctgaacatc

SEQ ID NO: 374537 - DNA, 25 bp, Artificial
  probe
  misc_feature (1)..(25): SEQ ID NO: 4149; WAN024GGS; Start 175; Stop 199
ttggaggacttacatgatgcttatc

SEQ ID NO: 374538 - DNA, 25 bp, Artificial
  probe
  misc_feature (1)..(25): SEQ ID NO: 4149; WAN024GGS; Start 554; Stop 578
cttatgctattgtccatcctgaaca

SEQ ID NO: 374539 - DNA, 25 bp, Artificial
  probe
  misc_feature (1)..(25): SEQ ID NO: 4149; WAN024GGS; Start 729; Stop 753
tcgtatcttagttcaatatggtctg

SEQ ID NO: 374540 - DNA, 25 bp, Artificial
  probe
  misc_feature (1)..(25): SEQ ID NO: 4149; WAN024GGS; Start 553; Stop 577
gcttatgctattgtccatcctgaac

SEQ ID NO: 374541 - DNA, 25 bp, Artificial
  probe
  misc_feature (1)..(25): SEQ ID NO: 4149; WAN024GGS; Start 551; Stop 575
atgcttatgctattgtccatcctga

SEQ ID NO: 374542 - DNA, 25 bp, Artificial
  probe
  misc_feature (1)..(25): SEQ ID NO: 4149; WAN024GGS; Start 177; Stop 201
ggaggacttacatgatgcttatctg

SEQ ID NO: 374543 - DNA, 25 bp, Artificial
  probe
  misc_feature (1)..(25): SEQ ID NO: 4149; WAN024GGS; Start 999; Stop 1023
tatctatgaagaagccaagaccatg

SEQ ID NO: 374544 - DNA, 25 bp, Artificial
  probe
  misc_feature (1)..(25): SEQ ID NO: 4149; WAN024GGS; Start 183; Stop 207
cttacatgatgcttatctgctccat

SEQ ID NO: 374545 - DNA, 25 bp, Artificial
  probe
  misc_feature (1)..(25): SEQ ID NO: 4149; WAN024GGS; Start 176; Stop 200
tggaggacttacatgatgcttatct

SEQ ID NO: 374546 - DNA, 25 bp, Artificial
  probe
  misc_feature (1)..(25): SEQ ID NO: 4149; WAN024GGS; Start 552; Stop 576
tgcttatgctattgtccatcctgaa

SEQ ID NO: 374547 - DNA, 25 bp, Artificial
  probe
  misc_feature (1)..(25): SEQ ID NO: 4149; WAN024GGS; Start 181; Stop 205
gacttacatgatgcttatctgctcc

SEQ ID NO: 374548 - DNA, 25 bp, Artificial
  probe
  misc_feature (1)..(25): SEQ ID NO: 4149; WAN024GGS; Start 180; Stop 204
ggacttacatgatgcttatctgctc

SEQ ID NO: 374549 - DNA, 25 bp, Artificial
  probe
  misc_feature (1)..(25): SEQ ID NO: 4149; WAN024GGS; Start 178; Stop 202
gaggacttacatgatgcttatctgc

SEQ ID NO: 374550 - DNA, 25 bp, Artificial
  probe
  misc_feature (1)..(25): SEQ ID NO: 4149; WAN024GGS; Start 561; Stop 585
tattgtccatcctgaacatccagat

SEQ ID NO: 374551 - DNA, 25 bp, Artificial
  probe
  misc_feature (1)..(25): SEQ ID NO: 4149; WAN024GGS; Start 1136; Stop 1160
ttaatatagaagacggtcgtgccaa

SEQ ID NO: 374552 - DNA, 25 bp, Artificial
  probe
  misc_feature (1)..(25): SEQ ID NO: 4149; WAN024GGS; Start 1810; Stop 1834
aacattccagaggatattactcagc

SEQ ID NO: 374553 - DNA, 25 bp, Artificial
  probe
  misc_feature (1)..(25): SEQ ID NO: 4149; WAN024GGS; Start 731; Stop 755
gtatcttagttcaatatggtctgga

SEQ ID NO: 374554 - DNA, 25 bp, Artificial
  probe
  misc_feature (1)..(25): SEQ ID NO: 4149; WAN024GGS; Start 1117; Stop 1141
ggacagacagtcattgttcttaata

SEQ ID NO: 374555 - DNA, 25 bp, Artificial
  probe
  misc_feature (1)..(25): SEQ ID NO: 4150; WAN024CR3; Start 120; Stop 144
tcagcagatagaggatattgttcac

SEQ ID NO: 374556 - DNA, 25 bp, Artificial
  probe
  misc_feature (1)..(25): SEQ ID NO: 4150; WAN024CR3; Start 124; Stop 148
cagatagaggatattgttcaccgta

SEQ ID NO: 374557 - DNA, 25 bp, Artificial
  probe
  misc_feature (1)..(25): SEQ ID NO: 4150; WAN024CR3; Start 119; Stop 143
ttcagcagatagaggatattgttca

SEQ ID NO: 374558 - DNA, 25 bp, Artificial
  probe
  misc_feature (1)..(25): SEQ ID NO: 4150; WAN024CR3; Start 121; Stop 145
cagcagatagaggatattgttcacc

SEQ ID NO: 374559 - DNA, 25 bp, Artificial
  probe
  misc_feature (1)..(25): SEQ ID NO: 4150; WAN024CR3; Start 125; Stop 149
agatagaggatattgttcaccgtat

SEQ ID NO: 374560 - DNA, 25 bp, Artificial
  probe
  misc_feature (1)..(25): SEQ ID NO: 4150; WAN024CR3; Start 122; Stop 146
agcagatagaggatattgttcaccg

SEQ ID NO: 374561 - DNA, 25 bp, Artificial
  probe
  misc_feature (1)..(25): SEQ ID NO: 4150; WAN024CR3; Start 123; Stop 147
gcagatagaggatattgttcaccgt

SEQ ID NO: 374562 - DNA, 25 bp, Artificial
  probe
  misc_feature (1)..(25): SEQ ID NO: 4150; WAN024CR3; Start 126; Stop 150
gatagaggatattgttcaccgtata

SEQ ID NO: 374563 - DNA, 25 bp, Artificial
  probe
  misc_feature (1)..(25): SEQ ID NO: 4150; WAN024CR3; Start 129; Stop 153
agaggatattgttcaccgtatactt

SEQ ID NO: 374564 - DNA, 25 bp, Artificial
  probe
  misc_feature (1)..(25): SEQ ID NO: 4150; WAN024CR3; Start 61; Stop 85
cttcataaatccagcctgtctttac

SEQ ID NO: 374565 - DNA, 25 bp, Artificial
  probe
  misc_feature (1)..(25): SEQ ID NO: 4150; WAN024CR3; Start 60; Stop 84
tcttcataaatccagcctgtcttta

SEQ ID NO: 374566 - DNA, 25 bp, Artificial
  probe
  misc_feature (1)..(25): SEQ ID NO: 4150; WAN024CR3; Start 118; Stop 142
tttcagcagatagaggatattgttc

SEQ ID NO: 374567 - DNA, 25 bp, Artificial
  probe
  misc_feature (1)..(25): SEQ ID NO: 4150; WAN024CR3; Start 186; Stop 210
acttgtttatctgtttgttctagca

SEQ ID NO: 374568 - DNA, 25 bp, Artificial
  probe
  misc_feature (1)..(25): SEQ ID NO: 4150; WAN024CR3; Start 128; Stop 152
tagaggatattgttcaccgtatact

SEQ ID NO: 374569 - DNA, 25 bp, Artificial
  probe
  misc_feature (1)..(25): SEQ ID NO: 4150; WAN024CR3; Start 62; Stop 86
ttcataaatccagcctgtctttaca

SEQ ID NO: 374570 - DNA, 25 bp, Artificial
  probe
  misc_feature (1)..(25): SEQ ID NO: 4150; WAN024CR3; Start 187; Stop 211
cttgtttatctgtttgttctagcaa

SEQ ID NO: 374571 - DNA, 25 bp, Artificial
  probe
  misc_feature (1)..(25): SEQ ID NO: 4150; WAN024CR3; Start 127; Stop 151
atagaggatattgttcaccgtatac

SEQ ID NO: 374572 - DNA, 25 bp, Artificial
  probe
  misc_feature (1)..(25): SEQ ID NO: 4150; WAN024CR3; Start 185; Stop 209
tacttgtttatctgtttgttctagc

SEQ ID NO: 374573 - DNA, 25 bp, Artificial
  probe
  misc_feature (1)..(25): SEQ ID NO: 4150; WAN024CR3; Start 1; Stop 25
gtggattgtaagaatcatcgccaaa

SEQ ID NO: 374574 - DNA, 25 bp, Artificial
  probe
  misc_feature (1)..(25): SEQ ID NO: 4150; WAN024CR3; Start 130; Stop 154
gaggatattgttcaccgtatacttt

SEQ ID NO: 374575 - DNA, 25 bp, Artificial
  probe
  misc_feature (1)..(25): SEQ ID NO: 4150; WAN024CR3; Start 192; Stop 216
ttatctgtttgttctagcaaagcac

SEQ ID NO: 374576 - DNA, 25 bp, Artificial
  probe
  misc_feature (1)..(25): SEQ ID NO: 4150; WAN024CR3; Start 191; Stop 215
tttatctgtttgttctagcaaagca

SEQ ID NO: 374577 - DNA, 25 bp, Artificial
  probe
  misc_feature (1)..(25): SEQ ID NO: 4150; WAN024CR3; Start 190; Stop 214
gtttatctgtttgttctagcaaagc

SEQ ID NO: 374578 - DNA, 25 bp, Artificial
  probe
  misc_feature (1)..(25): SEQ ID NO: 4150; WAN024CR3; Start 211; Stop 235
aagcaccatcttgtccaaaatagta

SEQ ID NO: 374579 - DNA, 25 bp, Artificial
  probe
  misc_feature (1)..(25): SEQ ID NO: 4150; WAN024CR3; Start 200; Stop 224
ttgttctagcaaagcaccatcttgt

SEQ ID NO: 374580 - DNA, 25 bp, Artificial
  probe
  misc_feature (1)..(25): SEQ ID NO: 4150; WAN024CR3; Start 210; Stop 234
aaagcaccatcttgtccaaaatagt

SEQ ID NO: 374581 - DNA, 25 bp, Artificial
  probe
  misc_feature (1)..(25): SEQ ID NO: 4150; WAN024CR3; Start 176; Stop 200
tgcctctagtacttgtttatctgtt

SEQ ID NO: 374582 - DNA, 25 bp, Artificial
  probe
  misc_feature (1)..(25): SEQ ID NO: 4150; WAN024CR3; Start 175; Stop 199
ttgcctctagtacttgtttatctgt

SEQ ID NO: 374583 - DNA, 25 bp, Artificial
  probe
  misc_feature (1)..(25): SEQ ID NO: 4150; WAN024CR3; Start 209; Stop 233
caaagcaccatcttgtccaaaatag

SEQ ID NO: 374584 - DNA, 25 bp, Artificial
  probe
  misc_feature (1)..(25): SEQ ID NO: 4150; WAN024CR3; Start 193; Stop 217
tatctgtttgttctagcaaagcacc

SEQ ID NO: 374585 - DNA, 25 bp, Artificial
  probe
  misc_feature (1)..(25): SEQ ID NO: 4150; WAN024CR3; Start 116; Stop 140
cttttcagcagatagaggatattgt

SEQ ID NO: 374586 - DNA, 25 bp, Artificial
  probe
  misc_feature (1)..(25): SEQ ID NO: 4150; WAN024CR3; Start 215; Stop 239
accatcttgtccaaaatagtaccac

SEQ ID NO: 374587 - DNA, 25 bp, Artificial
  probe
  misc_feature (1)..(25): SEQ ID NO: 4150; WAN024CR3; Start 214; Stop 238
caccatcttgtccaaaatagtacca

SEQ ID NO: 374588 - DNA, 25 bp, Artificial
  probe
  misc_feature (1)..(25): SEQ ID NO: 4151; WAN024EX5; Start 247; Stop 271
ggtattggcattatcgtagtgtcaa

SEQ ID NO: 374589 - DNA, 25 bp, Artificial
  probe
  misc_feature (1)..(25): SEQ ID NO: 4151; WAN024EX5; Start 164; Stop 188
atttggataataccctcattgcttg

SEQ ID NO: 374590 - DNA, 25 bp, Artificial
  probe
  misc_feature (1)..(25): SEQ ID NO: 4151; WAN024EX5; Start 169; Stop 193
gataataccctcattgcttggaaca

SEQ ID NO: 374591 - DNA, 25 bp, Artificial
  probe
  misc_feature (1)..(25): SEQ ID NO: 4151; WAN024EX5; Start 163; Stop 187
gatttggataataccctcattgctt

SEQ ID NO: 374592 - DNA, 25 bp, Artificial
  probe
  misc_feature (1)..(25): SEQ ID NO: 4151; WAN024EX5; Start 165; Stop 189
tttggataataccctcattgcttgg

SEQ ID NO: 374593 - DNA, 25 bp, Artificial
  probe
  misc_feature (1)..(25): SEQ ID NO: 4151; WAN024EX5; Start 162; Stop 186
cgatttggataataccctcattgct

SEQ ID NO: 374594 - DNA, 25 bp, Artificial
  probe
  misc_feature (1)..(25): SEQ ID NO: 4151; WAN024EX5; Start 252; Stop 276
tggcattatcgtagtgtcaaataac

SEQ ID NO: 374595 - DNA, 25 bp, Artificial
  probe
  misc_feature (1)..(25): SEQ ID NO: 4151; WAN024EX5; Start 170; Stop 194
ataataccctcattgcttggaacaa

SEQ ID NO: 374596 - DNA, 25 bp, Artificial
  probe
  misc_feature (1)..(25): SEQ ID NO: 4151; WAN024EX5; Start 248; Stop 272
gtattggcattatcgtagtgtcaaa

SEQ ID NO: 374597 - DNA, 25 bp, Artificial
  probe
  misc_feature (1)..(25): SEQ ID NO: 4151; WAN024EX5; Start 168; Stop 192
ggataataccctcattgcttggaac

SEQ ID NO: 374598 - DNA, 25 bp, Artificial
  probe
  misc_feature (1)..(25): SEQ ID NO: 4151; WAN024EX5; Start 167; Stop 191
tggataataccctcattgcttggaa

SEQ ID NO: 374599 - DNA, 25 bp, Artificial
  probe
  misc_feature (1)..(25): SEQ ID NO: 4151; WAN024EX5; Start 166; Stop 190
ttggataataccctcattgcttgga

SEQ ID NO: 374600 - DNA, 25 bp, Artificial
  probe
  misc_feature (1)..(25): SEQ ID NO: 4151; WAN024EX5; Start 251; Stop 275
ttggcattatcgtagtgtcaaataa

SEQ ID NO: 374601 - DNA, 25 bp, Artificial
  probe
  misc_feature (1)..(25): SEQ ID NO: 4151; WAN024EX5; Start 250; Stop 274
attggcattatcgtagtgtcaaata

SEQ ID NO: 374602 - DNA, 25 bp, Artificial
  probe
  misc_feature (1)..(25): SEQ ID NO: 4151; WAN024EX5; Start 249; Stop 273
tattggcattatcgtagtgtcaaat

SEQ ID NO: 374603 - DNA, 25 bp, Artificial
  probe
  misc_feature (1)..(25): SEQ ID NO: 4151; WAN024EX5; Start 171; Stop 195
taataccctcattgcttggaacaac

SEQ ID NO: 374604 - DNA, 25 bp, Artificial
  probe
  misc_feature (1)..(25): SEQ ID NO: 4151; WAN024EX5; Start 253; Stop 277
ggcattatcgtagtgtcaaataaca

SEQ ID NO: 374605 - DNA, 25 bp, Artificial
  probe
  misc_feature (1)..(25): SEQ ID NO: 4151; WAN024EX5; Start 100; Stop 124
gaagcagtctatgatctgacagtcc

SEQ ID NO: 374606 - DNA, 25 bp, Artificial
  probe
  misc_feature (1)..(25): SEQ ID NO: 4151; WAN024EX5; Start 99; Stop 123
ggaagcagtctatgatctgacagtc

SEQ ID NO: 374607 - DNA, 25 bp, Artificial
  probe
  misc_feature (1)..(25): SEQ ID NO: 4151; WAN024EX5; Start 97; Stop 121
gtggaagcagtctatgatctgacag

SEQ ID NO: 374608 - DNA, 25 bp, Artificial
  probe
  misc_feature (1)..(25): SEQ ID NO: 4151; WAN024EX5; Start 95; Stop 119
ctgtggaagcagtctatgatctgac

SEQ ID NO: 374609 - DNA, 25 bp, Artificial
  probe
  misc_feature (1)..(25): SEQ ID NO: 4151; WAN024EX5; Start 246; Stop 270
gggtattggcattatcgtagtgtca

SEQ ID NO: 374610 - DNA, 25 bp, Artificial
  probe
  misc_feature (1)..(25): SEQ ID NO: 4151; WAN024EX5; Start 160; Stop 184
gtcgatttggataataccctcattg

SEQ ID NO: 374611 - DNA, 25 bp, Artificial
  probe
  misc_feature (1)..(25): SEQ ID NO: 4151; WAN024EX5; Start 98; Stop 122
tggaagcagtctatgatctgacagt

SEQ ID NO: 374612 - DNA, 25 bp, Artificial
  probe
  misc_feature (1)..(25): SEQ ID NO: 4151; WAN024EX5; Start 161; Stop 185
tcgatttggataataccctcattgc

SEQ ID NO: 374613 - DNA, 25 bp, Artificial
  probe
  misc_feature (1)..(25): SEQ ID NO: 4151; WAN024EX5; Start 298; Stop 322
gcagttgagaaatttgggattgatt

SEQ ID NO: 374614 - DNA, 25 bp, Artificial
  probe
  misc_feature (1)..(25): SEQ ID NO: 4151; WAN024EX5; Start 309; Stop 333
atttgggattgattacgtttactgg

SEQ ID NO: 374615 - DNA, 25 bp, Artificial
  probe
  misc_feature (1)..(25): SEQ ID NO: 4151; WAN024EX5; Start 301; Stop 325
gttgagaaatttgggattgattacg

SEQ ID NO: 374616 - DNA, 25 bp, Artificial
  probe
  misc_feature (1)..(25): SEQ ID NO: 4151; WAN024EX5; Start 555; Stop 579
aaagtacggaccgattacatataaa

SEQ ID NO: 374617 - DNA, 25 bp, Artificial
  probe
  misc_feature (1)..(25): SEQ ID NO: 4151; WAN024EX5; Start 303; Stop 327
tgagaaatttgggattgattacgtt

SEQ ID NO: 374618 - DNA, 25 bp, Artificial
  probe
  misc_feature (1)..(25): SEQ ID NO: 4151; WAN024EX5; Start 302; Stop 326
ttgagaaatttgggattgattacgt

SEQ ID NO: 374619 - DNA, 25 bp, Artificial
  probe
  misc_feature (1)..(25): SEQ ID NO: 4151; WAN024EX5; Start 96; Stop 120
tgtggaagcagtctatgatctgaca

SEQ ID NO: 374620 - DNA, 25 bp, Artificial
  probe
  misc_feature (1)..(25): SEQ ID NO: 4151; WAN024EX5; Start 297; Stop 321
agcagttgagaaatttgggattgat

SEQ ID NO: 374621 - DNA, 25 bp, Artificial
  probe
  misc_feature (1)..(25): SEQ ID NO: 4152; WAN024DLQ; Start 129; Stop 153
agttagttggttgagcaatgagatt

SEQ ID NO: 374622 - DNA, 25 bp, Artificial
  probe
  misc_feature (1)..(25): SEQ ID NO: 4152; WAN024DLQ; Start 128; Stop 152
aagttagttggttgagcaatgagat

SEQ ID NO: 374623 - DNA, 25 bp, Artificial
  probe
  misc_feature (1)..(25): SEQ ID NO: 4152; WAN024DLQ; Start 58; Stop 82
gatgtcaaagagggtcaagttatca

SEQ ID NO: 374624 - DNA, 25 bp, Artificial
  probe
  misc_feature (1)..(25): SEQ ID NO: 4152; WAN024DLQ; Start 59; Stop 83
atgtcaaagagggtcaagttatcat

SEQ ID NO: 374625 - DNA, 25 bp, Artificial
  probe
  misc_feature (1)..(25): SEQ ID NO: 4152; WAN024DLQ; Start 130; Stop 154
gttagttggttgagcaatgagattt

SEQ ID NO: 374626 - DNA, 25 bp, Artificial
  probe
  misc_feature (1)..(25): SEQ ID NO: 4152; WAN024DLQ; Start 56; Stop 80
atgatgtcaaagagggtcaagttat

SEQ ID NO: 374627 - DNA, 25 bp, Artificial
  probe
  misc_feature (1)..(25): SEQ ID NO: 4152; WAN024DLQ; Start 55; Stop 79
aatgatgtcaaagagggtcaagtta

SEQ ID NO: 374628 - DNA, 25 bp, Artificial
  probe
  misc_feature (1)..(25): SEQ ID NO: 4152; WAN024DLQ; Start 127; Stop 151
aaagttagttggttgagcaatgaga

SEQ ID NO: 374629 - DNA, 25 bp, Artificial
  probe
  misc_feature (1)..(25): SEQ ID NO: 4152; WAN024DLQ; Start 126; Stop 150
caaagttagttggttgagcaatgag

SEQ ID NO: 374630 - DNA, 25 bp, Artificial
  probe
  misc_feature (1)..(25): SEQ ID NO: 4152; WAN024DLQ; Start 57; Stop 81
tgatgtcaaagagggtcaagttatc

SEQ ID NO: 374631 - DNA, 25 bp, Artificial
  probe
  misc_feature (1)..(25): SEQ ID NO: 4152; WAN024DLQ; Start 222; Stop 246
cagatttgaggttgttacggatgtc

SEQ ID NO: 374632 - DNA, 25 bp, Artificial
  probe
  misc_feature (1)..(25): SEQ ID NO: 4152; WAN024DLQ; Start 4; Stop 28
gatttcagcatagttctcagccttg

SEQ ID NO: 374633 - DNA, 25 bp, Artificial
  probe
  misc_feature (1)..(25): SEQ ID NO: 4152; WAN024DLQ; Start 60; Stop 84
tgtcaaagagggtcaagttatcatg

SEQ ID NO: 374634 - DNA, 25 bp, Artificial
  probe
  misc_feature (1)..(25): SEQ ID NO: 4152; WAN024DLQ; Start 224; Stop 248
gatttgaggttgttacggatgtcat

SEQ ID NO: 374635 - DNA, 25 bp, Artificial
  probe
  misc_feature (1)..(25): SEQ ID NO: 4152; WAN024DLQ; Start 54; Stop 78
caatgatgtcaaagagggtcaagtt

SEQ ID NO: 374636 - DNA, 25 bp, Artificial
  probe
  misc_feature (1)..(25): SEQ ID NO: 4152; WAN024DLQ; Start 227; Stop 251
ttgaggttgttacggatgtcatctg

SEQ ID NO: 374637 - DNA, 25 bp, Artificial
  probe
  misc_feature (1)..(25): SEQ ID NO: 4152; WAN024DLQ; Start 61; Stop 85
gtcaaagagggtcaagttatcatgg

SEQ ID NO: 374638 - DNA, 25 bp, Artificial
  probe
  misc_feature (1)..(25): SEQ ID NO: 4152; WAN024DLQ; Start 225; Stop 249
atttgaggttgttacggatgtcatc

SEQ ID NO: 374639 - DNA, 25 bp, Artificial
  probe
  misc_feature (1)..(25): SEQ ID NO: 4152; WAN024DLQ; Start 207; Stop 231
cttcgtttggataaccagatttgag

SEQ ID NO: 374640 - DNA, 25 bp, Artificial
  probe
  misc_feature (1)..(25): SEQ ID NO: 4152; WAN024DLQ; Start 223; Stop 247
agatttgaggttgttacggatgtca

SEQ ID NO: 374641 - DNA, 25 bp, Artificial
  probe
  misc_feature (1)..(25): SEQ ID NO: 4152; WAN024DLQ; Start 43; Stop 67
gatagactgggcaatgatgtcaaag

SEQ ID NO: 374642 - DNA, 25 bp, Artificial
  probe
  misc_feature (1)..(25): SEQ ID NO: 4152; WAN024DLQ; Start 3; Stop 27
ggatttcagcatagttctcagcctt

SEQ ID NO: 374643 - DNA, 25 bp, Artificial
  probe
  misc_feature (1)..(25): SEQ ID NO: 4152; WAN024DLQ; Start 62; Stop 86
tcaaagagggtcaagttatcatggg

SEQ ID NO: 374644 - DNA, 25 bp, Artificial
  probe
  misc_feature (1)..(25): SEQ ID NO: 4152; WAN024DLQ; Start 44; Stop 68
atagactgggcaatgatgtcaaaga

SEQ ID NO: 374645 - DNA, 25 bp, Artificial
  probe
  misc_feature (1)..(25): SEQ ID NO: 4152; WAN024DLQ; Start 228; Stop 252
tgaggttgttacggatgtcatctga

SEQ ID NO: 374646 - DNA, 25 bp, Artificial
  probe
  misc_feature (1)..(25): SEQ ID NO: 4152; WAN024DLQ; Start 208; Stop 232
ttcgtttggataaccagatttgagg

SEQ ID NO: 374647 - DNA, 25 bp, Artificial
  probe
  misc_feature (1)..(25): SEQ ID NO: 4152; WAN024DLQ; Start 206; Stop 230
ccttcgtttggataaccagatttga

SEQ ID NO: 374648 - DNA, 25 bp, Artificial
  probe
  misc_feature (1)..(25): SEQ ID NO: 4152; WAN024DLQ; Start 204; Stop 228
gaccttcgtttggataaccagattt

SEQ ID NO: 374649 - DNA, 25 bp, Artificial
  probe
  misc_feature (1)..(25): SEQ ID NO: 4152; WAN024DLQ; Start 221; Stop 245
ccagatttgaggttgttacggatgt

SEQ ID NO: 374650 - DNA, 25 bp, Artificial
  probe
  misc_feature (1)..(25): SEQ ID NO: 4152; WAN024DLQ; Start 205; Stop 229
accttcgtttggataaccagatttg

SEQ ID NO: 374651 - DNA, 25 bp, Artificial
  probe
  misc_feature (1)..(25): SEQ ID NO: 4152; WAN024DLQ; Start 42; Stop 66
tgatagactgggcaatgatgtcaaa

SEQ ID NO: 374652 - DNA, 25 bp, Artificial
  probe
  misc_feature (1)..(25): SEQ ID NO: 4152; WAN024DLQ; Start 40; Stop 64
tttgatagactgggcaatgatgtca

SEQ ID NO: 374653 - DNA, 25 bp, Artificial
  probe
  misc_feature (1)..(25): SEQ ID NO: 4152; WAN024DLQ; Start 226; Stop 250
tttgaggttgttacggatgtcatct

SEQ ID NO: 374654 - DNA, 25 bp, Artificial
  probe
  misc_feature (1)..(25): SEQ ID NO: 4153; WAN024CYY; Start 589; Stop 613
tctggagagattactgaggaagatt

SEQ ID NO: 374655 - DNA, 25 bp, Artificial
  probe
  misc_feature (1)..(25): SEQ ID NO: 4153; WAN024CYY; Start 684; Stop 708
cagagaatcagaatattggacttcc

SEQ ID NO: 374656 - DNA, 25 bp, Artificial
  probe
  misc_feature (1)..(25): SEQ ID NO: 4153; WAN024CYY; Start 769; Stop 793
attgcggctattattcgagaattgt

SEQ ID NO: 374657 - DNA, 25 bp, Artificial
  probe
  misc_feature (1)..(25): SEQ ID NO: 4153; WAN024CYY; Start 496; Stop 520
gcaacatttagtcctgaaacgaata

SEQ ID NO: 374658 - DNA, 25 bp, Artificial
  probe
  misc_feature (1)..(25): SEQ ID NO: 4153; WAN024CYY; Start 683; Stop 707
acagagaatcagaatattggacttc

SEQ ID NO: 374659 - DNA, 25 bp, Artificial
  probe
  misc_feature (1)..(25): SEQ ID NO: 4153; WAN024CYY; Start 590; Stop 614
ctggagagattactgaggaagattt

SEQ ID NO: 374660 - DNA, 25 bp, Artificial
  probe
  misc_feature (1)..(25): SEQ ID NO: 4153; WAN024CYY; Start 588; Stop 612
atctggagagattactgaggaagat

SEQ ID NO: 374661 - DNA, 25 bp, Artificial
  probe
  misc_feature (1)..(25): SEQ ID NO: 4153; WAN024CYY; Start 681; Stop 705
gtacagagaatcagaatattggact

SEQ ID NO: 374662 - DNA, 25 bp, Artificial
  probe
  misc_feature (1)..(25): SEQ ID NO: 4153; WAN024CYY; Start 680; Stop 704
agtacagagaatcagaatattggac

SEQ ID NO: 374663 - DNA, 25 bp, Artificial
  probe
  misc_feature (1)..(25): SEQ ID NO: 4153; WAN024CYY; Start 587; Stop 611
tatctggagagattactgaggaaga

SEQ ID NO: 374664 - DNA, 25 bp, Artificial
  probe
  misc_feature (1)..(25): SEQ ID NO: 4153; WAN024CYY; Start 768; Stop 792
aattgcggctattattcgagaattg

SEQ ID NO: 374665 - DNA, 25 bp, Artificial
  probe
  misc_feature (1)..(25): SEQ ID NO: 4153; WAN024CYY; Start 495; Stop 519
agcaacatttagtcctgaaacgaat

SEQ ID NO: 374666 - DNA, 25 bp, Artificial
  probe
  misc_feature (1)..(25): SEQ ID NO: 4153; WAN024CYY; Start 494; Stop 518
aagcaacatttagtcctgaaacgaa

SEQ ID NO: 374667 - DNA, 25 bp, Artificial
  probe
  misc_feature (1)..(25): SEQ ID NO: 4153; WAN024CYY; Start 741; Stop 765
ttatttacaatggtcagaatcggaa

SEQ ID NO: 374668 - DNA, 25 bp, Artificial
  probe
  misc_feature (1)..(25): SEQ ID NO: 4153; WAN024CYY; Start 679; Stop 703
gagtacagagaatcagaatattgga

SEQ ID NO: 374669 - DNA, 25 bp, Artificial
  probe
  misc_feature (1)..(25): SEQ ID NO: 4153; WAN024CYY; Start 488; Stop 512
taactcaagcaacatttagtcctga

SEQ ID NO: 374670 - DNA, 25 bp, Artificial
  probe
  misc_feature (1)..(25): SEQ ID NO: 4153; WAN024CYY; Start 742; Stop 766
tatttacaatggtcagaatcggaaa

SEQ ID NO: 374671 - DNA, 25 bp, Artificial
  probe
  misc_feature (1)..(25): SEQ ID NO: 4153; WAN024CYY; Start 487; Stop 511
ttaactcaagcaacatttagtcctg

SEQ ID NO: 374672 - DNA, 25 bp, Artificial
  probe
  misc_feature (1)..(25): SEQ ID NO: 4153; WAN024CYY; Start 485; Stop 509
acttaactcaagcaacatttagtcc

SEQ ID NO: 374673 - DNA, 25 bp, Artificial
  probe
  misc_feature (1)..(25): SEQ ID NO: 4153; WAN024CYY; Start 14; Stop 38
tgaagaggtttgaagtatctacaga

SEQ ID NO: 374674 - DNA, 25 bp, Artificial
  probe
  misc_feature (1)..(25): SEQ ID NO: 4153; WAN024CYY; Start 678; Stop 702
agagtacagagaatcagaatattgg

SEQ ID NO: 374675 - DNA, 25 bp, Artificial
  probe
  misc_feature (1)..(25): SEQ ID NO: 4153; WAN024CYY; Start 491; Stop 515
ctcaagcaacatttagtcctgaaac

SEQ ID NO: 374676 - DNA, 25 bp, Artificial
  probe
  misc_feature (1)..(25): SEQ ID NO: 4153; WAN024CYY; Start 486; Stop 510
cttaactcaagcaacatttagtcct

SEQ ID NO: 374677 - DNA, 25 bp, Artificial
  probe
  misc_feature (1)..(25): SEQ ID NO: 4153; WAN024CYY; Start 740; Stop 764
attatttacaatggtcagaatcgga

SEQ ID NO: 374678 - DNA, 25 bp, Artificial
  probe
  misc_feature (1)..(25): SEQ ID NO: 4153; WAN024CYY; Start 490; Stop 514
actcaagcaacatttagtcctgaaa

SEQ ID NO: 374679 - DNA, 25 bp, Artificial
  probe
  misc_feature (1)..(25): SEQ ID NO: 4153; WAN024CYY; Start 489; Stop 513
aactcaagcaacatttagtcctgaa

SEQ ID NO: 374680 - DNA, 25 bp, Artificial
  probe
  misc_feature (1)..(25): SEQ ID NO: 4153; WAN024CYY; Start 586; Stop 610
atatctggagagattactgaggaag

SEQ ID NO: 374681 - DNA, 25 bp, Artificial
  probe
  misc_feature (1)..(25): SEQ ID NO: 4153; WAN024CYY; Start 685; Stop 709
agagaatcagaatattggacttcca

SEQ ID NO: 374682 - DNA, 25 bp, Artificial
  probe
  misc_feature (1)..(25): SEQ ID NO: 4153; WAN024CYY; Start 479; Stop 503
ttaagaacttaactcaagcaacatt

SEQ ID NO: 374683 - DNA, 25 bp, Artificial
  probe
  misc_feature (1)..(25): SEQ ID NO: 4153; WAN024CYY; Start 493; Stop 517
caagcaacatttagtcctgaaacga

SEQ ID NO: 374684 - DNA, 25 bp, Artificial
  probe
  misc_feature (1)..(25): SEQ ID NO: 4153; WAN024CYY; Start 497; Stop 521
caacatttagtcctgaaacgaataa

SEQ ID NO: 374685 - DNA, 25 bp, Artificial
  probe
  misc_feature (1)..(25): SEQ ID NO: 4153; WAN024CYY; Start 682; Stop 706
tacagagaatcagaatattggactt

SEQ ID NO: 374686 - DNA, 25 bp, Artificial
  probe
  misc_feature (1)..(25): SEQ ID NO: 4153; WAN024CYY; Start 13; Stop 37
atgaagaggtttgaagtatctacag

SEQ ID NO: 374687 - DNA, 25 bp, Artificial
  probe
  misc_feature (1)..(25): SEQ ID NO: 4154; WAN024DHO; Start 446; Stop 470
gattgagacagatagtggcttgatt

SEQ ID NO: 374688 - DNA, 25 bp, Artificial
  probe
  misc_feature (1)..(25): SEQ ID NO: 4154; WAN024DHO; Start 431; Stop 455
acgacatagtaattggattgagaca

SEQ ID NO: 374689 - DNA, 25 bp, Artificial
  probe
  misc_feature (1)..(25): SEQ ID NO: 4154; WAN024DHO; Start 440; Stop 464
taattggattgagacagatagtggc

SEQ ID NO: 374690 - DNA, 25 bp, Artificial
  probe
  misc_feature (1)..(25): SEQ ID NO: 4154; WAN024DHO; Start 432; Stop 456
cgacatagtaattggattgagacag

SEQ ID NO: 374691 - DNA, 25 bp, Artificial
  probe
  misc_feature (1)..(25): SEQ ID NO: 4154; WAN024DHO; Start 439; Stop 463
gtaattggattgagacagatagtgg

SEQ ID NO: 374692 - DNA, 25 bp, Artificial
  probe
  misc_feature (1)..(25): SEQ ID NO: 4154; WAN024DHO; Start 154; Stop 178
aagaatggttgacaggcaagatatt

SEQ ID NO: 374693 - DNA, 25 bp, Artificial
  probe
  misc_feature (1)..(25): SEQ ID NO: 4154; WAN024DHO; Start 442; Stop 466
attggattgagacagatagtggctt

SEQ ID NO: 374694 - DNA, 25 bp, Artificial
  probe
  misc_feature (1)..(25): SEQ ID NO: 4154; WAN024DHO; Start 156; Stop 180
gaatggttgacaggcaagatattga

SEQ ID NO: 374695 - DNA, 25 bp, Artificial
  probe
  misc_feature (1)..(25): SEQ ID NO: 4154; WAN024DHO; Start 155; Stop 179
agaatggttgacaggcaagatattg

SEQ ID NO: 374696 - DNA, 25 bp, Artificial
  probe
  misc_feature (1)..(25): SEQ ID NO: 4154; WAN024DHO; Start 153; Stop 177
caagaatggttgacaggcaagatat

SEQ ID NO: 374697 - DNA, 25 bp, Artificial
  probe
  misc_feature (1)..(25): SEQ ID NO: 4154; WAN024DHO; Start 441; Stop 465
aattggattgagacagatagtggct

SEQ ID NO: 374698 - DNA, 25 bp, Artificial
  probe
  misc_feature (1)..(25): SEQ ID NO: 4154; WAN024DHO; Start 430; Stop 454
tacgacatagtaattggattgagac

SEQ ID NO: 374699 - DNA, 25 bp, Artificial
  probe
  misc_feature (1)..(25): SEQ ID NO: 4154; WAN024DHO; Start 157; Stop 181
aatggttgacaggcaagatattgac

SEQ ID NO: 374700 - DNA, 25 bp, Artificial
  probe
  misc_feature (1)..(25): SEQ ID NO: 4154; WAN024DHO; Start 438; Stop 462
agtaattggattgagacagatagtg

SEQ ID NO: 374701 - DNA, 25 bp, Artificial
  probe
  misc_feature (1)..(25): SEQ ID NO: 4154; WAN024DHO; Start 433; Stop 457
gacatagtaattggattgagacaga

SEQ ID NO: 374702 - DNA, 25 bp, Artificial
  probe
  misc_feature (1)..(25): SEQ ID NO: 4154; WAN024DHO; Start 445; Stop 469
ggattgagacagatagtggcttgat

SEQ ID NO: 374703 - DNA, 25 bp, Artificial
  probe
  misc_feature (1)..(25): SEQ ID NO: 4154; WAN024DHO; Start 140; Stop 164
tgatatgtgtgctcaagaatggttg

SEQ ID NO: 374704 - DNA, 25 bp, Artificial
  probe
  misc_feature (1)..(25): SEQ ID NO: 4154; WAN024DHO; Start 139; Stop 163
gtgatatgtgtgctcaagaatggtt

SEQ ID NO: 374705 - DNA, 25 bp, Artificial
  probe
  misc_feature (1)..(25): SEQ ID NO: 4154; WAN024DHO; Start 429; Stop 453
gtacgacatagtaattggattgaga

SEQ ID NO: 374706 - DNA, 25 bp, Artificial
  probe
  misc_feature (1)..(25): SEQ ID NO: 4154; WAN024DHO; Start 443; Stop 467
ttggattgagacagatagtggcttg

SEQ ID NO: 374707 - DNA, 25 bp, Artificial
  probe
  misc_feature (1)..(25): SEQ ID NO: 4154; WAN024DHO; Start 434; Stop 458
acatagtaattggattgagacagat

SEQ ID NO: 374708 - DNA, 25 bp, Artificial
  probe
  misc_feature (1)..(25): SEQ ID NO: 4154; WAN024DHO; Start 428; Stop 452
tgtacgacatagtaattggattgag

SEQ ID NO: 374709 - DNA, 25 bp, Artificial
  probe
  misc_feature (1)..(25): SEQ ID NO: 4154; WAN024DHO; Start 447; Stop 471
attgagacagatagtggcttgattt

SEQ ID NO: 374710 - DNA, 25 bp, Artificial
  probe
  misc_feature (1)..(25): SEQ ID NO: 4154; WAN024DHO; Start 448; Stop 472
ttgagacagatagtggcttgattta

SEQ ID NO: 374711 - DNA, 25 bp, Artificial
  probe
  misc_feature (1)..(25): SEQ ID NO: 4154; WAN024DHO; Start 574; Stop 598
cctactacggttacaagtacaatca

SEQ ID NO: 374712 - DNA, 25 bp, Artificial
  probe
  misc_feature (1)..(25): SEQ ID NO: 4154; WAN024DHO; Start 573; Stop 597
acctactacggttacaagtacaatc

SEQ ID NO: 374713 - DNA, 25 bp, Artificial
  probe
  misc_feature (1)..(25): SEQ ID NO: 4154; WAN024DHO; Start 572; Stop 596
gacctactacggttacaagtacaat

SEQ ID NO: 374714 - DNA, 25 bp, Artificial
  probe
  misc_feature (1)..(25): SEQ ID NO: 4154; WAN024DHO; Start 449; Stop 473
tgagacagatagtggcttgatttat

SEQ ID NO: 374715 - DNA, 25 bp, Artificial
  probe
  misc_feature (1)..(25): SEQ ID NO: 4154; WAN024DHO; Start 545; Stop 569
ttcagaacatcagtggaaggaatgg

SEQ ID NO: 374716 - DNA, 25 bp, Artificial
  probe
  misc_feature (1)..(25): SEQ ID NO: 4154; WAN024DHO; Start 102; Stop 126
ccacaattattatggagtcgtcgtt

SEQ ID NO: 374717 - DNA, 25 bp, Artificial
  probe
  misc_feature (1)..(25): SEQ ID NO: 4154; WAN024DHO; Start 472; Stop 496
atttagtagattgggattcggttcg

SEQ ID NO: 374718 - DNA, 25 bp, Artificial
  probe
  misc_feature (1)..(25): SEQ ID NO: 4154; WAN024DHO; Start 188; Stop 212
tgatatgaatcgtaagcaaatcgtc

SEQ ID NO: 374719 - DNA, 25 bp, Artificial
  probe
  misc_feature (1)..(25): SEQ ID NO: 4154; WAN024DHO; Start 569; Stop 593
gttgacctactacggttacaagtac

SEQ ID NO: 374720 - DNA, 25 bp, Artificial
  probe
  misc_feature (1)..(25): SEQ ID NO: 4155; WAN024COA; Start 51; Stop 75
tgatgtcttcataactgctagtaga

SEQ ID NO: 374721 - DNA, 25 bp, Artificial
  probe
  misc_feature (1)..(25): SEQ ID NO: 4155; WAN024COA; Start 52; Stop 76
gatgtcttcataactgctagtagaa

SEQ ID NO: 374722 - DNA, 25 bp, Artificial
  probe
  misc_feature (1)..(25): SEQ ID NO: 4155; WAN024COA; Start 48; Stop 72
acatgatgtcttcataactgctagt

SEQ ID NO: 374723 - DNA, 25 bp, Artificial
  probe
  misc_feature (1)..(25): SEQ ID NO: 4155; WAN024COA; Start 41; Stop 65
gatgcgtacatgatgtcttcataac

SEQ ID NO: 374724 - DNA, 25 bp, Artificial
  probe
  misc_feature (1)..(25): SEQ ID NO: 4155; WAN024COA; Start 40; Stop 64
agatgcgtacatgatgtcttcataa

SEQ ID NO: 374725 - DNA, 25 bp, Artificial
  probe
  misc_feature (1)..(25): SEQ ID NO: 4155; WAN024COA; Start 42; Stop 66
atgcgtacatgatgtcttcataact

SEQ ID NO: 374726 - DNA, 25 bp, Artificial
  probe
  misc_feature (1)..(25): SEQ ID NO: 4155; WAN024COA; Start 39; Stop 63
cagatgcgtacatgatgtcttcata

SEQ ID NO: 374727 - DNA, 25 bp, Artificial
  probe
  misc_feature (1)..(25): SEQ ID NO: 4155; WAN024COA; Start 45; Stop 69
cgtacatgatgtcttcataactgct

SEQ ID NO: 374728 - DNA, 25 bp, Artificial
  probe
  misc_feature (1)..(25): SEQ ID NO: 4155; WAN024COA; Start 43; Stop 67
tgcgtacatgatgtcttcataactg

SEQ ID NO: 374729 - DNA, 25 bp, Artificial
  probe
  misc_feature (1)..(25): SEQ ID NO: 4155; WAN024COA; Start 46; Stop 70
gtacatgatgtcttcataactgcta

SEQ ID NO: 374730 - DNA, 25 bp, Artificial
  probe
  misc_feature (1)..(25): SEQ ID NO: 4155; WAN024COA; Start 54; Stop 78
tgtcttcataactgctagtagaagt

SEQ ID NO: 374731 - DNA, 25 bp, Artificial
  probe
  misc_feature (1)..(25): SEQ ID NO: 4155; WAN024COA; Start 50; Stop 74
atgatgtcttcataactgctagtag

SEQ ID NO: 374732 - DNA, 25 bp, Artificial
  probe
  misc_feature (1)..(25): SEQ ID NO: 4155; WAN024COA; Start 49; Stop 73
catgatgtcttcataactgctagta

SEQ ID NO: 374733 - DNA, 25 bp, Artificial
  probe
  misc_feature (1)..(25): SEQ ID NO: 4155; WAN024COA; Start 47; Stop 71
tacatgatgtcttcataactgctag

SEQ ID NO: 374734 - DNA, 25 bp, Artificial
  probe
  misc_feature (1)..(25): SEQ ID NO: 4155; WAN024COA; Start 55; Stop 79
gtcttcataactgctagtagaagtt

SEQ ID NO: 374735 - DNA, 25 bp, Artificial
  probe
  misc_feature (1)..(25): SEQ ID NO: 4155; WAN024COA; Start 44; Stop 68
gcgtacatgatgtcttcataactgc

SEQ ID NO: 374736 - DNA, 25 bp, Artificial
  probe
  misc_feature (1)..(25): SEQ ID NO: 4155; WAN024COA; Start 53; Stop 77
atgtcttcataactgctagtagaag

SEQ ID NO: 374737 - DNA, 25 bp, Artificial
  probe
  misc_feature (1)..(25): SEQ ID NO: 4155; WAN024COA; Start 36; Stop 60
cagcagatgcgtacatgatgtcttc

SEQ ID NO: 374738 - DNA, 25 bp, Artificial
  probe
  misc_feature (1)..(25): SEQ ID NO: 4155; WAN024COA; Start 38; Stop 62
gcagatgcgtacatgatgtcttcat

SEQ ID NO: 374739 - DNA, 25 bp, Artificial
  probe
  misc_feature (1)..(25): SEQ ID NO: 4155; WAN024COA; Start 37; Stop 61
agcagatgcgtacatgatgtcttca

SEQ ID NO: 374740 - DNA, 25 bp, Artificial
  probe
  misc_feature (1)..(25): SEQ ID NO: 4155; WAN024COA; Start 79; Stop 103
tttaattcgaagtcggtctttcaag

SEQ ID NO: 374741 - DNA, 25 bp, Artificial
  probe
  misc_feature (1)..(25): SEQ ID NO: 4155; WAN024COA; Start 84; Stop 108
ttcgaagtcggtctttcaagaataa

SEQ ID NO: 374742 - DNA, 25 bp, Artificial
  probe
  misc_feature (1)..(25): SEQ ID NO: 4155; WAN024COA; Start 81; Stop 105
taattcgaagtcggtctttcaagaa

SEQ ID NO: 374743 - DNA, 25 bp, Artificial
  probe
  misc_feature (1)..(25): SEQ ID NO: 4155; WAN024COA; Start 80; Stop 104
ttaattcgaagtcggtctttcaaga

SEQ ID NO: 374744 - DNA, 25 bp, Artificial
  probe
  misc_feature (1)..(25): SEQ ID NO: 4155; WAN024COA; Start 56; Stop 80
tcttcataactgctagtagaagttt

SEQ ID NO: 374745 - DNA, 25 bp, Artificial
  probe
  misc_feature (1)..(25): SEQ ID NO: 4155; WAN024COA; Start 64; Stop 88
actgctagtagaagttttaattcga

SEQ ID NO: 374746 - DNA, 25 bp, Artificial
  probe
  misc_feature (1)..(25): SEQ ID NO: 4155; WAN024COA; Start 83; Stop 107
attcgaagtcggtctttcaagaata

SEQ ID NO: 374747 - DNA, 25 bp, Artificial
  probe
  misc_feature (1)..(25): SEQ ID NO: 4155; WAN024COA; Start 1; Stop 25
gtggcaagtgaattctttcttcgaa

SEQ ID NO: 374748 - DNA, 25 bp, Artificial
  probe
  misc_feature (1)..(25): SEQ ID NO: 4155; WAN024COA; Start 82; Stop 106
aattcgaagtcggtctttcaagaat

SEQ ID NO: 374749 - DNA, 25 bp, Artificial
  probe
  misc_feature (1)..(25): SEQ ID NO: 4155; WAN024COA; Start 12; Stop 36
attctttcttcgaaactttcttgcc

SEQ ID NO: 374750 - DNA, 25 bp, Artificial
  probe
  misc_feature (1)..(25): SEQ ID NO: 4155; WAN024COA; Start 4; Stop 28
gcaagtgaattctttcttcgaaact

SEQ ID NO: 374751 - DNA, 25 bp, Artificial
  probe
  misc_feature (1)..(25): SEQ ID NO: 4155; WAN024COA; Start 11; Stop 35
aattctttcttcgaaactttcttgc

SEQ ID NO: 374752 - DNA, 25 bp, Artificial
  probe
  misc_feature (1)..(25): SEQ ID NO: 4155; WAN024COA; Start 3; Stop 27
ggcaagtgaattctttcttcgaaac

SEQ ID NO: 374753 - DNA, 25 bp, Artificial
  probe
  misc_feature (1)..(25): SEQ ID NO: 4156; WAN024DNI; Start 58; Stop 82
tctatccgtcgtttggtttatcttt

SEQ ID NO: 374754 - DNA, 25 bp, Artificial
  probe
  misc_feature (1)..(25): SEQ ID NO: 4156; WAN024DNI; Start 57; Stop 81
ttctatccgtcgtttggtttatctt

SEQ ID NO: 374755 - DNA, 25 bp, Artificial
  probe
  misc_feature (1)..(25): SEQ ID NO: 4156; WAN024DNI; Start 56; Stop 80
tttctatccgtcgtttggtttatct

SEQ ID NO: 374756 - DNA, 25 bp, Artificial
  probe
  misc_feature (1)..(25): SEQ ID NO: 4156; WAN024DNI; Start 31; Stop 55
gaagtatattctgtgtgtgggcttt

SEQ ID NO: 374757 - DNA, 25 bp, Artificial
  probe
  misc_feature (1)..(25): SEQ ID NO: 4156; WAN024DNI; Start 30; Stop 54
ggaagtatattctgtgtgtgggctt

SEQ ID NO: 374758 - DNA, 25 bp, Artificial
  probe
  misc_feature (1)..(25): SEQ ID NO: 4156; WAN024DNI; Start 59; Stop 83
ctatccgtcgtttggtttatctttt

SEQ ID NO: 374759 - DNA, 25 bp, Artificial
  probe
  misc_feature (1)..(25): SEQ ID NO: 4156; WAN024DNI; Start 55; Stop 79
ttttctatccgtcgtttggtttatc

SEQ ID NO: 374760 - DNA, 25 bp, Artificial
  probe
  misc_feature (1)..(25): SEQ ID NO: 4156; WAN024DNI; Start 62; Stop 86
tccgtcgtttggtttatcttttatt

SEQ ID NO: 374761 - DNA, 25 bp, Artificial
  probe
  misc_feature (1)..(25): SEQ ID NO: 4156; WAN024DNI; Start 61; Stop 85
atccgtcgtttggtttatcttttat

SEQ ID NO: 374762 - DNA, 25 bp, Artificial
  probe
  misc_feature (1)..(25): SEQ ID NO: 4156; WAN024DNI; Start 32; Stop 56
aagtatattctgtgtgtgggctttt

SEQ ID NO: 374763 - DNA, 25 bp, Artificial
  probe
  misc_feature (1)..(25): SEQ ID NO: 4156; WAN024DNI; Start 67; Stop 91
cgtttggtttatcttttattagggc

SEQ ID NO: 374764 - DNA, 25 bp, Artificial
  probe
  misc_feature (1)..(25): SEQ ID NO: 4156; WAN024DNI; Start 60; Stop 84
tatccgtcgtttggtttatctttta

SEQ ID NO: 374765 - DNA, 25 bp, Artificial
  probe
  misc_feature (1)..(25): SEQ ID NO: 4156; WAN024DNI; Start 27; Stop 51
cacggaagtatattctgtgtgtggg

SEQ ID NO: 374766 - DNA, 25 bp, Artificial
  probe
  misc_feature (1)..(25): SEQ ID NO: 4156; WAN024DNI; Start 63; Stop 87
ccgtcgtttggtttatcttttatta

SEQ ID NO: 374767 - DNA, 25 bp, Artificial
  probe
  misc_feature (1)..(25): SEQ ID NO: 4156; WAN024DNI; Start 66; Stop 90
tcgtttggtttatcttttattaggg

SEQ ID NO: 374768 - DNA, 25 bp, Artificial
  probe
  misc_feature (1)..(25): SEQ ID NO: 4156; WAN024DNI; Start 29; Stop 53
cggaagtatattctgtgtgtgggct

SEQ ID NO: 374769 - DNA, 25 bp, Artificial
  probe
  misc_feature (1)..(25): SEQ ID NO: 4156; WAN024DNI; Start 64; Stop 88
cgtcgtttggtttatcttttattag

SEQ ID NO: 374770 - DNA, 25 bp, Artificial
  probe
  misc_feature (1)..(25): SEQ ID NO: 4156; WAN024DNI; Start 20; Stop 44
gccctcacacggaagtatattctgt

SEQ ID NO: 374771 - DNA, 25 bp, Artificial
  probe
  misc_feature (1)..(25): SEQ ID NO: 4156; WAN024DNI; Start 28; Stop 52
acggaagtatattctgtgtgtgggc

SEQ ID NO: 374772 - DNA, 25 bp, Artificial
  probe
  misc_feature (1)..(25): SEQ ID NO: 4156; WAN024DNI; Start 26; Stop 50
acacggaagtatattctgtgtgtgg

SEQ ID NO: 374773 - DNA, 25 bp, Artificial
  probe
  misc_feature (1)..(25): SEQ ID NO: 4156; WAN024DNI; Start 22; Stop 46
cctcacacggaagtatattctgtgt

SEQ ID NO: 374774 - DNA, 25 bp, Artificial
  probe
  misc_feature (1)..(25): SEQ ID NO: 4156; WAN024DNI; Start 17; Stop 41
aacgccctcacacggaagtatattc

SEQ ID NO: 374775 - DNA, 25 bp, Artificial
  probe
  misc_feature (1)..(25): SEQ ID NO: 4156; WAN024DNI; Start 65; Stop 89
gtcgtttggtttatcttttattagg

SEQ ID NO: 374776 - DNA, 25 bp, Artificial
  probe
  misc_feature (1)..(25): SEQ ID NO: 4156; WAN024DNI; Start 16; Stop 40
caacgccctcacacggaagtatatt

SEQ ID NO: 374777 - DNA, 25 bp, Artificial
  probe
  misc_feature (1)..(25): SEQ ID NO: 4156; WAN024DNI; Start 71; Stop 95
tggtttatcttttattagggcctct

SEQ ID NO: 374778 - DNA, 25 bp, Artificial
  probe
  misc_feature (1)..(25): SEQ ID NO: 4156; WAN024DNI; Start 19; Stop 43
cgccctcacacggaagtatattctg

SEQ ID NO: 374779 - DNA, 25 bp, Artificial
  probe
  misc_feature (1)..(25): SEQ ID NO: 4156; WAN024DNI; Start 70; Stop 94
ttggtttatcttttattagggcctc

SEQ ID NO: 374780 - DNA, 25 bp, Artificial
  probe
  misc_feature (1)..(25): SEQ ID NO: 4156; WAN024DNI; Start 68; Stop 92
gtttggtttatcttttattagggcc

SEQ ID NO: 374781 - DNA, 25 bp, Artificial
  probe
  misc_feature (1)..(25): SEQ ID NO: 4156; WAN024DNI; Start 69; Stop 93
tttggtttatcttttattagggcct

SEQ ID NO: 374782 - DNA, 25 bp, Artificial
  probe
  misc_feature (1)..(25): SEQ ID NO: 4156; WAN024DNI; Start 72; Stop 96
ggtttatcttttattagggcctcta

SEQ ID NO: 374783 - DNA, 25 bp, Artificial
  probe
  misc_feature (1)..(25): SEQ ID NO: 4156; WAN024DNI; Start 21; Stop 45
ccctcacacggaagtatattctgtg

SEQ ID NO: 374784 - DNA, 25 bp, Artificial
  probe
  misc_feature (1)..(25): SEQ ID NO: 4156; WAN024DNI; Start 77; Stop 101
atcttttattagggcctctaactaa

SEQ ID NO: 374785 - DNA, 25 bp, Artificial
  probe
  misc_feature (1)..(25): SEQ ID NO: 4156; WAN024DNI; Start 75; Stop 99
ttatcttttattagggcctctaact

SEQ ID NO: 374786 - DNA, 25 bp, Artificial
  probe
  misc_feature (1)..(25): SEQ ID NO: 4157; WAN024GBD; Start 442; Stop 466
aactatgtcttgattgatgatgtga

SEQ ID NO: 374787 - DNA, 25 bp, Artificial
  probe
  misc_feature (1)..(25): SEQ ID NO: 4157; WAN024GBD; Start 440; Stop 464
tgaactatgtcttgattgatgatgt

SEQ ID NO: 374788 - DNA, 25 bp, Artificial
  probe
  misc_feature (1)..(25): SEQ ID NO: 4157; WAN024GBD; Start 437; Stop 461
acttgaactatgtcttgattgatga

SEQ ID NO: 374789 - DNA, 25 bp, Artificial
  probe
  misc_feature (1)..(25): SEQ ID NO: 4157; WAN024GBD; Start 425; Stop 449
aagaacacactgacttgaactatgt

SEQ ID NO: 374790 - DNA, 25 bp, Artificial
  probe
  misc_feature (1)..(25): SEQ ID NO: 4157; WAN024GBD; Start 443; Stop 467
actatgtcttgattgatgatgtgat

SEQ ID NO: 374791 - DNA, 25 bp, Artificial
  probe
  misc_feature (1)..(25): SEQ ID NO: 4157; WAN024GBD; Start 441; Stop 465
gaactatgtcttgattgatgatgtg

SEQ ID NO: 374792 - DNA, 25 bp, Artificial
  probe
  misc_feature (1)..(25): SEQ ID NO: 4157; WAN024GBD; Start 431; Stop 455
acactgacttgaactatgtcttgat

SEQ ID NO: 374793 - DNA, 25 bp, Artificial
  probe
  misc_feature (1)..(25): SEQ ID NO: 4157; WAN024GBD; Start 428; Stop 452
aacacactgacttgaactatgtctt

SEQ ID NO: 374794 - DNA, 25 bp, Artificial
  probe
  misc_feature (1)..(25): SEQ ID NO: 4157; WAN024GBD; Start 430; Stop 454
cacactgacttgaactatgtcttga

SEQ ID NO: 374795 - DNA, 25 bp, Artificial
  probe
  misc_feature (1)..(25): SEQ ID NO: 4157; WAN024GBD; Start 427; Stop 451
gaacacactgacttgaactatgtct

SEQ ID NO: 374796 - DNA, 25 bp, Artificial
  probe
  misc_feature (1)..(25): SEQ ID NO: 4157; WAN024GBD; Start 426; Stop 450
agaacacactgacttgaactatgtc

SEQ ID NO: 374797 - DNA, 25 bp, Artificial
  probe
  misc_feature (1)..(25): SEQ ID NO: 4157; WAN024GBD; Start 433; Stop 457
actgacttgaactatgtcttgattg

SEQ ID NO: 374798 - DNA, 25 bp, Artificial
  probe
  misc_feature (1)..(25): SEQ ID NO: 4157; WAN024GBD; Start 432; Stop 456
cactgacttgaactatgtcttgatt

SEQ ID NO: 374799 - DNA, 25 bp, Artificial
  probe
  misc_feature (1)..(25): SEQ ID NO: 4157; WAN024GBD; Start 429; Stop 453
acacactgacttgaactatgtcttg

SEQ ID NO: 374800 - DNA, 25 bp, Artificial
  probe
  misc_feature (1)..(25): SEQ ID NO: 4157; WAN024GBD; Start 434; Stop 458
ctgacttgaactatgtcttgattga

SEQ ID NO: 374801 - DNA, 25 bp, Artificial
  probe
  misc_feature (1)..(25): SEQ ID NO: 4157; WAN024GBD; Start 577; Stop 601
ggtggtatcgaatctgaagttatct

SEQ ID NO: 374802 - DNA, 25 bp, Artificial
  probe
  misc_feature (1)..(25): SEQ ID NO: 4157; WAN024GBD; Start 576; Stop 600
aggtggtatcgaatctgaagttatc

SEQ ID NO: 374803 - DNA, 25 bp, Artificial
  probe
  misc_feature (1)..(25): SEQ ID NO: 4157; WAN024GBD; Start 574; Stop 598
gtaggtggtatcgaatctgaagtta

SEQ ID NO: 374804 - DNA, 25 bp, Artificial
  probe
  misc_feature (1)..(25): SEQ ID NO: 4157; WAN024GBD; Start 439; Stop 463
ttgaactatgtcttgattgatgatg

SEQ ID NO: 374805 - DNA, 25 bp, Artificial
  probe
  misc_feature (1)..(25): SEQ ID NO: 4157; WAN024GBD; Start 578; Stop 602
gtggtatcgaatctgaagttatctc

SEQ ID NO: 374806 - DNA, 25 bp, Artificial
  probe
  misc_feature (1)..(25): SEQ ID NO: 4157; WAN024GBD; Start 435; Stop 459
tgacttgaactatgtcttgattgat

SEQ ID NO: 374807 - DNA, 25 bp, Artificial
  probe
  misc_feature (1)..(25): SEQ ID NO: 4157; WAN024GBD; Start 579; Stop 603
tggtatcgaatctgaagttatctct

SEQ ID NO: 374808 - DNA, 25 bp, Artificial
  probe
  misc_feature (1)..(25): SEQ ID NO: 4157; WAN024GBD; Start 575; Stop 599
taggtggtatcgaatctgaagttat

SEQ ID NO: 374809 - DNA, 25 bp, Artificial
  probe
  misc_feature (1)..(25): SEQ ID NO: 4157; WAN024GBD; Start 573; Stop 597
tgtaggtggtatcgaatctgaagtt

SEQ ID NO: 374810 - DNA, 25 bp, Artificial
  probe
  misc_feature (1)..(25): SEQ ID NO: 4157; WAN024GBD; Start 572; Stop 596
ttgtaggtggtatcgaatctgaagt

SEQ ID NO: 374811 - DNA, 25 bp, Artificial
  probe
  misc_feature (1)..(25): SEQ ID NO: 4157; WAN024GBD; Start 444; Stop 468
ctatgtcttgattgatgatgtgatt

SEQ ID NO: 374812 - DNA, 25 bp, Artificial
  probe
  misc_feature (1)..(25): SEQ ID NO: 4157; WAN024GBD; Start 438; Stop 462
cttgaactatgtcttgattgatgat

SEQ ID NO: 374813 - DNA, 25 bp, Artificial
  probe
  misc_feature (1)..(25): SEQ ID NO: 4157; WAN024GBD; Start 68; Stop 92
cagtaatgaacaagaaacaatggct

SEQ ID NO: 374814 - DNA, 25 bp, Artificial
  probe
  misc_feature (1)..(25): SEQ ID NO: 4157; WAN024GBD; Start 291; Stop 315
agataacggtttcacttacttccaa

SEQ ID NO: 374815 - DNA, 25 bp, Artificial
  probe
  misc_feature (1)..(25): SEQ ID NO: 4157; WAN024GBD; Start 47; Stop 71
gcacatcttatttaggaggttcagt

SEQ ID NO: 374816 - DNA, 25 bp, Artificial
  probe
  misc_feature (1)..(25): SEQ ID NO: 4157; WAN024GBD; Start 436; Stop 460
gacttgaactatgtcttgattgatg

SEQ ID NO: 374817 - DNA, 25 bp, Artificial
  probe
  misc_feature (1)..(25): SEQ ID NO: 4157; WAN024GBD; Start 294; Stop 318
taacggtttcacttacttccaatca

SEQ ID NO: 374818 - DNA, 25 bp, Artificial
  probe
  misc_feature (1)..(25): SEQ ID NO: 4157; WAN024GBD; Start 855; Stop 879
ccaagaagcagaaggtaaatacact

SEQ ID NO: 374819 - DNA, 25 bp, Artificial
  probe
  misc_feature (1)..(25): SEQ ID NO: 4158; WAN024FPA; Start 350; Stop 374
gcgattatccattgacagagattaa

SEQ ID NO: 374820 - DNA, 25 bp, Artificial
  probe
  misc_feature (1)..(25): SEQ ID NO: 4158; WAN024FPA; Start 202; Stop 226
ggactgttactagagaaccttgatg

SEQ ID NO: 374821 - DNA, 25 bp, Artificial
  probe
  misc_feature (1)..(25): SEQ ID NO: 4158; WAN024FPA; Start 203; Stop 227
gactgttactagagaaccttgatgc

SEQ ID NO: 374822 - DNA, 25 bp, Artificial
  probe
  misc_feature (1)..(25): SEQ ID NO: 4158; WAN024FPA; Start 207; Stop 231
gttactagagaaccttgatgctcat

SEQ ID NO: 374823 - DNA, 25 bp, Artificial
  probe
  misc_feature (1)..(25): SEQ ID NO: 4158; WAN024FPA; Start 204; Stop 228
actgttactagagaaccttgatgct

SEQ ID NO: 374824 - DNA, 25 bp, Artificial
  probe
  misc_feature (1)..(25): SEQ ID NO: 4158; WAN024FPA; Start 205; Stop 229
ctgttactagagaaccttgatgctc

SEQ ID NO: 374825 - DNA, 25 bp, Artificial
  probe
  misc_feature (1)..(25): SEQ ID NO: 4158; WAN024FPA; Start 215; Stop 239
agaaccttgatgctcatctatatgg

SEQ ID NO: 374826 - DNA, 25 bp, Artificial
  probe
  misc_feature (1)..(25): SEQ ID NO: 4158; WAN024FPA; Start 208; Stop 232
ttactagagaaccttgatgctcatc

SEQ ID NO: 374827 - DNA, 25 bp, Artificial
  probe
  misc_feature (1)..(25): SEQ ID NO: 4158; WAN024FPA; Start 209; Stop 233
tactagagaaccttgatgctcatct

SEQ ID NO: 374828 - DNA, 25 bp, Artificial
  probe
  misc_feature (1)..(25): SEQ ID NO: 4158; WAN024FPA; Start 206; Stop 230
tgttactagagaaccttgatgctca

SEQ ID NO: 374829 - DNA, 25 bp, Artificial
  probe
  misc_feature (1)..(25): SEQ ID NO: 4158; WAN024FPA; Start 220; Stop 244
cttgatgctcatctatatggtggag

SEQ ID NO: 374830 - DNA, 25 bp, Artificial
  probe
  misc_feature (1)..(25): SEQ ID NO: 4158; WAN024FPA; Start 201; Stop 225
aggactgttactagagaaccttgat

SEQ ID NO: 374831 - DNA, 25 bp, Artificial
  probe
  misc_feature (1)..(25): SEQ ID NO: 4158; WAN024FPA; Start 214; Stop 238
gagaaccttgatgctcatctatatg

SEQ ID NO: 374832 - DNA, 25 bp, Artificial
  probe
  misc_feature (1)..(25): SEQ ID NO: 4158; WAN024FPA; Start 227; Stop 251
ctcatctatatggtggagcagtaga

SEQ ID NO: 374833 - DNA, 25 bp, Artificial
  probe
  misc_feature (1)..(25): SEQ ID NO: 4158; WAN024FPA; Start 213; Stop 237
agagaaccttgatgctcatctatat

SEQ ID NO: 374834 - DNA, 25 bp, Artificial
  probe
  misc_feature (1)..(25): SEQ ID NO: 4158; WAN024FPA; Start 200; Stop 224
caggactgttactagagaaccttga

SEQ ID NO: 374835 - DNA, 25 bp, Artificial
  probe
  misc_feature (1)..(25): SEQ ID NO: 4158; WAN024FPA; Start 219; Stop 243
ccttgatgctcatctatatggtgga

SEQ ID NO: 374836 - DNA, 25 bp, Artificial
  probe
  misc_feature (1)..(25): SEQ ID NO: 4158; WAN024FPA; Start 554; Stop 578
aagaatatacaactgatggactgca

SEQ ID NO: 374837 - DNA, 25 bp, Artificial
  probe
  misc_feature (1)..(25): SEQ ID NO: 4158; WAN024FPA; Start 210; Stop 234
actagagaaccttgatgctcatcta

SEQ ID NO: 374838 - DNA, 25 bp, Artificial
  probe
  misc_feature (1)..(25): SEQ ID NO: 4158; WAN024FPA; Start 194; Stop 218
atcagacaggactgttactagagaa

SEQ ID NO: 374839 - DNA, 25 bp, Artificial
  probe
  misc_feature (1)..(25): SEQ ID NO: 4158; WAN024FPA; Start 505; Stop 529
tttgtgccagtatttgattgtttga

SEQ ID NO: 374840 - DNA, 25 bp, Artificial
  probe
  misc_feature (1)..(25): SEQ ID NO: 4158; WAN024FPA; Start 211; Stop 235
ctagagaaccttgatgctcatctat

SEQ ID NO: 374841 - DNA, 25 bp, Artificial
  probe
  misc_feature (1)..(25): SEQ ID NO: 4158; WAN024FPA; Start 555; Stop 579
agaatatacaactgatggactgcac

SEQ ID NO: 374842 - DNA, 25 bp, Artificial
  probe
  misc_feature (1)..(25): SEQ ID NO: 4158; WAN024FPA; Start 193; Stop 217
tatcagacaggactgttactagaga

SEQ ID NO: 374843 - DNA, 25 bp, Artificial
  probe
  misc_feature (1)..(25): SEQ ID NO: 4158; WAN024FPA; Start 319; Stop 343
aatctcgaagctatcattcaatccg

SEQ ID NO: 374844 - DNA, 25 bp, Artificial
  probe
  misc_feature (1)..(25): SEQ ID NO: 4158; WAN024FPA; Start 506; Stop 530
ttgtgccagtatttgattgtttgac

SEQ ID NO: 374845 - DNA, 25 bp, Artificial
  probe
  misc_feature (1)..(25): SEQ ID NO: 4158; WAN024FPA; Start 504; Stop 528
atttgtgccagtatttgattgtttg

SEQ ID NO: 374846 - DNA, 25 bp, Artificial
  probe
  misc_feature (1)..(25): SEQ ID NO: 4158; WAN024FPA; Start 216; Stop 240
gaaccttgatgctcatctatatggt

SEQ ID NO: 374847 - DNA, 25 bp, Artificial
  probe
  misc_feature (1)..(25): SEQ ID NO: 4158; WAN024FPA; Start 217; Stop 241
aaccttgatgctcatctatatggtg

SEQ ID NO: 374848 - DNA, 25 bp, Artificial
  probe
  misc_feature (1)..(25): SEQ ID NO: 4158; WAN024FPA; Start 192; Stop 216
ctatcagacaggactgttactagag

SEQ ID NO: 374849 - DNA, 25 bp, Artificial
  probe
  misc_feature (1)..(25): SEQ ID NO: 4158; WAN024FPA; Start 191; Stop 215
gctatcagacaggactgttactaga

SEQ ID NO: 374850 - DNA, 25 bp, Artificial
  probe
  misc_feature (1)..(25): SEQ ID NO: 4158; WAN024FPA; Start 195; Stop 219
tcagacaggactgttactagagaac

SEQ ID NO: 374851 - DNA, 25 bp, Artificial
  probe
  misc_feature (1)..(25): SEQ ID NO: 4158; WAN024FPA; Start 553; Stop 577
aaagaatatacaactgatggactgc

SEQ ID NO: 374852 - DNA, 25 bp, Artificial
  probe
  misc_feature (1)..(25): SEQ ID NO: 4159; WAN024C62; Start 187; Stop 211
aattccgttacattggatattggct

SEQ ID NO: 374853 - DNA, 25 bp, Artificial
  probe
  misc_feature (1)..(25): SEQ ID NO: 4159; WAN024C62; Start 188; Stop 212
attccgttacattggatattggctc

SEQ ID NO: 374854 - DNA, 25 bp, Artificial
  probe
  misc_feature (1)..(25): SEQ ID NO: 4159; WAN024C62; Start 186; Stop 210
caattccgttacattggatattggc

SEQ ID NO: 374855 - DNA, 25 bp, Artificial
  probe
  misc_feature (1)..(25): SEQ ID NO: 4159; WAN024C62; Start 202; Stop 226
gatattggctccaccgtattcagac

SEQ ID NO: 374856 - DNA, 25 bp, Artificial
  probe
  misc_feature (1)..(25): SEQ ID NO: 4159; WAN024C62; Start 319; Stop 343
attgataatctttccatgccctttc

SEQ ID NO: 374857 - DNA, 25 bp, Artificial
  probe
  misc_feature (1)..(25): SEQ ID NO: 4159; WAN024C62; Start 156; Stop 180
ctgtttgaggagtggcaatataacc

SEQ ID NO: 374858 - DNA, 25 bp, Artificial
  probe
  misc_feature (1)..(25): SEQ ID NO: 4159; WAN024C62; Start 318; Stop 342
tattgataatctttccatgcccttt

SEQ ID NO: 374859 - DNA, 25 bp, Artificial
  probe
  misc_feature (1)..(25): SEQ ID NO: 4159; WAN024C62; Start 317; Stop 341
atattgataatctttccatgccctt

SEQ ID NO: 374860 - DNA, 25 bp, Artificial
  probe
  misc_feature (1)..(25): SEQ ID NO: 4159; WAN024C62; Start 189; Stop 213
ttccgttacattggatattggctcc

SEQ ID NO: 374861 - DNA, 25 bp, Artificial
  probe
  misc_feature (1)..(25): SEQ ID NO: 4159; WAN024C62; Start 155; Stop 179
gctgtttgaggagtggcaatataac

SEQ ID NO: 374862 - DNA, 25 bp, Artificial
  probe
  misc_feature (1)..(25): SEQ ID NO: 4159; WAN024C62; Start 316; Stop 340
aatattgataatctttccatgccct

SEQ ID NO: 374863 - DNA, 25 bp, Artificial
  probe
  misc_feature (1)..(25): SEQ ID NO: 4159; WAN024C62; Start 96; Stop 120
caatgatgaactggtcaaatgggtg

SEQ ID NO: 374864 - DNA, 25 bp, Artificial
  probe
  misc_feature (1)..(25): SEQ ID NO: 4159; WAN024C62; Start 315; Stop 339
aaatattgataatctttccatgccc

SEQ ID NO: 374865 - DNA, 25 bp, Artificial
  probe
  misc_feature (1)..(25): SEQ ID NO: 4159; WAN024C62; Start 201; Stop 225
ggatattggctccaccgtattcaga

SEQ ID NO: 374866 - DNA, 25 bp, Artificial
  probe
  misc_feature (1)..(25): SEQ ID NO: 4159; WAN024C62; Start 97; Stop 121
aatgatgaactggtcaaatgggtgg

SEQ ID NO: 374867 - DNA, 25 bp, Artificial
  probe
  misc_feature (1)..(25): SEQ ID NO: 4159; WAN024C62; Start 300; Stop 324
cgctcatcatcgaacaaatattgat

SEQ ID NO: 374868 - DNA, 25 bp, Artificial
  probe
  misc_feature (1)..(25): SEQ ID NO: 4159; WAN024C62; Start 299; Stop 323
tcgctcatcatcgaacaaatattga

SEQ ID NO: 374869 - DNA, 25 bp, Artificial
  probe
  misc_feature (1)..(25): SEQ ID NO: 4159; WAN024C62; Start 314; Stop 338
caaatattgataatctttccatgcc

SEQ ID NO: 374870 - DNA, 25 bp, Artificial
  probe
  misc_feature (1)..(25): SEQ ID NO: 4159; WAN024C62; Start 7; Stop 31
attgacaaaattgctggcatcacta

SEQ ID NO: 374871 - DNA, 25 bp, Artificial
  probe
  misc_feature (1)..(25): SEQ ID NO: 4159; WAN024C62; Start 154; Stop 178
tgctgtttgaggagtggcaatataa

SEQ ID NO: 374872 - DNA, 25 bp, Artificial
  probe
  misc_feature (1)..(25): SEQ ID NO: 4159; WAN024C62; Start 95; Stop 119
gcaatgatgaactggtcaaatgggt

SEQ ID NO: 374873 - DNA, 25 bp, Artificial
  probe
  misc_feature (1)..(25): SEQ ID NO: 4159; WAN024C62; Start 313; Stop 337
acaaatattgataatctttccatgc

SEQ ID NO: 374874 - DNA, 25 bp, Artificial
  probe
  misc_feature (1)..(25): SEQ ID NO: 4159; WAN024C62; Start 8; Stop 32
ttgacaaaattgctggcatcactag

SEQ ID NO: 374875 - DNA, 25 bp, Artificial
  probe
  misc_feature (1)..(25): SEQ ID NO: 4159; WAN024C62; Start 301; Stop 325
gctcatcatcgaacaaatattgata

SEQ ID NO: 374876 - DNA, 25 bp, Artificial
  probe
  misc_feature (1)..(25): SEQ ID NO: 4159; WAN024C62; Start 310; Stop 334
cgaacaaatattgataatctttcca

SEQ ID NO: 374877 - DNA, 25 bp, Artificial
  probe
  misc_feature (1)..(25): SEQ ID NO: 4159; WAN024C62; Start 153; Stop 177
gtgctgtttgaggagtggcaatata

SEQ ID NO: 374878 - DNA, 25 bp, Artificial
  probe
  misc_feature (1)..(25): SEQ ID NO: 4159; WAN024C62; Start 203; Stop 227
atattggctccaccgtattcagacg

SEQ ID NO: 374879 - DNA, 25 bp, Artificial
  probe
  misc_feature (1)..(25): SEQ ID NO: 4159; WAN024C62; Start 6; Stop 30
cattgacaaaattgctggcatcact

SEQ ID NO: 374880 - DNA, 25 bp, Artificial
  probe
  misc_feature (1)..(25): SEQ ID NO: 4159; WAN024C62; Start 198; Stop 222
attggatattggctccaccgtattc

SEQ ID NO: 374881 - DNA, 25 bp, Artificial
  probe
  misc_feature (1)..(25): SEQ ID NO: 4159; WAN024C62; Start 309; Stop 333
tcgaacaaatattgataatctttcc

SEQ ID NO: 374882 - DNA, 25 bp, Artificial
  probe
  misc_feature (1)..(25): SEQ ID NO: 4159; WAN024C62; Start 94; Stop 118
tgcaatgatgaactggtcaaatggg

SEQ ID NO: 374883 - DNA, 25 bp, Artificial
  probe
  misc_feature (1)..(25): SEQ ID NO: 4159; WAN024C62; Start 197; Stop 221
cattggatattggctccaccgtatt

SEQ ID NO: 374884 - DNA, 25 bp, Artificial
  probe
  misc_feature (1)..(25): SEQ ID NO: 4159; WAN024C62; Start 298; Stop 322
ttcgctcatcatcgaacaaatattg

SEQ ID NO: 374885 - DNA, 25 bp, Artificial
  probe
  misc_feature (1)..(25): SEQ ID NO: 4160; WAN024CJG; Start 44; Stop 68
cggatgaattatcagaatcactaga

SEQ ID NO: 374886 - DNA, 25 bp, Artificial
  probe
  misc_feature (1)..(25): SEQ ID NO: 4160; WAN024CJG; Start 137; Stop 161
tcttgaagtcctataaattgcctcg

SEQ ID NO: 374887 - DNA, 25 bp, Artificial
  probe
  misc_feature (1)..(25): SEQ ID NO: 4160; WAN024CJG; Start 136; Stop 160
atcttgaagtcctataaattgcctc

SEQ ID NO: 374888 - DNA, 25 bp, Artificial
  probe
  misc_feature (1)..(25): SEQ ID NO: 4160; WAN024CJG; Start 244; Stop 268
tatcacgctttaaattgtttggctt

SEQ ID NO: 374889 - DNA, 25 bp, Artificial
  probe
  misc_feature (1)..(25): SEQ ID NO: 4160; WAN024CJG; Start 243; Stop 267
ttatcacgctttaaattgtttggct

SEQ ID NO: 374890 - DNA, 25 bp, Artificial
  probe
  misc_feature (1)..(25): SEQ ID NO: 4160; WAN024CJG; Start 257; Stop 281
attgtttggctttaaatgatggtct

SEQ ID NO: 374891 - DNA, 25 bp, Artificial
  probe
  misc_feature (1)..(25): SEQ ID NO: 4160; WAN024CJG; Start 242; Stop 266
attatcacgctttaaattgtttggc

SEQ ID NO: 374892 - DNA, 25 bp, Artificial
  probe
  misc_feature (1)..(25): SEQ ID NO: 4160; WAN024CJG; Start 138; Stop 162
cttgaagtcctataaattgcctcga

SEQ ID NO: 374893 - DNA, 25 bp, Artificial
  probe
  misc_feature (1)..(25): SEQ ID NO: 4160; WAN024CJG; Start 259; Stop 283
tgtttggctttaaatgatggtctaa

SEQ ID NO: 374894 - DNA, 25 bp, Artificial
  probe
  misc_feature (1)..(25): SEQ ID NO: 4160; WAN024CJG; Start 258; Stop 282
ttgtttggctttaaatgatggtcta

SEQ ID NO: 374895 - DNA, 25 bp, Artificial
  probe
  misc_feature (1)..(25): SEQ ID NO: 4160; WAN024CJG; Start 245; Stop 269
atcacgctttaaattgtttggcttt

SEQ ID NO: 374896 - DNA, 25 bp, Artificial
  probe
  misc_feature (1)..(25): SEQ ID NO: 4160; WAN024CJG; Start 256; Stop 280
aattgtttggctttaaatgatggtc

SEQ ID NO: 374897 - DNA, 25 bp, Artificial
  probe
  misc_feature (1)..(25): SEQ ID NO: 4160; WAN024CJG; Start 135; Stop 159
tatcttgaagtcctataaattgcct

SEQ ID NO: 374898 - DNA, 25 bp, Artificial
  probe
  misc_feature (1)..(25): SEQ ID NO: 4160; WAN024CJG; Start 246; Stop 270
tcacgctttaaattgtttggcttta

SEQ ID NO: 374899 - DNA, 25 bp, Artificial
  probe
  misc_feature (1)..(25): SEQ ID NO: 4160; WAN024CJG; Start 43; Stop 67
ccggatgaattatcagaatcactag

SEQ ID NO: 374900 - DNA, 25 bp, Artificial
  probe
  misc_feature (1)..(25): SEQ ID NO: 4160; WAN024CJG; Start 255; Stop 279
aaattgtttggctttaaatgatggt

SEQ ID NO: 374901 - DNA, 25 bp, Artificial
  probe
  misc_feature (1)..(25): SEQ ID NO: 4160; WAN024CJG; Start 208; Stop 232
agaggactgaaagttacattgatta

SEQ ID NO: 374902 - DNA, 25 bp, Artificial
  probe
  misc_feature (1)..(25): SEQ ID NO: 4160; WAN024CJG; Start 207; Stop 231
tagaggactgaaagttacattgatt

SEQ ID NO: 374903 - DNA, 25 bp, Artificial
  probe
  misc_feature (1)..(25): SEQ ID NO: 4160; WAN024CJG; Start 205; Stop 229
aatagaggactgaaagttacattga

SEQ ID NO: 374904 - DNA, 25 bp, Artificial
  probe
  misc_feature (1)..(25): SEQ ID NO: 4160; WAN024CJG; Start 206; Stop 230
atagaggactgaaagttacattgat

SEQ ID NO: 374905 - DNA, 25 bp, Artificial
  probe
  misc_feature (1)..(25): SEQ ID NO: 4160; WAN024CJG; Start 260; Stop 284
gtttggctttaaatgatggtctaaa

SEQ ID NO: 374906 - DNA, 25 bp, Artificial
  probe
  misc_feature (1)..(25): SEQ ID NO: 4160; WAN024CJG; Start 81; Stop 105
aaattattctgaaactggattgtca

SEQ ID NO: 374907 - DNA, 25 bp, Artificial
  probe
  misc_feature (1)..(25): SEQ ID NO: 4160; WAN024CJG; Start 204; Stop 228
aaatagaggactgaaagttacattg

SEQ ID NO: 374908 - DNA, 25 bp, Artificial
  probe
  misc_feature (1)..(25): SEQ ID NO: 4160; WAN024CJG; Start 134; Stop 158
ttatcttgaagtcctataaattgcc

SEQ ID NO: 374909 - DNA, 25 bp, Artificial
  probe
  misc_feature (1)..(25): SEQ ID NO: 4160; WAN024CJG; Start 45; Stop 69
ggatgaattatcagaatcactagat

SEQ ID NO: 374910 - DNA, 25 bp, Artificial
  probe
  misc_feature (1)..(25): SEQ ID NO: 4160; WAN024CJG; Start 210; Stop 234
aggactgaaagttacattgattatc

SEQ ID NO: 374911 - DNA, 25 bp, Artificial
  probe
  misc_feature (1)..(25): SEQ ID NO: 4160; WAN024CJG; Start 209; Stop 233
gaggactgaaagttacattgattat

SEQ ID NO: 374912 - DNA, 25 bp, Artificial
  probe
  misc_feature (1)..(25): SEQ ID NO: 4160; WAN024CJG; Start 211; Stop 235
ggactgaaagttacattgattatca

SEQ ID NO: 374913 - DNA, 25 bp, Artificial
  probe
  misc_feature (1)..(25): SEQ ID NO: 4160; WAN024CJG; Start 188; Stop 212
tggtgaaggaattacaaaatagagg

SEQ ID NO: 374914 - DNA, 25 bp, Artificial
  probe
  misc_feature (1)..(25): SEQ ID NO: 4160; WAN024CJG; Start 189; Stop 213
ggtgaaggaattacaaaatagagga

SEQ ID NO: 374915 - DNA, 25 bp, Artificial
  probe
  misc_feature (1)..(25): SEQ ID NO: 4160; WAN024CJG; Start 247; Stop 271
cacgctttaaattgtttggctttaa

SEQ ID NO: 374916 - DNA, 25 bp, Artificial
  probe
  misc_feature (1)..(25): SEQ ID NO: 4160; WAN024CJG; Start 254; Stop 278
taaattgtttggctttaaatgatgg

SEQ ID NO: 374917 - DNA, 25 bp, Artificial
  probe
  misc_feature (1)..(25): SEQ ID NO: 4160; WAN024CJG; Start 241; Stop 265
tattatcacgctttaaattgtttgg

SEQ ID NO: 374918 - DNA, 25 bp, Artificial
  probe
  misc_feature (1)..(25): SEQ ID NO: 4161; WAN024FZX; Start 78; Stop 102
ctggctggtaataatcatagtagga

SEQ ID NO: 374919 - DNA, 25 bp, Artificial
  probe
  misc_feature (1)..(25): SEQ ID NO: 4161; WAN024FZX; Start 77; Stop 101
tctggctggtaataatcatagtagg

SEQ ID NO: 374920 - DNA, 25 bp, Artificial
  probe
  misc_feature (1)..(25): SEQ ID NO: 4161; WAN024FZX; Start 75; Stop 99
cctctggctggtaataatcatagta

SEQ ID NO: 374921 - DNA, 25 bp, Artificial
  probe
  misc_feature (1)..(25): SEQ ID NO: 4161; WAN024FZX; Start 79; Stop 103
tggctggtaataatcatagtaggat

SEQ ID NO: 374922 - DNA, 25 bp, Artificial
  probe
  misc_feature (1)..(25): SEQ ID NO: 4161; WAN024FZX; Start 76; Stop 100
ctctggctggtaataatcatagtag

SEQ ID NO: 374923 - DNA, 25 bp, Artificial
  probe
  misc_feature (1)..(25): SEQ ID NO: 4161; WAN024FZX; Start 42; Stop 66
tctcaatataggtatcgctagaagg

SEQ ID NO: 374924 - DNA, 25 bp, Artificial
  probe
  misc_feature (1)..(25): SEQ ID NO: 4161; WAN024FZX; Start 39; Stop 63
ccttctcaatataggtatcgctaga

SEQ ID NO: 374925 - DNA, 25 bp, Artificial
  probe
  misc_feature (1)..(25): SEQ ID NO: 4161; WAN024FZX; Start 38; Stop 62
tccttctcaatataggtatcgctag

SEQ ID NO: 374926 - DNA, 25 bp, Artificial
  probe
  misc_feature (1)..(25): SEQ ID NO: 4161; WAN024FZX; Start 16; Stop 40
aatctcgtcattgacagaactatcc

SEQ ID NO: 374927 - DNA, 25 bp, Artificial
  probe
  misc_feature (1)..(25): SEQ ID NO: 4161; WAN024FZX; Start 37; Stop 61
atccttctcaatataggtatcgcta

SEQ ID NO: 374928 - DNA, 25 bp, Artificial
  probe
  misc_feature (1)..(25): SEQ ID NO: 4161; WAN024FZX; Start 36; Stop 60
tatccttctcaatataggtatcgct

SEQ ID NO: 374929 - DNA, 25 bp, Artificial
  probe
  misc_feature (1)..(25): SEQ ID NO: 4161; WAN024FZX; Start 19; Stop 43
ctcgtcattgacagaactatccttc

SEQ ID NO: 374930 - DNA, 25 bp, Artificial
  probe
  misc_feature (1)..(25): SEQ ID NO: 4161; WAN024FZX; Start 17; Stop 41
atctcgtcattgacagaactatcct

SEQ ID NO: 374931 - DNA, 25 bp, Artificial
  probe
  misc_feature (1)..(25): SEQ ID NO: 4161; WAN024FZX; Start 35; Stop 59
ctatccttctcaatataggtatcgc

SEQ ID NO: 374932 - DNA, 25 bp, Artificial
  probe
  misc_feature (1)..(25): SEQ ID NO: 4161; WAN024FZX; Start 18; Stop 42
tctcgtcattgacagaactatcctt

SEQ ID NO: 374933 - DNA, 25 bp, Artificial
  probe
  misc_feature (1)..(25): SEQ ID NO: 4161; WAN024FZX; Start 202; Stop 226
attgactttagaaatgacctgactc

SEQ ID NO: 374934 - DNA, 25 bp, Artificial
  probe
  misc_feature (1)..(25): SEQ ID NO: 4161; WAN024FZX; Start 80; Stop 104
ggctggtaataatcatagtaggata

SEQ ID NO: 374935 - DNA, 25 bp, Artificial
  probe
  misc_feature (1)..(25): SEQ ID NO: 4161; WAN024FZX; Start 47; Stop 71
atataggtatcgctagaagggacat

SEQ ID NO: 374936 - DNA, 25 bp, Artificial
  probe
  misc_feature (1)..(25): SEQ ID NO: 4161; WAN024FZX; Start 46; Stop 70
aatataggtatcgctagaagggaca

SEQ ID NO: 374937 - DNA, 25 bp, Artificial
  probe
  misc_feature (1)..(25): SEQ ID NO: 4161; WAN024FZX; Start 45; Stop 69
caatataggtatcgctagaagggac

SEQ ID NO: 374938 - DNA, 25 bp, Artificial
  probe
  misc_feature (1)..(25): SEQ ID NO: 4161; WAN024FZX; Start 44; Stop 68
tcaatataggtatcgctagaaggga

SEQ ID NO: 374939 - DNA, 25 bp, Artificial
  probe
  misc_feature (1)..(25): SEQ ID NO: 4161; WAN024FZX; Start 43; Stop 67
ctcaatataggtatcgctagaaggg

SEQ ID NO: 374940 - DNA, 25 bp, Artificial
  probe
  misc_feature (1)..(25): SEQ ID NO: 4161; WAN024FZX; Start 49; Stop 73
ataggtatcgctagaagggacatag

SEQ ID NO: 374941 - DNA, 25 bp, Artificial
  probe
  misc_feature (1)..(25): SEQ ID NO: 4161; WAN024FZX; Start 48; Stop 72
tataggtatcgctagaagggacata

SEQ ID NO: 374942 - DNA, 25 bp, Artificial
  probe
  misc_feature (1)..(25): SEQ ID NO: 4161; WAN024FZX; Start 203; Stop 227
ttgactttagaaatgacctgactca

SEQ ID NO: 374943 - DNA, 25 bp, Artificial
  probe
  misc_feature (1)..(25): SEQ ID NO: 4161; WAN024FZX; Start 15; Stop 39
caatctcgtcattgacagaactatc

SEQ ID NO: 374944 - DNA, 25 bp, Artificial
  probe
  misc_feature (1)..(25): SEQ ID NO: 4161; WAN024FZX; Start 22; Stop 46
gtcattgacagaactatccttctca

SEQ ID NO: 374945 - DNA, 25 bp, Artificial
  probe
  misc_feature (1)..(25): SEQ ID NO: 4161; WAN024FZX; Start 223; Stop 247
actcatagtataggtcttccctgtt

SEQ ID NO: 374946 - DNA, 25 bp, Artificial
  probe
  misc_feature (1)..(25): SEQ ID NO: 4161; WAN024FZX; Start 220; Stop 244
ctgactcatagtataggtcttccct

SEQ ID NO: 374947 - DNA, 25 bp, Artificial
  probe
  misc_feature (1)..(25): SEQ ID NO: 4161; WAN024FZX; Start 222; Stop 246
gactcatagtataggtcttccctgt

SEQ ID NO: 374948 - DNA, 25 bp, Artificial
  probe
  misc_feature (1)..(25): SEQ ID NO: 4161; WAN024FZX; Start 221; Stop 245
tgactcatagtataggtcttccctg

SEQ ID NO: 374949 - DNA, 25 bp, Artificial
  probe
  misc_feature (1)..(25): SEQ ID NO: 4161; WAN024FZX; Start 23; Stop 47
tcattgacagaactatccttctcaa

SEQ ID NO: 374950 - DNA, 25 bp, Artificial
  probe
  misc_feature (1)..(25): SEQ ID NO: 4161; WAN024FZX; Start 227; Stop 251
atagtataggtcttccctgttccag

SEQ ID NO: 374951 - DNA, 25 bp, Artificial
  probe
  misc_feature (1)..(25): SEQ ID NO: 4162; WAN024GKU; Start 463; Stop 487
aagcatgttcatctaactggttcag

SEQ ID NO: 374952 - DNA, 25 bp, Artificial
  probe
  misc_feature (1)..(25): SEQ ID NO: 4162; WAN024GKU; Start 466; Stop 490
catgttcatctaactggttcaggac

SEQ ID NO: 374953 - DNA, 25 bp, Artificial
  probe
  misc_feature (1)..(25): SEQ ID NO: 4162; WAN024GKU; Start 343; Stop 367
ggcagtttctttgacgattgtttaa

SEQ ID NO: 374954 - DNA, 25 bp, Artificial
  probe
  misc_feature (1)..(25): SEQ ID NO: 4162; WAN024GKU; Start 342; Stop 366
aggcagtttctttgacgattgttta

SEQ ID NO: 374955 - DNA, 25 bp, Artificial
  probe
  misc_feature (1)..(25): SEQ ID NO: 4162; WAN024GKU; Start 467; Stop 491
atgttcatctaactggttcaggacg

SEQ ID NO: 374956 - DNA, 25 bp, Artificial
  probe
  misc_feature (1)..(25): SEQ ID NO: 4162; WAN024GKU; Start 12; Stop 36
cagaacgaaatccgatagcaatctt

SEQ ID NO: 374957 - DNA, 25 bp, Artificial
  probe
  misc_feature (1)..(25): SEQ ID NO: 4162; WAN024GKU; Start 13; Stop 37
agaacgaaatccgatagcaatcttg

SEQ ID NO: 374958 - DNA, 25 bp, Artificial
  probe
  misc_feature (1)..(25): SEQ ID NO: 4162; WAN024GKU; Start 451; Stop 475
gagttattgggaaagcatgttcatc

SEQ ID NO: 374959 - DNA, 25 bp, Artificial
  probe
  misc_feature (1)..(25): SEQ ID NO: 4162; WAN024GKU; Start 453; Stop 477
gttattgggaaagcatgttcatcta

SEQ ID NO: 374960 - DNA, 25 bp, Artificial
  probe
  misc_feature (1)..(25): SEQ ID NO: 4162; WAN024GKU; Start 461; Stop 485
gaaagcatgttcatctaactggttc

SEQ ID NO: 374961 - DNA, 25 bp, Artificial
  probe
  misc_feature (1)..(25): SEQ ID NO: 4162; WAN024GKU; Start 452; Stop 476
agttattgggaaagcatgttcatct

SEQ ID NO: 374962 - DNA, 25 bp, Artificial
  probe
  misc_feature (1)..(25): SEQ ID NO: 4162; WAN024GKU; Start 455; Stop 479
tattgggaaagcatgttcatctaac

SEQ ID NO: 374963 - DNA, 25 bp, Artificial
  probe
  misc_feature (1)..(25): SEQ ID NO: 4162; WAN024GKU; Start 472; Stop 496
catctaactggttcaggacgttatt

SEQ ID NO: 374964 - DNA, 25 bp, Artificial
  probe
  misc_feature (1)..(25): SEQ ID NO: 4162; WAN024GKU; Start 456; Stop 480
attgggaaagcatgttcatctaact

SEQ ID NO: 374965 - DNA, 25 bp, Artificial
  probe
  misc_feature (1)..(25): SEQ ID NO: 4162; WAN024GKU; Start 462; Stop 486
aaagcatgttcatctaactggttca

SEQ ID NO: 374966 - DNA, 25 bp, Artificial
  probe
  misc_feature (1)..(25): SEQ ID NO: 4162; WAN024GKU; Start 454; Stop 478
ttattgggaaagcatgttcatctaa

SEQ ID NO: 374967 - DNA, 25 bp, Artificial
  probe
  misc_feature (1)..(25): SEQ ID NO: 4162; WAN024GKU; Start 471; Stop 495
tcatctaactggttcaggacgttat

SEQ ID NO: 374968 - DNA, 25 bp, Artificial
  probe
  misc_feature (1)..(25): SEQ ID NO: 4162; WAN024GKU; Start 14; Stop 38
gaacgaaatccgatagcaatcttgg

SEQ ID NO: 374969 - DNA, 25 bp, Artificial
  probe
  misc_feature (1)..(25): SEQ ID NO: 4162; WAN024GKU; Start 495; Stop 519
tttgtatttggagtttgattatgct

SEQ ID NO: 374970 - DNA, 25 bp, Artificial
  probe
  misc_feature (1)..(25): SEQ ID NO: 4162; WAN024GKU; Start 450; Stop 474
ggagttattgggaaagcatgttcat

SEQ ID NO: 374971 - DNA, 25 bp, Artificial
  probe
  misc_feature (1)..(25): SEQ ID NO: 4162; WAN024GKU; Start 344; Stop 368
gcagtttctttgacgattgtttaaa

SEQ ID NO: 374972 - DNA, 25 bp, Artificial
  probe
  misc_feature (1)..(25): SEQ ID NO: 4162; WAN024GKU; Start 470; Stop 494
ttcatctaactggttcaggacgtta

SEQ ID NO: 374973 - DNA, 25 bp, Artificial
  probe
  misc_feature (1)..(25): SEQ ID NO: 4162; WAN024GKU; Start 460; Stop 484
ggaaagcatgttcatctaactggtt

SEQ ID NO: 374974 - DNA, 25 bp, Artificial
  probe
  misc_feature (1)..(25): SEQ ID NO: 4162; WAN024GKU; Start 457; Stop 481
ttgggaaagcatgttcatctaactg

SEQ ID NO: 374975 - DNA, 25 bp, Artificial
  probe
  misc_feature (1)..(25): SEQ ID NO: 4162; WAN024GKU; Start 465; Stop 489
gcatgttcatctaactggttcagga

SEQ ID NO: 374976 - DNA, 25 bp, Artificial
  probe
  misc_feature (1)..(25): SEQ ID NO: 4162; WAN024GKU; Start 464; Stop 488
agcatgttcatctaactggttcagg

SEQ ID NO: 374977 - DNA, 25 bp, Artificial
  probe
  misc_feature (1)..(25): SEQ ID NO: 4162; WAN024GKU; Start 341; Stop 365
caggcagtttctttgacgattgttt

SEQ ID NO: 374978 - DNA, 25 bp, Artificial
  probe
  misc_feature (1)..(25): SEQ ID NO: 4162; WAN024GKU; Start 484; Stop 508
tcaggacgttatttgtatttggagt

SEQ ID NO: 374979 - DNA, 25 bp, Artificial
  probe
  misc_feature (1)..(25): SEQ ID NO: 4162; WAN024GKU; Start 480; Stop 504
tggttcaggacgttatttgtatttg

SEQ ID NO: 374980 - DNA, 25 bp, Artificial
  probe
  misc_feature (1)..(25): SEQ ID NO: 4162; WAN024GKU; Start 485; Stop 509
caggacgttatttgtatttggagtt

SEQ ID NO: 374981 - DNA, 25 bp, Artificial
  probe
  misc_feature (1)..(25): SEQ ID NO: 4162; WAN024GKU; Start 482; Stop 506
gttcaggacgttatttgtatttgga

SEQ ID NO: 374982 - DNA, 25 bp, Artificial
  probe
  misc_feature (1)..(25): SEQ ID NO: 4162; WAN024GKU; Start 481; Stop 505
ggttcaggacgttatttgtatttgg

SEQ ID NO: 374983 - DNA, 25 bp, Artificial
  probe
  misc_feature (1)..(25): SEQ ID NO: 4162; WAN024GKU; Start 291; Stop 315
ttcacctactaatttcatgcaccta

SEQ ID NO: 374984 - DNA, 25 bp, Artificial
  probe
  misc_feature (1)..(25): SEQ ID NO: 4163; WAN024GM9; Start 61; Stop 85
atggaagatagaagaaagacaaact

SEQ ID NO: 374985 - DNA, 25 bp, Artificial
  probe
  misc_feature (1)..(25): SEQ ID NO: 4163; WAN024GM9; Start 62; Stop 86
tggaagatagaagaaagacaaacta

SEQ ID NO: 374986 - DNA, 25 bp, Artificial
  probe
  misc_feature (1)..(25): SEQ ID NO: 4163; WAN024GM9; Start 60; Stop 84
aatggaagatagaagaaagacaaac

SEQ ID NO: 374987 - DNA, 25 bp, Artificial
  probe
  misc_feature (1)..(25): SEQ ID NO: 4163; WAN024GM9; Start 24; Stop 48
taaagagagctaccatagactgaaa

SEQ ID NO: 374988 - DNA, 25 bp, Artificial
  probe
  misc_feature (1)..(25): SEQ ID NO: 4163; WAN024GM9; Start 23; Stop 47
ttaaagagagctaccatagactgaa

SEQ ID NO: 374989 - DNA, 25 bp, Artificial
  probe
  misc_feature (1)..(25): SEQ ID NO: 4163; WAN024GM9; Start 22; Stop 46
tttaaagagagctaccatagactga

SEQ ID NO: 374990 - DNA, 25 bp, Artificial
  probe
  misc_feature (1)..(25): SEQ ID NO: 4163; WAN024GM9; Start 59; Stop 83
taatggaagatagaagaaagacaaa

SEQ ID NO: 374991 - DNA, 25 bp, Artificial
  probe
  misc_feature (1)..(25): SEQ ID NO: 4163; WAN024GM9; Start 63; Stop 87
ggaagatagaagaaagacaaactat

SEQ ID NO: 374992 - DNA, 25 bp, Artificial
  probe
  misc_feature (1)..(25): SEQ ID NO: 4163; WAN024GM9; Start 25; Stop 49
aaagagagctaccatagactgaaaa

SEQ ID NO: 374993 - DNA, 25 bp, Artificial
  probe
  misc_feature (1)..(25): SEQ ID NO: 4163; WAN024GM9; Start 18; Stop 42
gccttttaaagagagctaccataga

SEQ ID NO: 374994 - DNA, 25 bp, Artificial
  probe
  misc_feature (1)..(25): SEQ ID NO: 4163; WAN024GM9; Start 58; Stop 82
ataatggaagatagaagaaagacaa

SEQ ID NO: 374995 - DNA, 25 bp, Artificial
  probe
  misc_feature (1)..(25): SEQ ID NO: 4163; WAN024GM9; Start 8; Stop 32
cagtatcggagccttttaaagagag

SEQ ID NO: 374996 - DNA, 25 bp, Artificial
  probe
  misc_feature (1)..(25): SEQ ID NO: 4163; WAN024GM9; Start 19; Stop 43
ccttttaaagagagctaccatagac

SEQ ID NO: 374997 - DNA, 25 bp, Artificial
  probe
  misc_feature (1)..(25): SEQ ID NO: 4163; WAN024GM9; Start 21; Stop 45
ttttaaagagagctaccatagactg

SEQ ID NO: 374998 - DNA, 25 bp, Artificial
  probe
  misc_feature (1)..(25): SEQ ID NO: 4163; WAN024GM9; Start 20; Stop 44
cttttaaagagagctaccatagact

SEQ ID NO: 374999 - DNA, 25 bp, Artificial
  probe
  misc_feature (1)..(25): SEQ ID NO: 4163; WAN024GM9; Start 9; Stop 33
agtatcggagccttttaaagagagc

SEQ ID NO: 375000 - DNA, 25 bp, Artificial
  probe
  misc_feature (1)..(25): SEQ ID NO: 4163; WAN024GM9; Start 7; Stop 31
gcagtatcggagccttttaaagaga

SEQ ID NO: 375001 - DNA, 25 bp, Artificial
  probe
  misc_feature (1)..(25): SEQ ID NO: 4163; WAN024GM9; Start 17; Stop 41
agccttttaaagagagctaccatag

SEQ ID NO: 375002 - DNA, 25 bp, Artificial
  probe
  misc_feature (1)..(25): SEQ ID NO: 4163; WAN024GM9; Start 16; Stop 40
gagccttttaaagagagctaccata

SEQ ID NO: 375003 - DNA, 25 bp, Artificial
  probe
  misc_feature (1)..(25): SEQ ID NO: 4163; WAN024GM9; Start 57; Stop 81
tataatggaagatagaagaaagaca

SEQ ID NO: 375004 - DNA, 25 bp, Artificial
  probe
  misc_feature (1)..(25): SEQ ID NO: 4163; WAN024GM9; Start 11; Stop 35
tatcggagccttttaaagagagcta

SEQ ID NO: 375005 - DNA, 25 bp, Artificial
  probe
  misc_feature (1)..(25): SEQ ID NO: 4163; WAN024GM9; Start 15; Stop 39
ggagccttttaaagagagctaccat

SEQ ID NO: 375006 - DNA, 25 bp, Artificial
  probe
  misc_feature (1)..(25): SEQ ID NO: 4163; WAN024GM9; Start 12; Stop 36
atcggagccttttaaagagagctac

SEQ ID NO: 375007 - DNA, 25 bp, Artificial
  probe
  misc_feature (1)..(25): SEQ ID NO: 4163; WAN024GM9; Start 10; Stop 34
gtatcggagccttttaaagagagct

SEQ ID NO: 375008 - DNA, 25 bp, Artificial
  probe
  misc_feature (1)..(25): SEQ ID NO: 4163; WAN024GM9; Start 13; Stop 37
tcggagccttttaaagagagctacc

SEQ ID NO: 375009 - DNA, 25 bp, Artificial
  probe
  misc_feature (1)..(25): SEQ ID NO: 4163; WAN024GM9; Start 14; Stop 38
cggagccttttaaagagagctacca

SEQ ID NO: 375010 - DNA, 25 bp, Artificial
  probe
  misc_feature (1)..(25): SEQ ID NO: 4163; WAN024GM9; Start 6; Stop 30
ggcagtatcggagccttttaaagag

SEQ ID NO: 375011 - DNA, 25 bp, Artificial
  probe
  misc_feature (1)..(25): SEQ ID NO: 4163; WAN024GM9; Start 5; Stop 29
cggcagtatcggagccttttaaaga

SEQ ID NO: 375012 - DNA, 25 bp, Artificial
  probe
  misc_feature (1)..(25): SEQ ID NO: 4164; WAN024G23; Start 403; Stop 427
gtcatagcgataaccaataacgata

SEQ ID NO: 375013 - DNA, 25 bp, Artificial
  probe
  misc_feature (1)..(25): SEQ ID NO: 4164; WAN024G23; Start 196; Stop 220
ttcagtaacagtgtaatcagccaag

SEQ ID NO: 375014 - DNA, 25 bp, Artificial
  probe
  misc_feature (1)..(25): SEQ ID NO: 4164; WAN024G23; Start 195; Stop 219
cttcagtaacagtgtaatcagccaa

SEQ ID NO: 375015 - DNA, 25 bp, Artificial
  probe
  misc_feature (1)..(25): SEQ ID NO: 4164; WAN024G23; Start 201; Stop 225
taacagtgtaatcagccaagtgaag

SEQ ID NO: 375016 - DNA, 25 bp, Artificial
  probe
  misc_feature (1)..(25): SEQ ID NO: 4164; WAN024G23; Start 200; Stop 224
gtaacagtgtaatcagccaagtgaa

SEQ ID NO: 375017 - DNA, 25 bp, Artificial
  probe
  misc_feature (1)..(25): SEQ ID NO: 4164; WAN024G23; Start 198; Stop 222
cagtaacagtgtaatcagccaagtg

SEQ ID NO: 375018 - DNA, 25 bp, Artificial
  probe
  misc_feature (1)..(25): SEQ ID NO: 4164; WAN024G23; Start 197; Stop 221
tcagtaacagtgtaatcagccaagt

SEQ ID NO: 375019 - DNA, 25 bp, Artificial
  probe
  misc_feature (1)..(25): SEQ ID NO: 4164; WAN024G23; Start 404; Stop 428
tcatagcgataaccaataacgatat

SEQ ID NO: 375020 - DNA, 25 bp, Artificial
  probe
  misc_feature (1)..(25): SEQ ID NO: 4164; WAN024G23; Start 65; Stop 89
ttagccacaccaccattcatcttaa

SEQ ID NO: 375021 - DNA, 25 bp, Artificial
  probe
  misc_feature (1)..(25): SEQ ID NO: 4164; WAN024G23; Start 199; Stop 223
agtaacagtgtaatcagccaagtga

SEQ ID NO: 375022 - DNA, 25 bp, Artificial
  probe
  misc_feature (1)..(25): SEQ ID NO: 4164; WAN024G23; Start 189; Stop 213
aaccagcttcagtaacagtgtaatc

SEQ ID NO: 375023 - DNA, 25 bp, Artificial
  probe
  misc_feature (1)..(25): SEQ ID NO: 4164; WAN024G23; Start 399; Stop 423
tacggtcatagcgataaccaataac

SEQ ID NO: 375024 - DNA, 25 bp, Artificial
  probe
  misc_feature (1)..(25): SEQ ID NO: 4164; WAN024G23; Start 402; Stop 426
ggtcatagcgataaccaataacgat

SEQ ID NO: 375025 - DNA, 25 bp, Artificial
  probe
  misc_feature (1)..(25): SEQ ID NO: 4164; WAN024G23; Start 191; Stop 215
ccagcttcagtaacagtgtaatcag

SEQ ID NO: 375026 - DNA, 25 bp, Artificial
  probe
  misc_feature (1)..(25): SEQ ID NO: 4164; WAN024G23; Start 398; Stop 422
gtacggtcatagcgataaccaataa

SEQ ID NO: 375027 - DNA, 25 bp, Artificial
  probe
  misc_feature (1)..(25): SEQ ID NO: 4164; WAN024G23; Start 405; Stop 429
catagcgataaccaataacgatatt

SEQ ID NO: 375028 - DNA, 25 bp, Artificial
  probe
  misc_feature (1)..(25): SEQ ID NO: 4164; WAN024G23; Start 152; Stop 176
atatcaaggaatttctcagcaccaa

SEQ ID NO: 375029 - DNA, 25 bp, Artificial
  probe
  misc_feature (1)..(25): SEQ ID NO: 4164; WAN024G23; Start 106; Stop 130
gacaataacaactgcatctggagat

SEQ ID NO: 375030 - DNA, 25 bp, Artificial
  probe
  misc_feature (1)..(25): SEQ ID NO: 4164; WAN024G23; Start 190; Stop 214
accagcttcagtaacagtgtaatca

SEQ ID NO: 375031 - DNA, 25 bp, Artificial
  probe
  misc_feature (1)..(25): SEQ ID NO: 4164; WAN024G23; Start 153; Stop 177
tatcaaggaatttctcagcaccaag

SEQ ID NO: 375032 - DNA, 25 bp, Artificial
  probe
  misc_feature (1)..(25): SEQ ID NO: 4164; WAN024G23; Start 411; Stop 435
gataaccaataacgatattcgccaa

SEQ ID NO: 375033 - DNA, 25 bp, Artificial
  probe
  misc_feature (1)..(25): SEQ ID NO: 4164; WAN024G23; Start 406; Stop 430
atagcgataaccaataacgatattc

SEQ ID NO: 375034 - DNA, 25 bp, Artificial
  probe
  misc_feature (1)..(25): SEQ ID NO: 4164; WAN024G23; Start 303; Stop 327
taccgtaaattgtctgaaccaagtt

SEQ ID NO: 375035 - DNA, 25 bp, Artificial
  probe
  misc_feature (1)..(25): SEQ ID NO: 4164; WAN024G23; Start 407; Stop 431
tagcgataaccaataacgatattcg

SEQ ID NO: 375036 - DNA, 25 bp, Artificial
  probe
  misc_feature (1)..(25): SEQ ID NO: 4164; WAN024G23; Start 305; Stop 329
ccgtaaattgtctgaaccaagtttg

SEQ ID NO: 375037 - DNA, 25 bp, Artificial
  probe
  misc_feature (1)..(25): SEQ ID NO: 4164; WAN024G23; Start 304; Stop 328
accgtaaattgtctgaaccaagttt

SEQ ID NO: 375038 - DNA, 25 bp, Artificial
  probe
  misc_feature (1)..(25): SEQ ID NO: 4164; WAN024G23; Start 410; Stop 434
cgataaccaataacgatattcgcca

SEQ ID NO: 375039 - DNA, 25 bp, Artificial
  probe
  misc_feature (1)..(25): SEQ ID NO: 4164; WAN024G23; Start 64; Stop 88
tttagccacaccaccattcatctta

SEQ ID NO: 375040 - DNA, 25 bp, Artificial
  probe
  misc_feature (1)..(25): SEQ ID NO: 4164; WAN024G23; Start 202; Stop 226
aacagtgtaatcagccaagtgaagg

SEQ ID NO: 375041 - DNA, 25 bp, Artificial
  probe
  misc_feature (1)..(25): SEQ ID NO: 4164; WAN024G23; Start 302; Stop 326
gtaccgtaaattgtctgaaccaagt

SEQ ID NO: 375042 - DNA, 25 bp, Artificial
  probe
  misc_feature (1)..(25): SEQ ID NO: 4164; WAN024G23; Start 301; Stop 325
tgtaccgtaaattgtctgaaccaag

SEQ ID NO: 375043 - DNA, 25 bp, Artificial
  probe
  misc_feature (1)..(25): SEQ ID NO: 4164; WAN024G23; Start 300; Stop 324
gtgtaccgtaaattgtctgaaccaa

SEQ ID NO: 375044 - DNA, 25 bp, Artificial
  probe
  misc_feature (1)..(25): SEQ ID NO: 4164; WAN024G23; Start 188; Stop 212
aaaccagcttcagtaacagtgtaat

SEQ ID NO: 375045 - DNA, 25 bp, Artificial
  probe
  misc_feature (1)..(25): SEQ ID NO: 4165; WAN024C9P; Start 16; Stop 40
accttggaaacctttacctttagaa

SEQ ID NO: 375046 - DNA, 25 bp, Artificial
  probe
  misc_feature (1)..(25): SEQ ID NO: 4165; WAN024C9P; Start 11; Stop 35
ataacaccttggaaacctttacctt

SEQ ID NO: 375047 - DNA, 25 bp, Artificial
  probe
  misc_feature (1)..(25): SEQ ID NO: 4165; WAN024C9P; Start 13; Stop 37
aacaccttggaaacctttaccttta

SEQ ID NO: 375048 - DNA, 25 bp, Artificial
  probe
  misc_feature (1)..(25): SEQ ID NO: 4165; WAN024C9P; Start 12; Stop 36
taacaccttggaaacctttaccttt

SEQ ID NO: 375049 - DNA, 25 bp, Artificial
  probe
  misc_feature (1)..(25): SEQ ID NO: 4165; WAN024C9P; Start 10; Stop 34
gataacaccttggaaacctttacct

SEQ ID NO: 375050 - DNA, 25 bp, Artificial
  probe
  misc_feature (1)..(25): SEQ ID NO: 4165; WAN024C9P; Start 8; Stop 32
ttgataacaccttggaaacctttac

SEQ ID NO: 375051 - DNA, 25 bp, Artificial
  probe
  misc_feature (1)..(25): SEQ ID NO: 4165; WAN024C9P; Start 15; Stop 39
caccttggaaacctttacctttaga

SEQ ID NO: 375052 - DNA, 25 bp, Artificial
  probe
  misc_feature (1)..(25): SEQ ID NO: 4165; WAN024C9P; Start 14; Stop 38
acaccttggaaacctttacctttag

SEQ ID NO: 375053 - DNA, 25 bp, Artificial
  probe
  misc_feature (1)..(25): SEQ ID NO: 4165; WAN024C9P; Start 9; Stop 33
tgataacaccttggaaacctttacc

SEQ ID NO: 375054 - DNA, 25 bp, Artificial
  probe
  misc_feature (1)..(25): SEQ ID NO: 4165; WAN024C9P; Start 17; Stop 41
ccttggaaacctttacctttagaag

SEQ ID NO: 375055 - DNA, 25 bp, Artificial
  probe
  misc_feature (1)..(25): SEQ ID NO: 4165; WAN024C9P; Start 70; Stop 94
tgcgaatgtttcaactgtaatttca

SEQ ID NO: 375056 - DNA, 25 bp, Artificial
  probe
  misc_feature (1)..(25): SEQ ID NO: 4165; WAN024C9P; Start 69; Stop 93
ctgcgaatgtttcaactgtaatttc

SEQ ID NO: 375057 - DNA, 25 bp, Artificial
  probe
  misc_feature (1)..(25): SEQ ID NO: 4165; WAN024C9P; Start 7; Stop 31
tttgataacaccttggaaaccttta

SEQ ID NO: 375058 - DNA, 25 bp, Artificial
  probe
  misc_feature (1)..(25): SEQ ID NO: 4165; WAN024C9P; Start 18; Stop 42
cttggaaacctttacctttagaagt

SEQ ID NO: 375059 - DNA, 25 bp, Artificial
  probe
  misc_feature (1)..(25): SEQ ID NO: 4165; WAN024C9P; Start 324; Stop 348
tgaagatttgagtcattcccacttt

SEQ ID NO: 375060 - DNA, 25 bp, Artificial
  probe
  misc_feature (1)..(25): SEQ ID NO: 4165; WAN024C9P; Start 28; Stop 52
tttacctttagaagtacccgttacg

SEQ ID NO: 375061 - DNA, 25 bp, Artificial
  probe
  misc_feature (1)..(25): SEQ ID NO: 4165; WAN024C9P; Start 26; Stop 50
cctttacctttagaagtacccgtta

SEQ ID NO: 375062 - DNA, 25 bp, Artificial
  probe
  misc_feature (1)..(25): SEQ ID NO: 4165; WAN024C9P; Start 68; Stop 92
gctgcgaatgtttcaactgtaattt

SEQ ID NO: 375063 - DNA, 25 bp, Artificial
  probe
  misc_feature (1)..(25): SEQ ID NO: 4165; WAN024C9P; Start 23; Stop 47
aaacctttacctttagaagtacccg

SEQ ID NO: 375064 - DNA, 25 bp, Artificial
  probe
  misc_feature (1)..(25): SEQ ID NO: 4165; WAN024C9P; Start 72; Stop 96
cgaatgtttcaactgtaatttcagc

SEQ ID NO: 375065 - DNA, 25 bp, Artificial
  probe
  misc_feature (1)..(25): SEQ ID NO: 4165; WAN024C9P; Start 71; Stop 95
gcgaatgtttcaactgtaatttcag

SEQ ID NO: 375066 - DNA, 25 bp, Artificial
  probe
  misc_feature (1)..(25): SEQ ID NO: 4165; WAN024C9P; Start 22; Stop 46
gaaacctttacctttagaagtaccc

SEQ ID NO: 375067 - DNA, 25 bp, Artificial
  probe
  misc_feature (1)..(25): SEQ ID NO: 4165; WAN024C9P; Start 21; Stop 45
ggaaacctttacctttagaagtacc

SEQ ID NO: 375068 - DNA, 25 bp, Artificial
  probe
  misc_feature (1)..(25): SEQ ID NO: 4165; WAN024C9P; Start 85; Stop 109
tgtaatttcagcaccaacttccaag

SEQ ID NO: 375069 - DNA, 25 bp, Artificial
  probe
  misc_feature (1)..(25): SEQ ID NO: 4165; WAN024C9P; Start 27; Stop 51
ctttacctttagaagtacccgttac

SEQ ID NO: 375070 - DNA, 25 bp, Artificial
  probe
  misc_feature (1)..(25): SEQ ID NO: 4165; WAN024C9P; Start 75; Stop 99
atgtttcaactgtaatttcagcacc

SEQ ID NO: 375071 - DNA, 25 bp, Artificial
  probe
  misc_feature (1)..(25): SEQ ID NO: 4165; WAN024C9P; Start 276; Stop 300
ttggagttgcttcaataactgttac

SEQ ID NO: 375072 - DNA, 25 bp, Artificial
  probe
  misc_feature (1)..(25): SEQ ID NO: 4165; WAN024C9P; Start 78; Stop 102
tttcaactgtaatttcagcaccaac

SEQ ID NO: 375073 - DNA, 25 bp, Artificial
  probe
  misc_feature (1)..(25): SEQ ID NO: 4165; WAN024C9P; Start 77; Stop 101
gtttcaactgtaatttcagcaccaa

SEQ ID NO: 375074 - DNA, 25 bp, Artificial
  probe
  misc_feature (1)..(25): SEQ ID NO: 4165; WAN024C9P; Start 25; Stop 49
acctttacctttagaagtacccgtt

SEQ ID NO: 375075 - DNA, 25 bp, Artificial
  probe
  misc_feature (1)..(25): SEQ ID NO: 4165; WAN024C9P; Start 24; Stop 48
aacctttacctttagaagtacccgt

SEQ ID NO: 375076 - DNA, 25 bp, Artificial
  probe
  misc_feature (1)..(25): SEQ ID NO: 4165; WAN024C9P; Start 277; Stop 301
tggagttgcttcaataactgttaca

SEQ ID NO: 375077 - DNA, 25 bp, Artificial
  probe
  misc_feature (1)..(25): SEQ ID NO: 4165; WAN024C9P; Start 74; Stop 98
aatgtttcaactgtaatttcagcac

SEQ ID NO: 375078 - DNA, 25 bp, Artificial
  probe
  misc_feature (1)..(25): SEQ ID NO: 4166; WAN024G6D; Start 78; Stop 102
tatcaggtgtcatatccattcgttc

SEQ ID NO: 375079 - DNA, 25 bp, Artificial
  probe
  misc_feature (1)..(25): SEQ ID NO: 4166; WAN024G6D; Start 77; Stop 101
ttatcaggtgtcatatccattcgtt

SEQ ID NO: 375080 - DNA, 25 bp, Artificial
  probe
  misc_feature (1)..(25): SEQ ID NO: 4166; WAN024G6D; Start 76; Stop 100
cttatcaggtgtcatatccattcgt

SEQ ID NO: 375081 - DNA, 25 bp, Artificial
  probe
  misc_feature (1)..(25): SEQ ID NO: 4166; WAN024G6D; Start 86; Stop 110
gtcatatccattcgttcagcaatct

SEQ ID NO: 375082 - DNA, 25 bp, Artificial
  probe
  misc_feature (1)..(25): SEQ ID NO: 4166; WAN024G6D; Start 85; Stop 109
tgtcatatccattcgttcagcaatc

SEQ ID NO: 375083 - DNA, 25 bp, Artificial
  probe
  misc_feature (1)..(25): SEQ ID NO: 4166; WAN024G6D; Start 84; Stop 108
gtgtcatatccattcgttcagcaat

SEQ ID NO: 375084 - DNA, 25 bp, Artificial
  probe
  misc_feature (1)..(25): SEQ ID NO: 4166; WAN024G6D; Start 79; Stop 103
atcaggtgtcatatccattcgttca

SEQ ID NO: 375085 - DNA, 25 bp, Artificial
  probe
  misc_feature (1)..(25): SEQ ID NO: 4166; WAN024G6D; Start 89; Stop 113
atatccattcgttcagcaatctgtt

SEQ ID NO: 375086 - DNA, 25 bp, Artificial
  probe
  misc_feature (1)..(25): SEQ ID NO: 4166; WAN024G6D; Start 87; Stop 111
tcatatccattcgttcagcaatctg

SEQ ID NO: 375087 - DNA, 25 bp, Artificial
  probe
  misc_feature (1)..(25): SEQ ID NO: 4166; WAN024G6D; Start 75; Stop 99
ccttatcaggtgtcatatccattcg

SEQ ID NO: 375088 - DNA, 25 bp, Artificial
  probe
  misc_feature (1)..(25): SEQ ID NO: 4166; WAN024G6D; Start 80; Stop 104
tcaggtgtcatatccattcgttcag

SEQ ID NO: 375089 - DNA, 25 bp, Artificial
  probe
  misc_feature (1)..(25): SEQ ID NO: 4166; WAN024G6D; Start 90; Stop 114
tatccattcgttcagcaatctgttc

SEQ ID NO: 375090 - DNA, 25 bp, Artificial
  probe
  misc_feature (1)..(25): SEQ ID NO: 4166; WAN024G6D; Start 88; Stop 112
catatccattcgttcagcaatctgt

SEQ ID NO: 375091 - DNA, 25 bp, Artificial
  probe
  misc_feature (1)..(25): SEQ ID NO: 4166; WAN024G6D; Start 18; Stop 42
caccgataggagtttcaagagatac

SEQ ID NO: 375092 - DNA, 25 bp, Artificial
  probe
  misc_feature (1)..(25): SEQ ID NO: 4166; WAN024G6D; Start 17; Stop 41
tcaccgataggagtttcaagagata

SEQ ID NO: 375093 - DNA, 25 bp, Artificial
  probe
  misc_feature (1)..(25): SEQ ID NO: 4166; WAN024G6D; Start 59; Stop 83
ttcaagatttcacgaaccttatcag

SEQ ID NO: 375094 - DNA, 25 bp, Artificial
  probe
  misc_feature (1)..(25): SEQ ID NO: 4166; WAN024G6D; Start 58; Stop 82
cttcaagatttcacgaaccttatca

SEQ ID NO: 375095 - DNA, 25 bp, Artificial
  probe
  misc_feature (1)..(25): SEQ ID NO: 4166; WAN024G6D; Start 16; Stop 40
ttcaccgataggagtttcaagagat

SEQ ID NO: 375096 - DNA, 25 bp, Artificial
  probe
  misc_feature (1)..(25): SEQ ID NO: 4166; WAN024G6D; Start 21; Stop 45
cgataggagtttcaagagatactgg

SEQ ID NO: 375097 - DNA, 25 bp, Artificial
  probe
  misc_feature (1)..(25): SEQ ID NO: 4166; WAN024G6D; Start 20; Stop 44
ccgataggagtttcaagagatactg

SEQ ID NO: 375098 - DNA, 25 bp, Artificial
  probe
  misc_feature (1)..(25): SEQ ID NO: 4166; WAN024G6D; Start 24; Stop 48
taggagtttcaagagatactggttc

SEQ ID NO: 375099 - DNA, 25 bp, Artificial
  probe
  misc_feature (1)..(25): SEQ ID NO: 4166; WAN024G6D; Start 19; Stop 43
accgataggagtttcaagagatact

SEQ ID NO: 375100 - DNA, 25 bp, Artificial
  probe
  misc_feature (1)..(25): SEQ ID NO: 4166; WAN024G6D; Start 22; Stop 46
gataggagtttcaagagatactggt

SEQ ID NO: 375101 - DNA, 25 bp, Artificial
  probe
  misc_feature (1)..(25): SEQ ID NO: 4166; WAN024G6D; Start 25; Stop 49
aggagtttcaagagatactggttct

SEQ ID NO: 375102 - DNA, 25 bp, Artificial
  probe
  misc_feature (1)..(25): SEQ ID NO: 4166; WAN024G6D; Start 23; Stop 47
ataggagtttcaagagatactggtt

SEQ ID NO: 375103 - DNA, 25 bp, Artificial
  probe
  misc_feature (1)..(25): SEQ ID NO: 4166; WAN024G6D; Start 57; Stop 81
tcttcaagatttcacgaaccttatc

SEQ ID NO: 375104 - DNA, 25 bp, Artificial
  probe
  misc_feature (1)..(25): SEQ ID NO: 4166; WAN024G6D; Start 83; Stop 107
ggtgtcatatccattcgttcagcaa

SEQ ID NO: 375105 - DNA, 25 bp, Artificial
  probe
  misc_feature (1)..(25): SEQ ID NO: 4166; WAN024G6D; Start 249; Stop 273
gaatccaccaagttgcataagttga

SEQ ID NO: 375106 - DNA, 25 bp, Artificial
  probe
  misc_feature (1)..(25): SEQ ID NO: 4166; WAN024G6D; Start 15; Stop 39
cttcaccgataggagtttcaagaga

SEQ ID NO: 375107 - DNA, 25 bp, Artificial
  probe
  misc_feature (1)..(25): SEQ ID NO: 4166; WAN024G6D; Start 91; Stop 115
atccattcgttcagcaatctgttct

SEQ ID NO: 375108 - DNA, 25 bp, Artificial
  probe
  misc_feature (1)..(25): SEQ ID NO: 4166; WAN024G6D; Start 134; Stop 158
aattcttgaaggagattccgctgtt

SEQ ID NO: 375109 - DNA, 25 bp, Artificial
  probe
  misc_feature (1)..(25): SEQ ID NO: 4166; WAN024G6D; Start 153; Stop 177
gctgttcacgaaccaatttattgat

SEQ ID NO: 375110 - DNA, 25 bp, Artificial
  probe
  misc_feature (1)..(25): SEQ ID NO: 4166; WAN024G6D; Start 60; Stop 84
tcaagatttcacgaaccttatcagg

SEQ ID NO: 375111 - DNA, 25 bp, Artificial
  probe
  misc_feature (1)..(25): SEQ ID NO: 4167; WAN024FKV; Start 55; Stop 79
tccctatttcttgcgatttatgtga

SEQ ID NO: 375112 - DNA, 25 bp, Artificial
  probe
  misc_feature (1)..(25): SEQ ID NO: 4167; WAN024FKV; Start 54; Stop 78
ttccctatttcttgcgatttatgtg

SEQ ID NO: 375113 - DNA, 25 bp, Artificial
  probe
  misc_feature (1)..(25): SEQ ID NO: 4167; WAN024FKV; Start 61; Stop 85
tttcttgcgatttatgtgattcctt

SEQ ID NO: 375114 - DNA, 25 bp, Artificial
  probe
  misc_feature (1)..(25): SEQ ID NO: 4167; WAN024FKV; Start 56; Stop 80
ccctatttcttgcgatttatgtgat

SEQ ID NO: 375115 - DNA, 25 bp, Artificial
  probe
  misc_feature (1)..(25): SEQ ID NO: 4167; WAN024FKV; Start 60; Stop 84
atttcttgcgatttatgtgattcct

SEQ ID NO: 375116 - DNA, 25 bp, Artificial
  probe
  misc_feature (1)..(25): SEQ ID NO: 4167; WAN024FKV; Start 48; Stop 72
atcagattccctatttcttgcgatt

SEQ ID NO: 375117 - DNA, 25 bp, Artificial
  probe
  misc_feature (1)..(25): SEQ ID NO: 4167; WAN024FKV; Start 62; Stop 86
ttcttgcgatttatgtgattcctta

SEQ ID NO: 375118 - DNA, 25 bp, Artificial
  probe
  misc_feature (1)..(25): SEQ ID NO: 4167; WAN024FKV; Start 53; Stop 77
attccctatttcttgcgatttatgt

SEQ ID NO: 375119 - DNA, 25 bp, Artificial
  probe
  misc_feature (1)..(25): SEQ ID NO: 4167; WAN024FKV; Start 49; Stop 73
tcagattccctatttcttgcgattt

SEQ ID NO: 375120 - DNA, 25 bp, Artificial
  probe
  misc_feature (1)..(25): SEQ ID NO: 4167; WAN024FKV; Start 50; Stop 74
cagattccctatttcttgcgattta

SEQ ID NO: 375121 - DNA, 25 bp, Artificial
  probe
  misc_feature (1)..(25): SEQ ID NO: 4167; WAN024FKV; Start 63; Stop 87
tcttgcgatttatgtgattccttat

SEQ ID NO: 375122 - DNA, 25 bp, Artificial
  probe
  misc_feature (1)..(25): SEQ ID NO: 4167; WAN024FKV; Start 47; Stop 71
aatcagattccctatttcttgcgat

SEQ ID NO: 375123 - DNA, 25 bp, Artificial
  probe
  misc_feature (1)..(25): SEQ ID NO: 4167; WAN024FKV; Start 52; Stop 76
gattccctatttcttgcgatttatg

SEQ ID NO: 375124 - DNA, 25 bp, Artificial
  probe
  misc_feature (1)..(25): SEQ ID NO: 4167; WAN024FKV; Start 59; Stop 83
tatttcttgcgatttatgtgattcc

SEQ ID NO: 375125 - DNA, 25 bp, Artificial
  probe
  misc_feature (1)..(25): SEQ ID NO: 4167; WAN024FKV; Start 51; Stop 75
agattccctatttcttgcgatttat

SEQ ID NO: 375126 - DNA, 25 bp, Artificial
  probe
  misc_feature (1)..(25): SEQ ID NO: 4167; WAN024FKV; Start 64; Stop 88
cttgcgatttatgtgattccttatt

SEQ ID NO: 375127 - DNA, 25 bp, Artificial
  probe
  misc_feature (1)..(25): SEQ ID NO: 4167; WAN024FKV; Start 57; Stop 81
cctatttcttgcgatttatgtgatt

SEQ ID NO: 375128 - DNA, 25 bp, Artificial
  probe
  misc_feature (1)..(25): SEQ ID NO: 4167; WAN024FKV; Start 30; Stop 54
gaacggttataaacacgaatcagat

SEQ ID NO: 375129 - DNA, 25 bp, Artificial
  probe
  misc_feature (1)..(25): SEQ ID NO: 4167; WAN024FKV; Start 65; Stop 89
ttgcgatttatgtgattccttattt

SEQ ID NO: 375130 - DNA, 25 bp, Artificial
  probe
  misc_feature (1)..(25): SEQ ID NO: 4167; WAN024FKV; Start 31; Stop 55
aacggttataaacacgaatcagatt

SEQ ID NO: 375131 - DNA, 25 bp, Artificial
  probe
  misc_feature (1)..(25): SEQ ID NO: 4167; WAN024FKV; Start 28; Stop 52
ttgaacggttataaacacgaatcag

SEQ ID NO: 375132 - DNA, 25 bp, Artificial
  probe
  misc_feature (1)..(25): SEQ ID NO: 4167; WAN024FKV; Start 27; Stop 51
tttgaacggttataaacacgaatca

SEQ ID NO: 375133 - DNA, 25 bp, Artificial
  probe
  misc_feature (1)..(25): SEQ ID NO: 4167; WAN024FKV; Start 29; Stop 53
tgaacggttataaacacgaatcaga

SEQ ID NO: 375134 - DNA, 25 bp, Artificial
  probe
  misc_feature (1)..(25): SEQ ID NO: 4167; WAN024FKV; Start 58; Stop 82
ctatttcttgcgatttatgtgattc

SEQ ID NO: 375135 - DNA, 25 bp, Artificial
  probe
  misc_feature (1)..(25): SEQ ID NO: 4167; WAN024FKV; Start 43; Stop 67
cacgaatcagattccctatttcttg

SEQ ID NO: 375136 - DNA, 25 bp, Artificial
  probe
  misc_feature (1)..(25): SEQ ID NO: 4167; WAN024FKV; Start 42; Stop 66
acacgaatcagattccctatttctt

SEQ ID NO: 375137 - DNA, 25 bp, Artificial
  probe
  misc_feature (1)..(25): SEQ ID NO: 4167; WAN024FKV; Start 41; Stop 65
aacacgaatcagattccctatttct

SEQ ID NO: 375138 - DNA, 25 bp, Artificial
  probe
  misc_feature (1)..(25): SEQ ID NO: 4167; WAN024FKV; Start 34; Stop 58
ggttataaacacgaatcagattccc

SEQ ID NO: 375139 - DNA, 25 bp, Artificial
  probe
  misc_feature (1)..(25): SEQ ID NO: 4167; WAN024FKV; Start 33; Stop 57
cggttataaacacgaatcagattcc

SEQ ID NO: 375140 - DNA, 25 bp, Artificial
  probe
  misc_feature (1)..(25): SEQ ID NO: 4167; WAN024FKV; Start 32; Stop 56
acggttataaacacgaatcagattc

SEQ ID NO: 375141 - DNA, 25 bp, Artificial
  probe
  misc_feature (1)..(25): SEQ ID NO: 4167; WAN024FKV; Start 40; Stop 64
aaacacgaatcagattccctatttc

SEQ ID NO: 375142 - DNA, 25 bp, Artificial
  probe
  misc_feature (1)..(25): SEQ ID NO: 4167; WAN024FKV; Start 46; Stop 70
gaatcagattccctatttcttgcga

SEQ ID NO: 375143 - DNA, 25 bp, Artificial
  probe
  misc_feature (1)..(25): SEQ ID NO: 4167; WAN024FKV; Start 35; Stop 59
gttataaacacgaatcagattccct

SEQ ID NO: 375144 - DNA, 25 bp, Artificial
  probe
  misc_feature (1)..(25): SEQ ID NO: 4168; WAN024DO7; Start 75; Stop 99
agaagaattgaaagcctttgtagag

SEQ ID NO: 375145 - DNA, 25 bp, Artificial
  probe
  misc_feature (1)..(25): SEQ ID NO: 4168; WAN024DO7; Start 60; Stop 84
gcgtaagatccctttagaagaattg

SEQ ID NO: 375146 - DNA, 25 bp, Artificial
  probe
  misc_feature (1)..(25): SEQ ID NO: 4168; WAN024DO7; Start 59; Stop 83
agcgtaagatccctttagaagaatt

SEQ ID NO: 375147 - DNA, 25 bp, Artificial
  probe
  misc_feature (1)..(25): SEQ ID NO: 4168; WAN024DO7; Start 58; Stop 82
aagcgtaagatccctttagaagaat

SEQ ID NO: 375148 - DNA, 25 bp, Artificial
  probe
  misc_feature (1)..(25): SEQ ID NO: 4168; WAN024DO7; Start 282; Stop 306
cctatatattgacgaaacgggaatc

SEQ ID NO: 375149 - DNA, 25 bp, Artificial
  probe
  misc_feature (1)..(25): SEQ ID NO: 4168; WAN024DO7; Start 76; Stop 100
gaagaattgaaagcctttgtagagg

SEQ ID NO: 375150 - DNA, 25 bp, Artificial
  probe
  misc_feature (1)..(25): SEQ ID NO: 4168; WAN024DO7; Start 61; Stop 85
cgtaagatccctttagaagaattga

SEQ ID NO: 375151 - DNA, 25 bp, Artificial
  probe
  misc_feature (1)..(25): SEQ ID NO: 4168; WAN024DO7; Start 74; Stop 98
tagaagaattgaaagcctttgtaga

SEQ ID NO: 375152 - DNA, 25 bp, Artificial
  probe
  misc_feature (1)..(25): SEQ ID NO: 4168; WAN024DO7; Start 276; Stop 300
accagtcctatatattgacgaaacg

SEQ ID NO: 375153 - DNA, 25 bp, Artificial
  probe
  misc_feature (1)..(25): SEQ ID NO: 4168; WAN024DO7; Start 278; Stop 302
cagtcctatatattgacgaaacggg

SEQ ID NO: 375154 - DNA, 25 bp, Artificial
  probe
  misc_feature (1)..(25): SEQ ID NO: 4168; WAN024DO7; Start 277; Stop 301
ccagtcctatatattgacgaaacgg

SEQ ID NO: 375155 - DNA, 25 bp, Artificial
  probe
  misc_feature (1)..(25): SEQ ID NO: 4168; WAN024DO7; Start 280; Stop 304
gtcctatatattgacgaaacgggaa

SEQ ID NO: 375156 - DNA, 25 bp, Artificial
  probe
  misc_feature (1)..(25): SEQ ID NO: 4168; WAN024DO7; Start 281; Stop 305
tcctatatattgacgaaacgggaat

SEQ ID NO: 375157 - DNA, 25 bp, Artificial
  probe
  misc_feature (1)..(25): SEQ ID NO: 4168; WAN024DO7; Start 279; Stop 303
agtcctatatattgacgaaacggga

SEQ ID NO: 375158 - DNA, 25 bp, Artificial
  probe
  misc_feature (1)..(25): SEQ ID NO: 4168; WAN024DO7; Start 73; Stop 97
ttagaagaattgaaagcctttgtag

SEQ ID NO: 375159 - DNA, 25 bp, Artificial
  probe
  misc_feature (1)..(25): SEQ ID NO: 4168; WAN024DO7; Start 67; Stop 91
atccctttagaagaattgaaagcct

SEQ ID NO: 375160 - DNA, 25 bp, Artificial
  probe
  misc_feature (1)..(25): SEQ ID NO: 4168; WAN024DO7; Start 69; Stop 93
ccctttagaagaattgaaagccttt

SEQ ID NO: 375161 - DNA, 25 bp, Artificial
  probe
  misc_feature (1)..(25): SEQ ID NO: 4168; WAN024DO7; Start 68; Stop 92
tccctttagaagaattgaaagcctt

SEQ ID NO: 375162 - DNA, 25 bp, Artificial
  probe
  misc_feature (1)..(25): SEQ ID NO: 4168; WAN024DO7; Start 66; Stop 90
gatccctttagaagaattgaaagcc

SEQ ID NO: 375163 - DNA, 25 bp, Artificial
  probe
  misc_feature (1)..(25): SEQ ID NO: 4168; WAN024DO7; Start 57; Stop 81
aaagcgtaagatccctttagaagaa

SEQ ID NO: 375164 - DNA, 25 bp, Artificial
  probe
  misc_feature (1)..(25): SEQ ID NO: 4168; WAN024DO7; Start 70; Stop 94
cctttagaagaattgaaagcctttg

SEQ ID NO: 375165 - DNA, 25 bp, Artificial
  probe
  misc_feature (1)..(25): SEQ ID NO: 4168; WAN024DO7; Start 65; Stop 89
agatccctttagaagaattgaaagc

SEQ ID NO: 375166 - DNA, 25 bp, Artificial
  probe
  misc_feature (1)..(25): SEQ ID NO: 4168; WAN024DO7; Start 72; Stop 96
tttagaagaattgaaagcctttgta

SEQ ID NO: 375167 - DNA, 25 bp, Artificial
  probe
  misc_feature (1)..(25): SEQ ID NO: 4168; WAN024DO7; Start 275; Stop 299
taccagtcctatatattgacgaaac

SEQ ID NO: 375168 - DNA, 25 bp, Artificial
  probe
  misc_feature (1)..(25): SEQ ID NO: 4168; WAN024DO7; Start 71; Stop 95
ctttagaagaattgaaagcctttgt

SEQ ID NO: 375169 - DNA, 25 bp, Artificial
  probe
  misc_feature (1)..(25): SEQ ID NO: 4168; WAN024DO7; Start 274; Stop 298
ttaccagtcctatatattgacgaaa

SEQ ID NO: 375170 - DNA, 25 bp, Artificial
  probe
  misc_feature (1)..(25): SEQ ID NO: 4168; WAN024DO7; Start 273; Stop 297
tttaccagtcctatatattgacgaa

SEQ ID NO: 375171 - DNA, 25 bp, Artificial
  probe
  misc_feature (1)..(25): SEQ ID NO: 4168; WAN024DO7; Start 222; Stop 246
aaagcctgagaaagtttctgagttt

SEQ ID NO: 375172 - DNA, 25 bp, Artificial
  probe
  misc_feature (1)..(25): SEQ ID NO: 4168; WAN024DO7; Start 223; Stop 247
aagcctgagaaagtttctgagtttc

SEQ ID NO: 375173 - DNA, 25 bp, Artificial
  probe
  misc_feature (1)..(25): SEQ ID NO: 4168; WAN024DO7; Start 62; Stop 86
gtaagatccctttagaagaattgaa

SEQ ID NO: 375174 - DNA, 25 bp, Artificial
  probe
  misc_feature (1)..(25): SEQ ID NO: 4168; WAN024DO7; Start 272; Stop 296
atttaccagtcctatatattgacga

SEQ ID NO: 375175 - DNA, 25 bp, Artificial
  probe
  misc_feature (1)..(25): SEQ ID NO: 4168; WAN024DO7; Start 271; Stop 295
gatttaccagtcctatatattgacg

SEQ ID NO: 375176 - DNA, 25 bp, Artificial
  probe
  misc_feature (1)..(25): SEQ ID NO: 4168; WAN024DO7; Start 211; Stop 235
tttagggaacaaaagcctgagaaag

SEQ ID NO: 375177 - DNA, 25 bp, Artificial
  probe
  misc_feature (1)..(25): SEQ ID NO: 4169; WAN024GAN; Start 106; Stop 130
atgtggagcattgtgaatcatctta

SEQ ID NO: 375178 - DNA, 25 bp, Artificial
  probe
  misc_feature (1)..(25): SEQ ID NO: 4169; WAN024GAN; Start 105; Stop 129
tatgtggagcattgtgaatcatctt

SEQ ID NO: 375179 - DNA, 25 bp, Artificial
  probe
  misc_feature (1)..(25): SEQ ID NO: 4169; WAN024GAN; Start 107; Stop 131
tgtggagcattgtgaatcatcttag

SEQ ID NO: 375180 - DNA, 25 bp, Artificial
  probe
  misc_feature (1)..(25): SEQ ID NO: 4169; WAN024GAN; Start 104; Stop 128
gtatgtggagcattgtgaatcatct

SEQ ID NO: 375181 - DNA, 25 bp, Artificial
  probe
  misc_feature (1)..(25): SEQ ID NO: 4169; WAN024GAN; Start 103; Stop 127
ggtatgtggagcattgtgaatcatc

SEQ ID NO: 375182 - DNA, 25 bp, Artificial
  probe
  misc_feature (1)..(25): SEQ ID NO: 4169; WAN024GAN; Start 108; Stop 132
gtggagcattgtgaatcatcttagc

SEQ ID NO: 375183 - DNA, 25 bp, Artificial
  probe
  misc_feature (1)..(25): SEQ ID NO: 4169; WAN024GAN; Start 109; Stop 133
tggagcattgtgaatcatcttagca

SEQ ID NO: 375184 - DNA, 25 bp, Artificial
  probe
  misc_feature (1)..(25): SEQ ID NO: 4169; WAN024GAN; Start 333; Stop 357
ggatagttgtataacgcatataagc

SEQ ID NO: 375185 - DNA, 25 bp, Artificial
  probe
  misc_feature (1)..(25): SEQ ID NO: 4169; WAN024GAN; Start 83; Stop 107
ttagacacaatagacgagctggtat

SEQ ID NO: 375186 - DNA, 25 bp, Artificial
  probe
  misc_feature (1)..(25): SEQ ID NO: 4169; WAN024GAN; Start 102; Stop 126
tggtatgtggagcattgtgaatcat

SEQ ID NO: 375187 - DNA, 25 bp, Artificial
  probe
  misc_feature (1)..(25): SEQ ID NO: 4169; WAN024GAN; Start 303; Stop 327
ccaagttatagacgttatcagacca

SEQ ID NO: 375188 - DNA, 25 bp, Artificial
  probe
  misc_feature (1)..(25): SEQ ID NO: 4169; WAN024GAN; Start 302; Stop 326
accaagttatagacgttatcagacc

SEQ ID NO: 375189 - DNA, 25 bp, Artificial
  probe
  misc_feature (1)..(25): SEQ ID NO: 4169; WAN024GAN; Start 337; Stop 361
agttgtataacgcatataagctccg

SEQ ID NO: 375190 - DNA, 25 bp, Artificial
  probe
  misc_feature (1)..(25): SEQ ID NO: 4169; WAN024GAN; Start 75; Stop 99
cgatggatttagacacaatagacga

SEQ ID NO: 375191 - DNA, 25 bp, Artificial
  probe
  misc_feature (1)..(25): SEQ ID NO: 4169; WAN024GAN; Start 69; Stop 93
ctttagcgatggatttagacacaat

SEQ ID NO: 375192 - DNA, 25 bp, Artificial
  probe
  misc_feature (1)..(25): SEQ ID NO: 4169; WAN024GAN; Start 72; Stop 96
tagcgatggatttagacacaataga

SEQ ID NO: 375193 - DNA, 25 bp, Artificial
  probe
  misc_feature (1)..(25): SEQ ID NO: 4169; WAN024GAN; Start 77; Stop 101
atggatttagacacaatagacgagc

SEQ ID NO: 375194 - DNA, 25 bp, Artificial
  probe
  misc_feature (1)..(25): SEQ ID NO: 4169; WAN024GAN; Start 73; Stop 97
agcgatggatttagacacaatagac

SEQ ID NO: 375195 - DNA, 25 bp, Artificial
  probe
  misc_feature (1)..(25): SEQ ID NO: 4169; WAN024GAN; Start 306; Stop 330
agttatagacgttatcagaccagtt

SEQ ID NO: 375196 - DNA, 25 bp, Artificial
  probe
  misc_feature (1)..(25): SEQ ID NO: 4169; WAN024GAN; Start 305; Stop 329
aagttatagacgttatcagaccagt

SEQ ID NO: 375197 - DNA, 25 bp, Artificial
  probe
  misc_feature (1)..(25): SEQ ID NO: 4169; WAN024GAN; Start 76; Stop 100
gatggatttagacacaatagacgag

SEQ ID NO: 375198 - DNA, 25 bp, Artificial
  probe
  misc_feature (1)..(25): SEQ ID NO: 4169; WAN024GAN; Start 84; Stop 108
tagacacaatagacgagctggtatg

SEQ ID NO: 375199 - DNA, 25 bp, Artificial
  probe
  misc_feature (1)..(25): SEQ ID NO: 4169; WAN024GAN; Start 304; Stop 328
caagttatagacgttatcagaccag

SEQ ID NO: 375200 - DNA, 25 bp, Artificial
  probe
  misc_feature (1)..(25): SEQ ID NO: 4169; WAN024GAN; Start 68; Stop 92
cctttagcgatggatttagacacaa

SEQ ID NO: 375201 - DNA, 25 bp, Artificial
  probe
  misc_feature (1)..(25): SEQ ID NO: 4169; WAN024GAN; Start 71; Stop 95
ttagcgatggatttagacacaatag

SEQ ID NO: 375202 - DNA, 25 bp, Artificial
  probe
  misc_feature (1)..(25): SEQ ID NO: 4169; WAN024GAN; Start 336; Stop 360
tagttgtataacgcatataagctcc

SEQ ID NO: 375203 - DNA, 25 bp, Artificial
  probe
  misc_feature (1)..(25): SEQ ID NO: 4169; WAN024GAN; Start 291; Stop 315
cacgctttgttaccaagttatagac

SEQ ID NO: 375204 - DNA, 25 bp, Artificial
  probe
  misc_feature (1)..(25): SEQ ID NO: 4169; WAN024GAN; Start 111; Stop 135
gagcattgtgaatcatcttagcacc

SEQ ID NO: 375205 - DNA, 25 bp, Artificial
  probe
  misc_feature (1)..(25): SEQ ID NO: 4169; WAN024GAN; Start 110; Stop 134
ggagcattgtgaatcatcttagcac

SEQ ID NO: 375206 - DNA, 25 bp, Artificial
  probe
  misc_feature (1)..(25): SEQ ID NO: 4169; WAN024GAN; Start 101; Stop 125
ctggtatgtggagcattgtgaatca

SEQ ID NO: 375207 - DNA, 25 bp, Artificial
  probe
  misc_feature (1)..(25): SEQ ID NO: 4169; WAN024GAN; Start 19; Stop 43
agagttcttgttaaaggtgacttgt

SEQ ID NO: 375208 - DNA, 25 bp, Artificial
  probe
  misc_feature (1)..(25): SEQ ID NO: 4169; WAN024GAN; Start 70; Stop 94
tttagcgatggatttagacacaata

SEQ ID NO: 375209 - DNA, 25 bp, Artificial
  probe
  misc_feature (1)..(25): SEQ ID NO: 4169; WAN024GAN; Start 50; Stop 74
tagtcaacctttcctccacctttag

SEQ ID NO: 375210 - DNA, 25 bp, Artificial
  probe
  misc_feature (1)..(25): SEQ ID NO: 4170; WAN024G5V; Start 583; Stop 607
caagagattagtcgccataagagat

SEQ ID NO: 375211 - DNA, 25 bp, Artificial
  probe
  misc_feature (1)..(25): SEQ ID NO: 4170; WAN024G5V; Start 546; Stop 570
gattggtagagaagttatggagagg

SEQ ID NO: 375212 - DNA, 25 bp, Artificial
  probe
  misc_feature (1)..(25): SEQ ID NO: 4170; WAN024G5V; Start 545; Stop 569
ggattggtagagaagttatggagag

SEQ ID NO: 375213 - DNA, 25 bp, Artificial
  probe
  misc_feature (1)..(25): SEQ ID NO: 4170; WAN024G5V; Start 579; Stop 603
ttaccaagagattagtcgccataag

SEQ ID NO: 375214 - DNA, 25 bp, Artificial
  probe
  misc_feature (1)..(25): SEQ ID NO: 4170; WAN024G5V; Start 584; Stop 608
aagagattagtcgccataagagatt

SEQ ID NO: 375215 - DNA, 25 bp, Artificial
  probe
  misc_feature (1)..(25): SEQ ID NO: 4170; WAN024G5V; Start 580; Stop 604
taccaagagattagtcgccataaga

SEQ ID NO: 375216 - DNA, 25 bp, Artificial
  probe
  misc_feature (1)..(25): SEQ ID NO: 4170; WAN024G5V; Start 839; Stop 863
ttccagagcaagtagcctattatca

SEQ ID NO: 375217 - DNA, 25 bp, Artificial
  probe
  misc_feature (1)..(25): SEQ ID NO: 4170; WAN024G5V; Start 838; Stop 862
cttccagagcaagtagcctattatc

SEQ ID NO: 375218 - DNA, 25 bp, Artificial
  probe
  misc_feature (1)..(25): SEQ ID NO: 4170; WAN024G5V; Start 587; Stop 611
agattagtcgccataagagattagt

SEQ ID NO: 375219 - DNA, 25 bp, Artificial
  probe
  misc_feature (1)..(25): SEQ ID NO: 4170; WAN024G5V; Start 585; Stop 609
agagattagtcgccataagagatta

SEQ ID NO: 375220 - DNA, 25 bp, Artificial
  probe
  misc_feature (1)..(25): SEQ ID NO: 4170; WAN024G5V; Start 837; Stop 861
tcttccagagcaagtagcctattat

SEQ ID NO: 375221 - DNA, 25 bp, Artificial
  probe
  misc_feature (1)..(25): SEQ ID NO: 4170; WAN024G5V; Start 840; Stop 864
tccagagcaagtagcctattatcag

SEQ ID NO: 375222 - DNA, 25 bp, Artificial
  probe
  misc_feature (1)..(25): SEQ ID NO: 4170; WAN024G5V; Start 544; Stop 568
cggattggtagagaagttatggaga

SEQ ID NO: 375223 - DNA, 25 bp, Artificial
  probe
  misc_feature (1)..(25): SEQ ID NO: 4170; WAN024G5V; Start 543; Stop 567
tcggattggtagagaagttatggag

SEQ ID NO: 375224 - DNA, 25 bp, Artificial
  probe
  misc_feature (1)..(25): SEQ ID NO: 4170; WAN024G5V; Start 586; Stop 610
gagattagtcgccataagagattag

SEQ ID NO: 375225 - DNA, 25 bp, Artificial
  probe
  misc_feature (1)..(25): SEQ ID NO: 4170; WAN024G5V; Start 582; Stop 606
ccaagagattagtcgccataagaga

SEQ ID NO: 375226 - DNA, 25 bp, Artificial
  probe
  misc_feature (1)..(25): SEQ ID NO: 4170; WAN024G5V; Start 540; Stop 564
cactcggattggtagagaagttatg

SEQ ID NO: 375227 - DNA, 25 bp, Artificial
  probe
  misc_feature (1)..(25): SEQ ID NO: 4170; WAN024G5V; Start 539; Stop 563
tcactcggattggtagagaagttat

SEQ ID NO: 375228 - DNA, 25 bp, Artificial
  probe
  misc_feature (1)..(25): SEQ ID NO: 4170; WAN024G5V; Start 581; Stop 605
accaagagattagtcgccataagag

SEQ ID NO: 375229 - DNA, 25 bp, Artificial
  probe
  misc_feature (1)..(25): SEQ ID NO: 4170; WAN024G5V; Start 836; Stop 860
gtcttccagagcaagtagcctatta

SEQ ID NO: 375230 - DNA, 25 bp, Artificial
  probe
  misc_feature (1)..(25): SEQ ID NO: 4170; WAN024G5V; Start 526; Stop 550
gatgtagactatgtcactcggattg

SEQ ID NO: 375231 - DNA, 25 bp, Artificial
  probe
  misc_feature (1)..(25): SEQ ID NO: 4170; WAN024G5V; Start 477; Stop 501
atggaccatgtatgagttgattctt

SEQ ID NO: 375232 - DNA, 25 bp, Artificial
  probe
  misc_feature (1)..(25): SEQ ID NO: 4170; WAN024G5V; Start 476; Stop 500
aatggaccatgtatgagttgattct

SEQ ID NO: 375233 - DNA, 25 bp, Artificial
  probe
  misc_feature (1)..(25): SEQ ID NO: 4170; WAN024G5V; Start 474; Stop 498
agaatggaccatgtatgagttgatt

SEQ ID NO: 375234 - DNA, 25 bp, Artificial
  probe
  misc_feature (1)..(25): SEQ ID NO: 4170; WAN024G5V; Start 473; Stop 497
aagaatggaccatgtatgagttgat

SEQ ID NO: 375235 - DNA, 25 bp, Artificial
  probe
  misc_feature (1)..(25): SEQ ID NO: 4170; WAN024G5V; Start 542; Stop 566
ctcggattggtagagaagttatgga

SEQ ID NO: 375236 - DNA, 25 bp, Artificial
  probe
  misc_feature (1)..(25): SEQ ID NO: 4170; WAN024G5V; Start 535; Stop 559
tatgtcactcggattggtagagaag

SEQ ID NO: 375237 - DNA, 25 bp, Artificial
  probe
  misc_feature (1)..(25): SEQ ID NO: 4170; WAN024G5V; Start 534; Stop 558
ctatgtcactcggattggtagagaa

SEQ ID NO: 375238 - DNA, 25 bp, Artificial
  probe
  misc_feature (1)..(25): SEQ ID NO: 4170; WAN024G5V; Start 530; Stop 554
tagactatgtcactcggattggtag

SEQ ID NO: 375239 - DNA, 25 bp, Artificial
  probe
  misc_feature (1)..(25): SEQ ID NO: 4170; WAN024G5V; Start 847; Stop 871
caagtagcctattatcaggaacact

SEQ ID NO: 375240 - DNA, 25 bp, Artificial
  probe
  misc_feature (1)..(25): SEQ ID NO: 4170; WAN024G5V; Start 472; Stop 496
gaagaatggaccatgtatgagttga

SEQ ID NO: 375241 - DNA, 25 bp, Artificial
  probe
  misc_feature (1)..(25): SEQ ID NO: 4170; WAN024G5V; Start 471; Stop 495
agaagaatggaccatgtatgagttg

SEQ ID NO: 375242 - DNA, 25 bp, Artificial
  probe
  misc_feature (1)..(25): SEQ ID NO: 4170; WAN024G5V; Start 470; Stop 494
cagaagaatggaccatgtatgagtt

SEQ ID NO: 375243 - DNA, 25 bp, Artificial
  probe
  misc_feature (1)..(25): SEQ ID NO: 4171; WAN024G5H; Start 207; Stop 231
aataatcgcaccttcaccaataatg

SEQ ID NO: 375244 - DNA, 25 bp, Artificial
  probe
  misc_feature (1)..(25): SEQ ID NO: 4171; WAN024G5H; Start 117; Stop 141
ttatcaatcttcatctgttgctacc

SEQ ID NO: 375245 - DNA, 25 bp, Artificial
  probe
  misc_feature (1)..(25): SEQ ID NO: 4171; WAN024G5H; Start 165; Stop 189
aacttgtacttcatctgttccatca

SEQ ID NO: 375246 - DNA, 25 bp, Artificial
  probe
  misc_feature (1)..(25): SEQ ID NO: 4171; WAN024G5H; Start 164; Stop 188
caacttgtacttcatctgttccatc

SEQ ID NO: 375247 - DNA, 25 bp, Artificial
  probe
  misc_feature (1)..(25): SEQ ID NO: 4171; WAN024G5H; Start 166; Stop 190
acttgtacttcatctgttccatcaa

SEQ ID NO: 375248 - DNA, 25 bp, Artificial
  probe
  misc_feature (1)..(25): SEQ ID NO: 4171; WAN024G5H; Start 167; Stop 191
cttgtacttcatctgttccatcaat

SEQ ID NO: 375249 - DNA, 25 bp, Artificial
  probe
  misc_feature (1)..(25): SEQ ID NO: 4171; WAN024G5H; Start 168; Stop 192
ttgtacttcatctgttccatcaatt

SEQ ID NO: 375250 - DNA, 25 bp, Artificial
  probe
  misc_feature (1)..(25): SEQ ID NO: 4171; WAN024G5H; Start 163; Stop 187
acaacttgtacttcatctgttccat

SEQ ID NO: 375251 - DNA, 25 bp, Artificial
  probe
  misc_feature (1)..(25): SEQ ID NO: 4171; WAN024G5H; Start 6; Stop 30
aagtcaatcaaacgatatttcccac

SEQ ID NO: 375252 - DNA, 25 bp, Artificial
  probe
  misc_feature (1)..(25): SEQ ID NO: 4171; WAN024G5H; Start 1; Stop 25
gtgggaagtcaatcaaacgatattt

SEQ ID NO: 375253 - DNA, 25 bp, Artificial
  probe
  misc_feature (1)..(25): SEQ ID NO: 4171; WAN024G5H; Start 206; Stop 230
aaataatcgcaccttcaccaataat

SEQ ID NO: 375254 - DNA, 25 bp, Artificial
  probe
  misc_feature (1)..(25): SEQ ID NO: 4171; WAN024G5H; Start 10; Stop 34
caatcaaacgatatttcccaccaaa

SEQ ID NO: 375255 - DNA, 25 bp, Artificial
  probe
  misc_feature (1)..(25): SEQ ID NO: 4171; WAN024G5H; Start 205; Stop 229
gaaataatcgcaccttcaccaataa

SEQ ID NO: 375256 - DNA, 25 bp, Artificial
  probe
  misc_feature (1)..(25): SEQ ID NO: 4171; WAN024G5H; Start 208; Stop 232
ataatcgcaccttcaccaataatgg

SEQ ID NO: 375257 - DNA, 25 bp, Artificial
  probe
  misc_feature (1)..(25): SEQ ID NO: 4171; WAN024G5H; Start 171; Stop 195
tacttcatctgttccatcaatttcg

SEQ ID NO: 375258 - DNA, 25 bp, Artificial
  probe
  misc_feature (1)..(25): SEQ ID NO: 4171; WAN024G5H; Start 5; Stop 29
gaagtcaatcaaacgatatttccca

SEQ ID NO: 375259 - DNA, 25 bp, Artificial
  probe
  misc_feature (1)..(25): SEQ ID NO: 4171; WAN024G5H; Start 2; Stop 26
tgggaagtcaatcaaacgatatttc

SEQ ID NO: 375260 - DNA, 25 bp, Artificial
  probe
  misc_feature (1)..(25): SEQ ID NO: 4171; WAN024G5H; Start 204; Stop 228
agaaataatcgcaccttcaccaata

SEQ ID NO: 375261 - DNA, 25 bp, Artificial
  probe
  misc_feature (1)..(25): SEQ ID NO: 4171; WAN024G5H; Start 9; Stop 33
tcaatcaaacgatatttcccaccaa

SEQ ID NO: 375262 - DNA, 25 bp, Artificial
  probe
  misc_feature (1)..(25): SEQ ID NO: 4171; WAN024G5H; Start 118; Stop 142
tatcaatcttcatctgttgctaccc

SEQ ID NO: 375263 - DNA, 25 bp, Artificial
  probe
  misc_feature (1)..(25): SEQ ID NO: 4171; WAN024G5H; Start 7; Stop 31
agtcaatcaaacgatatttcccacc

SEQ ID NO: 375264 - DNA, 25 bp, Artificial
  probe
  misc_feature (1)..(25): SEQ ID NO: 4171; WAN024G5H; Start 8; Stop 32
gtcaatcaaacgatatttcccacca

SEQ ID NO: 375265 - DNA, 25 bp, Artificial
  probe
  misc_feature (1)..(25): SEQ ID NO: 4171; WAN024G5H; Start 12; Stop 36
atcaaacgatatttcccaccaaatg

SEQ ID NO: 375266 - DNA, 25 bp, Artificial
  probe
  misc_feature (1)..(25): SEQ ID NO: 4171; WAN024G5H; Start 11; Stop 35
aatcaaacgatatttcccaccaaat

SEQ ID NO: 375267 - DNA, 25 bp, Artificial
  probe
  misc_feature (1)..(25): SEQ ID NO: 4171; WAN024G5H; Start 143; Stop 167
ccactacttcattatatcctacaac

SEQ ID NO: 375268 - DNA, 25 bp, Artificial
  probe
  misc_feature (1)..(25): SEQ ID NO: 4171; WAN024G5H; Start 169; Stop 193
tgtacttcatctgttccatcaattt

SEQ ID NO: 375269 - DNA, 25 bp, Artificial
  probe
  misc_feature (1)..(25): SEQ ID NO: 4171; WAN024G5H; Start 162; Stop 186
tacaacttgtacttcatctgttcca

SEQ ID NO: 375270 - DNA, 25 bp, Artificial
  probe
  misc_feature (1)..(25): SEQ ID NO: 4171; WAN024G5H; Start 203; Stop 227
cagaaataatcgcaccttcaccaat

SEQ ID NO: 375271 - DNA, 25 bp, Artificial
  probe
  misc_feature (1)..(25): SEQ ID NO: 4171; WAN024G5H; Start 159; Stop 183
tcctacaacttgtacttcatctgtt

SEQ ID NO: 375272 - DNA, 25 bp, Artificial
  probe
  misc_feature (1)..(25): SEQ ID NO: 4171; WAN024G5H; Start 161; Stop 185
ctacaacttgtacttcatctgttcc

SEQ ID NO: 375273 - DNA, 25 bp, Artificial
  probe
  misc_feature (1)..(25): SEQ ID NO: 4171; WAN024G5H; Start 160; Stop 184
cctacaacttgtacttcatctgttc

SEQ ID NO: 375274 - DNA, 25 bp, Artificial
  probe
  misc_feature (1)..(25): SEQ ID NO: 4171; WAN024G5H; Start 158; Stop 182
atcctacaacttgtacttcatctgt

SEQ ID NO: 375275 - DNA, 25 bp, Artificial
  probe
  misc_feature (1)..(25): SEQ ID NO: 4171; WAN024G5H; Start 170; Stop 194
gtacttcatctgttccatcaatttc

SEQ ID NO: 375276 - DNA, 25 bp, Artificial
  probe
  misc_feature (1)..(25): SEQ ID NO: 4172; WAN024C9K; Start 535; Stop 559
ggtgaagttcgtatgattcttggaa

SEQ ID NO: 375277 - DNA, 25 bp, Artificial
  probe
  misc_feature (1)..(25): SEQ ID NO: 4172; WAN024C9K; Start 532; Stop 556
tcaggtgaagttcgtatgattcttg

SEQ ID NO: 375278 - DNA, 25 bp, Artificial
  probe
  misc_feature (1)..(25): SEQ ID NO: 4172; WAN024C9K; Start 534; Stop 558
aggtgaagttcgtatgattcttgga

SEQ ID NO: 375279 - DNA, 25 bp, Artificial
  probe
  misc_feature (1)..(25): SEQ ID NO: 4172; WAN024C9K; Start 533; Stop 557
caggtgaagttcgtatgattcttgg

SEQ ID NO: 375280 - DNA, 25 bp, Artificial
  probe
  misc_feature (1)..(25): SEQ ID NO: 4172; WAN024C9K; Start 514; Stop 538
gttcttgttcgtcttcaatcaggtg

SEQ ID NO: 375281 - DNA, 25 bp, Artificial
  probe
  misc_feature (1)..(25): SEQ ID NO: 4172; WAN024C9K; Start 43; Stop 67
aatatgacttctttggatttcgctg

SEQ ID NO: 375282 - DNA, 25 bp, Artificial
  probe
  misc_feature (1)..(25): SEQ ID NO: 4172; WAN024C9K; Start 515; Stop 539
ttcttgttcgtcttcaatcaggtga

SEQ ID NO: 375283 - DNA, 25 bp, Artificial
  probe
  misc_feature (1)..(25): SEQ ID NO: 4172; WAN024C9K; Start 38; Stop 62
gccgtaatatgacttctttggattt

SEQ ID NO: 375284 - DNA, 25 bp, Artificial
  probe
  misc_feature (1)..(25): SEQ ID NO: 4172; WAN024C9K; Start 44; Stop 68
atatgacttctttggatttcgctga

SEQ ID NO: 375285 - DNA, 25 bp, Artificial
  probe
  misc_feature (1)..(25): SEQ ID NO: 4172; WAN024C9K; Start 792; Stop 816
gaaatctgacaaacttatcgttcgt

SEQ ID NO: 375286 - DNA, 25 bp, Artificial
  probe
  misc_feature (1)..(25): SEQ ID NO: 4172; WAN024C9K; Start 780; Stop 804
taacaagaaagcgaaatctgacaaa

SEQ ID NO: 375287 - DNA, 25 bp, Artificial
  probe
  misc_feature (1)..(25): SEQ ID NO: 4172; WAN024C9K; Start 779; Stop 803
gtaacaagaaagcgaaatctgacaa

SEQ ID NO: 375288 - DNA, 25 bp, Artificial
  probe
  misc_feature (1)..(25): SEQ ID NO: 4172; WAN024C9K; Start 45; Stop 69
tatgacttctttggatttcgctgaa

SEQ ID NO: 375289 - DNA, 25 bp, Artificial
  probe
  misc_feature (1)..(25): SEQ ID NO: 4172; WAN024C9K; Start 784; Stop 808
aagaaagcgaaatctgacaaactta

SEQ ID NO: 375290 - DNA, 25 bp, Artificial
  probe
  misc_feature (1)..(25): SEQ ID NO: 4172; WAN024C9K; Start 786; Stop 810
gaaagcgaaatctgacaaacttatc

SEQ ID NO: 375291 - DNA, 25 bp, Artificial
  probe
  misc_feature (1)..(25): SEQ ID NO: 4172; WAN024C9K; Start 785; Stop 809
agaaagcgaaatctgacaaacttat

SEQ ID NO: 375292 - DNA, 25 bp, Artificial
  probe
  misc_feature (1)..(25): SEQ ID NO: 4172; WAN024C9K; Start 783; Stop 807
caagaaagcgaaatctgacaaactt

SEQ ID NO: 375293 - DNA, 25 bp, Artificial
  probe
  misc_feature (1)..(25): SEQ ID NO: 4172; WAN024C9K; Start 42; Stop 66
taatatgacttctttggatttcgct

SEQ ID NO: 375294 - DNA, 25 bp, Artificial
  probe
  misc_feature (1)..(25): SEQ ID NO: 4172; WAN024C9K; Start 41; Stop 65
gtaatatgacttctttggatttcgc

SEQ ID NO: 375295 - DNA, 25 bp, Artificial
  probe
  misc_feature (1)..(25): SEQ ID NO: 4172; WAN024C9K; Start 781; Stop 805
aacaagaaagcgaaatctgacaaac

SEQ ID NO: 375296 - DNA, 25 bp, Artificial
  probe
  misc_feature (1)..(25): SEQ ID NO: 4172; WAN024C9K; Start 486; Stop 510
tcaagtattgggttctgaaggtaaa

SEQ ID NO: 375297 - DNA, 25 bp, Artificial
  probe
  misc_feature (1)..(25): SEQ ID NO: 4172; WAN024C9K; Start 485; Stop 509
ctcaagtattgggttctgaaggtaa

SEQ ID NO: 375298 - DNA, 25 bp, Artificial
  probe
  misc_feature (1)..(25): SEQ ID NO: 4172; WAN024C9K; Start 40; Stop 64
cgtaatatgacttctttggatttcg

SEQ ID NO: 375299 - DNA, 25 bp, Artificial
  probe
  misc_feature (1)..(25): SEQ ID NO: 4172; WAN024C9K; Start 37; Stop 61
cgccgtaatatgacttctttggatt

SEQ ID NO: 375300 - DNA, 25 bp, Artificial
  probe
  misc_feature (1)..(25): SEQ ID NO: 4172; WAN024C9K; Start 487; Stop 511
caagtattgggttctgaaggtaaat

SEQ ID NO: 375301 - DNA, 25 bp, Artificial
  probe
  misc_feature (1)..(25): SEQ ID NO: 4172; WAN024C9K; Start 129; Stop 153
taacaacaacggtcgtatcacagtt

SEQ ID NO: 375302 - DNA, 25 bp, Artificial
  probe
  misc_feature (1)..(25): SEQ ID NO: 4172; WAN024C9K; Start 531; Stop 555
atcaggtgaagttcgtatgattctt

SEQ ID NO: 375303 - DNA, 25 bp, Artificial
  probe
  misc_feature (1)..(25): SEQ ID NO: 4172; WAN024C9K; Start 39; Stop 63
ccgtaatatgacttctttggatttc

SEQ ID NO: 375304 - DNA, 25 bp, Artificial
  probe
  misc_feature (1)..(25): SEQ ID NO: 4172; WAN024C9K; Start 782; Stop 806
acaagaaagcgaaatctgacaaact

SEQ ID NO: 375305 - DNA, 25 bp, Artificial
  probe
  misc_feature (1)..(25): SEQ ID NO: 4172; WAN024C9K; Start 599; Stop 623
atggacttgtaaaccttggtaaagc

SEQ ID NO: 375306 - DNA, 25 bp, Artificial
  probe
  misc_feature (1)..(25): SEQ ID NO: 4172; WAN024C9K; Start 598; Stop 622
catggacttgtaaaccttggtaaag

SEQ ID NO: 375307 - DNA, 25 bp, Artificial
  probe
  misc_feature (1)..(25): SEQ ID NO: 4172; WAN024C9K; Start 793; Stop 817
aaatctgacaaacttatcgttcgtc

SEQ ID NO: 375308 - DNA, 25 bp, Artificial
  probe
  misc_feature (1)..(25): SEQ ID NO: 4172; WAN024C9K; Start 399; Stop 423
taacatcccagttggtactttgatt

SEQ ID NO: 375309 - DNA, 25 bp, Artificial
  probe
  misc_feature (1)..(25): SEQ ID NO: 4173; WAN024FI5; Start 92; Stop 116
ccaccatattgcgaatctgtttata

SEQ ID NO: 375310 - DNA, 25 bp, Artificial
  probe
  misc_feature (1)..(25): SEQ ID NO: 4173; WAN024FI5; Start 34; Stop 58
aagatgagatcaatctgctctactg

SEQ ID NO: 375311 - DNA, 25 bp, Artificial
  probe
  misc_feature (1)..(25): SEQ ID NO: 4173; WAN024FI5; Start 33; Stop 57
caagatgagatcaatctgctctact

SEQ ID NO: 375312 - DNA, 25 bp, Artificial
  probe
  misc_feature (1)..(25): SEQ ID NO: 4173; WAN024FI5; Start 91; Stop 115
cccaccatattgcgaatctgtttat

SEQ ID NO: 375313 - DNA, 25 bp, Artificial
  probe
  misc_feature (1)..(25): SEQ ID NO: 4173; WAN024FI5; Start 152; Stop 176
attgtcctgtctcatcgactattaa

SEQ ID NO: 375314 - DNA, 25 bp, Artificial
  probe
  misc_feature (1)..(25): SEQ ID NO: 4173; WAN024FI5; Start 151; Stop 175
aattgtcctgtctcatcgactatta

SEQ ID NO: 375315 - DNA, 25 bp, Artificial
  probe
  misc_feature (1)..(25): SEQ ID NO: 4173; WAN024FI5; Start 93; Stop 117
caccatattgcgaatctgtttatac

SEQ ID NO: 375316 - DNA, 25 bp, Artificial
  probe
  misc_feature (1)..(25): SEQ ID NO: 4173; WAN024FI5; Start 32; Stop 56
ccaagatgagatcaatctgctctac

SEQ ID NO: 375317 - DNA, 25 bp, Artificial
  probe
  misc_feature (1)..(25): SEQ ID NO: 4173; WAN024FI5; Start 31; Stop 55
tccaagatgagatcaatctgctcta

SEQ ID NO: 375318 - DNA, 25 bp, Artificial
  probe
  misc_feature (1)..(25): SEQ ID NO: 4173; WAN024FI5; Start 193; Stop 217
gtgcgaaccttatcctctacactag

SEQ ID NO: 375319 - DNA, 25 bp, Artificial
  probe
  misc_feature (1)..(25): SEQ ID NO: 4173; WAN024FI5; Start 35; Stop 59
agatgagatcaatctgctctactgg

SEQ ID NO: 375320 - DNA, 25 bp, Artificial
  probe
  misc_feature (1)..(25): SEQ ID NO: 4173; WAN024FI5; Start 36; Stop 60
gatgagatcaatctgctctactggc

SEQ ID NO: 375321 - DNA, 25 bp, Artificial
  probe
  misc_feature (1)..(25): SEQ ID NO: 4173; WAN024FI5; Start 94; Stop 118
accatattgcgaatctgtttataca

SEQ ID NO: 375322 - DNA, 25 bp, Artificial
  probe
  misc_feature (1)..(25): SEQ ID NO: 4173; WAN024FI5; Start 30; Stop 54
ctccaagatgagatcaatctgctct

SEQ ID NO: 375323 - DNA, 25 bp, Artificial
  probe
  misc_feature (1)..(25): SEQ ID NO: 4173; WAN024FI5; Start 166; Stop 190
tcgactattaaactagcttctgtga

SEQ ID NO: 375324 - DNA, 25 bp, Artificial
  probe
  misc_feature (1)..(25): SEQ ID NO: 4173; WAN024FI5; Start 196; Stop 220
cgaaccttatcctctacactagtcc

SEQ ID NO: 375325 - DNA, 25 bp, Artificial
  probe
  misc_feature (1)..(25): SEQ ID NO: 4173; WAN024FI5; Start 172; Stop 196
attaaactagcttctgtgatggtgc

SEQ ID NO: 375326 - DNA, 25 bp, Artificial
  probe
  misc_feature (1)..(25): SEQ ID NO: 4173; WAN024FI5; Start 171; Stop 195
tattaaactagcttctgtgatggtg

SEQ ID NO: 375327 - DNA, 25 bp, Artificial
  probe
  misc_feature (1)..(25): SEQ ID NO: 4173; WAN024FI5; Start 167; Stop 191
cgactattaaactagcttctgtgat

SEQ ID NO: 375328 - DNA, 25 bp, Artificial
  probe
  misc_feature (1)..(25): SEQ ID NO: 4173; WAN024FI5; Start 170; Stop 194
ctattaaactagcttctgtgatggt

SEQ ID NO: 375329 - DNA, 25 bp, Artificial
  probe
  misc_feature (1)..(25): SEQ ID NO: 4173; WAN024FI5; Start 169; Stop 193
actattaaactagcttctgtgatgg

SEQ ID NO: 375330 - DNA, 25 bp, Artificial
  probe
  misc_feature (1)..(25): SEQ ID NO: 4173; WAN024FI5; Start 95; Stop 119
ccatattgcgaatctgtttatacaa

SEQ ID NO: 375331 - DNA, 25 bp, Artificial
  probe
  misc_feature (1)..(25): SEQ ID NO: 4173; WAN024FI5; Start 165; Stop 189
atcgactattaaactagcttctgtg

SEQ ID NO: 375332 - DNA, 25 bp, Artificial
  probe
  misc_feature (1)..(25): SEQ ID NO: 4173; WAN024FI5; Start 164; Stop 188
catcgactattaaactagcttctgt

SEQ ID NO: 375333 - DNA, 25 bp, Artificial
  probe
  misc_feature (1)..(25): SEQ ID NO: 4173; WAN024FI5; Start 195; Stop 219
gcgaaccttatcctctacactagtc

SEQ ID NO: 375334 - DNA, 25 bp, Artificial
  probe
  misc_feature (1)..(25): SEQ ID NO: 4173; WAN024FI5; Start 26; Stop 50
tcttctccaagatgagatcaatctg

SEQ ID NO: 375335 - DNA, 25 bp, Artificial
  probe
  misc_feature (1)..(25): SEQ ID NO: 4173; WAN024FI5; Start 23; Stop 47
ccttcttctccaagatgagatcaat

SEQ ID NO: 375336 - DNA, 25 bp, Artificial
  probe
  misc_feature (1)..(25): SEQ ID NO: 4173; WAN024FI5; Start 163; Stop 187
tcatcgactattaaactagcttctg

SEQ ID NO: 375337 - DNA, 25 bp, Artificial
  probe
  misc_feature (1)..(25): SEQ ID NO: 4173; WAN024FI5; Start 99; Stop 123
attgcgaatctgtttatacaagaaa

SEQ ID NO: 375338 - DNA, 25 bp, Artificial
  probe
  misc_feature (1)..(25): SEQ ID NO: 4173; WAN024FI5; Start 155; Stop 179
gtcctgtctcatcgactattaaact

SEQ ID NO: 375339 - DNA, 25 bp, Artificial
  probe
  misc_feature (1)..(25): SEQ ID NO: 4173; WAN024FI5; Start 154; Stop 178
tgtcctgtctcatcgactattaaac

SEQ ID NO: 375340 - DNA, 25 bp, Artificial
  probe
  misc_feature (1)..(25): SEQ ID NO: 4173; WAN024FI5; Start 150; Stop 174
aaattgtcctgtctcatcgactatt

SEQ ID NO: 375341 - DNA, 25 bp, Artificial
  probe
  misc_feature (1)..(25): SEQ ID NO: 4173; WAN024FI5; Start 25; Stop 49
ttcttctccaagatgagatcaatct

SEQ ID NO: 375342 - DNA, 25 bp, Artificial
  probe
  misc_feature (1)..(25): SEQ ID NO: 4174; WAN024CUV; Start 67; Stop 91
caagaattatctcgactgacggatg

SEQ ID NO: 375343 - DNA, 25 bp, Artificial
  probe
  misc_feature (1)..(25): SEQ ID NO: 4174; WAN024CUV; Start 405; Stop 429
acgacatattgaggtatctgaaaga

SEQ ID NO: 375344 - DNA, 25 bp, Artificial
  probe
  misc_feature (1)..(25): SEQ ID NO: 4174; WAN024CUV; Start 404; Stop 428
aacgacatattgaggtatctgaaag

SEQ ID NO: 375345 - DNA, 25 bp, Artificial
  probe
  misc_feature (1)..(25): SEQ ID NO: 4174; WAN024CUV; Start 61; Stop 85
attggtcaagaattatctcgactga

SEQ ID NO: 375346 - DNA, 25 bp, Artificial
  probe
  misc_feature (1)..(25): SEQ ID NO: 4174; WAN024CUV; Start 60; Stop 84
cattggtcaagaattatctcgactg

SEQ ID NO: 375347 - DNA, 25 bp, Artificial
  probe
  misc_feature (1)..(25): SEQ ID NO: 4174; WAN024CUV; Start 59; Stop 83
ccattggtcaagaattatctcgact

SEQ ID NO: 375348 - DNA, 25 bp, Artificial
  probe
  misc_feature (1)..(25): SEQ ID NO: 4174; WAN024CUV; Start 66; Stop 90
tcaagaattatctcgactgacggat

SEQ ID NO: 375349 - DNA, 25 bp, Artificial
  probe
  misc_feature (1)..(25): SEQ ID NO: 4174; WAN024CUV; Start 406; Stop 430
cgacatattgaggtatctgaaagag

SEQ ID NO: 375350 - DNA, 25 bp, Artificial
  probe
  misc_feature (1)..(25): SEQ ID NO: 4174; WAN024CUV; Start 403; Stop 427
aaacgacatattgaggtatctgaaa

SEQ ID NO: 375351 - DNA, 25 bp, Artificial
  probe
  misc_feature (1)..(25): SEQ ID NO: 4174; WAN024CUV; Start 70; Stop 94
gaattatctcgactgacggatgcta

SEQ ID NO: 375352 - DNA, 25 bp, Artificial
  probe
  misc_feature (1)..(25): SEQ ID NO: 4174; WAN024CUV; Start 71; Stop 95
aattatctcgactgacggatgctac

SEQ ID NO: 375353 - DNA, 25 bp, Artificial
  probe
  misc_feature (1)..(25): SEQ ID NO: 4174; WAN024CUV; Start 58; Stop 82
accattggtcaagaattatctcgac

SEQ ID NO: 375354 - DNA, 25 bp, Artificial
  probe
  misc_feature (1)..(25): SEQ ID NO: 4174; WAN024CUV; Start 208; Stop 232
gcaagaaatcagcgatcagtaattt

SEQ ID NO: 375355 - DNA, 25 bp, Artificial
  probe
  misc_feature (1)..(25): SEQ ID NO: 4174; WAN024CUV; Start 407; Stop 431
gacatattgaggtatctgaaagaga

SEQ ID NO: 375356 - DNA, 25 bp, Artificial
  probe
  misc_feature (1)..(25): SEQ ID NO: 4174; WAN024CUV; Start 68; Stop 92
aagaattatctcgactgacggatgc

SEQ ID NO: 375357 - DNA, 25 bp, Artificial
  probe
  misc_feature (1)..(25): SEQ ID NO: 4174; WAN024CUV; Start 339; Stop 363
aacaagtcttgaagagtgcatacgt

SEQ ID NO: 375358 - DNA, 25 bp, Artificial
  probe
  misc_feature (1)..(25): SEQ ID NO: 4174; WAN024CUV; Start 408; Stop 432
acatattgaggtatctgaaagagaa

SEQ ID NO: 375359 - DNA, 25 bp, Artificial
  probe
  misc_feature (1)..(25): SEQ ID NO: 4174; WAN024CUV; Start 337; Stop 361
gaaacaagtcttgaagagtgcatac

SEQ ID NO: 375360 - DNA, 25 bp, Artificial
  probe
  misc_feature (1)..(25): SEQ ID NO: 4174; WAN024CUV; Start 480; Stop 504
gaatgagttgcaccactactttaaa

SEQ ID NO: 375361 - DNA, 25 bp, Artificial
  probe
  misc_feature (1)..(25): SEQ ID NO: 4174; WAN024CUV; Start 207; Stop 231
tgcaagaaatcagcgatcagtaatt

SEQ ID NO: 375362 - DNA, 25 bp, Artificial
  probe
  misc_feature (1)..(25): SEQ ID NO: 4174; WAN024CUV; Start 340; Stop 364
acaagtcttgaagagtgcatacgtc

SEQ ID NO: 375363 - DNA, 25 bp, Artificial
  probe
  misc_feature (1)..(25): SEQ ID NO: 4174; WAN024CUV; Start 336; Stop 360
ggaaacaagtcttgaagagtgcata

SEQ ID NO: 375364 - DNA, 25 bp, Artificial
  probe
  misc_feature (1)..(25): SEQ ID NO: 4174; WAN024CUV; Start 562; Stop 586
aacaaaatagagaaaggacacacac

SEQ ID NO: 375365 - DNA, 25 bp, Artificial
  probe
  misc_feature (1)..(25): SEQ ID NO: 4174; WAN024CUV; Start 82; Stop 106
ctgacggatgctaccctattttata

SEQ ID NO: 375366 - DNA, 25 bp, Artificial
  probe
  misc_feature (1)..(25): SEQ ID NO: 4174; WAN024CUV; Start 69; Stop 93
agaattatctcgactgacggatgct

SEQ ID NO: 375367 - DNA, 25 bp, Artificial
  probe
  misc_feature (1)..(25): SEQ ID NO: 4174; WAN024CUV; Start 564; Stop 588
caaaatagagaaaggacacacacat

SEQ ID NO: 375368 - DNA, 25 bp, Artificial
  probe
  misc_feature (1)..(25): SEQ ID NO: 4174; WAN024CUV; Start 563; Stop 587
acaaaatagagaaaggacacacaca

SEQ ID NO: 375369 - DNA, 25 bp, Artificial
  probe
  misc_feature (1)..(25): SEQ ID NO: 4174; WAN024CUV; Start 479; Stop 503
cgaatgagttgcaccactactttaa

SEQ ID NO: 375370 - DNA, 25 bp, Artificial
  probe
  misc_feature (1)..(25): SEQ ID NO: 4174; WAN024CUV; Start 390; Stop 414
gcacaaacccttaaaacgacatatt

SEQ ID NO: 375371 - DNA, 25 bp, Artificial
  probe
  misc_feature (1)..(25): SEQ ID NO: 4174; WAN024CUV; Start 206; Stop 230
gtgcaagaaatcagcgatcagtaat

SEQ ID NO: 375372 - DNA, 25 bp, Artificial
  probe
  misc_feature (1)..(25): SEQ ID NO: 4174; WAN024CUV; Start 561; Stop 585
aaacaaaatagagaaaggacacaca

SEQ ID NO: 375373 - DNA, 25 bp, Artificial
  probe
  misc_feature (1)..(25): SEQ ID NO: 4174; WAN024CUV; Start 338; Stop 362
aaacaagtcttgaagagtgcatacg

SEQ ID NO: 375374 - DNA, 25 bp, Artificial
  probe
  misc_feature (1)..(25): SEQ ID NO: 4174; WAN024CUV; Start 72; Stop 96
attatctcgactgacggatgctacc

SEQ ID NO: 375375 - DNA, 25 bp, Artificial
  probe
  misc_feature (1)..(25): SEQ ID NO: 4175; WAN024BDH; Start 1; Stop 25
gtgggatttcagaagaatactttta

SEQ ID NO: 375376 - DNA, 25 bp, Artificial
  probe
  misc_feature (1)..(25): SEQ ID NO: 4175; WAN024BDH; Start 59; Stop 83
ttttatctgcaacctcaaagctgtg

SEQ ID NO: 375377 - DNA, 25 bp, Artificial
  probe
  misc_feature (1)..(25): SEQ ID NO: 4175; WAN024BDH; Start 2; Stop 26
tgggatttcagaagaatacttttaa

SEQ ID NO: 375378 - DNA, 25 bp, Artificial
  probe
  misc_feature (1)..(25): SEQ ID NO: 4175; WAN024BDH; Start 52; Stop 76
acgtcagttttatctgcaacctcaa

SEQ ID NO: 375379 - DNA, 25 bp, Artificial
  probe
  misc_feature (1)..(25): SEQ ID NO: 4175; WAN024BDH; Start 44; Stop 68
ttcaaaccacgtcagttttatctgc

SEQ ID NO: 375380 - DNA, 25 bp, Artificial
  probe
  misc_feature (1)..(25): SEQ ID NO: 4175; WAN024BDH; Start 47; Stop 71
aaaccacgtcagttttatctgcaac

SEQ ID NO: 375381 - DNA, 25 bp, Artificial
  probe
  misc_feature (1)..(25): SEQ ID NO: 4175; WAN024BDH; Start 46; Stop 70
caaaccacgtcagttttatctgcaa

SEQ ID NO: 375382 - DNA, 25 bp, Artificial
  probe
  misc_feature (1)..(25): SEQ ID NO: 4175; WAN024BDH; Start 51; Stop 75
cacgtcagttttatctgcaacctca

SEQ ID NO: 375383 - DNA, 25 bp, Artificial
  probe
  misc_feature (1)..(25): SEQ ID NO: 4175; WAN024BDH; Start 3; Stop 27
gggatttcagaagaatacttttaat

SEQ ID NO: 375384 - DNA, 25 bp, Artificial
  probe
  misc_feature (1)..(25): SEQ ID NO: 4175; WAN024BDH; Start 45; Stop 69
tcaaaccacgtcagttttatctgca

SEQ ID NO: 375385 - DNA, 25 bp, Artificial
  probe
  misc_feature (1)..(25): SEQ ID NO: 4175; WAN024BDH; Start 48; Stop 72
aaccacgtcagttttatctgcaacc

SEQ ID NO: 375386 - DNA, 25 bp, Artificial
  probe
  misc_feature (1)..(25): SEQ ID NO: 4175; WAN024BDH; Start 50; Stop 74
ccacgtcagttttatctgcaacctc

SEQ ID NO: 375387 - DNA, 25 bp, Artificial
  probe
  misc_feature (1)..(25): SEQ ID NO: 4175; WAN024BDH; Start 49; Stop 73
accacgtcagttttatctgcaacct

SEQ ID NO: 375388 - DNA, 25 bp, Artificial
  probe
  misc_feature (1)..(25): SEQ ID NO: 4175; WAN024BDH; Start 19; Stop 43
acttttaatactcttcgaaaatctc

SEQ ID NO: 375389 - DNA, 25 bp, Artificial
  probe
  misc_feature (1)..(25): SEQ ID NO: 4175; WAN024BDH; Start 20; Stop 44
cttttaatactcttcgaaaatctct

SEQ ID NO: 375390 - DNA, 25 bp, Artificial
  probe
  misc_feature (1)..(25): SEQ ID NO: 4176; WAN024C7T; Start 123; Stop 147
agtacgtcctataatgtcatcttgg

SEQ ID NO: 375391 - DNA, 25 bp, Artificial
  probe
  misc_feature (1)..(25): SEQ ID NO: 4176; WAN024C7T; Start 116; Stop 140
tatgctcagtacgtcctataatgtc

SEQ ID NO: 375392 - DNA, 25 bp, Artificial
  probe
  misc_feature (1)..(25): SEQ ID NO: 4176; WAN024C7T; Start 115; Stop 139
gtatgctcagtacgtcctataatgt

SEQ ID NO: 375393 - DNA, 25 bp, Artificial
  probe
  misc_feature (1)..(25): SEQ ID NO: 4176; WAN024C7T; Start 114; Stop 138
agtatgctcagtacgtcctataatg

SEQ ID NO: 375394 - DNA, 25 bp, Artificial
  probe
  misc_feature (1)..(25): SEQ ID NO: 4176; WAN024C7T; Start 132; Stop 156
tataatgtcatcttgggttgcctta

SEQ ID NO: 375395 - DNA, 25 bp, Artificial
  probe
  misc_feature (1)..(25): SEQ ID NO: 4176; WAN024C7T; Start 120; Stop 144
ctcagtacgtcctataatgtcatct

SEQ ID NO: 375396 - DNA, 25 bp, Artificial
  probe
  misc_feature (1)..(25): SEQ ID NO: 4176; WAN024C7T; Start 119; Stop 143
gctcagtacgtcctataatgtcatc

SEQ ID NO: 375397 - DNA, 25 bp, Artificial
  probe
  misc_feature (1)..(25): SEQ ID NO: 4176; WAN024C7T; Start 133; Stop 157
ataatgtcatcttgggttgccttag

SEQ ID NO: 375398 - DNA, 25 bp, Artificial
  probe
  misc_feature (1)..(25): SEQ ID NO: 4176; WAN024C7T; Start 131; Stop 155
ctataatgtcatcttgggttgcctt

SEQ ID NO: 375399 - DNA, 25 bp, Artificial
  probe
  misc_feature (1)..(25): SEQ ID NO: 4176; WAN024C7T; Start 122; Stop 146
cagtacgtcctataatgtcatcttg

SEQ ID NO: 375400 - DNA, 25 bp, Artificial
  probe
  misc_feature (1)..(25): SEQ ID NO: 4176; WAN024C7T; Start 121; Stop 145
tcagtacgtcctataatgtcatctt

SEQ ID NO: 375401 - DNA, 25 bp, Artificial
  probe
  misc_feature (1)..(25): SEQ ID NO: 4176; WAN024C7T; Start 118; Stop 142
tgctcagtacgtcctataatgtcat

SEQ ID NO: 375402 - DNA, 25 bp, Artificial
  probe
  misc_feature (1)..(25): SEQ ID NO: 4176; WAN024C7T; Start 117; Stop 141
atgctcagtacgtcctataatgtca

SEQ ID NO: 375403 - DNA, 25 bp, Artificial
  probe
  misc_feature (1)..(25): SEQ ID NO: 4176; WAN024C7T; Start 113; Stop 137
aagtatgctcagtacgtcctataat

SEQ ID NO: 375404 - DNA, 25 bp, Artificial
  probe
  misc_feature (1)..(25): SEQ ID NO: 4176; WAN024C7T; Start 148; Stop 172
gttgccttagaaagaacattgaaga

SEQ ID NO: 375405 - DNA, 25 bp, Artificial
  probe
  misc_feature (1)..(25): SEQ ID NO: 4176; WAN024C7T; Start 147; Stop 171
ggttgccttagaaagaacattgaag

SEQ ID NO: 375406 - DNA, 25 bp, Artificial
  probe
  misc_feature (1)..(25): SEQ ID NO: 4176; WAN024C7T; Start 149; Stop 173
ttgccttagaaagaacattgaagaa

SEQ ID NO: 375407 - DNA, 25 bp, Artificial
  probe
  misc_feature (1)..(25): SEQ ID NO: 4176; WAN024C7T; Start 127; Stop 151
cgtcctataatgtcatcttgggttg

SEQ ID NO: 375408 - DNA, 25 bp, Artificial
  probe
  misc_feature (1)..(25): SEQ ID NO: 4176; WAN024C7T; Start 150; Stop 174
tgccttagaaagaacattgaagaat

SEQ ID NO: 375409 - DNA, 25 bp, Artificial
  probe
  misc_feature (1)..(25): SEQ ID NO: 4176; WAN024C7T; Start 128; Stop 152
gtcctataatgtcatcttgggttgc

SEQ ID NO: 375410 - DNA, 25 bp, Artificial
  probe
  misc_feature (1)..(25): SEQ ID NO: 4176; WAN024C7T; Start 146; Stop 170
gggttgccttagaaagaacattgaa

SEQ ID NO: 375411 - DNA, 25 bp, Artificial
  probe
  misc_feature (1)..(25): SEQ ID NO: 4176; WAN024C7T; Start 143; Stop 167
cttgggttgccttagaaagaacatt

SEQ ID NO: 375412 - DNA, 25 bp, Artificial
  probe
  misc_feature (1)..(25): SEQ ID NO: 4176; WAN024C7T; Start 134; Stop 158
taatgtcatcttgggttgccttaga

SEQ ID NO: 375413 - DNA, 25 bp, Artificial
  probe
  misc_feature (1)..(25): SEQ ID NO: 4176; WAN024C7T; Start 144; Stop 168
ttgggttgccttagaaagaacattg

SEQ ID NO: 375414 - DNA, 25 bp, Artificial
  probe
  misc_feature (1)..(25): SEQ ID NO: 4176; WAN024C7T; Start 130; Stop 154
cctataatgtcatcttgggttgcct

SEQ ID NO: 375415 - DNA, 25 bp, Artificial
  probe
  misc_feature (1)..(25): SEQ ID NO: 4176; WAN024C7T; Start 129; Stop 153
tcctataatgtcatcttgggttgcc

SEQ ID NO: 375416 - DNA, 25 bp, Artificial
  probe
  misc_feature (1)..(25): SEQ ID NO: 4176; WAN024C7T; Start 162; Stop 186
aacattgaagaatgcagagtatcct

SEQ ID NO: 375417 - DNA, 25 bp, Artificial
  probe
  misc_feature (1)..(25): SEQ ID NO: 4176; WAN024C7T; Start 161; Stop 185
gaacattgaagaatgcagagtatcc

SEQ ID NO: 375418 - DNA, 25 bp, Artificial
  probe
  misc_feature (1)..(25): SEQ ID NO: 4176; WAN024C7T; Start 136; Stop 160
atgtcatcttgggttgccttagaaa

SEQ ID NO: 375419 - DNA, 25 bp, Artificial
  probe
  misc_feature (1)..(25): SEQ ID NO: 4176; WAN024C7T; Start 135; Stop 159
aatgtcatcttgggttgccttagaa

SEQ ID NO: 375420 - DNA, 25 bp, Artificial
  probe
  misc_feature (1)..(25): SEQ ID NO: 4176; WAN024C7T; Start 64; Stop 88
tttaatgtgtcaagcataaattcca

SEQ ID NO: 375421 - DNA, 25 bp, Artificial
  probe
  misc_feature (1)..(25): SEQ ID NO: 4176; WAN024C7T; Start 160; Stop 184
agaacattgaagaatgcagagtatc

SEQ ID NO: 375422 - DNA, 25 bp, Artificial
  probe
  misc_feature (1)..(25): SEQ ID NO: 4176; WAN024C7T; Start 68; Stop 92
atgtgtcaagcataaattccataaa

SEQ ID NO: 375423 - DNA, 25 bp, Artificial
  probe
  misc_feature (1)..(25): SEQ ID NO: 4177; WAN024GHB; Start 83; Stop 107
atgatgtctgccataaactccacta

SEQ ID NO: 375424 - DNA, 25 bp, Artificial
  probe
  misc_feature (1)..(25): SEQ ID NO: 4177; WAN024GHB; Start 361; Stop 385
cccacaaacatacatcttgatcttg

SEQ ID NO: 375425 - DNA, 25 bp, Artificial
  probe
  misc_feature (1)..(25): SEQ ID NO: 4177; WAN024GHB; Start 367; Stop 391
aacatacatcttgatcttgccgtcc

SEQ ID NO: 375426 - DNA, 25 bp, Artificial
  probe
  misc_feature (1)..(25): SEQ ID NO: 4177; WAN024GHB; Start 363; Stop 387
cacaaacatacatcttgatcttgcc

SEQ ID NO: 375427 - DNA, 25 bp, Artificial
  probe
  misc_feature (1)..(25): SEQ ID NO: 4177; WAN024GHB; Start 362; Stop 386
ccacaaacatacatcttgatcttgc

SEQ ID NO: 375428 - DNA, 25 bp, Artificial
  probe
  misc_feature (1)..(25): SEQ ID NO: 4177; WAN024GHB; Start 369; Stop 393
catacatcttgatcttgccgtcctc

SEQ ID NO: 375429 - DNA, 25 bp, Artificial
  probe
  misc_feature (1)..(25): SEQ ID NO: 4177; WAN024GHB; Start 253; Stop 277
ggaaatataggcaaccttataccca

SEQ ID NO: 375430 - DNA, 25 bp, Artificial
  probe
  misc_feature (1)..(25): SEQ ID NO: 4177; WAN024GHB; Start 252; Stop 276
tggaaatataggcaaccttataccc

SEQ ID NO: 375431 - DNA, 25 bp, Artificial
  probe
  misc_feature (1)..(25): SEQ ID NO: 4177; WAN024GHB; Start 255; Stop 279
aaatataggcaaccttatacccacg

SEQ ID NO: 375432 - DNA, 25 bp, Artificial
  probe
  misc_feature (1)..(25): SEQ ID NO: 4177; WAN024GHB; Start 366; Stop 390
aaacatacatcttgatcttgccgtc

SEQ ID NO: 375433 - DNA, 25 bp, Artificial
  probe
  misc_feature (1)..(25): SEQ ID NO: 4177; WAN024GHB; Start 254; Stop 278
gaaatataggcaaccttatacccac

SEQ ID NO: 375434 - DNA, 25 bp, Artificial
  probe
  misc_feature (1)..(25): SEQ ID NO: 4177; WAN024GHB; Start 84; Stop 108
tgatgtctgccataaactccactac

SEQ ID NO: 375435 - DNA, 25 bp, Artificial
  probe
  misc_feature (1)..(25): SEQ ID NO: 4177; WAN024GHB; Start 360; Stop 384
gcccacaaacatacatcttgatctt

SEQ ID NO: 375436 - DNA, 25 bp, Artificial
  probe
  misc_feature (1)..(25): SEQ ID NO: 4177; WAN024GHB; Start 365; Stop 389
caaacatacatcttgatcttgccgt

SEQ ID NO: 375437 - DNA, 25 bp, Artificial
  probe
  misc_feature (1)..(25): SEQ ID NO: 4177; WAN024GHB; Start 364; Stop 388
acaaacatacatcttgatcttgccg

SEQ ID NO: 375438 - DNA, 25 bp, Artificial
  probe
  misc_feature (1)..(25): SEQ ID NO: 4177; WAN024GHB; Start 251; Stop 275
ttggaaatataggcaaccttatacc

SEQ ID NO: 375439 - DNA, 25 bp, Artificial
  probe
  misc_feature (1)..(25): SEQ ID NO: 4177; WAN024GHB; Start 82; Stop 106
gatgatgtctgccataaactccact

SEQ ID NO: 375440 - DNA, 25 bp, Artificial
  probe
  misc_feature (1)..(25): SEQ ID NO: 4177; WAN024GHB; Start 77; Stop 101
aaacggatgatgtctgccataaact

SEQ ID NO: 375441 - DNA, 25 bp, Artificial
  probe
  misc_feature (1)..(25): SEQ ID NO: 4177; WAN024GHB; Start 256; Stop 280
aatataggcaaccttatacccacgg

SEQ ID NO: 375442 - DNA, 25 bp, Artificial
  probe
  misc_feature (1)..(25): SEQ ID NO: 4177; WAN024GHB; Start 54; Stop 78
ctttctcgatcaagtcttccacaaa

SEQ ID NO: 375443 - DNA, 25 bp, Artificial
  probe
  misc_feature (1)..(25): SEQ ID NO: 4177; WAN024GHB; Start 370; Stop 394
atacatcttgatcttgccgtcctca

SEQ ID NO: 375444 - DNA, 25 bp, Artificial
  probe
  misc_feature (1)..(25): SEQ ID NO: 4177; WAN024GHB; Start 85; Stop 109
gatgtctgccataaactccactaca

SEQ ID NO: 375445 - DNA, 25 bp, Artificial
  probe
  misc_feature (1)..(25): SEQ ID NO: 4177; WAN024GHB; Start 368; Stop 392
acatacatcttgatcttgccgtcct

SEQ ID NO: 375446 - DNA, 25 bp, Artificial
  probe
  misc_feature (1)..(25): SEQ ID NO: 4177; WAN024GHB; Start 170; Stop 194
atgtacttatccgcaacctcctgag

SEQ ID NO: 375447 - DNA, 25 bp, Artificial
  probe
  misc_feature (1)..(25): SEQ ID NO: 4177; WAN024GHB; Start 169; Stop 193
gatgtacttatccgcaacctcctga

SEQ ID NO: 375448 - DNA, 25 bp, Artificial
  probe
  misc_feature (1)..(25): SEQ ID NO: 4177; WAN024GHB; Start 86; Stop 110
atgtctgccataaactccactacac

SEQ ID NO: 375449 - DNA, 25 bp, Artificial
  probe
  misc_feature (1)..(25): SEQ ID NO: 4177; WAN024GHB; Start 78; Stop 102
aacggatgatgtctgccataaactc

SEQ ID NO: 375450 - DNA, 25 bp, Artificial
  probe
  misc_feature (1)..(25): SEQ ID NO: 4177; WAN024GHB; Start 393; Stop 417
caatcgggacaaattctcgcaaatc

SEQ ID NO: 375451 - DNA, 25 bp, Artificial
  probe
  misc_feature (1)..(25): SEQ ID NO: 4177; WAN024GHB; Start 48; Stop 72
caaagcctttctcgatcaagtcttc

SEQ ID NO: 375452 - DNA, 25 bp, Artificial
  probe
  misc_feature (1)..(25): SEQ ID NO: 4177; WAN024GHB; Start 330; Stop 354
ttcctacgtggatatagttgtacac

SEQ ID NO: 375453 - DNA, 25 bp, Artificial
  probe
  misc_feature (1)..(25): SEQ ID NO: 4177; WAN024GHB; Start 209; Stop 233
tccctggcacggttgataatcttat

SEQ ID NO: 375454 - DNA, 25 bp, Artificial
  probe
  misc_feature (1)..(25): SEQ ID NO: 4177; WAN024GHB; Start 394; Stop 418
aatcgggacaaattctcgcaaatca

SEQ ID NO: 375455 - DNA, 25 bp, Artificial
  probe
  misc_feature (1)..(25): SEQ ID NO: 4177; WAN024GHB; Start 392; Stop 416
tcaatcgggacaaattctcgcaaat

SEQ ID NO: 375456 - DNA, 25 bp, Artificial
  probe
  misc_feature (1)..(25): SEQ ID NO: 4178; WAN024CKV; Start 4; Stop 28
ggcacactattagcaacaagattaa

SEQ ID NO: 375457 - DNA, 25 bp, Artificial
  probe
  misc_feature (1)..(25): SEQ ID NO: 4178; WAN024CKV; Start 389; Stop 413
aagaagatgcgattgtacgattaga

SEQ ID NO: 375458 - DNA, 25 bp, Artificial
  probe
  misc_feature (1)..(25): SEQ ID NO: 4178; WAN024CKV; Start 390; Stop 414
agaagatgcgattgtacgattagag

SEQ ID NO: 375459 - DNA, 25 bp, Artificial
  probe
  misc_feature (1)..(25): SEQ ID NO: 4178; WAN024CKV; Start 391; Stop 415
gaagatgcgattgtacgattagagg

SEQ ID NO: 375460 - DNA, 25 bp, Artificial
  probe
  misc_feature (1)..(25): SEQ ID NO: 4178; WAN024CKV; Start 681; Stop 705
taaggcttacagaacgaattatctt

SEQ ID NO: 375461 - DNA, 25 bp, Artificial
  probe
  misc_feature (1)..(25): SEQ ID NO: 4178; WAN024CKV; Start 62; Stop 86
gagaactagctgaaggtatctgtaa

SEQ ID NO: 375462 - DNA, 25 bp, Artificial
  probe
  misc_feature (1)..(25): SEQ ID NO: 4178; WAN024CKV; Start 198; Stop 222
ggttgtagagaaagttgaggagtta

SEQ ID NO: 375463 - DNA, 25 bp, Artificial
  probe
  misc_feature (1)..(25): SEQ ID NO: 4178; WAN024CKV; Start 61; Stop 85
cgagaactagctgaaggtatctgta

SEQ ID NO: 375464 - DNA, 25 bp, Artificial
  probe
  misc_feature (1)..(25): SEQ ID NO: 4178; WAN024CKV; Start 560; Stop 584
tgagtacaatcgaagagttagaact

SEQ ID NO: 375465 - DNA, 25 bp, Artificial
  probe
  misc_feature (1)..(25): SEQ ID NO: 4178; WAN024CKV; Start 187; Stop 211
tttgatgagcaggttgtagagaaag

SEQ ID NO: 375466 - DNA, 25 bp, Artificial
  probe
  misc_feature (1)..(25): SEQ ID NO: 4178; WAN024CKV; Start 3; Stop 27
gggcacactattagcaacaagatta

SEQ ID NO: 375467 - DNA, 25 bp, Artificial
  probe
  misc_feature (1)..(25): SEQ ID NO: 4178; WAN024CKV; Start 197; Stop 221
aggttgtagagaaagttgaggagtt

SEQ ID NO: 375468 - DNA, 25 bp, Artificial
  probe
  misc_feature (1)..(25): SEQ ID NO: 4178; WAN024CKV; Start 559; Stop 583
ttgagtacaatcgaagagttagaac

SEQ ID NO: 375469 - DNA, 25 bp, Artificial
  probe
  misc_feature (1)..(25): SEQ ID NO: 4178; WAN024CKV; Start 490; Stop 514
gatattggagatttaggtcgtttca

SEQ ID NO: 375470 - DNA, 25 bp, Artificial
  probe
  misc_feature (1)..(25): SEQ ID NO: 4178; WAN024CKV; Start 489; Stop 513
tgatattggagatttaggtcgtttc

SEQ ID NO: 375471 - DNA, 25 bp, Artificial
  probe
  misc_feature (1)..(25): SEQ ID NO: 4178; WAN024CKV; Start 143; Stop 167
tgaatgcccttgctaagaagttaaa

SEQ ID NO: 375472 - DNA, 25 bp, Artificial
  probe
  misc_feature (1)..(25): SEQ ID NO: 4178; WAN024CKV; Start 190; Stop 214
gatgagcaggttgtagagaaagttg

SEQ ID NO: 375473 - DNA, 25 bp, Artificial
  probe
  misc_feature (1)..(25): SEQ ID NO: 4178; WAN024CKV; Start 706; Stop 730
ttggctgatttgtacttattgatgg

SEQ ID NO: 375474 - DNA, 25 bp, Artificial
  probe
  misc_feature (1)..(25): SEQ ID NO: 4178; WAN024CKV; Start 388; Stop 412
aaagaagatgcgattgtacgattag

SEQ ID NO: 375475 - DNA, 25 bp, Artificial
  probe
  misc_feature (1)..(25): SEQ ID NO: 4178; WAN024CKV; Start 387; Stop 411
gaaagaagatgcgattgtacgatta

SEQ ID NO: 375476 - DNA, 25 bp, Artificial
  probe
  misc_feature (1)..(25): SEQ ID NO: 4178; WAN024CKV; Start 142; Stop 166
ctgaatgcccttgctaagaagttaa

SEQ ID NO: 375477 - DNA, 25 bp, Artificial
  probe
  misc_feature (1)..(25): SEQ ID NO: 4178; WAN024CKV; Start 826; Stop 850
actctgaaagttgagcattacattg

SEQ ID NO: 375478 - DNA, 25 bp, Artificial
  probe
  misc_feature (1)..(25): SEQ ID NO: 4178; WAN024CKV; Start 709; Stop 733
gctgatttgtacttattgatgggaa

SEQ ID NO: 375479 - DNA, 25 bp, Artificial
  probe
  misc_feature (1)..(25): SEQ ID NO: 4178; WAN024CKV; Start 199; Stop 223
gttgtagagaaagttgaggagttat

SEQ ID NO: 375480 - DNA, 25 bp, Artificial
  probe
  misc_feature (1)..(25): SEQ ID NO: 4178; WAN024CKV; Start 825; Stop 849
gactctgaaagttgagcattacatt

SEQ ID NO: 375481 - DNA, 25 bp, Artificial
  probe
  misc_feature (1)..(25): SEQ ID NO: 4178; WAN024CKV; Start 824; Stop 848
tgactctgaaagttgagcattacat

SEQ ID NO: 375482 - DNA, 25 bp, Artificial
  probe
  misc_feature (1)..(25): SEQ ID NO: 4178; WAN024CKV; Start 823; Stop 847
atgactctgaaagttgagcattaca

SEQ ID NO: 375483 - DNA, 25 bp, Artificial
  probe
  misc_feature (1)..(25): SEQ ID NO: 4178; WAN024CKV; Start 456; Stop 480
ccaagtttcaaacaccctattcaat

SEQ ID NO: 375484 - DNA, 25 bp, Artificial
  probe
  misc_feature (1)..(25): SEQ ID NO: 4178; WAN024CKV; Start 450; Stop 474
ctatctccaagtttcaaacacccta

SEQ ID NO: 375485 - DNA, 25 bp, Artificial
  probe
  misc_feature (1)..(25): SEQ ID NO: 4178; WAN024CKV; Start 204; Stop 228
agagaaagttgaggagttatcagaa

SEQ ID NO: 375486 - DNA, 25 bp, Artificial
  probe
  misc_feature (1)..(25): SEQ ID NO: 4178; WAN024CKV; Start 708; Stop 732
ggctgatttgtacttattgatggga

SEQ ID NO: 375487 - DNA, 25 bp, Artificial
  probe
  misc_feature (1)..(25): SEQ ID NO: 4178; WAN024CKV; Start 682; Stop 706
aaggcttacagaacgaattatcttt

SEQ ID NO: 375488 - DNA, 25 bp, Artificial
  probe
  misc_feature (1)..(25): SEQ ID NO: 4178; WAN024CKV; Start 452; Stop 476
atctccaagtttcaaacaccctatt

SEQ ID NO: 375489 - DNA, 25 bp, Artificial
  probe
  misc_feature (1)..(25): SEQ ID NO: 4179; WAN024DWY; Start 182; Stop 206
atatgtccaacaaccagaccataag

SEQ ID NO: 375490 - DNA, 25 bp, Artificial
  probe
  misc_feature (1)..(25): SEQ ID NO: 4179; WAN024DWY; Start 181; Stop 205
gatatgtccaacaaccagaccataa

SEQ ID NO: 375491 - DNA, 25 bp, Artificial
  probe
  misc_feature (1)..(25): SEQ ID NO: 4179; WAN024DWY; Start 107; Stop 131
gtatcttggtcaaccgtaacgatat

SEQ ID NO: 375492 - DNA, 25 bp, Artificial
  probe
  misc_feature (1)..(25): SEQ ID NO: 4179; WAN024DWY; Start 184; Stop 208
atgtccaacaaccagaccataagta

SEQ ID NO: 375493 - DNA, 25 bp, Artificial
  probe
  misc_feature (1)..(25): SEQ ID NO: 4179; WAN024DWY; Start 183; Stop 207
tatgtccaacaaccagaccataagt

SEQ ID NO: 375494 - DNA, 25 bp, Artificial
  probe
  misc_feature (1)..(25): SEQ ID NO: 4179; WAN024DWY; Start 246; Stop 270
tatctccctgacctttaccaacaat

SEQ ID NO: 375495 - DNA, 25 bp, Artificial
  probe
  misc_feature (1)..(25): SEQ ID NO: 4179; WAN024DWY; Start 245; Stop 269
ttatctccctgacctttaccaacaa

SEQ ID NO: 375496 - DNA, 25 bp, Artificial
  probe
  misc_feature (1)..(25): SEQ ID NO: 4179; WAN024DWY; Start 244; Stop 268
cttatctccctgacctttaccaaca

SEQ ID NO: 375497 - DNA, 25 bp, Artificial
  probe
  misc_feature (1)..(25): SEQ ID NO: 4179; WAN024DWY; Start 180; Stop 204
cgatatgtccaacaaccagaccata

SEQ ID NO: 375498 - DNA, 25 bp, Artificial
  probe
  misc_feature (1)..(25): SEQ ID NO: 4179; WAN024DWY; Start 108; Stop 132
tatcttggtcaaccgtaacgatatc

SEQ ID NO: 375499 - DNA, 25 bp, Artificial
  probe
  misc_feature (1)..(25): SEQ ID NO: 4179; WAN024DWY; Start 185; Stop 209
tgtccaacaaccagaccataagtac

SEQ ID NO: 375500 - DNA, 25 bp, Artificial
  probe
  misc_feature (1)..(25): SEQ ID NO: 4179; WAN024DWY; Start 247; Stop 271
atctccctgacctttaccaacaatc

SEQ ID NO: 375501 - DNA, 25 bp, Artificial
  probe
  misc_feature (1)..(25): SEQ ID NO: 4179; WAN024DWY; Start 195; Stop 219
ccagaccataagtaccaccagagaa

SEQ ID NO: 375502 - DNA, 25 bp, Artificial
  probe
  misc_feature (1)..(25): SEQ ID NO: 4179; WAN024DWY; Start 189; Stop 213
caacaaccagaccataagtaccacc

SEQ ID NO: 375503 - DNA, 25 bp, Artificial
  probe
  misc_feature (1)..(25): SEQ ID NO: 4179; WAN024DWY; Start 188; Stop 212
ccaacaaccagaccataagtaccac

SEQ ID NO: 375504 - DNA, 25 bp, Artificial
  probe
  misc_feature (1)..(25): SEQ ID NO: 4179; WAN024DWY; Start 252; Stop 276
cctgacctttaccaacaatcattga

SEQ ID NO: 375505 - DNA, 25 bp, Artificial
  probe
  misc_feature (1)..(25): SEQ ID NO: 4179; WAN024DWY; Start 106; Stop 130
ggtatcttggtcaaccgtaacgata

SEQ ID NO: 375506 - DNA, 25 bp, Artificial
  probe
  misc_feature (1)..(25): SEQ ID NO: 4179; WAN024DWY; Start 243; Stop 267
ccttatctccctgacctttaccaac

SEQ ID NO: 375507 - DNA, 25 bp, Artificial
  probe
  misc_feature (1)..(25): SEQ ID NO: 4179; WAN024DWY; Start 197; Stop 221
agaccataagtaccaccagagaaac

SEQ ID NO: 375508 - DNA, 25 bp, Artificial
  probe
  misc_feature (1)..(25): SEQ ID NO: 4179; WAN024DWY; Start 196; Stop 220
cagaccataagtaccaccagagaaa

SEQ ID NO: 375509 - DNA, 25 bp, Artificial
  probe
  misc_feature (1)..(25): SEQ ID NO: 4179; WAN024DWY; Start 187; Stop 211
tccaacaaccagaccataagtacca

SEQ ID NO: 375510 - DNA, 25 bp, Artificial
  probe
  misc_feature (1)..(25): SEQ ID NO: 4179; WAN024DWY; Start 193; Stop 217
aaccagaccataagtaccaccagag

SEQ ID NO: 375511 - DNA, 25 bp, Artificial
  probe
  misc_feature (1)..(25): SEQ ID NO: 4179; WAN024DWY; Start 250; Stop 274
tccctgacctttaccaacaatcatt

SEQ ID NO: 375512 - DNA, 25 bp, Artificial
  probe
  misc_feature (1)..(25): SEQ ID NO: 4179; WAN024DWY; Start 242; Stop 266
accttatctccctgacctttaccaa

SEQ ID NO: 375513 - DNA, 25 bp, Artificial
  probe
  misc_feature (1)..(25): SEQ ID NO: 4179; WAN024DWY; Start 97; Stop 121
aatttctttggtatcttggtcaacc

SEQ ID NO: 375514 - DNA, 25 bp, Artificial
  probe
  misc_feature (1)..(25): SEQ ID NO: 4179; WAN024DWY; Start 190; Stop 214
aacaaccagaccataagtaccacca

SEQ ID NO: 375515 - DNA, 25 bp, Artificial
  probe
  misc_feature (1)..(25): SEQ ID NO: 4179; WAN024DWY; Start 186; Stop 210
gtccaacaaccagaccataagtacc

SEQ ID NO: 375516 - DNA, 25 bp, Artificial
  probe
  misc_feature (1)..(25): SEQ ID NO: 4179; WAN024DWY; Start 251; Stop 275
ccctgacctttaccaacaatcattg

SEQ ID NO: 375517 - DNA, 25 bp, Artificial
  probe
  misc_feature (1)..(25): SEQ ID NO: 4179; WAN024DWY; Start 249; Stop 273
ctccctgacctttaccaacaatcat

SEQ ID NO: 375518 - DNA, 25 bp, Artificial
  probe
  misc_feature (1)..(25): SEQ ID NO: 4179; WAN024DWY; Start 192; Stop 216
caaccagaccataagtaccaccaga

SEQ ID NO: 375519 - DNA, 25 bp, Artificial
  probe
  misc_feature (1)..(25): SEQ ID NO: 4179; WAN024DWY; Start 98; Stop 122
atttctttggtatcttggtcaaccg

SEQ ID NO: 375520 - DNA, 25 bp, Artificial
  probe
  misc_feature (1)..(25): SEQ ID NO: 4179; WAN024DWY; Start 191; Stop 215
acaaccagaccataagtaccaccag

SEQ ID NO: 375521 - DNA, 25 bp, Artificial
  probe
  misc_feature (1)..(25): SEQ ID NO: 4179; WAN024DWY; Start 102; Stop 126
ctttggtatcttggtcaaccgtaac

SEQ ID NO: 375522 - DNA, 25 bp, Artificial
  probe
  misc_feature (1)..(25): SEQ ID NO: 4180; WAN024FKQ; Start 157; Stop 181
ttcttcttgcgtccaatcttgataa

SEQ ID NO: 375523 - DNA, 25 bp, Artificial
  probe
  misc_feature (1)..(25): SEQ ID NO: 4180; WAN024FKQ; Start 198; Stop 222
cagttgtccattccattcattcctc

SEQ ID NO: 375524 - DNA, 25 bp, Artificial
  probe
  misc_feature (1)..(25): SEQ ID NO: 4180; WAN024FKQ; Start 196; Stop 220
ctcagttgtccattccattcattcc

SEQ ID NO: 375525 - DNA, 25 bp, Artificial
  probe
  misc_feature (1)..(25): SEQ ID NO: 4180; WAN024FKQ; Start 197; Stop 221
tcagttgtccattccattcattcct

SEQ ID NO: 375526 - DNA, 25 bp, Artificial
  probe
  misc_feature (1)..(25): SEQ ID NO: 4180; WAN024FKQ; Start 195; Stop 219
gctcagttgtccattccattcattc

SEQ ID NO: 375527 - DNA, 25 bp, Artificial
  probe
  misc_feature (1)..(25): SEQ ID NO: 4180; WAN024FKQ; Start 199; Stop 223
agttgtccattccattcattcctcc

SEQ ID NO: 375528 - DNA, 25 bp, Artificial
  probe
  misc_feature (1)..(25): SEQ ID NO: 4180; WAN024FKQ; Start 201; Stop 225
ttgtccattccattcattcctccaa

SEQ ID NO: 375529 - DNA, 25 bp, Artificial
  probe
  misc_feature (1)..(25): SEQ ID NO: 4180; WAN024FKQ; Start 200; Stop 224
gttgtccattccattcattcctcca

SEQ ID NO: 375530 - DNA, 25 bp, Artificial
  probe
  misc_feature (1)..(25): SEQ ID NO: 4180; WAN024FKQ; Start 146; Stop 170
atatgttgaatttcttcttgcgtcc

SEQ ID NO: 375531 - DNA, 25 bp, Artificial
  probe
  misc_feature (1)..(25): SEQ ID NO: 4180; WAN024FKQ; Start 165; Stop 189
gcgtccaatcttgataaagtctgta

SEQ ID NO: 375532 - DNA, 25 bp, Artificial
  probe
  misc_feature (1)..(25): SEQ ID NO: 4180; WAN024FKQ; Start 159; Stop 183
cttcttgcgtccaatcttgataaag

SEQ ID NO: 375533 - DNA, 25 bp, Artificial
  probe
  misc_feature (1)..(25): SEQ ID NO: 4180; WAN024FKQ; Start 169; Stop 193
ccaatcttgataaagtctgtaacga

SEQ ID NO: 375534 - DNA, 25 bp, Artificial
  probe
  misc_feature (1)..(25): SEQ ID NO: 4180; WAN024FKQ; Start 168; Stop 192
tccaatcttgataaagtctgtaacg

SEQ ID NO: 375535 - DNA, 25 bp, Artificial
  probe
  misc_feature (1)..(25): SEQ ID NO: 4180; WAN024FKQ; Start 166; Stop 190
cgtccaatcttgataaagtctgtaa

SEQ ID NO: 375536 - DNA, 25 bp, Artificial
  probe
  misc_feature (1)..(25): SEQ ID NO: 4180; WAN024FKQ; Start 158; Stop 182
tcttcttgcgtccaatcttgataaa

SEQ ID NO: 375537 - DNA, 25 bp, Artificial
  probe
  misc_feature (1)..(25): SEQ ID NO: 4180; WAN024FKQ; Start 156; Stop 180
tttcttcttgcgtccaatcttgata

SEQ ID NO: 375538 - DNA, 25 bp, Artificial
  probe
  misc_feature (1)..(25): SEQ ID NO: 4180; WAN024FKQ; Start 160; Stop 184
ttcttgcgtccaatcttgataaagt

SEQ ID NO: 375539 - DNA, 25 bp, Artificial
  probe
  misc_feature (1)..(25): SEQ ID NO: 4180; WAN024FKQ; Start 147; Stop 171
tatgttgaatttcttcttgcgtcca

SEQ ID NO: 375540 - DNA, 25 bp, Artificial
  probe
  misc_feature (1)..(25): SEQ ID NO: 4180; WAN024FKQ; Start 155; Stop 179
atttcttcttgcgtccaatcttgat

SEQ ID NO: 375541 - DNA, 25 bp, Artificial
  probe
  misc_feature (1)..(25): SEQ ID NO: 4180; WAN024FKQ; Start 153; Stop 177
gaatttcttcttgcgtccaatcttg

SEQ ID NO: 375542 - DNA, 25 bp, Artificial
  probe
  misc_feature (1)..(25): SEQ ID NO: 4180; WAN024FKQ; Start 162; Stop 186
cttgcgtccaatcttgataaagtct

SEQ ID NO: 375543 - DNA, 25 bp, Artificial
  probe
  misc_feature (1)..(25): SEQ ID NO: 4180; WAN024FKQ; Start 161; Stop 185
tcttgcgtccaatcttgataaagtc

SEQ ID NO: 375544 - DNA, 25 bp, Artificial
  probe
  misc_feature (1)..(25): SEQ ID NO: 4180; WAN024FKQ; Start 154; Stop 178
aatttcttcttgcgtccaatcttga

SEQ ID NO: 375545 - DNA, 25 bp, Artificial
  probe
  misc_feature (1)..(25): SEQ ID NO: 4180; WAN024FKQ; Start 152; Stop 176
tgaatttcttcttgcgtccaatctt

SEQ ID NO: 375546 - DNA, 25 bp, Artificial
  probe
  misc_feature (1)..(25): SEQ ID NO: 4180; WAN024FKQ; Start 151; Stop 175
ttgaatttcttcttgcgtccaatct

SEQ ID NO: 375547 - DNA, 25 bp, Artificial
  probe
  misc_feature (1)..(25): SEQ ID NO: 4180; WAN024FKQ; Start 150; Stop 174
gttgaatttcttcttgcgtccaatc

SEQ ID NO: 375548 - DNA, 25 bp, Artificial
  probe
  misc_feature (1)..(25): SEQ ID NO: 4180; WAN024FKQ; Start 163; Stop 187
ttgcgtccaatcttgataaagtctg

SEQ ID NO: 375549 - DNA, 25 bp, Artificial
  probe
  misc_feature (1)..(25): SEQ ID NO: 4180; WAN024FKQ; Start 171; Stop 195
aatcttgataaagtctgtaacgacg

SEQ ID NO: 375550 - DNA, 25 bp, Artificial
  probe
  misc_feature (1)..(25): SEQ ID NO: 4180; WAN024FKQ; Start 145; Stop 169
tatatgttgaatttcttcttgcgtc

SEQ ID NO: 375551 - DNA, 25 bp, Artificial
  probe
  misc_feature (1)..(25): SEQ ID NO: 4180; WAN024FKQ; Start 172; Stop 196
atcttgataaagtctgtaacgacgc

SEQ ID NO: 375552 - DNA, 25 bp, Artificial
  probe
  misc_feature (1)..(25): SEQ ID NO: 4180; WAN024FKQ; Start 149; Stop 173
tgttgaatttcttcttgcgtccaat

SEQ ID NO: 375553 - DNA, 25 bp, Artificial
  probe
  misc_feature (1)..(25): SEQ ID NO: 4180; WAN024FKQ; Start 148; Stop 172
atgttgaatttcttcttgcgtccaa

SEQ ID NO: 375554 - DNA, 25 bp, Artificial
  probe
  misc_feature (1)..(25): SEQ ID NO: 4180; WAN024FKQ; Start 202; Stop 226
tgtccattccattcattcctccaaa

SEQ ID NO: 375555 - DNA, 25 bp, Artificial
  probe
  misc_feature (1)..(25): SEQ ID NO: 4181; WAN024GBO; Start 13; Stop 37
gataacttcaggaaccgtagacata

SEQ ID NO: 375556 - DNA, 25 bp, Artificial
  probe
  misc_feature (1)..(25): SEQ ID NO: 4181; WAN024GBO; Start 14; Stop 38
ataacttcaggaaccgtagacatac

SEQ ID NO: 375557 - DNA, 25 bp, Artificial
  probe
  misc_feature (1)..(25): SEQ ID NO: 4181; WAN024GBO; Start 104; Stop 128
gtaactccgatatagacaccttcat

SEQ ID NO: 375558 - DNA, 25 bp, Artificial
  probe
  misc_feature (1)..(25): SEQ ID NO: 4181; WAN024GBO; Start 102; Stop 126
cagtaactccgatatagacaccttc

SEQ ID NO: 375559 - DNA, 25 bp, Artificial
  probe
  misc_feature (1)..(25): SEQ ID NO: 4181; WAN024GBO; Start 103; Stop 127
agtaactccgatatagacaccttca

SEQ ID NO: 375560 - DNA, 25 bp, Artificial
  probe
  misc_feature (1)..(25): SEQ ID NO: 4181; WAN024GBO; Start 108; Stop 132
ctccgatatagacaccttcatcaag

SEQ ID NO: 375561 - DNA, 25 bp, Artificial
  probe
  misc_feature (1)..(25): SEQ ID NO: 4181; WAN024GBO; Start 107; Stop 131
actccgatatagacaccttcatcaa

SEQ ID NO: 375562 - DNA, 25 bp, Artificial
  probe
  misc_feature (1)..(25): SEQ ID NO: 4181; WAN024GBO; Start 106; Stop 130
aactccgatatagacaccttcatca

SEQ ID NO: 375563 - DNA, 25 bp, Artificial
  probe
  misc_feature (1)..(25): SEQ ID NO: 4181; WAN024GBO; Start 105; Stop 129
taactccgatatagacaccttcatc

SEQ ID NO: 375564 - DNA, 25 bp, Artificial
  probe
  misc_feature (1)..(25): SEQ ID NO: 4181; WAN024GBO; Start 101; Stop 125
ccagtaactccgatatagacacctt

SEQ ID NO: 375565 - DNA, 25 bp, Artificial
  probe
  misc_feature (1)..(25): SEQ ID NO: 4181; WAN024GBO; Start 15; Stop 39
taacttcaggaaccgtagacatacc

SEQ ID NO: 375566 - DNA, 25 bp, Artificial
  probe
  misc_feature (1)..(25): SEQ ID NO: 4181; WAN024GBO; Start 99; Stop 123
gaccagtaactccgatatagacacc

SEQ ID NO: 375567 - DNA, 25 bp, Artificial
  probe
  misc_feature (1)..(25): SEQ ID NO: 4181; WAN024GBO; Start 100; Stop 124
accagtaactccgatatagacacct

SEQ ID NO: 375568 - DNA, 25 bp, Artificial
  probe
  misc_feature (1)..(25): SEQ ID NO: 4181; WAN024GBO; Start 109; Stop 133
tccgatatagacaccttcatcaagc

SEQ ID NO: 375569 - DNA, 25 bp, Artificial
  probe
  misc_feature (1)..(25): SEQ ID NO: 4181; WAN024GBO; Start 12; Stop 36
cgataacttcaggaaccgtagacat

SEQ ID NO: 375570 - DNA, 25 bp, Artificial
  probe
  misc_feature (1)..(25): SEQ ID NO: 4181; WAN024GBO; Start 18; Stop 42
cttcaggaaccgtagacataccaac

SEQ ID NO: 375571 - DNA, 25 bp, Artificial
  probe
  misc_feature (1)..(25): SEQ ID NO: 4181; WAN024GBO; Start 73; Stop 97
aatttctgctggtgtttcataagtc

SEQ ID NO: 375572 - DNA, 25 bp, Artificial
  probe
  misc_feature (1)..(25): SEQ ID NO: 4181; WAN024GBO; Start 53; Stop 77
cccagtgtcttataggaacgaattt

SEQ ID NO: 375573 - DNA, 25 bp, Artificial
  probe
  misc_feature (1)..(25): SEQ ID NO: 4181; WAN024GBO; Start 98; Stop 122
ggaccagtaactccgatatagacac

SEQ ID NO: 375574 - DNA, 25 bp, Artificial
  probe
  misc_feature (1)..(25): SEQ ID NO: 4181; WAN024GBO; Start 72; Stop 96
gaatttctgctggtgtttcataagt

SEQ ID NO: 375575 - DNA, 25 bp, Artificial
  probe
  misc_feature (1)..(25): SEQ ID NO: 4181; WAN024GBO; Start 59; Stop 83
gtcttataggaacgaatttctgctg

SEQ ID NO: 375576 - DNA, 25 bp, Artificial
  probe
  misc_feature (1)..(25): SEQ ID NO: 4181; WAN024GBO; Start 58; Stop 82
tgtcttataggaacgaatttctgct

SEQ ID NO: 375577 - DNA, 25 bp, Artificial
  probe
  misc_feature (1)..(25): SEQ ID NO: 4181; WAN024GBO; Start 57; Stop 81
gtgtcttataggaacgaatttctgc

SEQ ID NO: 375578 - DNA, 25 bp, Artificial
  probe
  misc_feature (1)..(25): SEQ ID NO: 4181; WAN024GBO; Start 54; Stop 78
ccagtgtcttataggaacgaatttc

SEQ ID NO: 375579 - DNA, 25 bp, Artificial
  probe
  misc_feature (1)..(25): SEQ ID NO: 4181; WAN024GBO; Start 60; Stop 84
tcttataggaacgaatttctgctgg

SEQ ID NO: 375580 - DNA, 25 bp, Artificial
  probe
  misc_feature (1)..(25): SEQ ID NO: 4181; WAN024GBO; Start 19; Stop 43
ttcaggaaccgtagacataccaact

SEQ ID NO: 375581 - DNA, 25 bp, Artificial
  probe
  misc_feature (1)..(25): SEQ ID NO: 4181; WAN024GBO; Start 17; Stop 41
acttcaggaaccgtagacataccaa

SEQ ID NO: 375582 - DNA, 25 bp, Artificial
  probe
  misc_feature (1)..(25): SEQ ID NO: 4181; WAN024GBO; Start 16; Stop 40
aacttcaggaaccgtagacatacca

SEQ ID NO: 375583 - DNA, 25 bp, Artificial
  probe
  misc_feature (1)..(25): SEQ ID NO: 4181; WAN024GBO; Start 61; Stop 85
cttataggaacgaatttctgctggt

SEQ ID NO: 375584 - DNA, 25 bp, Artificial
  probe
  misc_feature (1)..(25): SEQ ID NO: 4181; WAN024GBO; Start 71; Stop 95
cgaatttctgctggtgtttcataag

SEQ ID NO: 375585 - DNA, 25 bp, Artificial
  probe
  misc_feature (1)..(25): SEQ ID NO: 4181; WAN024GBO; Start 62; Stop 86
ttataggaacgaatttctgctggtg

SEQ ID NO: 375586 - DNA, 25 bp, Artificial
  probe
  misc_feature (1)..(25): SEQ ID NO: 4181; WAN024GBO; Start 110; Stop 134
ccgatatagacaccttcatcaagct

SEQ ID NO: 375587 - DNA, 25 bp, Artificial
  probe
  misc_feature (1)..(25): SEQ ID NO: 4181; WAN024GBO; Start 56; Stop 80
agtgtcttataggaacgaatttctg

SEQ ID NO: 375588 - DNA, 25 bp, Artificial
  probe
  misc_feature (1)..(25): SEQ ID NO: 4182; WAN024CET; Start 229; Stop 253
ccattcttccataccattatcgctg

SEQ ID NO: 375589 - DNA, 25 bp, Artificial
  probe
  misc_feature (1)..(25): SEQ ID NO: 4182; WAN024CET; Start 163; Stop 187
tatggtgatggaactcctgaattga

SEQ ID NO: 375590 - DNA, 25 bp, Artificial
  probe
  misc_feature (1)..(25): SEQ ID NO: 4182; WAN024CET; Start 162; Stop 186
gtatggtgatggaactcctgaattg

SEQ ID NO: 375591 - DNA, 25 bp, Artificial
  probe
  misc_feature (1)..(25): SEQ ID NO: 4182; WAN024CET; Start 160; Stop 184
atgtatggtgatggaactcctgaat

SEQ ID NO: 375592 - DNA, 25 bp, Artificial
  probe
  misc_feature (1)..(25): SEQ ID NO: 4182; WAN024CET; Start 593; Stop 617
ctcttgtagcaacagtgattaactt

SEQ ID NO: 375593 - DNA, 25 bp, Artificial
  probe
  misc_feature (1)..(25): SEQ ID NO: 4182; WAN024CET; Start 161; Stop 185
tgtatggtgatggaactcctgaatt

SEQ ID NO: 375594 - DNA, 25 bp, Artificial
  probe
  misc_feature (1)..(25): SEQ ID NO: 4182; WAN024CET; Start 159; Stop 183
aatgtatggtgatggaactcctgaa

SEQ ID NO: 375595 - DNA, 25 bp, Artificial
  probe
  misc_feature (1)..(25): SEQ ID NO: 4182; WAN024CET; Start 164; Stop 188
atggtgatggaactcctgaattgaa

SEQ ID NO: 375596 - DNA, 25 bp, Artificial
  probe
  misc_feature (1)..(25): SEQ ID NO: 4182; WAN024CET; Start 766; Stop 790
atcggtattattatcgtacttgctt

SEQ ID NO: 375597 - DNA, 25 bp, Artificial
  probe
  misc_feature (1)..(25): SEQ ID NO: 4182; WAN024CET; Start 708; Stop 732
ctttactgcctttatcttctggttg

SEQ ID NO: 375598 - DNA, 25 bp, Artificial
  probe
  misc_feature (1)..(25): SEQ ID NO: 4182; WAN024CET; Start 707; Stop 731
tctttactgcctttatcttctggtt

SEQ ID NO: 375599 - DNA, 25 bp, Artificial
  probe
  misc_feature (1)..(25): SEQ ID NO: 4182; WAN024CET; Start 706; Stop 730
atctttactgcctttatcttctggt

SEQ ID NO: 375600 - DNA, 25 bp, Artificial
  probe
  misc_feature (1)..(25): SEQ ID NO: 4182; WAN024CET; Start 89; Stop 113
aattaggttggaactacgaacgtat

SEQ ID NO: 375601 - DNA, 25 bp, Artificial
  probe
  misc_feature (1)..(25): SEQ ID NO: 4182; WAN024CET; Start 716; Stop 740
cctttatcttctggttgcttggtaa

SEQ ID NO: 375602 - DNA, 25 bp, Artificial
  probe
  misc_feature (1)..(25): SEQ ID NO: 4182; WAN024CET; Start 477; Stop 501
ttggaaacagttggaatttgcttac

SEQ ID NO: 375603 - DNA, 25 bp, Artificial
  probe
  misc_feature (1)..(25): SEQ ID NO: 4182; WAN024CET; Start 171; Stop 195
tggaactcctgaattgaaagaaatg

SEQ ID NO: 375604 - DNA, 25 bp, Artificial
  probe
  misc_feature (1)..(25): SEQ ID NO: 4182; WAN024CET; Start 168; Stop 192
tgatggaactcctgaattgaaagaa

SEQ ID NO: 375605 - DNA, 25 bp, Artificial
  probe
  misc_feature (1)..(25): SEQ ID NO: 4182; WAN024CET; Start 90; Stop 114
attaggttggaactacgaacgtatg

SEQ ID NO: 375606 - DNA, 25 bp, Artificial
  probe
  misc_feature (1)..(25): SEQ ID NO: 4182; WAN024CET; Start 705; Stop 729
aatctttactgcctttatcttctgg

SEQ ID NO: 375607 - DNA, 25 bp, Artificial
  probe
  misc_feature (1)..(25): SEQ ID NO: 4182; WAN024CET; Start 172; Stop 196
ggaactcctgaattgaaagaaatga

SEQ ID NO: 375608 - DNA, 25 bp, Artificial
  probe
  misc_feature (1)..(25): SEQ ID NO: 4182; WAN024CET; Start 169; Stop 193
gatggaactcctgaattgaaagaaa

SEQ ID NO: 375609 - DNA, 25 bp, Artificial
  probe
  misc_feature (1)..(25): SEQ ID NO: 4182; WAN024CET; Start 230; Stop 254
cattcttccataccattatcgctgg

SEQ ID NO: 375610 - DNA, 25 bp, Artificial
  probe
  misc_feature (1)..(25): SEQ ID NO: 4182; WAN024CET; Start 88; Stop 112
caattaggttggaactacgaacgta

SEQ ID NO: 375611 - DNA, 25 bp, Artificial
  probe
  misc_feature (1)..(25): SEQ ID NO: 4182; WAN024CET; Start 765; Stop 789
tatcggtattattatcgtacttgct

SEQ ID NO: 375612 - DNA, 25 bp, Artificial
  probe
  misc_feature (1)..(25): SEQ ID NO: 4182; WAN024CET; Start 709; Stop 733
tttactgcctttatcttctggttgc

SEQ ID NO: 375613 - DNA, 25 bp, Artificial
  probe
  misc_feature (1)..(25): SEQ ID NO: 4182; WAN024CET; Start 476; Stop 500
gttggaaacagttggaatttgctta

SEQ ID NO: 375614 - DNA, 25 bp, Artificial
  probe
  misc_feature (1)..(25): SEQ ID NO: 4182; WAN024CET; Start 167; Stop 191
gtgatggaactcctgaattgaaaga

SEQ ID NO: 375615 - DNA, 25 bp, Artificial
  probe
  misc_feature (1)..(25): SEQ ID NO: 4182; WAN024CET; Start 175; Stop 199
actcctgaattgaaagaaatgatga

SEQ ID NO: 375616 - DNA, 25 bp, Artificial
  probe
  misc_feature (1)..(25): SEQ ID NO: 4182; WAN024CET; Start 170; Stop 194
atggaactcctgaattgaaagaaat

SEQ ID NO: 375617 - DNA, 25 bp, Artificial
  probe
  misc_feature (1)..(25): SEQ ID NO: 4182; WAN024CET; Start 479; Stop 503
ggaaacagttggaatttgcttacaa

SEQ ID NO: 375618 - DNA, 25 bp, Artificial
  probe
  misc_feature (1)..(25): SEQ ID NO: 4182; WAN024CET; Start 774; Stop 798
tattatcgtacttgctttggctctt

SEQ ID NO: 375619 - DNA, 25 bp, Artificial
  probe
  misc_feature (1)..(25): SEQ ID NO: 4182; WAN024CET; Start 773; Stop 797
ttattatcgtacttgctttggctct

SEQ ID NO: 375620 - DNA, 25 bp, Artificial
  probe
  misc_feature (1)..(25): SEQ ID NO: 4182; WAN024CET; Start 764; Stop 788
ctatcggtattattatcgtacttgc

SEQ ID NO: 375621 - DNA, 25 bp, Artificial
  probe
  misc_feature (1)..(25): SEQ ID NO: 4183; WAN024EXT; Start 180; Stop 204
attgacctccagacagttgactaat

SEQ ID NO: 375622 - DNA, 25 bp, Artificial
  probe
  misc_feature (1)..(25): SEQ ID NO: 4183; WAN024EXT; Start 181; Stop 205
ttgacctccagacagttgactaatt

SEQ ID NO: 375623 - DNA, 25 bp, Artificial
  probe
  misc_feature (1)..(25): SEQ ID NO: 4183; WAN024EXT; Start 179; Stop 203
aattgacctccagacagttgactaa

SEQ ID NO: 375624 - DNA, 25 bp, Artificial
  probe
  misc_feature (1)..(25): SEQ ID NO: 4183; WAN024EXT; Start 178; Stop 202
gaattgacctccagacagttgacta

SEQ ID NO: 375625 - DNA, 25 bp, Artificial
  probe
  misc_feature (1)..(25): SEQ ID NO: 4183; WAN024EXT; Start 185; Stop 209
cctccagacagttgactaatttgac

SEQ ID NO: 375626 - DNA, 25 bp, Artificial
  probe
  misc_feature (1)..(25): SEQ ID NO: 4183; WAN024EXT; Start 183; Stop 207
gacctccagacagttgactaatttg

SEQ ID NO: 375627 - DNA, 25 bp, Artificial
  probe
  misc_feature (1)..(25): SEQ ID NO: 4183; WAN024EXT; Start 186; Stop 210
ctccagacagttgactaatttgacg

SEQ ID NO: 375628 - DNA, 25 bp, Artificial
  probe
  misc_feature (1)..(25): SEQ ID NO: 4183; WAN024EXT; Start 184; Stop 208
acctccagacagttgactaatttga

SEQ ID NO: 375629 - DNA, 25 bp, Artificial
  probe
  misc_feature (1)..(25): SEQ ID NO: 4183; WAN024EXT; Start 182; Stop 206
tgacctccagacagttgactaattt

SEQ ID NO: 375630 - DNA, 25 bp, Artificial
  probe
  misc_feature (1)..(25): SEQ ID NO: 4183; WAN024EXT; Start 55; Stop 79
tttcaaatctctcagcgtattcatg

SEQ ID NO: 375631 - DNA, 25 bp, Artificial
  probe
  misc_feature (1)..(25): SEQ ID NO: 4183; WAN024EXT; Start 77; Stop 101
atgatgatttcctcactgacagagt

SEQ ID NO: 375632 - DNA, 25 bp, Artificial
  probe
  misc_feature (1)..(25): SEQ ID NO: 4183; WAN024EXT; Start 76; Stop 100
catgatgatttcctcactgacagag

SEQ ID NO: 375633 - DNA, 25 bp, Artificial
  probe
  misc_feature (1)..(25): SEQ ID NO: 4183; WAN024EXT; Start 189; Stop 213
cagacagttgactaatttgacgttc

SEQ ID NO: 375634 - DNA, 25 bp, Artificial
  probe
  misc_feature (1)..(25): SEQ ID NO: 4183; WAN024EXT; Start 78; Stop 102
tgatgatttcctcactgacagagtc

SEQ ID NO: 375635 - DNA, 25 bp, Artificial
  probe
  misc_feature (1)..(25): SEQ ID NO: 4183; WAN024EXT; Start 61; Stop 85
atctctcagcgtattcatgatgatt

SEQ ID NO: 375636 - DNA, 25 bp, Artificial
  probe
  misc_feature (1)..(25): SEQ ID NO: 4183; WAN024EXT; Start 60; Stop 84
aatctctcagcgtattcatgatgat

SEQ ID NO: 375637 - DNA, 25 bp, Artificial
  probe
  misc_feature (1)..(25): SEQ ID NO: 4183; WAN024EXT; Start 191; Stop 215
gacagttgactaatttgacgttcag

SEQ ID NO: 375638 - DNA, 25 bp, Artificial
  probe
  misc_feature (1)..(25): SEQ ID NO: 4183; WAN024EXT; Start 190; Stop 214
agacagttgactaatttgacgttca

SEQ ID NO: 375639 - DNA, 25 bp, Artificial
  probe
  misc_feature (1)..(25): SEQ ID NO: 4183; WAN024EXT; Start 188; Stop 212
ccagacagttgactaatttgacgtt

SEQ ID NO: 375640 - DNA, 25 bp, Artificial
  probe
  misc_feature (1)..(25): SEQ ID NO: 4183; WAN024EXT; Start 54; Stop 78
ttttcaaatctctcagcgtattcat

SEQ ID NO: 375641 - DNA, 25 bp, Artificial
  probe
  misc_feature (1)..(25): SEQ ID NO: 4183; WAN024EXT; Start 187; Stop 211
tccagacagttgactaatttgacgt

SEQ ID NO: 375642 - DNA, 25 bp, Artificial
  probe
  misc_feature (1)..(25): SEQ ID NO: 4183; WAN024EXT; Start 116; Stop 140
ggttcatccaagaggatatagtcgg

SEQ ID NO: 375643 - DNA, 25 bp, Artificial
  probe
  misc_feature (1)..(25): SEQ ID NO: 4183; WAN024EXT; Start 192; Stop 216
acagttgactaatttgacgttcagc

SEQ ID NO: 375644 - DNA, 25 bp, Artificial
  probe
  misc_feature (1)..(25): SEQ ID NO: 4183; WAN024EXT; Start 120; Stop 144
catccaagaggatatagtcggcttc

SEQ ID NO: 375645 - DNA, 25 bp, Artificial
  probe
  misc_feature (1)..(25): SEQ ID NO: 4183; WAN024EXT; Start 177; Stop 201
ggaattgacctccagacagttgact

SEQ ID NO: 375646 - DNA, 25 bp, Artificial
  probe
  misc_feature (1)..(25): SEQ ID NO: 4183; WAN024EXT; Start 119; Stop 143
tcatccaagaggatatagtcggctt

SEQ ID NO: 375647 - DNA, 25 bp, Artificial
  probe
  misc_feature (1)..(25): SEQ ID NO: 4183; WAN024EXT; Start 118; Stop 142
ttcatccaagaggatatagtcggct

SEQ ID NO: 375648 - DNA, 25 bp, Artificial
  probe
  misc_feature (1)..(25): SEQ ID NO: 4183; WAN024EXT; Start 117; Stop 141
gttcatccaagaggatatagtcggc

SEQ ID NO: 375649 - DNA, 25 bp, Artificial
  probe
  misc_feature (1)..(25): SEQ ID NO: 4183; WAN024EXT; Start 111; Stop 135
caaagggttcatccaagaggatata

SEQ ID NO: 375650 - DNA, 25 bp, Artificial
  probe
  misc_feature (1)..(25): SEQ ID NO: 4183; WAN024EXT; Start 113; Stop 137
aagggttcatccaagaggatatagt

SEQ ID NO: 375651 - DNA, 25 bp, Artificial
  probe
  misc_feature (1)..(25): SEQ ID NO: 4183; WAN024EXT; Start 112; Stop 136
aaagggttcatccaagaggatatag

SEQ ID NO: 375652 - DNA, 25 bp, Artificial
  probe
  misc_feature (1)..(25): SEQ ID NO: 4183; WAN024EXT; Start 73; Stop 97
attcatgatgatttcctcactgaca

SEQ ID NO: 375653 - DNA, 25 bp, Artificial
  probe
  misc_feature (1)..(25): SEQ ID NO: 4183; WAN024EXT; Start 70; Stop 94
cgtattcatgatgatttcctcactg

SEQ ID NO: 375654 - DNA, 25 bp, Artificial
  probe
  misc_feature (1)..(25): SEQ ID NO: 4184; WAN024DVE; Start 18; Stop 42
gttaatcaaggacgaagagagaaga

SEQ ID NO: 375655 - DNA, 25 bp, Artificial
  probe
  misc_feature (1)..(25): SEQ ID NO: 4184; WAN024DVE; Start 17; Stop 41
agttaatcaaggacgaagagagaag

SEQ ID NO: 375656 - DNA, 25 bp, Artificial
  probe
  misc_feature (1)..(25): SEQ ID NO: 4184; WAN024DVE; Start 16; Stop 40
aagttaatcaaggacgaagagagaa

SEQ ID NO: 375657 - DNA, 25 bp, Artificial
  probe
  misc_feature (1)..(25): SEQ ID NO: 4184; WAN024DVE; Start 19; Stop 43
ttaatcaaggacgaagagagaagaa

SEQ ID NO: 375658 - DNA, 25 bp, Artificial
  probe
  misc_feature (1)..(25): SEQ ID NO: 4184; WAN024DVE; Start 880; Stop 904
gaagtcggtaaagatggagtgatta

SEQ ID NO: 375659 - DNA, 25 bp, Artificial
  probe
  misc_feature (1)..(25): SEQ ID NO: 4184; WAN024DVE; Start 20; Stop 44
taatcaaggacgaagagagaagaaa

SEQ ID NO: 375660 - DNA, 25 bp, Artificial
  probe
  misc_feature (1)..(25): SEQ ID NO: 4184; WAN024DVE; Start 1340; Stop 1364
atattgttgtgcagctattgagtca

SEQ ID NO: 375661 - DNA, 25 bp, Artificial
  probe
  misc_feature (1)..(25): SEQ ID NO: 4184; WAN024DVE; Start 15; Stop 39
aaagttaatcaaggacgaagagaga

SEQ ID NO: 375662 - DNA, 25 bp, Artificial
  probe
  misc_feature (1)..(25): SEQ ID NO: 4184; WAN024DVE; Start 532; Stop 556
ttgacaggtaagtttgctacagaaa

SEQ ID NO: 375663 - DNA, 25 bp, Artificial
  probe
  misc_feature (1)..(25): SEQ ID NO: 4184; WAN024DVE; Start 1339; Stop 1363
aatattgttgtgcagctattgagtc

SEQ ID NO: 375664 - DNA, 25 bp, Artificial
  probe
  misc_feature (1)..(25): SEQ ID NO: 4184; WAN024DVE; Start 1338; Stop 1362
gaatattgttgtgcagctattgagt

SEQ ID NO: 375665 - DNA, 25 bp, Artificial
  probe
  misc_feature (1)..(25): SEQ ID NO: 4184; WAN024DVE; Start 525; Stop 549
ttatctcttgacaggtaagtttgct

SEQ ID NO: 375666 - DNA, 25 bp, Artificial
  probe
  misc_feature (1)..(25): SEQ ID NO: 4184; WAN024DVE; Start 1337; Stop 1361
ggaatattgttgtgcagctattgag

SEQ ID NO: 375667 - DNA, 25 bp, Artificial
  probe
  misc_feature (1)..(25): SEQ ID NO: 4184; WAN024DVE; Start 527; Stop 551
atctcttgacaggtaagtttgctac

SEQ ID NO: 375668 - DNA, 25 bp, Artificial
  probe
  misc_feature (1)..(25): SEQ ID NO: 4184; WAN024DVE; Start 876; Stop 900
aaatgaagtcggtaaagatggagtg

SEQ ID NO: 375669 - DNA, 25 bp, Artificial
  probe
  misc_feature (1)..(25): SEQ ID NO: 4184; WAN024DVE; Start 875; Stop 899
caaatgaagtcggtaaagatggagt

SEQ ID NO: 375670 - DNA, 25 bp, Artificial
  probe
  misc_feature (1)..(25): SEQ ID NO: 4184; WAN024DVE; Start 526; Stop 550
tatctcttgacaggtaagtttgcta

SEQ ID NO: 375671 - DNA, 25 bp, Artificial
  probe
  misc_feature (1)..(25): SEQ ID NO: 4184; WAN024DVE; Start 1374; Stop 1398
aaacgaggatacagagttaaaggat

SEQ ID NO: 375672 - DNA, 25 bp, Artificial
  probe
  misc_feature (1)..(25): SEQ ID NO: 4184; WAN024DVE; Start 531; Stop 555
cttgacaggtaagtttgctacagaa

SEQ ID NO: 375673 - DNA, 25 bp, Artificial
  probe
  misc_feature (1)..(25): SEQ ID NO: 4184; WAN024DVE; Start 524; Stop 548
attatctcttgacaggtaagtttgc

SEQ ID NO: 375674 - DNA, 25 bp, Artificial
  probe
  misc_feature (1)..(25): SEQ ID NO: 4184; WAN024DVE; Start 1341; Stop 1365
tattgttgtgcagctattgagtcaa

SEQ ID NO: 375675 - DNA, 25 bp, Artificial
  probe
  misc_feature (1)..(25): SEQ ID NO: 4184; WAN024DVE; Start 878; Stop 902
atgaagtcggtaaagatggagtgat

SEQ ID NO: 375676 - DNA, 25 bp, Artificial
  probe
  misc_feature (1)..(25): SEQ ID NO: 4184; WAN024DVE; Start 1376; Stop 1400
acgaggatacagagttaaaggatat

SEQ ID NO: 375677 - DNA, 25 bp, Artificial
  probe
  misc_feature (1)..(25): SEQ ID NO: 4184; WAN024DVE; Start 1373; Stop 1397
taaacgaggatacagagttaaagga

SEQ ID NO: 375678 - DNA, 25 bp, Artificial
  probe
  misc_feature (1)..(25): SEQ ID NO: 4184; WAN024DVE; Start 529; Stop 553
ctcttgacaggtaagtttgctacag

SEQ ID NO: 375679 - DNA, 25 bp, Artificial
  probe
  misc_feature (1)..(25): SEQ ID NO: 4184; WAN024DVE; Start 1375; Stop 1399
aacgaggatacagagttaaaggata

SEQ ID NO: 375680 - DNA, 25 bp, Artificial
  probe
  misc_feature (1)..(25): SEQ ID NO: 4184; WAN024DVE; Start 892; Stop 916
gatggagtgattacatttctgaaga

SEQ ID NO: 375681 - DNA, 25 bp, Artificial
  probe
  misc_feature (1)..(25): SEQ ID NO: 4184; WAN024DVE; Start 879; Stop 903
tgaagtcggtaaagatggagtgatt

SEQ ID NO: 375682 - DNA, 25 bp, Artificial
  probe
  misc_feature (1)..(25): SEQ ID NO: 4184; WAN024DVE; Start 877; Stop 901
aatgaagtcggtaaagatggagtga

SEQ ID NO: 375683 - DNA, 25 bp, Artificial
  probe
  misc_feature (1)..(25): SEQ ID NO: 4184; WAN024DVE; Start 14; Stop 38
taaagttaatcaaggacgaagagag

SEQ ID NO: 375684 - DNA, 25 bp, Artificial
  probe
  misc_feature (1)..(25): SEQ ID NO: 4184; WAN024DVE; Start 891; Stop 915
agatggagtgattacatttctgaag

SEQ ID NO: 375685 - DNA, 25 bp, Artificial
  probe
  misc_feature (1)..(25): SEQ ID NO: 4184; WAN024DVE; Start 528; Stop 552
tctcttgacaggtaagtttgctaca

SEQ ID NO: 375686 - DNA, 25 bp, Artificial
  probe
  misc_feature (1)..(25): SEQ ID NO: 4184; WAN024DVE; Start 530; Stop 554
tcttgacaggtaagtttgctacaga

SEQ ID NO: 375687 - DNA, 25 bp, Artificial
  probe
  misc_feature (1)..(25): SEQ ID NO: 4185; WAN024DVF; Start 828; Stop 852
acttacttcaccgattcttactacc

SEQ ID NO: 375688 - DNA, 25 bp, Artificial
  probe
  misc_feature (1)..(25): SEQ ID NO: 4185; WAN024DVF; Start 829; Stop 853
cttacttcaccgattcttactaccg

SEQ ID NO: 375689 - DNA, 25 bp, Artificial
  probe
  misc_feature (1)..(25): SEQ ID NO: 4185; WAN024DVF; Start 825; Stop 849
ggaacttacttcaccgattcttact

SEQ ID NO: 375690 - DNA, 25 bp, Artificial
  probe
  misc_feature (1)..(25): SEQ ID NO: 4185; WAN024DVF; Start 830; Stop 854
ttacttcaccgattcttactaccga

SEQ ID NO: 375691 - DNA, 25 bp, Artificial
  probe
  misc_feature (1)..(25): SEQ ID NO: 4185; WAN024DVF; Start 824; Stop 848
tggaacttacttcaccgattcttac

SEQ ID NO: 375692 - DNA, 25 bp, Artificial
  probe
  misc_feature (1)..(25): SEQ ID NO: 4185; WAN024DVF; Start 831; Stop 855
tacttcaccgattcttactaccgaa

SEQ ID NO: 375693 - DNA, 25 bp, Artificial
  probe
  misc_feature (1)..(25): SEQ ID NO: 4185; WAN024DVF; Start 827; Stop 851
aacttacttcaccgattcttactac

SEQ ID NO: 375694 - DNA, 25 bp, Artificial
  probe
  misc_feature (1)..(25): SEQ ID NO: 4185; WAN024DVF; Start 319; Stop 343
ttacaacctgttcattatcgtgatg

SEQ ID NO: 375695 - DNA, 25 bp, Artificial
  probe
  misc_feature (1)..(25): SEQ ID NO: 4185; WAN024DVF; Start 826; Stop 850
gaacttacttcaccgattcttacta

SEQ ID NO: 375696 - DNA, 25 bp, Artificial
  probe
  misc_feature (1)..(25): SEQ ID NO: 4185; WAN024DVF; Start 823; Stop 847
gtggaacttacttcaccgattctta

SEQ ID NO: 375697 - DNA, 25 bp, Artificial
  probe
  misc_feature (1)..(25): SEQ ID NO: 4185; WAN024DVF; Start 318; Stop 342
attacaacctgttcattatcgtgat

SEQ ID NO: 375698 - DNA, 25 bp, Artificial
  probe
  misc_feature (1)..(25): SEQ ID NO: 4185; WAN024DVF; Start 841; Stop 865
attcttactaccgaatccttcagtt

SEQ ID NO: 375699 - DNA, 25 bp, Artificial
  probe
  misc_feature (1)..(25): SEQ ID NO: 4185; WAN024DVF; Start 317; Stop 341
tattacaacctgttcattatcgtga

SEQ ID NO: 375700 - DNA, 25 bp, Artificial
  probe
  misc_feature (1)..(25): SEQ ID NO: 4185; WAN024DVF; Start 334; Stop 358
tatcgtgatgaaagaacaaagggag

SEQ ID NO: 375701 - DNA, 25 bp, Artificial
  probe
  misc_feature (1)..(25): SEQ ID NO: 4185; WAN024DVF; Start 822; Stop 846
agtggaacttacttcaccgattctt

SEQ ID NO: 375702 - DNA, 25 bp, Artificial
  probe
  misc_feature (1)..(25): SEQ ID NO: 4185; WAN024DVF; Start 312; Stop 336
gctgttattacaacctgttcattat

SEQ ID NO: 375703 - DNA, 25 bp, Artificial
  probe
  misc_feature (1)..(25): SEQ ID NO: 4185; WAN024DVF; Start 353; Stop 377
agggagtgttaaaggaaatatctga

SEQ ID NO: 375704 - DNA, 25 bp, Artificial
  probe
  misc_feature (1)..(25): SEQ ID NO: 4185; WAN024DVF; Start 832; Stop 856
acttcaccgattcttactaccgaat

SEQ ID NO: 375705 - DNA, 25 bp, Artificial
  probe
  misc_feature (1)..(25): SEQ ID NO: 4185; WAN024DVF; Start 310; Stop 334
aagctgttattacaacctgttcatt

SEQ ID NO: 375706 - DNA, 25 bp, Artificial
  probe
  misc_feature (1)..(25): SEQ ID NO: 4185; WAN024DVF; Start 316; Stop 340
ttattacaacctgttcattatcgtg

SEQ ID NO: 375707 - DNA, 25 bp, Artificial
  probe
  misc_feature (1)..(25): SEQ ID NO: 4185; WAN024DVF; Start 315; Stop 339
gttattacaacctgttcattatcgt

SEQ ID NO: 375708 - DNA, 25 bp, Artificial
  probe
  misc_feature (1)..(25): SEQ ID NO: 4185; WAN024DVF; Start 314; Stop 338
tgttattacaacctgttcattatcg

SEQ ID NO: 375709 - DNA, 25 bp, Artificial
  probe
  misc_feature (1)..(25): SEQ ID NO: 4185; WAN024DVF; Start 821; Stop 845
gagtggaacttacttcaccgattct

SEQ ID NO: 375710 - DNA, 25 bp, Artificial
  probe
  misc_feature (1)..(25): SEQ ID NO: 4185; WAN024DVF; Start 354; Stop 378
gggagtgttaaaggaaatatctgaa

SEQ ID NO: 375711 - DNA, 25 bp, Artificial
  probe
  misc_feature (1)..(25): SEQ ID NO: 4185; WAN024DVF; Start 352; Stop 376
aagggagtgttaaaggaaatatctg

SEQ ID NO: 375712 - DNA, 25 bp, Artificial
  probe
  misc_feature (1)..(25): SEQ ID NO: 4185; WAN024DVF; Start 182; Stop 206
cttgggatattgactttctactagc

SEQ ID NO: 375713 - DNA, 25 bp, Artificial
  probe
  misc_feature (1)..(25): SEQ ID NO: 4185; WAN024DVF; Start 308; Stop 332
gtaagctgttattacaacctgttca

SEQ ID NO: 375714 - DNA, 25 bp, Artificial
  probe
  misc_feature (1)..(25): SEQ ID NO: 4185; WAN024DVF; Start 311; Stop 335
agctgttattacaacctgttcatta

SEQ ID NO: 375715 - DNA, 25 bp, Artificial
  probe
  misc_feature (1)..(25): SEQ ID NO: 4185; WAN024DVF; Start 309; Stop 333
taagctgttattacaacctgttcat

SEQ ID NO: 375716 - DNA, 25 bp, Artificial
  probe
  misc_feature (1)..(25): SEQ ID NO: 4185; WAN024DVF; Start 320; Stop 344
tacaacctgttcattatcgtgatga

SEQ ID NO: 375717 - DNA, 25 bp, Artificial
  probe
  misc_feature (1)..(25): SEQ ID NO: 4185; WAN024DVF; Start 307; Stop 331
ggtaagctgttattacaacctgttc

SEQ ID NO: 375718 - DNA, 25 bp, Artificial
  probe
  misc_feature (1)..(25): SEQ ID NO: 4185; WAN024DVF; Start 170; Stop 194
aagggcatttatcttgggatattga

SEQ ID NO: 375719 - DNA, 25 bp, Artificial
  probe
  misc_feature (1)..(25): SEQ ID NO: 4185; WAN024DVF; Start 1393; Stop 1417
caccatgttattgaggagtttctac

SEQ ID NO: 375720 - DNA, 25 bp, Artificial
  probe
  misc_feature (1)..(25): SEQ ID NO: 4186; WAN024C84; Start 438; Stop 462
ccaaggaattatcggtgctatcatt

SEQ ID NO: 375721 - DNA, 25 bp, Artificial
  probe
  misc_feature (1)..(25): SEQ ID NO: 4186; WAN024C84; Start 439; Stop 463
caaggaattatcggtgctatcatta

SEQ ID NO: 375722 - DNA, 25 bp, Artificial
  probe
  misc_feature (1)..(25): SEQ ID NO: 4186; WAN024C84; Start 516; Stop 540
tattaagatgccagaacaagttcca

SEQ ID NO: 375723 - DNA, 25 bp, Artificial
  probe
  misc_feature (1)..(25): SEQ ID NO: 4186; WAN024C84; Start 515; Stop 539
ttattaagatgccagaacaagttcc

SEQ ID NO: 375724 - DNA, 25 bp, Artificial
  probe
  misc_feature (1)..(25): SEQ ID NO: 4186; WAN024C84; Start 440; Stop 464
aaggaattatcggtgctatcattat

SEQ ID NO: 375725 - DNA, 25 bp, Artificial
  probe
  misc_feature (1)..(25): SEQ ID NO: 4186; WAN024C84; Start 517; Stop 541
attaagatgccagaacaagttccac

SEQ ID NO: 375726 - DNA, 25 bp, Artificial
  probe
  misc_feature (1)..(25): SEQ ID NO: 4186; WAN024C84; Start 514; Stop 538
gttattaagatgccagaacaagttc

SEQ ID NO: 375727 - DNA, 25 bp, Artificial
  probe
  misc_feature (1)..(25): SEQ ID NO: 4186; WAN024C84; Start 333; Stop 357
tggagttctatctgtatctgcattc

SEQ ID NO: 375728 - DNA, 25 bp, Artificial
  probe
  misc_feature (1)..(25): SEQ ID NO: 4186; WAN024C84; Start 332; Stop 356
ctggagttctatctgtatctgcatt

SEQ ID NO: 375729 - DNA, 25 bp, Artificial
  probe
  misc_feature (1)..(25): SEQ ID NO: 4186; WAN024C84; Start 334; Stop 358
ggagttctatctgtatctgcattct

SEQ ID NO: 375730 - DNA, 25 bp, Artificial
  probe
  misc_feature (1)..(25): SEQ ID NO: 4186; WAN024C84; Start 767; Stop 791
aatcggtagtaaatggagtagtgac

SEQ ID NO: 375731 - DNA, 25 bp, Artificial
  probe
  misc_feature (1)..(25): SEQ ID NO: 4186; WAN024C84; Start 766; Stop 790
caatcggtagtaaatggagtagtga

SEQ ID NO: 375732 - DNA, 25 bp, Artificial
  probe
  misc_feature (1)..(25): SEQ ID NO: 4186; WAN024C84; Start 60; Stop 84
gatgatgaagtttgtgaatatgcgt

SEQ ID NO: 375733 - DNA, 25 bp, Artificial
  probe
  misc_feature (1)..(25): SEQ ID NO: 4186; WAN024C84; Start 57; Stop 81
accgatgatgaagtttgtgaatatg

SEQ ID NO: 375734 - DNA, 25 bp, Artificial
  probe
  misc_feature (1)..(25): SEQ ID NO: 4186; WAN024C84; Start 61; Stop 85
atgatgaagtttgtgaatatgcgtg

SEQ ID NO: 375735 - DNA, 25 bp, Artificial
  probe
  misc_feature (1)..(25): SEQ ID NO: 4186; WAN024C84; Start 768; Stop 792
atcggtagtaaatggagtagtgaca

SEQ ID NO: 375736 - DNA, 25 bp, Artificial
  probe
  misc_feature (1)..(25): SEQ ID NO: 4186; WAN024C84; Start 441; Stop 465
aggaattatcggtgctatcattata

SEQ ID NO: 375737 - DNA, 25 bp, Artificial
  probe
  misc_feature (1)..(25): SEQ ID NO: 4186; WAN024C84; Start 903; Stop 927
aattctatcaggttcagggattacg

SEQ ID NO: 375738 - DNA, 25 bp, Artificial
  probe
  misc_feature (1)..(25): SEQ ID NO: 4186; WAN024C84; Start 58; Stop 82
ccgatgatgaagtttgtgaatatgc

SEQ ID NO: 375739 - DNA, 25 bp, Artificial
  probe
  misc_feature (1)..(25): SEQ ID NO: 4186; WAN024C84; Start 1030; Stop 1054
gttgtatttggatttccgattgtca

SEQ ID NO: 375740 - DNA, 25 bp, Artificial
  probe
  misc_feature (1)..(25): SEQ ID NO: 4186; WAN024C84; Start 1029; Stop 1053
agttgtatttggatttccgattgtc

SEQ ID NO: 375741 - DNA, 25 bp, Artificial
  probe
  misc_feature (1)..(25): SEQ ID NO: 4186; WAN024C84; Start 1028; Stop 1052
cagttgtatttggatttccgattgt

SEQ ID NO: 375742 - DNA, 25 bp, Artificial
  probe
  misc_feature (1)..(25): SEQ ID NO: 4186; WAN024C84; Start 59; Stop 83
cgatgatgaagtttgtgaatatgcg

SEQ ID NO: 375743 - DNA, 25 bp, Artificial
  probe
  misc_feature (1)..(25): SEQ ID NO: 4186; WAN024C84; Start 1031; Stop 1055
ttgtatttggatttccgattgtcat

SEQ ID NO: 375744 - DNA, 25 bp, Artificial
  probe
  misc_feature (1)..(25): SEQ ID NO: 4186; WAN024C84; Start 769; Stop 793
tcggtagtaaatggagtagtgacag

SEQ ID NO: 375745 - DNA, 25 bp, Artificial
  probe
  misc_feature (1)..(25): SEQ ID NO: 4186; WAN024C84; Start 445; Stop 469
attatcggtgctatcattataggtt

SEQ ID NO: 375746 - DNA, 25 bp, Artificial
  probe
  misc_feature (1)..(25): SEQ ID NO: 4186; WAN024C84; Start 444; Stop 468
aattatcggtgctatcattataggt

SEQ ID NO: 375747 - DNA, 25 bp, Artificial
  probe
  misc_feature (1)..(25): SEQ ID NO: 4186; WAN024C84; Start 437; Stop 461
gccaaggaattatcggtgctatcat

SEQ ID NO: 375748 - DNA, 25 bp, Artificial
  probe
  misc_feature (1)..(25): SEQ ID NO: 4186; WAN024C84; Start 1103; Stop 1127
ctgtgatagtatatggagctattgc

SEQ ID NO: 375749 - DNA, 25 bp, Artificial
  probe
  misc_feature (1)..(25): SEQ ID NO: 4186; WAN024C84; Start 1075; Stop 1099
cctttcattcttgttcctgtacttg

SEQ ID NO: 375750 - DNA, 25 bp, Artificial
  probe
  misc_feature (1)..(25): SEQ ID NO: 4186; WAN024C84; Start 1067; Stop 1091
tgtttgtacctttcattcttgttcc

SEQ ID NO: 375751 - DNA, 25 bp, Artificial
  probe
  misc_feature (1)..(25): SEQ ID NO: 4186; WAN024C84; Start 1074; Stop 1098
acctttcattcttgttcctgtactt

SEQ ID NO: 375752 - DNA, 25 bp, Artificial
  probe
  misc_feature (1)..(25): SEQ ID NO: 4186; WAN024C84; Start 1071; Stop 1095
tgtacctttcattcttgttcctgta

SEQ ID NO: 375753 - DNA, 25 bp, Artificial
  probe
  misc_feature (1)..(25): SEQ ID NO: 4187; WAN024FY3; Start 125; Stop 149
aacttcatcttataggtcttagccc

SEQ ID NO: 375754 - DNA, 25 bp, Artificial
  probe
  misc_feature (1)..(25): SEQ ID NO: 4187; WAN024FY3; Start 121; Stop 145
gccaaacttcatcttataggtctta

SEQ ID NO: 375755 - DNA, 25 bp, Artificial
  probe
  misc_feature (1)..(25): SEQ ID NO: 4187; WAN024FY3; Start 124; Stop 148
aaacttcatcttataggtcttagcc

SEQ ID NO: 375756 - DNA, 25 bp, Artificial
  probe
  misc_feature (1)..(25): SEQ ID NO: 4187; WAN024FY3; Start 173; Stop 197
tgtcccatacaaataccaaagattg

SEQ ID NO: 375757 - DNA, 25 bp, Artificial
  probe
  misc_feature (1)..(25): SEQ ID NO: 4187; WAN024FY3; Start 172; Stop 196
gtgtcccatacaaataccaaagatt

SEQ ID NO: 375758 - DNA, 25 bp, Artificial
  probe
  misc_feature (1)..(25): SEQ ID NO: 4187; WAN024FY3; Start 163; Stop 187
aaagagttggtgtcccatacaaata

SEQ ID NO: 375759 - DNA, 25 bp, Artificial
  probe
  misc_feature (1)..(25): SEQ ID NO: 4187; WAN024FY3; Start 164; Stop 188
aagagttggtgtcccatacaaatac

SEQ ID NO: 375760 - DNA, 25 bp, Artificial
  probe
  misc_feature (1)..(25): SEQ ID NO: 4187; WAN024FY3; Start 123; Stop 147
caaacttcatcttataggtcttagc

SEQ ID NO: 375761 - DNA, 25 bp, Artificial
  probe
  misc_feature (1)..(25): SEQ ID NO: 4187; WAN024FY3; Start 171; Stop 195
ggtgtcccatacaaataccaaagat

SEQ ID NO: 375762 - DNA, 25 bp, Artificial
  probe
  misc_feature (1)..(25): SEQ ID NO: 4187; WAN024FY3; Start 162; Stop 186
caaagagttggtgtcccatacaaat

SEQ ID NO: 375763 - DNA, 25 bp, Artificial
  probe
  misc_feature (1)..(25): SEQ ID NO: 4187; WAN024FY3; Start 122; Stop 146
ccaaacttcatcttataggtcttag

SEQ ID NO: 375764 - DNA, 25 bp, Artificial
  probe
  misc_feature (1)..(25): SEQ ID NO: 4187; WAN024FY3; Start 165; Stop 189
agagttggtgtcccatacaaatacc

SEQ ID NO: 375765 - DNA, 25 bp, Artificial
  probe
  misc_feature (1)..(25): SEQ ID NO: 4187; WAN024FY3; Start 126; Stop 150
acttcatcttataggtcttagcccc

SEQ ID NO: 375766 - DNA, 25 bp, Artificial
  probe
  misc_feature (1)..(25): SEQ ID NO: 4187; WAN024FY3; Start 5; Stop 29
gtaataatcaagtgctctggcaaat

SEQ ID NO: 375767 - DNA, 25 bp, Artificial
  probe
  misc_feature (1)..(25): SEQ ID NO: 4187; WAN024FY3; Start 6; Stop 30
taataatcaagtgctctggcaaatc

SEQ ID NO: 375768 - DNA, 25 bp, Artificial
  probe
  misc_feature (1)..(25): SEQ ID NO: 4187; WAN024FY3; Start 62; Stop 86
ctggtgaagtctactcgtcctgttg

SEQ ID NO: 375769 - DNA, 25 bp, Artificial
  probe
  misc_feature (1)..(25): SEQ ID NO: 4187; WAN024FY3; Start 1; Stop 25
gtgggtaataatcaagtgctctggc

SEQ ID NO: 375770 - DNA, 25 bp, Artificial
  probe
  misc_feature (1)..(25): SEQ ID NO: 4187; WAN024FY3; Start 120; Stop 144
ggccaaacttcatcttataggtctt

SEQ ID NO: 375771 - DNA, 25 bp, Artificial
  probe
  misc_feature (1)..(25): SEQ ID NO: 4187; WAN024FY3; Start 131; Stop 155
atcttataggtcttagccccgtttg

SEQ ID NO: 375772 - DNA, 25 bp, Artificial
  probe
  misc_feature (1)..(25): SEQ ID NO: 4187; WAN024FY3; Start 130; Stop 154
catcttataggtcttagccccgttt

SEQ ID NO: 375773 - DNA, 25 bp, Artificial
  probe
  misc_feature (1)..(25): SEQ ID NO: 4187; WAN024FY3; Start 127; Stop 151
cttcatcttataggtcttagccccg

SEQ ID NO: 375774 - DNA, 25 bp, Artificial
  probe
  misc_feature (1)..(25): SEQ ID NO: 4187; WAN024FY3; Start 4; Stop 28
ggtaataatcaagtgctctggcaaa

SEQ ID NO: 375775 - DNA, 25 bp, Artificial
  probe
  misc_feature (1)..(25): SEQ ID NO: 4187; WAN024FY3; Start 7; Stop 31
aataatcaagtgctctggcaaatcc

SEQ ID NO: 375776 - DNA, 25 bp, Artificial
  probe
  misc_feature (1)..(25): SEQ ID NO: 4187; WAN024FY3; Start 219; Stop 243
gaatcatgtcgagtgcttgtggaac

SEQ ID NO: 375777 - DNA, 25 bp, Artificial
  probe
  misc_feature (1)..(25): SEQ ID NO: 4187; WAN024FY3; Start 129; Stop 153
tcatcttataggtcttagccccgtt

SEQ ID NO: 375778 - DNA, 25 bp, Artificial
  probe
  misc_feature (1)..(25): SEQ ID NO: 4187; WAN024FY3; Start 128; Stop 152
ttcatcttataggtcttagccccgt

SEQ ID NO: 375779 - DNA, 25 bp, Artificial
  probe
  misc_feature (1)..(25): SEQ ID NO: 4187; WAN024FY3; Start 8; Stop 32
ataatcaagtgctctggcaaatcct

SEQ ID NO: 375780 - DNA, 25 bp, Artificial
  probe
  misc_feature (1)..(25): SEQ ID NO: 4187; WAN024FY3; Start 161; Stop 185
gcaaagagttggtgtcccatacaaa

SEQ ID NO: 375781 - DNA, 25 bp, Artificial
  probe
  misc_feature (1)..(25): SEQ ID NO: 4187; WAN024FY3; Start 51; Stop 75
catggttctggctggtgaagtctac

SEQ ID NO: 375782 - DNA, 25 bp, Artificial
  probe
  misc_feature (1)..(25): SEQ ID NO: 4187; WAN024FY3; Start 9; Stop 33
taatcaagtgctctggcaaatcctc

SEQ ID NO: 375783 - DNA, 25 bp, Artificial
  probe
  misc_feature (1)..(25): SEQ ID NO: 4187; WAN024FY3; Start 3; Stop 27
gggtaataatcaagtgctctggcaa

SEQ ID NO: 375784 - DNA, 25 bp, Artificial
  probe
  misc_feature (1)..(25): SEQ ID NO: 4187; WAN024FY3; Start 175; Stop 199
tcccatacaaataccaaagattgga

SEQ ID NO: 375785 - DNA, 25 bp, Artificial
  probe
  misc_feature (1)..(25): SEQ ID NO: 4187; WAN024FY3; Start 174; Stop 198
gtcccatacaaataccaaagattgg

SEQ ID NO: 375786 - DNA, 25 bp, Artificial
  probe
  misc_feature (1)..(25): SEQ ID NO: 4188; WAN024CKW; Start 392; Stop 416
aagaggcaattacacgattagagaa

SEQ ID NO: 375787 - DNA, 25 bp, Artificial
  probe
  misc_feature (1)..(25): SEQ ID NO: 4188; WAN024CKW; Start 389; Stop 413
aagaagaggcaattacacgattaga

SEQ ID NO: 375788 - DNA, 25 bp, Artificial
  probe
  misc_feature (1)..(25): SEQ ID NO: 4188; WAN024CKW; Start 393; Stop 417
agaggcaattacacgattagagaat

SEQ ID NO: 375789 - DNA, 25 bp, Artificial
  probe
  misc_feature (1)..(25): SEQ ID NO: 4188; WAN024CKW; Start 391; Stop 415
gaagaggcaattacacgattagaga

SEQ ID NO: 375790 - DNA, 25 bp, Artificial
  probe
  misc_feature (1)..(25): SEQ ID NO: 4188; WAN024CKW; Start 390; Stop 414
agaagaggcaattacacgattagag

SEQ ID NO: 375791 - DNA, 25 bp, Artificial
  probe
  misc_feature (1)..(25): SEQ ID NO: 4188; WAN024CKW; Start 402; Stop 426
tacacgattagagaatatgctacct

SEQ ID NO: 375792 - DNA, 25 bp, Artificial
  probe
  misc_feature (1)..(25): SEQ ID NO: 4188; WAN024CKW; Start 198; Stop 222
ggttgtagaggaagtcaatgagtta

SEQ ID NO: 375793 - DNA, 25 bp, Artificial
  probe
  misc_feature (1)..(25): SEQ ID NO: 4188; WAN024CKW; Start 205; Stop 229
gaggaagtcaatgagttatcagagt

SEQ ID NO: 375794 - DNA, 25 bp, Artificial
  probe
  misc_feature (1)..(25): SEQ ID NO: 4188; WAN024CKW; Start 204; Stop 228
agaggaagtcaatgagttatcagag

SEQ ID NO: 375795 - DNA, 25 bp, Artificial
  probe
  misc_feature (1)..(25): SEQ ID NO: 4188; WAN024CKW; Start 206; Stop 230
aggaagtcaatgagttatcagagtt

SEQ ID NO: 375796 - DNA, 25 bp, Artificial
  probe
  misc_feature (1)..(25): SEQ ID NO: 4188; WAN024CKW; Start 404; Stop 428
cacgattagagaatatgctacctca

SEQ ID NO: 375797 - DNA, 25 bp, Artificial
  probe
  misc_feature (1)..(25): SEQ ID NO: 4188; WAN024CKW; Start 403; Stop 427
acacgattagagaatatgctacctc

SEQ ID NO: 375798 - DNA, 25 bp, Artificial
  probe
  misc_feature (1)..(25): SEQ ID NO: 4188; WAN024CKW; Start 394; Stop 418
gaggcaattacacgattagagaata

SEQ ID NO: 375799 - DNA, 25 bp, Artificial
  probe
  misc_feature (1)..(25): SEQ ID NO: 4188; WAN024CKW; Start 406; Stop 430
cgattagagaatatgctacctcagt

SEQ ID NO: 375800 - DNA, 25 bp, Artificial
  probe
  misc_feature (1)..(25): SEQ ID NO: 4188; WAN024CKW; Start 405; Stop 429
acgattagagaatatgctacctcag

SEQ ID NO: 375801 - DNA, 25 bp, Artificial
  probe
  misc_feature (1)..(25): SEQ ID NO: 4188; WAN024CKW; Start 201; Stop 225
tgtagaggaagtcaatgagttatca

SEQ ID NO: 375802 - DNA, 25 bp, Artificial
  probe
  misc_feature (1)..(25): SEQ ID NO: 4188; WAN024CKW; Start 197; Stop 221
aggttgtagaggaagtcaatgagtt

SEQ ID NO: 375803 - DNA, 25 bp, Artificial
  probe
  misc_feature (1)..(25): SEQ ID NO: 4188; WAN024CKW; Start 401; Stop 425
ttacacgattagagaatatgctacc

SEQ ID NO: 375804 - DNA, 25 bp, Artificial
  probe
  misc_feature (1)..(25): SEQ ID NO: 4188; WAN024CKW; Start 202; Stop 226
gtagaggaagtcaatgagttatcag

SEQ ID NO: 375805 - DNA, 25 bp, Artificial
  probe
  misc_feature (1)..(25): SEQ ID NO: 4188; WAN024CKW; Start 396; Stop 420
ggcaattacacgattagagaatatg

SEQ ID NO: 375806 - DNA, 25 bp, Artificial
  probe
  misc_feature (1)..(25): SEQ ID NO: 4188; WAN024CKW; Start 199; Stop 223
gttgtagaggaagtcaatgagttat

SEQ ID NO: 375807 - DNA, 25 bp, Artificial
  probe
  misc_feature (1)..(25): SEQ ID NO: 4188; WAN024CKW; Start 203; Stop 227
tagaggaagtcaatgagttatcaga

SEQ ID NO: 375808 - DNA, 25 bp, Artificial
  probe
  misc_feature (1)..(25): SEQ ID NO: 4188; WAN024CKW; Start 395; Stop 419
aggcaattacacgattagagaatat

SEQ ID NO: 375809 - DNA, 25 bp, Artificial
  probe
  misc_feature (1)..(25): SEQ ID NO: 4188; WAN024CKW; Start 200; Stop 224
ttgtagaggaagtcaatgagttatc

SEQ ID NO: 375810 - DNA, 25 bp, Artificial
  probe
  misc_feature (1)..(25): SEQ ID NO: 4188; WAN024CKW; Start 196; Stop 220
caggttgtagaggaagtcaatgagt

SEQ ID NO: 375811 - DNA, 25 bp, Artificial
  probe
  misc_feature (1)..(25): SEQ ID NO: 4188; WAN024CKW; Start 520; Stop 544
attagagacaagctagagcatcaag

SEQ ID NO: 375812 - DNA, 25 bp, Artificial
  probe
  misc_feature (1)..(25): SEQ ID NO: 4188; WAN024CKW; Start 514; Stop 538
aatgagattagagacaagctagagc

SEQ ID NO: 375813 - DNA, 25 bp, Artificial
  probe
  misc_feature (1)..(25): SEQ ID NO: 4188; WAN024CKW; Start 519; Stop 543
gattagagacaagctagagcatcaa

SEQ ID NO: 375814 - DNA, 25 bp, Artificial
  probe
  misc_feature (1)..(25): SEQ ID NO: 4188; WAN024CKW; Start 517; Stop 541
gagattagagacaagctagagcatc

SEQ ID NO: 375815 - DNA, 25 bp, Artificial
  probe
  misc_feature (1)..(25): SEQ ID NO: 4188; WAN024CKW; Start 97; Stop 121
attagtcgattagagagtggagagt

SEQ ID NO: 375816 - DNA, 25 bp, Artificial
  probe
  misc_feature (1)..(25): SEQ ID NO: 4188; WAN024CKW; Start 98; Stop 122
ttagtcgattagagagtggagagtt

SEQ ID NO: 375817 - DNA, 25 bp, Artificial
  probe
  misc_feature (1)..(25): SEQ ID NO: 4188; WAN024CKW; Start 680; Stop 704
gtaaggagtacaggacaacttatct

SEQ ID NO: 375818 - DNA, 25 bp, Artificial
  probe
  misc_feature (1)..(25): SEQ ID NO: 4188; WAN024CKW; Start 516; Stop 540
tgagattagagacaagctagagcat

SEQ ID NO: 375819 - DNA, 25 bp, Artificial
  probe
  misc_feature (1)..(25): SEQ ID NO: 4189; WAN024DGF; Start 4; Stop 28
ggtatcttgtcgattattcttggtt

SEQ ID NO: 375820 - DNA, 25 bp, Artificial
  probe
  misc_feature (1)..(25): SEQ ID NO: 4189; WAN024DGF; Start 3; Stop 27
gggtatcttgtcgattattcttggt

SEQ ID NO: 375821 - DNA, 25 bp, Artificial
  probe
  misc_feature (1)..(25): SEQ ID NO: 4189; WAN024DGF; Start 2; Stop 26
tgggtatcttgtcgattattcttgg

SEQ ID NO: 375822 - DNA, 25 bp, Artificial
  probe
  misc_feature (1)..(25): SEQ ID NO: 4189; WAN024DGF; Start 1; Stop 25
gtgggtatcttgtcgattattcttg

SEQ ID NO: 375823 - DNA, 25 bp, Artificial
  probe
  misc_feature (1)..(25): SEQ ID NO: 4189; WAN024DGF; Start 8; Stop 32
tcttgtcgattattcttggtttgtt

SEQ ID NO: 375824 - DNA, 25 bp, Artificial
  probe
  misc_feature (1)..(25): SEQ ID NO: 4189; WAN024DGF; Start 137; Stop 161
tcttaggaattgtgatttctgtagt

SEQ ID NO: 375825 - DNA, 25 bp, Artificial
  probe
  misc_feature (1)..(25): SEQ ID NO: 4189; WAN024DGF; Start 7; Stop 31
atcttgtcgattattcttggtttgt

SEQ ID NO: 375826 - DNA, 25 bp, Artificial
  probe
  misc_feature (1)..(25): SEQ ID NO: 4189; WAN024DGF; Start 14; Stop 38
cgattattcttggtttgttatttcc

SEQ ID NO: 375827 - DNA, 25 bp, Artificial
  probe
  misc_feature (1)..(25): SEQ ID NO: 4189; WAN024DGF; Start 138; Stop 162
cttaggaattgtgatttctgtagtt

SEQ ID NO: 375828 - DNA, 25 bp, Artificial
  probe
  misc_feature (1)..(25): SEQ ID NO: 4189; WAN024DGF; Start 9; Stop 33
cttgtcgattattcttggtttgtta

SEQ ID NO: 375829 - DNA, 25 bp, Artificial
  probe
  misc_feature (1)..(25): SEQ ID NO: 4189; WAN024DGF; Start 53; Stop 77
ttttgggtatcataggattggtctt

SEQ ID NO: 375830 - DNA, 25 bp, Artificial
  probe
  misc_feature (1)..(25): SEQ ID NO: 4189; WAN024DGF; Start 52; Stop 76
attttgggtatcataggattggtct

SEQ ID NO: 375831 - DNA, 25 bp, Artificial
  probe
  misc_feature (1)..(25): SEQ ID NO: 4189; WAN024DGF; Start 51; Stop 75
gattttgggtatcataggattggtc

SEQ ID NO: 375832 - DNA, 25 bp, Artificial
  probe
  misc_feature (1)..(25): SEQ ID NO: 4189; WAN024DGF; Start 6; Stop 30
tatcttgtcgattattcttggtttg

SEQ ID NO: 375833 - DNA, 25 bp, Artificial
  probe
  misc_feature (1)..(25): SEQ ID NO: 4189; WAN024DGF; Start 5; Stop 29
gtatcttgtcgattattcttggttt

SEQ ID NO: 375834 - DNA, 25 bp, Artificial
  probe
  misc_feature (1)..(25): SEQ ID NO: 4189; WAN024DGF; Start 136; Stop 160
atcttaggaattgtgatttctgtag

SEQ ID NO: 375835 - DNA, 25 bp, Artificial
  probe
  misc_feature (1)..(25): SEQ ID NO: 4189; WAN024DGF; Start 11; Stop 35
tgtcgattattcttggtttgttatt

SEQ ID NO: 375836 - DNA, 25 bp, Artificial
  probe
  misc_feature (1)..(25): SEQ ID NO: 4189; WAN024DGF; Start 10; Stop 34
ttgtcgattattcttggtttgttat

SEQ ID NO: 375837 - DNA, 25 bp, Artificial
  probe
  misc_feature (1)..(25): SEQ ID NO: 4189; WAN024DGF; Start 25; Stop 49
ggtttgttatttccaattgtaggcc

SEQ ID NO: 375838 - DNA, 25 bp, Artificial
  probe
  misc_feature (1)..(25): SEQ ID NO: 4189; WAN024DGF; Start 134; Stop 158
atatcttaggaattgtgatttctgt

SEQ ID NO: 375839 - DNA, 25 bp, Artificial
  probe
  misc_feature (1)..(25): SEQ ID NO: 4189; WAN024DGF; Start 140; Stop 164
taggaattgtgatttctgtagttaa

SEQ ID NO: 375840 - DNA, 25 bp, Artificial
  probe
  misc_feature (1)..(25): SEQ ID NO: 4189; WAN024DGF; Start 139; Stop 163
ttaggaattgtgatttctgtagtta

SEQ ID NO: 375841 - DNA, 25 bp, Artificial
  probe
  misc_feature (1)..(25): SEQ ID NO: 4189; WAN024DGF; Start 12; Stop 36
gtcgattattcttggtttgttattt

SEQ ID NO: 375842 - DNA, 25 bp, Artificial
  probe
  misc_feature (1)..(25): SEQ ID NO: 4189; WAN024DGF; Start 24; Stop 48
tggtttgttatttccaattgtaggc

SEQ ID NO: 375843 - DNA, 25 bp, Artificial
  probe
  misc_feature (1)..(25): SEQ ID NO: 4189; WAN024DGF; Start 141; Stop 165
aggaattgtgatttctgtagttaac

SEQ ID NO: 375844 - DNA, 25 bp, Artificial
  probe
  misc_feature (1)..(25): SEQ ID NO: 4189; WAN024DGF; Start 13; Stop 37
tcgattattcttggtttgttatttc

SEQ ID NO: 375845 - DNA, 25 bp, Artificial
  probe
  misc_feature (1)..(25): SEQ ID NO: 4189; WAN024DGF; Start 135; Stop 159
tatcttaggaattgtgatttctgta

SEQ ID NO: 375846 - DNA, 25 bp, Artificial
  probe
  misc_feature (1)..(25): SEQ ID NO: 4189; WAN024DGF; Start 15; Stop 39
gattattcttggtttgttatttcca

SEQ ID NO: 375847 - DNA, 25 bp, Artificial
  probe
  misc_feature (1)..(25): SEQ ID NO: 4189; WAN024DGF; Start 50; Stop 74
tgattttgggtatcataggattggt

SEQ ID NO: 375848 - DNA, 25 bp, Artificial
  probe
  misc_feature (1)..(25): SEQ ID NO: 4189; WAN024DGF; Start 47; Stop 71
gcctgattttgggtatcataggatt

SEQ ID NO: 375849 - DNA, 25 bp, Artificial
  probe
  misc_feature (1)..(25): SEQ ID NO: 4189; WAN024DGF; Start 49; Stop 73
ctgattttgggtatcataggattgg

SEQ ID NO: 375850 - DNA, 25 bp, Artificial
  probe
  misc_feature (1)..(25): SEQ ID NO: 4189; WAN024DGF; Start 48; Stop 72
cctgattttgggtatcataggattg

SEQ ID NO: 375851 - DNA, 25 bp, Artificial
  probe
  misc_feature (1)..(25): SEQ ID NO: 4189; WAN024DGF; Start 133; Stop 157
aatatcttaggaattgtgatttctg

SEQ ID NO: 375852 - DNA, 25 bp, Artificial
  probe
  misc_feature (1)..(25): SEQ ID NO: 4190; WAN024C97; Start 556; Stop 580
gaagaagcagatactacatacggta

SEQ ID NO: 375853 - DNA, 25 bp, Artificial
  probe
  misc_feature (1)..(25): SEQ ID NO: 4190; WAN024C97; Start 557; Stop 581
aagaagcagatactacatacggtaa

SEQ ID NO: 375854 - DNA, 25 bp, Artificial
  probe
  misc_feature (1)..(25): SEQ ID NO: 4190; WAN024C97; Start 492; Stop 516
tgaaggatactctgaaggaactgtt

SEQ ID NO: 375855 - DNA, 25 bp, Artificial
  probe
  misc_feature (1)..(25): SEQ ID NO: 4190; WAN024C97; Start 491; Stop 515
ctgaaggatactctgaaggaactgt

SEQ ID NO: 375856 - DNA, 25 bp, Artificial
  probe
  misc_feature (1)..(25): SEQ ID NO: 4190; WAN024C97; Start 555; Stop 579
ggaagaagcagatactacatacggt

SEQ ID NO: 375857 - DNA, 25 bp, Artificial
  probe
  misc_feature (1)..(25): SEQ ID NO: 4190; WAN024C97; Start 493; Stop 517
gaaggatactctgaaggaactgttc

SEQ ID NO: 375858 - DNA, 25 bp, Artificial
  probe
  misc_feature (1)..(25): SEQ ID NO: 4190; WAN024C97; Start 490; Stop 514
gctgaaggatactctgaaggaactg

SEQ ID NO: 375859 - DNA, 25 bp, Artificial
  probe
  misc_feature (1)..(25): SEQ ID NO: 4190; WAN024C97; Start 288; Stop 312
acaagtacacatcaacatcatcgaa

SEQ ID NO: 375860 - DNA, 25 bp, Artificial
  probe
  misc_feature (1)..(25): SEQ ID NO: 4190; WAN024C97; Start 287; Stop 311
aacaagtacacatcaacatcatcga

SEQ ID NO: 375861 - DNA, 25 bp, Artificial
  probe
  misc_feature (1)..(25): SEQ ID NO: 4190; WAN024C97; Start 552; Stop 576
ttgggaagaagcagatactacatac

SEQ ID NO: 375862 - DNA, 25 bp, Artificial
  probe
  misc_feature (1)..(25): SEQ ID NO: 4190; WAN024C97; Start 488; Stop 512
gtgctgaaggatactctgaaggaac

SEQ ID NO: 375863 - DNA, 25 bp, Artificial
  probe
  misc_feature (1)..(25): SEQ ID NO: 4190; WAN024C97; Start 562; Stop 586
gcagatactacatacggtaaacttg

SEQ ID NO: 375864 - DNA, 25 bp, Artificial
  probe
  misc_feature (1)..(25): SEQ ID NO: 4190; WAN024C97; Start 561; Stop 585
agcagatactacatacggtaaactt

SEQ ID NO: 375865 - DNA, 25 bp, Artificial
  probe
  misc_feature (1)..(25): SEQ ID NO: 4190; WAN024C97; Start 560; Stop 584
aagcagatactacatacggtaaact

SEQ ID NO: 375866 - DNA, 25 bp, Artificial
  probe
  misc_feature (1)..(25): SEQ ID NO: 4190; WAN024C97; Start 489; Stop 513
tgctgaaggatactctgaaggaact

SEQ ID NO: 375867 - DNA, 25 bp, Artificial
  probe
  misc_feature (1)..(25): SEQ ID NO: 4190; WAN024C97; Start 565; Stop 589
gatactacatacggtaaacttggtg

SEQ ID NO: 375868 - DNA, 25 bp, Artificial
  probe
  misc_feature (1)..(25): SEQ ID NO: 4190; WAN024C97; Start 559; Stop 583
gaagcagatactacatacggtaaac

SEQ ID NO: 375869 - DNA, 25 bp, Artificial
  probe
  misc_feature (1)..(25): SEQ ID NO: 4190; WAN024C97; Start 558; Stop 582
agaagcagatactacatacggtaaa

SEQ ID NO: 375870 - DNA, 25 bp, Artificial
  probe
  misc_feature (1)..(25): SEQ ID NO: 4190; WAN024C97; Start 551; Stop 575
cttgggaagaagcagatactacata

SEQ ID NO: 375871 - DNA, 25 bp, Artificial
  probe
  misc_feature (1)..(25): SEQ ID NO: 4190; WAN024C97; Start 564; Stop 588
agatactacatacggtaaacttggt

SEQ ID NO: 375872 - DNA, 25 bp, Artificial
  probe
  misc_feature (1)..(25): SEQ ID NO: 4190; WAN024C97; Start 563; Stop 587
cagatactacatacggtaaacttgg

SEQ ID NO: 375873 - DNA, 25 bp, Artificial
  probe
  misc_feature (1)..(25): SEQ ID NO: 4190; WAN024C97; Start 596; Stop 620
tatggatctaccgtggtgaagttct

SEQ ID NO: 375874 - DNA, 25 bp, Artificial
  probe
  misc_feature (1)..(25): SEQ ID NO: 4190; WAN024C97; Start 595; Stop 619
gtatggatctaccgtggtgaagttc

SEQ ID NO: 375875 - DNA, 25 bp, Artificial
  probe
  misc_feature (1)..(25): SEQ ID NO: 4190; WAN024C97; Start 286; Stop 310
aaacaagtacacatcaacatcatcg

SEQ ID NO: 375876 - DNA, 25 bp, Artificial
  probe
  misc_feature (1)..(25): SEQ ID NO: 4190; WAN024C97; Start 553; Stop 577
tgggaagaagcagatactacatacg

SEQ ID NO: 375877 - DNA, 25 bp, Artificial
  probe
  misc_feature (1)..(25): SEQ ID NO: 4190; WAN024C97; Start 568; Stop 592
actacatacggtaaacttggtgtta

SEQ ID NO: 375878 - DNA, 25 bp, Artificial
  probe
  misc_feature (1)..(25): SEQ ID NO: 4190; WAN024C97; Start 567; Stop 591
tactacatacggtaaacttggtgtt

SEQ ID NO: 375879 - DNA, 25 bp, Artificial
  probe
  misc_feature (1)..(25): SEQ ID NO: 4190; WAN024C97; Start 566; Stop 590
atactacatacggtaaacttggtgt

SEQ ID NO: 375880 - DNA, 25 bp, Artificial
  probe
  misc_feature (1)..(25): SEQ ID NO: 4190; WAN024C97; Start 594; Stop 618
agtatggatctaccgtggtgaagtt

SEQ ID NO: 375881 - DNA, 25 bp, Artificial
  probe
  misc_feature (1)..(25): SEQ ID NO: 4190; WAN024C97; Start 554; Stop 578
gggaagaagcagatactacatacgg

SEQ ID NO: 375882 - DNA, 25 bp, Artificial
  probe
  misc_feature (1)..(25): SEQ ID NO: 4190; WAN024C97; Start 597; Stop 621
atggatctaccgtggtgaagttctt

SEQ ID NO: 375883 - DNA, 25 bp, Artificial
  probe
  misc_feature (1)..(25): SEQ ID NO: 4190; WAN024C97; Start 289; Stop 313
caagtacacatcaacatcatcgaaa

SEQ ID NO: 375884 - DNA, 25 bp, Artificial
  probe
  misc_feature (1)..(25): SEQ ID NO: 4190; WAN024C97; Start 296; Stop 320
acatcaacatcatcgaaatcaaaca

SEQ ID NO: 375885 - DNA, 25 bp, Artificial
  probe
  misc_feature (1)..(25): SEQ ID NO: 4191; WAN024FHA; Start 4; Stop 28
ggtctgatggcttatattgagatga

SEQ ID NO: 375886 - DNA, 25 bp, Artificial
  probe
  misc_feature (1)..(25): SEQ ID NO: 4191; WAN024FHA; Start 144; Stop 168
caagtcaacagttcttaaccttctt

SEQ ID NO: 375887 - DNA, 25 bp, Artificial
  probe
  misc_feature (1)..(25): SEQ ID NO: 4191; WAN024FHA; Start 145; Stop 169
aagtcaacagttcttaaccttcttg

SEQ ID NO: 375888 - DNA, 25 bp, Artificial
  probe
  misc_feature (1)..(25): SEQ ID NO: 4191; WAN024FHA; Start 146; Stop 170
agtcaacagttcttaaccttcttgg

SEQ ID NO: 375889 - DNA, 25 bp, Artificial
  probe
  misc_feature (1)..(25): SEQ ID NO: 4191; WAN024FHA; Start 143; Stop 167
gcaagtcaacagttcttaaccttct

SEQ ID NO: 375890 - DNA, 25 bp, Artificial
  probe
  misc_feature (1)..(25): SEQ ID NO: 4191; WAN024FHA; Start 5; Stop 29
gtctgatggcttatattgagatgaa

SEQ ID NO: 375891 - DNA, 25 bp, Artificial
  probe
  misc_feature (1)..(25): SEQ ID NO: 4191; WAN024FHA; Start 204; Stop 228
gattgatggtgttaatattgcggat

SEQ ID NO: 375892 - DNA, 25 bp, Artificial
  probe
  misc_feature (1)..(25): SEQ ID NO: 4191; WAN024FHA; Start 205; Stop 229
attgatggtgttaatattgcggatt

SEQ ID NO: 375893 - DNA, 25 bp, Artificial
  probe
  misc_feature (1)..(25): SEQ ID NO: 4191; WAN024FHA; Start 201; Stop 225
ctggattgatggtgttaatattgcg

SEQ ID NO: 375894 - DNA, 25 bp, Artificial
  probe
  misc_feature (1)..(25): SEQ ID NO: 4191; WAN024FHA; Start 200; Stop 224
tctggattgatggtgttaatattgc

SEQ ID NO: 375895 - DNA, 25 bp, Artificial
  probe
  misc_feature (1)..(25): SEQ ID NO: 4191; WAN024FHA; Start 142; Stop 166
ggcaagtcaacagttcttaaccttc

SEQ ID NO: 375896 - DNA, 25 bp, Artificial
  probe
  misc_feature (1)..(25): SEQ ID NO: 4191; WAN024FHA; Start 112; Stop 136
ctggttattatccttggtgcttcag

SEQ ID NO: 375897 - DNA, 25 bp, Artificial
  probe
  misc_feature (1)..(25): SEQ ID NO: 4191; WAN024FHA; Start 203; Stop 227
ggattgatggtgttaatattgcgga

SEQ ID NO: 375898 - DNA, 25 bp, Artificial
  probe
  misc_feature (1)..(25): SEQ ID NO: 4191; WAN024FHA; Start 206; Stop 230
ttgatggtgttaatattgcggatta

SEQ ID NO: 375899 - DNA, 25 bp, Artificial
  probe
  misc_feature (1)..(25): SEQ ID NO: 4191; WAN024FHA; Start 207; Stop 231
tgatggtgttaatattgcggattat

SEQ ID NO: 375900 - DNA, 25 bp, Artificial
  probe
  misc_feature (1)..(25): SEQ ID NO: 4191; WAN024FHA; Start 115; Stop 139
gttattatccttggtgcttcaggtg

SEQ ID NO: 375901 - DNA, 25 bp, Artificial
  probe
  misc_feature (1)..(25): SEQ ID NO: 4191; WAN024FHA; Start 202; Stop 226
tggattgatggtgttaatattgcgg

SEQ ID NO: 375902 - DNA, 25 bp, Artificial
  probe
  misc_feature (1)..(25): SEQ ID NO: 4191; WAN024FHA; Start 11; Stop 35
tggcttatattgagatgaaacactg

SEQ ID NO: 375903 - DNA, 25 bp, Artificial
  probe
  misc_feature (1)..(25): SEQ ID NO: 4191; WAN024FHA; Start 210; Stop 234
tggtgttaatattgcggattatagt

SEQ ID NO: 375904 - DNA, 25 bp, Artificial
  probe
  misc_feature (1)..(25): SEQ ID NO: 4191; WAN024FHA; Start 12; Stop 36
ggcttatattgagatgaaacactgt

SEQ ID NO: 375905 - DNA, 25 bp, Artificial
  probe
  misc_feature (1)..(25): SEQ ID NO: 4191; WAN024FHA; Start 3; Stop 27
gggtctgatggcttatattgagatg

SEQ ID NO: 375906 - DNA, 25 bp, Artificial
  probe
  misc_feature (1)..(25): SEQ ID NO: 4191; WAN024FHA; Start 195; Stop 219
ggaaatctggattgatggtgttaat

SEQ ID NO: 375907 - DNA, 25 bp, Artificial
  probe
  misc_feature (1)..(25): SEQ ID NO: 4191; WAN024FHA; Start 31; Stop 55
cactgttacaagcgttatcaggttg

SEQ ID NO: 375908 - DNA, 25 bp, Artificial
  probe
  misc_feature (1)..(25): SEQ ID NO: 4191; WAN024FHA; Start 2; Stop 26
tgggtctgatggcttatattgagat

SEQ ID NO: 375909 - DNA, 25 bp, Artificial
  probe
  misc_feature (1)..(25): SEQ ID NO: 4191; WAN024FHA; Start 339; Stop 363
tgaaattgtgacagatgccttgaat

SEQ ID NO: 375910 - DNA, 25 bp, Artificial
  probe
  misc_feature (1)..(25): SEQ ID NO: 4191; WAN024FHA; Start 194; Stop 218
gggaaatctggattgatggtgttaa

SEQ ID NO: 375911 - DNA, 25 bp, Artificial
  probe
  misc_feature (1)..(25): SEQ ID NO: 4191; WAN024FHA; Start 10; Stop 34
atggcttatattgagatgaaacact

SEQ ID NO: 375912 - DNA, 25 bp, Artificial
  probe
  misc_feature (1)..(25): SEQ ID NO: 4191; WAN024FHA; Start 8; Stop 32
tgatggcttatattgagatgaaaca

SEQ ID NO: 375913 - DNA, 25 bp, Artificial
  probe
  misc_feature (1)..(25): SEQ ID NO: 4191; WAN024FHA; Start 245; Stop 269
gcaccaattaccgtagaaatgatgt

SEQ ID NO: 375914 - DNA, 25 bp, Artificial
  probe
  misc_feature (1)..(25): SEQ ID NO: 4191; WAN024FHA; Start 141; Stop 165
aggcaagtcaacagttcttaacctt

SEQ ID NO: 375915 - DNA, 25 bp, Artificial
  probe
  misc_feature (1)..(25): SEQ ID NO: 4191; WAN024FHA; Start 114; Stop 138
ggttattatccttggtgcttcaggt

SEQ ID NO: 375916 - DNA, 25 bp, Artificial
  probe
  misc_feature (1)..(25): SEQ ID NO: 4191; WAN024FHA; Start 113; Stop 137
tggttattatccttggtgcttcagg

SEQ ID NO: 375917 - DNA, 25 bp, Artificial
  probe
  misc_feature (1)..(25): SEQ ID NO: 4191; WAN024FHA; Start 30; Stop 54
acactgttacaagcgttatcaggtt

SEQ ID NO: 375918 - DNA, 25 bp, Artificial
  probe
  misc_feature (1)..(25): SEQ ID NO: 4192; WAN024G8G; Start 146; Stop 170
tcatcaattcctcctgtatcaatca

SEQ ID NO: 375919 - DNA, 25 bp, Artificial
  probe
  misc_feature (1)..(25): SEQ ID NO: 4192; WAN024G8G; Start 147; Stop 171
catcaattcctcctgtatcaatcat

SEQ ID NO: 375920 - DNA, 25 bp, Artificial
  probe
  misc_feature (1)..(25): SEQ ID NO: 4192; WAN024G8G; Start 144; Stop 168
catcatcaattcctcctgtatcaat

SEQ ID NO: 375921 - DNA, 25 bp, Artificial
  probe
  misc_feature (1)..(25): SEQ ID NO: 4192; WAN024G8G; Start 145; Stop 169
atcatcaattcctcctgtatcaatc

SEQ ID NO: 375922 - DNA, 25 bp, Artificial
  probe
  misc_feature (1)..(25): SEQ ID NO: 4192; WAN024G8G; Start 142; Stop 166
gacatcatcaattcctcctgtatca

SEQ ID NO: 375923 - DNA, 25 bp, Artificial
  probe
  misc_feature (1)..(25): SEQ ID NO: 4192; WAN024G8G; Start 143; Stop 167
acatcatcaattcctcctgtatcaa

SEQ ID NO: 375924 - DNA, 25 bp, Artificial
  probe
  misc_feature (1)..(25): SEQ ID NO: 4192; WAN024G8G; Start 152; Stop 176
attcctcctgtatcaatcatgctaa

SEQ ID NO: 375925 - DNA, 25 bp, Artificial
  probe
  misc_feature (1)..(25): SEQ ID NO: 4192; WAN024G8G; Start 151; Stop 175
aattcctcctgtatcaatcatgcta

SEQ ID NO: 375926 - DNA, 25 bp, Artificial
  probe
  misc_feature (1)..(25): SEQ ID NO: 4192; WAN024G8G; Start 150; Stop 174
caattcctcctgtatcaatcatgct

SEQ ID NO: 375927 - DNA, 25 bp, Artificial
  probe
  misc_feature (1)..(25): SEQ ID NO: 4192; WAN024G8G; Start 149; Stop 173
tcaattcctcctgtatcaatcatgc

SEQ ID NO: 375928 - DNA, 25 bp, Artificial
  probe
  misc_feature (1)..(25): SEQ ID NO: 4192; WAN024G8G; Start 141; Stop 165
cgacatcatcaattcctcctgtatc

SEQ ID NO: 375929 - DNA, 25 bp, Artificial
  probe
  misc_feature (1)..(25): SEQ ID NO: 4192; WAN024G8G; Start 148; Stop 172
atcaattcctcctgtatcaatcatg

SEQ ID NO: 375930 - DNA, 25 bp, Artificial
  probe
  misc_feature (1)..(25): SEQ ID NO: 4192; WAN024G8G; Start 222; Stop 246
tcactccttcgacatcttctacaat

SEQ ID NO: 375931 - DNA, 25 bp, Artificial
  probe
  misc_feature (1)..(25): SEQ ID NO: 4192; WAN024G8G; Start 223; Stop 247
cactccttcgacatcttctacaatg

SEQ ID NO: 375932 - DNA, 25 bp, Artificial
  probe
  misc_feature (1)..(25): SEQ ID NO: 4192; WAN024G8G; Start 236; Stop 260
tcttctacaatggagattcgctcac

SEQ ID NO: 375933 - DNA, 25 bp, Artificial
  probe
  misc_feature (1)..(25): SEQ ID NO: 4192; WAN024G8G; Start 227; Stop 251
ccttcgacatcttctacaatggaga

SEQ ID NO: 375934 - DNA, 25 bp, Artificial
  probe
  misc_feature (1)..(25): SEQ ID NO: 4192; WAN024G8G; Start 234; Stop 258
catcttctacaatggagattcgctc

SEQ ID NO: 375935 - DNA, 25 bp, Artificial
  probe
  misc_feature (1)..(25): SEQ ID NO: 4192; WAN024G8G; Start 140; Stop 164
tcgacatcatcaattcctcctgtat

SEQ ID NO: 375936 - DNA, 25 bp, Artificial
  probe
  misc_feature (1)..(25): SEQ ID NO: 4192; WAN024G8G; Start 139; Stop 163
atcgacatcatcaattcctcctgta

SEQ ID NO: 375937 - DNA, 25 bp, Artificial
  probe
  misc_feature (1)..(25): SEQ ID NO: 4192; WAN024G8G; Start 153; Stop 177
ttcctcctgtatcaatcatgctaaa

SEQ ID NO: 375938 - DNA, 25 bp, Artificial
  probe
  misc_feature (1)..(25): SEQ ID NO: 4192; WAN024G8G; Start 224; Stop 248
actccttcgacatcttctacaatgg

SEQ ID NO: 375939 - DNA, 25 bp, Artificial
  probe
  misc_feature (1)..(25): SEQ ID NO: 4192; WAN024G8G; Start 235; Stop 259
atcttctacaatggagattcgctca

SEQ ID NO: 375940 - DNA, 25 bp, Artificial
  probe
  misc_feature (1)..(25): SEQ ID NO: 4192; WAN024G8G; Start 232; Stop 256
gacatcttctacaatggagattcgc

SEQ ID NO: 375941 - DNA, 25 bp, Artificial
  probe
  misc_feature (1)..(25): SEQ ID NO: 4192; WAN024G8G; Start 231; Stop 255
cgacatcttctacaatggagattcg

SEQ ID NO: 375942 - DNA, 25 bp, Artificial
  probe
  misc_feature (1)..(25): SEQ ID NO: 4192; WAN024G8G; Start 233; Stop 257
acatcttctacaatggagattcgct

SEQ ID NO: 375943 - DNA, 25 bp, Artificial
  probe
  misc_feature (1)..(25): SEQ ID NO: 4192; WAN024G8G; Start 237; Stop 261
cttctacaatggagattcgctcacc

SEQ ID NO: 375944 - DNA, 25 bp, Artificial
  probe
  misc_feature (1)..(25): SEQ ID NO: 4192; WAN024G8G; Start 230; Stop 254
tcgacatcttctacaatggagattc

SEQ ID NO: 375945 - DNA, 25 bp, Artificial
  probe
  misc_feature (1)..(25): SEQ ID NO: 4192; WAN024G8G; Start 229; Stop 253
ttcgacatcttctacaatggagatt

SEQ ID NO: 375946 - DNA, 25 bp, Artificial
  probe
  misc_feature (1)..(25): SEQ ID NO: 4192; WAN024G8G; Start 228; Stop 252
cttcgacatcttctacaatggagat

SEQ ID NO: 375947 - DNA, 25 bp, Artificial
  probe
  misc_feature (1)..(25): SEQ ID NO: 4192; WAN024G8G; Start 221; Stop 245
gtcactccttcgacatcttctacaa

SEQ ID NO: 375948 - DNA, 25 bp, Artificial
  probe
  misc_feature (1)..(25): SEQ ID NO: 4192; WAN024G8G; Start 226; Stop 250
tccttcgacatcttctacaatggag

SEQ ID NO: 375949 - DNA, 25 bp, Artificial
  probe
  misc_feature (1)..(25): SEQ ID NO: 4192; WAN024G8G; Start 225; Stop 249
ctccttcgacatcttctacaatgga

SEQ ID NO: 375950 - DNA, 25 bp, Artificial
  probe
  misc_feature (1)..(25): SEQ ID NO: 4192; WAN024G8G; Start 138; Stop 162
catcgacatcatcaattcctcctgt

SEQ ID NO: 375951 - DNA, 25 bp, Artificial
  probe
  misc_feature (1)..(25): SEQ ID NO: 4193; WAN024FMU; Start 289; Stop 313
gatggctgtcgttatgaagatattg

SEQ ID NO: 375952 - DNA, 25 bp, Artificial
  probe
  misc_feature (1)..(25): SEQ ID NO: 4193; WAN024FMU; Start 288; Stop 312
agatggctgtcgttatgaagatatt

SEQ ID NO: 375953 - DNA, 25 bp, Artificial
  probe
  misc_feature (1)..(25): SEQ ID NO: 4193; WAN024FMU; Start 287; Stop 311
gagatggctgtcgttatgaagatat

SEQ ID NO: 375954 - DNA, 25 bp, Artificial
  probe
  misc_feature (1)..(25): SEQ ID NO: 4193; WAN024FMU; Start 290; Stop 314
atggctgtcgttatgaagatattgt

SEQ ID NO: 375955 - DNA, 25 bp, Artificial
  probe
  misc_feature (1)..(25): SEQ ID NO: 4193; WAN024FMU; Start 293; Stop 317
gctgtcgttatgaagatattgtgaa

SEQ ID NO: 375956 - DNA, 25 bp, Artificial
  probe
  misc_feature (1)..(25): SEQ ID NO: 4193; WAN024FMU; Start 292; Stop 316
ggctgtcgttatgaagatattgtga

SEQ ID NO: 375957 - DNA, 25 bp, Artificial
  probe
  misc_feature (1)..(25): SEQ ID NO: 4193; WAN024FMU; Start 291; Stop 315
tggctgtcgttatgaagatattgtg

SEQ ID NO: 375958 - DNA, 25 bp, Artificial
  probe
  misc_feature (1)..(25): SEQ ID NO: 4193; WAN024FMU; Start 295; Stop 319
tgtcgttatgaagatattgtgaagt

SEQ ID NO: 375959 - DNA, 25 bp, Artificial
  probe
  misc_feature (1)..(25): SEQ ID NO: 4193; WAN024FMU; Start 294; Stop 318
ctgtcgttatgaagatattgtgaag

SEQ ID NO: 375960 - DNA, 25 bp, Artificial
  probe
  misc_feature (1)..(25): SEQ ID NO: 4193; WAN024FMU; Start 296; Stop 320
gtcgttatgaagatattgtgaagtt

SEQ ID NO: 375961 - DNA, 25 bp, Artificial
  probe
  misc_feature (1)..(25): SEQ ID NO: 4193; WAN024FMU; Start 271; Stop 295
cttatgatgtctgaacgagatggct

SEQ ID NO: 375962 - DNA, 25 bp, Artificial
  probe
  misc_feature (1)..(25): SEQ ID NO: 4193; WAN024FMU; Start 270; Stop 294
tcttatgatgtctgaacgagatggc

SEQ ID NO: 375963 - DNA, 25 bp, Artificial
  probe
  misc_feature (1)..(25): SEQ ID NO: 4193; WAN024FMU; Start 37; Stop 61
tttcgttctcccactatcaatatgt

SEQ ID NO: 375964 - DNA, 25 bp, Artificial
  probe
  misc_feature (1)..(25): SEQ ID NO: 4193; WAN024FMU; Start 272; Stop 296
ttatgatgtctgaacgagatggctg

SEQ ID NO: 375965 - DNA, 25 bp, Artificial
  probe
  misc_feature (1)..(25): SEQ ID NO: 4193; WAN024FMU; Start 32; Stop 56
tacaatttcgttctcccactatcaa

SEQ ID NO: 375966 - DNA, 25 bp, Artificial
  probe
  misc_feature (1)..(25): SEQ ID NO: 4193; WAN024FMU; Start 30; Stop 54
tctacaatttcgttctcccactatc

SEQ ID NO: 375967 - DNA, 25 bp, Artificial
  probe
  misc_feature (1)..(25): SEQ ID NO: 4193; WAN024FMU; Start 31; Stop 55
ctacaatttcgttctcccactatca

SEQ ID NO: 375968 - DNA, 25 bp, Artificial
  probe
  misc_feature (1)..(25): SEQ ID NO: 4193; WAN024FMU; Start 29; Stop 53
gtctacaatttcgttctcccactat

SEQ ID NO: 375969 - DNA, 25 bp, Artificial
  probe
  misc_feature (1)..(25): SEQ ID NO: 4193; WAN024FMU; Start 38; Stop 62
ttcgttctcccactatcaatatgta

SEQ ID NO: 375970 - DNA, 25 bp, Artificial
  probe
  misc_feature (1)..(25): SEQ ID NO: 4193; WAN024FMU; Start 33; Stop 57
acaatttcgttctcccactatcaat

SEQ ID NO: 375971 - DNA, 25 bp, Artificial
  probe
  misc_feature (1)..(25): SEQ ID NO: 4193; WAN024FMU; Start 269; Stop 293
atcttatgatgtctgaacgagatgg

SEQ ID NO: 375972 - DNA, 25 bp, Artificial
  probe
  misc_feature (1)..(25): SEQ ID NO: 4193; WAN024FMU; Start 39; Stop 63
tcgttctcccactatcaatatgtat

SEQ ID NO: 375973 - DNA, 25 bp, Artificial
  probe
  misc_feature (1)..(25): SEQ ID NO: 4193; WAN024FMU; Start 54; Stop 78
caatatgtatatagaagcagcagac

SEQ ID NO: 375974 - DNA, 25 bp, Artificial
  probe
  misc_feature (1)..(25): SEQ ID NO: 4193; WAN024FMU; Start 36; Stop 60
atttcgttctcccactatcaatatg

SEQ ID NO: 375975 - DNA, 25 bp, Artificial
  probe
  misc_feature (1)..(25): SEQ ID NO: 4193; WAN024FMU; Start 34; Stop 58
caatttcgttctcccactatcaata

SEQ ID NO: 375976 - DNA, 25 bp, Artificial
  probe
  misc_feature (1)..(25): SEQ ID NO: 4193; WAN024FMU; Start 20; Stop 44
atgatttgggtctacaatttcgttc

SEQ ID NO: 375977 - DNA, 25 bp, Artificial
  probe
  misc_feature (1)..(25): SEQ ID NO: 4193; WAN024FMU; Start 22; Stop 46
gatttgggtctacaatttcgttctc

SEQ ID NO: 375978 - DNA, 25 bp, Artificial
  probe
  misc_feature (1)..(25): SEQ ID NO: 4193; WAN024FMU; Start 64; Stop 88
atagaagcagcagactttattcagt

SEQ ID NO: 375979 - DNA, 25 bp, Artificial
  probe
  misc_feature (1)..(25): SEQ ID NO: 4193; WAN024FMU; Start 65; Stop 89
tagaagcagcagactttattcagtt

SEQ ID NO: 375980 - DNA, 25 bp, Artificial
  probe
  misc_feature (1)..(25): SEQ ID NO: 4193; WAN024FMU; Start 55; Stop 79
aatatgtatatagaagcagcagact

SEQ ID NO: 375981 - DNA, 25 bp, Artificial
  probe
  misc_feature (1)..(25): SEQ ID NO: 4193; WAN024FMU; Start 53; Stop 77
tcaatatgtatatagaagcagcaga

SEQ ID NO: 375982 - DNA, 25 bp, Artificial
  probe
  misc_feature (1)..(25): SEQ ID NO: 4193; WAN024FMU; Start 21; Stop 45
tgatttgggtctacaatttcgttct

SEQ ID NO: 375983 - DNA, 25 bp, Artificial
  probe
  misc_feature (1)..(25): SEQ ID NO: 4193; WAN024FMU; Start 439; Stop 463
tcagtaacaacttatcttaactcct

SEQ ID NO: 375984 - DNA, 25 bp, Artificial
  probe
  misc_feature (1)..(25): SEQ ID NO: 4194; WAN024FI4; Start 122; Stop 146
atcacatcaatatcttcaggagact

SEQ ID NO: 375985 - DNA, 25 bp, Artificial
  probe
  misc_feature (1)..(25): SEQ ID NO: 4194; WAN024FI4; Start 121; Stop 145
aatcacatcaatatcttcaggagac

SEQ ID NO: 375986 - DNA, 25 bp, Artificial
  probe
  misc_feature (1)..(25): SEQ ID NO: 4194; WAN024FI4; Start 123; Stop 147
tcacatcaatatcttcaggagactg

SEQ ID NO: 375987 - DNA, 25 bp, Artificial
  probe
  misc_feature (1)..(25): SEQ ID NO: 4194; WAN024FI4; Start 124; Stop 148
cacatcaatatcttcaggagactgg

SEQ ID NO: 375988 - DNA, 25 bp, Artificial
  probe
  misc_feature (1)..(25): SEQ ID NO: 4194; WAN024FI4; Start 118; Stop 142
cgaaatcacatcaatatcttcagga

SEQ ID NO: 375989 - DNA, 25 bp, Artificial
  probe
  misc_feature (1)..(25): SEQ ID NO: 4194; WAN024FI4; Start 167; Stop 191
agtttctcctcatccatctgataag

SEQ ID NO: 375990 - DNA, 25 bp, Artificial
  probe
  misc_feature (1)..(25): SEQ ID NO: 4194; WAN024FI4; Start 166; Stop 190
gagtttctcctcatccatctgataa

SEQ ID NO: 375991 - DNA, 25 bp, Artificial
  probe
  misc_feature (1)..(25): SEQ ID NO: 4194; WAN024FI4; Start 129; Stop 153
caatatcttcaggagactgggtatc

SEQ ID NO: 375992 - DNA, 25 bp, Artificial
  probe
  misc_feature (1)..(25): SEQ ID NO: 4194; WAN024FI4; Start 128; Stop 152
tcaatatcttcaggagactgggtat

SEQ ID NO: 375993 - DNA, 25 bp, Artificial
  probe
  misc_feature (1)..(25): SEQ ID NO: 4194; WAN024FI4; Start 127; Stop 151
atcaatatcttcaggagactgggta

SEQ ID NO: 375994 - DNA, 25 bp, Artificial
  probe
  misc_feature (1)..(25): SEQ ID NO: 4194; WAN024FI4; Start 170; Stop 194
ttctcctcatccatctgataaggca

SEQ ID NO: 375995 - DNA, 25 bp, Artificial
  probe
  misc_feature (1)..(25): SEQ ID NO: 4194; WAN024FI4; Start 168; Stop 192
gtttctcctcatccatctgataagg

SEQ ID NO: 375996 - DNA, 25 bp, Artificial
  probe
  misc_feature (1)..(25): SEQ ID NO: 4194; WAN024FI4; Start 130; Stop 154
aatatcttcaggagactgggtatcc

SEQ ID NO: 375997 - DNA, 25 bp, Artificial
  probe
  misc_feature (1)..(25): SEQ ID NO: 4194; WAN024FI4; Start 120; Stop 144
aaatcacatcaatatcttcaggaga

SEQ ID NO: 375998 - DNA, 25 bp, Artificial
  probe
  misc_feature (1)..(25): SEQ ID NO: 4194; WAN024FI4; Start 108; Stop 132
caagctcaatcgaaatcacatcaat

SEQ ID NO: 375999 - DNA, 25 bp, Artificial
  probe
  misc_feature (1)..(25): SEQ ID NO: 4194; WAN024FI4; Start 176; Stop 200
tcatccatctgataaggcaggtcaa

SEQ ID NO: 376000 - DNA, 25 bp, Artificial
  probe
  misc_feature (1)..(25): SEQ ID NO: 4194; WAN024FI4; Start 119; Stop 143
gaaatcacatcaatatcttcaggag

SEQ ID NO: 376001 - DNA, 25 bp, Artificial
  probe
  misc_feature (1)..(25): SEQ ID NO: 4194; WAN024FI4; Start 171; Stop 195
tctcctcatccatctgataaggcag

SEQ ID NO: 376002 - DNA, 25 bp, Artificial
  probe
  misc_feature (1)..(25): SEQ ID NO: 4194; WAN024FI4; Start 126; Stop 150
catcaatatcttcaggagactgggt

SEQ ID NO: 376003 - DNA, 25 bp, Artificial
  probe
  misc_feature (1)..(25): SEQ ID NO: 4194; WAN024FI4; Start 125; Stop 149
acatcaatatcttcaggagactggg

SEQ ID NO: 376004 - DNA, 25 bp, Artificial
  probe
  misc_feature (1)..(25): SEQ ID NO: 4194; WAN024FI4; Start 109; Stop 133
aagctcaatcgaaatcacatcaata

SEQ ID NO: 376005 - DNA, 25 bp, Artificial
  probe
  misc_feature (1)..(25): SEQ ID NO: 4194; WAN024FI4; Start 110; Stop 134
agctcaatcgaaatcacatcaatat

SEQ ID NO: 376006 - DNA, 25 bp, Artificial
  probe
  misc_feature (1)..(25): SEQ ID NO: 4194; WAN024FI4; Start 111; Stop 135
gctcaatcgaaatcacatcaatatc

SEQ ID NO: 376007 - DNA, 25 bp, Artificial
  probe
  misc_feature (1)..(25): SEQ ID NO: 4194; WAN024FI4; Start 117; Stop 141
tcgaaatcacatcaatatcttcagg

SEQ ID NO: 376008 - DNA, 25 bp, Artificial
  probe
  misc_feature (1)..(25): SEQ ID NO: 4194; WAN024FI4; Start 107; Stop 131
acaagctcaatcgaaatcacatcaa

SEQ ID NO: 376009 - DNA, 25 bp, Artificial
  probe
  misc_feature (1)..(25): SEQ ID NO: 4194; WAN024FI4; Start 169; Stop 193
tttctcctcatccatctgataaggc

SEQ ID NO: 376010 - DNA, 25 bp, Artificial
  probe
  misc_feature (1)..(25): SEQ ID NO: 4194; WAN024FI4; Start 175; Stop 199
ctcatccatctgataaggcaggtca

SEQ ID NO: 376011 - DNA, 25 bp, Artificial
  probe
  misc_feature (1)..(25): SEQ ID NO: 4194; WAN024FI4; Start 131; Stop 155
atatcttcaggagactgggtatcca

SEQ ID NO: 376012 - DNA, 25 bp, Artificial
  probe
  misc_feature (1)..(25): SEQ ID NO: 4194; WAN024FI4; Start 132; Stop 156
tatcttcaggagactgggtatccaa

SEQ ID NO: 376013 - DNA, 25 bp, Artificial
  probe
  misc_feature (1)..(25): SEQ ID NO: 4194; WAN024FI4; Start 106; Stop 130
cacaagctcaatcgaaatcacatca

SEQ ID NO: 376014 - DNA, 25 bp, Artificial
  probe
  misc_feature (1)..(25): SEQ ID NO: 4194; WAN024FI4; Start 177; Stop 201
catccatctgataaggcaggtcaaa

SEQ ID NO: 376015 - DNA, 25 bp, Artificial
  probe
  misc_feature (1)..(25): SEQ ID NO: 4194; WAN024FI4; Start 112; Stop 136
ctcaatcgaaatcacatcaatatct

SEQ ID NO: 376016 - DNA, 25 bp, Artificial
  probe
  misc_feature (1)..(25): SEQ ID NO: 4194; WAN024FI4; Start 172; Stop 196
ctcctcatccatctgataaggcagg

SEQ ID NO: 376017 - DNA, 25 bp, Artificial
  probe
  misc_feature (1)..(25): SEQ ID NO: 4195; WAN024DQ2; Start 45; Stop 69
acttattggactttctctcaaatcg

SEQ ID NO: 376018 - DNA, 25 bp, Artificial
  probe
  misc_feature (1)..(25): SEQ ID NO: 4195; WAN024DQ2; Start 42; Stop 66
aagacttattggactttctctcaaa

SEQ ID NO: 376019 - DNA, 25 bp, Artificial
  probe
  misc_feature (1)..(25): SEQ ID NO: 4195; WAN024DQ2; Start 43; Stop 67
agacttattggactttctctcaaat

SEQ ID NO: 376020 - DNA, 25 bp, Artificial
  probe
  misc_feature (1)..(25): SEQ ID NO: 4195; WAN024DQ2; Start 86; Stop 110
tcttacttgattgggattgaaattc

SEQ ID NO: 376021 - DNA, 25 bp, Artificial
  probe
  misc_feature (1)..(25): SEQ ID NO: 4195; WAN024DQ2; Start 44; Stop 68
gacttattggactttctctcaaatc

SEQ ID NO: 376022 - DNA, 25 bp, Artificial
  probe
  misc_feature (1)..(25): SEQ ID NO: 4195; WAN024DQ2; Start 88; Stop 112
ttacttgattgggattgaaattcca

SEQ ID NO: 376023 - DNA, 25 bp, Artificial
  probe
  misc_feature (1)..(25): SEQ ID NO: 4195; WAN024DQ2; Start 87; Stop 111
cttacttgattgggattgaaattcc

SEQ ID NO: 376024 - DNA, 25 bp, Artificial
  probe
  misc_feature (1)..(25): SEQ ID NO: 4195; WAN024DQ2; Start 48; Stop 72
tattggactttctctcaaatcgagt

SEQ ID NO: 376025 - DNA, 25 bp, Artificial
  probe
  misc_feature (1)..(25): SEQ ID NO: 4195; WAN024DQ2; Start 49; Stop 73
attggactttctctcaaatcgagtt

SEQ ID NO: 376026 - DNA, 25 bp, Artificial
  probe
  misc_feature (1)..(25): SEQ ID NO: 4195; WAN024DQ2; Start 50; Stop 74
ttggactttctctcaaatcgagttt

SEQ ID NO: 376027 - DNA, 25 bp, Artificial
  probe
  misc_feature (1)..(25): SEQ ID NO: 4195; WAN024DQ2; Start 46; Stop 70
cttattggactttctctcaaatcga

SEQ ID NO: 376028 - DNA, 25 bp, Artificial
  probe
  misc_feature (1)..(25): SEQ ID NO: 4195; WAN024DQ2; Start 47; Stop 71
ttattggactttctctcaaatcgag

SEQ ID NO: 376029 - DNA, 25 bp, Artificial
  probe
  misc_feature (1)..(25): SEQ ID NO: 4195; WAN024DQ2; Start 85; Stop 109
ttcttacttgattgggattgaaatt

SEQ ID NO: 376030 - DNA, 25 bp, Artificial
  probe
  misc_feature (1)..(25): SEQ ID NO: 4195; WAN024DQ2; Start 41; Stop 65
aaagacttattggactttctctcaa

SEQ ID NO: 376031 - DNA, 25 bp, Artificial
  probe
  misc_feature (1)..(25): SEQ ID NO: 4195; WAN024DQ2; Start 84; Stop 108
tttcttacttgattgggattgaaat

SEQ ID NO: 376032 - DNA, 25 bp, Artificial
  probe
  misc_feature (1)..(25): SEQ ID NO: 4195; WAN024DQ2; Start 51; Stop 75
tggactttctctcaaatcgagtttt

SEQ ID NO: 376033 - DNA, 25 bp, Artificial
  probe
  misc_feature (1)..(25): SEQ ID NO: 4195; WAN024DQ2; Start 81; Stop 105
aattttcttacttgattgggattga

SEQ ID NO: 376034 - DNA, 25 bp, Artificial
  probe
  misc_feature (1)..(25): SEQ ID NO: 4195; WAN024DQ2; Start 82; Stop 106
attttcttacttgattgggattgaa

SEQ ID NO: 376035 - DNA, 25 bp, Artificial
  probe
  misc_feature (1)..(25): SEQ ID NO: 4195; WAN024DQ2; Start 89; Stop 113
tacttgattgggattgaaattccaa

SEQ ID NO: 376036 - DNA, 25 bp, Artificial
  probe
  misc_feature (1)..(25): SEQ ID NO: 4195; WAN024DQ2; Start 77; Stop 101
actcaattttcttacttgattggga

SEQ ID NO: 376037 - DNA, 25 bp, Artificial
  probe
  misc_feature (1)..(25): SEQ ID NO: 4195; WAN024DQ2; Start 83; Stop 107
ttttcttacttgattgggattgaaa

SEQ ID NO: 376038 - DNA, 25 bp, Artificial
  probe
  misc_feature (1)..(25): SEQ ID NO: 4195; WAN024DQ2; Start 80; Stop 104
caattttcttacttgattgggattg

SEQ ID NO: 376039 - DNA, 25 bp, Artificial
  probe
  misc_feature (1)..(25): SEQ ID NO: 4195; WAN024DQ2; Start 78; Stop 102
ctcaattttcttacttgattgggat

SEQ ID NO: 376040 - DNA, 25 bp, Artificial
  probe
  misc_feature (1)..(25): SEQ ID NO: 4195; WAN024DQ2; Start 76; Stop 100
tactcaattttcttacttgattggg

SEQ ID NO: 376041 - DNA, 25 bp, Artificial
  probe
  misc_feature (1)..(25): SEQ ID NO: 4195; WAN024DQ2; Start 106; Stop 130
aattccaattaatttctctgagcta

SEQ ID NO: 376042 - DNA, 25 bp, Artificial
  probe
  misc_feature (1)..(25): SEQ ID NO: 4195; WAN024DQ2; Start 79; Stop 103
tcaattttcttacttgattgggatt

SEQ ID NO: 376043 - DNA, 25 bp, Artificial
  probe
  misc_feature (1)..(25): SEQ ID NO: 4195; WAN024DQ2; Start 105; Stop 129
aaattccaattaatttctctgagct

SEQ ID NO: 376044 - DNA, 25 bp, Artificial
  probe
  misc_feature (1)..(25): SEQ ID NO: 4195; WAN024DQ2; Start 75; Stop 99
ttactcaattttcttacttgattgg

SEQ ID NO: 376045 - DNA, 25 bp, Artificial
  probe
  misc_feature (1)..(25): SEQ ID NO: 4195; WAN024DQ2; Start 96; Stop 120
ttgggattgaaattccaattaattt

SEQ ID NO: 376046 - DNA, 25 bp, Artificial
  probe
  misc_feature (1)..(25): SEQ ID NO: 4196; WAN024B88; Start 95; Stop 119
atttcatttggctcgataaaggttc

SEQ ID NO: 376047 - DNA, 25 bp, Artificial
  probe
  misc_feature (1)..(25): SEQ ID NO: 4196; WAN024B88; Start 94; Stop 118
gatttcatttggctcgataaaggtt

SEQ ID NO: 376048 - DNA, 25 bp, Artificial
  probe
  misc_feature (1)..(25): SEQ ID NO: 4196; WAN024B88; Start 92; Stop 116
ttgatttcatttggctcgataaagg

SEQ ID NO: 376049 - DNA, 25 bp, Artificial
  probe
  misc_feature (1)..(25): SEQ ID NO: 4196; WAN024B88; Start 89; Stop 113
tctttgatttcatttggctcgataa

SEQ ID NO: 376050 - DNA, 25 bp, Artificial
  probe
  misc_feature (1)..(25): SEQ ID NO: 4196; WAN024B88; Start 93; Stop 117
tgatttcatttggctcgataaaggt

SEQ ID NO: 376051 - DNA, 25 bp, Artificial
  probe
  misc_feature (1)..(25): SEQ ID NO: 4196; WAN024B88; Start 88; Stop 112
atctttgatttcatttggctcgata

SEQ ID NO: 376052 - DNA, 25 bp, Artificial
  probe
  misc_feature (1)..(25): SEQ ID NO: 4196; WAN024B88; Start 91; Stop 115
tttgatttcatttggctcgataaag

SEQ ID NO: 376053 - DNA, 25 bp, Artificial
  probe
  misc_feature (1)..(25): SEQ ID NO: 4196; WAN024B88; Start 90; Stop 114
ctttgatttcatttggctcgataaa

SEQ ID NO: 376054 - DNA, 25 bp, Artificial
  probe
  misc_feature (1)..(25): SEQ ID NO: 4196; WAN024B88; Start 85; Stop 109
ataatctttgatttcatttggctcg

SEQ ID NO: 376055 - DNA, 25 bp, Artificial
  probe
  misc_feature (1)..(25): SEQ ID NO: 4196; WAN024B88; Start 96; Stop 120
tttcatttggctcgataaaggttcc

SEQ ID NO: 376056 - DNA, 25 bp, Artificial
  probe
  misc_feature (1)..(25): SEQ ID NO: 4196; WAN024B88; Start 83; Stop 107
ggataatctttgatttcatttggct

SEQ ID NO: 376057 - DNA, 25 bp, Artificial
  probe
  misc_feature (1)..(25): SEQ ID NO: 4196; WAN024B88; Start 82; Stop 106
aggataatctttgatttcatttggc

SEQ ID NO: 376058 - DNA, 25 bp, Artificial
  probe
  misc_feature (1)..(25): SEQ ID NO: 4196; WAN024B88; Start 192; Stop 216
caatcttgcgtccagtcttaacagc

SEQ ID NO: 376059 - DNA, 25 bp, Artificial
  probe
  misc_feature (1)..(25): SEQ ID NO: 4196; WAN024B88; Start 87; Stop 111
aatctttgatttcatttggctcgat

SEQ ID NO: 376060 - DNA, 25 bp, Artificial
  probe
  misc_feature (1)..(25): SEQ ID NO: 4196; WAN024B88; Start 86; Stop 110
taatctttgatttcatttggctcga

SEQ ID NO: 376061 - DNA, 25 bp, Artificial
  probe
  misc_feature (1)..(25): SEQ ID NO: 4196; WAN024B88; Start 56; Stop 80
gtacagaggataagaacttctcctg

SEQ ID NO: 376062 - DNA, 25 bp, Artificial
  probe
  misc_feature (1)..(25): SEQ ID NO: 4196; WAN024B88; Start 80; Stop 104
gcaggataatctttgatttcatttg

SEQ ID NO: 376063 - DNA, 25 bp, Artificial
  probe
  misc_feature (1)..(25): SEQ ID NO: 4196; WAN024B88; Start 84; Stop 108
gataatctttgatttcatttggctc

SEQ ID NO: 376064 - DNA, 25 bp, Artificial
  probe
  misc_feature (1)..(25): SEQ ID NO: 4196; WAN024B88; Start 57; Stop 81
tacagaggataagaacttctcctgc

SEQ ID NO: 376065 - DNA, 25 bp, Artificial
  probe
  misc_feature (1)..(25): SEQ ID NO: 4196; WAN024B88; Start 122; Stop 146
ttaggagctttgatgtagccaagat

SEQ ID NO: 376066 - DNA, 25 bp, Artificial
  probe
  misc_feature (1)..(25): SEQ ID NO: 4196; WAN024B88; Start 228; Stop 252
cctgctggagacggaagatatttga

SEQ ID NO: 376067 - DNA, 25 bp, Artificial
  probe
  misc_feature (1)..(25): SEQ ID NO: 4196; WAN024B88; Start 81; Stop 105
caggataatctttgatttcatttgg

SEQ ID NO: 376068 - DNA, 25 bp, Artificial
  probe
  misc_feature (1)..(25): SEQ ID NO: 4196; WAN024B88; Start 97; Stop 121
ttcatttggctcgataaaggttccc

SEQ ID NO: 376069 - DNA, 25 bp, Artificial
  probe
  misc_feature (1)..(25): SEQ ID NO: 4196; WAN024B88; Start 115; Stop 139
ggttcccttaggagctttgatgtag

SEQ ID NO: 376070 - DNA, 25 bp, Artificial
  probe
  misc_feature (1)..(25): SEQ ID NO: 4196; WAN024B88; Start 172; Stop 196
catagaacgaccaaagaccgcaatc

SEQ ID NO: 376071 - DNA, 25 bp, Artificial
  probe
  misc_feature (1)..(25): SEQ ID NO: 4196; WAN024B88; Start 123; Stop 147
taggagctttgatgtagccaagatc

SEQ ID NO: 376072 - DNA, 25 bp, Artificial
  probe
  misc_feature (1)..(25): SEQ ID NO: 4196; WAN024B88; Start 114; Stop 138
aggttcccttaggagctttgatgta

SEQ ID NO: 376073 - DNA, 25 bp, Artificial
  probe
  misc_feature (1)..(25): SEQ ID NO: 4196; WAN024B88; Start 121; Stop 145
cttaggagctttgatgtagccaaga

SEQ ID NO: 376074 - DNA, 25 bp, Artificial
  probe
  misc_feature (1)..(25): SEQ ID NO: 4196; WAN024B88; Start 79; Stop 103
tgcaggataatctttgatttcattt

SEQ ID NO: 376075 - DNA, 25 bp, Artificial
  probe
  misc_feature (1)..(25): SEQ ID NO: 4196; WAN024B88; Start 173; Stop 197
atagaacgaccaaagaccgcaatct

SEQ ID NO: 376076 - DNA, 25 bp, Artificial
  probe
  misc_feature (1)..(25): SEQ ID NO: 4196; WAN024B88; Start 129; Stop 153
ctttgatgtagccaagatcgattcc

SEQ ID NO: 376077 - DNA, 25 bp, Artificial
  probe
  misc_feature (1)..(25): SEQ ID NO: 4196; WAN024B88; Start 167; Stop 191
ttttccatagaacgaccaaagaccg

SEQ ID NO: 376078 - DNA, 25 bp, Artificial
  probe
  misc_feature (1)..(25): SEQ ID NO: 4196; WAN024B88; Start 166; Stop 190
cttttccatagaacgaccaaagacc

SEQ ID NO: 376079 - DNA, 25 bp, Artificial
  probe
  misc_feature (1)..(25): SEQ ID NO: 4197; WAN024CTR; Start 236; Stop 260
gtaatcaattcgtacaaggcaggtt

SEQ ID NO: 376080 - DNA, 25 bp, Artificial
  probe
  misc_feature (1)..(25): SEQ ID NO: 4197; WAN024CTR; Start 164; Stop 188
gtccagtgatagtaacggtaaccaa

SEQ ID NO: 376081 - DNA, 25 bp, Artificial
  probe
  misc_feature (1)..(25): SEQ ID NO: 4197; WAN024CTR; Start 161; Stop 185
ggagtccagtgatagtaacggtaac

SEQ ID NO: 376082 - DNA, 25 bp, Artificial
  probe
  misc_feature (1)..(25): SEQ ID NO: 4197; WAN024CTR; Start 162; Stop 186
gagtccagtgatagtaacggtaacc

SEQ ID NO: 376083 - DNA, 25 bp, Artificial
  probe
  misc_feature (1)..(25): SEQ ID NO: 4197; WAN024CTR; Start 190; Stop 214
caaatccttcttagcatcaaccaat

SEQ ID NO: 376084 - DNA, 25 bp, Artificial
  probe
  misc_feature (1)..(25): SEQ ID NO: 4197; WAN024CTR; Start 187; Stop 211
aaacaaatccttcttagcatcaacc

SEQ ID NO: 376085 - DNA, 25 bp, Artificial
  probe
  misc_feature (1)..(25): SEQ ID NO: 4197; WAN024CTR; Start 185; Stop 209
ccaaacaaatccttcttagcatcaa

SEQ ID NO: 376086 - DNA, 25 bp, Artificial
  probe
  misc_feature (1)..(25): SEQ ID NO: 4197; WAN024CTR; Start 183; Stop 207
aaccaaacaaatccttcttagcatc

SEQ ID NO: 376087 - DNA, 25 bp, Artificial
  probe
  misc_feature (1)..(25): SEQ ID NO: 4197; WAN024CTR; Start 181; Stop 205
gtaaccaaacaaatccttcttagca

SEQ ID NO: 376088 - DNA, 25 bp, Artificial
  probe
  misc_feature (1)..(25): SEQ ID NO: 4197; WAN024CTR; Start 186; Stop 210
caaacaaatccttcttagcatcaac

SEQ ID NO: 376089 - DNA, 25 bp, Artificial
  probe
  misc_feature (1)..(25): SEQ ID NO: 4197; WAN024CTR; Start 49; Stop 73
acggcgatattctgctttatagttt

SEQ ID NO: 376090 - DNA, 25 bp, Artificial
  probe
  misc_feature (1)..(25): SEQ ID NO: 4197; WAN024CTR; Start 189; Stop 213
acaaatccttcttagcatcaaccaa

SEQ ID NO: 376091 - DNA, 25 bp, Artificial
  probe
  misc_feature (1)..(25): SEQ ID NO: 4197; WAN024CTR; Start 188; Stop 212
aacaaatccttcttagcatcaacca

SEQ ID NO: 376092 - DNA, 25 bp, Artificial
  probe
  misc_feature (1)..(25): SEQ ID NO: 4197; WAN024CTR; Start 184; Stop 208
accaaacaaatccttcttagcatca

SEQ ID NO: 376093 - DNA, 25 bp, Artificial
  probe
  misc_feature (1)..(25): SEQ ID NO: 4197; WAN024CTR; Start 163; Stop 187
agtccagtgatagtaacggtaacca

SEQ ID NO: 376094 - DNA, 25 bp, Artificial
  probe
  misc_feature (1)..(25): SEQ ID NO: 4197; WAN024CTR; Start 135; Stop 159
caccattcaaagagaaaccttcatt

SEQ ID NO: 376095 - DNA, 25 bp, Artificial
  probe
  misc_feature (1)..(25): SEQ ID NO: 4197; WAN024CTR; Start 182; Stop 206
taaccaaacaaatccttcttagcat

SEQ ID NO: 376096 - DNA, 25 bp, Artificial
  probe
  misc_feature (1)..(25): SEQ ID NO: 4197; WAN024CTR; Start 134; Stop 158
tcaccattcaaagagaaaccttcat

SEQ ID NO: 376097 - DNA, 25 bp, Artificial
  probe
  misc_feature (1)..(25): SEQ ID NO: 4197; WAN024CTR; Start 21; Stop 45
taactcccatctccttcatttgttt

SEQ ID NO: 376098 - DNA, 25 bp, Artificial
  probe
  misc_feature (1)..(25): SEQ ID NO: 4197; WAN024CTR; Start 191; Stop 215
aaatccttcttagcatcaaccaatt

SEQ ID NO: 376099 - DNA, 25 bp, Artificial
  probe
  misc_feature (1)..(25): SEQ ID NO: 4197; WAN024CTR; Start 179; Stop 203
cggtaaccaaacaaatccttcttag

SEQ ID NO: 376100 - DNA, 25 bp, Artificial
  probe
  misc_feature (1)..(25): SEQ ID NO: 4197; WAN024CTR; Start 173; Stop 197
tagtaacggtaaccaaacaaatcct

SEQ ID NO: 376101 - DNA, 25 bp, Artificial
  probe
  misc_feature (1)..(25): SEQ ID NO: 4197; WAN024CTR; Start 136; Stop 160
accattcaaagagaaaccttcattt

SEQ ID NO: 376102 - DNA, 25 bp, Artificial
  probe
  misc_feature (1)..(25): SEQ ID NO: 4197; WAN024CTR; Start 48; Stop 72
gacggcgatattctgctttatagtt

SEQ ID NO: 376103 - DNA, 25 bp, Artificial
  probe
  misc_feature (1)..(25): SEQ ID NO: 4197; WAN024CTR; Start 20; Stop 44
ttaactcccatctccttcatttgtt

SEQ ID NO: 376104 - DNA, 25 bp, Artificial
  probe
  misc_feature (1)..(25): SEQ ID NO: 4197; WAN024CTR; Start 180; Stop 204
ggtaaccaaacaaatccttcttagc

SEQ ID NO: 376105 - DNA, 25 bp, Artificial
  probe
  misc_feature (1)..(25): SEQ ID NO: 4197; WAN024CTR; Start 168; Stop 192
agtgatagtaacggtaaccaaacaa

SEQ ID NO: 376106 - DNA, 25 bp, Artificial
  probe
  misc_feature (1)..(25): SEQ ID NO: 4197; WAN024CTR; Start 133; Stop 157
ttcaccattcaaagagaaaccttca

SEQ ID NO: 376107 - DNA, 25 bp, Artificial
  probe
  misc_feature (1)..(25): SEQ ID NO: 4197; WAN024CTR; Start 132; Stop 156
gttcaccattcaaagagaaaccttc

SEQ ID NO: 376108 - DNA, 25 bp, Artificial
  probe
  misc_feature (1)..(25): SEQ ID NO: 4197; WAN024CTR; Start 169; Stop 193
gtgatagtaacggtaaccaaacaaa

SEQ ID NO: 376109 - DNA, 25 bp, Artificial
  probe
  misc_feature (1)..(25): SEQ ID NO: 4197; WAN024CTR; Start 178; Stop 202
acggtaaccaaacaaatccttctta

SEQ ID NO: 376110 - DNA, 25 bp, Artificial
  probe
  misc_feature (1)..(25): SEQ ID NO: 4197; WAN024CTR; Start 176; Stop 200
taacggtaaccaaacaaatccttct

SEQ ID NO: 376111 - DNA, 25 bp, Artificial
  probe
  misc_feature (1)..(25): SEQ ID NO: 4197; WAN024CTR; Start 175; Stop 199
gtaacggtaaccaaacaaatccttc

SEQ ID NO: 376112 - DNA, 25 bp, Artificial
  probe
  misc_feature (1)..(25): SEQ ID NO: 4198; WAN024GIP; Start 265; Stop 289
gacaacggcattatcatctttcttt

SEQ ID NO: 376113 - DNA, 25 bp, Artificial
  probe
  misc_feature (1)..(25): SEQ ID NO: 4198; WAN024GIP; Start 270; Stop 294
cggcattatcatctttctttatcgt

SEQ ID NO: 376114 - DNA, 25 bp, Artificial
  probe
  misc_feature (1)..(25): SEQ ID NO: 4198; WAN024GIP; Start 269; Stop 293
acggcattatcatctttctttatcg

SEQ ID NO: 376115 - DNA, 25 bp, Artificial
  probe
  misc_feature (1)..(25): SEQ ID NO: 4198; WAN024GIP; Start 129; Stop 153
atttcacaatcccaataatcggttt

SEQ ID NO: 376116 - DNA, 25 bp, Artificial
  probe
  misc_feature (1)..(25): SEQ ID NO: 4198; WAN024GIP; Start 127; Stop 151
gaatttcacaatcccaataatcggt

SEQ ID NO: 376117 - DNA, 25 bp, Artificial
  probe
  misc_feature (1)..(25): SEQ ID NO: 4198; WAN024GIP; Start 266; Stop 290
acaacggcattatcatctttcttta

SEQ ID NO: 376118 - DNA, 25 bp, Artificial
  probe
  misc_feature (1)..(25): SEQ ID NO: 4198; WAN024GIP; Start 126; Stop 150
agaatttcacaatcccaataatcgg

SEQ ID NO: 376119 - DNA, 25 bp, Artificial
  probe
  misc_feature (1)..(25): SEQ ID NO: 4198; WAN024GIP; Start 128; Stop 152
aatttcacaatcccaataatcggtt

SEQ ID NO: 376120 - DNA, 25 bp, Artificial
  probe
  misc_feature (1)..(25): SEQ ID NO: 4198; WAN024GIP; Start 130; Stop 154
tttcacaatcccaataatcggtttg

SEQ ID NO: 376121 - DNA, 25 bp, Artificial
  probe
  misc_feature (1)..(25): SEQ ID NO: 4198; WAN024GIP; Start 133; Stop 157
cacaatcccaataatcggtttgata

SEQ ID NO: 376122 - DNA, 25 bp, Artificial
  probe
  misc_feature (1)..(25): SEQ ID NO: 4198; WAN024GIP; Start 132; Stop 156
tcacaatcccaataatcggtttgat

SEQ ID NO: 376123 - DNA, 25 bp, Artificial
  probe
  misc_feature (1)..(25): SEQ ID NO: 4198; WAN024GIP; Start 131; Stop 155
ttcacaatcccaataatcggtttga

SEQ ID NO: 376124 - DNA, 25 bp, Artificial
  probe
  misc_feature (1)..(25): SEQ ID NO: 4198; WAN024GIP; Start 134; Stop 158
acaatcccaataatcggtttgataa

SEQ ID NO: 376125 - DNA, 25 bp, Artificial
  probe
  misc_feature (1)..(25): SEQ ID NO: 4198; WAN024GIP; Start 125; Stop 149
aagaatttcacaatcccaataatcg

SEQ ID NO: 376126 - DNA, 25 bp, Artificial
  probe
  misc_feature (1)..(25): SEQ ID NO: 4198; WAN024GIP; Start 267; Stop 291
caacggcattatcatctttctttat

SEQ ID NO: 376127 - DNA, 25 bp, Artificial
  probe
  misc_feature (1)..(25): SEQ ID NO: 4198; WAN024GIP; Start 264; Stop 288
cgacaacggcattatcatctttctt

SEQ ID NO: 376128 - DNA, 25 bp, Artificial
  probe
  misc_feature (1)..(25): SEQ ID NO: 4198; WAN024GIP; Start 271; Stop 295
ggcattatcatctttctttatcgtt

SEQ ID NO: 376129 - DNA, 25 bp, Artificial
  probe
  misc_feature (1)..(25): SEQ ID NO: 4198; WAN024GIP; Start 268; Stop 292
aacggcattatcatctttctttatc

SEQ ID NO: 376130 - DNA, 25 bp, Artificial
  probe
  misc_feature (1)..(25): SEQ ID NO: 4198; WAN024GIP; Start 135; Stop 159
caatcccaataatcggtttgataaa

SEQ ID NO: 376131 - DNA, 25 bp, Artificial
  probe
  misc_feature (1)..(25): SEQ ID NO: 4198; WAN024GIP; Start 118; Stop 142
catccaaaagaatttcacaatccca

SEQ ID NO: 376132 - DNA, 25 bp, Artificial
  probe
  misc_feature (1)..(25): SEQ ID NO: 4198; WAN024GIP; Start 117; Stop 141
tcatccaaaagaatttcacaatccc

SEQ ID NO: 376133 - DNA, 25 bp, Artificial
  probe
  misc_feature (1)..(25): SEQ ID NO: 4198; WAN024GIP; Start 120; Stop 144
tccaaaagaatttcacaatcccaat

SEQ ID NO: 376134 - DNA, 25 bp, Artificial
  probe
  misc_feature (1)..(25): SEQ ID NO: 4198; WAN024GIP; Start 119; Stop 143
atccaaaagaatttcacaatcccaa

SEQ ID NO: 376135 - DNA, 25 bp, Artificial
  probe
  misc_feature (1)..(25): SEQ ID NO: 4198; WAN024GIP; Start 272; Stop 296
gcattatcatctttctttatcgttt

SEQ ID NO: 376136 - DNA, 25 bp, Artificial
  probe
  misc_feature (1)..(25): SEQ ID NO: 4198; WAN024GIP; Start 124; Stop 148
aaagaatttcacaatcccaataatc

SEQ ID NO: 376137 - DNA, 25 bp, Artificial
  probe
  misc_feature (1)..(25): SEQ ID NO: 4198; WAN024GIP; Start 116; Stop 140
atcatccaaaagaatttcacaatcc

SEQ ID NO: 376138 - DNA, 25 bp, Artificial
  probe
  misc_feature (1)..(25): SEQ ID NO: 4198; WAN024GIP; Start 121; Stop 145
ccaaaagaatttcacaatcccaata

SEQ ID NO: 376139 - DNA, 25 bp, Artificial
  probe
  misc_feature (1)..(25): SEQ ID NO: 4198; WAN024GIP; Start 290; Stop 314
atcgttttcattacttttacacctt

SEQ ID NO: 376140 - DNA, 25 bp, Artificial
  probe
  misc_feature (1)..(25): SEQ ID NO: 4198; WAN024GIP; Start 74; Stop 98
aacactatcttgtaaaacagcaatt

SEQ ID NO: 376141 - DNA, 25 bp, Artificial
  probe
  misc_feature (1)..(25): SEQ ID NO: 4198; WAN024GIP; Start 73; Stop 97
aaacactatcttgtaaaacagcaat

SEQ ID NO: 376142 - DNA, 25 bp, Artificial
  probe
  misc_feature (1)..(25): SEQ ID NO: 4198; WAN024GIP; Start 58; Stop 82
ccaatccaatatcttaaacactatc

SEQ ID NO: 376143 - DNA, 25 bp, Artificial
  probe
  misc_feature (1)..(25): SEQ ID NO: 4198; WAN024GIP; Start 136; Stop 160
aatcccaataatcggtttgataaaa

SEQ ID NO: 376144 - DNA, 25 bp, Artificial
  probe
  misc_feature (1)..(25): SEQ ID NO: 4198; WAN024GIP; Start 115; Stop 139
gatcatccaaaagaatttcacaatc

SEQ ID NO: 376145 - DNA, 25 bp, Artificial
  probe
  misc_feature (1)..(25): SEQ ID NO: 4199; WAN024GFI; Start 530; Stop 554
cgacctatctgagttccttgattaa

SEQ ID NO: 376146 - DNA, 25 bp, Artificial
  probe
  misc_feature (1)..(25): SEQ ID NO: 4199; WAN024GFI; Start 529; Stop 553
ccgacctatctgagttccttgatta

SEQ ID NO: 376147 - DNA, 25 bp, Artificial
  probe
  misc_feature (1)..(25): SEQ ID NO: 4199; WAN024GFI; Start 531; Stop 555
gacctatctgagttccttgattaag

SEQ ID NO: 376148 - DNA, 25 bp, Artificial
  probe
  misc_feature (1)..(25): SEQ ID NO: 4199; WAN024GFI; Start 532; Stop 556
acctatctgagttccttgattaaga

SEQ ID NO: 376149 - DNA, 25 bp, Artificial
  probe
  misc_feature (1)..(25): SEQ ID NO: 4199; WAN024GFI; Start 15; Stop 39
gagcatgacctacacaatcttaatc

SEQ ID NO: 376150 - DNA, 25 bp, Artificial
  probe
  misc_feature (1)..(25): SEQ ID NO: 4199; WAN024GFI; Start 46; Stop 70
gatgaatatctggtaagacaaggtt

SEQ ID NO: 376151 - DNA, 25 bp, Artificial
  probe
  misc_feature (1)..(25): SEQ ID NO: 4199; WAN024GFI; Start 16; Stop 40
agcatgacctacacaatcttaatcg

SEQ ID NO: 376152 - DNA, 25 bp, Artificial
  probe
  misc_feature (1)..(25): SEQ ID NO: 4199; WAN024GFI; Start 14; Stop 38
agagcatgacctacacaatcttaat

SEQ ID NO: 376153 - DNA, 25 bp, Artificial
  probe
  misc_feature (1)..(25): SEQ ID NO: 4199; WAN024GFI; Start 13; Stop 37
cagagcatgacctacacaatcttaa

SEQ ID NO: 376154 - DNA, 25 bp, Artificial
  probe
  misc_feature (1)..(25): SEQ ID NO: 4199; WAN024GFI; Start 17; Stop 41
gcatgacctacacaatcttaatcgt

SEQ ID NO: 376155 - DNA, 25 bp, Artificial
  probe
  misc_feature (1)..(25): SEQ ID NO: 4199; WAN024GFI; Start 524; Stop 548
ttagtccgacctatctgagttcctt

SEQ ID NO: 376156 - DNA, 25 bp, Artificial
  probe
  misc_feature (1)..(25): SEQ ID NO: 4199; WAN024GFI; Start 18; Stop 42
catgacctacacaatcttaatcgta

SEQ ID NO: 376157 - DNA, 25 bp, Artificial
  probe
  misc_feature (1)..(25): SEQ ID NO: 4199; WAN024GFI; Start 533; Stop 557
cctatctgagttccttgattaagaa

SEQ ID NO: 376158 - DNA, 25 bp, Artificial
  probe
  misc_feature (1)..(25): SEQ ID NO: 4199; WAN024GFI; Start 575; Stop 599
ttcaggattatctggtgagagaacg

SEQ ID NO: 376159 - DNA, 25 bp, Artificial
  probe
  misc_feature (1)..(25): SEQ ID NO: 4199; WAN024GFI; Start 528; Stop 552
tccgacctatctgagttccttgatt

SEQ ID NO: 376160 - DNA, 25 bp, Artificial
  probe
  misc_feature (1)..(25): SEQ ID NO: 4199; WAN024GFI; Start 398; Stop 422
aagagaaagaagagcagttacaaga

SEQ ID NO: 376161 - DNA, 25 bp, Artificial
  probe
  misc_feature (1)..(25): SEQ ID NO: 4199; WAN024GFI; Start 399; Stop 423
agagaaagaagagcagttacaagat

SEQ ID NO: 376162 - DNA, 25 bp, Artificial
  probe
  misc_feature (1)..(25): SEQ ID NO: 4199; WAN024GFI; Start 397; Stop 421
gaagagaaagaagagcagttacaag

SEQ ID NO: 376163 - DNA, 25 bp, Artificial
  probe
  misc_feature (1)..(25): SEQ ID NO: 4199; WAN024GFI; Start 394; Stop 418
aaggaagagaaagaagagcagttac

SEQ ID NO: 376164 - DNA, 25 bp, Artificial
  probe
  misc_feature (1)..(25): SEQ ID NO: 4199; WAN024GFI; Start 393; Stop 417
caaggaagagaaagaagagcagtta

SEQ ID NO: 376165 - DNA, 25 bp, Artificial
  probe
  misc_feature (1)..(25): SEQ ID NO: 4199; WAN024GFI; Start 396; Stop 420
ggaagagaaagaagagcagttacaa

SEQ ID NO: 376166 - DNA, 25 bp, Artificial
  probe
  misc_feature (1)..(25): SEQ ID NO: 4199; WAN024GFI; Start 580; Stop 604
gattatctggtgagagaacgtgtta

SEQ ID NO: 376167 - DNA, 25 bp, Artificial
  probe
  misc_feature (1)..(25): SEQ ID NO: 4199; WAN024GFI; Start 581; Stop 605
attatctggtgagagaacgtgttaa

SEQ ID NO: 376168 - DNA, 25 bp, Artificial
  probe
  misc_feature (1)..(25): SEQ ID NO: 4199; WAN024GFI; Start 525; Stop 549
tagtccgacctatctgagttccttg

SEQ ID NO: 376169 - DNA, 25 bp, Artificial
  probe
  misc_feature (1)..(25): SEQ ID NO: 4199; WAN024GFI; Start 400; Stop 424
gagaaagaagagcagttacaagatt

SEQ ID NO: 376170 - DNA, 25 bp, Artificial
  probe
  misc_feature (1)..(25): SEQ ID NO: 4199; WAN024GFI; Start 546; Stop 570
cttgattaagaaagagttgggcttg

SEQ ID NO: 376171 - DNA, 25 bp, Artificial
  probe
  misc_feature (1)..(25): SEQ ID NO: 4199; WAN024GFI; Start 542; Stop 566
gttccttgattaagaaagagttggg

SEQ ID NO: 376172 - DNA, 25 bp, Artificial
  probe
  misc_feature (1)..(25): SEQ ID NO: 4199; WAN024GFI; Start 389; Stop 413
tagacaaggaagagaaagaagagca

SEQ ID NO: 376173 - DNA, 25 bp, Artificial
  probe
  misc_feature (1)..(25): SEQ ID NO: 4199; WAN024GFI; Start 240; Stop 264
ctatcctcaggttcatttggtcttt

SEQ ID NO: 376174 - DNA, 25 bp, Artificial
  probe
  misc_feature (1)..(25): SEQ ID NO: 4199; WAN024GFI; Start 395; Stop 419
aggaagagaaagaagagcagttaca

SEQ ID NO: 376175 - DNA, 25 bp, Artificial
  probe
  misc_feature (1)..(25): SEQ ID NO: 4199; WAN024GFI; Start 54; Stop 78
tctggtaagacaaggtttgactaaa

SEQ ID NO: 376176 - DNA, 25 bp, Artificial
  probe
  misc_feature (1)..(25): SEQ ID NO: 4199; WAN024GFI; Start 387; Stop 411
actagacaaggaagagaaagaagag

SEQ ID NO: 376177 - DNA, 25 bp, Artificial
  probe
  misc_feature (1)..(25): SEQ ID NO: 4199; WAN024GFI; Start 388; Stop 412
ctagacaaggaagagaaagaagagc

SEQ ID NO: 376178 - DNA, 25 bp, Artificial
  probe
  misc_feature (1)..(25): SEQ ID NO: 4200; WAN024FX4; Start 895; Stop 919
aacactgatactccacttattcctc

SEQ ID NO: 376179 - DNA, 25 bp, Artificial
  probe
  misc_feature (1)..(25): SEQ ID NO: 4200; WAN024FX4; Start 1268; Stop 1292
aagatggtcgctatcaagtgttatt

SEQ ID NO: 376180 - DNA, 25 bp, Artificial
  probe
  misc_feature (1)..(25): SEQ ID NO: 4200; WAN024FX4; Start 833; Stop 857
attacgatacagtggaccttcaatt

SEQ ID NO: 376181 - DNA, 25 bp, Artificial
  probe
  misc_feature (1)..(25): SEQ ID NO: 4200; WAN024FX4; Start 832; Stop 856
aattacgatacagtggaccttcaat

SEQ ID NO: 376182 - DNA, 25 bp, Artificial
  probe
  misc_feature (1)..(25): SEQ ID NO: 4200; WAN024FX4; Start 824; Stop 848
tgaacaagaattacgatacagtgga

SEQ ID NO: 376183 - DNA, 25 bp, Artificial
  probe
  misc_feature (1)..(25): SEQ ID NO: 4200; WAN024FX4; Start 825; Stop 849
gaacaagaattacgatacagtggac

SEQ ID NO: 376184 - DNA, 25 bp, Artificial
  probe
  misc_feature (1)..(25): SEQ ID NO: 4200; WAN024FX4; Start 1269; Stop 1293
agatggtcgctatcaagtgttattc

SEQ ID NO: 376185 - DNA, 25 bp, Artificial
  probe
  misc_feature (1)..(25): SEQ ID NO: 4200; WAN024FX4; Start 1267; Stop 1291
gaagatggtcgctatcaagtgttat

SEQ ID NO: 376186 - DNA, 25 bp, Artificial
  probe
  misc_feature (1)..(25): SEQ ID NO: 4200; WAN024FX4; Start 1271; Stop 1295
atggtcgctatcaagtgttattcag

SEQ ID NO: 376187 - DNA, 25 bp, Artificial
  probe
  misc_feature (1)..(25): SEQ ID NO: 4200; WAN024FX4; Start 1270; Stop 1294
gatggtcgctatcaagtgttattca

SEQ ID NO: 376188 - DNA, 25 bp, Artificial
  probe
  misc_feature (1)..(25): SEQ ID NO: 4200; WAN024FX4; Start 826; Stop 850
aacaagaattacgatacagtggacc

SEQ ID NO: 376189 - DNA, 25 bp, Artificial
  probe
  misc_feature (1)..(25): SEQ ID NO: 4200; WAN024FX4; Start 1279; Stop 1303
tatcaagtgttattcagcgaacctt

SEQ ID NO: 376190 - DNA, 25 bp, Artificial
  probe
  misc_feature (1)..(25): SEQ ID NO: 4200; WAN024FX4; Start 829; Stop 853
aagaattacgatacagtggaccttc

SEQ ID NO: 376191 - DNA, 25 bp, Artificial
  probe
  misc_feature (1)..(25): SEQ ID NO: 4200; WAN024FX4; Start 831; Stop 855
gaattacgatacagtggaccttcaa

SEQ ID NO: 376192 - DNA, 25 bp, Artificial
  probe
  misc_feature (1)..(25): SEQ ID NO: 4200; WAN024FX4; Start 828; Stop 852
caagaattacgatacagtggacctt

SEQ ID NO: 376193 - DNA, 25 bp, Artificial
  probe
  misc_feature (1)..(25): SEQ ID NO: 4200; WAN024FX4; Start 1278; Stop 1302
ctatcaagtgttattcagcgaacct

SEQ ID NO: 376194 - DNA, 25 bp, Artificial
  probe
  misc_feature (1)..(25): SEQ ID NO: 4200; WAN024FX4; Start 926; Stop 950
aaggtcaatatggtgatggagaatt

SEQ ID NO: 376195 - DNA, 25 bp, Artificial
  probe
  misc_feature (1)..(25): SEQ ID NO: 4200; WAN024FX4; Start 814; Stop 838
ggagatcaactgaacaagaattacg

SEQ ID NO: 376196 - DNA, 25 bp, Artificial
  probe
  misc_feature (1)..(25): SEQ ID NO: 4200; WAN024FX4; Start 1266; Stop 1290
agaagatggtcgctatcaagtgtta

SEQ ID NO: 376197 - DNA, 25 bp, Artificial
  probe
  misc_feature (1)..(25): SEQ ID NO: 4200; WAN024FX4; Start 1265; Stop 1289
tagaagatggtcgctatcaagtgtt

SEQ ID NO: 376198 - DNA, 25 bp, Artificial
  probe
  misc_feature (1)..(25): SEQ ID NO: 4200; WAN024FX4; Start 897; Stop 921
cactgatactccacttattcctcgt

SEQ ID NO: 376199 - DNA, 25 bp, Artificial
  probe
  misc_feature (1)..(25): SEQ ID NO: 4200; WAN024FX4; Start 896; Stop 920
acactgatactccacttattcctcg

SEQ ID NO: 376200 - DNA, 25 bp, Artificial
  probe
  misc_feature (1)..(25): SEQ ID NO: 4200; WAN024FX4; Start 830; Stop 854
agaattacgatacagtggaccttca

SEQ ID NO: 376201 - DNA, 25 bp, Artificial
  probe
  misc_feature (1)..(25): SEQ ID NO: 4200; WAN024FX4; Start 827; Stop 851
acaagaattacgatacagtggacct

SEQ ID NO: 376202 - DNA, 25 bp, Artificial
  probe
  misc_feature (1)..(25): SEQ ID NO: 4200; WAN024FX4; Start 819; Stop 843
tcaactgaacaagaattacgataca

SEQ ID NO: 376203 - DNA, 25 bp, Artificial
  probe
  misc_feature (1)..(25): SEQ ID NO: 4200; WAN024FX4; Start 811; Stop 835
gaaggagatcaactgaacaagaatt

SEQ ID NO: 376204 - DNA, 25 bp, Artificial
  probe
  misc_feature (1)..(25): SEQ ID NO: 4200; WAN024FX4; Start 580; Stop 604
gcagacactcataaccatatcatat

SEQ ID NO: 376205 - DNA, 25 bp, Artificial
  probe
  misc_feature (1)..(25): SEQ ID NO: 4200; WAN024FX4; Start 815; Stop 839
gagatcaactgaacaagaattacga

SEQ ID NO: 376206 - DNA, 25 bp, Artificial
  probe
  misc_feature (1)..(25): SEQ ID NO: 4200; WAN024FX4; Start 1263; Stop 1287
aatagaagatggtcgctatcaagtg

SEQ ID NO: 376207 - DNA, 25 bp, Artificial
  probe
  misc_feature (1)..(25): SEQ ID NO: 4200; WAN024FX4; Start 813; Stop 837
aggagatcaactgaacaagaattac

SEQ ID NO: 376208 - DNA, 25 bp, Artificial
  probe
  misc_feature (1)..(25): SEQ ID NO: 4200; WAN024FX4; Start 619; Stop 643
aatcgctatgtgctaattactcgta

SEQ ID NO: 376209 - DNA, 25 bp, Artificial
  probe
  misc_feature (1)..(25): SEQ ID NO: 4200; WAN024FX4; Start 623; Stop 647
gctatgtgctaattactcgtacttg

SEQ ID NO: 376210 - DNA, 25 bp, Artificial
  probe
  misc_feature (1)..(25): SEQ ID NO: 4200; WAN024FX4; Start 481; Stop 505
attgattacggtaacggtgttcatt

SEQ ID NO: 376211 - DNA, 25 bp, Artificial
  probe
  misc_feature (1)..(25): SEQ ID NO: 4201; WAN024FSF; Start 175; Stop 199
ttcttcagcacaaatcttatcctca

SEQ ID NO: 376212 - DNA, 25 bp, Artificial
  probe
  misc_feature (1)..(25): SEQ ID NO: 4201; WAN024FSF; Start 170; Stop 194
caaccttcttcagcacaaatcttat

SEQ ID NO: 376213 - DNA, 25 bp, Artificial
  probe
  misc_feature (1)..(25): SEQ ID NO: 4201; WAN024FSF; Start 19; Stop 43
gaccacatcataaatcagaccaaac

SEQ ID NO: 376214 - DNA, 25 bp, Artificial
  probe
  misc_feature (1)..(25): SEQ ID NO: 4201; WAN024FSF; Start 174; Stop 198
cttcttcagcacaaatcttatcctc

SEQ ID NO: 376215 - DNA, 25 bp, Artificial
  probe
  misc_feature (1)..(25): SEQ ID NO: 4201; WAN024FSF; Start 171; Stop 195
aaccttcttcagcacaaatcttatc

SEQ ID NO: 376216 - DNA, 25 bp, Artificial
  probe
  misc_feature (1)..(25): SEQ ID NO: 4201; WAN024FSF; Start 20; Stop 44
accacatcataaatcagaccaaact

SEQ ID NO: 376217 - DNA, 25 bp, Artificial
  probe
  misc_feature (1)..(25): SEQ ID NO: 4201; WAN024FSF; Start 176; Stop 200
tcttcagcacaaatcttatcctcag

SEQ ID NO: 376218 - DNA, 25 bp, Artificial
  probe
  misc_feature (1)..(25): SEQ ID NO: 4201; WAN024FSF; Start 173; Stop 197
ccttcttcagcacaaatcttatcct

SEQ ID NO: 376219 - DNA, 25 bp, Artificial
  probe
  misc_feature (1)..(25): SEQ ID NO: 4201; WAN024FSF; Start 169; Stop 193
acaaccttcttcagcacaaatctta

SEQ ID NO: 376220 - DNA, 25 bp, Artificial
  probe
  misc_feature (1)..(25): SEQ ID NO: 4201; WAN024FSF; Start 172; Stop 196
accttcttcagcacaaatcttatcc

SEQ ID NO: 376221 - DNA, 25 bp, Artificial
  probe
  misc_feature (1)..(25): SEQ ID NO: 4201; WAN024FSF; Start 15; Stop 39
ctttgaccacatcataaatcagacc

SEQ ID NO: 376222 - DNA, 25 bp, Artificial
  probe
  misc_feature (1)..(25): SEQ ID NO: 4201; WAN024FSF; Start 14; Stop 38
cctttgaccacatcataaatcagac

SEQ ID NO: 376223 - DNA, 25 bp, Artificial
  probe
  misc_feature (1)..(25): SEQ ID NO: 4201; WAN024FSF; Start 18; Stop 42
tgaccacatcataaatcagaccaaa

SEQ ID NO: 376224 - DNA, 25 bp, Artificial
  probe
  misc_feature (1)..(25): SEQ ID NO: 4201; WAN024FSF; Start 17; Stop 41
ttgaccacatcataaatcagaccaa

SEQ ID NO: 376225 - DNA, 25 bp, Artificial
  probe
  misc_feature (1)..(25): SEQ ID NO: 4201; WAN024FSF; Start 16; Stop 40
tttgaccacatcataaatcagacca

SEQ ID NO: 376226 - DNA, 25 bp, Artificial
  probe
  misc_feature (1)..(25): SEQ ID NO: 4201; WAN024FSF; Start 13; Stop 37
ccctttgaccacatcataaatcaga

SEQ ID NO: 376227 - DNA, 25 bp, Artificial
  probe
  misc_feature (1)..(25): SEQ ID NO: 4201; WAN024FSF; Start 177; Stop 201
cttcagcacaaatcttatcctcagg

SEQ ID NO: 376228 - DNA, 25 bp, Artificial
  probe
  misc_feature (1)..(25): SEQ ID NO: 4201; WAN024FSF; Start 318; Stop 342
gaatgtactgacctgctttcttaac

SEQ ID NO: 376229 - DNA, 25 bp, Artificial
  probe
  misc_feature (1)..(25): SEQ ID NO: 4201; WAN024FSF; Start 300; Stop 324
cttcctgcatatggtcaagaatgta

SEQ ID NO: 376230 - DNA, 25 bp, Artificial
  probe
  misc_feature (1)..(25): SEQ ID NO: 4201; WAN024FSF; Start 168; Stop 192
gacaaccttcttcagcacaaatctt

SEQ ID NO: 376231 - DNA, 25 bp, Artificial
  probe
  misc_feature (1)..(25): SEQ ID NO: 4201; WAN024FSF; Start 301; Stop 325
ttcctgcatatggtcaagaatgtac

SEQ ID NO: 376232 - DNA, 25 bp, Artificial
  probe
  misc_feature (1)..(25): SEQ ID NO: 4201; WAN024FSF; Start 24; Stop 48
catcataaatcagaccaaactgtcc

SEQ ID NO: 376233 - DNA, 25 bp, Artificial
  probe
  misc_feature (1)..(25): SEQ ID NO: 4201; WAN024FSF; Start 21; Stop 45
ccacatcataaatcagaccaaactg

SEQ ID NO: 376234 - DNA, 25 bp, Artificial
  probe
  misc_feature (1)..(25): SEQ ID NO: 4201; WAN024FSF; Start 304; Stop 328
ctgcatatggtcaagaatgtactga

SEQ ID NO: 376235 - DNA, 25 bp, Artificial
  probe
  misc_feature (1)..(25): SEQ ID NO: 4201; WAN024FSF; Start 22; Stop 46
cacatcataaatcagaccaaactgt

SEQ ID NO: 376236 - DNA, 25 bp, Artificial
  probe
  misc_feature (1)..(25): SEQ ID NO: 4201; WAN024FSF; Start 410; Stop 434
ctgaactgctcggtaaagtgaatag

SEQ ID NO: 376237 - DNA, 25 bp, Artificial
  probe
  misc_feature (1)..(25): SEQ ID NO: 4201; WAN024FSF; Start 23; Stop 47
acatcataaatcagaccaaactgtc

SEQ ID NO: 376238 - DNA, 25 bp, Artificial
  probe
  misc_feature (1)..(25): SEQ ID NO: 4201; WAN024FSF; Start 25; Stop 49
atcataaatcagaccaaactgtccc

SEQ ID NO: 376239 - DNA, 25 bp, Artificial
  probe
  misc_feature (1)..(25): SEQ ID NO: 4201; WAN024FSF; Start 303; Stop 327
cctgcatatggtcaagaatgtactg

SEQ ID NO: 376240 - DNA, 25 bp, Artificial
  probe
  misc_feature (1)..(25): SEQ ID NO: 4201; WAN024FSF; Start 302; Stop 326
tcctgcatatggtcaagaatgtact

SEQ ID NO: 376241 - DNA, 25 bp, Artificial
  probe
  misc_feature (1)..(25): SEQ ID NO: 4201; WAN024FSF; Start 320; Stop 344
atgtactgacctgctttcttaacaa

SEQ ID NO: 376242 - DNA, 25 bp, Artificial
  probe
  misc_feature (1)..(25): SEQ ID NO: 4201; WAN024FSF; Start 319; Stop 343
aatgtactgacctgctttcttaaca

SEQ ID NO: 376243 - DNA, 25 bp, Artificial
  probe
  misc_feature (1)..(25): SEQ ID NO: 4201; WAN024FSF; Start 321; Stop 345
tgtactgacctgctttcttaacaag

SEQ ID NO: 376244 - DNA, 25 bp, Artificial
  probe
  misc_feature (1)..(25): SEQ ID NO: 4202; WAN024CBH; Start 48; Stop 72
accttgcattgtccataatgataag

SEQ ID NO: 376245 - DNA, 25 bp, Artificial
  probe
  misc_feature (1)..(25): SEQ ID NO: 4202; WAN024CBH; Start 47; Stop 71
aaccttgcattgtccataatgataa

SEQ ID NO: 376246 - DNA, 25 bp, Artificial
  probe
  misc_feature (1)..(25): SEQ ID NO: 4202; WAN024CBH; Start 53; Stop 77
gcattgtccataatgataagggatg

SEQ ID NO: 376247 - DNA, 25 bp, Artificial
  probe
  misc_feature (1)..(25): SEQ ID NO: 4202; WAN024CBH; Start 42; Stop 66
tgtgaaaccttgcattgtccataat

SEQ ID NO: 376248 - DNA, 25 bp, Artificial
  probe
  misc_feature (1)..(25): SEQ ID NO: 4202; WAN024CBH; Start 41; Stop 65
ctgtgaaaccttgcattgtccataa

SEQ ID NO: 376249 - DNA, 25 bp, Artificial
  probe
  misc_feature (1)..(25): SEQ ID NO: 4202; WAN024CBH; Start 19; Stop 43
ctgctccttacacatgttcattctg

SEQ ID NO: 376250 - DNA, 25 bp, Artificial
  probe
  misc_feature (1)..(25): SEQ ID NO: 4202; WAN024CBH; Start 36; Stop 60
tcattctgtgaaaccttgcattgtc

SEQ ID NO: 376251 - DNA, 25 bp, Artificial
  probe
  misc_feature (1)..(25): SEQ ID NO: 4202; WAN024CBH; Start 40; Stop 64
tctgtgaaaccttgcattgtccata

SEQ ID NO: 376252 - DNA, 25 bp, Artificial
  probe
  misc_feature (1)..(25): SEQ ID NO: 4202; WAN024CBH; Start 52; Stop 76
tgcattgtccataatgataagggat

SEQ ID NO: 376253 - DNA, 25 bp, Artificial
  probe
  misc_feature (1)..(25): SEQ ID NO: 4202; WAN024CBH; Start 51; Stop 75
ttgcattgtccataatgataaggga

SEQ ID NO: 376254 - DNA, 25 bp, Artificial
  probe
  misc_feature (1)..(25): SEQ ID NO: 4202; WAN024CBH; Start 50; Stop 74
cttgcattgtccataatgataaggg

SEQ ID NO: 376255 - DNA, 25 bp, Artificial
  probe
  misc_feature (1)..(25): SEQ ID NO: 4202; WAN024CBH; Start 45; Stop 69
gaaaccttgcattgtccataatgat

SEQ ID NO: 376256 - DNA, 25 bp, Artificial
  probe
  misc_feature (1)..(25): SEQ ID NO: 4202; WAN024CBH; Start 49; Stop 73
ccttgcattgtccataatgataagg

SEQ ID NO: 376257 - DNA, 25 bp, Artificial
  probe
  misc_feature (1)..(25): SEQ ID NO: 4202; WAN024CBH; Start 46; Stop 70
aaaccttgcattgtccataatgata

SEQ ID NO: 376258 - DNA, 25 bp, Artificial
  probe
  misc_feature (1)..(25): SEQ ID NO: 4202; WAN024CBH; Start 44; Stop 68
tgaaaccttgcattgtccataatga

SEQ ID NO: 376259 - DNA, 25 bp, Artificial
  probe
  misc_feature (1)..(25): SEQ ID NO: 4202; WAN024CBH; Start 43; Stop 67
gtgaaaccttgcattgtccataatg

SEQ ID NO: 376260 - DNA, 25 bp, Artificial
  probe
  misc_feature (1)..(25): SEQ ID NO: 4202; WAN024CBH; Start 5; Stop 29
taacagtctatgccctgctccttac

SEQ ID NO: 376261 - DNA, 25 bp, Artificial
  probe
  misc_feature (1)..(25): SEQ ID NO: 4202; WAN024CBH; Start 4; Stop 28
gtaacagtctatgccctgctcctta

SEQ ID NO: 376262 - DNA, 25 bp, Artificial
  probe
  misc_feature (1)..(25): SEQ ID NO: 4202; WAN024CBH; Start 37; Stop 61
cattctgtgaaaccttgcattgtcc

SEQ ID NO: 376263 - DNA, 25 bp, Artificial
  probe
  misc_feature (1)..(25): SEQ ID NO: 4202; WAN024CBH; Start 18; Stop 42
cctgctccttacacatgttcattct

SEQ ID NO: 376264 - DNA, 25 bp, Artificial
  probe
  misc_feature (1)..(25): SEQ ID NO: 4202; WAN024CBH; Start 20; Stop 44
tgctccttacacatgttcattctgt

SEQ ID NO: 376265 - DNA, 25 bp, Artificial
  probe
  misc_feature (1)..(25): SEQ ID NO: 4202; WAN024CBH; Start 39; Stop 63
ttctgtgaaaccttgcattgtccat

SEQ ID NO: 376266 - DNA, 25 bp, Artificial
  probe
  misc_feature (1)..(25): SEQ ID NO: 4202; WAN024CBH; Start 38; Stop 62
attctgtgaaaccttgcattgtcca

SEQ ID NO: 376267 - DNA, 25 bp, Artificial
  probe
  misc_feature (1)..(25): SEQ ID NO: 4202; WAN024CBH; Start 58; Stop 82
gtccataatgataagggatggtgta

SEQ ID NO: 376268 - DNA, 25 bp, Artificial
  probe
  misc_feature (1)..(25): SEQ ID NO: 4202; WAN024CBH; Start 56; Stop 80
ttgtccataatgataagggatggtg

SEQ ID NO: 376269 - DNA, 25 bp, Artificial
  probe
  misc_feature (1)..(25): SEQ ID NO: 4202; WAN024CBH; Start 34; Stop 58
gttcattctgtgaaaccttgcattg

SEQ ID NO: 376270 - DNA, 25 bp, Artificial
  probe
  misc_feature (1)..(25): SEQ ID NO: 4202; WAN024CBH; Start 32; Stop 56
atgttcattctgtgaaaccttgcat

SEQ ID NO: 376271 - DNA, 25 bp, Artificial
  probe
  misc_feature (1)..(25): SEQ ID NO: 4202; WAN024CBH; Start 55; Stop 79
attgtccataatgataagggatggt

SEQ ID NO: 376272 - DNA, 25 bp, Artificial
  probe
  misc_feature (1)..(25): SEQ ID NO: 4202; WAN024CBH; Start 54; Stop 78
cattgtccataatgataagggatgg

SEQ ID NO: 376273 - DNA, 25 bp, Artificial
  probe
  misc_feature (1)..(25): SEQ ID NO: 4202; WAN024CBH; Start 35; Stop 59
ttcattctgtgaaaccttgcattgt

SEQ ID NO: 376274 - DNA, 25 bp, Artificial
  probe
  misc_feature (1)..(25): SEQ ID NO: 4202; WAN024CBH; Start 33; Stop 57
tgttcattctgtgaaaccttgcatt

SEQ ID NO: 376275 - DNA, 25 bp, Artificial
  probe
  misc_feature (1)..(25): SEQ ID NO: 4202; WAN024CBH; Start 59; Stop 83
tccataatgataagggatggtgtat

SEQ ID NO: 376276 - DNA, 25 bp, Artificial
  probe
  misc_feature (1)..(25): SEQ ID NO: 4202; WAN024CBH; Start 57; Stop 81
tgtccataatgataagggatggtgt

SEQ ID NO: 376277 - DNA, 25 bp, Artificial
  probe
  misc_feature (1)..(25): SEQ ID NO: 4203; WAN024D5E; Start 72; Stop 96
caatagcagaagccttcaacacatc

SEQ ID NO: 376278 - DNA, 25 bp, Artificial
  probe
  misc_feature (1)..(25): SEQ ID NO: 4203; WAN024D5E; Start 213; Stop 237
aacgaacagattggttaaagaactt

SEQ ID NO: 376279 - DNA, 25 bp, Artificial
  probe
  misc_feature (1)..(25): SEQ ID NO: 4203; WAN024D5E; Start 212; Stop 236
aaacgaacagattggttaaagaact

SEQ ID NO: 376280 - DNA, 25 bp, Artificial
  probe
  misc_feature (1)..(25): SEQ ID NO: 4203; WAN024D5E; Start 211; Stop 235
caaacgaacagattggttaaagaac

SEQ ID NO: 376281 - DNA, 25 bp, Artificial
  probe
  misc_feature (1)..(25): SEQ ID NO: 4203; WAN024D5E; Start 74; Stop 98
atagcagaagccttcaacacatcaa

SEQ ID NO: 376282 - DNA, 25 bp, Artificial
  probe
  misc_feature (1)..(25): SEQ ID NO: 4203; WAN024D5E; Start 73; Stop 97
aatagcagaagccttcaacacatca

SEQ ID NO: 376283 - DNA, 25 bp, Artificial
  probe
  misc_feature (1)..(25): SEQ ID NO: 4203; WAN024D5E; Start 214; Stop 238
acgaacagattggttaaagaactta

SEQ ID NO: 376284 - DNA, 25 bp, Artificial
  probe
  misc_feature (1)..(25): SEQ ID NO: 4203; WAN024D5E; Start 248; Stop 272
ttaaagattgcttcaacggaacctt

SEQ ID NO: 376285 - DNA, 25 bp, Artificial
  probe
  misc_feature (1)..(25): SEQ ID NO: 4203; WAN024D5E; Start 249; Stop 273
taaagattgcttcaacggaaccttg

SEQ ID NO: 376286 - DNA, 25 bp, Artificial
  probe
  misc_feature (1)..(25): SEQ ID NO: 4203; WAN024D5E; Start 288; Stop 312
attcgactttctcaccatccatatt

SEQ ID NO: 376287 - DNA, 25 bp, Artificial
  probe
  misc_feature (1)..(25): SEQ ID NO: 4203; WAN024D5E; Start 287; Stop 311
aattcgactttctcaccatccatat

SEQ ID NO: 376288 - DNA, 25 bp, Artificial
  probe
  misc_feature (1)..(25): SEQ ID NO: 4203; WAN024D5E; Start 286; Stop 310
aaattcgactttctcaccatccata

SEQ ID NO: 376289 - DNA, 25 bp, Artificial
  probe
  misc_feature (1)..(25): SEQ ID NO: 4203; WAN024D5E; Start 285; Stop 309
taaattcgactttctcaccatccat

SEQ ID NO: 376290 - DNA, 25 bp, Artificial
  probe
  misc_feature (1)..(25): SEQ ID NO: 4203; WAN024D5E; Start 281; Stop 305
gcattaaattcgactttctcaccat

SEQ ID NO: 376291 - DNA, 25 bp, Artificial
  probe
  misc_feature (1)..(25): SEQ ID NO: 4203; WAN024D5E; Start 284; Stop 308
ttaaattcgactttctcaccatcca

SEQ ID NO: 376292 - DNA, 25 bp, Artificial
  probe
  misc_feature (1)..(25): SEQ ID NO: 4203; WAN024D5E; Start 283; Stop 307
attaaattcgactttctcaccatcc

SEQ ID NO: 376293 - DNA, 25 bp, Artificial
  probe
  misc_feature (1)..(25): SEQ ID NO: 4203; WAN024D5E; Start 289; Stop 313
ttcgactttctcaccatccatattg

SEQ ID NO: 376294 - DNA, 25 bp, Artificial
  probe
  misc_feature (1)..(25): SEQ ID NO: 4203; WAN024D5E; Start 217; Stop 241
aacagattggttaaagaacttatcg

SEQ ID NO: 376295 - DNA, 25 bp, Artificial
  probe
  misc_feature (1)..(25): SEQ ID NO: 4203; WAN024D5E; Start 215; Stop 239
cgaacagattggttaaagaacttat

SEQ ID NO: 376296 - DNA, 25 bp, Artificial
  probe
  misc_feature (1)..(25): SEQ ID NO: 4203; WAN024D5E; Start 294; Stop 318
ctttctcaccatccatattggctag

SEQ ID NO: 376297 - DNA, 25 bp, Artificial
  probe
  misc_feature (1)..(25): SEQ ID NO: 4203; WAN024D5E; Start 282; Stop 306
cattaaattcgactttctcaccatc

SEQ ID NO: 376298 - DNA, 25 bp, Artificial
  probe
  misc_feature (1)..(25): SEQ ID NO: 4203; WAN024D5E; Start 110; Stop 134
gctgcattaaagatggtttctgtat

SEQ ID NO: 376299 - DNA, 25 bp, Artificial
  probe
  misc_feature (1)..(25): SEQ ID NO: 4203; WAN024D5E; Start 293; Stop 317
actttctcaccatccatattggcta

SEQ ID NO: 376300 - DNA, 25 bp, Artificial
  probe
  misc_feature (1)..(25): SEQ ID NO: 4203; WAN024D5E; Start 42; Stop 66
tttgaacaaaggtattagcgtttat

SEQ ID NO: 376301 - DNA, 25 bp, Artificial
  probe
  misc_feature (1)..(25): SEQ ID NO: 4203; WAN024D5E; Start 109; Stop 133
tgctgcattaaagatggtttctgta

SEQ ID NO: 376302 - DNA, 25 bp, Artificial
  probe
  misc_feature (1)..(25): SEQ ID NO: 4203; WAN024D5E; Start 218; Stop 242
acagattggttaaagaacttatcga

SEQ ID NO: 376303 - DNA, 25 bp, Artificial
  probe
  misc_feature (1)..(25): SEQ ID NO: 4203; WAN024D5E; Start 280; Stop 304
cgcattaaattcgactttctcacca

SEQ ID NO: 376304 - DNA, 25 bp, Artificial
  probe
  misc_feature (1)..(25): SEQ ID NO: 4203; WAN024D5E; Start 118; Stop 142
aaagatggtttctgtatctctgttt

SEQ ID NO: 376305 - DNA, 25 bp, Artificial
  probe
  misc_feature (1)..(25): SEQ ID NO: 4203; WAN024D5E; Start 111; Stop 135
ctgcattaaagatggtttctgtatc

SEQ ID NO: 376306 - DNA, 25 bp, Artificial
  probe
  misc_feature (1)..(25): SEQ ID NO: 4203; WAN024D5E; Start 43; Stop 67
ttgaacaaaggtattagcgtttata

SEQ ID NO: 376307 - DNA, 25 bp, Artificial
  probe
  misc_feature (1)..(25): SEQ ID NO: 4203; WAN024D5E; Start 75; Stop 99
tagcagaagccttcaacacatcaaa

SEQ ID NO: 376308 - DNA, 25 bp, Artificial
  probe
  misc_feature (1)..(25): SEQ ID NO: 4203; WAN024D5E; Start 121; Stop 145
gatggtttctgtatctctgttttca

SEQ ID NO: 376309 - DNA, 25 bp, Artificial
  probe
  misc_feature (1)..(25): SEQ ID NO: 4203; WAN024D5E; Start 81; Stop 105
aagccttcaacacatcaaaatcaag

SEQ ID NO: 376310 - DNA, 25 bp, Artificial
  probe
  misc_feature (1)..(25): SEQ ID NO: 4204; WAN024CKJ; Start 805; Stop 829
gttggagatggtacggaactattaa

SEQ ID NO: 376311 - DNA, 25 bp, Artificial
  probe
  misc_feature (1)..(25): SEQ ID NO: 4204; WAN024CKJ; Start 45; Stop 69
ttgtcaacattataagccagaacct

SEQ ID NO: 376312 - DNA, 25 bp, Artificial
  probe
  misc_feature (1)..(25): SEQ ID NO: 4204; WAN024CKJ; Start 804; Stop 828
tgttggagatggtacggaactatta

SEQ ID NO: 376313 - DNA, 25 bp, Artificial
  probe
  misc_feature (1)..(25): SEQ ID NO: 4204; WAN024CKJ; Start 46; Stop 70
tgtcaacattataagccagaacctt

SEQ ID NO: 376314 - DNA, 25 bp, Artificial
  probe
  misc_feature (1)..(25): SEQ ID NO: 4204; WAN024CKJ; Start 843; Stop 867
agcatgtgaactagaattagagaac

SEQ ID NO: 376315 - DNA, 25 bp, Artificial
  probe
  misc_feature (1)..(25): SEQ ID NO: 4204; WAN024CKJ; Start 530; Stop 554
aagtatatcaagccagcgattatat

SEQ ID NO: 376316 - DNA, 25 bp, Artificial
  probe
  misc_feature (1)..(25): SEQ ID NO: 4204; WAN024CKJ; Start 803; Stop 827
ttgttggagatggtacggaactatt

SEQ ID NO: 376317 - DNA, 25 bp, Artificial
  probe
  misc_feature (1)..(25): SEQ ID NO: 4204; WAN024CKJ; Start 844; Stop 868
gcatgtgaactagaattagagaaca

SEQ ID NO: 376318 - DNA, 25 bp, Artificial
  probe
  misc_feature (1)..(25): SEQ ID NO: 4204; WAN024CKJ; Start 623; Stop 647
cttacttaccacaatatgcagagga

SEQ ID NO: 376319 - DNA, 25 bp, Artificial
  probe
  misc_feature (1)..(25): SEQ ID NO: 4204; WAN024CKJ; Start 622; Stop 646
acttacttaccacaatatgcagagg

SEQ ID NO: 376320 - DNA, 25 bp, Artificial
  probe
  misc_feature (1)..(25): SEQ ID NO: 4204; WAN024CKJ; Start 1017; Stop 1041
tataggagcgatttcaggagatact

SEQ ID NO: 376321 - DNA, 25 bp, Artificial
  probe
  misc_feature (1)..(25): SEQ ID NO: 4204; WAN024CKJ; Start 773; Stop 797
ccgatttagcaaagagagttcattt

SEQ ID NO: 376322 - DNA, 25 bp, Artificial
  probe
  misc_feature (1)..(25): SEQ ID NO: 4204; WAN024CKJ; Start 625; Stop 649
tacttaccacaatatgcagaggatt

SEQ ID NO: 376323 - DNA, 25 bp, Artificial
  probe
  misc_feature (1)..(25): SEQ ID NO: 4204; WAN024CKJ; Start 624; Stop 648
ttacttaccacaatatgcagaggat

SEQ ID NO: 376324 - DNA, 25 bp, Artificial
  probe
  misc_feature (1)..(25): SEQ ID NO: 4204; WAN024CKJ; Start 286; Stop 310
gctctttcttctacgataggtgtta

SEQ ID NO: 376325 - DNA, 25 bp, Artificial
  probe
  misc_feature (1)..(25): SEQ ID NO: 4204; WAN024CKJ; Start 295; Stop 319
tctacgataggtgttatatttgggc

SEQ ID NO: 376326 - DNA, 25 bp, Artificial
  probe
  misc_feature (1)..(25): SEQ ID NO: 4204; WAN024CKJ; Start 192; Stop 216
aagagagactataaatggtgttgct

SEQ ID NO: 376327 - DNA, 25 bp, Artificial
  probe
  misc_feature (1)..(25): SEQ ID NO: 4204; WAN024CKJ; Start 1016; Stop 1040
ttataggagcgatttcaggagatac

SEQ ID NO: 376328 - DNA, 25 bp, Artificial
  probe
  misc_feature (1)..(25): SEQ ID NO: 4204; WAN024CKJ; Start 191; Stop 215
gaagagagactataaatggtgttgc

SEQ ID NO: 376329 - DNA, 25 bp, Artificial
  probe
  misc_feature (1)..(25): SEQ ID NO: 4204; WAN024CKJ; Start 283; Stop 307
tttgctctttcttctacgataggtg

SEQ ID NO: 376330 - DNA, 25 bp, Artificial
  probe
  misc_feature (1)..(25): SEQ ID NO: 4204; WAN024CKJ; Start 221; Stop 245
ttcgttcatacaccattgctaggag

SEQ ID NO: 376331 - DNA, 25 bp, Artificial
  probe
  misc_feature (1)..(25): SEQ ID NO: 4204; WAN024CKJ; Start 1013; Stop 1037
caattataggagcgatttcaggaga

SEQ ID NO: 376332 - DNA, 25 bp, Artificial
  probe
  misc_feature (1)..(25): SEQ ID NO: 4204; WAN024CKJ; Start 955; Stop 979
tctataatttctcgcaccttaccag

SEQ ID NO: 376333 - DNA, 25 bp, Artificial
  probe
  misc_feature (1)..(25): SEQ ID NO: 4204; WAN024CKJ; Start 954; Stop 978
ctctataatttctcgcaccttacca

SEQ ID NO: 376334 - DNA, 25 bp, Artificial
  probe
  misc_feature (1)..(25): SEQ ID NO: 4204; WAN024CKJ; Start 953; Stop 977
actctataatttctcgcaccttacc

SEQ ID NO: 376335 - DNA, 25 bp, Artificial
  probe
  misc_feature (1)..(25): SEQ ID NO: 4204; WAN024CKJ; Start 299; Stop 323
cgataggtgttatatttgggcgtta

SEQ ID NO: 376336 - DNA, 25 bp, Artificial
  probe
  misc_feature (1)..(25): SEQ ID NO: 4204; WAN024CKJ; Start 760; Stop 784
atagaacagattcccgatttagcaa

SEQ ID NO: 376337 - DNA, 25 bp, Artificial
  probe
  misc_feature (1)..(25): SEQ ID NO: 4204; WAN024CKJ; Start 759; Stop 783
aatagaacagattcccgatttagca

SEQ ID NO: 376338 - DNA, 25 bp, Artificial
  probe
  misc_feature (1)..(25): SEQ ID NO: 4204; WAN024CKJ; Start 1114; Stop 1138
attcgtaagttctgtttgctttctg

SEQ ID NO: 376339 - DNA, 25 bp, Artificial
  probe
  misc_feature (1)..(25): SEQ ID NO: 4204; WAN024CKJ; Start 761; Stop 785
tagaacagattcccgatttagcaaa

SEQ ID NO: 376340 - DNA, 25 bp, Artificial
  probe
  misc_feature (1)..(25): SEQ ID NO: 4204; WAN024CKJ; Start 758; Stop 782
caatagaacagattcccgatttagc

SEQ ID NO: 376341 - DNA, 25 bp, Artificial
  probe
  misc_feature (1)..(25): SEQ ID NO: 4204; WAN024CKJ; Start 757; Stop 781
gcaatagaacagattcccgatttag

SEQ ID NO: 376342 - DNA, 25 bp, Artificial
  probe
  misc_feature (1)..(25): SEQ ID NO: 4204; WAN024CKJ; Start 1117; Stop 1141
cgtaagttctgtttgctttctgtag

SEQ ID NO: 376343 - DNA, 25 bp, Artificial
  probe
  misc_feature (1)..(25): SEQ ID NO: 4205; WAN024DEQ; Start 805; Stop 829
gatggtaactatggtcacaattctg

SEQ ID NO: 376344 - DNA, 25 bp, Artificial
  probe
  misc_feature (1)..(25): SEQ ID NO: 4205; WAN024DEQ; Start 804; Stop 828
cgatggtaactatggtcacaattct

SEQ ID NO: 376345 - DNA, 25 bp, Artificial
  probe
  misc_feature (1)..(25): SEQ ID NO: 4205; WAN024DEQ; Start 6; Stop 30
aataggtgtgctagattctaaggag

SEQ ID NO: 376346 - DNA, 25 bp, Artificial
  probe
  misc_feature (1)..(25): SEQ ID NO: 4205; WAN024DEQ; Start 1; Stop 25
gtggtaataggtgtgctagattcta

SEQ ID NO: 376347 - DNA, 25 bp, Artificial
  probe
  misc_feature (1)..(25): SEQ ID NO: 4205; WAN024DEQ; Start 7; Stop 31
ataggtgtgctagattctaaggagg

SEQ ID NO: 376348 - DNA, 25 bp, Artificial
  probe
  misc_feature (1)..(25): SEQ ID NO: 4205; WAN024DEQ; Start 2; Stop 26
tggtaataggtgtgctagattctaa

SEQ ID NO: 376349 - DNA, 25 bp, Artificial
  probe
  misc_feature (1)..(25): SEQ ID NO: 4205; WAN024DEQ; Start 806; Stop 830
atggtaactatggtcacaattctgt

SEQ ID NO: 376350 - DNA, 25 bp, Artificial
  probe
  misc_feature (1)..(25): SEQ ID NO: 4205; WAN024DEQ; Start 810; Stop 834
taactatggtcacaattctgtcact

SEQ ID NO: 376351 - DNA, 25 bp, Artificial
  probe
  misc_feature (1)..(25): SEQ ID NO: 4205; WAN024DEQ; Start 809; Stop 833
gtaactatggtcacaattctgtcac

SEQ ID NO: 376352 - DNA, 25 bp, Artificial
  probe
  misc_feature (1)..(25): SEQ ID NO: 4205; WAN024DEQ; Start 808; Stop 832
ggtaactatggtcacaattctgtca

SEQ ID NO: 376353 - DNA, 25 bp, Artificial
  probe
  misc_feature (1)..(25): SEQ ID NO: 4205; WAN024DEQ; Start 807; Stop 831
tggtaactatggtcacaattctgtc

SEQ ID NO: 376354 - DNA, 25 bp, Artificial
  probe
  misc_feature (1)..(25): SEQ ID NO: 4205; WAN024DEQ; Start 813; Stop 837
ctatggtcacaattctgtcactcat

SEQ ID NO: 376355 - DNA, 25 bp, Artificial
  probe
  misc_feature (1)..(25): SEQ ID NO: 4205; WAN024DEQ; Start 815; Stop 839
atggtcacaattctgtcactcatac

SEQ ID NO: 376356 - DNA, 25 bp, Artificial
  probe
  misc_feature (1)..(25): SEQ ID NO: 4205; WAN024DEQ; Start 811; Stop 835
aactatggtcacaattctgtcactc

SEQ ID NO: 376357 - DNA, 25 bp, Artificial
  probe
  misc_feature (1)..(25): SEQ ID NO: 4205; WAN024DEQ; Start 817; Stop 841
ggtcacaattctgtcactcatacaa

SEQ ID NO: 376358 - DNA, 25 bp, Artificial
  probe
  misc_feature (1)..(25): SEQ ID NO: 4205; WAN024DEQ; Start 8; Stop 32
taggtgtgctagattctaaggagga

SEQ ID NO: 376359 - DNA, 25 bp, Artificial
  probe
  misc_feature (1)..(25): SEQ ID NO: 4205; WAN024DEQ; Start 4; Stop 28
gtaataggtgtgctagattctaagg

SEQ ID NO: 376360 - DNA, 25 bp, Artificial
  probe
  misc_feature (1)..(25): SEQ ID NO: 4205; WAN024DEQ; Start 3; Stop 27
ggtaataggtgtgctagattctaag

SEQ ID NO: 376361 - DNA, 25 bp, Artificial
  probe
  misc_feature (1)..(25): SEQ ID NO: 4205; WAN024DEQ; Start 5; Stop 29
taataggtgtgctagattctaagga

SEQ ID NO: 376362 - DNA, 25 bp, Artificial
  probe
  misc_feature (1)..(25): SEQ ID NO: 4205; WAN024DEQ; Start 814; Stop 838
tatggtcacaattctgtcactcata

SEQ ID NO: 376363 - DNA, 25 bp, Artificial
  probe
  misc_feature (1)..(25): SEQ ID NO: 4205; WAN024DEQ; Start 464; Stop 488
tggttgataatgacaatgttgtgac

SEQ ID NO: 376364 - DNA, 25 bp, Artificial
  probe
  misc_feature (1)..(25): SEQ ID NO: 4205; WAN024DEQ; Start 463; Stop 487
gtggttgataatgacaatgttgtga

SEQ ID NO: 376365 - DNA, 25 bp, Artificial
  probe
  misc_feature (1)..(25): SEQ ID NO: 4205; WAN024DEQ; Start 465; Stop 489
ggttgataatgacaatgttgtgact

SEQ ID NO: 376366 - DNA, 25 bp, Artificial
  probe
  misc_feature (1)..(25): SEQ ID NO: 4205; WAN024DEQ; Start 462; Stop 486
tgtggttgataatgacaatgttgtg

SEQ ID NO: 376367 - DNA, 25 bp, Artificial
  probe
  misc_feature (1)..(25): SEQ ID NO: 4205; WAN024DEQ; Start 812; Stop 836
actatggtcacaattctgtcactca

SEQ ID NO: 376368 - DNA, 25 bp, Artificial
  probe
  misc_feature (1)..(25): SEQ ID NO: 4205; WAN024DEQ; Start 467; Stop 491
ttgataatgacaatgttgtgactcc

SEQ ID NO: 376369 - DNA, 25 bp, Artificial
  probe
  misc_feature (1)..(25): SEQ ID NO: 4205; WAN024DEQ; Start 461; Stop 485
atgtggttgataatgacaatgttgt

SEQ ID NO: 376370 - DNA, 25 bp, Artificial
  probe
  misc_feature (1)..(25): SEQ ID NO: 4205; WAN024DEQ; Start 803; Stop 827
tcgatggtaactatggtcacaattc

SEQ ID NO: 376371 - DNA, 25 bp, Artificial
  probe
  misc_feature (1)..(25): SEQ ID NO: 4205; WAN024DEQ; Start 802; Stop 826
gtcgatggtaactatggtcacaatt

SEQ ID NO: 376372 - DNA, 25 bp, Artificial
  probe
  misc_feature (1)..(25): SEQ ID NO: 4205; WAN024DEQ; Start 13; Stop 37
gtgctagattctaaggaggaattga

SEQ ID NO: 376373 - DNA, 25 bp, Artificial
  probe
  misc_feature (1)..(25): SEQ ID NO: 4205; WAN024DEQ; Start 12; Stop 36
tgtgctagattctaaggaggaattg

SEQ ID NO: 376374 - DNA, 25 bp, Artificial
  probe
  misc_feature (1)..(25): SEQ ID NO: 4205; WAN024DEQ; Start 11; Stop 35
gtgtgctagattctaaggaggaatt

SEQ ID NO: 376375 - DNA, 25 bp, Artificial
  probe
  misc_feature (1)..(25): SEQ ID NO: 4205; WAN024DEQ; Start 816; Stop 840
tggtcacaattctgtcactcataca

SEQ ID NO: 376376 - DNA, 25 bp, Artificial
  probe
  misc_feature (1)..(25): SEQ ID NO: 4206; WAN024CTW; Start 205; Stop 229
ttacgaatccaagaaccatctgctt

SEQ ID NO: 376377 - DNA, 25 bp, Artificial
  probe
  misc_feature (1)..(25): SEQ ID NO: 4206; WAN024CTW; Start 73; Stop 97
tcttgtccttctttcttaccagtaa

SEQ ID NO: 376378 - DNA, 25 bp, Artificial
  probe
  misc_feature (1)..(25): SEQ ID NO: 4206; WAN024CTW; Start 197; Stop 221
taaatgctttacgaatccaagaacc

SEQ ID NO: 376379 - DNA, 25 bp, Artificial
  probe
  misc_feature (1)..(25): SEQ ID NO: 4206; WAN024CTW; Start 199; Stop 223
aatgctttacgaatccaagaaccat

SEQ ID NO: 376380 - DNA, 25 bp, Artificial
  probe
  misc_feature (1)..(25): SEQ ID NO: 4206; WAN024CTW; Start 198; Stop 222
aaatgctttacgaatccaagaacca

SEQ ID NO: 376381 - DNA, 25 bp, Artificial
  probe
  misc_feature (1)..(25): SEQ ID NO: 4206; WAN024CTW; Start 74; Stop 98
cttgtccttctttcttaccagtaaa

SEQ ID NO: 376382 - DNA, 25 bp, Artificial
  probe
  misc_feature (1)..(25): SEQ ID NO: 4206; WAN024CTW; Start 192; Stop 216
accattaaatgctttacgaatccaa

SEQ ID NO: 376383 - DNA, 25 bp, Artificial
  probe
  misc_feature (1)..(25): SEQ ID NO: 4206; WAN024CTW; Start 169; Stop 193
gatttgacaatggcaacacctttac

SEQ ID NO: 376384 - DNA, 25 bp, Artificial
  probe
  misc_feature (1)..(25): SEQ ID NO: 4206; WAN024CTW; Start 200; Stop 224
atgctttacgaatccaagaaccatc

SEQ ID NO: 376385 - DNA, 25 bp, Artificial
  probe
  misc_feature (1)..(25): SEQ ID NO: 4206; WAN024CTW; Start 193; Stop 217
ccattaaatgctttacgaatccaag

SEQ ID NO: 376386 - DNA, 25 bp, Artificial
  probe
  misc_feature (1)..(25): SEQ ID NO: 4206; WAN024CTW; Start 186; Stop 210
acctttaccattaaatgctttacga

SEQ ID NO: 376387 - DNA, 25 bp, Artificial
  probe
  misc_feature (1)..(25): SEQ ID NO: 4206; WAN024CTW; Start 185; Stop 209
cacctttaccattaaatgctttacg

SEQ ID NO: 376388 - DNA, 25 bp, Artificial
  probe
  misc_feature (1)..(25): SEQ ID NO: 4206; WAN024CTW; Start 19; Stop 43
gcctctccaataatggtctgtactt

SEQ ID NO: 376389 - DNA, 25 bp, Artificial
  probe
  misc_feature (1)..(25): SEQ ID NO: 4206; WAN024CTW; Start 196; Stop 220
ttaaatgctttacgaatccaagaac

SEQ ID NO: 376390 - DNA, 25 bp, Artificial
  probe
  misc_feature (1)..(25): SEQ ID NO: 4206; WAN024CTW; Start 168; Stop 192
tgatttgacaatggcaacaccttta

SEQ ID NO: 376391 - DNA, 25 bp, Artificial
  probe
  misc_feature (1)..(25): SEQ ID NO: 4206; WAN024CTW; Start 191; Stop 215
taccattaaatgctttacgaatcca

SEQ ID NO: 376392 - DNA, 25 bp, Artificial
  probe
  misc_feature (1)..(25): SEQ ID NO: 4206; WAN024CTW; Start 182; Stop 206
caacacctttaccattaaatgcttt

SEQ ID NO: 376393 - DNA, 25 bp, Artificial
  probe
  misc_feature (1)..(25): SEQ ID NO: 4206; WAN024CTW; Start 203; Stop 227
ctttacgaatccaagaaccatctgc

SEQ ID NO: 376394 - DNA, 25 bp, Artificial
  probe
  misc_feature (1)..(25): SEQ ID NO: 4206; WAN024CTW; Start 202; Stop 226
gctttacgaatccaagaaccatctg

SEQ ID NO: 376395 - DNA, 25 bp, Artificial
  probe
  misc_feature (1)..(25): SEQ ID NO: 4206; WAN024CTW; Start 194; Stop 218
cattaaatgctttacgaatccaaga

SEQ ID NO: 376396 - DNA, 25 bp, Artificial
  probe
  misc_feature (1)..(25): SEQ ID NO: 4206; WAN024CTW; Start 187; Stop 211
cctttaccattaaatgctttacgaa

SEQ ID NO: 376397 - DNA, 25 bp, Artificial
  probe
  misc_feature (1)..(25): SEQ ID NO: 4206; WAN024CTW; Start 149; Stop 173
atttccctgcttgttcagttgattt

SEQ ID NO: 376398 - DNA, 25 bp, Artificial
  probe
  misc_feature (1)..(25): SEQ ID NO: 4206; WAN024CTW; Start 148; Stop 172
aatttccctgcttgttcagttgatt

SEQ ID NO: 376399 - DNA, 25 bp, Artificial
  probe
  misc_feature (1)..(25): SEQ ID NO: 4206; WAN024CTW; Start 167; Stop 191
ttgatttgacaatggcaacaccttt

SEQ ID NO: 376400 - DNA, 25 bp, Artificial
  probe
  misc_feature (1)..(25): SEQ ID NO: 4206; WAN024CTW; Start 190; Stop 214
ttaccattaaatgctttacgaatcc

SEQ ID NO: 376401 - DNA, 25 bp, Artificial
  probe
  misc_feature (1)..(25): SEQ ID NO: 4206; WAN024CTW; Start 184; Stop 208
acacctttaccattaaatgctttac

SEQ ID NO: 376402 - DNA, 25 bp, Artificial
  probe
  misc_feature (1)..(25): SEQ ID NO: 4206; WAN024CTW; Start 95; Stop 119
taaagacagtgacttggttcgattt

SEQ ID NO: 376403 - DNA, 25 bp, Artificial
  probe
  misc_feature (1)..(25): SEQ ID NO: 4206; WAN024CTW; Start 195; Stop 219
attaaatgctttacgaatccaagaa

SEQ ID NO: 376404 - DNA, 25 bp, Artificial
  probe
  misc_feature (1)..(25): SEQ ID NO: 4206; WAN024CTW; Start 170; Stop 194
atttgacaatggcaacacctttacc

SEQ ID NO: 376405 - DNA, 25 bp, Artificial
  probe
  misc_feature (1)..(25): SEQ ID NO: 4206; WAN024CTW; Start 204; Stop 228
tttacgaatccaagaaccatctgct

SEQ ID NO: 376406 - DNA, 25 bp, Artificial
  probe
  misc_feature (1)..(25): SEQ ID NO: 4206; WAN024CTW; Start 201; Stop 225
tgctttacgaatccaagaaccatct

SEQ ID NO: 376407 - DNA, 25 bp, Artificial
  probe
  misc_feature (1)..(25): SEQ ID NO: 4206; WAN024CTW; Start 87; Stop 111
cttaccagtaaagacagtgacttgg

SEQ ID NO: 376408 - DNA, 25 bp, Artificial
  probe
  misc_feature (1)..(25): SEQ ID NO: 4206; WAN024CTW; Start 160; Stop 184
tgttcagttgatttgacaatggcaa

SEQ ID NO: 376409 - DNA, 25 bp, Artificial
  probe
  misc_feature (1)..(25): SEQ ID NO: 4207; WAN024FBT; Start 68; Stop 92
atttgagtgaagatttagttgctgc

SEQ ID NO: 376410 - DNA, 25 bp, Artificial
  probe
  misc_feature (1)..(25): SEQ ID NO: 4207; WAN024FBT; Start 69; Stop 93
tttgagtgaagatttagttgctgct

SEQ ID NO: 376411 - DNA, 25 bp, Artificial
  probe
  misc_feature (1)..(25): SEQ ID NO: 4207; WAN024FBT; Start 66; Stop 90
tgatttgagtgaagatttagttgct

SEQ ID NO: 376412 - DNA, 25 bp, Artificial
  probe
  misc_feature (1)..(25): SEQ ID NO: 4207; WAN024FBT; Start 67; Stop 91
gatttgagtgaagatttagttgctg

SEQ ID NO: 376413 - DNA, 25 bp, Artificial
  probe
  misc_feature (1)..(25): SEQ ID NO: 4207; WAN024FBT; Start 15; Stop 39
agaaccaaacctagaaagccttata

SEQ ID NO: 376414 - DNA, 25 bp, Artificial
  probe
  misc_feature (1)..(25): SEQ ID NO: 4207; WAN024FBT; Start 172; Stop 196
gaattgctcctaaatcccaaacatc

SEQ ID NO: 376415 - DNA, 25 bp, Artificial
  probe
  misc_feature (1)..(25): SEQ ID NO: 4207; WAN024FBT; Start 236; Stop 260
gagaagaagccaagtacagaggaac

SEQ ID NO: 376416 - DNA, 25 bp, Artificial
  probe
  misc_feature (1)..(25): SEQ ID NO: 4207; WAN024FBT; Start 235; Stop 259
agagaagaagccaagtacagaggaa

SEQ ID NO: 376417 - DNA, 25 bp, Artificial
  probe
  misc_feature (1)..(25): SEQ ID NO: 4207; WAN024FBT; Start 234; Stop 258
aagagaagaagccaagtacagagga

SEQ ID NO: 376418 - DNA, 25 bp, Artificial
  probe
  misc_feature (1)..(25): SEQ ID NO: 4207; WAN024FBT; Start 171; Stop 195
tgaattgctcctaaatcccaaacat

SEQ ID NO: 376419 - DNA, 25 bp, Artificial
  probe
  misc_feature (1)..(25): SEQ ID NO: 4207; WAN024FBT; Start 76; Stop 100
gaagatttagttgctgctctcctag

SEQ ID NO: 376420 - DNA, 25 bp, Artificial
  probe
  misc_feature (1)..(25): SEQ ID NO: 4207; WAN024FBT; Start 75; Stop 99
tgaagatttagttgctgctctccta

SEQ ID NO: 376421 - DNA, 25 bp, Artificial
  probe
  misc_feature (1)..(25): SEQ ID NO: 4207; WAN024FBT; Start 65; Stop 89
atgatttgagtgaagatttagttgc

SEQ ID NO: 376422 - DNA, 25 bp, Artificial
  probe
  misc_feature (1)..(25): SEQ ID NO: 4207; WAN024FBT; Start 77; Stop 101
aagatttagttgctgctctcctaga

SEQ ID NO: 376423 - DNA, 25 bp, Artificial
  probe
  misc_feature (1)..(25): SEQ ID NO: 4207; WAN024FBT; Start 173; Stop 197
aattgctcctaaatcccaaacatcc

SEQ ID NO: 376424 - DNA, 25 bp, Artificial
  probe
  misc_feature (1)..(25): SEQ ID NO: 4207; WAN024FBT; Start 170; Stop 194
gtgaattgctcctaaatcccaaaca

SEQ ID NO: 376425 - DNA, 25 bp, Artificial
  probe
  misc_feature (1)..(25): SEQ ID NO: 4207; WAN024FBT; Start 70; Stop 94
ttgagtgaagatttagttgctgctc

SEQ ID NO: 376426 - DNA, 25 bp, Artificial
  probe
  misc_feature (1)..(25): SEQ ID NO: 4207; WAN024FBT; Start 72; Stop 96
gagtgaagatttagttgctgctctc

SEQ ID NO: 376427 - DNA, 25 bp, Artificial
  probe
  misc_feature (1)..(25): SEQ ID NO: 4207; WAN024FBT; Start 16; Stop 40
gaaccaaacctagaaagccttataa

SEQ ID NO: 376428 - DNA, 25 bp, Artificial
  probe
  misc_feature (1)..(25): SEQ ID NO: 4207; WAN024FBT; Start 61; Stop 85
cgacatgatttgagtgaagatttag

SEQ ID NO: 376429 - DNA, 25 bp, Artificial
  probe
  misc_feature (1)..(25): SEQ ID NO: 4207; WAN024FBT; Start 237; Stop 261
agaagaagccaagtacagaggaact

SEQ ID NO: 376430 - DNA, 25 bp, Artificial
  probe
  misc_feature (1)..(25): SEQ ID NO: 4207; WAN024FBT; Start 17; Stop 41
aaccaaacctagaaagccttataaa

SEQ ID NO: 376431 - DNA, 25 bp, Artificial
  probe
  misc_feature (1)..(25): SEQ ID NO: 4207; WAN024FBT; Start 166; Stop 190
aatcgtgaattgctcctaaatccca

SEQ ID NO: 376432 - DNA, 25 bp, Artificial
  probe
  misc_feature (1)..(25): SEQ ID NO: 4207; WAN024FBT; Start 238; Stop 262
gaagaagccaagtacagaggaactg

SEQ ID NO: 376433 - DNA, 25 bp, Artificial
  probe
  misc_feature (1)..(25): SEQ ID NO: 4207; WAN024FBT; Start 233; Stop 257
aaagagaagaagccaagtacagagg

SEQ ID NO: 376434 - DNA, 25 bp, Artificial
  probe
  misc_feature (1)..(25): SEQ ID NO: 4207; WAN024FBT; Start 174; Stop 198
attgctcctaaatcccaaacatcca

SEQ ID NO: 376435 - DNA, 25 bp, Artificial
  probe
  misc_feature (1)..(25): SEQ ID NO: 4207; WAN024FBT; Start 71; Stop 95
tgagtgaagatttagttgctgctct

SEQ ID NO: 376436 - DNA, 25 bp, Artificial
  probe
  misc_feature (1)..(25): SEQ ID NO: 4207; WAN024FBT; Start 60; Stop 84
tcgacatgatttgagtgaagattta

SEQ ID NO: 376437 - DNA, 25 bp, Artificial
  probe
  misc_feature (1)..(25): SEQ ID NO: 4207; WAN024FBT; Start 167; Stop 191
atcgtgaattgctcctaaatcccaa

SEQ ID NO: 376438 - DNA, 25 bp, Artificial
  probe
  misc_feature (1)..(25): SEQ ID NO: 4207; WAN024FBT; Start 59; Stop 83
ctcgacatgatttgagtgaagattt

SEQ ID NO: 376439 - DNA, 25 bp, Artificial
  probe
  misc_feature (1)..(25): SEQ ID NO: 4207; WAN024FBT; Start 169; Stop 193
cgtgaattgctcctaaatcccaaac

SEQ ID NO: 376440 - DNA, 25 bp, Artificial
  probe
  misc_feature (1)..(25): SEQ ID NO: 4207; WAN024FBT; Start 74; Stop 98
gtgaagatttagttgctgctctcct

SEQ ID NO: 376441 - DNA, 25 bp, Artificial
  probe
  misc_feature (1)..(25): SEQ ID NO: 4207; WAN024FBT; Start 73; Stop 97
agtgaagatttagttgctgctctcc

SEQ ID NO: 376442 - DNA, 25 bp, Artificial
  probe
  misc_feature (1)..(25): SEQ ID NO: 4208; WAN024DCK; Start 178; Stop 202
gaagatagtgccttgacagagtaac

SEQ ID NO: 376443 - DNA, 25 bp, Artificial
  probe
  misc_feature (1)..(25): SEQ ID NO: 4208; WAN024DCK; Start 179; Stop 203
aagatagtgccttgacagagtaact

SEQ ID NO: 376444 - DNA, 25 bp, Artificial
  probe
  misc_feature (1)..(25): SEQ ID NO: 4208; WAN024DCK; Start 177; Stop 201
ggaagatagtgccttgacagagtaa

SEQ ID NO: 376445 - DNA, 25 bp, Artificial
  probe
  misc_feature (1)..(25): SEQ ID NO: 4208; WAN024DCK; Start 181; Stop 205
gatagtgccttgacagagtaactaa

SEQ ID NO: 376446 - DNA, 25 bp, Artificial
  probe
  misc_feature (1)..(25): SEQ ID NO: 4208; WAN024DCK; Start 180; Stop 204
agatagtgccttgacagagtaacta

SEQ ID NO: 376447 - DNA, 25 bp, Artificial
  probe
  misc_feature (1)..(25): SEQ ID NO: 4208; WAN024DCK; Start 182; Stop 206
atagtgccttgacagagtaactaat

SEQ ID NO: 376448 - DNA, 25 bp, Artificial
  probe
  misc_feature (1)..(25): SEQ ID NO: 4208; WAN024DCK; Start 43; Stop 67
caagagcaagttgacaagtctgaac

SEQ ID NO: 376449 - DNA, 25 bp, Artificial
  probe
  misc_feature (1)..(25): SEQ ID NO: 4208; WAN024DCK; Start 176; Stop 200
cggaagatagtgccttgacagagta

SEQ ID NO: 376450 - DNA, 25 bp, Artificial
  probe
  misc_feature (1)..(25): SEQ ID NO: 4208; WAN024DCK; Start 44; Stop 68
aagagcaagttgacaagtctgaact

SEQ ID NO: 376451 - DNA, 25 bp, Artificial
  probe
  misc_feature (1)..(25): SEQ ID NO: 4208; WAN024DCK; Start 42; Stop 66
tcaagagcaagttgacaagtctgaa

SEQ ID NO: 376452 - DNA, 25 bp, Artificial
  probe
  misc_feature (1)..(25): SEQ ID NO: 4208; WAN024DCK; Start 108; Stop 132
tttggcaacagtatctgatccgaaa

SEQ ID NO: 376453 - DNA, 25 bp, Artificial
  probe
  misc_feature (1)..(25): SEQ ID NO: 4208; WAN024DCK; Start 41; Stop 65
ctcaagagcaagttgacaagtctga

SEQ ID NO: 376454 - DNA, 25 bp, Artificial
  probe
  misc_feature (1)..(25): SEQ ID NO: 4208; WAN024DCK; Start 107; Stop 131
ctttggcaacagtatctgatccgaa

SEQ ID NO: 376455 - DNA, 25 bp, Artificial
  probe
  misc_feature (1)..(25): SEQ ID NO: 4208; WAN024DCK; Start 111; Stop 135
ggcaacagtatctgatccgaaaatc

SEQ ID NO: 376456 - DNA, 25 bp, Artificial
  probe
  misc_feature (1)..(25): SEQ ID NO: 4208; WAN024DCK; Start 38; Stop 62
aagctcaagagcaagttgacaagtc

SEQ ID NO: 376457 - DNA, 25 bp, Artificial
  probe
  misc_feature (1)..(25): SEQ ID NO: 4208; WAN024DCK; Start 110; Stop 134
tggcaacagtatctgatccgaaaat

SEQ ID NO: 376458 - DNA, 25 bp, Artificial
  probe
  misc_feature (1)..(25): SEQ ID NO: 4208; WAN024DCK; Start 109; Stop 133
ttggcaacagtatctgatccgaaaa

SEQ ID NO: 376459 - DNA, 25 bp, Artificial
  probe
  misc_feature (1)..(25): SEQ ID NO: 4208; WAN024DCK; Start 67; Stop 91
cttcgtgccttgagtcaagagttag

SEQ ID NO: 376460 - DNA, 25 bp, Artificial
  probe
  misc_feature (1)..(25): SEQ ID NO: 4208; WAN024DCK; Start 37; Stop 61
caagctcaagagcaagttgacaagt

SEQ ID NO: 376461 - DNA, 25 bp, Artificial
  probe
  misc_feature (1)..(25): SEQ ID NO: 4208; WAN024DCK; Start 36; Stop 60
acaagctcaagagcaagttgacaag

SEQ ID NO: 376462 - DNA, 25 bp, Artificial
  probe
  misc_feature (1)..(25): SEQ ID NO: 4208; WAN024DCK; Start 113; Stop 137
caacagtatctgatccgaaaatcga

SEQ ID NO: 376463 - DNA, 25 bp, Artificial
  probe
  misc_feature (1)..(25): SEQ ID NO: 4208; WAN024DCK; Start 68; Stop 92
ttcgtgccttgagtcaagagttaga

SEQ ID NO: 376464 - DNA, 25 bp, Artificial
  probe
  misc_feature (1)..(25): SEQ ID NO: 4208; WAN024DCK; Start 35; Stop 59
cacaagctcaagagcaagttgacaa

SEQ ID NO: 376465 - DNA, 25 bp, Artificial
  probe
  misc_feature (1)..(25): SEQ ID NO: 4208; WAN024DCK; Start 112; Stop 136
gcaacagtatctgatccgaaaatcg

SEQ ID NO: 376466 - DNA, 25 bp, Artificial
  probe
  misc_feature (1)..(25): SEQ ID NO: 4208; WAN024DCK; Start 40; Stop 64
gctcaagagcaagttgacaagtctg

SEQ ID NO: 376467 - DNA, 25 bp, Artificial
  probe
  misc_feature (1)..(25): SEQ ID NO: 4208; WAN024DCK; Start 53; Stop 77
ttgacaagtctgaacttcgtgcctt

SEQ ID NO: 376468 - DNA, 25 bp, Artificial
  probe
  misc_feature (1)..(25): SEQ ID NO: 4208; WAN024DCK; Start 66; Stop 90
acttcgtgccttgagtcaagagtta

SEQ ID NO: 376469 - DNA, 25 bp, Artificial
  probe
  misc_feature (1)..(25): SEQ ID NO: 4208; WAN024DCK; Start 39; Stop 63
agctcaagagcaagttgacaagtct

SEQ ID NO: 376470 - DNA, 25 bp, Artificial
  probe
  misc_feature (1)..(25): SEQ ID NO: 4208; WAN024DCK; Start 46; Stop 70
gagcaagttgacaagtctgaacttc

SEQ ID NO: 376471 - DNA, 25 bp, Artificial
  probe
  misc_feature (1)..(25): SEQ ID NO: 4208; WAN024DCK; Start 58; Stop 82
aagtctgaacttcgtgccttgagtc

SEQ ID NO: 376472 - DNA, 25 bp, Artificial
  probe
  misc_feature (1)..(25): SEQ ID NO: 4208; WAN024DCK; Start 49; Stop 73
caagttgacaagtctgaacttcgtg

SEQ ID NO: 376473 - DNA, 25 bp, Artificial
  probe
  misc_feature (1)..(25): SEQ ID NO: 4208; WAN024DCK; Start 45; Stop 69
agagcaagttgacaagtctgaactt

SEQ ID NO: 376474 - DNA, 25 bp, Artificial
  probe
  misc_feature (1)..(25): SEQ ID NO: 4208; WAN024DCK; Start 104; Stop 128
aagctttggcaacagtatctgatcc

SEQ ID NO: 376475 - DNA, 25 bp, Artificial
  probe
  misc_feature (1)..(25): SEQ ID NO: 4209; WAN024F4P; Start 202; Stop 226
tacaagcatcattggttcaaggata

SEQ ID NO: 376476 - DNA, 25 bp, Artificial
  probe
  misc_feature (1)..(25): SEQ ID NO: 4209; WAN024F4P; Start 201; Stop 225
ttacaagcatcattggttcaaggat

SEQ ID NO: 376477 - DNA, 25 bp, Artificial
  probe
  misc_feature (1)..(25): SEQ ID NO: 4209; WAN024F4P; Start 203; Stop 227
acaagcatcattggttcaaggatag

SEQ ID NO: 376478 - DNA, 25 bp, Artificial
  probe
  misc_feature (1)..(25): SEQ ID NO: 4209; WAN024F4P; Start 197; Stop 221
attgttacaagcatcattggttcaa

SEQ ID NO: 376479 - DNA, 25 bp, Artificial
  probe
  misc_feature (1)..(25): SEQ ID NO: 4209; WAN024F4P; Start 196; Stop 220
gattgttacaagcatcattggttca

SEQ ID NO: 376480 - DNA, 25 bp, Artificial
  probe
  misc_feature (1)..(25): SEQ ID NO: 4209; WAN024F4P; Start 200; Stop 224
gttacaagcatcattggttcaagga

SEQ ID NO: 376481 - DNA, 25 bp, Artificial
  probe
  misc_feature (1)..(25): SEQ ID NO: 4209; WAN024F4P; Start 198; Stop 222
ttgttacaagcatcattggttcaag

SEQ ID NO: 376482 - DNA, 25 bp, Artificial
  probe
  misc_feature (1)..(25): SEQ ID NO: 4209; WAN024F4P; Start 199; Stop 223
tgttacaagcatcattggttcaagg

SEQ ID NO: 376483 - DNA, 25 bp, Artificial
  probe
  misc_feature (1)..(25): SEQ ID NO: 4209; WAN024F4P; Start 204; Stop 228
caagcatcattggttcaaggatagc

SEQ ID NO: 376484 - DNA, 25 bp, Artificial
  probe
  misc_feature (1)..(25): SEQ ID NO: 4209; WAN024F4P; Start 110; Stop 134
ttaccgtgtgcttccataccatcta

SEQ ID NO: 376485 - DNA, 25 bp, Artificial
  probe
  misc_feature (1)..(25): SEQ ID NO: 4209; WAN024F4P; Start 209; Stop 233
atcattggttcaaggatagctggtt

SEQ ID NO: 376486 - DNA, 25 bp, Artificial
  probe
  misc_feature (1)..(25): SEQ ID NO: 4209; WAN024F4P; Start 195; Stop 219
tgattgttacaagcatcattggttc

SEQ ID NO: 376487 - DNA, 25 bp, Artificial
  probe
  misc_feature (1)..(25): SEQ ID NO: 4209; WAN024F4P; Start 191; Stop 215
acagtgattgttacaagcatcattg

SEQ ID NO: 376488 - DNA, 25 bp, Artificial
  probe
  misc_feature (1)..(25): SEQ ID NO: 4209; WAN024F4P; Start 194; Stop 218
gtgattgttacaagcatcattggtt

SEQ ID NO: 376489 - DNA, 25 bp, Artificial
  probe
  misc_feature (1)..(25): SEQ ID NO: 4209; WAN024F4P; Start 192; Stop 216
cagtgattgttacaagcatcattgg

SEQ ID NO: 376490 - DNA, 25 bp, Artificial
  probe
  misc_feature (1)..(25): SEQ ID NO: 4209; WAN024F4P; Start 193; Stop 217
agtgattgttacaagcatcattggt

SEQ ID NO: 376491 - DNA, 25 bp, Artificial
  probe
  misc_feature (1)..(25): SEQ ID NO: 4209; WAN024F4P; Start 17; Stop 41
atgaatgtaccacgtccttgagatg

SEQ ID NO: 376492 - DNA, 25 bp, Artificial
  probe
  misc_feature (1)..(25): SEQ ID NO: 4209; WAN024F4P; Start 16; Stop 40
catgaatgtaccacgtccttgagat

SEQ ID NO: 376493 - DNA, 25 bp, Artificial
  probe
  misc_feature (1)..(25): SEQ ID NO: 4209; WAN024F4P; Start 208; Stop 232
catcattggttcaaggatagctggt

SEQ ID NO: 376494 - DNA, 25 bp, Artificial
  probe
  misc_feature (1)..(25): SEQ ID NO: 4209; WAN024F4P; Start 111; Stop 135
taccgtgtgcttccataccatctac

SEQ ID NO: 376495 - DNA, 25 bp, Artificial
  probe
  misc_feature (1)..(25): SEQ ID NO: 4209; WAN024F4P; Start 189; Stop 213
gaacagtgattgttacaagcatcat

SEQ ID NO: 376496 - DNA, 25 bp, Artificial
  probe
  misc_feature (1)..(25): SEQ ID NO: 4209; WAN024F4P; Start 183; Stop 207
cttctggaacagtgattgttacaag

SEQ ID NO: 376497 - DNA, 25 bp, Artificial
  probe
  misc_feature (1)..(25): SEQ ID NO: 4209; WAN024F4P; Start 190; Stop 214
aacagtgattgttacaagcatcatt

SEQ ID NO: 376498 - DNA, 25 bp, Artificial
  probe
  misc_feature (1)..(25): SEQ ID NO: 4209; WAN024F4P; Start 182; Stop 206
tcttctggaacagtgattgttacaa

SEQ ID NO: 376499 - DNA, 25 bp, Artificial
  probe
  misc_feature (1)..(25): SEQ ID NO: 4209; WAN024F4P; Start 181; Stop 205
ttcttctggaacagtgattgttaca

SEQ ID NO: 376500 - DNA, 25 bp, Artificial
  probe
  misc_feature (1)..(25): SEQ ID NO: 4209; WAN024F4P; Start 210; Stop 234
tcattggttcaaggatagctggttg

SEQ ID NO: 376501 - DNA, 25 bp, Artificial
  probe
  misc_feature (1)..(25): SEQ ID NO: 4209; WAN024F4P; Start 8; Stop 32
aataccatcatgaatgtaccacgtc

SEQ ID NO: 376502 - DNA, 25 bp, Artificial
  probe
  misc_feature (1)..(25): SEQ ID NO: 4209; WAN024F4P; Start 212; Stop 236
attggttcaaggatagctggttgtg

SEQ ID NO: 376503 - DNA, 25 bp, Artificial
  probe
  misc_feature (1)..(25): SEQ ID NO: 4209; WAN024F4P; Start 211; Stop 235
cattggttcaaggatagctggttgt

SEQ ID NO: 376504 - DNA, 25 bp, Artificial
  probe
  misc_feature (1)..(25): SEQ ID NO: 4209; WAN024F4P; Start 186; Stop 210
ctggaacagtgattgttacaagcat

SEQ ID NO: 376505 - DNA, 25 bp, Artificial
  probe
  misc_feature (1)..(25): SEQ ID NO: 4209; WAN024F4P; Start 184; Stop 208
ttctggaacagtgattgttacaagc

SEQ ID NO: 376506 - DNA, 25 bp, Artificial
  probe
  misc_feature (1)..(25): SEQ ID NO: 4209; WAN024F4P; Start 62; Stop 86
taaccgaacatttcagcaagtggaa

SEQ ID NO: 376507 - DNA, 25 bp, Artificial
  probe
  misc_feature (1)..(25): SEQ ID NO: 4209; WAN024F4P; Start 188; Stop 212
ggaacagtgattgttacaagcatca

SEQ ID NO: 376508 - DNA, 25 bp, Artificial
  probe
  misc_feature (1)..(25): SEQ ID NO: 4210; WAN024GJ8; Start 337; Stop 361
agtctgattacggttgttcttgtta

SEQ ID NO: 376509 - DNA, 25 bp, Artificial
  probe
  misc_feature (1)..(25): SEQ ID NO: 4210; WAN024GJ8; Start 341; Stop 365
tgattacggttgttcttgttattgc

SEQ ID NO: 376510 - DNA, 25 bp, Artificial
  probe
  misc_feature (1)..(25): SEQ ID NO: 4210; WAN024GJ8; Start 338; Stop 362
gtctgattacggttgttcttgttat

SEQ ID NO: 376511 - DNA, 25 bp, Artificial
  probe
  misc_feature (1)..(25): SEQ ID NO: 4210; WAN024GJ8; Start 342; Stop 366
gattacggttgttcttgttattgcc

SEQ ID NO: 376512 - DNA, 25 bp, Artificial
  probe
  misc_feature (1)..(25): SEQ ID NO: 4210; WAN024GJ8; Start 343; Stop 367
attacggttgttcttgttattgcct

SEQ ID NO: 376513 - DNA, 25 bp, Artificial
  probe
  misc_feature (1)..(25): SEQ ID NO: 4210; WAN024GJ8; Start 340; Stop 364
ctgattacggttgttcttgttattg

SEQ ID NO: 376514 - DNA, 25 bp, Artificial
  probe
  misc_feature (1)..(25): SEQ ID NO: 4210; WAN024GJ8; Start 339; Stop 363
tctgattacggttgttcttgttatt

SEQ ID NO: 376515 - DNA, 25 bp, Artificial
  probe
  misc_feature (1)..(25): SEQ ID NO: 4210; WAN024GJ8; Start 336; Stop 360
gagtctgattacggttgttcttgtt

SEQ ID NO: 376516 - DNA, 25 bp, Artificial
  probe
  misc_feature (1)..(25): SEQ ID NO: 4210; WAN024GJ8; Start 344; Stop 368
ttacggttgttcttgttattgcctt

SEQ ID NO: 376517 - DNA, 25 bp, Artificial
  probe
  misc_feature (1)..(25): SEQ ID NO: 4210; WAN024GJ8; Start 333; Stop 357
ttggagtctgattacggttgttctt

SEQ ID NO: 376518 - DNA, 25 bp, Artificial
  probe
  misc_feature (1)..(25): SEQ ID NO: 4210; WAN024GJ8; Start 91; Stop 115
gatgtcagcattatccacttcaacc

SEQ ID NO: 376519 - DNA, 25 bp, Artificial
  probe
  misc_feature (1)..(25): SEQ ID NO: 4210; WAN024GJ8; Start 36; Stop 60
gacgctcaaccaattcatcttcatt

SEQ ID NO: 376520 - DNA, 25 bp, Artificial
  probe
  misc_feature (1)..(25): SEQ ID NO: 4210; WAN024GJ8; Start 92; Stop 116
atgtcagcattatccacttcaacct

SEQ ID NO: 376521 - DNA, 25 bp, Artificial
  probe
  misc_feature (1)..(25): SEQ ID NO: 4210; WAN024GJ8; Start 93; Stop 117
tgtcagcattatccacttcaacctt

SEQ ID NO: 376522 - DNA, 25 bp, Artificial
  probe
  misc_feature (1)..(25): SEQ ID NO: 4210; WAN024GJ8; Start 90; Stop 114
cgatgtcagcattatccacttcaac

SEQ ID NO: 376523 - DNA, 25 bp, Artificial
  probe
  misc_feature (1)..(25): SEQ ID NO: 4210; WAN024GJ8; Start 266; Stop 290
acggtcataccatctgtatattcaa

SEQ ID NO: 376524 - DNA, 25 bp, Artificial
  probe
  misc_feature (1)..(25): SEQ ID NO: 4210; WAN024GJ8; Start 265; Stop 289
aacggtcataccatctgtatattca

SEQ ID NO: 376525 - DNA, 25 bp, Artificial
  probe
  misc_feature (1)..(25): SEQ ID NO: 4210; WAN024GJ8; Start 335; Stop 359
ggagtctgattacggttgttcttgt

SEQ ID NO: 376526 - DNA, 25 bp, Artificial
  probe
  misc_feature (1)..(25): SEQ ID NO: 4210; WAN024GJ8; Start 334; Stop 358
tggagtctgattacggttgttcttg

SEQ ID NO: 376527 - DNA, 25 bp, Artificial
  probe
  misc_feature (1)..(25): SEQ ID NO: 4210; WAN024GJ8; Start 264; Stop 288
caacggtcataccatctgtatattc

SEQ ID NO: 376528 - DNA, 25 bp, Artificial
  probe
  misc_feature (1)..(25): SEQ ID NO: 4210; WAN024GJ8; Start 263; Stop 287
gcaacggtcataccatctgtatatt

SEQ ID NO: 376529 - DNA, 25 bp, Artificial
  probe
  misc_feature (1)..(25): SEQ ID NO: 4210; WAN024GJ8; Start 136; Stop 160
gtaatccaccatgaggagttcaatt

SEQ ID NO: 376530 - DNA, 25 bp, Artificial
  probe
  misc_feature (1)..(25): SEQ ID NO: 4210; WAN024GJ8; Start 345; Stop 369
tacggttgttcttgttattgccttt

SEQ ID NO: 376531 - DNA, 25 bp, Artificial
  probe
  misc_feature (1)..(25): SEQ ID NO: 4210; WAN024GJ8; Start 94; Stop 118
gtcagcattatccacttcaaccttt

SEQ ID NO: 376532 - DNA, 25 bp, Artificial
  probe
  misc_feature (1)..(25): SEQ ID NO: 4210; WAN024GJ8; Start 52; Stop 76
atcttcattgagataaccatcttcg

SEQ ID NO: 376533 - DNA, 25 bp, Artificial
  probe
  misc_feature (1)..(25): SEQ ID NO: 4210; WAN024GJ8; Start 87; Stop 111
gttcgatgtcagcattatccacttc

SEQ ID NO: 376534 - DNA, 25 bp, Artificial
  probe
  misc_feature (1)..(25): SEQ ID NO: 4210; WAN024GJ8; Start 278; Stop 302
tctgtatattcaaattctgttggca

SEQ ID NO: 376535 - DNA, 25 bp, Artificial
  probe
  misc_feature (1)..(25): SEQ ID NO: 4210; WAN024GJ8; Start 332; Stop 356
tttggagtctgattacggttgttct

SEQ ID NO: 376536 - DNA, 25 bp, Artificial
  probe
  misc_feature (1)..(25): SEQ ID NO: 4210; WAN024GJ8; Start 89; Stop 113
tcgatgtcagcattatccacttcaa

SEQ ID NO: 376537 - DNA, 25 bp, Artificial
  probe
  misc_feature (1)..(25): SEQ ID NO: 4210; WAN024GJ8; Start 88; Stop 112
ttcgatgtcagcattatccacttca

SEQ ID NO: 376538 - DNA, 25 bp, Artificial
  probe
  misc_feature (1)..(25): SEQ ID NO: 4210; WAN024GJ8; Start 45; Stop 69
ccaattcatcttcattgagataacc

SEQ ID NO: 376539 - DNA, 25 bp, Artificial
  probe
  misc_feature (1)..(25): SEQ ID NO: 4210; WAN024GJ8; Start 56; Stop 80
tcattgagataaccatcttcgacaa

SEQ ID NO: 376540 - DNA, 25 bp, Artificial
  probe
  misc_feature (1)..(25): SEQ ID NO: 4210; WAN024GJ8; Start 55; Stop 79
ttcattgagataaccatcttcgaca

SEQ ID NO: 376541 - DNA, 25 bp, Artificial
  probe
  misc_feature (1)..(25): SEQ ID NO: 4211; WAN024CND; Start 1; Stop 25
gtggtcaagtctgtcaatgaatgta

SEQ ID NO: 376542 - DNA, 25 bp, Artificial
  probe
  misc_feature (1)..(25): SEQ ID NO: 4211; WAN024CND; Start 5; Stop 29
tcaagtctgtcaatgaatgtacctg

SEQ ID NO: 376543 - DNA, 25 bp, Artificial
  probe
  misc_feature (1)..(25): SEQ ID NO: 4211; WAN024CND; Start 4; Stop 28
gtcaagtctgtcaatgaatgtacct

SEQ ID NO: 376544 - DNA, 25 bp, Artificial
  probe
  misc_feature (1)..(25): SEQ ID NO: 4211; WAN024CND; Start 2; Stop 26
tggtcaagtctgtcaatgaatgtac

SEQ ID NO: 376545 - DNA, 25 bp, Artificial
  probe
  misc_feature (1)..(25): SEQ ID NO: 4211; WAN024CND; Start 6; Stop 30
caagtctgtcaatgaatgtacctgc

SEQ ID NO: 376546 - DNA, 25 bp, Artificial
  probe
  misc_feature (1)..(25): SEQ ID NO: 4211; WAN024CND; Start 10; Stop 34
tctgtcaatgaatgtacctgcgatt

SEQ ID NO: 376547 - DNA, 25 bp, Artificial
  probe
  misc_feature (1)..(25): SEQ ID NO: 4211; WAN024CND; Start 3; Stop 27
ggtcaagtctgtcaatgaatgtacc

SEQ ID NO: 376548 - DNA, 25 bp, Artificial
  probe
  misc_feature (1)..(25): SEQ ID NO: 4211; WAN024CND; Start 9; Stop 33
gtctgtcaatgaatgtacctgcgat

SEQ ID NO: 376549 - DNA, 25 bp, Artificial
  probe
  misc_feature (1)..(25): SEQ ID NO: 4211; WAN024CND; Start 7; Stop 31
aagtctgtcaatgaatgtacctgcg

SEQ ID NO: 376550 - DNA, 25 bp, Artificial
  probe
  misc_feature (1)..(25): SEQ ID NO: 4211; WAN024CND; Start 11; Stop 35
ctgtcaatgaatgtacctgcgattt

SEQ ID NO: 376551 - DNA, 25 bp, Artificial
  probe
  misc_feature (1)..(25): SEQ ID NO: 4211; WAN024CND; Start 8; Stop 32
agtctgtcaatgaatgtacctgcga

SEQ ID NO: 376552 - DNA, 25 bp, Artificial
  probe
  misc_feature (1)..(25): SEQ ID NO: 4211; WAN024CND; Start 45; Stop 69
gataaaagtcaacaaccatcccttg

SEQ ID NO: 376553 - DNA, 25 bp, Artificial
  probe
  misc_feature (1)..(25): SEQ ID NO: 4211; WAN024CND; Start 44; Stop 68
tgataaaagtcaacaaccatccctt

SEQ ID NO: 376554 - DNA, 25 bp, Artificial
  probe
  misc_feature (1)..(25): SEQ ID NO: 4211; WAN024CND; Start 16; Stop 40
aatgaatgtacctgcgattttcttg

SEQ ID NO: 376555 - DNA, 25 bp, Artificial
  probe
  misc_feature (1)..(25): SEQ ID NO: 4211; WAN024CND; Start 15; Stop 39
caatgaatgtacctgcgattttctt

SEQ ID NO: 376556 - DNA, 25 bp, Artificial
  probe
  misc_feature (1)..(25): SEQ ID NO: 4211; WAN024CND; Start 43; Stop 67
gtgataaaagtcaacaaccatccct

SEQ ID NO: 376557 - DNA, 25 bp, Artificial
  probe
  misc_feature (1)..(25): SEQ ID NO: 4211; WAN024CND; Start 17; Stop 41
atgaatgtacctgcgattttcttga

SEQ ID NO: 376558 - DNA, 25 bp, Artificial
  probe
  misc_feature (1)..(25): SEQ ID NO: 4211; WAN024CND; Start 14; Stop 38
tcaatgaatgtacctgcgattttct

SEQ ID NO: 376559 - DNA, 25 bp, Artificial
  probe
  misc_feature (1)..(25): SEQ ID NO: 4211; WAN024CND; Start 13; Stop 37
gtcaatgaatgtacctgcgattttc

SEQ ID NO: 376560 - DNA, 25 bp, Artificial
  probe
  misc_feature (1)..(25): SEQ ID NO: 4211; WAN024CND; Start 12; Stop 36
tgtcaatgaatgtacctgcgatttt

SEQ ID NO: 376561 - DNA, 25 bp, Artificial
  probe
  misc_feature (1)..(25): SEQ ID NO: 4211; WAN024CND; Start 18; Stop 42
tgaatgtacctgcgattttcttgac

SEQ ID NO: 376562 - DNA, 25 bp, Artificial
  probe
  misc_feature (1)..(25): SEQ ID NO: 4211; WAN024CND; Start 42; Stop 66
cgtgataaaagtcaacaaccatccc

SEQ ID NO: 376563 - DNA, 25 bp, Artificial
  probe
  misc_feature (1)..(25): SEQ ID NO: 4211; WAN024CND; Start 19; Stop 43
gaatgtacctgcgattttcttgacg

SEQ ID NO: 376564 - DNA, 25 bp, Artificial
  probe
  misc_feature (1)..(25): SEQ ID NO: 4211; WAN024CND; Start 40; Stop 64
gacgtgataaaagtcaacaaccatc

SEQ ID NO: 376565 - DNA, 25 bp, Artificial
  probe
  misc_feature (1)..(25): SEQ ID NO: 4211; WAN024CND; Start 29; Stop 53
gcgattttcttgacgtgataaaagt

SEQ ID NO: 376566 - DNA, 25 bp, Artificial
  probe
  misc_feature (1)..(25): SEQ ID NO: 4211; WAN024CND; Start 28; Stop 52
tgcgattttcttgacgtgataaaag

SEQ ID NO: 376567 - DNA, 25 bp, Artificial
  probe
  misc_feature (1)..(25): SEQ ID NO: 4211; WAN024CND; Start 27; Stop 51
ctgcgattttcttgacgtgataaaa

SEQ ID NO: 376568 - DNA, 25 bp, Artificial
  probe
  misc_feature (1)..(25): SEQ ID NO: 4211; WAN024CND; Start 26; Stop 50
cctgcgattttcttgacgtgataaa

SEQ ID NO: 376569 - DNA, 25 bp, Artificial
  probe
  misc_feature (1)..(25): SEQ ID NO: 4211; WAN024CND; Start 30; Stop 54
cgattttcttgacgtgataaaagtc

SEQ ID NO: 376570 - DNA, 25 bp, Artificial
  probe
  misc_feature (1)..(25): SEQ ID NO: 4211; WAN024CND; Start 41; Stop 65
acgtgataaaagtcaacaaccatcc

SEQ ID NO: 376571 - DNA, 25 bp, Artificial
  probe
  misc_feature (1)..(25): SEQ ID NO: 4211; WAN024CND; Start 46; Stop 70
ataaaagtcaacaaccatcccttga

SEQ ID NO: 376572 - DNA, 25 bp, Artificial
  probe
  misc_feature (1)..(25): SEQ ID NO: 4211; WAN024CND; Start 24; Stop 48
tacctgcgattttcttgacgtgata

SEQ ID NO: 376573 - DNA, 25 bp, Artificial
  probe
  misc_feature (1)..(25): SEQ ID NO: 4211; WAN024CND; Start 25; Stop 49
acctgcgattttcttgacgtgataa

SEQ ID NO: 376574 - DNA, 25 bp, Artificial
  probe
  misc_feature (1)..(25): SEQ ID NO: 4212; WAN024EZ8; Start 190; Stop 214
atcaatgtcgtattcaacctcttca

SEQ ID NO: 376575 - DNA, 25 bp, Artificial
  probe
  misc_feature (1)..(25): SEQ ID NO: 4212; WAN024EZ8; Start 194; Stop 218
atgtcgtattcaacctcttcaactt

SEQ ID NO: 376576 - DNA, 25 bp, Artificial
  probe
  misc_feature (1)..(25): SEQ ID NO: 4212; WAN024EZ8; Start 193; Stop 217
aatgtcgtattcaacctcttcaact

SEQ ID NO: 376577 - DNA, 25 bp, Artificial
  probe
  misc_feature (1)..(25): SEQ ID NO: 4212; WAN024EZ8; Start 192; Stop 216
caatgtcgtattcaacctcttcaac

SEQ ID NO: 376578 - DNA, 25 bp, Artificial
  probe
  misc_feature (1)..(25): SEQ ID NO: 4212; WAN024EZ8; Start 191; Stop 215
tcaatgtcgtattcaacctcttcaa

SEQ ID NO: 376579 - DNA, 25 bp, Artificial
  probe
  misc_feature (1)..(25): SEQ ID NO: 4212; WAN024EZ8; Start 197; Stop 221
tcgtattcaacctcttcaacttctg

SEQ ID NO: 376580 - DNA, 25 bp, Artificial
  probe
  misc_feature (1)..(25): SEQ ID NO: 4212; WAN024EZ8; Start 196; Stop 220
gtcgtattcaacctcttcaacttct

SEQ ID NO: 376581 - DNA, 25 bp, Artificial
  probe
  misc_feature (1)..(25): SEQ ID NO: 4212; WAN024EZ8; Start 195; Stop 219
tgtcgtattcaacctcttcaacttc

SEQ ID NO: 376582 - DNA, 25 bp, Artificial
  probe
  misc_feature (1)..(25): SEQ ID NO: 4212; WAN024EZ8; Start 189; Stop 213
gatcaatgtcgtattcaacctcttc

SEQ ID NO: 376583 - DNA, 25 bp, Artificial
  probe
  misc_feature (1)..(25): SEQ ID NO: 4212; WAN024EZ8; Start 198; Stop 222
cgtattcaacctcttcaacttctgg

SEQ ID NO: 376584 - DNA, 25 bp, Artificial
  probe
  misc_feature (1)..(25): SEQ ID NO: 4212; WAN024EZ8; Start 199; Stop 223
gtattcaacctcttcaacttctggc

SEQ ID NO: 376585 - DNA, 25 bp, Artificial
  probe
  misc_feature (1)..(25): SEQ ID NO: 4212; WAN024EZ8; Start 188; Stop 212
ggatcaatgtcgtattcaacctctt

SEQ ID NO: 376586 - DNA, 25 bp, Artificial
  probe
  misc_feature (1)..(25): SEQ ID NO: 4212; WAN024EZ8; Start 85; Stop 109
gatattggttggcaagtgaacgata

SEQ ID NO: 376587 - DNA, 25 bp, Artificial
  probe
  misc_feature (1)..(25): SEQ ID NO: 4212; WAN024EZ8; Start 207; Stop 231
cctcttcaacttctggcataacaag

SEQ ID NO: 376588 - DNA, 25 bp, Artificial
  probe
  misc_feature (1)..(25): SEQ ID NO: 4212; WAN024EZ8; Start 86; Stop 110
atattggttggcaagtgaacgatac

SEQ ID NO: 376589 - DNA, 25 bp, Artificial
  probe
  misc_feature (1)..(25): SEQ ID NO: 4212; WAN024EZ8; Start 204; Stop 228
caacctcttcaacttctggcataac

SEQ ID NO: 376590 - DNA, 25 bp, Artificial
  probe
  misc_feature (1)..(25): SEQ ID NO: 4212; WAN024EZ8; Start 203; Stop 227
tcaacctcttcaacttctggcataa

SEQ ID NO: 376591 - DNA, 25 bp, Artificial
  probe
  misc_feature (1)..(25): SEQ ID NO: 4212; WAN024EZ8; Start 202; Stop 226
ttcaacctcttcaacttctggcata

SEQ ID NO: 376592 - DNA, 25 bp, Artificial
  probe
  misc_feature (1)..(25): SEQ ID NO: 4212; WAN024EZ8; Start 200; Stop 224
tattcaacctcttcaacttctggca

SEQ ID NO: 376593 - DNA, 25 bp, Artificial
  probe
  misc_feature (1)..(25): SEQ ID NO: 4212; WAN024EZ8; Start 186; Stop 210
ttggatcaatgtcgtattcaacctc

SEQ ID NO: 376594 - DNA, 25 bp, Artificial
  probe
  misc_feature (1)..(25): SEQ ID NO: 4212; WAN024EZ8; Start 206; Stop 230
acctcttcaacttctggcataacaa

SEQ ID NO: 376595 - DNA, 25 bp, Artificial
  probe
  misc_feature (1)..(25): SEQ ID NO: 4212; WAN024EZ8; Start 205; Stop 229
aacctcttcaacttctggcataaca

SEQ ID NO: 376596 - DNA, 25 bp, Artificial
  probe
  misc_feature (1)..(25): SEQ ID NO: 4212; WAN024EZ8; Start 187; Stop 211
tggatcaatgtcgtattcaacctct

SEQ ID NO: 376597 - DNA, 25 bp, Artificial
  probe
  misc_feature (1)..(25): SEQ ID NO: 4212; WAN024EZ8; Start 201; Stop 225
attcaacctcttcaacttctggcat

SEQ ID NO: 376598 - DNA, 25 bp, Artificial
  probe
  misc_feature (1)..(25): SEQ ID NO: 4212; WAN024EZ8; Start 66; Stop 90
cttcctgcatctcaaccttgatatt

SEQ ID NO: 376599 - DNA, 25 bp, Artificial
  probe
  misc_feature (1)..(25): SEQ ID NO: 4212; WAN024EZ8; Start 210; Stop 234
cttcaacttctggcataacaagaac

SEQ ID NO: 376600 - DNA, 25 bp, Artificial
  probe
  misc_feature (1)..(25): SEQ ID NO: 4212; WAN024EZ8; Start 209; Stop 233
tcttcaacttctggcataacaagaa

SEQ ID NO: 376601 - DNA, 25 bp, Artificial
  probe
  misc_feature (1)..(25): SEQ ID NO: 4212; WAN024EZ8; Start 67; Stop 91
ttcctgcatctcaaccttgatattg

SEQ ID NO: 376602 - DNA, 25 bp, Artificial
  probe
  misc_feature (1)..(25): SEQ ID NO: 4212; WAN024EZ8; Start 211; Stop 235
ttcaacttctggcataacaagaact

SEQ ID NO: 376603 - DNA, 25 bp, Artificial
  probe
  misc_feature (1)..(25): SEQ ID NO: 4212; WAN024EZ8; Start 84; Stop 108
tgatattggttggcaagtgaacgat

SEQ ID NO: 376604 - DNA, 25 bp, Artificial
  probe
  misc_feature (1)..(25): SEQ ID NO: 4212; WAN024EZ8; Start 208; Stop 232
ctcttcaacttctggcataacaaga

SEQ ID NO: 376605 - DNA, 25 bp, Artificial
  probe
  misc_feature (1)..(25): SEQ ID NO: 4212; WAN024EZ8; Start 65; Stop 89
tcttcctgcatctcaaccttgatat

SEQ ID NO: 376606 - DNA, 25 bp, Artificial
  probe
  misc_feature (1)..(25): SEQ ID NO: 4212; WAN024EZ8; Start 83; Stop 107
ttgatattggttggcaagtgaacga

SEQ ID NO: 376607 - DNA, 25 bp, Artificial
  probe
  misc_feature (1)..(25): SEQ ID NO: 4213; WAN024DH5; Start 12; Stop 36
cttacagacaaaaggccagcaagag

SEQ ID NO: 376608 - DNA, 25 bp, Artificial
  probe
  misc_feature (1)..(25): SEQ ID NO: 4213; WAN024DH5; Start 13; Stop 37
ttacagacaaaaggccagcaagaga

SEQ ID NO: 376609 - DNA, 25 bp, Artificial
  probe
  misc_feature (1)..(25): SEQ ID NO: 4213; WAN024DH5; Start 14; Stop 38
tacagacaaaaggccagcaagagac

SEQ ID NO: 376610 - DNA, 25 bp, Artificial
  probe
  misc_feature (1)..(25): SEQ ID NO: 4214; WAN024GAU; Start 461; Stop 485
atagttcattattgatgccaacagc

SEQ ID NO: 376611 - DNA, 25 bp, Artificial
  probe
  misc_feature (1)..(25): SEQ ID NO: 4214; WAN024GAU; Start 455; Stop 479
cgacagatagttcattattgatgcc

SEQ ID NO: 376612 - DNA, 25 bp, Artificial
  probe
  misc_feature (1)..(25): SEQ ID NO: 4214; WAN024GAU; Start 456; Stop 480
gacagatagttcattattgatgcca

SEQ ID NO: 376613 - DNA, 25 bp, Artificial
  probe
  misc_feature (1)..(25): SEQ ID NO: 4214; WAN024GAU; Start 459; Stop 483
agatagttcattattgatgccaaca

SEQ ID NO: 376614 - DNA, 25 bp, Artificial
  probe
  misc_feature (1)..(25): SEQ ID NO: 4214; WAN024GAU; Start 457; Stop 481
acagatagttcattattgatgccaa

SEQ ID NO: 376615 - DNA, 25 bp, Artificial
  probe
  misc_feature (1)..(25): SEQ ID NO: 4214; WAN024GAU; Start 460; Stop 484
gatagttcattattgatgccaacag

SEQ ID NO: 376616 - DNA, 25 bp, Artificial
  probe
  misc_feature (1)..(25): SEQ ID NO: 4214; WAN024GAU; Start 458; Stop 482
cagatagttcattattgatgccaac

SEQ ID NO: 376617 - DNA, 25 bp, Artificial
  probe
  misc_feature (1)..(25): SEQ ID NO: 4214; WAN024GAU; Start 535; Stop 559
ccatactcacaagttggtattaagg

SEQ ID NO: 376618 - DNA, 25 bp, Artificial
  probe
  misc_feature (1)..(25): SEQ ID NO: 4214; WAN024GAU; Start 462; Stop 486
tagttcattattgatgccaacagct

SEQ ID NO: 376619 - DNA, 25 bp, Artificial
  probe
  misc_feature (1)..(25): SEQ ID NO: 4214; WAN024GAU; Start 507; Stop 531
tgtaagtaacgtagtaccattctca

SEQ ID NO: 376620 - DNA, 25 bp, Artificial
  probe
  misc_feature (1)..(25): SEQ ID NO: 4214; WAN024GAU; Start 454; Stop 478
tcgacagatagttcattattgatgc

SEQ ID NO: 376621 - DNA, 25 bp, Artificial
  probe
  misc_feature (1)..(25): SEQ ID NO: 4214; WAN024GAU; Start 464; Stop 488
gttcattattgatgccaacagcttc

SEQ ID NO: 376622 - DNA, 25 bp, Artificial
  probe
  misc_feature (1)..(25): SEQ ID NO: 4214; WAN024GAU; Start 151; Stop 175
ggaaatgttattgatggtttgatgg

SEQ ID NO: 376623 - DNA, 25 bp, Artificial
  probe
  misc_feature (1)..(25): SEQ ID NO: 4214; WAN024GAU; Start 466; Stop 490
tcattattgatgccaacagcttcat

SEQ ID NO: 376624 - DNA, 25 bp, Artificial
  probe
  misc_feature (1)..(25): SEQ ID NO: 4214; WAN024GAU; Start 465; Stop 489
ttcattattgatgccaacagcttca

SEQ ID NO: 376625 - DNA, 25 bp, Artificial
  probe
  misc_feature (1)..(25): SEQ ID NO: 4214; WAN024GAU; Start 463; Stop 487
agttcattattgatgccaacagctt

SEQ ID NO: 376626 - DNA, 25 bp, Artificial
  probe
  misc_feature (1)..(25): SEQ ID NO: 4214; WAN024GAU; Start 150; Stop 174
tggaaatgttattgatggtttgatg

SEQ ID NO: 376627 - DNA, 25 bp, Artificial
  probe
  misc_feature (1)..(25): SEQ ID NO: 4214; WAN024GAU; Start 508; Stop 532
gtaagtaacgtagtaccattctcaa

SEQ ID NO: 376628 - DNA, 25 bp, Artificial
  probe
  misc_feature (1)..(25): SEQ ID NO: 4214; WAN024GAU; Start 506; Stop 530
ttgtaagtaacgtagtaccattctc

SEQ ID NO: 376629 - DNA, 25 bp, Artificial
  probe
  misc_feature (1)..(25): SEQ ID NO: 4214; WAN024GAU; Start 144; Stop 168
cgttattggaaatgttattgatggt

SEQ ID NO: 376630 - DNA, 25 bp, Artificial
  probe
  misc_feature (1)..(25): SEQ ID NO: 4214; WAN024GAU; Start 152; Stop 176
gaaatgttattgatggtttgatgga

SEQ ID NO: 376631 - DNA, 25 bp, Artificial
  probe
  misc_feature (1)..(25): SEQ ID NO: 4214; WAN024GAU; Start 77; Stop 101
cttatgtctatgcagtagatccagc

SEQ ID NO: 376632 - DNA, 25 bp, Artificial
  probe
  misc_feature (1)..(25): SEQ ID NO: 4214; WAN024GAU; Start 76; Stop 100
tcttatgtctatgcagtagatccag

SEQ ID NO: 376633 - DNA, 25 bp, Artificial
  probe
  misc_feature (1)..(25): SEQ ID NO: 4214; WAN024GAU; Start 154; Stop 178
aatgttattgatggtttgatggaaa

SEQ ID NO: 376634 - DNA, 25 bp, Artificial
  probe
  misc_feature (1)..(25): SEQ ID NO: 4214; WAN024GAU; Start 153; Stop 177
aaatgttattgatggtttgatggaa

SEQ ID NO: 376635 - DNA, 25 bp, Artificial
  probe
  misc_feature (1)..(25): SEQ ID NO: 4214; WAN024GAU; Start 149; Stop 173
ttggaaatgttattgatggtttgat

SEQ ID NO: 376636 - DNA, 25 bp, Artificial
  probe
  misc_feature (1)..(25): SEQ ID NO: 4214; WAN024GAU; Start 148; Stop 172
attggaaatgttattgatggtttga

SEQ ID NO: 376637 - DNA, 25 bp, Artificial
  probe
  misc_feature (1)..(25): SEQ ID NO: 4214; WAN024GAU; Start 536; Stop 560
catactcacaagttggtattaaggg

SEQ ID NO: 376638 - DNA, 25 bp, Artificial
  probe
  misc_feature (1)..(25): SEQ ID NO: 4214; WAN024GAU; Start 75; Stop 99
ttcttatgtctatgcagtagatcca

SEQ ID NO: 376639 - DNA, 25 bp, Artificial
  probe
  misc_feature (1)..(25): SEQ ID NO: 4214; WAN024GAU; Start 373; Stop 397
aagaaattgttagaagatgctgttt

SEQ ID NO: 376640 - DNA, 25 bp, Artificial
  probe
  misc_feature (1)..(25): SEQ ID NO: 4214; WAN024GAU; Start 372; Stop 396
taagaaattgttagaagatgctgtt

SEQ ID NO: 376641 - DNA, 25 bp, Artificial
  probe
  misc_feature (1)..(25): SEQ ID NO: 4214; WAN024GAU; Start 467; Stop 491
cattattgatgccaacagcttcatc

SEQ ID NO: 376642 - DNA, 25 bp, Artificial
  probe
  misc_feature (1)..(25): SEQ ID NO: 4214; WAN024GAU; Start 379; Stop 403
ttgttagaagatgctgtttctgaga

SEQ ID NO: 376643 - DNA, 25 bp, Artificial
  probe
  misc_feature (1)..(25): SEQ ID NO: 4215; WAN024CSE; Start 167; Stop 191
gtgtaatcagctccattgaggtaag

SEQ ID NO: 376644 - DNA, 25 bp, Artificial
  probe
  misc_feature (1)..(25): SEQ ID NO: 4215; WAN024CSE; Start 8; Stop 32
ctacgcttgctagaaatcttaaagg

SEQ ID NO: 376645 - DNA, 25 bp, Artificial
  probe
  misc_feature (1)..(25): SEQ ID NO: 4215; WAN024CSE; Start 9; Stop 33
tacgcttgctagaaatcttaaaggt

SEQ ID NO: 376646 - DNA, 25 bp, Artificial
  probe
  misc_feature (1)..(25): SEQ ID NO: 4215; WAN024CSE; Start 7; Stop 31
gctacgcttgctagaaatcttaaag

SEQ ID NO: 376647 - DNA, 25 bp, Artificial
  probe
  misc_feature (1)..(25): SEQ ID NO: 4215; WAN024CSE; Start 57; Stop 81
gcataatctcttggacagaagactt

SEQ ID NO: 376648 - DNA, 25 bp, Artificial
  probe
  misc_feature (1)..(25): SEQ ID NO: 4215; WAN024CSE; Start 12; Stop 36
gcttgctagaaatcttaaaggtcat

SEQ ID NO: 376649 - DNA, 25 bp, Artificial
  probe
  misc_feature (1)..(25): SEQ ID NO: 4215; WAN024CSE; Start 166; Stop 190
tgtgtaatcagctccattgaggtaa

SEQ ID NO: 376650 - DNA, 25 bp, Artificial
  probe
  misc_feature (1)..(25): SEQ ID NO: 4215; WAN024CSE; Start 60; Stop 84
taatctcttggacagaagacttcaa

SEQ ID NO: 376651 - DNA, 25 bp, Artificial
  probe
  misc_feature (1)..(25): SEQ ID NO: 4215; WAN024CSE; Start 31; Stop 55
ggtcataccttccttgtagatgtcc

SEQ ID NO: 376652 - DNA, 25 bp, Artificial
  probe
  misc_feature (1)..(25): SEQ ID NO: 4215; WAN024CSE; Start 59; Stop 83
ataatctcttggacagaagacttca

SEQ ID NO: 376653 - DNA, 25 bp, Artificial
  probe
  misc_feature (1)..(25): SEQ ID NO: 4215; WAN024CSE; Start 58; Stop 82
cataatctcttggacagaagacttc

SEQ ID NO: 376654 - DNA, 25 bp, Artificial
  probe
  misc_feature (1)..(25): SEQ ID NO: 4215; WAN024CSE; Start 11; Stop 35
cgcttgctagaaatcttaaaggtca

SEQ ID NO: 376655 - DNA, 25 bp, Artificial
  probe
  misc_feature (1)..(25): SEQ ID NO: 4215; WAN024CSE; Start 10; Stop 34
acgcttgctagaaatcttaaaggtc

SEQ ID NO: 376656 - DNA, 25 bp, Artificial
  probe
  misc_feature (1)..(25): SEQ ID NO: 4215; WAN024CSE; Start 6; Stop 30
cgctacgcttgctagaaatcttaaa

SEQ ID NO: 376657 - DNA, 25 bp, Artificial
  probe
  misc_feature (1)..(25): SEQ ID NO: 4215; WAN024CSE; Start 32; Stop 56
gtcataccttccttgtagatgtccc

SEQ ID NO: 376658 - DNA, 25 bp, Artificial
  probe
  misc_feature (1)..(25): SEQ ID NO: 4215; WAN024CSE; Start 165; Stop 189
ctgtgtaatcagctccattgaggta

SEQ ID NO: 376659 - DNA, 25 bp, Artificial
  probe
  misc_feature (1)..(25): SEQ ID NO: 4215; WAN024CSE; Start 40; Stop 64
ttccttgtagatgtcccgcataatc

SEQ ID NO: 376660 - DNA, 25 bp, Artificial
  probe
  misc_feature (1)..(25): SEQ ID NO: 4215; WAN024CSE; Start 39; Stop 63
cttccttgtagatgtcccgcataat

SEQ ID NO: 376661 - DNA, 25 bp, Artificial
  probe
  misc_feature (1)..(25): SEQ ID NO: 4215; WAN024CSE; Start 149; Stop 173
agagattctgcaactgctgtgtaat

SEQ ID NO: 376662 - DNA, 25 bp, Artificial
  probe
  misc_feature (1)..(25): SEQ ID NO: 4215; WAN024CSE; Start 5; Stop 29
tcgctacgcttgctagaaatcttaa

SEQ ID NO: 376663 - DNA, 25 bp, Artificial
  probe
  misc_feature (1)..(25): SEQ ID NO: 4215; WAN024CSE; Start 56; Stop 80
cgcataatctcttggacagaagact

SEQ ID NO: 376664 - DNA, 25 bp, Artificial
  probe
  misc_feature (1)..(25): SEQ ID NO: 4215; WAN024CSE; Start 138; Stop 162
aaacttgtttgagagattctgcaac

SEQ ID NO: 376665 - DNA, 25 bp, Artificial
  probe
  misc_feature (1)..(25): SEQ ID NO: 4215; WAN024CSE; Start 15; Stop 39
tgctagaaatcttaaaggtcatacc

SEQ ID NO: 376666 - DNA, 25 bp, Artificial
  probe
  misc_feature (1)..(25): SEQ ID NO: 4215; WAN024CSE; Start 148; Stop 172
gagagattctgcaactgctgtgtaa

SEQ ID NO: 376667 - DNA, 25 bp, Artificial
  probe
  misc_feature (1)..(25): SEQ ID NO: 4215; WAN024CSE; Start 150; Stop 174
gagattctgcaactgctgtgtaatc

SEQ ID NO: 376668 - DNA, 25 bp, Artificial
  probe
  misc_feature (1)..(25): SEQ ID NO: 4215; WAN024CSE; Start 268; Stop 292
tttattgatgaaacgcatacggttt

SEQ ID NO: 376669 - DNA, 25 bp, Artificial
  probe
  misc_feature (1)..(25): SEQ ID NO: 4215; WAN024CSE; Start 262; Stop 286
acgaagtttattgatgaaacgcata

SEQ ID NO: 376670 - DNA, 25 bp, Artificial
  probe
  misc_feature (1)..(25): SEQ ID NO: 4215; WAN024CSE; Start 261; Stop 285
tacgaagtttattgatgaaacgcat

SEQ ID NO: 376671 - DNA, 25 bp, Artificial
  probe
  misc_feature (1)..(25): SEQ ID NO: 4215; WAN024CSE; Start 260; Stop 284
ttacgaagtttattgatgaaacgca

SEQ ID NO: 376672 - DNA, 25 bp, Artificial
  probe
  misc_feature (1)..(25): SEQ ID NO: 4215; WAN024CSE; Start 139; Stop 163
aacttgtttgagagattctgcaact

SEQ ID NO: 376673 - DNA, 25 bp, Artificial
  probe
  misc_feature (1)..(25): SEQ ID NO: 4215; WAN024CSE; Start 265; Stop 289
aagtttattgatgaaacgcatacgg

SEQ ID NO: 376674 - DNA, 25 bp, Artificial
  probe
  misc_feature (1)..(25): SEQ ID NO: 4215; WAN024CSE; Start 264; Stop 288
gaagtttattgatgaaacgcatacg

SEQ ID NO: 376675 - DNA, 25 bp, Artificial
  probe
  misc_feature (1)..(25): SEQ ID NO: 4215; WAN024CSE; Start 263; Stop 287
cgaagtttattgatgaaacgcatac

SEQ ID NO: 376676 - DNA, 25 bp, Artificial
  probe
  misc_feature (1)..(25): SEQ ID NO: 4216; WAN024CSR; Start 160; Stop 184
cgtatcaatgttcttatgtggcaat

SEQ ID NO: 376677 - DNA, 25 bp, Artificial
  probe
  misc_feature (1)..(25): SEQ ID NO: 4216; WAN024CSR; Start 163; Stop 187
atcaatgttcttatgtggcaattcc

SEQ ID NO: 376678 - DNA, 25 bp, Artificial
  probe
  misc_feature (1)..(25): SEQ ID NO: 4216; WAN024CSR; Start 165; Stop 189
caatgttcttatgtggcaattcctt

SEQ ID NO: 376679 - DNA, 25 bp, Artificial
  probe
  misc_feature (1)..(25): SEQ ID NO: 4216; WAN024CSR; Start 164; Stop 188
tcaatgttcttatgtggcaattcct

SEQ ID NO: 376680 - DNA, 25 bp, Artificial
  probe
  misc_feature (1)..(25): SEQ ID NO: 4216; WAN024CSR; Start 166; Stop 190
aatgttcttatgtggcaattccttg

SEQ ID NO: 376681 - DNA, 25 bp, Artificial
  probe
  misc_feature (1)..(25): SEQ ID NO: 4216; WAN024CSR; Start 169; Stop 193
gttcttatgtggcaattccttgtat

SEQ ID NO: 376682 - DNA, 25 bp, Artificial
  probe
  misc_feature (1)..(25): SEQ ID NO: 4216; WAN024CSR; Start 172; Stop 196
cttatgtggcaattccttgtattcg

SEQ ID NO: 376683 - DNA, 25 bp, Artificial
  probe
  misc_feature (1)..(25): SEQ ID NO: 4216; WAN024CSR; Start 171; Stop 195
tcttatgtggcaattccttgtattc

SEQ ID NO: 376684 - DNA, 25 bp, Artificial
  probe
  misc_feature (1)..(25): SEQ ID NO: 4216; WAN024CSR; Start 168; Stop 192
tgttcttatgtggcaattccttgta

SEQ ID NO: 376685 - DNA, 25 bp, Artificial
  probe
  misc_feature (1)..(25): SEQ ID NO: 4216; WAN024CSR; Start 159; Stop 183
ccgtatcaatgttcttatgtggcaa

SEQ ID NO: 376686 - DNA, 25 bp, Artificial
  probe
  misc_feature (1)..(25): SEQ ID NO: 4216; WAN024CSR; Start 170; Stop 194
ttcttatgtggcaattccttgtatt

SEQ ID NO: 376687 - DNA, 25 bp, Artificial
  probe
  misc_feature (1)..(25): SEQ ID NO: 4216; WAN024CSR; Start 167; Stop 191
atgttcttatgtggcaattccttgt

SEQ ID NO: 376688 - DNA, 25 bp, Artificial
  probe
  misc_feature (1)..(25): SEQ ID NO: 4216; WAN024CSR; Start 161; Stop 185
gtatcaatgttcttatgtggcaatt

SEQ ID NO: 376689 - DNA, 25 bp, Artificial
  probe
  misc_feature (1)..(25): SEQ ID NO: 4216; WAN024CSR; Start 162; Stop 186
tatcaatgttcttatgtggcaattc

SEQ ID NO: 376690 - DNA, 25 bp, Artificial
  probe
  misc_feature (1)..(25): SEQ ID NO: 4216; WAN024CSR; Start 173; Stop 197
ttatgtggcaattccttgtattcgc

SEQ ID NO: 376691 - DNA, 25 bp, Artificial
  probe
  misc_feature (1)..(25): SEQ ID NO: 4216; WAN024CSR; Start 175; Stop 199
atgtggcaattccttgtattcgcta

SEQ ID NO: 376692 - DNA, 25 bp, Artificial
  probe
  misc_feature (1)..(25): SEQ ID NO: 4216; WAN024CSR; Start 174; Stop 198
tatgtggcaattccttgtattcgct

SEQ ID NO: 376693 - DNA, 25 bp, Artificial
  probe
  misc_feature (1)..(25): SEQ ID NO: 4216; WAN024CSR; Start 46; Stop 70
ataaaccttaccagacaatttctcg

SEQ ID NO: 376694 - DNA, 25 bp, Artificial
  probe
  misc_feature (1)..(25): SEQ ID NO: 4216; WAN024CSR; Start 10; Stop 34
gataaccttgaagctcatgttgtcg

SEQ ID NO: 376695 - DNA, 25 bp, Artificial
  probe
  misc_feature (1)..(25): SEQ ID NO: 4216; WAN024CSR; Start 9; Stop 33
cgataaccttgaagctcatgttgtc

SEQ ID NO: 376696 - DNA, 25 bp, Artificial
  probe
  misc_feature (1)..(25): SEQ ID NO: 4216; WAN024CSR; Start 44; Stop 68
tcataaaccttaccagacaatttct

SEQ ID NO: 376697 - DNA, 25 bp, Artificial
  probe
  misc_feature (1)..(25): SEQ ID NO: 4216; WAN024CSR; Start 45; Stop 69
cataaaccttaccagacaatttctc

SEQ ID NO: 376698 - DNA, 25 bp, Artificial
  probe
  misc_feature (1)..(25): SEQ ID NO: 4216; WAN024CSR; Start 61; Stop 85
caatttctcgacttcacggataatc

SEQ ID NO: 376699 - DNA, 25 bp, Artificial
  probe
  misc_feature (1)..(25): SEQ ID NO: 4216; WAN024CSR; Start 60; Stop 84
acaatttctcgacttcacggataat

SEQ ID NO: 376700 - DNA, 25 bp, Artificial
  probe
  misc_feature (1)..(25): SEQ ID NO: 4216; WAN024CSR; Start 176; Stop 200
tgtggcaattccttgtattcgctac

SEQ ID NO: 376701 - DNA, 25 bp, Artificial
  probe
  misc_feature (1)..(25): SEQ ID NO: 4216; WAN024CSR; Start 47; Stop 71
taaaccttaccagacaatttctcga

SEQ ID NO: 376702 - DNA, 25 bp, Artificial
  probe
  misc_feature (1)..(25): SEQ ID NO: 4216; WAN024CSR; Start 43; Stop 67
gtcataaaccttaccagacaatttc

SEQ ID NO: 376703 - DNA, 25 bp, Artificial
  probe
  misc_feature (1)..(25): SEQ ID NO: 4216; WAN024CSR; Start 42; Stop 66
ggtcataaaccttaccagacaattt

SEQ ID NO: 376704 - DNA, 25 bp, Artificial
  probe
  misc_feature (1)..(25): SEQ ID NO: 4216; WAN024CSR; Start 59; Stop 83
gacaatttctcgacttcacggataa

SEQ ID NO: 376705 - DNA, 25 bp, Artificial
  probe
  misc_feature (1)..(25): SEQ ID NO: 4216; WAN024CSR; Start 52; Stop 76
cttaccagacaatttctcgacttca

SEQ ID NO: 376706 - DNA, 25 bp, Artificial
  probe
  misc_feature (1)..(25): SEQ ID NO: 4216; WAN024CSR; Start 53; Stop 77
ttaccagacaatttctcgacttcac

SEQ ID NO: 376707 - DNA, 25 bp, Artificial
  probe
  misc_feature (1)..(25): SEQ ID NO: 4216; WAN024CSR; Start 48; Stop 72
aaaccttaccagacaatttctcgac

SEQ ID NO: 376708 - DNA, 25 bp, Artificial
  probe
  misc_feature (1)..(25): SEQ ID NO: 4216; WAN024CSR; Start 51; Stop 75
ccttaccagacaatttctcgacttc

SEQ ID NO: 376709 - DNA, 25 bp, Artificial
  probe
  misc_feature (1)..(25): SEQ ID NO: 4217; WAN024ESF; Start 163; Stop 187
acctggaatatcttgaatggcatta

SEQ ID NO: 376710 - DNA, 25 bp, Artificial
  probe
  misc_feature (1)..(25): SEQ ID NO: 4217; WAN024ESF; Start 162; Stop 186
aacctggaatatcttgaatggcatt

SEQ ID NO: 376711 - DNA, 25 bp, Artificial
  probe
  misc_feature (1)..(25): SEQ ID NO: 4217; WAN024ESF; Start 164; Stop 188
cctggaatatcttgaatggcattat

SEQ ID NO: 376712 - DNA, 25 bp, Artificial
  probe
  misc_feature (1)..(25): SEQ ID NO: 4217; WAN024ESF; Start 161; Stop 185
aaacctggaatatcttgaatggcat

SEQ ID NO: 376713 - DNA, 25 bp, Artificial
  probe
  misc_feature (1)..(25): SEQ ID NO: 4217; WAN024ESF; Start 62; Stop 86
aagaaatcaaggacaaactgctcat

SEQ ID NO: 376714 - DNA, 25 bp, Artificial
  probe
  misc_feature (1)..(25): SEQ ID NO: 4217; WAN024ESF; Start 65; Stop 89
aaatcaaggacaaactgctcatcat

SEQ ID NO: 376715 - DNA, 25 bp, Artificial
  probe
  misc_feature (1)..(25): SEQ ID NO: 4217; WAN024ESF; Start 158; Stop 182
gacaaacctggaatatcttgaatgg

SEQ ID NO: 376716 - DNA, 25 bp, Artificial
  probe
  misc_feature (1)..(25): SEQ ID NO: 4217; WAN024ESF; Start 59; Stop 83
ttcaagaaatcaaggacaaactgct

SEQ ID NO: 376717 - DNA, 25 bp, Artificial
  probe
  misc_feature (1)..(25): SEQ ID NO: 4217; WAN024ESF; Start 58; Stop 82
cttcaagaaatcaaggacaaactgc

SEQ ID NO: 376718 - DNA, 25 bp, Artificial
  probe
  misc_feature (1)..(25): SEQ ID NO: 4217; WAN024ESF; Start 57; Stop 81
gcttcaagaaatcaaggacaaactg

SEQ ID NO: 376719 - DNA, 25 bp, Artificial
  probe
  misc_feature (1)..(25): SEQ ID NO: 4217; WAN024ESF; Start 55; Stop 79
ctgcttcaagaaatcaaggacaaac

SEQ ID NO: 376720 - DNA, 25 bp, Artificial
  probe
  misc_feature (1)..(25): SEQ ID NO: 4217; WAN024ESF; Start 63; Stop 87
agaaatcaaggacaaactgctcatc

SEQ ID NO: 376721 - DNA, 25 bp, Artificial
  probe
  misc_feature (1)..(25): SEQ ID NO: 4217; WAN024ESF; Start 66; Stop 90
aatcaaggacaaactgctcatcatc

SEQ ID NO: 376722 - DNA, 25 bp, Artificial
  probe
  misc_feature (1)..(25): SEQ ID NO: 4217; WAN024ESF; Start 56; Stop 80
tgcttcaagaaatcaaggacaaact

SEQ ID NO: 376723 - DNA, 25 bp, Artificial
  probe
  misc_feature (1)..(25): SEQ ID NO: 4217; WAN024ESF; Start 157; Stop 181
agacaaacctggaatatcttgaatg

SEQ ID NO: 376724 - DNA, 25 bp, Artificial
  probe
  misc_feature (1)..(25): SEQ ID NO: 4217; WAN024ESF; Start 64; Stop 88
gaaatcaaggacaaactgctcatca

SEQ ID NO: 376725 - DNA, 25 bp, Artificial
  probe
  misc_feature (1)..(25): SEQ ID NO: 4217; WAN024ESF; Start 60; Stop 84
tcaagaaatcaaggacaaactgctc

SEQ ID NO: 376726 - DNA, 25 bp, Artificial
  probe
  misc_feature (1)..(25): SEQ ID NO: 4217; WAN024ESF; Start 61; Stop 85
caagaaatcaaggacaaactgctca

SEQ ID NO: 376727 - DNA, 25 bp, Artificial
  probe
  misc_feature (1)..(25): SEQ ID NO: 4217; WAN024ESF; Start 160; Stop 184
caaacctggaatatcttgaatggca

SEQ ID NO: 376728 - DNA, 25 bp, Artificial
  probe
  misc_feature (1)..(25): SEQ ID NO: 4217; WAN024ESF; Start 159; Stop 183
acaaacctggaatatcttgaatggc

SEQ ID NO: 376729 - DNA, 25 bp, Artificial
  probe
  misc_feature (1)..(25): SEQ ID NO: 4217; WAN024ESF; Start 166; Stop 190
tggaatatcttgaatggcattatag

SEQ ID NO: 376730 - DNA, 25 bp, Artificial
  probe
  misc_feature (1)..(25): SEQ ID NO: 4217; WAN024ESF; Start 165; Stop 189
ctggaatatcttgaatggcattata

SEQ ID NO: 376731 - DNA, 25 bp, Artificial
  probe
  misc_feature (1)..(25): SEQ ID NO: 4217; WAN024ESF; Start 195; Stop 219
aatttctttgctcgtagattcgtcc

SEQ ID NO: 376732 - DNA, 25 bp, Artificial
  probe
  misc_feature (1)..(25): SEQ ID NO: 4217; WAN024ESF; Start 69; Stop 93
caaggacaaactgctcatcatcatc

SEQ ID NO: 376733 - DNA, 25 bp, Artificial
  probe
  misc_feature (1)..(25): SEQ ID NO: 4217; WAN024ESF; Start 156; Stop 180
cagacaaacctggaatatcttgaat

SEQ ID NO: 376734 - DNA, 25 bp, Artificial
  probe
  misc_feature (1)..(25): SEQ ID NO: 4217; WAN024ESF; Start 68; Stop 92
tcaaggacaaactgctcatcatcat

SEQ ID NO: 376735 - DNA, 25 bp, Artificial
  probe
  misc_feature (1)..(25): SEQ ID NO: 4217; WAN024ESF; Start 67; Stop 91
atcaaggacaaactgctcatcatca

SEQ ID NO: 376736 - DNA, 25 bp, Artificial
  probe
  misc_feature (1)..(25): SEQ ID NO: 4217; WAN024ESF; Start 155; Stop 179
gcagacaaacctggaatatcttgaa

SEQ ID NO: 376737 - DNA, 25 bp, Artificial
  probe
  misc_feature (1)..(25): SEQ ID NO: 4217; WAN024ESF; Start 94; Stop 118
gatacggtacatattgcggtcgatt

SEQ ID NO: 376738 - DNA, 25 bp, Artificial
  probe
  misc_feature (1)..(25): SEQ ID NO: 4217; WAN024ESF; Start 167; Stop 191
ggaatatcttgaatggcattataga

SEQ ID NO: 376739 - DNA, 25 bp, Artificial
  probe
  misc_feature (1)..(25): SEQ ID NO: 4217; WAN024ESF; Start 196; Stop 220
atttctttgctcgtagattcgtcca

SEQ ID NO: 376740 - DNA, 25 bp, Artificial
  probe
  misc_feature (1)..(25): SEQ ID NO: 4217; WAN024ESF; Start 194; Stop 218
aaatttctttgctcgtagattcgtc

SEQ ID NO: 376741 - DNA, 25 bp, Artificial
  probe
  misc_feature (1)..(25): SEQ ID NO: 4217; WAN024ESF; Start 54; Stop 78
cctgcttcaagaaatcaaggacaaa

SEQ ID NO: 376742 - DNA, 25 bp, Artificial
  probe
  misc_feature (1)..(25): SEQ ID NO: 4218; WAN024CVF; Start 299; Stop 323
tacgaatcatccaacttccatactt

SEQ ID NO: 376743 - DNA, 25 bp, Artificial
  probe
  misc_feature (1)..(25): SEQ ID NO: 4218; WAN024CVF; Start 298; Stop 322
atacgaatcatccaacttccatact

SEQ ID NO: 376744 - DNA, 25 bp, Artificial
  probe
  misc_feature (1)..(25): SEQ ID NO: 4218; WAN024CVF; Start 134; Stop 158
gtctggataatagagcgaacatagt

SEQ ID NO: 376745 - DNA, 25 bp, Artificial
  probe
  misc_feature (1)..(25): SEQ ID NO: 4218; WAN024CVF; Start 133; Stop 157
cgtctggataatagagcgaacatag

SEQ ID NO: 376746 - DNA, 25 bp, Artificial
  probe
  misc_feature (1)..(25): SEQ ID NO: 4218; WAN024CVF; Start 297; Stop 321
aatacgaatcatccaacttccatac

SEQ ID NO: 376747 - DNA, 25 bp, Artificial
  probe
  misc_feature (1)..(25): SEQ ID NO: 4218; WAN024CVF; Start 296; Stop 320
gaatacgaatcatccaacttccata

SEQ ID NO: 376748 - DNA, 25 bp, Artificial
  probe
  misc_feature (1)..(25): SEQ ID NO: 4218; WAN024CVF; Start 283; Stop 307
ccgatcatcataggaatacgaatca

SEQ ID NO: 376749 - DNA, 25 bp, Artificial
  probe
  misc_feature (1)..(25): SEQ ID NO: 4218; WAN024CVF; Start 300; Stop 324
acgaatcatccaacttccatacttg

SEQ ID NO: 376750 - DNA, 25 bp, Artificial
  probe
  misc_feature (1)..(25): SEQ ID NO: 4218; WAN024CVF; Start 188; Stop 212
atctgattctcaaggaaggtcatct

SEQ ID NO: 376751 - DNA, 25 bp, Artificial
  probe
  misc_feature (1)..(25): SEQ ID NO: 4218; WAN024CVF; Start 187; Stop 211
aatctgattctcaaggaaggtcatc

SEQ ID NO: 376752 - DNA, 25 bp, Artificial
  probe
  misc_feature (1)..(25): SEQ ID NO: 4218; WAN024CVF; Start 186; Stop 210
caatctgattctcaaggaaggtcat

SEQ ID NO: 376753 - DNA, 25 bp, Artificial
  probe
  misc_feature (1)..(25): SEQ ID NO: 4218; WAN024CVF; Start 184; Stop 208
ttcaatctgattctcaaggaaggtc

SEQ ID NO: 376754 - DNA, 25 bp, Artificial
  probe
  misc_feature (1)..(25): SEQ ID NO: 4218; WAN024CVF; Start 135; Stop 159
tctggataatagagcgaacatagta

SEQ ID NO: 376755 - DNA, 25 bp, Artificial
  probe
  misc_feature (1)..(25): SEQ ID NO: 4218; WAN024CVF; Start 191; Stop 215
tgattctcaaggaaggtcatctcaa

SEQ ID NO: 376756 - DNA, 25 bp, Artificial
  probe
  misc_feature (1)..(25): SEQ ID NO: 4218; WAN024CVF; Start 189; Stop 213
tctgattctcaaggaaggtcatctc

SEQ ID NO: 376757 - DNA, 25 bp, Artificial
  probe
  misc_feature (1)..(25): SEQ ID NO: 4218; WAN024CVF; Start 132; Stop 156
ccgtctggataatagagcgaacata

SEQ ID NO: 376758 - DNA, 25 bp, Artificial
  probe
  misc_feature (1)..(25): SEQ ID NO: 4218; WAN024CVF; Start 136; Stop 160
ctggataatagagcgaacatagtaa

SEQ ID NO: 376759 - DNA, 25 bp, Artificial
  probe
  misc_feature (1)..(25): SEQ ID NO: 4218; WAN024CVF; Start 284; Stop 308
cgatcatcataggaatacgaatcat

SEQ ID NO: 376760 - DNA, 25 bp, Artificial
  probe
  misc_feature (1)..(25): SEQ ID NO: 4218; WAN024CVF; Start 185; Stop 209
tcaatctgattctcaaggaaggtca

SEQ ID NO: 376761 - DNA, 25 bp, Artificial
  probe
  misc_feature (1)..(25): SEQ ID NO: 4218; WAN024CVF; Start 190; Stop 214
ctgattctcaaggaaggtcatctca

SEQ ID NO: 376762 - DNA, 25 bp, Artificial
  probe
  misc_feature (1)..(25): SEQ ID NO: 4218; WAN024CVF; Start 290; Stop 314
tcataggaatacgaatcatccaact

SEQ ID NO: 376763 - DNA, 25 bp, Artificial
  probe
  misc_feature (1)..(25): SEQ ID NO: 4218; WAN024CVF; Start 357; Stop 381
taaccacctcctgatagttctccaa

SEQ ID NO: 376764 - DNA, 25 bp, Artificial
  probe
  misc_feature (1)..(25): SEQ ID NO: 4218; WAN024CVF; Start 301; Stop 325
cgaatcatccaacttccatacttgc

SEQ ID NO: 376765 - DNA, 25 bp, Artificial
  probe
  misc_feature (1)..(25): SEQ ID NO: 4218; WAN024CVF; Start 287; Stop 311
tcatcataggaatacgaatcatcca

SEQ ID NO: 376766 - DNA, 25 bp, Artificial
  probe
  misc_feature (1)..(25): SEQ ID NO: 4218; WAN024CVF; Start 179; Stop 203
gatacttcaatctgattctcaagga

SEQ ID NO: 376767 - DNA, 25 bp, Artificial
  probe
  misc_feature (1)..(25): SEQ ID NO: 4218; WAN024CVF; Start 291; Stop 315
cataggaatacgaatcatccaactt

SEQ ID NO: 376768 - DNA, 25 bp, Artificial
  probe
  misc_feature (1)..(25): SEQ ID NO: 4218; WAN024CVF; Start 351; Stop 375
attgactaaccacctcctgatagtt

SEQ ID NO: 376769 - DNA, 25 bp, Artificial
  probe
  misc_feature (1)..(25): SEQ ID NO: 4218; WAN024CVF; Start 350; Stop 374
aattgactaaccacctcctgatagt

SEQ ID NO: 376770 - DNA, 25 bp, Artificial
  probe
  misc_feature (1)..(25): SEQ ID NO: 4218; WAN024CVF; Start 505; Stop 529
caatggctcctttctctcttactta

SEQ ID NO: 376771 - DNA, 25 bp, Artificial
  probe
  misc_feature (1)..(25): SEQ ID NO: 4218; WAN024CVF; Start 445; Stop 469
acacagagccataacaaagaagata

SEQ ID NO: 376772 - DNA, 25 bp, Artificial
  probe
  misc_feature (1)..(25): SEQ ID NO: 4218; WAN024CVF; Start 289; Stop 313
atcataggaatacgaatcatccaac

SEQ ID NO: 376773 - DNA, 25 bp, Artificial
  probe
  misc_feature (1)..(25): SEQ ID NO: 4218; WAN024CVF; Start 288; Stop 312
catcataggaatacgaatcatccaa

SEQ ID NO: 376774 - DNA, 25 bp, Artificial
  probe
  misc_feature (1)..(25): SEQ ID NO: 4218; WAN024CVF; Start 28; Stop 52
cacctttgttgtcattgtatctgtt

SEQ ID NO: 376775 - DNA, 25 bp, Artificial
  probe
  misc_feature (1)..(25): SEQ ID NO: 4219; WAN024BDJ; Start 161; Stop 185
ttcacgattattctccaattctcca

SEQ ID NO: 376776 - DNA, 25 bp, Artificial
  probe
  misc_feature (1)..(25): SEQ ID NO: 4219; WAN024BDJ; Start 159; Stop 183
gcttcacgattattctccaattctc

SEQ ID NO: 376777 - DNA, 25 bp, Artificial
  probe
  misc_feature (1)..(25): SEQ ID NO: 4219; WAN024BDJ; Start 162; Stop 186
tcacgattattctccaattctccat

SEQ ID NO: 376778 - DNA, 25 bp, Artificial
  probe
  misc_feature (1)..(25): SEQ ID NO: 4219; WAN024BDJ; Start 160; Stop 184
cttcacgattattctccaattctcc

SEQ ID NO: 376779 - DNA, 25 bp, Artificial
  probe
  misc_feature (1)..(25): SEQ ID NO: 4219; WAN024BDJ; Start 163; Stop 187
cacgattattctccaattctccatc

SEQ ID NO: 376780 - DNA, 25 bp, Artificial
  probe
  misc_feature (1)..(25): SEQ ID NO: 4219; WAN024BDJ; Start 158; Stop 182
ggcttcacgattattctccaattct

SEQ ID NO: 376781 - DNA, 25 bp, Artificial
  probe
  misc_feature (1)..(25): SEQ ID NO: 4219; WAN024BDJ; Start 168; Stop 192
ttattctccaattctccatcgacaa

SEQ ID NO: 376782 - DNA, 25 bp, Artificial
  probe
  misc_feature (1)..(25): SEQ ID NO: 4219; WAN024BDJ; Start 169; Stop 193
tattctccaattctccatcgacaat

SEQ ID NO: 376783 - DNA, 25 bp, Artificial
  probe
  misc_feature (1)..(25): SEQ ID NO: 4219; WAN024BDJ; Start 167; Stop 191
attattctccaattctccatcgaca

SEQ ID NO: 376784 - DNA, 25 bp, Artificial
  probe
  misc_feature (1)..(25): SEQ ID NO: 4219; WAN024BDJ; Start 151; Stop 175
catggatggcttcacgattattctc

SEQ ID NO: 376785 - DNA, 25 bp, Artificial
  probe
  misc_feature (1)..(25): SEQ ID NO: 4219; WAN024BDJ; Start 166; Stop 190
gattattctccaattctccatcgac

SEQ ID NO: 376786 - DNA, 25 bp, Artificial
  probe
  misc_feature (1)..(25): SEQ ID NO: 4219; WAN024BDJ; Start 156; Stop 180
atggcttcacgattattctccaatt

SEQ ID NO: 376787 - DNA, 25 bp, Artificial
  probe
  misc_feature (1)..(25): SEQ ID NO: 4219; WAN024BDJ; Start 155; Stop 179
gatggcttcacgattattctccaat

SEQ ID NO: 376788 - DNA, 25 bp, Artificial
  probe
  misc_feature (1)..(25): SEQ ID NO: 4219; WAN024BDJ; Start 170; Stop 194
attctccaattctccatcgacaatg

SEQ ID NO: 376789 - DNA, 25 bp, Artificial
  probe
  misc_feature (1)..(25): SEQ ID NO: 4219; WAN024BDJ; Start 157; Stop 181
tggcttcacgattattctccaattc

SEQ ID NO: 376790 - DNA, 25 bp, Artificial
  probe
  misc_feature (1)..(25): SEQ ID NO: 4219; WAN024BDJ; Start 32; Stop 56
aaccaattctgtctaagtcatggat

SEQ ID NO: 376791 - DNA, 25 bp, Artificial
  probe
  misc_feature (1)..(25): SEQ ID NO: 4219; WAN024BDJ; Start 23; Stop 47
caccgattaaaccaattctgtctaa

SEQ ID NO: 376792 - DNA, 25 bp, Artificial
  probe
  misc_feature (1)..(25): SEQ ID NO: 4219; WAN024BDJ; Start 190; Stop 214
caatggcaaactcaatctctgttaa

SEQ ID NO: 376793 - DNA, 25 bp, Artificial
  probe
  misc_feature (1)..(25): SEQ ID NO: 4219; WAN024BDJ; Start 25; Stop 49
ccgattaaaccaattctgtctaagt

SEQ ID NO: 376794 - DNA, 25 bp, Artificial
  probe
  misc_feature (1)..(25): SEQ ID NO: 4219; WAN024BDJ; Start 24; Stop 48
accgattaaaccaattctgtctaag

SEQ ID NO: 376795 - DNA, 25 bp, Artificial
  probe
  misc_feature (1)..(25): SEQ ID NO: 4219; WAN024BDJ; Start 33; Stop 57
accaattctgtctaagtcatggata

SEQ ID NO: 376796 - DNA, 25 bp, Artificial
  probe
  misc_feature (1)..(25): SEQ ID NO: 4219; WAN024BDJ; Start 191; Stop 215
aatggcaaactcaatctctgttaaa

SEQ ID NO: 376797 - DNA, 25 bp, Artificial
  probe
  misc_feature (1)..(25): SEQ ID NO: 4219; WAN024BDJ; Start 86; Stop 110
tgtcaccaacggatttacttagttt

SEQ ID NO: 376798 - DNA, 25 bp, Artificial
  probe
  misc_feature (1)..(25): SEQ ID NO: 4219; WAN024BDJ; Start 85; Stop 109
ttgtcaccaacggatttacttagtt

SEQ ID NO: 376799 - DNA, 25 bp, Artificial
  probe
  misc_feature (1)..(25): SEQ ID NO: 4219; WAN024BDJ; Start 83; Stop 107
tcttgtcaccaacggatttacttag

SEQ ID NO: 376800 - DNA, 25 bp, Artificial
  probe
  misc_feature (1)..(25): SEQ ID NO: 4219; WAN024BDJ; Start 82; Stop 106
gtcttgtcaccaacggatttactta

SEQ ID NO: 376801 - DNA, 25 bp, Artificial
  probe
  misc_feature (1)..(25): SEQ ID NO: 4219; WAN024BDJ; Start 84; Stop 108
cttgtcaccaacggatttacttagt

SEQ ID NO: 376802 - DNA, 25 bp, Artificial
  probe
  misc_feature (1)..(25): SEQ ID NO: 4219; WAN024BDJ; Start 22; Stop 46
acaccgattaaaccaattctgtcta

SEQ ID NO: 376803 - DNA, 25 bp, Artificial
  probe
  misc_feature (1)..(25): SEQ ID NO: 4219; WAN024BDJ; Start 34; Stop 58
ccaattctgtctaagtcatggataa

SEQ ID NO: 376804 - DNA, 25 bp, Artificial
  probe
  misc_feature (1)..(25): SEQ ID NO: 4219; WAN024BDJ; Start 189; Stop 213
acaatggcaaactcaatctctgtta

SEQ ID NO: 376805 - DNA, 25 bp, Artificial
  probe
  misc_feature (1)..(25): SEQ ID NO: 4219; WAN024BDJ; Start 26; Stop 50
cgattaaaccaattctgtctaagtc

SEQ ID NO: 376806 - DNA, 25 bp, Artificial
  probe
  misc_feature (1)..(25): SEQ ID NO: 4219; WAN024BDJ; Start 19; Stop 43
ttgacaccgattaaaccaattctgt

SEQ ID NO: 376807 - DNA, 25 bp, Artificial
  probe
  misc_feature (1)..(25): SEQ ID NO: 4219; WAN024BDJ; Start 152; Stop 176
atggatggcttcacgattattctcc

SEQ ID NO: 376808 - DNA, 25 bp, Artificial
  probe
  misc_feature (1)..(25): SEQ ID NO: 4220; WAN024CKF; Start 743; Stop 767
ttcaattcaagtatcattctcctgc

SEQ ID NO: 376809 - DNA, 25 bp, Artificial
  probe
  misc_feature (1)..(25): SEQ ID NO: 4220; WAN024CKF; Start 659; Stop 683
ttgtagtaacttcggattccattct

SEQ ID NO: 376810 - DNA, 25 bp, Artificial
  probe
  misc_feature (1)..(25): SEQ ID NO: 4220; WAN024CKF; Start 664; Stop 688
gtaacttcggattccattctacctt

SEQ ID NO: 376811 - DNA, 25 bp, Artificial
  probe
  misc_feature (1)..(25): SEQ ID NO: 4220; WAN024CKF; Start 666; Stop 690
aacttcggattccattctaccttat

SEQ ID NO: 376812 - DNA, 25 bp, Artificial
  probe
  misc_feature (1)..(25): SEQ ID NO: 4220; WAN024CKF; Start 662; Stop 686
tagtaacttcggattccattctacc

SEQ ID NO: 376813 - DNA, 25 bp, Artificial
  probe
  misc_feature (1)..(25): SEQ ID NO: 4220; WAN024CKF; Start 676; Stop 700
tccattctaccttatgaagatgctt

SEQ ID NO: 376814 - DNA, 25 bp, Artificial
  probe
  misc_feature (1)..(25): SEQ ID NO: 4220; WAN024CKF; Start 675; Stop 699
ttccattctaccttatgaagatgct

SEQ ID NO: 376815 - DNA, 25 bp, Artificial
  probe
  misc_feature (1)..(25): SEQ ID NO: 4220; WAN024CKF; Start 28; Stop 52
gcaacggattatggttcaagtaatt

SEQ ID NO: 376816 - DNA, 25 bp, Artificial
  probe
  misc_feature (1)..(25): SEQ ID NO: 4220; WAN024CKF; Start 670; Stop 694
tcggattccattctaccttatgaag

SEQ ID NO: 376817 - DNA, 25 bp, Artificial
  probe
  misc_feature (1)..(25): SEQ ID NO: 4220; WAN024CKF; Start 668; Stop 692
cttcggattccattctaccttatga

SEQ ID NO: 376818 - DNA, 25 bp, Artificial
  probe
  misc_feature (1)..(25): SEQ ID NO: 4220; WAN024CKF; Start 667; Stop 691
acttcggattccattctaccttatg

SEQ ID NO: 376819 - DNA, 25 bp, Artificial
  probe
  misc_feature (1)..(25): SEQ ID NO: 4220; WAN024CKF; Start 669; Stop 693
ttcggattccattctaccttatgaa

SEQ ID NO: 376820 - DNA, 25 bp, Artificial
  probe
  misc_feature (1)..(25): SEQ ID NO: 4220; WAN024CKF; Start 671; Stop 695
cggattccattctaccttatgaaga

SEQ ID NO: 376821 - DNA, 25 bp, Artificial
  probe
  misc_feature (1)..(25): SEQ ID NO: 4220; WAN024CKF; Start 665; Stop 689
taacttcggattccattctacctta

SEQ ID NO: 376822 - DNA, 25 bp, Artificial
  probe
  misc_feature (1)..(25): SEQ ID NO: 4220; WAN024CKF; Start 660; Stop 684
tgtagtaacttcggattccattcta

SEQ ID NO: 376823 - DNA, 25 bp, Artificial
  probe
  misc_feature (1)..(25): SEQ ID NO: 4220; WAN024CKF; Start 656; Stop 680
atgttgtagtaacttcggattccat

SEQ ID NO: 376824 - DNA, 25 bp, Artificial
  probe
  misc_feature (1)..(25): SEQ ID NO: 4220; WAN024CKF; Start 658; Stop 682
gttgtagtaacttcggattccattc

SEQ ID NO: 376825 - DNA, 25 bp, Artificial
  probe
  misc_feature (1)..(25): SEQ ID NO: 4220; WAN024CKF; Start 657; Stop 681
tgttgtagtaacttcggattccatt

SEQ ID NO: 376826 - DNA, 25 bp, Artificial
  probe
  misc_feature (1)..(25): SEQ ID NO: 4220; WAN024CKF; Start 663; Stop 687
agtaacttcggattccattctacct

SEQ ID NO: 376827 - DNA, 25 bp, Artificial
  probe
  misc_feature (1)..(25): SEQ ID NO: 4220; WAN024CKF; Start 655; Stop 679
tatgttgtagtaacttcggattcca

SEQ ID NO: 376828 - DNA, 25 bp, Artificial
  probe
  misc_feature (1)..(25): SEQ ID NO: 4220; WAN024CKF; Start 989; Stop 1013
aaccgataacaataccttcagaatt

SEQ ID NO: 376829 - DNA, 25 bp, Artificial
  probe
  misc_feature (1)..(25): SEQ ID NO: 4220; WAN024CKF; Start 674; Stop 698
attccattctaccttatgaagatgc

SEQ ID NO: 376830 - DNA, 25 bp, Artificial
  probe
  misc_feature (1)..(25): SEQ ID NO: 4220; WAN024CKF; Start 654; Stop 678
ttatgttgtagtaacttcggattcc

SEQ ID NO: 376831 - DNA, 25 bp, Artificial
  probe
  misc_feature (1)..(25): SEQ ID NO: 4220; WAN024CKF; Start 677; Stop 701
ccattctaccttatgaagatgctta

SEQ ID NO: 376832 - DNA, 25 bp, Artificial
  probe
  misc_feature (1)..(25): SEQ ID NO: 4220; WAN024CKF; Start 672; Stop 696
ggattccattctaccttatgaagat

SEQ ID NO: 376833 - DNA, 25 bp, Artificial
  probe
  misc_feature (1)..(25): SEQ ID NO: 4220; WAN024CKF; Start 744; Stop 768
tcaattcaagtatcattctcctgca

SEQ ID NO: 376834 - DNA, 25 bp, Artificial
  probe
  misc_feature (1)..(25): SEQ ID NO: 4220; WAN024CKF; Start 322; Stop 346
ataggagtattaggtattggtgcag

SEQ ID NO: 376835 - DNA, 25 bp, Artificial
  probe
  misc_feature (1)..(25): SEQ ID NO: 4220; WAN024CKF; Start 50; Stop 74
attacggtgattatctttacggtga

SEQ ID NO: 376836 - DNA, 25 bp, Artificial
  probe
  misc_feature (1)..(25): SEQ ID NO: 4220; WAN024CKF; Start 51; Stop 75
ttacggtgattatctttacggtgag

SEQ ID NO: 376837 - DNA, 25 bp, Artificial
  probe
  misc_feature (1)..(25): SEQ ID NO: 4220; WAN024CKF; Start 323; Stop 347
taggagtattaggtattggtgcagg

SEQ ID NO: 376838 - DNA, 25 bp, Artificial
  probe
  misc_feature (1)..(25): SEQ ID NO: 4220; WAN024CKF; Start 991; Stop 1015
ccgataacaataccttcagaattgg

SEQ ID NO: 376839 - DNA, 25 bp, Artificial
  probe
  misc_feature (1)..(25): SEQ ID NO: 4220; WAN024CKF; Start 15; Stop 39
tatgttacatggtgcaacggattat

SEQ ID NO: 376840 - DNA, 25 bp, Artificial
  probe
  misc_feature (1)..(25): SEQ ID NO: 4220; WAN024CKF; Start 49; Stop 73
aattacggtgattatctttacggtg

SEQ ID NO: 376841 - DNA, 25 bp, Artificial
  probe
  misc_feature (1)..(25): SEQ ID NO: 4221; WAN024G67; Start 4; Stop 28
gtggaaggagttgatatgagagatt

SEQ ID NO: 376842 - DNA, 25 bp, Artificial
  probe
  misc_feature (1)..(25): SEQ ID NO: 4221; WAN024G67; Start 3; Stop 27
ggtggaaggagttgatatgagagat

SEQ ID NO: 376843 - DNA, 25 bp, Artificial
  probe
  misc_feature (1)..(25): SEQ ID NO: 4221; WAN024G67; Start 2; Stop 26
tggtggaaggagttgatatgagaga

SEQ ID NO: 376844 - DNA, 25 bp, Artificial
  probe
  misc_feature (1)..(25): SEQ ID NO: 4221; WAN024G67; Start 1; Stop 25
gtggtggaaggagttgatatgagag

SEQ ID NO: 376845 - DNA, 25 bp, Artificial
  probe
  misc_feature (1)..(25): SEQ ID NO: 4221; WAN024G67; Start 81; Stop 105
ttgtgtactcaacagaagaatcctg

SEQ ID NO: 376846 - DNA, 25 bp, Artificial
  probe
  misc_feature (1)..(25): SEQ ID NO: 4221; WAN024G67; Start 86; Stop 110
tactcaacagaagaatcctgccaat

SEQ ID NO: 376847 - DNA, 25 bp, Artificial
  probe
  misc_feature (1)..(25): SEQ ID NO: 4221; WAN024G67; Start 5; Stop 29
tggaaggagttgatatgagagattt

SEQ ID NO: 376848 - DNA, 25 bp, Artificial
  probe
  misc_feature (1)..(25): SEQ ID NO: 4221; WAN024G67; Start 108; Stop 132
aatggtcttcgatatcttggtacaa

SEQ ID NO: 376849 - DNA, 25 bp, Artificial
  probe
  misc_feature (1)..(25): SEQ ID NO: 4221; WAN024G67; Start 107; Stop 131
caatggtcttcgatatcttggtaca

SEQ ID NO: 376850 - DNA, 25 bp, Artificial
  probe
  misc_feature (1)..(25): SEQ ID NO: 4221; WAN024G67; Start 6; Stop 30
ggaaggagttgatatgagagatttc

SEQ ID NO: 376851 - DNA, 25 bp, Artificial
  probe
  misc_feature (1)..(25): SEQ ID NO: 4221; WAN024G67; Start 85; Stop 109
gtactcaacagaagaatcctgccaa

SEQ ID NO: 376852 - DNA, 25 bp, Artificial
  probe
  misc_feature (1)..(25): SEQ ID NO: 4221; WAN024G67; Start 82; Stop 106
tgtgtactcaacagaagaatcctgc

SEQ ID NO: 376853 - DNA, 25 bp, Artificial
  probe
  misc_feature (1)..(25): SEQ ID NO: 4221; WAN024G67; Start 63; Stop 87
ctgttaccaagcgttgagttgtgta

SEQ ID NO: 376854 - DNA, 25 bp, Artificial
  probe
  misc_feature (1)..(25): SEQ ID NO: 4221; WAN024G67; Start 7; Stop 31
gaaggagttgatatgagagatttct

SEQ ID NO: 376855 - DNA, 25 bp, Artificial
  probe
  misc_feature (1)..(25): SEQ ID NO: 4221; WAN024G67; Start 98; Stop 122
gaatcctgccaatggtcttcgatat

SEQ ID NO: 376856 - DNA, 25 bp, Artificial
  probe
  misc_feature (1)..(25): SEQ ID NO: 4221; WAN024G67; Start 87; Stop 111
actcaacagaagaatcctgccaatg

SEQ ID NO: 376857 - DNA, 25 bp, Artificial
  probe
  misc_feature (1)..(25): SEQ ID NO: 4221; WAN024G67; Start 195; Stop 219
tctgtttaatagcttccttgatgag

SEQ ID NO: 376858 - DNA, 25 bp, Artificial
  probe
  misc_feature (1)..(25): SEQ ID NO: 4221; WAN024G67; Start 65; Stop 89
gttaccaagcgttgagttgtgtact

SEQ ID NO: 376859 - DNA, 25 bp, Artificial
  probe
  misc_feature (1)..(25): SEQ ID NO: 4221; WAN024G67; Start 99; Stop 123
aatcctgccaatggtcttcgatatc

SEQ ID NO: 376860 - DNA, 25 bp, Artificial
  probe
  misc_feature (1)..(25): SEQ ID NO: 4221; WAN024G67; Start 317; Stop 341
aagatgagcttgtcaatcaaactga

SEQ ID NO: 376861 - DNA, 25 bp, Artificial
  probe
  misc_feature (1)..(25): SEQ ID NO: 4221; WAN024G67; Start 83; Stop 107
gtgtactcaacagaagaatcctgcc

SEQ ID NO: 376862 - DNA, 25 bp, Artificial
  probe
  misc_feature (1)..(25): SEQ ID NO: 4221; WAN024G67; Start 194; Stop 218
ttctgtttaatagcttccttgatga

SEQ ID NO: 376863 - DNA, 25 bp, Artificial
  probe
  misc_feature (1)..(25): SEQ ID NO: 4221; WAN024G67; Start 61; Stop 85
ttctgttaccaagcgttgagttgtg

SEQ ID NO: 376864 - DNA, 25 bp, Artificial
  probe
  misc_feature (1)..(25): SEQ ID NO: 4221; WAN024G67; Start 64; Stop 88
tgttaccaagcgttgagttgtgtac

SEQ ID NO: 376865 - DNA, 25 bp, Artificial
  probe
  misc_feature (1)..(25): SEQ ID NO: 4221; WAN024G67; Start 109; Stop 133
atggtcttcgatatcttggtacaaa

SEQ ID NO: 376866 - DNA, 25 bp, Artificial
  probe
  misc_feature (1)..(25): SEQ ID NO: 4221; WAN024G67; Start 111; Stop 135
ggtcttcgatatcttggtacaaagt

SEQ ID NO: 376867 - DNA, 25 bp, Artificial
  probe
  misc_feature (1)..(25): SEQ ID NO: 4221; WAN024G67; Start 110; Stop 134
tggtcttcgatatcttggtacaaag

SEQ ID NO: 376868 - DNA, 25 bp, Artificial
  probe
  misc_feature (1)..(25): SEQ ID NO: 4221; WAN024G67; Start 197; Stop 221
tgtttaatagcttccttgatgaggg

SEQ ID NO: 376869 - DNA, 25 bp, Artificial
  probe
  misc_feature (1)..(25): SEQ ID NO: 4221; WAN024G67; Start 196; Stop 220
ctgtttaatagcttccttgatgagg

SEQ ID NO: 376870 - DNA, 25 bp, Artificial
  probe
  misc_feature (1)..(25): SEQ ID NO: 4221; WAN024G67; Start 114; Stop 138
cttcgatatcttggtacaaagttcc

SEQ ID NO: 376871 - DNA, 25 bp, Artificial
  probe
  misc_feature (1)..(25): SEQ ID NO: 4221; WAN024G67; Start 35; Stop 59
tagatttcttggagaacggtatctg

SEQ ID NO: 376872 - DNA, 25 bp, Artificial
  probe
  misc_feature (1)..(25): SEQ ID NO: 4221; WAN024G67; Start 32; Stop 56
ccatagatttcttggagaacggtat

SEQ ID NO: 376873 - DNA, 25 bp, Artificial
  probe
  misc_feature (1)..(25): SEQ ID NO: 4221; WAN024G67; Start 120; Stop 144
tatcttggtacaaagttccacccat

SEQ ID NO: 376874 - DNA, 25 bp, Artificial
  probe
  misc_feature (1)..(25): SEQ ID NO: 4222; WAN024DPB; Start 43; Stop 67
gaactgacctataaggactgctatc

SEQ ID NO: 376875 - DNA, 25 bp, Artificial
  probe
  misc_feature (1)..(25): SEQ ID NO: 4222; WAN024DPB; Start 45; Stop 69
actgacctataaggactgctatcat

SEQ ID NO: 376876 - DNA, 25 bp, Artificial
  probe
  misc_feature (1)..(25): SEQ ID NO: 4222; WAN024DPB; Start 44; Stop 68
aactgacctataaggactgctatca

SEQ ID NO: 376877 - DNA, 25 bp, Artificial
  probe
  misc_feature (1)..(25): SEQ ID NO: 4222; WAN024DPB; Start 42; Stop 66
tgaactgacctataaggactgctat

SEQ ID NO: 376878 - DNA, 25 bp, Artificial
  probe
  misc_feature (1)..(25): SEQ ID NO: 4222; WAN024DPB; Start 122; Stop 146
caggatgtgtaaccttaccagatac

SEQ ID NO: 376879 - DNA, 25 bp, Artificial
  probe
  misc_feature (1)..(25): SEQ ID NO: 4222; WAN024DPB; Start 121; Stop 145
tcaggatgtgtaaccttaccagata

SEQ ID NO: 376880 - DNA, 25 bp, Artificial
  probe
  misc_feature (1)..(25): SEQ ID NO: 4222; WAN024DPB; Start 41; Stop 65
ttgaactgacctataaggactgcta

SEQ ID NO: 376881 - DNA, 25 bp, Artificial
  probe
  misc_feature (1)..(25): SEQ ID NO: 4222; WAN024DPB; Start 46; Stop 70
ctgacctataaggactgctatcatg

SEQ ID NO: 376882 - DNA, 25 bp, Artificial
  probe
  misc_feature (1)..(25): SEQ ID NO: 4222; WAN024DPB; Start 47; Stop 71
tgacctataaggactgctatcatgt

SEQ ID NO: 376883 - DNA, 25 bp, Artificial
  probe
  misc_feature (1)..(25): SEQ ID NO: 4222; WAN024DPB; Start 49; Stop 73
acctataaggactgctatcatgtag

SEQ ID NO: 376884 - DNA, 25 bp, Artificial
  probe
  misc_feature (1)..(25): SEQ ID NO: 4222; WAN024DPB; Start 48; Stop 72
gacctataaggactgctatcatgta

SEQ ID NO: 376885 - DNA, 25 bp, Artificial
  probe
  misc_feature (1)..(25): SEQ ID NO: 4222; WAN024DPB; Start 120; Stop 144
gtcaggatgtgtaaccttaccagat

SEQ ID NO: 376886 - DNA, 25 bp, Artificial
  probe
  misc_feature (1)..(25): SEQ ID NO: 4222; WAN024DPB; Start 51; Stop 75
ctataaggactgctatcatgtagag

SEQ ID NO: 376887 - DNA, 25 bp, Artificial
  probe
  misc_feature (1)..(25): SEQ ID NO: 4222; WAN024DPB; Start 50; Stop 74
cctataaggactgctatcatgtaga

SEQ ID NO: 376888 - DNA, 25 bp, Artificial
  probe
  misc_feature (1)..(25): SEQ ID NO: 4222; WAN024DPB; Start 123; Stop 147
aggatgtgtaaccttaccagataca

SEQ ID NO: 376889 - DNA, 25 bp, Artificial
  probe
  misc_feature (1)..(25): SEQ ID NO: 4222; WAN024DPB; Start 118; Stop 142
ttgtcaggatgtgtaaccttaccag

SEQ ID NO: 376890 - DNA, 25 bp, Artificial
  probe
  misc_feature (1)..(25): SEQ ID NO: 4222; WAN024DPB; Start 52; Stop 76
tataaggactgctatcatgtagagc

SEQ ID NO: 376891 - DNA, 25 bp, Artificial
  probe
  misc_feature (1)..(25): SEQ ID NO: 4222; WAN024DPB; Start 58; Stop 82
gactgctatcatgtagagcgtactc

SEQ ID NO: 376892 - DNA, 25 bp, Artificial
  probe
  misc_feature (1)..(25): SEQ ID NO: 4222; WAN024DPB; Start 145; Stop 169
acactttatgtgacttctctgactt

SEQ ID NO: 376893 - DNA, 25 bp, Artificial
  probe
  misc_feature (1)..(25): SEQ ID NO: 4222; WAN024DPB; Start 38; Stop 62
tgtttgaactgacctataaggactg

SEQ ID NO: 376894 - DNA, 25 bp, Artificial
  probe
  misc_feature (1)..(25): SEQ ID NO: 4222; WAN024DPB; Start 119; Stop 143
tgtcaggatgtgtaaccttaccaga

SEQ ID NO: 376895 - DNA, 25 bp, Artificial
  probe
  misc_feature (1)..(25): SEQ ID NO: 4222; WAN024DPB; Start 114; Stop 138
gactttgtcaggatgtgtaacctta

SEQ ID NO: 376896 - DNA, 25 bp, Artificial
  probe
  misc_feature (1)..(25): SEQ ID NO: 4222; WAN024DPB; Start 138; Stop 162
accagatacactttatgtgacttct

SEQ ID NO: 376897 - DNA, 25 bp, Artificial
  probe
  misc_feature (1)..(25): SEQ ID NO: 4222; WAN024DPB; Start 37; Stop 61
atgtttgaactgacctataaggact

SEQ ID NO: 376898 - DNA, 25 bp, Artificial
  probe
  misc_feature (1)..(25): SEQ ID NO: 4222; WAN024DPB; Start 133; Stop 157
accttaccagatacactttatgtga

SEQ ID NO: 376899 - DNA, 25 bp, Artificial
  probe
  misc_feature (1)..(25): SEQ ID NO: 4222; WAN024DPB; Start 115; Stop 139
actttgtcaggatgtgtaaccttac

SEQ ID NO: 376900 - DNA, 25 bp, Artificial
  probe
  misc_feature (1)..(25): SEQ ID NO: 4222; WAN024DPB; Start 144; Stop 168
tacactttatgtgacttctctgact

SEQ ID NO: 376901 - DNA, 25 bp, Artificial
  probe
  misc_feature (1)..(25): SEQ ID NO: 4222; WAN024DPB; Start 146; Stop 170
cactttatgtgacttctctgacttt

SEQ ID NO: 376902 - DNA, 25 bp, Artificial
  probe
  misc_feature (1)..(25): SEQ ID NO: 4222; WAN024DPB; Start 139; Stop 163
ccagatacactttatgtgacttctc

SEQ ID NO: 376903 - DNA, 25 bp, Artificial
  probe
  misc_feature (1)..(25): SEQ ID NO: 4222; WAN024DPB; Start 134; Stop 158
ccttaccagatacactttatgtgac

SEQ ID NO: 376904 - DNA, 25 bp, Artificial
  probe
  misc_feature (1)..(25): SEQ ID NO: 4222; WAN024DPB; Start 36; Stop 60
aatgtttgaactgacctataaggac

SEQ ID NO: 376905 - DNA, 25 bp, Artificial
  probe
  misc_feature (1)..(25): SEQ ID NO: 4222; WAN024DPB; Start 53; Stop 77
ataaggactgctatcatgtagagcg

SEQ ID NO: 376906 - DNA, 25 bp, Artificial
  probe
  misc_feature (1)..(25): SEQ ID NO: 4222; WAN024DPB; Start 116; Stop 140
ctttgtcaggatgtgtaaccttacc

SEQ ID NO: 376907 - DNA, 25 bp, Artificial
  probe
  misc_feature (1)..(25): SEQ ID NO: 4223; WAN024F7R; Start 9; Stop 33
acacaacttcgatgttacagacaaa

SEQ ID NO: 376908 - DNA, 25 bp, Artificial
  probe
  misc_feature (1)..(25): SEQ ID NO: 4223; WAN024F7R; Start 8; Stop 32
aacacaacttcgatgttacagacaa

SEQ ID NO: 376909 - DNA, 25 bp, Artificial
  probe
  misc_feature (1)..(25): SEQ ID NO: 4223; WAN024F7R; Start 20; Stop 44
atgttacagacaaaactggcaaaat

SEQ ID NO: 376910 - DNA, 25 bp, Artificial
  probe
  misc_feature (1)..(25): SEQ ID NO: 4223; WAN024F7R; Start 21; Stop 45
tgttacagacaaaactggcaaaatt

SEQ ID NO: 376911 - DNA, 25 bp, Artificial
  probe
  misc_feature (1)..(25): SEQ ID NO: 4223; WAN024F7R; Start 24; Stop 48
tacagacaaaactggcaaaattagc

SEQ ID NO: 376912 - DNA, 25 bp, Artificial
  probe
  misc_feature (1)..(25): SEQ ID NO: 4223; WAN024F7R; Start 19; Stop 43
gatgttacagacaaaactggcaaaa

SEQ ID NO: 376913 - DNA, 25 bp, Artificial
  probe
  misc_feature (1)..(25): SEQ ID NO: 4223; WAN024F7R; Start 22; Stop 46
gttacagacaaaactggcaaaatta

SEQ ID NO: 376914 - DNA, 25 bp, Artificial
  probe
  misc_feature (1)..(25): SEQ ID NO: 4223; WAN024F7R; Start 31; Stop 55
aaaactggcaaaattagctcaaaac

SEQ ID NO: 376915 - DNA, 25 bp, Artificial
  probe
  misc_feature (1)..(25): SEQ ID NO: 4223; WAN024F7R; Start 30; Stop 54
caaaactggcaaaattagctcaaaa

SEQ ID NO: 376916 - DNA, 25 bp, Artificial
  probe
  misc_feature (1)..(25): SEQ ID NO: 4223; WAN024F7R; Start 32; Stop 56
aaactggcaaaattagctcaaaaca

SEQ ID NO: 376917 - DNA, 25 bp, Artificial
  probe
  misc_feature (1)..(25): SEQ ID NO: 4223; WAN024F7R; Start 29; Stop 53
acaaaactggcaaaattagctcaaa

SEQ ID NO: 376918 - DNA, 25 bp, Artificial
  probe
  misc_feature (1)..(25): SEQ ID NO: 4223; WAN024F7R; Start 23; Stop 47
ttacagacaaaactggcaaaattag

SEQ ID NO: 376919 - DNA, 25 bp, Artificial
  probe
  misc_feature (1)..(25): SEQ ID NO: 4223; WAN024F7R; Start 61; Stop 85
tttgagattactgataaaactgacg

SEQ ID NO: 376920 - DNA, 25 bp, Artificial
  probe
  misc_feature (1)..(25): SEQ ID NO: 4223; WAN024F7R; Start 28; Stop 52
gacaaaactggcaaaattagctcaa

SEQ ID NO: 376921 - DNA, 25 bp, Artificial
  probe
  misc_feature (1)..(25): SEQ ID NO: 4223; WAN024F7R; Start 33; Stop 57
aactggcaaaattagctcaaaacac

SEQ ID NO: 376922 - DNA, 25 bp, Artificial
  probe
  misc_feature (1)..(25): SEQ ID NO: 4223; WAN024F7R; Start 37; Stop 61
ggcaaaattagctcaaaacactgtt

SEQ ID NO: 376923 - DNA, 25 bp, Artificial
  probe
  misc_feature (1)..(25): SEQ ID NO: 4223; WAN024F7R; Start 35; Stop 59
ctggcaaaattagctcaaaacactg

SEQ ID NO: 376924 - DNA, 25 bp, Artificial
  probe
  misc_feature (1)..(25): SEQ ID NO: 4223; WAN024F7R; Start 27; Stop 51
agacaaaactggcaaaattagctca

SEQ ID NO: 376925 - DNA, 25 bp, Artificial
  probe
  misc_feature (1)..(25): SEQ ID NO: 4223; WAN024F7R; Start 7; Stop 31
aaacacaacttcgatgttacagaca

SEQ ID NO: 376926 - DNA, 25 bp, Artificial
  probe
  misc_feature (1)..(25): SEQ ID NO: 4223; WAN024F7R; Start 34; Stop 58
actggcaaaattagctcaaaacact

SEQ ID NO: 376927 - DNA, 25 bp, Artificial
  probe
  misc_feature (1)..(25): SEQ ID NO: 4223; WAN024F7R; Start 12; Stop 36
caacttcgatgttacagacaaaact

SEQ ID NO: 376928 - DNA, 25 bp, Artificial
  probe
  misc_feature (1)..(25): SEQ ID NO: 4223; WAN024F7R; Start 11; Stop 35
acaacttcgatgttacagacaaaac

SEQ ID NO: 376929 - DNA, 25 bp, Artificial
  probe
  misc_feature (1)..(25): SEQ ID NO: 4223; WAN024F7R; Start 10; Stop 34
cacaacttcgatgttacagacaaaa

SEQ ID NO: 376930 - DNA, 25 bp, Artificial
  probe
  misc_feature (1)..(25): SEQ ID NO: 4223; WAN024F7R; Start 13; Stop 37
aacttcgatgttacagacaaaactg

SEQ ID NO: 376931 - DNA, 25 bp, Artificial
  probe
  misc_feature (1)..(25): SEQ ID NO: 4223; WAN024F7R; Start 36; Stop 60
tggcaaaattagctcaaaacactgt

SEQ ID NO: 376932 - DNA, 25 bp, Artificial
  probe
  misc_feature (1)..(25): SEQ ID NO: 4223; WAN024F7R; Start 62; Stop 86
ttgagattactgataaaactgacgt

SEQ ID NO: 376933 - DNA, 25 bp, Artificial
  probe
  misc_feature (1)..(25): SEQ ID NO: 4223; WAN024F7R; Start 18; Stop 42
cgatgttacagacaaaactggcaaa

SEQ ID NO: 376934 - DNA, 25 bp, Artificial
  probe
  misc_feature (1)..(25): SEQ ID NO: 4223; WAN024F7R; Start 26; Stop 50
cagacaaaactggcaaaattagctc

SEQ ID NO: 376935 - DNA, 25 bp, Artificial
  probe
  misc_feature (1)..(25): SEQ ID NO: 4223; WAN024F7R; Start 54; Stop 78
acactgttttgagattactgataaa

SEQ ID NO: 376936 - DNA, 25 bp, Artificial
  probe
  misc_feature (1)..(25): SEQ ID NO: 4223; WAN024F7R; Start 14; Stop 38
acttcgatgttacagacaaaactgg

SEQ ID NO: 376937 - DNA, 25 bp, Artificial
  probe
  misc_feature (1)..(25): SEQ ID NO: 4223; WAN024F7R; Start 25; Stop 49
acagacaaaactggcaaaattagct

SEQ ID NO: 376938 - DNA, 25 bp, Artificial
  probe
  misc_feature (1)..(25): SEQ ID NO: 4223; WAN024F7R; Start 53; Stop 77
aacactgttttgagattactgataa

SEQ ID NO: 376939 - DNA, 25 bp, Artificial
  probe
  misc_feature (1)..(25): SEQ ID NO: 4223; WAN024F7R; Start 38; Stop 62
gcaaaattagctcaaaacactgttt

SEQ ID NO: 376940 - DNA, 25 bp, Artificial
  probe
  misc_feature (1)..(25): SEQ ID NO: 4224; WAN024CKY; Start 285; Stop 309
caagcataactggatctgtaaggtc

SEQ ID NO: 376941 - DNA, 25 bp, Artificial
  probe
  misc_feature (1)..(25): SEQ ID NO: 4224; WAN024CKY; Start 291; Stop 315
taactggatctgtaaggtcgttgat

SEQ ID NO: 376942 - DNA, 25 bp, Artificial
  probe
  misc_feature (1)..(25): SEQ ID NO: 4224; WAN024CKY; Start 290; Stop 314
ataactggatctgtaaggtcgttga

SEQ ID NO: 376943 - DNA, 25 bp, Artificial
  probe
  misc_feature (1)..(25): SEQ ID NO: 4224; WAN024CKY; Start 289; Stop 313
cataactggatctgtaaggtcgttg

SEQ ID NO: 376944 - DNA, 25 bp, Artificial
  probe
  misc_feature (1)..(25): SEQ ID NO: 4224; WAN024CKY; Start 286; Stop 310
aagcataactggatctgtaaggtcg

SEQ ID NO: 376945 - DNA, 25 bp, Artificial
  probe
  misc_feature (1)..(25): SEQ ID NO: 4224; WAN024CKY; Start 215; Stop 239
aatccaccttctttaacttcaacag

SEQ ID NO: 376946 - DNA, 25 bp, Artificial
  probe
  misc_feature (1)..(25): SEQ ID NO: 4224; WAN024CKY; Start 181; Stop 205
agcagaaactttgatgaatttaccg

SEQ ID NO: 376947 - DNA, 25 bp, Artificial
  probe
  misc_feature (1)..(25): SEQ ID NO: 4224; WAN024CKY; Start 182; Stop 206
gcagaaactttgatgaatttaccgt

SEQ ID NO: 376948 - DNA, 25 bp, Artificial
  probe
  misc_feature (1)..(25): SEQ ID NO: 4224; WAN024CKY; Start 214; Stop 238
aaatccaccttctttaacttcaaca

SEQ ID NO: 376949 - DNA, 25 bp, Artificial
  probe
  misc_feature (1)..(25): SEQ ID NO: 4224; WAN024CKY; Start 180; Stop 204
cagcagaaactttgatgaatttacc

SEQ ID NO: 376950 - DNA, 25 bp, Artificial
  probe
  misc_feature (1)..(25): SEQ ID NO: 4224; WAN024CKY; Start 376; Stop 400
tccgaaaccgttaataccaacttta

SEQ ID NO: 376951 - DNA, 25 bp, Artificial
  probe
  misc_feature (1)..(25): SEQ ID NO: 4224; WAN024CKY; Start 377; Stop 401
ccgaaaccgttaataccaactttaa

SEQ ID NO: 376952 - DNA, 25 bp, Artificial
  probe
  misc_feature (1)..(25): SEQ ID NO: 4224; WAN024CKY; Start 213; Stop 237
caaatccaccttctttaacttcaac

SEQ ID NO: 376953 - DNA, 25 bp, Artificial
  probe
  misc_feature (1)..(25): SEQ ID NO: 4224; WAN024CKY; Start 212; Stop 236
tcaaatccaccttctttaacttcaa

SEQ ID NO: 376954 - DNA, 25 bp, Artificial
  probe
  misc_feature (1)..(25): SEQ ID NO: 4224; WAN024CKY; Start 211; Stop 235
ttcaaatccaccttctttaacttca

SEQ ID NO: 376955 - DNA, 25 bp, Artificial
  probe
  misc_feature (1)..(25): SEQ ID NO: 4224; WAN024CKY; Start 209; Stop 233
acttcaaatccaccttctttaactt

SEQ ID NO: 376956 - DNA, 25 bp, Artificial
  probe
  misc_feature (1)..(25): SEQ ID NO: 4224; WAN024CKY; Start 208; Stop 232
aacttcaaatccaccttctttaact

SEQ ID NO: 376957 - DNA, 25 bp, Artificial
  probe
  misc_feature (1)..(25): SEQ ID NO: 4224; WAN024CKY; Start 292; Stop 316
aactggatctgtaaggtcgttgatg

SEQ ID NO: 376958 - DNA, 25 bp, Artificial
  probe
  misc_feature (1)..(25): SEQ ID NO: 4224; WAN024CKY; Start 217; Stop 241
tccaccttctttaacttcaacagta

SEQ ID NO: 376959 - DNA, 25 bp, Artificial
  probe
  misc_feature (1)..(25): SEQ ID NO: 4224; WAN024CKY; Start 216; Stop 240
atccaccttctttaacttcaacagt

SEQ ID NO: 376960 - DNA, 25 bp, Artificial
  probe
  misc_feature (1)..(25): SEQ ID NO: 4224; WAN024CKY; Start 288; Stop 312
gcataactggatctgtaaggtcgtt

SEQ ID NO: 376961 - DNA, 25 bp, Artificial
  probe
  misc_feature (1)..(25): SEQ ID NO: 4224; WAN024CKY; Start 284; Stop 308
gcaagcataactggatctgtaaggt

SEQ ID NO: 376962 - DNA, 25 bp, Artificial
  probe
  misc_feature (1)..(25): SEQ ID NO: 4224; WAN024CKY; Start 210; Stop 234
cttcaaatccaccttctttaacttc

SEQ ID NO: 376963 - DNA, 25 bp, Artificial
  probe
  misc_feature (1)..(25): SEQ ID NO: 4224; WAN024CKY; Start 183; Stop 207
cagaaactttgatgaatttaccgtt

SEQ ID NO: 376964 - DNA, 25 bp, Artificial
  probe
  misc_feature (1)..(25): SEQ ID NO: 4224; WAN024CKY; Start 282; Stop 306
gtgcaagcataactggatctgtaag

SEQ ID NO: 376965 - DNA, 25 bp, Artificial
  probe
  misc_feature (1)..(25): SEQ ID NO: 4224; WAN024CKY; Start 303; Stop 327
taaggtcgttgatgcgtgtaacttc

SEQ ID NO: 376966 - DNA, 25 bp, Artificial
  probe
  misc_feature (1)..(25): SEQ ID NO: 4224; WAN024CKY; Start 222; Stop 246
cttctttaacttcaacagtaccgtc

SEQ ID NO: 376967 - DNA, 25 bp, Artificial
  probe
  misc_feature (1)..(25): SEQ ID NO: 4224; WAN024CKY; Start 219; Stop 243
caccttctttaacttcaacagtacc

SEQ ID NO: 376968 - DNA, 25 bp, Artificial
  probe
  misc_feature (1)..(25): SEQ ID NO: 4224; WAN024CKY; Start 218; Stop 242
ccaccttctttaacttcaacagtac

SEQ ID NO: 376969 - DNA, 25 bp, Artificial
  probe
  misc_feature (1)..(25): SEQ ID NO: 4224; WAN024CKY; Start 375; Stop 399
gtccgaaaccgttaataccaacttt

SEQ ID NO: 376970 - DNA, 25 bp, Artificial
  probe
  misc_feature (1)..(25): SEQ ID NO: 4224; WAN024CKY; Start 221; Stop 245
ccttctttaacttcaacagtaccgt

SEQ ID NO: 376971 - DNA, 25 bp, Artificial
  probe
  misc_feature (1)..(25): SEQ ID NO: 4224; WAN024CKY; Start 220; Stop 244
accttctttaacttcaacagtaccg

SEQ ID NO: 376972 - DNA, 25 bp, Artificial
  probe
  misc_feature (1)..(25): SEQ ID NO: 4224; WAN024CKY; Start 179; Stop 203
tcagcagaaactttgatgaatttac

SEQ ID NO: 376973 - DNA, 25 bp, Artificial
  probe
  misc_feature (1)..(25): SEQ ID NO: 4225; WAN024DWX; Start 114; Stop 138
tagcaatagcaatcatagatccagg

SEQ ID NO: 376974 - DNA, 25 bp, Artificial
  probe
  misc_feature (1)..(25): SEQ ID NO: 4225; WAN024DWX; Start 117; Stop 141
caatagcaatcatagatccaggcat

SEQ ID NO: 376975 - DNA, 25 bp, Artificial
  probe
  misc_feature (1)..(25): SEQ ID NO: 4225; WAN024DWX; Start 118; Stop 142
aatagcaatcatagatccaggcatg

SEQ ID NO: 376976 - DNA, 25 bp, Artificial
  probe
  misc_feature (1)..(25): SEQ ID NO: 4225; WAN024DWX; Start 113; Stop 137
ttagcaatagcaatcatagatccag

SEQ ID NO: 376977 - DNA, 25 bp, Artificial
  probe
  misc_feature (1)..(25): SEQ ID NO: 4225; WAN024DWX; Start 124; Stop 148
aatcatagatccaggcatgttcttg

SEQ ID NO: 376978 - DNA, 25 bp, Artificial
  probe
  misc_feature (1)..(25): SEQ ID NO: 4225; WAN024DWX; Start 123; Stop 147
caatcatagatccaggcatgttctt

SEQ ID NO: 376979 - DNA, 25 bp, Artificial
  probe
  misc_feature (1)..(25): SEQ ID NO: 4225; WAN024DWX; Start 119; Stop 143
atagcaatcatagatccaggcatgt

SEQ ID NO: 376980 - DNA, 25 bp, Artificial
  probe
  misc_feature (1)..(25): SEQ ID NO: 4225; WAN024DWX; Start 112; Stop 136
attagcaatagcaatcatagatcca

SEQ ID NO: 376981 - DNA, 25 bp, Artificial
  probe
  misc_feature (1)..(25): SEQ ID NO: 4225; WAN024DWX; Start 120; Stop 144
tagcaatcatagatccaggcatgtt

SEQ ID NO: 376982 - DNA, 25 bp, Artificial
  probe
  misc_feature (1)..(25): SEQ ID NO: 4225; WAN024DWX; Start 125; Stop 149
atcatagatccaggcatgttcttgt

SEQ ID NO: 376983 - DNA, 25 bp, Artificial
  probe
  misc_feature (1)..(25): SEQ ID NO: 4225; WAN024DWX; Start 17; Stop 41
ataccttcaaagacagaaaccaagt

SEQ ID NO: 376984 - DNA, 25 bp, Artificial
  probe
  misc_feature (1)..(25): SEQ ID NO: 4225; WAN024DWX; Start 16; Stop 40
gataccttcaaagacagaaaccaag

SEQ ID NO: 376985 - DNA, 25 bp, Artificial
  probe
  misc_feature (1)..(25): SEQ ID NO: 4225; WAN024DWX; Start 126; Stop 150
tcatagatccaggcatgttcttgtc

SEQ ID NO: 376986 - DNA, 25 bp, Artificial
  probe
  misc_feature (1)..(25): SEQ ID NO: 4225; WAN024DWX; Start 12; Stop 36
ttccgataccttcaaagacagaaac

SEQ ID NO: 376987 - DNA, 25 bp, Artificial
  probe
  misc_feature (1)..(25): SEQ ID NO: 4225; WAN024DWX; Start 115; Stop 139
agcaatagcaatcatagatccaggc

SEQ ID NO: 376988 - DNA, 25 bp, Artificial
  probe
  misc_feature (1)..(25): SEQ ID NO: 4225; WAN024DWX; Start 15; Stop 39
cgataccttcaaagacagaaaccaa

SEQ ID NO: 376989 - DNA, 25 bp, Artificial
  probe
  misc_feature (1)..(25): SEQ ID NO: 4225; WAN024DWX; Start 128; Stop 152
atagatccaggcatgttcttgtcac

SEQ ID NO: 376990 - DNA, 25 bp, Artificial
  probe
  misc_feature (1)..(25): SEQ ID NO: 4225; WAN024DWX; Start 127; Stop 151
catagatccaggcatgttcttgtca

SEQ ID NO: 376991 - DNA, 25 bp, Artificial
  probe
  misc_feature (1)..(25): SEQ ID NO: 4225; WAN024DWX; Start 116; Stop 140
gcaatagcaatcatagatccaggca

SEQ ID NO: 376992 - DNA, 25 bp, Artificial
  probe
  misc_feature (1)..(25): SEQ ID NO: 4225; WAN024DWX; Start 121; Stop 145
agcaatcatagatccaggcatgttc

SEQ ID NO: 376993 - DNA, 25 bp, Artificial
  probe
  misc_feature (1)..(25): SEQ ID NO: 4225; WAN024DWX; Start 122; Stop 146
gcaatcatagatccaggcatgttct

SEQ ID NO: 376994 - DNA, 25 bp, Artificial
  probe
  misc_feature (1)..(25): SEQ ID NO: 4225; WAN024DWX; Start 108; Stop 132
ccatattagcaatagcaatcataga

SEQ ID NO: 376995 - DNA, 25 bp, Artificial
  probe
  misc_feature (1)..(25): SEQ ID NO: 4225; WAN024DWX; Start 107; Stop 131
tccatattagcaatagcaatcatag

SEQ ID NO: 376996 - DNA, 25 bp, Artificial
  probe
  misc_feature (1)..(25): SEQ ID NO: 4225; WAN024DWX; Start 18; Stop 42
taccttcaaagacagaaaccaagtc

SEQ ID NO: 376997 - DNA, 25 bp, Artificial
  probe
  misc_feature (1)..(25): SEQ ID NO: 4225; WAN024DWX; Start 13; Stop 37
tccgataccttcaaagacagaaacc

SEQ ID NO: 376998 - DNA, 25 bp, Artificial
  probe
  misc_feature (1)..(25): SEQ ID NO: 4225; WAN024DWX; Start 14; Stop 38
ccgataccttcaaagacagaaacca

SEQ ID NO: 376999 - DNA, 25 bp, Artificial
  probe
  misc_feature (1)..(25): SEQ ID NO: 4225; WAN024DWX; Start 111; Stop 135
tattagcaatagcaatcatagatcc

SEQ ID NO: 377000 - DNA, 25 bp, Artificial
  probe
  misc_feature (1)..(25): SEQ ID NO: 4225; WAN024DWX; Start 11; Stop 35
tttccgataccttcaaagacagaaa

SEQ ID NO: 377001 - DNA, 25 bp, Artificial
  probe
  misc_feature (1)..(25): SEQ ID NO: 4225; WAN024DWX; Start 35; Stop 59
accaagtcgatatctttaccatcaa

SEQ ID NO: 377002 - DNA, 25 bp, Artificial
  probe
  misc_feature (1)..(25): SEQ ID NO: 4225; WAN024DWX; Start 34; Stop 58
aaccaagtcgatatctttaccatca

SEQ ID NO: 377003 - DNA, 25 bp, Artificial
  probe
  misc_feature (1)..(25): SEQ ID NO: 4225; WAN024DWX; Start 106; Stop 130
atccatattagcaatagcaatcata

SEQ ID NO: 377004 - DNA, 25 bp, Artificial
  probe
  misc_feature (1)..(25): SEQ ID NO: 4225; WAN024DWX; Start 105; Stop 129
tatccatattagcaatagcaatcat

SEQ ID NO: 377005 - DNA, 25 bp, Artificial
  probe
  misc_feature (1)..(25): SEQ ID NO: 4225; WAN024DWX; Start 104; Stop 128
atatccatattagcaatagcaatca

SEQ ID NO: 377006 - DNA, 25 bp, Artificial
  probe
  misc_feature (1)..(25): SEQ ID NO: 4226; WAN024FMF; Start 383; Stop 407
atcaagagactccaacaccagataa

SEQ ID NO: 377007 - DNA, 25 bp, Artificial
  probe
  misc_feature (1)..(25): SEQ ID NO: 4226; WAN024FMF; Start 382; Stop 406
aatcaagagactccaacaccagata

SEQ ID NO: 377008 - DNA, 25 bp, Artificial
  probe
  misc_feature (1)..(25): SEQ ID NO: 4226; WAN024FMF; Start 557; Stop 581
tgttagctggtctaggattaggatt

SEQ ID NO: 377009 - DNA, 25 bp, Artificial
  probe
  misc_feature (1)..(25): SEQ ID NO: 4226; WAN024FMF; Start 556; Stop 580
ttgttagctggtctaggattaggat

SEQ ID NO: 377010 - DNA, 25 bp, Artificial
  probe
  misc_feature (1)..(25): SEQ ID NO: 4226; WAN024FMF; Start 555; Stop 579
cttgttagctggtctaggattagga

SEQ ID NO: 377011 - DNA, 25 bp, Artificial
  probe
  misc_feature (1)..(25): SEQ ID NO: 4226; WAN024FMF; Start 373; Stop 397
gaactaccaaatcaagagactccaa

SEQ ID NO: 377012 - DNA, 25 bp, Artificial
  probe
  misc_feature (1)..(25): SEQ ID NO: 4226; WAN024FMF; Start 366; Stop 390
aaacccagaactaccaaatcaagag

SEQ ID NO: 377013 - DNA, 25 bp, Artificial
  probe
  misc_feature (1)..(25): SEQ ID NO: 4226; WAN024FMF; Start 374; Stop 398
aactaccaaatcaagagactccaac

SEQ ID NO: 377014 - DNA, 25 bp, Artificial
  probe
  misc_feature (1)..(25): SEQ ID NO: 4226; WAN024FMF; Start 371; Stop 395
cagaactaccaaatcaagagactcc

SEQ ID NO: 377015 - DNA, 25 bp, Artificial
  probe
  misc_feature (1)..(25): SEQ ID NO: 4226; WAN024FMF; Start 370; Stop 394
ccagaactaccaaatcaagagactc

SEQ ID NO: 377016 - DNA, 25 bp, Artificial
  probe
  misc_feature (1)..(25): SEQ ID NO: 4226; WAN024FMF; Start 365; Stop 389
caaacccagaactaccaaatcaaga

SEQ ID NO: 377017 - DNA, 25 bp, Artificial
  probe
  misc_feature (1)..(25): SEQ ID NO: 4226; WAN024FMF; Start 186; Stop 210
ggacgaggttatatctggtaagatt

SEQ ID NO: 377018 - DNA, 25 bp, Artificial
  probe
  misc_feature (1)..(25): SEQ ID NO: 4226; WAN024FMF; Start 372; Stop 396
agaactaccaaatcaagagactcca

SEQ ID NO: 377019 - DNA, 25 bp, Artificial
  probe
  misc_feature (1)..(25): SEQ ID NO: 4226; WAN024FMF; Start 367; Stop 391
aacccagaactaccaaatcaagaga

SEQ ID NO: 377020 - DNA, 25 bp, Artificial
  probe
  misc_feature (1)..(25): SEQ ID NO: 4226; WAN024FMF; Start 385; Stop 409
caagagactccaacaccagataaac

SEQ ID NO: 377021 - DNA, 25 bp, Artificial
  probe
  misc_feature (1)..(25): SEQ ID NO: 4226; WAN024FMF; Start 384; Stop 408
tcaagagactccaacaccagataaa

SEQ ID NO: 377022 - DNA, 25 bp, Artificial
  probe
  misc_feature (1)..(25): SEQ ID NO: 4226; WAN024FMF; Start 376; Stop 400
ctaccaaatcaagagactccaacac

SEQ ID NO: 377023 - DNA, 25 bp, Artificial
  probe
  misc_feature (1)..(25): SEQ ID NO: 4226; WAN024FMF; Start 295; Stop 319
tatgaccgtttatcaacaccagaaa

SEQ ID NO: 377024 - DNA, 25 bp, Artificial
  probe
  misc_feature (1)..(25): SEQ ID NO: 4226; WAN024FMF; Start 188; Stop 212
acgaggttatatctggtaagattga

SEQ ID NO: 377025 - DNA, 25 bp, Artificial
  probe
  misc_feature (1)..(25): SEQ ID NO: 4226; WAN024FMF; Start 189; Stop 213
cgaggttatatctggtaagattgac

SEQ ID NO: 377026 - DNA, 25 bp, Artificial
  probe
  misc_feature (1)..(25): SEQ ID NO: 4226; WAN024FMF; Start 187; Stop 211
gacgaggttatatctggtaagattg

SEQ ID NO: 377027 - DNA, 25 bp, Artificial
  probe
  misc_feature (1)..(25): SEQ ID NO: 4226; WAN024FMF; Start 183; Stop 207
ctgggacgaggttatatctggtaag

SEQ ID NO: 377028 - DNA, 25 bp, Artificial
  probe
  misc_feature (1)..(25): SEQ ID NO: 4226; WAN024FMF; Start 375; Stop 399
actaccaaatcaagagactccaaca

SEQ ID NO: 377029 - DNA, 25 bp, Artificial
  probe
  misc_feature (1)..(25): SEQ ID NO: 4226; WAN024FMF; Start 294; Stop 318
gtatgaccgtttatcaacaccagaa

SEQ ID NO: 377030 - DNA, 25 bp, Artificial
  probe
  misc_feature (1)..(25): SEQ ID NO: 4226; WAN024FMF; Start 369; Stop 393
cccagaactaccaaatcaagagact

SEQ ID NO: 377031 - DNA, 25 bp, Artificial
  probe
  misc_feature (1)..(25): SEQ ID NO: 4226; WAN024FMF; Start 396; Stop 420
aacaccagataaaccaactccagaa

SEQ ID NO: 377032 - DNA, 25 bp, Artificial
  probe
  misc_feature (1)..(25): SEQ ID NO: 4226; WAN024FMF; Start 381; Stop 405
aaatcaagagactccaacaccagat

SEQ ID NO: 377033 - DNA, 25 bp, Artificial
  probe
  misc_feature (1)..(25): SEQ ID NO: 4226; WAN024FMF; Start 364; Stop 388
ccaaacccagaactaccaaatcaag

SEQ ID NO: 377034 - DNA, 25 bp, Artificial
  probe
  misc_feature (1)..(25): SEQ ID NO: 4226; WAN024FMF; Start 368; Stop 392
acccagaactaccaaatcaagagac

SEQ ID NO: 377035 - DNA, 25 bp, Artificial
  probe
  misc_feature (1)..(25): SEQ ID NO: 4226; WAN024FMF; Start 182; Stop 206
actgggacgaggttatatctggtaa

SEQ ID NO: 377036 - DNA, 25 bp, Artificial
  probe
  misc_feature (1)..(25): SEQ ID NO: 4226; WAN024FMF; Start 553; Stop 577
accttgttagctggtctaggattag

SEQ ID NO: 377037 - DNA, 25 bp, Artificial
  probe
  misc_feature (1)..(25): SEQ ID NO: 4226; WAN024FMF; Start 184; Stop 208
tgggacgaggttatatctggtaaga

SEQ ID NO: 377038 - DNA, 25 bp, Artificial
  probe
  misc_feature (1)..(25): SEQ ID NO: 4226; WAN024FMF; Start 386; Stop 410
aagagactccaacaccagataaacc

SEQ ID NO: 377039 - DNA, 25 bp, Artificial
  probe
  misc_feature (1)..(25): SEQ ID NO: 4227; WAN024FME; Start 190; Stop 214
gaggttgtatctggtaagattgaca

SEQ ID NO: 377040 - DNA, 25 bp, Artificial
  probe
  misc_feature (1)..(25): SEQ ID NO: 4227; WAN024FME; Start 189; Stop 213
cgaggttgtatctggtaagattgac

SEQ ID NO: 377041 - DNA, 25 bp, Artificial
  probe
  misc_feature (1)..(25): SEQ ID NO: 4227; WAN024FME; Start 187; Stop 211
gacgaggttgtatctggtaagattg

SEQ ID NO: 377042 - DNA, 25 bp, Artificial
  probe
  misc_feature (1)..(25): SEQ ID NO: 4227; WAN024FME; Start 188; Stop 212
acgaggttgtatctggtaagattga

SEQ ID NO: 377043 - DNA, 25 bp, Artificial
  probe
  misc_feature (1)..(25): SEQ ID NO: 4227; WAN024FME; Start 294; Stop 318
gtatgaccgtttatcaacaccagat

SEQ ID NO: 377044 - DNA, 25 bp, Artificial
  probe
  misc_feature (1)..(25): SEQ ID NO: 4227; WAN024FME; Start 295; Stop 319
tatgaccgtttatcaacaccagata

SEQ ID NO: 377045 - DNA, 25 bp, Artificial
  probe
  misc_feature (1)..(25): SEQ ID NO: 4227; WAN024FME; Start 305; Stop 329
tatcaacaccagataaaccaactcc

SEQ ID NO: 377046 - DNA, 25 bp, Artificial
  probe
  misc_feature (1)..(25): SEQ ID NO: 4227; WAN024FME; Start 186; Stop 210
ggacgaggttgtatctggtaagatt

SEQ ID NO: 377047 - DNA, 25 bp, Artificial
  probe
  misc_feature (1)..(25): SEQ ID NO: 4227; WAN024FME; Start 306; Stop 330
atcaacaccagataaaccaactcca

SEQ ID NO: 377048 - DNA, 25 bp, Artificial
  probe
  misc_feature (1)..(25): SEQ ID NO: 4227; WAN024FME; Start 196; Stop 220
gtatctggtaagattgacaagtaca

SEQ ID NO: 377049 - DNA, 25 bp, Artificial
  probe
  misc_feature (1)..(25): SEQ ID NO: 4227; WAN024FME; Start 195; Stop 219
tgtatctggtaagattgacaagtac

SEQ ID NO: 377050 - DNA, 25 bp, Artificial
  probe
  misc_feature (1)..(25): SEQ ID NO: 4227; WAN024FME; Start 309; Stop 333
aacaccagataaaccaactccagac

SEQ ID NO: 377051 - DNA, 25 bp, Artificial
  probe
  misc_feature (1)..(25): SEQ ID NO: 4227; WAN024FME; Start 307; Stop 331
tcaacaccagataaaccaactccag

SEQ ID NO: 377052 - DNA, 25 bp, Artificial
  probe
  misc_feature (1)..(25): SEQ ID NO: 4227; WAN024FME; Start 191; Stop 215
aggttgtatctggtaagattgacaa

SEQ ID NO: 377053 - DNA, 25 bp, Artificial
  probe
  misc_feature (1)..(25): SEQ ID NO: 4227; WAN024FME; Start 192; Stop 216
ggttgtatctggtaagattgacaag

SEQ ID NO: 377054 - DNA, 25 bp, Artificial
  probe
  misc_feature (1)..(25): SEQ ID NO: 4227; WAN024FME; Start 193; Stop 217
gttgtatctggtaagattgacaagt

SEQ ID NO: 377055 - DNA, 25 bp, Artificial
  probe
  misc_feature (1)..(25): SEQ ID NO: 4227; WAN024FME; Start 479; Stop 503
gtctaggattaggattcttcaagaa

SEQ ID NO: 377056 - DNA, 25 bp, Artificial
  probe
  misc_feature (1)..(25): SEQ ID NO: 4227; WAN024FME; Start 194; Stop 218
ttgtatctggtaagattgacaagta

SEQ ID NO: 377057 - DNA, 25 bp, Artificial
  probe
  misc_feature (1)..(25): SEQ ID NO: 4227; WAN024FME; Start 296; Stop 320
atgaccgtttatcaacaccagataa

SEQ ID NO: 377058 - DNA, 25 bp, Artificial
  probe
  misc_feature (1)..(25): SEQ ID NO: 4227; WAN024FME; Start 304; Stop 328
ttatcaacaccagataaaccaactc

SEQ ID NO: 377059 - DNA, 25 bp, Artificial
  probe
  misc_feature (1)..(25): SEQ ID NO: 4227; WAN024FME; Start 310; Stop 334
acaccagataaaccaactccagacc

SEQ ID NO: 377060 - DNA, 25 bp, Artificial
  probe
  misc_feature (1)..(25): SEQ ID NO: 4227; WAN024FME; Start 183; Stop 207
ctgggacgaggttgtatctggtaag

SEQ ID NO: 377061 - DNA, 25 bp, Artificial
  probe
  misc_feature (1)..(25): SEQ ID NO: 4227; WAN024FME; Start 316; Stop 340
gataaaccaactccagacccaggta

SEQ ID NO: 377062 - DNA, 25 bp, Artificial
  probe
  misc_feature (1)..(25): SEQ ID NO: 4227; WAN024FME; Start 185; Stop 209
gggacgaggttgtatctggtaagat

SEQ ID NO: 377063 - DNA, 25 bp, Artificial
  probe
  misc_feature (1)..(25): SEQ ID NO: 4227; WAN024FME; Start 314; Stop 338
cagataaaccaactccagacccagg

SEQ ID NO: 377064 - DNA, 25 bp, Artificial
  probe
  misc_feature (1)..(25): SEQ ID NO: 4227; WAN024FME; Start 313; Stop 337
ccagataaaccaactccagacccag

SEQ ID NO: 377065 - DNA, 25 bp, Artificial
  probe
  misc_feature (1)..(25): SEQ ID NO: 4227; WAN024FME; Start 184; Stop 208
tgggacgaggttgtatctggtaaga

SEQ ID NO: 377066 - DNA, 25 bp, Artificial
  probe
  misc_feature (1)..(25): SEQ ID NO: 4227; WAN024FME; Start 182; Stop 206
actgggacgaggttgtatctggtaa

SEQ ID NO: 377067 - DNA, 25 bp, Artificial
  probe
  misc_feature (1)..(25): SEQ ID NO: 4227; WAN024FME; Start 317; Stop 341
ataaaccaactccagacccaggtac

SEQ ID NO: 377068 - DNA, 25 bp, Artificial
  probe
  misc_feature (1)..(25): SEQ ID NO: 4227; WAN024FME; Start 311; Stop 335
caccagataaaccaactccagaccc

SEQ ID NO: 377069 - DNA, 25 bp, Artificial
  probe
  misc_feature (1)..(25): SEQ ID NO: 4227; WAN024FME; Start 181; Stop 205
aactgggacgaggttgtatctggta

SEQ ID NO: 377070 - DNA, 25 bp, Artificial
  probe
  misc_feature (1)..(25): SEQ ID NO: 4227; WAN024FME; Start 480; Stop 504
tctaggattaggattcttcaagaaa

SEQ ID NO: 377071 - DNA, 25 bp, Artificial
  probe
  misc_feature (1)..(25): SEQ ID NO: 4227; WAN024FME; Start 179; Stop 203
gaaactgggacgaggttgtatctgg

SEQ ID NO: 377072 - DNA, 25 bp, Artificial
  probe
  misc_feature (1)..(25): SEQ ID NO: 4228; WAN024GNF; Start 295; Stop 319
ttatcagtacggctagtatccattg

SEQ ID NO: 377073 - DNA, 25 bp, Artificial
  probe
  misc_feature (1)..(25): SEQ ID NO: 4228; WAN024GNF; Start 292; Stop 316
caattatcagtacggctagtatcca

SEQ ID NO: 377074 - DNA, 25 bp, Artificial
  probe
  misc_feature (1)..(25): SEQ ID NO: 4228; WAN024GNF; Start 284; Stop 308
tgttatctcaattatcagtacggct

SEQ ID NO: 377075 - DNA, 25 bp, Artificial
  probe
  misc_feature (1)..(25): SEQ ID NO: 4228; WAN024GNF; Start 291; Stop 315
tcaattatcagtacggctagtatcc

SEQ ID NO: 377076 - DNA, 25 bp, Artificial
  probe
  misc_feature (1)..(25): SEQ ID NO: 4228; WAN024GNF; Start 296; Stop 320
tatcagtacggctagtatccattgt

SEQ ID NO: 377077 - DNA, 25 bp, Artificial
  probe
  misc_feature (1)..(25): SEQ ID NO: 4228; WAN024GNF; Start 294; Stop 318
attatcagtacggctagtatccatt

SEQ ID NO: 377078 - DNA, 25 bp, Artificial
  probe
  misc_feature (1)..(25): SEQ ID NO: 4228; WAN024GNF; Start 293; Stop 317
aattatcagtacggctagtatccat

SEQ ID NO: 377079 - DNA, 25 bp, Artificial
  probe
  misc_feature (1)..(25): SEQ ID NO: 4228; WAN024GNF; Start 287; Stop 311
tatctcaattatcagtacggctagt

SEQ ID NO: 377080 - DNA, 25 bp, Artificial
  probe
  misc_feature (1)..(25): SEQ ID NO: 4228; WAN024GNF; Start 297; Stop 321
atcagtacggctagtatccattgtt

SEQ ID NO: 377081 - DNA, 25 bp, Artificial
  probe
  misc_feature (1)..(25): SEQ ID NO: 4228; WAN024GNF; Start 289; Stop 313
tctcaattatcagtacggctagtat

SEQ ID NO: 377082 - DNA, 25 bp, Artificial
  probe
  misc_feature (1)..(25): SEQ ID NO: 4228; WAN024GNF; Start 288; Stop 312
atctcaattatcagtacggctagta

SEQ ID NO: 377083 - DNA, 25 bp, Artificial
  probe
  misc_feature (1)..(25): SEQ ID NO: 4228; WAN024GNF; Start 300; Stop 324
agtacggctagtatccattgttcaa

SEQ ID NO: 377084 - DNA, 25 bp, Artificial
  probe
  misc_feature (1)..(25): SEQ ID NO: 4228; WAN024GNF; Start 290; Stop 314
ctcaattatcagtacggctagtatc

SEQ ID NO: 377085 - DNA, 25 bp, Artificial
  probe
  misc_feature (1)..(25): SEQ ID NO: 4228; WAN024GNF; Start 283; Stop 307
ttgttatctcaattatcagtacggc

SEQ ID NO: 377086 - DNA, 25 bp, Artificial
  probe
  misc_feature (1)..(25): SEQ ID NO: 4228; WAN024GNF; Start 285; Stop 309
gttatctcaattatcagtacggcta

SEQ ID NO: 377087 - DNA, 25 bp, Artificial
  probe
  misc_feature (1)..(25): SEQ ID NO: 4228; WAN024GNF; Start 298; Stop 322
tcagtacggctagtatccattgttc

SEQ ID NO: 377088 - DNA, 25 bp, Artificial
  probe
  misc_feature (1)..(25): SEQ ID NO: 4228; WAN024GNF; Start 299; Stop 323
cagtacggctagtatccattgttca

SEQ ID NO: 377089 - DNA, 25 bp, Artificial
  probe
  misc_feature (1)..(25): SEQ ID NO: 4228; WAN024GNF; Start 286; Stop 310
ttatctcaattatcagtacggctag

SEQ ID NO: 377090 - DNA, 25 bp, Artificial
  probe
  misc_feature (1)..(25): SEQ ID NO: 4228; WAN024GNF; Start 411; Stop 435
tatgatttgtggtcttctattgggc

SEQ ID NO: 377091 - DNA, 25 bp, Artificial
  probe
  misc_feature (1)..(25): SEQ ID NO: 4228; WAN024GNF; Start 302; Stop 326
tacggctagtatccattgttcaaat

SEQ ID NO: 377092 - DNA, 25 bp, Artificial
  probe
  misc_feature (1)..(25): SEQ ID NO: 4228; WAN024GNF; Start 38; Stop 62
ctagtggattgggttctatatcagg

SEQ ID NO: 377093 - DNA, 25 bp, Artificial
  probe
  misc_feature (1)..(25): SEQ ID NO: 4228; WAN024GNF; Start 37; Stop 61
gctagtggattgggttctatatcag

SEQ ID NO: 377094 - DNA, 25 bp, Artificial
  probe
  misc_feature (1)..(25): SEQ ID NO: 4228; WAN024GNF; Start 410; Stop 434
atatgatttgtggtcttctattggg

SEQ ID NO: 377095 - DNA, 25 bp, Artificial
  probe
  misc_feature (1)..(25): SEQ ID NO: 4228; WAN024GNF; Start 39; Stop 63
tagtggattgggttctatatcaggc

SEQ ID NO: 377096 - DNA, 25 bp, Artificial
  probe
  misc_feature (1)..(25): SEQ ID NO: 4228; WAN024GNF; Start 301; Stop 325
gtacggctagtatccattgttcaaa

SEQ ID NO: 377097 - DNA, 25 bp, Artificial
  probe
  misc_feature (1)..(25): SEQ ID NO: 4228; WAN024GNF; Start 109; Stop 133
taccattcggtcagtgatattgctt

SEQ ID NO: 377098 - DNA, 25 bp, Artificial
  probe
  misc_feature (1)..(25): SEQ ID NO: 4228; WAN024GNF; Start 607; Stop 631
catttagcacctgttccagttattt

SEQ ID NO: 377099 - DNA, 25 bp, Artificial
  probe
  misc_feature (1)..(25): SEQ ID NO: 4228; WAN024GNF; Start 605; Stop 629
atcatttagcacctgttccagttat

SEQ ID NO: 377100 - DNA, 25 bp, Artificial
  probe
  misc_feature (1)..(25): SEQ ID NO: 4228; WAN024GNF; Start 604; Stop 628
tatcatttagcacctgttccagtta

SEQ ID NO: 377101 - DNA, 25 bp, Artificial
  probe
  misc_feature (1)..(25): SEQ ID NO: 4228; WAN024GNF; Start 606; Stop 630
tcatttagcacctgttccagttatt

SEQ ID NO: 377102 - DNA, 25 bp, Artificial
  probe
  misc_feature (1)..(25): SEQ ID NO: 4228; WAN024GNF; Start 599; Stop 623
atcagtatcatttagcacctgttcc

SEQ ID NO: 377103 - DNA, 25 bp, Artificial
  probe
  misc_feature (1)..(25): SEQ ID NO: 4228; WAN024GNF; Start 412; Stop 436
atgatttgtggtcttctattgggct

SEQ ID NO: 377104 - DNA, 25 bp, Artificial
  probe
  misc_feature (1)..(25): SEQ ID NO: 4228; WAN024GNF; Start 41; Stop 65
gtggattgggttctatatcaggcat

SEQ ID NO: 377105 - DNA, 25 bp, Artificial
  probe
  misc_feature (1)..(25): SEQ ID NO: 4229; WAN024G35; Start 213; Stop 237
catcaccaaattcatccaacatctg

SEQ ID NO: 377106 - DNA, 25 bp, Artificial
  probe
  misc_feature (1)..(25): SEQ ID NO: 4229; WAN024G35; Start 182; Stop 206
tgataggtttctttcaagtcccaaa

SEQ ID NO: 377107 - DNA, 25 bp, Artificial
  probe
  misc_feature (1)..(25): SEQ ID NO: 4229; WAN024G35; Start 70; Stop 94
aatctctgccatttgaaattccaac

SEQ ID NO: 377108 - DNA, 25 bp, Artificial
  probe
  misc_feature (1)..(25): SEQ ID NO: 4229; WAN024G35; Start 69; Stop 93
caatctctgccatttgaaattccaa

SEQ ID NO: 377109 - DNA, 25 bp, Artificial
  probe
  misc_feature (1)..(25): SEQ ID NO: 4229; WAN024G35; Start 73; Stop 97
ctctgccatttgaaattccaacatt

SEQ ID NO: 377110 - DNA, 25 bp, Artificial
  probe
  misc_feature (1)..(25): SEQ ID NO: 4229; WAN024G35; Start 74; Stop 98
tctgccatttgaaattccaacattt

SEQ ID NO: 377111 - DNA, 25 bp, Artificial
  probe
  misc_feature (1)..(25): SEQ ID NO: 4229; WAN024G35; Start 72; Stop 96
tctctgccatttgaaattccaacat

SEQ ID NO: 377112 - DNA, 25 bp, Artificial
  probe
  misc_feature (1)..(25): SEQ ID NO: 4229; WAN024G35; Start 71; Stop 95
atctctgccatttgaaattccaaca

SEQ ID NO: 377113 - DNA, 25 bp, Artificial
  probe
  misc_feature (1)..(25): SEQ ID NO: 4229; WAN024G35; Start 9; Stop 33
ggagtttatctcgctcttgattgag

SEQ ID NO: 377114 - DNA, 25 bp, Artificial
  probe
  misc_feature (1)..(25): SEQ ID NO: 4229; WAN024G35; Start 7; Stop 31
gaggagtttatctcgctcttgattg

SEQ ID NO: 377115 - DNA, 25 bp, Artificial
  probe
  misc_feature (1)..(25): SEQ ID NO: 4229; WAN024G35; Start 212; Stop 236
gcatcaccaaattcatccaacatct

SEQ ID NO: 377116 - DNA, 25 bp, Artificial
  probe
  misc_feature (1)..(25): SEQ ID NO: 4229; WAN024G35; Start 8; Stop 32
aggagtttatctcgctcttgattga

SEQ ID NO: 377117 - DNA, 25 bp, Artificial
  probe
  misc_feature (1)..(25): SEQ ID NO: 4229; WAN024G35; Start 6; Stop 30
tgaggagtttatctcgctcttgatt

SEQ ID NO: 377118 - DNA, 25 bp, Artificial
  probe
  misc_feature (1)..(25): SEQ ID NO: 4229; WAN024G35; Start 5; Stop 29
ttgaggagtttatctcgctcttgat

SEQ ID NO: 377119 - DNA, 25 bp, Artificial
  probe
  misc_feature (1)..(25): SEQ ID NO: 4229; WAN024G35; Start 4; Stop 28
gttgaggagtttatctcgctcttga

SEQ ID NO: 377120 - DNA, 25 bp, Artificial
  probe
  misc_feature (1)..(25): SEQ ID NO: 4229; WAN024G35; Start 214; Stop 238
atcaccaaattcatccaacatctgg

SEQ ID NO: 377121 - DNA, 25 bp, Artificial
  probe
  misc_feature (1)..(25): SEQ ID NO: 4229; WAN024G35; Start 211; Stop 235
ggcatcaccaaattcatccaacatc

SEQ ID NO: 377122 - DNA, 25 bp, Artificial
  probe
  misc_feature (1)..(25): SEQ ID NO: 4229; WAN024G35; Start 173; Stop 197
aaactcgtttgataggtttctttca

SEQ ID NO: 377123 - DNA, 25 bp, Artificial
  probe
  misc_feature (1)..(25): SEQ ID NO: 4229; WAN024G35; Start 183; Stop 207
gataggtttctttcaagtcccaaaa

SEQ ID NO: 377124 - DNA, 25 bp, Artificial
  probe
  misc_feature (1)..(25): SEQ ID NO: 4229; WAN024G35; Start 3; Stop 27
ggttgaggagtttatctcgctcttg

SEQ ID NO: 377125 - DNA, 25 bp, Artificial
  probe
  misc_feature (1)..(25): SEQ ID NO: 4229; WAN024G35; Start 179; Stop 203
gtttgataggtttctttcaagtccc

SEQ ID NO: 377126 - DNA, 25 bp, Artificial
  probe
  misc_feature (1)..(25): SEQ ID NO: 4229; WAN024G35; Start 181; Stop 205
ttgataggtttctttcaagtcccaa

SEQ ID NO: 377127 - DNA, 25 bp, Artificial
  probe
  misc_feature (1)..(25): SEQ ID NO: 4229; WAN024G35; Start 180; Stop 204
tttgataggtttctttcaagtccca

SEQ ID NO: 377128 - DNA, 25 bp, Artificial
  probe
  misc_feature (1)..(25): SEQ ID NO: 4229; WAN024G35; Start 178; Stop 202
cgtttgataggtttctttcaagtcc

SEQ ID NO: 377129 - DNA, 25 bp, Artificial
  probe
  misc_feature (1)..(25): SEQ ID NO: 4229; WAN024G35; Start 177; Stop 201
tcgtttgataggtttctttcaagtc

SEQ ID NO: 377130 - DNA, 25 bp, Artificial
  probe
  misc_feature (1)..(25): SEQ ID NO: 4229; WAN024G35; Start 176; Stop 200
ctcgtttgataggtttctttcaagt

SEQ ID NO: 377131 - DNA, 25 bp, Artificial
  probe
  misc_feature (1)..(25): SEQ ID NO: 4229; WAN024G35; Start 175; Stop 199
actcgtttgataggtttctttcaag

SEQ ID NO: 377132 - DNA, 25 bp, Artificial
  probe
  misc_feature (1)..(25): SEQ ID NO: 4229; WAN024G35; Start 67; Stop 91
ctcaatctctgccatttgaaattcc

SEQ ID NO: 377133 - DNA, 25 bp, Artificial
  probe
  misc_feature (1)..(25): SEQ ID NO: 4229; WAN024G35; Start 66; Stop 90
cctcaatctctgccatttgaaattc

SEQ ID NO: 377134 - DNA, 25 bp, Artificial
  probe
  misc_feature (1)..(25): SEQ ID NO: 4229; WAN024G35; Start 174; Stop 198
aactcgtttgataggtttctttcaa

SEQ ID NO: 377135 - DNA, 25 bp, Artificial
  probe
  misc_feature (1)..(25): SEQ ID NO: 4229; WAN024G35; Start 23; Stop 47
tcttgattgagagccaagtcttctc

SEQ ID NO: 377136 - DNA, 25 bp, Artificial
  probe
  misc_feature (1)..(25): SEQ ID NO: 4229; WAN024G35; Start 22; Stop 46
ctcttgattgagagccaagtcttct

SEQ ID NO: 377137 - DNA, 25 bp, Artificial
  probe
  misc_feature (1)..(25): SEQ ID NO: 4229; WAN024G35; Start 68; Stop 92
tcaatctctgccatttgaaattcca

SEQ ID NO: 377138 - DNA, 25 bp, Artificial
  probe
  misc_feature (1)..(25): SEQ ID NO: 4230; WAN024F2M-5; Start 301; Stop 325
gtatctcacatctggtacttcaagg

SEQ ID NO: 377139 - DNA, 25 bp, Artificial
  probe
  misc_feature (1)..(25): SEQ ID NO: 4230; WAN024F2M-5; Start 1662; Stop 1686
acataaggtcttgcttacaacagtt

SEQ ID NO: 377140 - DNA, 25 bp, Artificial
  probe
  misc_feature (1)..(25): SEQ ID NO: 4230; WAN024F2M-5; Start 62; Stop 86
gttcatggtcttatggagaagtcaa

SEQ ID NO: 377141 - DNA, 25 bp, Artificial
  probe
  misc_feature (1)..(25): SEQ ID NO: 4230; WAN024F2M-5; Start 1661; Stop 1685
gacataaggtcttgcttacaacagt

SEQ ID NO: 377142 - DNA, 25 bp, Artificial
  probe
  misc_feature (1)..(25): SEQ ID NO: 4230; WAN024F2M-5; Start 300; Stop 324
tgtatctcacatctggtacttcaag

SEQ ID NO: 377143 - DNA, 25 bp, Artificial
  probe
  misc_feature (1)..(25): SEQ ID NO: 4230; WAN024F2M-5; Start 299; Stop 323
ctgtatctcacatctggtacttcaa

SEQ ID NO: 377144 - DNA, 25 bp, Artificial
  probe
  misc_feature (1)..(25): SEQ ID NO: 4230; WAN024F2M-5; Start 297; Stop 321
tcctgtatctcacatctggtacttc

SEQ ID NO: 377145 - DNA, 25 bp, Artificial
  probe
  misc_feature (1)..(25): SEQ ID NO: 4230; WAN024F2M-5; Start 296; Stop 320
ctcctgtatctcacatctggtactt

SEQ ID NO: 377146 - DNA, 25 bp, Artificial
  probe
  misc_feature (1)..(25): SEQ ID NO: 4230; WAN024F2M-5; Start 298; Stop 322
cctgtatctcacatctggtacttca

SEQ ID NO: 377147 - DNA, 25 bp, Artificial
  probe
  misc_feature (1)..(25): SEQ ID NO: 4230; WAN024F2M-5; Start 1663; Stop 1687
cataaggtcttgcttacaacagttg

SEQ ID NO: 377148 - DNA, 25 bp, Artificial
  probe
  misc_feature (1)..(25): SEQ ID NO: 4230; WAN024F2M-5; Start 397; Stop 421
gcttatgtggtgattgatcctaagg

SEQ ID NO: 377149 - DNA, 25 bp, Artificial
  probe
  misc_feature (1)..(25): SEQ ID NO: 4230; WAN024F2M-5; Start 396; Stop 420
ggcttatgtggtgattgatcctaag

SEQ ID NO: 377150 - DNA, 25 bp, Artificial
  probe
  misc_feature (1)..(25): SEQ ID NO: 4230; WAN024F2M-5; Start 416; Stop 440
ctaaggatacaccacttgagcacaa

SEQ ID NO: 377151 - DNA, 25 bp, Artificial
  probe
  misc_feature (1)..(25): SEQ ID NO: 4230; WAN024F2M-5; Start 652; Stop 676
tacaagtctggaaacaaacctgaat

SEQ ID NO: 377152 - DNA, 25 bp, Artificial
  probe
  misc_feature (1)..(25): SEQ ID NO: 4230; WAN024F2M-5; Start 651; Stop 675
ttacaagtctggaaacaaacctgaa

SEQ ID NO: 377153 - DNA, 25 bp, Artificial
  probe
  misc_feature (1)..(25): SEQ ID NO: 4230; WAN024F2M-5; Start 1079; Stop 1103
gtgaaatggcgattgaactctttaa

SEQ ID NO: 377154 - DNA, 25 bp, Artificial
  probe
  misc_feature (1)..(25): SEQ ID NO: 4230; WAN024F2M-5; Start 650; Stop 674
tttacaagtctggaaacaaacctga

SEQ ID NO: 377155 - DNA, 25 bp, Artificial
  probe
  misc_feature (1)..(25): SEQ ID NO: 4230; WAN024F2M-5; Start 1664; Stop 1688
ataaggtcttgcttacaacagttgg

SEQ ID NO: 377156 - DNA, 25 bp, Artificial
  probe
  misc_feature (1)..(25): SEQ ID NO: 4230; WAN024F2M-5; Start 1692; Stop 1716
aattctcttcaacgatatcatgcca

SEQ ID NO: 377157 - DNA, 25 bp, Artificial
  probe
  misc_feature (1)..(25): SEQ ID NO: 4230; WAN024F2M-5; Start 660; Stop 684
tggaaacaaacctgaatggatgatt

SEQ ID NO: 377158 - DNA, 25 bp, Artificial
  probe
  misc_feature (1)..(25): SEQ ID NO: 4230; WAN024F2M-5; Start 398; Stop 422
cttatgtggtgattgatcctaagga

SEQ ID NO: 377159 - DNA, 25 bp, Artificial
  probe
  misc_feature (1)..(25): SEQ ID NO: 4230; WAN024F2M-5; Start 395; Stop 419
cggcttatgtggtgattgatcctaa

SEQ ID NO: 377160 - DNA, 25 bp, Artificial
  probe
  misc_feature (1)..(25): SEQ ID NO: 4230; WAN024F2M-5; Start 668; Stop 692
aacctgaatggatgattcttaacat

SEQ ID NO: 377161 - DNA, 25 bp, Artificial
  probe
  misc_feature (1)..(25): SEQ ID NO: 4230; WAN024F2M-5; Start 1693; Stop 1717
attctcttcaacgatatcatgccag

SEQ ID NO: 377162 - DNA, 25 bp, Artificial
  probe
  misc_feature (1)..(25): SEQ ID NO: 4230; WAN024F2M-5; Start 61; Stop 85
cgttcatggtcttatggagaagtca

SEQ ID NO: 377163 - DNA, 25 bp, Artificial
  probe
  misc_feature (1)..(25): SEQ ID NO: 4230; WAN024F2M-5; Start 659; Stop 683
ctggaaacaaacctgaatggatgat

SEQ ID NO: 377164 - DNA, 25 bp, Artificial
  probe
  misc_feature (1)..(25): SEQ ID NO: 4230; WAN024F2M-5; Start 1666; Stop 1690
aaggtcttgcttacaacagttggta

SEQ ID NO: 377165 - DNA, 25 bp, Artificial
  probe
  misc_feature (1)..(25): SEQ ID NO: 4230; WAN024F2M-5; Start 561; Stop 585
agaaattgctgaactcaaagaagaa

SEQ ID NO: 377166 - DNA, 25 bp, Artificial
  probe
  misc_feature (1)..(25): SEQ ID NO: 4230; WAN024F2M-5; Start 560; Stop 584
aagaaattgctgaactcaaagaaga

SEQ ID NO: 377167 - DNA, 25 bp, Artificial
  probe
  misc_feature (1)..(25): SEQ ID NO: 4230; WAN024F2M-5; Start 1644; Stop 1668
ttggacagaagagcaaagacataag

SEQ ID NO: 377168 - DNA, 25 bp, Artificial
  probe
  misc_feature (1)..(25): SEQ ID NO: 4230; WAN024F2M-5; Start 1643; Stop 1667
cttggacagaagagcaaagacataa

SEQ ID NO: 377169 - DNA, 25 bp, Artificial
  probe
  misc_feature (1)..(25): SEQ ID NO: 4230; WAN024F2M-5; Start 482; Stop 506
aatatggttatggttcatttgttgc

SEQ ID NO: 377170 - DNA, 25 bp, Artificial
  probe
  misc_feature (1)..(25): SEQ ID NO: 4230; WAN024F2M-5; Start 128; Stop 152
gtgaaggactctttgatgaagtgat

SEQ ID NO: 377171 - DNA, 25 bp, Artificial
  probe
  misc_feature (1)..(25): SEQ ID NO: 4231; WAN024FWJ; Start 128; Stop 152
cttatttaagactagcaacgaagcg

SEQ ID NO: 377172 - DNA, 25 bp, Artificial
  probe
  misc_feature (1)..(25): SEQ ID NO: 4231; WAN024FWJ; Start 220; Stop 244
atttgtttggcttgttctggtgtat

SEQ ID NO: 377173 - DNA, 25 bp, Artificial
  probe
  misc_feature (1)..(25): SEQ ID NO: 4231; WAN024FWJ; Start 219; Stop 243
gatttgtttggcttgttctggtgta

SEQ ID NO: 377174 - DNA, 25 bp, Artificial
  probe
  misc_feature (1)..(25): SEQ ID NO: 4231; WAN024FWJ; Start 221; Stop 245
tttgtttggcttgttctggtgtatg

SEQ ID NO: 377175 - DNA, 25 bp, Artificial
  probe
  misc_feature (1)..(25): SEQ ID NO: 4231; WAN024FWJ; Start 203; Stop 227
gcactccatattcaaggatttgttt

SEQ ID NO: 377176 - DNA, 25 bp, Artificial
  probe
  misc_feature (1)..(25): SEQ ID NO: 4231; WAN024FWJ; Start 208; Stop 232
ccatattcaaggatttgtttggctt

SEQ ID NO: 377177 - DNA, 25 bp, Artificial
  probe
  misc_feature (1)..(25): SEQ ID NO: 4231; WAN024FWJ; Start 205; Stop 229
actccatattcaaggatttgtttgg

SEQ ID NO: 377178 - DNA, 25 bp, Artificial
  probe
  misc_feature (1)..(25): SEQ ID NO: 4231; WAN024FWJ; Start 206; Stop 230
ctccatattcaaggatttgtttggc

SEQ ID NO: 377179 - DNA, 25 bp, Artificial
  probe
  misc_feature (1)..(25): SEQ ID NO: 4231; WAN024FWJ; Start 207; Stop 231
tccatattcaaggatttgtttggct

SEQ ID NO: 377180 - DNA, 25 bp, Artificial
  probe
  misc_feature (1)..(25): SEQ ID NO: 4231; WAN024FWJ; Start 204; Stop 228
cactccatattcaaggatttgtttg

SEQ ID NO: 377181 - DNA, 25 bp, Artificial
  probe
  misc_feature (1)..(25): SEQ ID NO: 4231; WAN024FWJ; Start 222; Stop 246
ttgtttggcttgttctggtgtatga

SEQ ID NO: 377182 - DNA, 25 bp, Artificial
  probe
  misc_feature (1)..(25): SEQ ID NO: 4231; WAN024FWJ; Start 202; Stop 226
cgcactccatattcaaggatttgtt

SEQ ID NO: 377183 - DNA, 25 bp, Artificial
  probe
  misc_feature (1)..(25): SEQ ID NO: 4231; WAN024FWJ; Start 200; Stop 224
ctcgcactccatattcaaggatttg

SEQ ID NO: 377184 - DNA, 25 bp, Artificial
  probe
  misc_feature (1)..(25): SEQ ID NO: 4231; WAN024FWJ; Start 150; Stop 174
gcgttctgtaatctcttttggtcta

SEQ ID NO: 377185 - DNA, 25 bp, Artificial
  probe
  misc_feature (1)..(25): SEQ ID NO: 4231; WAN024FWJ; Start 201; Stop 225
tcgcactccatattcaaggatttgt

SEQ ID NO: 377186 - DNA, 25 bp, Artificial
  probe
  misc_feature (1)..(25): SEQ ID NO: 4231; WAN024FWJ; Start 127; Stop 151
tcttatttaagactagcaacgaagc

SEQ ID NO: 377187 - DNA, 25 bp, Artificial
  probe
  misc_feature (1)..(25): SEQ ID NO: 4231; WAN024FWJ; Start 216; Stop 240
aaggatttgtttggcttgttctggt

SEQ ID NO: 377188 - DNA, 25 bp, Artificial
  probe
  misc_feature (1)..(25): SEQ ID NO: 4231; WAN024FWJ; Start 151; Stop 175
cgttctgtaatctcttttggtctag

SEQ ID NO: 377189 - DNA, 25 bp, Artificial
  probe
  misc_feature (1)..(25): SEQ ID NO: 4231; WAN024FWJ; Start 159; Stop 183
aatctcttttggtctagtaatggcg

SEQ ID NO: 377190 - DNA, 25 bp, Artificial
  probe
  misc_feature (1)..(25): SEQ ID NO: 4231; WAN024FWJ; Start 129; Stop 153
ttatttaagactagcaacgaagcgt

SEQ ID NO: 377191 - DNA, 25 bp, Artificial
  probe
  misc_feature (1)..(25): SEQ ID NO: 4231; WAN024FWJ; Start 119; Stop 143
ccctcacatcttatttaagactagc

SEQ ID NO: 377192 - DNA, 25 bp, Artificial
  probe
  misc_feature (1)..(25): SEQ ID NO: 4231; WAN024FWJ; Start 148; Stop 172
aagcgttctgtaatctcttttggtc

SEQ ID NO: 377193 - DNA, 25 bp, Artificial
  probe
  misc_feature (1)..(25): SEQ ID NO: 4231; WAN024FWJ; Start 147; Stop 171
gaagcgttctgtaatctcttttggt

SEQ ID NO: 377194 - DNA, 25 bp, Artificial
  probe
  misc_feature (1)..(25): SEQ ID NO: 4231; WAN024FWJ; Start 199; Stop 223
cctcgcactccatattcaaggattt

SEQ ID NO: 377195 - DNA, 25 bp, Artificial
  probe
  misc_feature (1)..(25): SEQ ID NO: 4231; WAN024FWJ; Start 158; Stop 182
taatctcttttggtctagtaatggc

SEQ ID NO: 377196 - DNA, 25 bp, Artificial
  probe
  misc_feature (1)..(25): SEQ ID NO: 4231; WAN024FWJ; Start 123; Stop 147
cacatcttatttaagactagcaacg

SEQ ID NO: 377197 - DNA, 25 bp, Artificial
  probe
  misc_feature (1)..(25): SEQ ID NO: 4231; WAN024FWJ; Start 152; Stop 176
gttctgtaatctcttttggtctagt

SEQ ID NO: 377198 - DNA, 25 bp, Artificial
  probe
  misc_feature (1)..(25): SEQ ID NO: 4231; WAN024FWJ; Start 124; Stop 148
acatcttatttaagactagcaacga

SEQ ID NO: 377199 - DNA, 25 bp, Artificial
  probe
  misc_feature (1)..(25): SEQ ID NO: 4231; WAN024FWJ; Start 120; Stop 144
cctcacatcttatttaagactagca

SEQ ID NO: 377200 - DNA, 25 bp, Artificial
  probe
  misc_feature (1)..(25): SEQ ID NO: 4231; WAN024FWJ; Start 149; Stop 173
agcgttctgtaatctcttttggtct

SEQ ID NO: 377201 - DNA, 25 bp, Artificial
  probe
  misc_feature (1)..(25): SEQ ID NO: 4231; WAN024FWJ; Start 217; Stop 241
aggatttgtttggcttgttctggtg

SEQ ID NO: 377202 - DNA, 25 bp, Artificial
  probe
  misc_feature (1)..(25): SEQ ID NO: 4231; WAN024FWJ; Start 211; Stop 235
tattcaaggatttgtttggcttgtt

SEQ ID NO: 377203 - DNA, 25 bp, Artificial
  probe
  misc_feature (1)..(25): SEQ ID NO: 4231; WAN024FWJ; Start 210; Stop 234
atattcaaggatttgtttggcttgt

SEQ ID NO: 377204 - DNA, 25 bp, Artificial
  probe
  misc_feature (1)..(25): SEQ ID NO: 4232; WAN024CMK; Start 90; Stop 114
tcgtcacttgcctcttctaactaat

SEQ ID NO: 377205 - DNA, 25 bp, Artificial
  probe
  misc_feature (1)..(25): SEQ ID NO: 4232; WAN024CMK; Start 89; Stop 113
ctcgtcacttgcctcttctaactaa

SEQ ID NO: 377206 - DNA, 25 bp, Artificial
  probe
  misc_feature (1)..(25): SEQ ID NO: 4232; WAN024CMK; Start 88; Stop 112
actcgtcacttgcctcttctaacta

SEQ ID NO: 377207 - DNA, 25 bp, Artificial
  probe
  misc_feature (1)..(25): SEQ ID NO: 4232; WAN024CMK; Start 75; Stop 99
cttattgctcttgactcgtcacttg

SEQ ID NO: 377208 - DNA, 25 bp, Artificial
  probe
  misc_feature (1)..(25): SEQ ID NO: 4232; WAN024CMK; Start 74; Stop 98
ccttattgctcttgactcgtcactt

SEQ ID NO: 377209 - DNA, 25 bp, Artificial
  probe
  misc_feature (1)..(25): SEQ ID NO: 4232; WAN024CMK; Start 87; Stop 111
gactcgtcacttgcctcttctaact

SEQ ID NO: 377210 - DNA, 25 bp, Artificial
  probe
  misc_feature (1)..(25): SEQ ID NO: 4232; WAN024CMK; Start 76; Stop 100
ttattgctcttgactcgtcacttgc

SEQ ID NO: 377211 - DNA, 25 bp, Artificial
  probe
  misc_feature (1)..(25): SEQ ID NO: 4232; WAN024CMK; Start 57; Stop 81
ctttcacgttgttcaagccttattg

SEQ ID NO: 377212 - DNA, 25 bp, Artificial
  probe
  misc_feature (1)..(25): SEQ ID NO: 4232; WAN024CMK; Start 85; Stop 109
ttgactcgtcacttgcctcttctaa

SEQ ID NO: 377213 - DNA, 25 bp, Artificial
  probe
  misc_feature (1)..(25): SEQ ID NO: 4232; WAN024CMK; Start 17; Stop 41
ctataagcccaaatcatcagccagc

SEQ ID NO: 377214 - DNA, 25 bp, Artificial
  probe
  misc_feature (1)..(25): SEQ ID NO: 4232; WAN024CMK; Start 4; Stop 28
gtttatctcagagctataagcccaa

SEQ ID NO: 377215 - DNA, 25 bp, Artificial
  probe
  misc_feature (1)..(25): SEQ ID NO: 4232; WAN024CMK; Start 7; Stop 31
tatctcagagctataagcccaaatc

SEQ ID NO: 377216 - DNA, 25 bp, Artificial
  probe
  misc_feature (1)..(25): SEQ ID NO: 4232; WAN024CMK; Start 5; Stop 29
tttatctcagagctataagcccaaa

SEQ ID NO: 377217 - DNA, 25 bp, Artificial
  probe
  misc_feature (1)..(25): SEQ ID NO: 4232; WAN024CMK; Start 84; Stop 108
cttgactcgtcacttgcctcttcta

SEQ ID NO: 377218 - DNA, 25 bp, Artificial
  probe
  misc_feature (1)..(25): SEQ ID NO: 4232; WAN024CMK; Start 6; Stop 30
ttatctcagagctataagcccaaat

SEQ ID NO: 377219 - DNA, 25 bp, Artificial
  probe
  misc_feature (1)..(25): SEQ ID NO: 4232; WAN024CMK; Start 1; Stop 25
gtggtttatctcagagctataagcc

SEQ ID NO: 377220 - DNA, 25 bp, Artificial
  probe
  misc_feature (1)..(25): SEQ ID NO: 4232; WAN024CMK; Start 10; Stop 34
ctcagagctataagcccaaatcatc

SEQ ID NO: 377221 - DNA, 25 bp, Artificial
  probe
  misc_feature (1)..(25): SEQ ID NO: 4232; WAN024CMK; Start 12; Stop 36
cagagctataagcccaaatcatcag

SEQ ID NO: 377222 - DNA, 25 bp, Artificial
  probe
  misc_feature (1)..(25): SEQ ID NO: 4232; WAN024CMK; Start 9; Stop 33
tctcagagctataagcccaaatcat

SEQ ID NO: 377223 - DNA, 25 bp, Artificial
  probe
  misc_feature (1)..(25): SEQ ID NO: 4232; WAN024CMK; Start 8; Stop 32
atctcagagctataagcccaaatca

SEQ ID NO: 377224 - DNA, 25 bp, Artificial
  probe
  misc_feature (1)..(25): SEQ ID NO: 4232; WAN024CMK; Start 86; Stop 110
tgactcgtcacttgcctcttctaac

SEQ ID NO: 377225 - DNA, 25 bp, Artificial
  probe
  misc_feature (1)..(25): SEQ ID NO: 4232; WAN024CMK; Start 11; Stop 35
tcagagctataagcccaaatcatca

SEQ ID NO: 377226 - DNA, 25 bp, Artificial
  probe
  misc_feature (1)..(25): SEQ ID NO: 4232; WAN024CMK; Start 3; Stop 27
ggtttatctcagagctataagccca

SEQ ID NO: 377227 - DNA, 25 bp, Artificial
  probe
  misc_feature (1)..(25): SEQ ID NO: 4232; WAN024CMK; Start 2; Stop 26
tggtttatctcagagctataagccc

SEQ ID NO: 377228 - DNA, 25 bp, Artificial
  probe
  misc_feature (1)..(25): SEQ ID NO: 4232; WAN024CMK; Start 58; Stop 82
tttcacgttgttcaagccttattgc

SEQ ID NO: 377229 - DNA, 25 bp, Artificial
  probe
  misc_feature (1)..(25): SEQ ID NO: 4232; WAN024CMK; Start 63; Stop 87
cgttgttcaagccttattgctcttg

SEQ ID NO: 377230 - DNA, 25 bp, Artificial
  probe
  misc_feature (1)..(25): SEQ ID NO: 4232; WAN024CMK; Start 62; Stop 86
acgttgttcaagccttattgctctt

SEQ ID NO: 377231 - DNA, 25 bp, Artificial
  probe
  misc_feature (1)..(25): SEQ ID NO: 4232; WAN024CMK; Start 59; Stop 83
ttcacgttgttcaagccttattgct

SEQ ID NO: 377232 - DNA, 25 bp, Artificial
  probe
  misc_feature (1)..(25): SEQ ID NO: 4232; WAN024CMK; Start 13; Stop 37
agagctataagcccaaatcatcagc

SEQ ID NO: 377233 - DNA, 25 bp, Artificial
  probe
  misc_feature (1)..(25): SEQ ID NO: 4232; WAN024CMK; Start 73; Stop 97
gccttattgctcttgactcgtcact

SEQ ID NO: 377234 - DNA, 25 bp, Artificial
  probe
  misc_feature (1)..(25): SEQ ID NO: 4232; WAN024CMK; Start 71; Stop 95
aagccttattgctcttgactcgtca

SEQ ID NO: 377235 - DNA, 25 bp, Artificial
  probe
  misc_feature (1)..(25): SEQ ID NO: 4232; WAN024CMK; Start 82; Stop 106
ctcttgactcgtcacttgcctcttc

SEQ ID NO: 377236 - DNA, 25 bp, Artificial
  probe
  misc_feature (1)..(25): SEQ ID NO: 4232; WAN024CMK; Start 77; Stop 101
tattgctcttgactcgtcacttgcc

SEQ ID NO: 377237 - DNA, 25 bp, Artificial
  probe
  misc_feature (1)..(25): SEQ ID NO: 4233; WAN024GGG; Start 11; Stop 35
tccgtttggtaatctactctttctt

SEQ ID NO: 377238 - DNA, 25 bp, Artificial
  probe
  misc_feature (1)..(25): SEQ ID NO: 4233; WAN024GGG; Start 10; Stop 34
ttccgtttggtaatctactctttct

SEQ ID NO: 377239 - DNA, 25 bp, Artificial
  probe
  misc_feature (1)..(25): SEQ ID NO: 4233; WAN024GGG; Start 12; Stop 36
ccgtttggtaatctactctttcttc

SEQ ID NO: 377240 - DNA, 25 bp, Artificial
  probe
  misc_feature (1)..(25): SEQ ID NO: 4233; WAN024GGG; Start 9; Stop 33
cttccgtttggtaatctactctttc

SEQ ID NO: 377241 - DNA, 25 bp, Artificial
  probe
  misc_feature (1)..(25): SEQ ID NO: 4233; WAN024GGG; Start 8; Stop 32
ccttccgtttggtaatctactcttt

SEQ ID NO: 377242 - DNA, 25 bp, Artificial
  probe
  misc_feature (1)..(25): SEQ ID NO: 4233; WAN024GGG; Start 5; Stop 29
tttccttccgtttggtaatctactc

SEQ ID NO: 377243 - DNA, 25 bp, Artificial
  probe
  misc_feature (1)..(25): SEQ ID NO: 4233; WAN024GGG; Start 16; Stop 40
ttggtaatctactctttcttctgct

SEQ ID NO: 377244 - DNA, 25 bp, Artificial
  probe
  misc_feature (1)..(25): SEQ ID NO: 4233; WAN024GGG; Start 4; Stop 28
gtttccttccgtttggtaatctact

SEQ ID NO: 377245 - DNA, 25 bp, Artificial
  probe
  misc_feature (1)..(25): SEQ ID NO: 4233; WAN024GGG; Start 22; Stop 46
atctactctttcttctgctacttga

SEQ ID NO: 377246 - DNA, 25 bp, Artificial
  probe
  misc_feature (1)..(25): SEQ ID NO: 4233; WAN024GGG; Start 15; Stop 39
tttggtaatctactctttcttctgc

SEQ ID NO: 377247 - DNA, 25 bp, Artificial
  probe
  misc_feature (1)..(25): SEQ ID NO: 4233; WAN024GGG; Start 7; Stop 31
tccttccgtttggtaatctactctt

SEQ ID NO: 377248 - DNA, 25 bp, Artificial
  probe
  misc_feature (1)..(25): SEQ ID NO: 4233; WAN024GGG; Start 6; Stop 30
ttccttccgtttggtaatctactct

SEQ ID NO: 377249 - DNA, 25 bp, Artificial
  probe
  misc_feature (1)..(25): SEQ ID NO: 4233; WAN024GGG; Start 17; Stop 41
tggtaatctactctttcttctgcta

SEQ ID NO: 377250 - DNA, 25 bp, Artificial
  probe
  misc_feature (1)..(25): SEQ ID NO: 4233; WAN024GGG; Start 13; Stop 37
cgtttggtaatctactctttcttct

SEQ ID NO: 377251 - DNA, 25 bp, Artificial
  probe
  misc_feature (1)..(25): SEQ ID NO: 4233; WAN024GGG; Start 18; Stop 42
ggtaatctactctttcttctgctac

SEQ ID NO: 377252 - DNA, 25 bp, Artificial
  probe
  misc_feature (1)..(25): SEQ ID NO: 4233; WAN024GGG; Start 3; Stop 27
ggtttccttccgtttggtaatctac

SEQ ID NO: 377253 - DNA, 25 bp, Artificial
  probe
  misc_feature (1)..(25): SEQ ID NO: 4233; WAN024GGG; Start 21; Stop 45
aatctactctttcttctgctacttg

SEQ ID NO: 377254 - DNA, 25 bp, Artificial
  probe
  misc_feature (1)..(25): SEQ ID NO: 4233; WAN024GGG; Start 23; Stop 47
tctactctttcttctgctacttgag

SEQ ID NO: 377255 - DNA, 25 bp, Artificial
  probe
  misc_feature (1)..(25): SEQ ID NO: 4233; WAN024GGG; Start 2; Stop 26
tggtttccttccgtttggtaatcta

SEQ ID NO: 377256 - DNA, 25 bp, Artificial
  probe
  misc_feature (1)..(25): SEQ ID NO: 4233; WAN024GGG; Start 19; Stop 43
gtaatctactctttcttctgctact

SEQ ID NO: 377257 - DNA, 25 bp, Artificial
  probe
  misc_feature (1)..(25): SEQ ID NO: 4233; WAN024GGG; Start 14; Stop 38
gtttggtaatctactctttcttctg

SEQ ID NO: 377258 - DNA, 25 bp, Artificial
  probe
  misc_feature (1)..(25): SEQ ID NO: 4233; WAN024GGG; Start 112; Stop 136
aacttcgacaatctcatccacactg

SEQ ID NO: 377259 - DNA, 25 bp, Artificial
  probe
  misc_feature (1)..(25): SEQ ID NO: 4233; WAN024GGG; Start 111; Stop 135
caacttcgacaatctcatccacact

SEQ ID NO: 377260 - DNA, 25 bp, Artificial
  probe
  misc_feature (1)..(25): SEQ ID NO: 4233; WAN024GGG; Start 20; Stop 44
taatctactctttcttctgctactt

SEQ ID NO: 377261 - DNA, 25 bp, Artificial
  probe
  misc_feature (1)..(25): SEQ ID NO: 4233; WAN024GGG; Start 1; Stop 25
gtggtttccttccgtttggtaatct

SEQ ID NO: 377262 - DNA, 25 bp, Artificial
  probe
  misc_feature (1)..(25): SEQ ID NO: 4233; WAN024GGG; Start 110; Stop 134
ccaacttcgacaatctcatccacac

SEQ ID NO: 377263 - DNA, 25 bp, Artificial
  probe
  misc_feature (1)..(25): SEQ ID NO: 4233; WAN024GGG; Start 124; Stop 148
ctcatccacactggcttccttgatt

SEQ ID NO: 377264 - DNA, 25 bp, Artificial
  probe
  misc_feature (1)..(25): SEQ ID NO: 4233; WAN024GGG; Start 121; Stop 145
aatctcatccacactggcttccttg

SEQ ID NO: 377265 - DNA, 25 bp, Artificial
  probe
  misc_feature (1)..(25): SEQ ID NO: 4233; WAN024GGG; Start 120; Stop 144
caatctcatccacactggcttcctt

SEQ ID NO: 377266 - DNA, 25 bp, Artificial
  probe
  misc_feature (1)..(25): SEQ ID NO: 4233; WAN024GGG; Start 145; Stop 169
gattttggtcaaagacttgaaatgc

SEQ ID NO: 377267 - DNA, 25 bp, Artificial
  probe
  misc_feature (1)..(25): SEQ ID NO: 4233; WAN024GGG; Start 141; Stop 165
ccttgattttggtcaaagacttgaa

SEQ ID NO: 377268 - DNA, 25 bp, Artificial
  probe
  misc_feature (1)..(25): SEQ ID NO: 4233; WAN024GGG; Start 139; Stop 163
ttccttgattttggtcaaagacttg

SEQ ID NO: 377269 - DNA, 25 bp, Artificial
  probe
  misc_feature (1)..(25): SEQ ID NO: 4233; WAN024GGG; Start 138; Stop 162
cttccttgattttggtcaaagactt

SEQ ID NO: 377270 - DNA, 25 bp, Artificial
  probe
  misc_feature (1)..(25): SEQ ID NO: 4234; WAN024FZO; Start 38; Stop 62
tcatagtagccaccacgttcttcta

SEQ ID NO: 377271 - DNA, 25 bp, Artificial
  probe
  misc_feature (1)..(25): SEQ ID NO: 4234; WAN024FZO; Start 155; Stop 179
aagatgctttggatcatttccttac

SEQ ID NO: 377272 - DNA, 25 bp, Artificial
  probe
  misc_feature (1)..(25): SEQ ID NO: 4234; WAN024FZO; Start 156; Stop 180
agatgctttggatcatttccttacc

SEQ ID NO: 377273 - DNA, 25 bp, Artificial
  probe
  misc_feature (1)..(25): SEQ ID NO: 4234; WAN024FZO; Start 157; Stop 181
gatgctttggatcatttccttacca

SEQ ID NO: 377274 - DNA, 25 bp, Artificial
  probe
  misc_feature (1)..(25): SEQ ID NO: 4234; WAN024FZO; Start 154; Stop 178
aaagatgctttggatcatttcctta

SEQ ID NO: 377275 - DNA, 25 bp, Artificial
  probe
  misc_feature (1)..(25): SEQ ID NO: 4234; WAN024FZO; Start 204; Stop 228
tttgttcttcgtcaaatgttgctag

SEQ ID NO: 377276 - DNA, 25 bp, Artificial
  probe
  misc_feature (1)..(25): SEQ ID NO: 4234; WAN024FZO; Start 164; Stop 188
tggatcatttccttaccaagataat

SEQ ID NO: 377277 - DNA, 25 bp, Artificial
  probe
  misc_feature (1)..(25): SEQ ID NO: 4234; WAN024FZO; Start 73; Stop 97
ctccgcaaaggtaatttgaacattg

SEQ ID NO: 377278 - DNA, 25 bp, Artificial
  probe
  misc_feature (1)..(25): SEQ ID NO: 4234; WAN024FZO; Start 81; Stop 105
aggtaatttgaacattgtcgataaa

SEQ ID NO: 377279 - DNA, 25 bp, Artificial
  probe
  misc_feature (1)..(25): SEQ ID NO: 4234; WAN024FZO; Start 80; Stop 104
aaggtaatttgaacattgtcgataa

SEQ ID NO: 377280 - DNA, 25 bp, Artificial
  probe
  misc_feature (1)..(25): SEQ ID NO: 4234; WAN024FZO; Start 79; Stop 103
aaaggtaatttgaacattgtcgata

SEQ ID NO: 377281 - DNA, 25 bp, Artificial
  probe
  misc_feature (1)..(25): SEQ ID NO: 4234; WAN024FZO; Start 75; Stop 99
ccgcaaaggtaatttgaacattgtc

SEQ ID NO: 377282 - DNA, 25 bp, Artificial
  probe
  misc_feature (1)..(25): SEQ ID NO: 4234; WAN024FZO; Start 74; Stop 98
tccgcaaaggtaatttgaacattgt

SEQ ID NO: 377283 - DNA, 25 bp, Artificial
  probe
  misc_feature (1)..(25): SEQ ID NO: 4234; WAN024FZO; Start 39; Stop 63
catagtagccaccacgttcttctac

SEQ ID NO: 377284 - DNA, 25 bp, Artificial
  probe
  misc_feature (1)..(25): SEQ ID NO: 4234; WAN024FZO; Start 76; Stop 100
cgcaaaggtaatttgaacattgtcg

SEQ ID NO: 377285 - DNA, 25 bp, Artificial
  probe
  misc_feature (1)..(25): SEQ ID NO: 4234; WAN024FZO; Start 37; Stop 61
gtcatagtagccaccacgttcttct

SEQ ID NO: 377286 - DNA, 25 bp, Artificial
  probe
  misc_feature (1)..(25): SEQ ID NO: 4234; WAN024FZO; Start 166; Stop 190
gatcatttccttaccaagataatgg

SEQ ID NO: 377287 - DNA, 25 bp, Artificial
  probe
  misc_feature (1)..(25): SEQ ID NO: 4234; WAN024FZO; Start 165; Stop 189
ggatcatttccttaccaagataatg

SEQ ID NO: 377288 - DNA, 25 bp, Artificial
  probe
  misc_feature (1)..(25): SEQ ID NO: 4234; WAN024FZO; Start 77; Stop 101
gcaaaggtaatttgaacattgtcga

SEQ ID NO: 377289 - DNA, 25 bp, Artificial
  probe
  misc_feature (1)..(25): SEQ ID NO: 4234; WAN024FZO; Start 40; Stop 64
atagtagccaccacgttcttctaca

SEQ ID NO: 377290 - DNA, 25 bp, Artificial
  probe
  misc_feature (1)..(25): SEQ ID NO: 4234; WAN024FZO; Start 78; Stop 102
caaaggtaatttgaacattgtcgat

SEQ ID NO: 377291 - DNA, 25 bp, Artificial
  probe
  misc_feature (1)..(25): SEQ ID NO: 4234; WAN024FZO; Start 93; Stop 117
cattgtcgataaaatccttgttcca

SEQ ID NO: 377292 - DNA, 25 bp, Artificial
  probe
  misc_feature (1)..(25): SEQ ID NO: 4234; WAN024FZO; Start 180; Stop 204
caagataatggtcgatacggaaaat

SEQ ID NO: 377293 - DNA, 25 bp, Artificial
  probe
  misc_feature (1)..(25): SEQ ID NO: 4234; WAN024FZO; Start 185; Stop 209
taatggtcgatacggaaaatttgtt

SEQ ID NO: 377294 - DNA, 25 bp, Artificial
  probe
  misc_feature (1)..(25): SEQ ID NO: 4234; WAN024FZO; Start 96; Stop 120
tgtcgataaaatccttgttccaaac

SEQ ID NO: 377295 - DNA, 25 bp, Artificial
  probe
  misc_feature (1)..(25): SEQ ID NO: 4234; WAN024FZO; Start 184; Stop 208
ataatggtcgatacggaaaatttgt

SEQ ID NO: 377296 - DNA, 25 bp, Artificial
  probe
  misc_feature (1)..(25): SEQ ID NO: 4234; WAN024FZO; Start 181; Stop 205
aagataatggtcgatacggaaaatt

SEQ ID NO: 377297 - DNA, 25 bp, Artificial
  probe
  misc_feature (1)..(25): SEQ ID NO: 4234; WAN024FZO; Start 186; Stop 210
aatggtcgatacggaaaatttgttc

SEQ ID NO: 377298 - DNA, 25 bp, Artificial
  probe
  misc_feature (1)..(25): SEQ ID NO: 4234; WAN024FZO; Start 95; Stop 119
ttgtcgataaaatccttgttccaaa

SEQ ID NO: 377299 - DNA, 25 bp, Artificial
  probe
  misc_feature (1)..(25): SEQ ID NO: 4234; WAN024FZO; Start 72; Stop 96
gctccgcaaaggtaatttgaacatt

SEQ ID NO: 377300 - DNA, 25 bp, Artificial
  probe
  misc_feature (1)..(25): SEQ ID NO: 4234; WAN024FZO; Start 94; Stop 118
attgtcgataaaatccttgttccaa

SEQ ID NO: 377301 - DNA, 25 bp, Artificial
  probe
  misc_feature (1)..(25): SEQ ID NO: 4234; WAN024FZO; Start 189; Stop 213
ggtcgatacggaaaatttgttcttc

SEQ ID NO: 377302 - DNA, 25 bp, Artificial
  probe
  misc_feature (1)..(25): SEQ ID NO: 4234; WAN024FZO; Start 97; Stop 121
gtcgataaaatccttgttccaaacg

SEQ ID NO: 377303 - DNA, 25 bp, Artificial
  probe
  misc_feature (1)..(25): SEQ ID NO: 4235; WAN024BDD; Start 48; Stop 72
ttcacatacccatccattatacact

SEQ ID NO: 377304 - DNA, 25 bp, Artificial
  probe
  misc_feature (1)..(25): SEQ ID NO: 4235; WAN024BDD; Start 47; Stop 71
tttcacatacccatccattatacac

SEQ ID NO: 377305 - DNA, 25 bp, Artificial
  probe
  misc_feature (1)..(25): SEQ ID NO: 4235; WAN024BDD; Start 49; Stop 73
tcacatacccatccattatacacta

SEQ ID NO: 377306 - DNA, 25 bp, Artificial
  probe
  misc_feature (1)..(25): SEQ ID NO: 4235; WAN024BDD; Start 50; Stop 74
cacatacccatccattatacactat

SEQ ID NO: 377307 - DNA, 25 bp, Artificial
  probe
  misc_feature (1)..(25): SEQ ID NO: 4235; WAN024BDD; Start 51; Stop 75
acatacccatccattatacactatt

SEQ ID NO: 377308 - DNA, 25 bp, Artificial
  probe
  misc_feature (1)..(25): SEQ ID NO: 4235; WAN024BDD; Start 52; Stop 76
catacccatccattatacactattt

SEQ ID NO: 377309 - DNA, 25 bp, Artificial
  probe
  misc_feature (1)..(25): SEQ ID NO: 4235; WAN024BDD; Start 46; Stop 70
ttttcacatacccatccattataca

SEQ ID NO: 377310 - DNA, 25 bp, Artificial
  probe
  misc_feature (1)..(25): SEQ ID NO: 4235; WAN024BDD; Start 3; Stop 27
ggttttggcggtaattagagatttt

SEQ ID NO: 377311 - DNA, 25 bp, Artificial
  probe
  misc_feature (1)..(25): SEQ ID NO: 4235; WAN024BDD; Start 2; Stop 26
tggttttggcggtaattagagattt

SEQ ID NO: 377312 - DNA, 25 bp, Artificial
  probe
  misc_feature (1)..(25): SEQ ID NO: 4235; WAN024BDD; Start 55; Stop 79
acccatccattatacactatttatc

SEQ ID NO: 377313 - DNA, 25 bp, Artificial
  probe
  misc_feature (1)..(25): SEQ ID NO: 4235; WAN024BDD; Start 1; Stop 25
gtggttttggcggtaattagagatt

SEQ ID NO: 377314 - DNA, 25 bp, Artificial
  probe
  misc_feature (1)..(25): SEQ ID NO: 4235; WAN024BDD; Start 56; Stop 80
cccatccattatacactatttatct

SEQ ID NO: 377315 - DNA, 25 bp, Artificial
  probe
  misc_feature (1)..(25): SEQ ID NO: 4235; WAN024BDD; Start 68; Stop 92
acactatttatctggaattgcaaga

SEQ ID NO: 377316 - DNA, 25 bp, Artificial
  probe
  misc_feature (1)..(25): SEQ ID NO: 4235; WAN024BDD; Start 65; Stop 89
tatacactatttatctggaattgca

SEQ ID NO: 377317 - DNA, 25 bp, Artificial
  probe
  misc_feature (1)..(25): SEQ ID NO: 4235; WAN024BDD; Start 69; Stop 93
cactatttatctggaattgcaagag

SEQ ID NO: 377318 - DNA, 25 bp, Artificial
  probe
  misc_feature (1)..(25): SEQ ID NO: 4235; WAN024BDD; Start 64; Stop 88
ttatacactatttatctggaattgc

SEQ ID NO: 377319 - DNA, 25 bp, Artificial
  probe
  misc_feature (1)..(25): SEQ ID NO: 4235; WAN024BDD; Start 70; Stop 94
actatttatctggaattgcaagaga

SEQ ID NO: 377320 - DNA, 25 bp, Artificial
  probe
  misc_feature (1)..(25): SEQ ID NO: 4235; WAN024BDD; Start 67; Stop 91
tacactatttatctggaattgcaag

SEQ ID NO: 377321 - DNA, 25 bp, Artificial
  probe
  misc_feature (1)..(25): SEQ ID NO: 4235; WAN024BDD; Start 71; Stop 95
ctatttatctggaattgcaagagaa

SEQ ID NO: 377322 - DNA, 25 bp, Artificial
  probe
  misc_feature (1)..(25): SEQ ID NO: 4235; WAN024BDD; Start 80; Stop 104
tggaattgcaagagaaaagtttact

SEQ ID NO: 377323 - DNA, 25 bp, Artificial
  probe
  misc_feature (1)..(25): SEQ ID NO: 4235; WAN024BDD; Start 79; Stop 103
ctggaattgcaagagaaaagtttac

SEQ ID NO: 377324 - DNA, 25 bp, Artificial
  probe
  misc_feature (1)..(25): SEQ ID NO: 4235; WAN024BDD; Start 72; Stop 96
tatttatctggaattgcaagagaaa

SEQ ID NO: 377325 - DNA, 25 bp, Artificial
  probe
  misc_feature (1)..(25): SEQ ID NO: 4235; WAN024BDD; Start 77; Stop 101
atctggaattgcaagagaaaagttt

SEQ ID NO: 377326 - DNA, 25 bp, Artificial
  probe
  misc_feature (1)..(25): SEQ ID NO: 4235; WAN024BDD; Start 66; Stop 90
atacactatttatctggaattgcaa

SEQ ID NO: 377327 - DNA, 25 bp, Artificial
  probe
  misc_feature (1)..(25): SEQ ID NO: 4235; WAN024BDD; Start 78; Stop 102
tctggaattgcaagagaaaagttta

SEQ ID NO: 377328 - DNA, 25 bp, Artificial
  probe
  misc_feature (1)..(25): SEQ ID NO: 4235; WAN024BDD; Start 76; Stop 100
tatctggaattgcaagagaaaagtt

SEQ ID NO: 377329 - DNA, 25 bp, Artificial
  probe
  misc_feature (1)..(25): SEQ ID NO: 4235; WAN024BDD; Start 75; Stop 99
ttatctggaattgcaagagaaaagt

SEQ ID NO: 377330 - DNA, 25 bp, Artificial
  probe
  misc_feature (1)..(25): SEQ ID NO: 4235; WAN024BDD; Start 81; Stop 105
ggaattgcaagagaaaagtttactt

SEQ ID NO: 377331 - DNA, 25 bp, Artificial
  probe
  misc_feature (1)..(25): SEQ ID NO: 4235; WAN024BDD; Start 74; Stop 98
tttatctggaattgcaagagaaaag

SEQ ID NO: 377332 - DNA, 25 bp, Artificial
  probe
  misc_feature (1)..(25): SEQ ID NO: 4235; WAN024BDD; Start 105; Stop 129
ttttgtactcaatgaaaatcaaaga

SEQ ID NO: 377333 - DNA, 25 bp, Artificial
  probe
  misc_feature (1)..(25): SEQ ID NO: 4235; WAN024BDD; Start 73; Stop 97
atttatctggaattgcaagagaaaa

SEQ ID NO: 377334 - DNA, 25 bp, Artificial
  probe
  misc_feature (1)..(25): SEQ ID NO: 4235; WAN024BDD; Start 82; Stop 106
gaattgcaagagaaaagtttacttt

SEQ ID NO: 377335 - DNA, 25 bp, Artificial
  probe
  misc_feature (1)..(25): SEQ ID NO: 4235; WAN024BDD; Start 60; Stop 84
tccattatacactatttatctggaa

SEQ ID NO: 377336 - DNA, 25 bp, Artificial
  probe
  misc_feature (1)..(25): SEQ ID NO: 4235; WAN024BDD; Start 83; Stop 107
aattgcaagagaaaagtttactttt

SEQ ID NO: 377337 - DNA, 25 bp, Artificial
  probe
  misc_feature (1)..(25): SEQ ID NO: 4236; WAN024DIP; Start 468; Stop 492
cacgcaagacctgattctaactaat

SEQ ID NO: 377338 - DNA, 25 bp, Artificial
  probe
  misc_feature (1)..(25): SEQ ID NO: 4236; WAN024DIP; Start 467; Stop 491
tcacgcaagacctgattctaactaa

SEQ ID NO: 377339 - DNA, 25 bp, Artificial
  probe
  misc_feature (1)..(25): SEQ ID NO: 4236; WAN024DIP; Start 172; Stop 196
ttgaatagtgagattgtgaatgttc

SEQ ID NO: 377340 - DNA, 25 bp, Artificial
  probe
  misc_feature (1)..(25): SEQ ID NO: 4236; WAN024DIP; Start 273; Stop 297
tattccaaagtatgtaagcgagtct

SEQ ID NO: 377341 - DNA, 25 bp, Artificial
  probe
  misc_feature (1)..(25): SEQ ID NO: 4236; WAN024DIP; Start 208; Stop 232
agtattctgaaaggttatcgtctcc

SEQ ID NO: 377342 - DNA, 25 bp, Artificial
  probe
  misc_feature (1)..(25): SEQ ID NO: 4236; WAN024DIP; Start 209; Stop 233
gtattctgaaaggttatcgtctccc

SEQ ID NO: 377343 - DNA, 25 bp, Artificial
  probe
  misc_feature (1)..(25): SEQ ID NO: 4236; WAN024DIP; Start 274; Stop 298
attccaaagtatgtaagcgagtctc

SEQ ID NO: 377344 - DNA, 25 bp, Artificial
  probe
  misc_feature (1)..(25): SEQ ID NO: 4236; WAN024DIP; Start 272; Stop 296
ttattccaaagtatgtaagcgagtc

SEQ ID NO: 377345 - DNA, 25 bp, Artificial
  probe
  misc_feature (1)..(25): SEQ ID NO: 4236; WAN024DIP; Start 466; Stop 490
gtcacgcaagacctgattctaacta

SEQ ID NO: 377346 - DNA, 25 bp, Artificial
  probe
  misc_feature (1)..(25): SEQ ID NO: 4236; WAN024DIP; Start 271; Stop 295
tttattccaaagtatgtaagcgagt

SEQ ID NO: 377347 - DNA, 25 bp, Artificial
  probe
  misc_feature (1)..(25): SEQ ID NO: 4236; WAN024DIP; Start 463; Stop 487
aatgtcacgcaagacctgattctaa

SEQ ID NO: 377348 - DNA, 25 bp, Artificial
  probe
  misc_feature (1)..(25): SEQ ID NO: 4236; WAN024DIP; Start 294; Stop 318
gtctcgtgtactgtatttggattca

SEQ ID NO: 377349 - DNA, 25 bp, Artificial
  probe
  misc_feature (1)..(25): SEQ ID NO: 4236; WAN024DIP; Start 206; Stop 230
gtagtattctgaaaggttatcgtct

SEQ ID NO: 377350 - DNA, 25 bp, Artificial
  probe
  misc_feature (1)..(25): SEQ ID NO: 4236; WAN024DIP; Start 205; Stop 229
agtagtattctgaaaggttatcgtc

SEQ ID NO: 377351 - DNA, 25 bp, Artificial
  probe
  misc_feature (1)..(25): SEQ ID NO: 4236; WAN024DIP; Start 166; Stop 190
gagactttgaatagtgagattgtga

SEQ ID NO: 377352 - DNA, 25 bp, Artificial
  probe
  misc_feature (1)..(25): SEQ ID NO: 4236; WAN024DIP; Start 165; Stop 189
agagactttgaatagtgagattgtg

SEQ ID NO: 377353 - DNA, 25 bp, Artificial
  probe
  misc_feature (1)..(25): SEQ ID NO: 4236; WAN024DIP; Start 293; Stop 317
agtctcgtgtactgtatttggattc

SEQ ID NO: 377354 - DNA, 25 bp, Artificial
  probe
  misc_feature (1)..(25): SEQ ID NO: 4236; WAN024DIP; Start 292; Stop 316
gagtctcgtgtactgtatttggatt

SEQ ID NO: 377355 - DNA, 25 bp, Artificial
  probe
  misc_feature (1)..(25): SEQ ID NO: 4236; WAN024DIP; Start 19; Stop 43
gcgattgtcttaggtgcagataatg

SEQ ID NO: 377356 - DNA, 25 bp, Artificial
  probe
  misc_feature (1)..(25): SEQ ID NO: 4236; WAN024DIP; Start 18; Stop 42
agcgattgtcttaggtgcagataat

SEQ ID NO: 377357 - DNA, 25 bp, Artificial
  probe
  misc_feature (1)..(25): SEQ ID NO: 4236; WAN024DIP; Start 207; Stop 231
tagtattctgaaaggttatcgtctc

SEQ ID NO: 377358 - DNA, 25 bp, Artificial
  probe
  misc_feature (1)..(25): SEQ ID NO: 4236; WAN024DIP; Start 167; Stop 191
agactttgaatagtgagattgtgaa

SEQ ID NO: 377359 - DNA, 25 bp, Artificial
  probe
  misc_feature (1)..(25): SEQ ID NO: 4236; WAN024DIP; Start 170; Stop 194
ctttgaatagtgagattgtgaatgt

SEQ ID NO: 377360 - DNA, 25 bp, Artificial
  probe
  misc_feature (1)..(25): SEQ ID NO: 4236; WAN024DIP; Start 297; Stop 321
tcgtgtactgtatttggattcagat

SEQ ID NO: 377361 - DNA, 25 bp, Artificial
  probe
  misc_feature (1)..(25): SEQ ID NO: 4236; WAN024DIP; Start 464; Stop 488
atgtcacgcaagacctgattctaac

SEQ ID NO: 377362 - DNA, 25 bp, Artificial
  probe
  misc_feature (1)..(25): SEQ ID NO: 4236; WAN024DIP; Start 310; Stop 334
ttggattcagatattgttgtaagaa

SEQ ID NO: 377363 - DNA, 25 bp, Artificial
  probe
  misc_feature (1)..(25): SEQ ID NO: 4236; WAN024DIP; Start 296; Stop 320
ctcgtgtactgtatttggattcaga

SEQ ID NO: 377364 - DNA, 25 bp, Artificial
  probe
  misc_feature (1)..(25): SEQ ID NO: 4236; WAN024DIP; Start 295; Stop 319
tctcgtgtactgtatttggattcag

SEQ ID NO: 377365 - DNA, 25 bp, Artificial
  probe
  misc_feature (1)..(25): SEQ ID NO: 4236; WAN024DIP; Start 17; Stop 41
aagcgattgtcttaggtgcagataa

SEQ ID NO: 377366 - DNA, 25 bp, Artificial
  probe
  misc_feature (1)..(25): SEQ ID NO: 4236; WAN024DIP; Start 171; Stop 195
tttgaatagtgagattgtgaatgtt

SEQ ID NO: 377367 - DNA, 25 bp, Artificial
  probe
  misc_feature (1)..(25): SEQ ID NO: 4236; WAN024DIP; Start 169; Stop 193
actttgaatagtgagattgtgaatg

SEQ ID NO: 377368 - DNA, 25 bp, Artificial
  probe
  misc_feature (1)..(25): SEQ ID NO: 4236; WAN024DIP; Start 298; Stop 322
cgtgtactgtatttggattcagata

SEQ ID NO: 377369 - DNA, 25 bp, Artificial
  probe
  misc_feature (1)..(25): SEQ ID NO: 4236; WAN024DIP; Start 168; Stop 192
gactttgaatagtgagattgtgaat

SEQ ID NO: 377370 - DNA, 25 bp, Artificial
  probe
  misc_feature (1)..(25): SEQ ID NO: 4237; WAN024DYW; Start 154; Stop 178
gatatagagagttgcaccatcagac

SEQ ID NO: 377371 - DNA, 25 bp, Artificial
  probe
  misc_feature (1)..(25): SEQ ID NO: 4237; WAN024DYW; Start 155; Stop 179
atatagagagttgcaccatcagact

SEQ ID NO: 377372 - DNA, 25 bp, Artificial
  probe
  misc_feature (1)..(25): SEQ ID NO: 4237; WAN024DYW; Start 156; Stop 180
tatagagagttgcaccatcagactt

SEQ ID NO: 377373 - DNA, 25 bp, Artificial
  probe
  misc_feature (1)..(25): SEQ ID NO: 4237; WAN024DYW; Start 205; Stop 229
tccatatttctcaagattcacaact

SEQ ID NO: 377374 - DNA, 25 bp, Artificial
  probe
  misc_feature (1)..(25): SEQ ID NO: 4237; WAN024DYW; Start 150; Stop 174
gtgtgatatagagagttgcaccatc

SEQ ID NO: 377375 - DNA, 25 bp, Artificial
  probe
  misc_feature (1)..(25): SEQ ID NO: 4237; WAN024DYW; Start 157; Stop 181
atagagagttgcaccatcagacttc

SEQ ID NO: 377376 - DNA, 25 bp, Artificial
  probe
  misc_feature (1)..(25): SEQ ID NO: 4237; WAN024DYW; Start 204; Stop 228
ttccatatttctcaagattcacaac

SEQ ID NO: 377377 - DNA, 25 bp, Artificial
  probe
  misc_feature (1)..(25): SEQ ID NO: 4237; WAN024DYW; Start 206; Stop 230
ccatatttctcaagattcacaactt

SEQ ID NO: 377378 - DNA, 25 bp, Artificial
  probe
  misc_feature (1)..(25): SEQ ID NO: 4237; WAN024DYW; Start 153; Stop 177
tgatatagagagttgcaccatcaga

SEQ ID NO: 377379 - DNA, 25 bp, Artificial
  probe
  misc_feature (1)..(25): SEQ ID NO: 4237; WAN024DYW; Start 152; Stop 176
gtgatatagagagttgcaccatcag

SEQ ID NO: 377380 - DNA, 25 bp, Artificial
  probe
  misc_feature (1)..(25): SEQ ID NO: 4237; WAN024DYW; Start 149; Stop 173
cgtgtgatatagagagttgcaccat

SEQ ID NO: 377381 - DNA, 25 bp, Artificial
  probe
  misc_feature (1)..(25): SEQ ID NO: 4237; WAN024DYW; Start 158; Stop 182
tagagagttgcaccatcagacttct

SEQ ID NO: 377382 - DNA, 25 bp, Artificial
  probe
  misc_feature (1)..(25): SEQ ID NO: 4237; WAN024DYW; Start 151; Stop 175
tgtgatatagagagttgcaccatca

SEQ ID NO: 377383 - DNA, 25 bp, Artificial
  probe
  misc_feature (1)..(25): SEQ ID NO: 4237; WAN024DYW; Start 203; Stop 227
attccatatttctcaagattcacaa

SEQ ID NO: 377384 - DNA, 25 bp, Artificial
  probe
  misc_feature (1)..(25): SEQ ID NO: 4237; WAN024DYW; Start 202; Stop 226
aattccatatttctcaagattcaca

SEQ ID NO: 377385 - DNA, 25 bp, Artificial
  probe
  misc_feature (1)..(25): SEQ ID NO: 4237; WAN024DYW; Start 197; Stop 221
tgttcaattccatatttctcaagat

SEQ ID NO: 377386 - DNA, 25 bp, Artificial
  probe
  misc_feature (1)..(25): SEQ ID NO: 4237; WAN024DYW; Start 194; Stop 218
ggatgttcaattccatatttctcaa

SEQ ID NO: 377387 - DNA, 25 bp, Artificial
  probe
  misc_feature (1)..(25): SEQ ID NO: 4237; WAN024DYW; Start 201; Stop 225
caattccatatttctcaagattcac

SEQ ID NO: 377388 - DNA, 25 bp, Artificial
  probe
  misc_feature (1)..(25): SEQ ID NO: 4237; WAN024DYW; Start 196; Stop 220
atgttcaattccatatttctcaaga

SEQ ID NO: 377389 - DNA, 25 bp, Artificial
  probe
  misc_feature (1)..(25): SEQ ID NO: 4237; WAN024DYW; Start 200; Stop 224
tcaattccatatttctcaagattca

SEQ ID NO: 377390 - DNA, 25 bp, Artificial
  probe
  misc_feature (1)..(25): SEQ ID NO: 4237; WAN024DYW; Start 195; Stop 219
gatgttcaattccatatttctcaag

SEQ ID NO: 377391 - DNA, 25 bp, Artificial
  probe
  misc_feature (1)..(25): SEQ ID NO: 4237; WAN024DYW; Start 160; Stop 184
gagagttgcaccatcagacttcttg

SEQ ID NO: 377392 - DNA, 25 bp, Artificial
  probe
  misc_feature (1)..(25): SEQ ID NO: 4237; WAN024DYW; Start 159; Stop 183
agagagttgcaccatcagacttctt

SEQ ID NO: 377393 - DNA, 25 bp, Artificial
  probe
  misc_feature (1)..(25): SEQ ID NO: 4237; WAN024DYW; Start 161; Stop 185
agagttgcaccatcagacttcttga

SEQ ID NO: 377394 - DNA, 25 bp, Artificial
  probe
  misc_feature (1)..(25): SEQ ID NO: 4237; WAN024DYW; Start 148; Stop 172
acgtgtgatatagagagttgcacca

SEQ ID NO: 377395 - DNA, 25 bp, Artificial
  probe
  misc_feature (1)..(25): SEQ ID NO: 4237; WAN024DYW; Start 209; Stop 233
tatttctcaagattcacaacttggg

SEQ ID NO: 377396 - DNA, 25 bp, Artificial
  probe
  misc_feature (1)..(25): SEQ ID NO: 4237; WAN024DYW; Start 198; Stop 222
gttcaattccatatttctcaagatt

SEQ ID NO: 377397 - DNA, 25 bp, Artificial
  probe
  misc_feature (1)..(25): SEQ ID NO: 4237; WAN024DYW; Start 162; Stop 186
gagttgcaccatcagacttcttgat

SEQ ID NO: 377398 - DNA, 25 bp, Artificial
  probe
  misc_feature (1)..(25): SEQ ID NO: 4237; WAN024DYW; Start 199; Stop 223
ttcaattccatatttctcaagattc

SEQ ID NO: 377399 - DNA, 25 bp, Artificial
  probe
  misc_feature (1)..(25): SEQ ID NO: 4237; WAN024DYW; Start 177; Stop 201
acttcttgatgagggctggatgttc

SEQ ID NO: 377400 - DNA, 25 bp, Artificial
  probe
  misc_feature (1)..(25): SEQ ID NO: 4237; WAN024DYW; Start 176; Stop 200
gacttcttgatgagggctggatgtt

SEQ ID NO: 377401 - DNA, 25 bp, Artificial
  probe
  misc_feature (1)..(25): SEQ ID NO: 4237; WAN024DYW; Start 210; Stop 234
atttctcaagattcacaacttgggc

SEQ ID NO: 377402 - DNA, 25 bp, Artificial
  probe
  misc_feature (1)..(25): SEQ ID NO: 4237; WAN024DYW; Start 217; Stop 241
aagattcacaacttgggcaccttct

SEQ ID NO: 377403 - DNA, 25 bp, Artificial
  probe
  misc_feature (1)..(25): SEQ ID NO: 4238; WAN024B5V; Start 115; Stop 139
tgtctttcccattacactttccttt

SEQ ID NO: 377404 - DNA, 25 bp, Artificial
  probe
  misc_feature (1)..(25): SEQ ID NO: 4238; WAN024B5V; Start 114; Stop 138
ttgtctttcccattacactttcctt

SEQ ID NO: 377405 - DNA, 25 bp, Artificial
  probe
  misc_feature (1)..(25): SEQ ID NO: 4238; WAN024B5V; Start 113; Stop 137
tttgtctttcccattacactttcct

SEQ ID NO: 377406 - DNA, 25 bp, Artificial
  probe
  misc_feature (1)..(25): SEQ ID NO: 4238; WAN024B5V; Start 121; Stop 145
tcccattacactttccttttctaca

SEQ ID NO: 377407 - DNA, 25 bp, Artificial
  probe
  misc_feature (1)..(25): SEQ ID NO: 4238; WAN024B5V; Start 116; Stop 140
gtctttcccattacactttcctttt

SEQ ID NO: 377408 - DNA, 25 bp, Artificial
  probe
  misc_feature (1)..(25): SEQ ID NO: 4238; WAN024B5V; Start 118; Stop 142
ctttcccattacactttccttttct

SEQ ID NO: 377409 - DNA, 25 bp, Artificial
  probe
  misc_feature (1)..(25): SEQ ID NO: 4238; WAN024B5V; Start 117; Stop 141
tctttcccattacactttccttttc

SEQ ID NO: 377410 - DNA, 25 bp, Artificial
  probe
  misc_feature (1)..(25): SEQ ID NO: 4238; WAN024B5V; Start 105; Stop 129
gcagttcttttgtctttcccattac

SEQ ID NO: 377411 - DNA, 25 bp, Artificial
  probe
  misc_feature (1)..(25): SEQ ID NO: 4238; WAN024B5V; Start 104; Stop 128
agcagttcttttgtctttcccatta

SEQ ID NO: 377412 - DNA, 25 bp, Artificial
  probe
  misc_feature (1)..(25): SEQ ID NO: 4238; WAN024B5V; Start 122; Stop 146
cccattacactttccttttctacat

SEQ ID NO: 377413 - DNA, 25 bp, Artificial
  probe
  misc_feature (1)..(25): SEQ ID NO: 4238; WAN024B5V; Start 120; Stop 144
ttcccattacactttccttttctac

SEQ ID NO: 377414 - DNA, 25 bp, Artificial
  probe
  misc_feature (1)..(25): SEQ ID NO: 4238; WAN024B5V; Start 119; Stop 143
tttcccattacactttccttttcta

SEQ ID NO: 377415 - DNA, 25 bp, Artificial
  probe
  misc_feature (1)..(25): SEQ ID NO: 4238; WAN024B5V; Start 103; Stop 127
aagcagttcttttgtctttcccatt

SEQ ID NO: 377416 - DNA, 25 bp, Artificial
  probe
  misc_feature (1)..(25): SEQ ID NO: 4238; WAN024B5V; Start 112; Stop 136
ttttgtctttcccattacactttcc

SEQ ID NO: 377417 - DNA, 25 bp, Artificial
  probe
  misc_feature (1)..(25): SEQ ID NO: 4238; WAN024B5V; Start 53; Stop 77
tgtcttctttcttctttcattatct

SEQ ID NO: 377418 - DNA, 25 bp, Artificial
  probe
  misc_feature (1)..(25): SEQ ID NO: 4238; WAN024B5V; Start 108; Stop 132
gttcttttgtctttcccattacact

SEQ ID NO: 377419 - DNA, 25 bp, Artificial
  probe
  misc_feature (1)..(25): SEQ ID NO: 4238; WAN024B5V; Start 107; Stop 131
agttcttttgtctttcccattacac

SEQ ID NO: 377420 - DNA, 25 bp, Artificial
  probe
  misc_feature (1)..(25): SEQ ID NO: 4238; WAN024B5V; Start 106; Stop 130
cagttcttttgtctttcccattaca

SEQ ID NO: 377421 - DNA, 25 bp, Artificial
  probe
  misc_feature (1)..(25): SEQ ID NO: 4238; WAN024B5V; Start 110; Stop 134
tcttttgtctttcccattacacttt

SEQ ID NO: 377422 - DNA, 25 bp, Artificial
  probe
  misc_feature (1)..(25): SEQ ID NO: 4238; WAN024B5V; Start 109; Stop 133
ttcttttgtctttcccattacactt

SEQ ID NO: 377423 - DNA, 25 bp, Artificial
  probe
  misc_feature (1)..(25): SEQ ID NO: 4238; WAN024B5V; Start 111; Stop 135
cttttgtctttcccattacactttc

SEQ ID NO: 377424 - DNA, 25 bp, Artificial
  probe
  misc_feature (1)..(25): SEQ ID NO: 4238; WAN024B5V; Start 165; Stop 189
caatctgcaaggagaccaagtcatc

SEQ ID NO: 377425 - DNA, 25 bp, Artificial
  probe
  misc_feature (1)..(25): SEQ ID NO: 4238; WAN024B5V; Start 167; Stop 191
atctgcaaggagaccaagtcatctt

SEQ ID NO: 377426 - DNA, 25 bp, Artificial
  probe
  misc_feature (1)..(25): SEQ ID NO: 4238; WAN024B5V; Start 166; Stop 190
aatctgcaaggagaccaagtcatct

SEQ ID NO: 377427 - DNA, 25 bp, Artificial
  probe
  misc_feature (1)..(25): SEQ ID NO: 4238; WAN024B5V; Start 49; Stop 73
aaattgtcttctttcttctttcatt

SEQ ID NO: 377428 - DNA, 25 bp, Artificial
  probe
  misc_feature (1)..(25): SEQ ID NO: 4238; WAN024B5V; Start 52; Stop 76
ttgtcttctttcttctttcattatc

SEQ ID NO: 377429 - DNA, 25 bp, Artificial
  probe
  misc_feature (1)..(25): SEQ ID NO: 4238; WAN024B5V; Start 102; Stop 126
aaagcagttcttttgtctttcccat

SEQ ID NO: 377430 - DNA, 25 bp, Artificial
  probe
  misc_feature (1)..(25): SEQ ID NO: 4238; WAN024B5V; Start 182; Stop 206
aagtcatcttggatagaaatgattt

SEQ ID NO: 377431 - DNA, 25 bp, Artificial
  probe
  misc_feature (1)..(25): SEQ ID NO: 4238; WAN024B5V; Start 50; Stop 74
aattgtcttctttcttctttcatta

SEQ ID NO: 377432 - DNA, 25 bp, Artificial
  probe
  misc_feature (1)..(25): SEQ ID NO: 4238; WAN024B5V; Start 181; Stop 205
caagtcatcttggatagaaatgatt

SEQ ID NO: 377433 - DNA, 25 bp, Artificial
  probe
  misc_feature (1)..(25): SEQ ID NO: 4238; WAN024B5V; Start 62; Stop 86
tcttctttcattatctattaccaga

SEQ ID NO: 377434 - DNA, 25 bp, Artificial
  probe
  misc_feature (1)..(25): SEQ ID NO: 4238; WAN024B5V; Start 48; Stop 72
aaaattgtcttctttcttctttcat

SEQ ID NO: 377435 - DNA, 25 bp, Artificial
  probe
  misc_feature (1)..(25): SEQ ID NO: 4238; WAN024B5V; Start 168; Stop 192
tctgcaaggagaccaagtcatcttg

SEQ ID NO: 377436 - DNA, 25 bp, Artificial
  probe
  misc_feature (1)..(25): SEQ ID NO: 4239; WAN0249NZ; Start 7; Stop 31
acatctacataaaacaggaaaagcc

SEQ ID NO: 377437 - DNA, 25 bp, Artificial
  probe
  misc_feature (1)..(25): SEQ ID NO: 4239; WAN0249NZ; Start 6; Stop 30
aacatctacataaaacaggaaaagc

SEQ ID NO: 377438 - DNA, 25 bp, Artificial
  probe
  misc_feature (1)..(25): SEQ ID NO: 4239; WAN0249NZ; Start 11; Stop 35
ctacataaaacaggaaaagccttgg

SEQ ID NO: 377439 - DNA, 25 bp, Artificial
  probe
  misc_feature (1)..(25): SEQ ID NO: 4239; WAN0249NZ; Start 10; Stop 34
tctacataaaacaggaaaagccttg

SEQ ID NO: 377440 - DNA, 25 bp, Artificial
  probe
  misc_feature (1)..(25): SEQ ID NO: 4239; WAN0249NZ; Start 8; Stop 32
catctacataaaacaggaaaagcct

SEQ ID NO: 377441 - DNA, 25 bp, Artificial
  probe
  misc_feature (1)..(25): SEQ ID NO: 4239; WAN0249NZ; Start 12; Stop 36
tacataaaacaggaaaagccttggt

SEQ ID NO: 377442 - DNA, 25 bp, Artificial
  probe
  misc_feature (1)..(25): SEQ ID NO: 4239; WAN0249NZ; Start 9; Stop 33
atctacataaaacaggaaaagcctt

SEQ ID NO: 377443 - DNA, 25 bp, Artificial
  probe
  misc_feature (1)..(25): SEQ ID NO: 4239; WAN0249NZ; Start 13; Stop 37
acataaaacaggaaaagccttggtt

SEQ ID NO: 377444 - DNA, 25 bp, Artificial
  probe
  misc_feature (1)..(25): SEQ ID NO: 4239; WAN0249NZ; Start 162; Stop 186
ttttctgtctaacttttgaggtaca

SEQ ID NO: 377445 - DNA, 25 bp, Artificial
  probe
  misc_feature (1)..(25): SEQ ID NO: 4239; WAN0249NZ; Start 117; Stop 141
tgattgaaggtcttttcttaacaaa

SEQ ID NO: 377446 - DNA, 25 bp, Artificial
  probe
  misc_feature (1)..(25): SEQ ID NO: 4239; WAN0249NZ; Start 115; Stop 139
aatgattgaaggtcttttcttaaca

SEQ ID NO: 377447 - DNA, 25 bp, Artificial
  probe
  misc_feature (1)..(25): SEQ ID NO: 4239; WAN0249NZ; Start 116; Stop 140
atgattgaaggtcttttcttaacaa

SEQ ID NO: 377448 - DNA, 25 bp, Artificial
  probe
  misc_feature (1)..(25): SEQ ID NO: 4239; WAN0249NZ; Start 15; Stop 39
ataaaacaggaaaagccttggtttc

SEQ ID NO: 377449 - DNA, 25 bp, Artificial
  probe
  misc_feature (1)..(25): SEQ ID NO: 4239; WAN0249NZ; Start 14; Stop 38
cataaaacaggaaaagccttggttt

SEQ ID NO: 377450 - DNA, 25 bp, Artificial
  probe
  misc_feature (1)..(25): SEQ ID NO: 4239; WAN0249NZ; Start 16; Stop 40
taaaacaggaaaagccttggtttca

SEQ ID NO: 377451 - DNA, 25 bp, Artificial
  probe
  misc_feature (1)..(25): SEQ ID NO: 4239; WAN0249NZ; Start 167; Stop 191
tgtctaacttttgaggtacagttca

SEQ ID NO: 377452 - DNA, 25 bp, Artificial
  probe
  misc_feature (1)..(25): SEQ ID NO: 4239; WAN0249NZ; Start 179; Stop 203
gaggtacagttcaaacgcgaaatag

SEQ ID NO: 377453 - DNA, 25 bp, Artificial
  probe
  misc_feature (1)..(25): SEQ ID NO: 4239; WAN0249NZ; Start 168; Stop 192
gtctaacttttgaggtacagttcaa

SEQ ID NO: 377454 - DNA, 25 bp, Artificial
  probe
  misc_feature (1)..(25): SEQ ID NO: 4239; WAN0249NZ; Start 17; Stop 41
aaaacaggaaaagccttggtttcat

SEQ ID NO: 377455 - DNA, 25 bp, Artificial
  probe
  misc_feature (1)..(25): SEQ ID NO: 4239; WAN0249NZ; Start 114; Stop 138
aaatgattgaaggtcttttcttaac

SEQ ID NO: 377456 - DNA, 25 bp, Artificial
  probe
  misc_feature (1)..(25): SEQ ID NO: 4239; WAN0249NZ; Start 5; Stop 29
aaacatctacataaaacaggaaaag

SEQ ID NO: 377457 - DNA, 25 bp, Artificial
  probe
  misc_feature (1)..(25): SEQ ID NO: 4239; WAN0249NZ; Start 178; Stop 202
tgaggtacagttcaaacgcgaaata

SEQ ID NO: 377458 - DNA, 25 bp, Artificial
  probe
  misc_feature (1)..(25): SEQ ID NO: 4239; WAN0249NZ; Start 111; Stop 135
cttaaatgattgaaggtcttttctt

SEQ ID NO: 377459 - DNA, 25 bp, Artificial
  probe
  misc_feature (1)..(25): SEQ ID NO: 4239; WAN0249NZ; Start 118; Stop 142
gattgaaggtcttttcttaacaaaa

SEQ ID NO: 377460 - DNA, 25 bp, Artificial
  probe
  misc_feature (1)..(25): SEQ ID NO: 4239; WAN0249NZ; Start 1; Stop 25
gtgtaaacatctacataaaacagga

SEQ ID NO: 377461 - DNA, 25 bp, Artificial
  probe
  misc_feature (1)..(25): SEQ ID NO: 4239; WAN0249NZ; Start 18; Stop 42
aaacaggaaaagccttggtttcatg

SEQ ID NO: 377462 - DNA, 25 bp, Artificial
  probe
  misc_feature (1)..(25): SEQ ID NO: 4239; WAN0249NZ; Start 3; Stop 27
gtaaacatctacataaaacaggaaa

SEQ ID NO: 377463 - DNA, 25 bp, Artificial
  probe
  misc_feature (1)..(25): SEQ ID NO: 4239; WAN0249NZ; Start 2; Stop 26
tgtaaacatctacataaaacaggaa

SEQ ID NO: 377464 - DNA, 25 bp, Artificial
  probe
  misc_feature (1)..(25): SEQ ID NO: 4239; WAN0249NZ; Start 165; Stop 189
tctgtctaacttttgaggtacagtt

SEQ ID NO: 377465 - DNA, 25 bp, Artificial
  probe
  misc_feature (1)..(25): SEQ ID NO: 4239; WAN0249NZ; Start 164; Stop 188
ttctgtctaacttttgaggtacagt

SEQ ID NO: 377466 - DNA, 25 bp, Artificial
  probe
  misc_feature (1)..(25): SEQ ID NO: 4239; WAN0249NZ; Start 166; Stop 190
ctgtctaacttttgaggtacagttc

SEQ ID NO: 377467 - DNA, 25 bp, Artificial
  probe
  misc_feature (1)..(25): SEQ ID NO: 4239; WAN0249NZ; Start 180; Stop 204
aggtacagttcaaacgcgaaatagc

SEQ ID NO: 377468 - DNA, 25 bp, Artificial
  probe
  misc_feature (1)..(25): SEQ ID NO: 4239; WAN0249NZ; Start 163; Stop 187
tttctgtctaacttttgaggtacag

SEQ ID NO: 377469 - DNA, 25 bp, Artificial
  probe
  misc_feature (1)..(25): SEQ ID NO: 4240; WAN024A9S; Start 23; Stop 47
aattcggactaaggtttgtgtgaaa

SEQ ID NO: 377470 - DNA, 25 bp, Artificial
  probe
  misc_feature (1)..(25): SEQ ID NO: 4240; WAN024A9S; Start 13; Stop 37
agagtaattgaattcggactaaggt

SEQ ID NO: 377471 - DNA, 25 bp, Artificial
  probe
  misc_feature (1)..(25): SEQ ID NO: 4240; WAN024A9S; Start 12; Stop 36
gagagtaattgaattcggactaagg

SEQ ID NO: 377472 - DNA, 25 bp, Artificial
  probe
  misc_feature (1)..(25): SEQ ID NO: 4240; WAN024A9S; Start 14; Stop 38
gagtaattgaattcggactaaggtt

SEQ ID NO: 377473 - DNA, 25 bp, Artificial
  probe
  misc_feature (1)..(25): SEQ ID NO: 4240; WAN024A9S; Start 1; Stop 25
gtgtaaatcacgagagtaattgaat

SEQ ID NO: 377474 - DNA, 25 bp, Artificial
  probe
  misc_feature (1)..(25): SEQ ID NO: 4240; WAN024A9S; Start 18; Stop 42
aattgaattcggactaaggtttgtg

SEQ ID NO: 377475 - DNA, 25 bp, Artificial
  probe
  misc_feature (1)..(25): SEQ ID NO: 4240; WAN024A9S; Start 10; Stop 34
acgagagtaattgaattcggactaa

SEQ ID NO: 377476 - DNA, 25 bp, Artificial
  probe
  misc_feature (1)..(25): SEQ ID NO: 4240; WAN024A9S; Start 6; Stop 30
aatcacgagagtaattgaattcgga

SEQ ID NO: 377477 - DNA, 25 bp, Artificial
  probe
  misc_feature (1)..(25): SEQ ID NO: 4240; WAN024A9S; Start 9; Stop 33
cacgagagtaattgaattcggacta

SEQ ID NO: 377478 - DNA, 25 bp, Artificial
  probe
  misc_feature (1)..(25): SEQ ID NO: 4240; WAN024A9S; Start 11; Stop 35
cgagagtaattgaattcggactaag

SEQ ID NO: 377479 - DNA, 25 bp, Artificial
  probe
  misc_feature (1)..(25): SEQ ID NO: 4240; WAN024A9S; Start 19; Stop 43
attgaattcggactaaggtttgtgt

SEQ ID NO: 377480 - DNA, 25 bp, Artificial
  probe
  misc_feature (1)..(25): SEQ ID NO: 4240; WAN024A9S; Start 2; Stop 26
tgtaaatcacgagagtaattgaatt

SEQ ID NO: 377481 - DNA, 25 bp, Artificial
  probe
  misc_feature (1)..(25): SEQ ID NO: 4240; WAN024A9S; Start 7; Stop 31
atcacgagagtaattgaattcggac

SEQ ID NO: 377482 - DNA, 25 bp, Artificial
  probe
  misc_feature (1)..(25): SEQ ID NO: 4240; WAN024A9S; Start 24; Stop 48
attcggactaaggtttgtgtgaaaa

SEQ ID NO: 377483 - DNA, 25 bp, Artificial
  probe
  misc_feature (1)..(25): SEQ ID NO: 4240; WAN024A9S; Start 17; Stop 41
taattgaattcggactaaggtttgt

SEQ ID NO: 377484 - DNA, 25 bp, Artificial
  probe
  misc_feature (1)..(25): SEQ ID NO: 4240; WAN024A9S; Start 16; Stop 40
gtaattgaattcggactaaggtttg

SEQ ID NO: 377485 - DNA, 25 bp, Artificial
  probe
  misc_feature (1)..(25): SEQ ID NO: 4240; WAN024A9S; Start 20; Stop 44
ttgaattcggactaaggtttgtgtg

SEQ ID NO: 377486 - DNA, 25 bp, Artificial
  probe
  misc_feature (1)..(25): SEQ ID NO: 4240; WAN024A9S; Start 22; Stop 46
gaattcggactaaggtttgtgtgaa

SEQ ID NO: 377487 - DNA, 25 bp, Artificial
  probe
  misc_feature (1)..(25): SEQ ID NO: 4240; WAN024A9S; Start 8; Stop 32
tcacgagagtaattgaattcggact

SEQ ID NO: 377488 - DNA, 25 bp, Artificial
  probe
  misc_feature (1)..(25): SEQ ID NO: 4240; WAN024A9S; Start 15; Stop 39
agtaattgaattcggactaaggttt

SEQ ID NO: 377489 - DNA, 25 bp, Artificial
  probe
  misc_feature (1)..(25): SEQ ID NO: 4240; WAN024A9S; Start 21; Stop 45
tgaattcggactaaggtttgtgtga

SEQ ID NO: 377490 - DNA, 25 bp, Artificial
  probe
  misc_feature (1)..(25): SEQ ID NO: 4240; WAN024A9S; Start 5; Stop 29
aaatcacgagagtaattgaattcgg

SEQ ID NO: 377491 - DNA, 25 bp, Artificial
  probe
  misc_feature (1)..(25): SEQ ID NO: 4240; WAN024A9S; Start 3; Stop 27
gtaaatcacgagagtaattgaattc

SEQ ID NO: 377492 - DNA, 25 bp, Artificial
  probe
  misc_feature (1)..(25): SEQ ID NO: 4241; WAN024DA8; Start 68; Stop 92
gctctatcactaaccattctacagg

SEQ ID NO: 377493 - DNA, 25 bp, Artificial
  probe
  misc_feature (1)..(25): SEQ ID NO: 4241; WAN024DA8; Start 67; Stop 91
cgctctatcactaaccattctacag

SEQ ID NO: 377494 - DNA, 25 bp, Artificial
  probe
  misc_feature (1)..(25): SEQ ID NO: 4241; WAN024DA8; Start 178; Stop 202
gagcctcatcctaacctaagtattc

SEQ ID NO: 377495 - DNA, 25 bp, Artificial
  probe
  misc_feature (1)..(25): SEQ ID NO: 4241; WAN024DA8; Start 177; Stop 201
agagcctcatcctaacctaagtatt

SEQ ID NO: 377496 - DNA, 25 bp, Artificial
  probe
  misc_feature (1)..(25): SEQ ID NO: 4241; WAN024DA8; Start 176; Stop 200
cagagcctcatcctaacctaagtat

SEQ ID NO: 377497 - DNA, 25 bp, Artificial
  probe
  misc_feature (1)..(25): SEQ ID NO: 4241; WAN024DA8; Start 179; Stop 203
agcctcatcctaacctaagtattcg

SEQ ID NO: 377498 - DNA, 25 bp, Artificial
  probe
  misc_feature (1)..(25): SEQ ID NO: 4241; WAN024DA8; Start 65; Stop 89
tccgctctatcactaaccattctac

SEQ ID NO: 377499 - DNA, 25 bp, Artificial
  probe
  misc_feature (1)..(25): SEQ ID NO: 4241; WAN024DA8; Start 64; Stop 88
gtccgctctatcactaaccattcta

SEQ ID NO: 377500 - DNA, 25 bp, Artificial
  probe
  misc_feature (1)..(25): SEQ ID NO: 4241; WAN024DA8; Start 66; Stop 90
ccgctctatcactaaccattctaca

SEQ ID NO: 377501 - DNA, 25 bp, Artificial
  probe
  misc_feature (1)..(25): SEQ ID NO: 4241; WAN024DA8; Start 211; Stop 235
accaataccaaggaccttctaatag

SEQ ID NO: 377502 - DNA, 25 bp, Artificial
  probe
  misc_feature (1)..(25): SEQ ID NO: 4241; WAN024DA8; Start 212; Stop 236
ccaataccaaggaccttctaataga

SEQ ID NO: 377503 - DNA, 25 bp, Artificial
  probe
  misc_feature (1)..(25): SEQ ID NO: 4241; WAN024DA8; Start 209; Stop 233
ttaccaataccaaggaccttctaat

SEQ ID NO: 377504 - DNA, 25 bp, Artificial
  probe
  misc_feature (1)..(25): SEQ ID NO: 4241; WAN024DA8; Start 175; Stop 199
ccagagcctcatcctaacctaagta

SEQ ID NO: 377505 - DNA, 25 bp, Artificial
  probe
  misc_feature (1)..(25): SEQ ID NO: 4241; WAN024DA8; Start 72; Stop 96
tatcactaaccattctacaggtcac

SEQ ID NO: 377506 - DNA, 25 bp, Artificial
  probe
  misc_feature (1)..(25): SEQ ID NO: 4241; WAN024DA8; Start 210; Stop 234
taccaataccaaggaccttctaata

SEQ ID NO: 377507 - DNA, 25 bp, Artificial
  probe
  misc_feature (1)..(25): SEQ ID NO: 4241; WAN024DA8; Start 71; Stop 95
ctatcactaaccattctacaggtca

SEQ ID NO: 377508 - DNA, 25 bp, Artificial
  probe
  misc_feature (1)..(25): SEQ ID NO: 4241; WAN024DA8; Start 247; Stop 271
cgtgttcaggattatcaggtcttga

SEQ ID NO: 377509 - DNA, 25 bp, Artificial
  probe
  misc_feature (1)..(25): SEQ ID NO: 4241; WAN024DA8; Start 73; Stop 97
atcactaaccattctacaggtcact

SEQ ID NO: 377510 - DNA, 25 bp, Artificial
  probe
  misc_feature (1)..(25): SEQ ID NO: 4241; WAN024DA8; Start 70; Stop 94
tctatcactaaccattctacaggtc

SEQ ID NO: 377511 - DNA, 25 bp, Artificial
  probe
  misc_feature (1)..(25): SEQ ID NO: 4241; WAN024DA8; Start 69; Stop 93
ctctatcactaaccattctacaggt

SEQ ID NO: 377512 - DNA, 25 bp, Artificial
  probe
  misc_feature (1)..(25): SEQ ID NO: 4241; WAN024DA8; Start 75; Stop 99
cactaaccattctacaggtcacttg

SEQ ID NO: 377513 - DNA, 25 bp, Artificial
  probe
  misc_feature (1)..(25): SEQ ID NO: 4241; WAN024DA8; Start 74; Stop 98
tcactaaccattctacaggtcactt

SEQ ID NO: 377514 - DNA, 25 bp, Artificial
  probe
  misc_feature (1)..(25): SEQ ID NO: 4241; WAN024DA8; Start 180; Stop 204
gcctcatcctaacctaagtattcga

SEQ ID NO: 377515 - DNA, 25 bp, Artificial
  probe
  misc_feature (1)..(25): SEQ ID NO: 4241; WAN024DA8; Start 183; Stop 207
tcatcctaacctaagtattcgagaa

SEQ ID NO: 377516 - DNA, 25 bp, Artificial
  probe
  misc_feature (1)..(25): SEQ ID NO: 4241; WAN024DA8; Start 181; Stop 205
cctcatcctaacctaagtattcgag

SEQ ID NO: 377517 - DNA, 25 bp, Artificial
  probe
  misc_feature (1)..(25): SEQ ID NO: 4241; WAN024DA8; Start 182; Stop 206
ctcatcctaacctaagtattcgaga

SEQ ID NO: 377518 - DNA, 25 bp, Artificial
  probe
  misc_feature (1)..(25): SEQ ID NO: 4241; WAN024DA8; Start 237; Stop 261
aatgcaagaacgtgttcaggattat

SEQ ID NO: 377519 - DNA, 25 bp, Artificial
  probe
  misc_feature (1)..(25): SEQ ID NO: 4241; WAN024DA8; Start 383; Stop 407
agatttcttcaactgatgaggttca

SEQ ID NO: 377520 - DNA, 25 bp, Artificial
  probe
  misc_feature (1)..(25): SEQ ID NO: 4241; WAN024DA8; Start 304; Stop 328
gtttatatgacagggcttgaggaag

SEQ ID NO: 377521 - DNA, 25 bp, Artificial
  probe
  misc_feature (1)..(25): SEQ ID NO: 4241; WAN024DA8; Start 76; Stop 100
actaaccattctacaggtcacttgg

SEQ ID NO: 377522 - DNA, 25 bp, Artificial
  probe
  misc_feature (1)..(25): SEQ ID NO: 4241; WAN024DA8; Start 306; Stop 330
ttatatgacagggcttgaggaagtt

SEQ ID NO: 377523 - DNA, 25 bp, Artificial
  probe
  misc_feature (1)..(25): SEQ ID NO: 4241; WAN024DA8; Start 305; Stop 329
tttatatgacagggcttgaggaagt

SEQ ID NO: 377524 - DNA, 25 bp, Artificial
  probe
  misc_feature (1)..(25): SEQ ID NO: 4241; WAN024DA8; Start 504; Stop 528
taccgaagatcatctggttgacatt

SEQ ID NO: 377525 - DNA, 25 bp, Artificial
  probe
  misc_feature (1)..(25): SEQ ID NO: 4242; WAN024G4O; Start 281; Stop 305
atcttagtaccgttgatgtcacctg

SEQ ID NO: 377526 - DNA, 25 bp, Artificial
  probe
  misc_feature (1)..(25): SEQ ID NO: 4242; WAN024G4O; Start 14; Stop 38
atttctccgtatttcttatcagcga

SEQ ID NO: 377527 - DNA, 25 bp, Artificial
  probe
  misc_feature (1)..(25): SEQ ID NO: 4242; WAN024G4O; Start 15; Stop 39
tttctccgtatttcttatcagcgat

SEQ ID NO: 377528 - DNA, 25 bp, Artificial
  probe
  misc_feature (1)..(25): SEQ ID NO: 4242; WAN024G4O; Start 13; Stop 37
gatttctccgtatttcttatcagcg

SEQ ID NO: 377529 - DNA, 25 bp, Artificial
  probe
  misc_feature (1)..(25): SEQ ID NO: 4242; WAN024G4O; Start 16; Stop 40
ttctccgtatttcttatcagcgata

SEQ ID NO: 377530 - DNA, 25 bp, Artificial
  probe
  misc_feature (1)..(25): SEQ ID NO: 4242; WAN024G4O; Start 135; Stop 159
cttgttcttctgtcaaacctactgc

SEQ ID NO: 377531 - DNA, 25 bp, Artificial
  probe
  misc_feature (1)..(25): SEQ ID NO: 4242; WAN024G4O; Start 134; Stop 158
gcttgttcttctgtcaaacctactg

SEQ ID NO: 377532 - DNA, 25 bp, Artificial
  probe
  misc_feature (1)..(25): SEQ ID NO: 4242; WAN024G4O; Start 7; Stop 31
accaaggatttctccgtatttctta

SEQ ID NO: 377533 - DNA, 25 bp, Artificial
  probe
  misc_feature (1)..(25): SEQ ID NO: 4242; WAN024G4O; Start 12; Stop 36
ggatttctccgtatttcttatcagc

SEQ ID NO: 377534 - DNA, 25 bp, Artificial
  probe
  misc_feature (1)..(25): SEQ ID NO: 4242; WAN024G4O; Start 4; Stop 28
tacaccaaggatttctccgtatttc

SEQ ID NO: 377535 - DNA, 25 bp, Artificial
  probe
  misc_feature (1)..(25): SEQ ID NO: 4242; WAN024G4O; Start 6; Stop 30
caccaaggatttctccgtatttctt

SEQ ID NO: 377536 - DNA, 25 bp, Artificial
  probe
  misc_feature (1)..(25): SEQ ID NO: 4242; WAN024G4O; Start 136; Stop 160
ttgttcttctgtcaaacctactgct

SEQ ID NO: 377537 - DNA, 25 bp, Artificial
  probe
  misc_feature (1)..(25): SEQ ID NO: 4242; WAN024G4O; Start 8; Stop 32
ccaaggatttctccgtatttcttat

SEQ ID NO: 377538 - DNA, 25 bp, Artificial
  probe
  misc_feature (1)..(25): SEQ ID NO: 4242; WAN024G4O; Start 3; Stop 27
gtacaccaaggatttctccgtattt

SEQ ID NO: 377539 - DNA, 25 bp, Artificial
  probe
  misc_feature (1)..(25): SEQ ID NO: 4242; WAN024G4O; Start 282; Stop 306
tcttagtaccgttgatgtcacctgg

SEQ ID NO: 377540 - DNA, 25 bp, Artificial
  probe
  misc_feature (1)..(25): SEQ ID NO: 4242; WAN024G4O; Start 122; Stop 146
tatttctcacgggcttgttcttctg

SEQ ID NO: 377541 - DNA, 25 bp, Artificial
  probe
  misc_feature (1)..(25): SEQ ID NO: 4242; WAN024G4O; Start 121; Stop 145
gtatttctcacgggcttgttcttct

SEQ ID NO: 377542 - DNA, 25 bp, Artificial
  probe
  misc_feature (1)..(25): SEQ ID NO: 4242; WAN024G4O; Start 11; Stop 35
aggatttctccgtatttcttatcag

SEQ ID NO: 377543 - DNA, 25 bp, Artificial
  probe
  misc_feature (1)..(25): SEQ ID NO: 4242; WAN024G4O; Start 5; Stop 29
acaccaaggatttctccgtatttct

SEQ ID NO: 377544 - DNA, 25 bp, Artificial
  probe
  misc_feature (1)..(25): SEQ ID NO: 4242; WAN024G4O; Start 137; Stop 161
tgttcttctgtcaaacctactgctg

SEQ ID NO: 377545 - DNA, 25 bp, Artificial
  probe
  misc_feature (1)..(25): SEQ ID NO: 4242; WAN024G4O; Start 133; Stop 157
ggcttgttcttctgtcaaacctact

SEQ ID NO: 377546 - DNA, 25 bp, Artificial
  probe
  misc_feature (1)..(25): SEQ ID NO: 4242; WAN024G4O; Start 199; Stop 223
attcaatttggcaactgcatgattt

SEQ ID NO: 377547 - DNA, 25 bp, Artificial
  probe
  misc_feature (1)..(25): SEQ ID NO: 4242; WAN024G4O; Start 198; Stop 222
aattcaatttggcaactgcatgatt

SEQ ID NO: 377548 - DNA, 25 bp, Artificial
  probe
  misc_feature (1)..(25): SEQ ID NO: 4242; WAN024G4O; Start 280; Stop 304
catcttagtaccgttgatgtcacct

SEQ ID NO: 377549 - DNA, 25 bp, Artificial
  probe
  misc_feature (1)..(25): SEQ ID NO: 4242; WAN024G4O; Start 10; Stop 34
aaggatttctccgtatttcttatca

SEQ ID NO: 377550 - DNA, 25 bp, Artificial
  probe
  misc_feature (1)..(25): SEQ ID NO: 4242; WAN024G4O; Start 144; Stop 168
ctgtcaaacctactgctgctacttc

SEQ ID NO: 377551 - DNA, 25 bp, Artificial
  probe
  misc_feature (1)..(25): SEQ ID NO: 4242; WAN024G4O; Start 141; Stop 165
cttctgtcaaacctactgctgctac

SEQ ID NO: 377552 - DNA, 25 bp, Artificial
  probe
  misc_feature (1)..(25): SEQ ID NO: 4242; WAN024G4O; Start 206; Stop 230
ttggcaactgcatgatttcctttaa

SEQ ID NO: 377553 - DNA, 25 bp, Artificial
  probe
  misc_feature (1)..(25): SEQ ID NO: 4242; WAN024G4O; Start 205; Stop 229
tttggcaactgcatgatttccttta

SEQ ID NO: 377554 - DNA, 25 bp, Artificial
  probe
  misc_feature (1)..(25): SEQ ID NO: 4242; WAN024G4O; Start 197; Stop 221
aaattcaatttggcaactgcatgat

SEQ ID NO: 377555 - DNA, 25 bp, Artificial
  probe
  misc_feature (1)..(25): SEQ ID NO: 4242; WAN024G4O; Start 200; Stop 224
ttcaatttggcaactgcatgatttc

SEQ ID NO: 377556 - DNA, 25 bp, Artificial
  probe
  misc_feature (1)..(25): SEQ ID NO: 4242; WAN024G4O; Start 140; Stop 164
tcttctgtcaaacctactgctgcta

SEQ ID NO: 377557 - DNA, 25 bp, Artificial
  probe
  misc_feature (1)..(25): SEQ ID NO: 4242; WAN024G4O; Start 36; Stop 60
cgataacttttacgaaaccttgagc

SEQ ID NO: 377558 - DNA, 25 bp, Artificial
  probe
  misc_feature (1)..(25): SEQ ID NO: 4243; WAN024F43; Start 107; Stop 131
agcgtaacaatgaccaatacaagat

SEQ ID NO: 377559 - DNA, 25 bp, Artificial
  probe
  misc_feature (1)..(25): SEQ ID NO: 4243; WAN024F43; Start 104; Stop 128
atgagcgtaacaatgaccaatacaa

SEQ ID NO: 377560 - DNA, 25 bp, Artificial
  probe
  misc_feature (1)..(25): SEQ ID NO: 4243; WAN024F43; Start 103; Stop 127
aatgagcgtaacaatgaccaataca

SEQ ID NO: 377561 - DNA, 25 bp, Artificial
  probe
  misc_feature (1)..(25): SEQ ID NO: 4243; WAN024F43; Start 106; Stop 130
gagcgtaacaatgaccaatacaaga

SEQ ID NO: 377562 - DNA, 25 bp, Artificial
  probe
  misc_feature (1)..(25): SEQ ID NO: 4243; WAN024F43; Start 105; Stop 129
tgagcgtaacaatgaccaatacaag

SEQ ID NO: 377563 - DNA, 25 bp, Artificial
  probe
  misc_feature (1)..(25): SEQ ID NO: 4243; WAN024F43; Start 108; Stop 132
gcgtaacaatgaccaatacaagatc

SEQ ID NO: 377564 - DNA, 25 bp, Artificial
  probe
  misc_feature (1)..(25): SEQ ID NO: 4243; WAN024F43; Start 203; Stop 227
aagcccagtccaatataaatcagaa

SEQ ID NO: 377565 - DNA, 25 bp, Artificial
  probe
  misc_feature (1)..(25): SEQ ID NO: 4243; WAN024F43; Start 204; Stop 228
agcccagtccaatataaatcagaag

SEQ ID NO: 377566 - DNA, 25 bp, Artificial
  probe
  misc_feature (1)..(25): SEQ ID NO: 4243; WAN024F43; Start 102; Stop 126
aaatgagcgtaacaatgaccaatac

SEQ ID NO: 377567 - DNA, 25 bp, Artificial
  probe
  misc_feature (1)..(25): SEQ ID NO: 4243; WAN024F43; Start 200; Stop 224
aacaagcccagtccaatataaatca

SEQ ID NO: 377568 - DNA, 25 bp, Artificial
  probe
  misc_feature (1)..(25): SEQ ID NO: 4243; WAN024F43; Start 199; Stop 223
aaacaagcccagtccaatataaatc

SEQ ID NO: 377569 - DNA, 25 bp, Artificial
  probe
  misc_feature (1)..(25): SEQ ID NO: 4243; WAN024F43; Start 205; Stop 229
gcccagtccaatataaatcagaagt

SEQ ID NO: 377570 - DNA, 25 bp, Artificial
  probe
  misc_feature (1)..(25): SEQ ID NO: 4243; WAN024F43; Start 202; Stop 226
caagcccagtccaatataaatcaga

SEQ ID NO: 377571 - DNA, 25 bp, Artificial
  probe
  misc_feature (1)..(25): SEQ ID NO: 4243; WAN024F43; Start 206; Stop 230
cccagtccaatataaatcagaagtg

SEQ ID NO: 377572 - DNA, 25 bp, Artificial
  probe
  misc_feature (1)..(25): SEQ ID NO: 4243; WAN024F43; Start 201; Stop 225
acaagcccagtccaatataaatcag

SEQ ID NO: 377573 - DNA, 25 bp, Artificial
  probe
  misc_feature (1)..(25): SEQ ID NO: 4243; WAN024F43; Start 156; Stop 180
aaacttccttcttaaccgaatttgg

SEQ ID NO: 377574 - DNA, 25 bp, Artificial
  probe
  misc_feature (1)..(25): SEQ ID NO: 4243; WAN024F43; Start 166; Stop 190
cttaaccgaatttgggacaagatag

SEQ ID NO: 377575 - DNA, 25 bp, Artificial
  probe
  misc_feature (1)..(25): SEQ ID NO: 4243; WAN024F43; Start 155; Stop 179
gaaacttccttcttaaccgaatttg

SEQ ID NO: 377576 - DNA, 25 bp, Artificial
  probe
  misc_feature (1)..(25): SEQ ID NO: 4243; WAN024F43; Start 167; Stop 191
ttaaccgaatttgggacaagatagg

SEQ ID NO: 377577 - DNA, 25 bp, Artificial
  probe
  misc_feature (1)..(25): SEQ ID NO: 4243; WAN024F43; Start 157; Stop 181
aacttccttcttaaccgaatttggg

SEQ ID NO: 377578 - DNA, 25 bp, Artificial
  probe
  misc_feature (1)..(25): SEQ ID NO: 4243; WAN024F43; Start 207; Stop 231
ccagtccaatataaatcagaagtga

SEQ ID NO: 377579 - DNA, 25 bp, Artificial
  probe
  misc_feature (1)..(25): SEQ ID NO: 4243; WAN024F43; Start 109; Stop 133
cgtaacaatgaccaatacaagatct

SEQ ID NO: 377580 - DNA, 25 bp, Artificial
  probe
  misc_feature (1)..(25): SEQ ID NO: 4243; WAN024F43; Start 114; Stop 138
caatgaccaatacaagatctcggaa

SEQ ID NO: 377581 - DNA, 25 bp, Artificial
  probe
  misc_feature (1)..(25): SEQ ID NO: 4243; WAN024F43; Start 162; Stop 186
ccttcttaaccgaatttgggacaag

SEQ ID NO: 377582 - DNA, 25 bp, Artificial
  probe
  misc_feature (1)..(25): SEQ ID NO: 4243; WAN024F43; Start 111; Stop 135
taacaatgaccaatacaagatctcg

SEQ ID NO: 377583 - DNA, 25 bp, Artificial
  probe
  misc_feature (1)..(25): SEQ ID NO: 4243; WAN024F43; Start 112; Stop 136
aacaatgaccaatacaagatctcgg

SEQ ID NO: 377584 - DNA, 25 bp, Artificial
  probe
  misc_feature (1)..(25): SEQ ID NO: 4243; WAN024F43; Start 113; Stop 137
acaatgaccaatacaagatctcgga

SEQ ID NO: 377585 - DNA, 25 bp, Artificial
  probe
  misc_feature (1)..(25): SEQ ID NO: 4243; WAN024F43; Start 154; Stop 178
ggaaacttccttcttaaccgaattt

SEQ ID NO: 377586 - DNA, 25 bp, Artificial
  probe
  misc_feature (1)..(25): SEQ ID NO: 4243; WAN024F43; Start 159; Stop 183
cttccttcttaaccgaatttgggac

SEQ ID NO: 377587 - DNA, 25 bp, Artificial
  probe
  misc_feature (1)..(25): SEQ ID NO: 4243; WAN024F43; Start 168; Stop 192
taaccgaatttgggacaagataggc

SEQ ID NO: 377588 - DNA, 25 bp, Artificial
  probe
  misc_feature (1)..(25): SEQ ID NO: 4243; WAN024F43; Start 110; Stop 134
gtaacaatgaccaatacaagatctc

SEQ ID NO: 377589 - DNA, 25 bp, Artificial
  probe
  misc_feature (1)..(25): SEQ ID NO: 4243; WAN024F43; Start 165; Stop 189
tcttaaccgaatttgggacaagata

SEQ ID NO: 377590 - DNA, 25 bp, Artificial
  probe
  misc_feature (1)..(25): SEQ ID NO: 4243; WAN024F43; Start 158; Stop 182
acttccttcttaaccgaatttggga

SEQ ID NO: 377591 - DNA, 25 bp, Artificial
  probe
  misc_feature (1)..(25): SEQ ID NO: 4244; WAN024G4C; Start 164; Stop 188
ggacatcattgggtttcttattacg

SEQ ID NO: 377592 - DNA, 25 bp, Artificial
  probe
  misc_feature (1)..(25): SEQ ID NO: 4244; WAN024G4C; Start 178; Stop 202
ttcttattacgatggagcatgagca

SEQ ID NO: 377593 - DNA, 25 bp, Artificial
  probe
  misc_feature (1)..(25): SEQ ID NO: 4244; WAN024G4C; Start 165; Stop 189
gacatcattgggtttcttattacga

SEQ ID NO: 377594 - DNA, 25 bp, Artificial
  probe
  misc_feature (1)..(25): SEQ ID NO: 4244; WAN024G4C; Start 169; Stop 193
tcattgggtttcttattacgatgga

SEQ ID NO: 377595 - DNA, 25 bp, Artificial
  probe
  misc_feature (1)..(25): SEQ ID NO: 4244; WAN024G4C; Start 170; Stop 194
cattgggtttcttattacgatggag

SEQ ID NO: 377596 - DNA, 25 bp, Artificial
  probe
  misc_feature (1)..(25): SEQ ID NO: 4244; WAN024G4C; Start 163; Stop 187
tggacatcattgggtttcttattac

SEQ ID NO: 377597 - DNA, 25 bp, Artificial
  probe
  misc_feature (1)..(25): SEQ ID NO: 4244; WAN024G4C; Start 171; Stop 195
attgggtttcttattacgatggagc

SEQ ID NO: 377598 - DNA, 25 bp, Artificial
  probe
  misc_feature (1)..(25): SEQ ID NO: 4244; WAN024G4C; Start 168; Stop 192
atcattgggtttcttattacgatgg

SEQ ID NO: 377599 - DNA, 25 bp, Artificial
  probe
  misc_feature (1)..(25): SEQ ID NO: 4244; WAN024G4C; Start 181; Stop 205
ttattacgatggagcatgagcagtt

SEQ ID NO: 377600 - DNA, 25 bp, Artificial
  probe
  misc_feature (1)..(25): SEQ ID NO: 4244; WAN024G4C; Start 166; Stop 190
acatcattgggtttcttattacgat

SEQ ID NO: 377601 - DNA, 25 bp, Artificial
  probe
  misc_feature (1)..(25): SEQ ID NO: 4244; WAN024G4C; Start 197; Stop 221
tgagcagttctttcccattatcaat

SEQ ID NO: 377602 - DNA, 25 bp, Artificial
  probe
  misc_feature (1)..(25): SEQ ID NO: 4244; WAN024G4C; Start 196; Stop 220
atgagcagttctttcccattatcaa

SEQ ID NO: 377603 - DNA, 25 bp, Artificial
  probe
  misc_feature (1)..(25): SEQ ID NO: 4244; WAN024G4C; Start 179; Stop 203
tcttattacgatggagcatgagcag

SEQ ID NO: 377604 - DNA, 25 bp, Artificial
  probe
  misc_feature (1)..(25): SEQ ID NO: 4244; WAN024G4C; Start 182; Stop 206
tattacgatggagcatgagcagttc

SEQ ID NO: 377605 - DNA, 25 bp, Artificial
  probe
  misc_feature (1)..(25): SEQ ID NO: 4244; WAN024G4C; Start 180; Stop 204
cttattacgatggagcatgagcagt

SEQ ID NO: 377606 - DNA, 25 bp, Artificial
  probe
  misc_feature (1)..(25): SEQ ID NO: 4244; WAN024G4C; Start 176; Stop 200
gtttcttattacgatggagcatgag

SEQ ID NO: 377607 - DNA, 25 bp, Artificial
  probe
  misc_feature (1)..(25): SEQ ID NO: 4244; WAN024G4C; Start 162; Stop 186
atggacatcattgggtttcttatta

SEQ ID NO: 377608 - DNA, 25 bp, Artificial
  probe
  misc_feature (1)..(25): SEQ ID NO: 4244; WAN024G4C; Start 160; Stop 184
tcatggacatcattgggtttcttat

SEQ ID NO: 377609 - DNA, 25 bp, Artificial
  probe
  misc_feature (1)..(25): SEQ ID NO: 4244; WAN024G4C; Start 161; Stop 185
catggacatcattgggtttcttatt

SEQ ID NO: 377610 - DNA, 25 bp, Artificial
  probe
  misc_feature (1)..(25): SEQ ID NO: 4244; WAN024G4C; Start 159; Stop 183
ttcatggacatcattgggtttctta

SEQ ID NO: 377611 - DNA, 25 bp, Artificial
  probe
  misc_feature (1)..(25): SEQ ID NO: 4244; WAN024G4C; Start 172; Stop 196
ttgggtttcttattacgatggagca

SEQ ID NO: 377612 - DNA, 25 bp, Artificial
  probe
  misc_feature (1)..(25): SEQ ID NO: 4244; WAN024G4C; Start 175; Stop 199
ggtttcttattacgatggagcatga

SEQ ID NO: 377613 - DNA, 25 bp, Artificial
  probe
  misc_feature (1)..(25): SEQ ID NO: 4244; WAN024G4C; Start 173; Stop 197
tgggtttcttattacgatggagcat

SEQ ID NO: 377614 - DNA, 25 bp, Artificial
  probe
  misc_feature (1)..(25): SEQ ID NO: 4244; WAN024G4C; Start 177; Stop 201
tttcttattacgatggagcatgagc

SEQ ID NO: 377615 - DNA, 25 bp, Artificial
  probe
  misc_feature (1)..(25): SEQ ID NO: 4244; WAN024G4C; Start 195; Stop 219
catgagcagttctttcccattatca

SEQ ID NO: 377616 - DNA, 25 bp, Artificial
  probe
  misc_feature (1)..(25): SEQ ID NO: 4244; WAN024G4C; Start 158; Stop 182
cttcatggacatcattgggtttctt

SEQ ID NO: 377617 - DNA, 25 bp, Artificial
  probe
  misc_feature (1)..(25): SEQ ID NO: 4244; WAN024G4C; Start 115; Stop 139
gtctctcctctctctagcttaccac

SEQ ID NO: 377618 - DNA, 25 bp, Artificial
  probe
  misc_feature (1)..(25): SEQ ID NO: 4244; WAN024G4C; Start 9; Stop 33
gtctaaatctggtgtaaattcagga

SEQ ID NO: 377619 - DNA, 25 bp, Artificial
  probe
  misc_feature (1)..(25): SEQ ID NO: 4244; WAN024G4C; Start 8; Stop 32
agtctaaatctggtgtaaattcagg

SEQ ID NO: 377620 - DNA, 25 bp, Artificial
  probe
  misc_feature (1)..(25): SEQ ID NO: 4244; WAN024G4C; Start 174; Stop 198
gggtttcttattacgatggagcatg

SEQ ID NO: 377621 - DNA, 25 bp, Artificial
  probe
  misc_feature (1)..(25): SEQ ID NO: 4244; WAN024G4C; Start 10; Stop 34
tctaaatctggtgtaaattcaggaa

SEQ ID NO: 377622 - DNA, 25 bp, Artificial
  probe
  misc_feature (1)..(25): SEQ ID NO: 4244; WAN024G4C; Start 198; Stop 222
gagcagttctttcccattatcaatg

SEQ ID NO: 377623 - DNA, 25 bp, Artificial
  probe
  misc_feature (1)..(25): SEQ ID NO: 4244; WAN024G4C; Start 194; Stop 218
gcatgagcagttctttcccattatc

SEQ ID NO: 377624 - DNA, 25 bp, Artificial
  probe
  misc_feature (1)..(25): SEQ ID NO: 4245; WAN024EVC; Start 16; Stop 40
catctcttcatcaatgtctctggtc

SEQ ID NO: 377625 - DNA, 25 bp, Artificial
  probe
  misc_feature (1)..(25): SEQ ID NO: 4245; WAN024EVC; Start 17; Stop 41
atctcttcatcaatgtctctggtcg

SEQ ID NO: 377626 - DNA, 25 bp, Artificial
  probe
  misc_feature (1)..(25): SEQ ID NO: 4245; WAN024EVC; Start 19; Stop 43
ctcttcatcaatgtctctggtcgtg

SEQ ID NO: 377627 - DNA, 25 bp, Artificial
  probe
  misc_feature (1)..(25): SEQ ID NO: 4245; WAN024EVC; Start 18; Stop 42
tctcttcatcaatgtctctggtcgt

SEQ ID NO: 377628 - DNA, 25 bp, Artificial
  probe
  misc_feature (1)..(25): SEQ ID NO: 4245; WAN024EVC; Start 12; Stop 36
tgaacatctcttcatcaatgtctct

SEQ ID NO: 377629 - DNA, 25 bp, Artificial
  probe
  misc_feature (1)..(25): SEQ ID NO: 4245; WAN024EVC; Start 13; Stop 37
gaacatctcttcatcaatgtctctg

SEQ ID NO: 377630 - DNA, 25 bp, Artificial
  probe
  misc_feature (1)..(25): SEQ ID NO: 4245; WAN024EVC; Start 14; Stop 38
aacatctcttcatcaatgtctctgg

SEQ ID NO: 377631 - DNA, 25 bp, Artificial
  probe
  misc_feature (1)..(25): SEQ ID NO: 4245; WAN024EVC; Start 15; Stop 39
acatctcttcatcaatgtctctggt

SEQ ID NO: 377632 - DNA, 25 bp, Artificial
  probe
  misc_feature (1)..(25): SEQ ID NO: 4245; WAN024EVC; Start 21; Stop 45
cttcatcaatgtctctggtcgtgga

SEQ ID NO: 377633 - DNA, 25 bp, Artificial
  probe
  misc_feature (1)..(25): SEQ ID NO: 4245; WAN024EVC; Start 20; Stop 44
tcttcatcaatgtctctggtcgtgg

SEQ ID NO: 377634 - DNA, 25 bp, Artificial
  probe
  misc_feature (1)..(25): SEQ ID NO: 4245; WAN024EVC; Start 22; Stop 46
ttcatcaatgtctctggtcgtggag

SEQ ID NO: 377635 - DNA, 25 bp, Artificial
  probe
  misc_feature (1)..(25): SEQ ID NO: 4245; WAN024EVC; Start 11; Stop 35
atgaacatctcttcatcaatgtctc

SEQ ID NO: 377636 - DNA, 25 bp, Artificial
  probe
  misc_feature (1)..(25): SEQ ID NO: 4246; WAN024F82; Start 79; Stop 103
aagttggagtatatgatgctaggtg

SEQ ID NO: 377637 - DNA, 25 bp, Artificial
  probe
  misc_feature (1)..(25): SEQ ID NO: 4246; WAN024F82; Start 80; Stop 104
agttggagtatatgatgctaggtga

SEQ ID NO: 377638 - DNA, 25 bp, Artificial
  probe
  misc_feature (1)..(25): SEQ ID NO: 4246; WAN024F82; Start 81; Stop 105
gttggagtatatgatgctaggtgac

SEQ ID NO: 377639 - DNA, 25 bp, Artificial
  probe
  misc_feature (1)..(25): SEQ ID NO: 4246; WAN024F82; Start 82; Stop 106
ttggagtatatgatgctaggtgact

SEQ ID NO: 377640 - DNA, 25 bp, Artificial
  probe
  misc_feature (1)..(25): SEQ ID NO: 4246; WAN024F82; Start 272; Stop 296
ggataggttcgttggatgagagatt

SEQ ID NO: 377641 - DNA, 25 bp, Artificial
  probe
  misc_feature (1)..(25): SEQ ID NO: 4246; WAN024F82; Start 83; Stop 107
tggagtatatgatgctaggtgactg

SEQ ID NO: 377642 - DNA, 25 bp, Artificial
  probe
  misc_feature (1)..(25): SEQ ID NO: 4246; WAN024F82; Start 268; Stop 292
tactggataggttcgttggatgaga

SEQ ID NO: 377643 - DNA, 25 bp, Artificial
  probe
  misc_feature (1)..(25): SEQ ID NO: 4246; WAN024F82; Start 271; Stop 295
tggataggttcgttggatgagagat

SEQ ID NO: 377644 - DNA, 25 bp, Artificial
  probe
  misc_feature (1)..(25): SEQ ID NO: 4246; WAN024F82; Start 273; Stop 297
gataggttcgttggatgagagattt

SEQ ID NO: 377645 - DNA, 25 bp, Artificial
  probe
  misc_feature (1)..(25): SEQ ID NO: 4246; WAN024F82; Start 267; Stop 291
gtactggataggttcgttggatgag

SEQ ID NO: 377646 - DNA, 25 bp, Artificial
  probe
  misc_feature (1)..(25): SEQ ID NO: 4246; WAN024F82; Start 84; Stop 108
ggagtatatgatgctaggtgactgc

SEQ ID NO: 377647 - DNA, 25 bp, Artificial
  probe
  misc_feature (1)..(25): SEQ ID NO: 4246; WAN024F82; Start 29; Stop 53
attatcgcttaccaacatttgcttt

SEQ ID NO: 377648 - DNA, 25 bp, Artificial
  probe
  misc_feature (1)..(25): SEQ ID NO: 4246; WAN024F82; Start 78; Stop 102
aaagttggagtatatgatgctaggt

SEQ ID NO: 377649 - DNA, 25 bp, Artificial
  probe
  misc_feature (1)..(25): SEQ ID NO: 4246; WAN024F82; Start 28; Stop 52
tattatcgcttaccaacatttgctt

SEQ ID NO: 377650 - DNA, 25 bp, Artificial
  probe
  misc_feature (1)..(25): SEQ ID NO: 4246; WAN024F82; Start 85; Stop 109
gagtatatgatgctaggtgactgcg

SEQ ID NO: 377651 - DNA, 25 bp, Artificial
  probe
  misc_feature (1)..(25): SEQ ID NO: 4246; WAN024F82; Start 27; Stop 51
atattatcgcttaccaacatttgct

SEQ ID NO: 377652 - DNA, 25 bp, Artificial
  probe
  misc_feature (1)..(25): SEQ ID NO: 4246; WAN024F82; Start 431; Stop 455
cttctgctattgatccaatctatgg

SEQ ID NO: 377653 - DNA, 25 bp, Artificial
  probe
  misc_feature (1)..(25): SEQ ID NO: 4246; WAN024F82; Start 270; Stop 294
ctggataggttcgttggatgagaga

SEQ ID NO: 377654 - DNA, 25 bp, Artificial
  probe
  misc_feature (1)..(25): SEQ ID NO: 4246; WAN024F82; Start 427; Stop 451
aattcttctgctattgatccaatct

SEQ ID NO: 377655 - DNA, 25 bp, Artificial
  probe
  misc_feature (1)..(25): SEQ ID NO: 4246; WAN024F82; Start 430; Stop 454
tcttctgctattgatccaatctatg

SEQ ID NO: 377656 - DNA, 25 bp, Artificial
  probe
  misc_feature (1)..(25): SEQ ID NO: 4246; WAN024F82; Start 269; Stop 293
actggataggttcgttggatgagag

SEQ ID NO: 377657 - DNA, 25 bp, Artificial
  probe
  misc_feature (1)..(25): SEQ ID NO: 4246; WAN024F82; Start 87; Stop 111
gtatatgatgctaggtgactgcgtc

SEQ ID NO: 377658 - DNA, 25 bp, Artificial
  probe
  misc_feature (1)..(25): SEQ ID NO: 4246; WAN024F82; Start 86; Stop 110
agtatatgatgctaggtgactgcgt

SEQ ID NO: 377659 - DNA, 25 bp, Artificial
  probe
  misc_feature (1)..(25): SEQ ID NO: 4246; WAN024F82; Start 26; Stop 50
tatattatcgcttaccaacatttgc

SEQ ID NO: 377660 - DNA, 25 bp, Artificial
  probe
  misc_feature (1)..(25): SEQ ID NO: 4246; WAN024F82; Start 244; Stop 268
aaattatctaatcaaccgagtgggt

SEQ ID NO: 377661 - DNA, 25 bp, Artificial
  probe
  misc_feature (1)..(25): SEQ ID NO: 4246; WAN024F82; Start 245; Stop 269
aattatctaatcaaccgagtgggta

SEQ ID NO: 377662 - DNA, 25 bp, Artificial
  probe
  misc_feature (1)..(25): SEQ ID NO: 4246; WAN024F82; Start 429; Stop 453
ttcttctgctattgatccaatctat

SEQ ID NO: 377663 - DNA, 25 bp, Artificial
  probe
  misc_feature (1)..(25): SEQ ID NO: 4246; WAN024F82; Start 428; Stop 452
attcttctgctattgatccaatcta

SEQ ID NO: 377664 - DNA, 25 bp, Artificial
  probe
  misc_feature (1)..(25): SEQ ID NO: 4246; WAN024F82; Start 266; Stop 290
ggtactggataggttcgttggatga

SEQ ID NO: 377665 - DNA, 25 bp, Artificial
  probe
  misc_feature (1)..(25): SEQ ID NO: 4246; WAN024F82; Start 246; Stop 270
attatctaatcaaccgagtgggtac

SEQ ID NO: 377666 - DNA, 25 bp, Artificial
  probe
  misc_feature (1)..(25): SEQ ID NO: 4246; WAN024F82; Start 109; Stop 133
gtcatgttagtaaacgaaatggaaa

SEQ ID NO: 377667 - DNA, 25 bp, Artificial
  probe
  misc_feature (1)..(25): SEQ ID NO: 4246; WAN024F82; Start 247; Stop 271
ttatctaatcaaccgagtgggtact

SEQ ID NO: 377668 - DNA, 25 bp, Artificial
  probe
  misc_feature (1)..(25): SEQ ID NO: 4246; WAN024F82; Start 248; Stop 272
tatctaatcaaccgagtgggtactg

SEQ ID NO: 377669 - DNA, 25 bp, Artificial
  probe
  misc_feature (1)..(25): SEQ ID NO: 4247; WAN024GII; Start 254; Stop 278
atagggagatgattgaggatgagat

SEQ ID NO: 377670 - DNA, 25 bp, Artificial
  probe
  misc_feature (1)..(25): SEQ ID NO: 4247; WAN024GII; Start 255; Stop 279
tagggagatgattgaggatgagatt

SEQ ID NO: 377671 - DNA, 25 bp, Artificial
  probe
  misc_feature (1)..(25): SEQ ID NO: 4247; WAN024GII; Start 235; Stop 259
attgacaaaggtaatctccataggg

SEQ ID NO: 377672 - DNA, 25 bp, Artificial
  probe
  misc_feature (1)..(25): SEQ ID NO: 4247; WAN024GII; Start 258; Stop 282
ggagatgattgaggatgagattggc

SEQ ID NO: 377673 - DNA, 25 bp, Artificial
  probe
  misc_feature (1)..(25): SEQ ID NO: 4247; WAN024GII; Start 253; Stop 277
catagggagatgattgaggatgaga

SEQ ID NO: 377674 - DNA, 25 bp, Artificial
  probe
  misc_feature (1)..(25): SEQ ID NO: 4247; WAN024GII; Start 256; Stop 280
agggagatgattgaggatgagattg

SEQ ID NO: 377675 - DNA, 25 bp, Artificial
  probe
  misc_feature (1)..(25): SEQ ID NO: 4247; WAN024GII; Start 252; Stop 276
ccatagggagatgattgaggatgag

SEQ ID NO: 377676 - DNA, 25 bp, Artificial
  probe
  misc_feature (1)..(25): SEQ ID NO: 4247; WAN024GII; Start 234; Stop 258
tattgacaaaggtaatctccatagg

SEQ ID NO: 377677 - DNA, 25 bp, Artificial
  probe
  misc_feature (1)..(25): SEQ ID NO: 4247; WAN024GII; Start 257; Stop 281
gggagatgattgaggatgagattgg

SEQ ID NO: 377678 - DNA, 25 bp, Artificial
  probe
  misc_feature (1)..(25): SEQ ID NO: 4247; WAN024GII; Start 236; Stop 260
ttgacaaaggtaatctccataggga

SEQ ID NO: 377679 - DNA, 25 bp, Artificial
  probe
  misc_feature (1)..(25): SEQ ID NO: 4247; WAN024GII; Start 251; Stop 275
tccatagggagatgattgaggatga

SEQ ID NO: 377680 - DNA, 25 bp, Artificial
  probe
  misc_feature (1)..(25): SEQ ID NO: 4247; WAN024GII; Start 195; Stop 219
ctggcgtattgtcattgtaatactg

SEQ ID NO: 377681 - DNA, 25 bp, Artificial
  probe
  misc_feature (1)..(25): SEQ ID NO: 4247; WAN024GII; Start 198; Stop 222
gcgtattgtcattgtaatactggaa

SEQ ID NO: 377682 - DNA, 25 bp, Artificial
  probe
  misc_feature (1)..(25): SEQ ID NO: 4247; WAN024GII; Start 197; Stop 221
ggcgtattgtcattgtaatactgga

SEQ ID NO: 377683 - DNA, 25 bp, Artificial
  probe
  misc_feature (1)..(25): SEQ ID NO: 4247; WAN024GII; Start 9; Stop 33
cagcataggtgatgtggacaaactt

SEQ ID NO: 377684 - DNA, 25 bp, Artificial
  probe
  misc_feature (1)..(25): SEQ ID NO: 4247; WAN024GII; Start 196; Stop 220
tggcgtattgtcattgtaatactgg

SEQ ID NO: 377685 - DNA, 25 bp, Artificial
  probe
  misc_feature (1)..(25): SEQ ID NO: 4247; WAN024GII; Start 44; Stop 68
tcagacttgaaccacatttcatact

SEQ ID NO: 377686 - DNA, 25 bp, Artificial
  probe
  misc_feature (1)..(25): SEQ ID NO: 4247; WAN024GII; Start 43; Stop 67
ctcagacttgaaccacatttcatac

SEQ ID NO: 377687 - DNA, 25 bp, Artificial
  probe
  misc_feature (1)..(25): SEQ ID NO: 4247; WAN024GII; Start 42; Stop 66
actcagacttgaaccacatttcata

SEQ ID NO: 377688 - DNA, 25 bp, Artificial
  probe
  misc_feature (1)..(25): SEQ ID NO: 4247; WAN024GII; Start 48; Stop 72
acttgaaccacatttcatacttgtc

SEQ ID NO: 377689 - DNA, 25 bp, Artificial
  probe
  misc_feature (1)..(25): SEQ ID NO: 4247; WAN024GII; Start 47; Stop 71
gacttgaaccacatttcatacttgt

SEQ ID NO: 377690 - DNA, 25 bp, Artificial
  probe
  misc_feature (1)..(25): SEQ ID NO: 4247; WAN024GII; Start 194; Stop 218
gctggcgtattgtcattgtaatact

SEQ ID NO: 377691 - DNA, 25 bp, Artificial
  probe
  misc_feature (1)..(25): SEQ ID NO: 4247; WAN024GII; Start 46; Stop 70
agacttgaaccacatttcatacttg

SEQ ID NO: 377692 - DNA, 25 bp, Artificial
  probe
  misc_feature (1)..(25): SEQ ID NO: 4247; WAN024GII; Start 45; Stop 69
cagacttgaaccacatttcatactt

SEQ ID NO: 377693 - DNA, 25 bp, Artificial
  probe
  misc_feature (1)..(25): SEQ ID NO: 4247; WAN024GII; Start 233; Stop 257
ttattgacaaaggtaatctccatag

SEQ ID NO: 377694 - DNA, 25 bp, Artificial
  probe
  misc_feature (1)..(25): SEQ ID NO: 4247; WAN024GII; Start 230; Stop 254
tctttattgacaaaggtaatctcca

SEQ ID NO: 377695 - DNA, 25 bp, Artificial
  probe
  misc_feature (1)..(25): SEQ ID NO: 4247; WAN024GII; Start 259; Stop 283
gagatgattgaggatgagattggcc

SEQ ID NO: 377696 - DNA, 25 bp, Artificial
  probe
  misc_feature (1)..(25): SEQ ID NO: 4247; WAN024GII; Start 41; Stop 65
gactcagacttgaaccacatttcat

SEQ ID NO: 377697 - DNA, 25 bp, Artificial
  probe
  misc_feature (1)..(25): SEQ ID NO: 4247; WAN024GII; Start 193; Stop 217
agctggcgtattgtcattgtaatac

SEQ ID NO: 377698 - DNA, 25 bp, Artificial
  probe
  misc_feature (1)..(25): SEQ ID NO: 4247; WAN024GII; Start 232; Stop 256
tttattgacaaaggtaatctccata

SEQ ID NO: 377699 - DNA, 25 bp, Artificial
  probe
  misc_feature (1)..(25): SEQ ID NO: 4247; WAN024GII; Start 231; Stop 255
ctttattgacaaaggtaatctccat

SEQ ID NO: 377700 - DNA, 25 bp, Artificial
  probe
  misc_feature (1)..(25): SEQ ID NO: 4247; WAN024GII; Start 229; Stop 253
ttctttattgacaaaggtaatctcc

SEQ ID NO: 377701 - DNA, 25 bp, Artificial
  probe
  misc_feature (1)..(25): SEQ ID NO: 4247; WAN024GII; Start 261; Stop 285
gatgattgaggatgagattggcctg

SEQ ID NO: 377702 - DNA, 25 bp, Artificial
  probe
  misc_feature (1)..(25): SEQ ID NO: 4248; WAN024BFZ; Start 95; Stop 119
tctatgaacttagaaaacaaggata

SEQ ID NO: 377703 - DNA, 25 bp, Artificial
  probe
  misc_feature (1)..(25): SEQ ID NO: 4249; WAN024FEF; Start 49; Stop 73
gtcctttactcaacattccgaaatc

SEQ ID NO: 377704 - DNA, 25 bp, Artificial
  probe
  misc_feature (1)..(25): SEQ ID NO: 4249; WAN024FEF; Start 51; Stop 75
cctttactcaacattccgaaatcat

SEQ ID NO: 377705 - DNA, 25 bp, Artificial
  probe
  misc_feature (1)..(25): SEQ ID NO: 4249; WAN024FEF; Start 50; Stop 74
tcctttactcaacattccgaaatca

SEQ ID NO: 377706 - DNA, 25 bp, Artificial
  probe
  misc_feature (1)..(25): SEQ ID NO: 4249; WAN024FEF; Start 48; Stop 72
agtcctttactcaacattccgaaat

SEQ ID NO: 377707 - DNA, 25 bp, Artificial
  probe
  misc_feature (1)..(25): SEQ ID NO: 4249; WAN024FEF; Start 52; Stop 76
ctttactcaacattccgaaatcatt

SEQ ID NO: 377708 - DNA, 25 bp, Artificial
  probe
  misc_feature (1)..(25): SEQ ID NO: 4249; WAN024FEF; Start 92; Stop 116
agaaggtaaatgatgaatttgagcc

SEQ ID NO: 377709 - DNA, 25 bp, Artificial
  probe
  misc_feature (1)..(25): SEQ ID NO: 4249; WAN024FEF; Start 47; Stop 71
cagtcctttactcaacattccgaaa

SEQ ID NO: 377710 - DNA, 25 bp, Artificial
  probe
  misc_feature (1)..(25): SEQ ID NO: 4249; WAN024FEF; Start 96; Stop 120
ggtaaatgatgaatttgagcctttg

SEQ ID NO: 377711 - DNA, 25 bp, Artificial
  probe
  misc_feature (1)..(25): SEQ ID NO: 4249; WAN024FEF; Start 99; Stop 123
aaatgatgaatttgagcctttgacg

SEQ ID NO: 377712 - DNA, 25 bp, Artificial
  probe
  misc_feature (1)..(25): SEQ ID NO: 4249; WAN024FEF; Start 80; Stop 104
aggactacatgaagaaggtaaatga

SEQ ID NO: 377713 - DNA, 25 bp, Artificial
  probe
  misc_feature (1)..(25): SEQ ID NO: 4249; WAN024FEF; Start 93; Stop 117
gaaggtaaatgatgaatttgagcct

SEQ ID NO: 377714 - DNA, 25 bp, Artificial
  probe
  misc_feature (1)..(25): SEQ ID NO: 4249; WAN024FEF; Start 43; Stop 67
gaagcagtcctttactcaacattcc

SEQ ID NO: 377715 - DNA, 25 bp, Artificial
  probe
  misc_feature (1)..(25): SEQ ID NO: 4249; WAN024FEF; Start 95; Stop 119
aggtaaatgatgaatttgagccttt

SEQ ID NO: 377716 - DNA, 25 bp, Artificial
  probe
  misc_feature (1)..(25): SEQ ID NO: 4249; WAN024FEF; Start 100; Stop 124
aatgatgaatttgagcctttgacgg

SEQ ID NO: 377717 - DNA, 25 bp, Artificial
  probe
  misc_feature (1)..(25): SEQ ID NO: 4249; WAN024FEF; Start 33; Stop 57
tatggttatggaagcagtcctttac

SEQ ID NO: 377718 - DNA, 25 bp, Artificial
  probe
  misc_feature (1)..(25): SEQ ID NO: 4249; WAN024FEF; Start 32; Stop 56
gtatggttatggaagcagtccttta

SEQ ID NO: 377719 - DNA, 25 bp, Artificial
  probe
  misc_feature (1)..(25): SEQ ID NO: 4249; WAN024FEF; Start 98; Stop 122
taaatgatgaatttgagcctttgac

SEQ ID NO: 377720 - DNA, 25 bp, Artificial
  probe
  misc_feature (1)..(25): SEQ ID NO: 4249; WAN024FEF; Start 97; Stop 121
gtaaatgatgaatttgagcctttga

SEQ ID NO: 377721 - DNA, 25 bp, Artificial
  probe
  misc_feature (1)..(25): SEQ ID NO: 4249; WAN024FEF; Start 53; Stop 77
tttactcaacattccgaaatcattt

SEQ ID NO: 377722 - DNA, 25 bp, Artificial
  probe
  misc_feature (1)..(25): SEQ ID NO: 4249; WAN024FEF; Start 79; Stop 103
aaggactacatgaagaaggtaaatg

SEQ ID NO: 377723 - DNA, 25 bp, Artificial
  probe
  misc_feature (1)..(25): SEQ ID NO: 4249; WAN024FEF; Start 38; Stop 62
ttatggaagcagtcctttactcaac

SEQ ID NO: 377724 - DNA, 25 bp, Artificial
  probe
  misc_feature (1)..(25): SEQ ID NO: 4249; WAN024FEF; Start 37; Stop 61
gttatggaagcagtcctttactcaa

SEQ ID NO: 377725 - DNA, 25 bp, Artificial
  probe
  misc_feature (1)..(25): SEQ ID NO: 4249; WAN024FEF; Start 81; Stop 105
ggactacatgaagaaggtaaatgat

SEQ ID NO: 377726 - DNA, 25 bp, Artificial
  probe
  misc_feature (1)..(25): SEQ ID NO: 4249; WAN024FEF; Start 91; Stop 115
aagaaggtaaatgatgaatttgagc

SEQ ID NO: 377727 - DNA, 25 bp, Artificial
  probe
  misc_feature (1)..(25): SEQ ID NO: 4249; WAN024FEF; Start 26; Stop 50
aacgaggtatggttatggaagcagt

SEQ ID NO: 377728 - DNA, 25 bp, Artificial
  probe
  misc_feature (1)..(25): SEQ ID NO: 4249; WAN024FEF; Start 30; Stop 54
aggtatggttatggaagcagtcctt

SEQ ID NO: 377729 - DNA, 25 bp, Artificial
  probe
  misc_feature (1)..(25): SEQ ID NO: 4249; WAN024FEF; Start 78; Stop 102
aaaggactacatgaagaaggtaaat

SEQ ID NO: 377730 - DNA, 25 bp, Artificial
  probe
  misc_feature (1)..(25): SEQ ID NO: 4249; WAN024FEF; Start 58; Stop 82
tcaacattccgaaatcatttaaagg

SEQ ID NO: 377731 - DNA, 25 bp, Artificial
  probe
  misc_feature (1)..(25): SEQ ID NO: 4249; WAN024FEF; Start 39; Stop 63
tatggaagcagtcctttactcaaca

SEQ ID NO: 377732 - DNA, 25 bp, Artificial
  probe
  misc_feature (1)..(25): SEQ ID NO: 4249; WAN024FEF; Start 34; Stop 58
atggttatggaagcagtcctttact

SEQ ID NO: 377733 - DNA, 25 bp, Artificial
  probe
  misc_feature (1)..(25): SEQ ID NO: 4249; WAN024FEF; Start 27; Stop 51
acgaggtatggttatggaagcagtc

SEQ ID NO: 377734 - DNA, 25 bp, Artificial
  probe
  misc_feature (1)..(25): SEQ ID NO: 4249; WAN024FEF; Start 42; Stop 66
ggaagcagtcctttactcaacattc

SEQ ID NO: 377735 - DNA, 25 bp, Artificial
  probe
  misc_feature (1)..(25): SEQ ID NO: 4249; WAN024FEF; Start 25; Stop 49
aaacgaggtatggttatggaagcag

SEQ ID NO: 377736 - DNA, 25 bp, Artificial
  probe
  misc_feature (1)..(25): SEQ ID NO: 4250; WAN024B6D; Start 1131; Stop 1155
gagagattatagtggagaattgcga

SEQ ID NO: 377737 - DNA, 25 bp, Artificial
  probe
  misc_feature (1)..(25): SEQ ID NO: 4250; WAN024B6D; Start 1130; Stop 1154
tgagagattatagtggagaattgcg

SEQ ID NO: 377738 - DNA, 25 bp, Artificial
  probe
  misc_feature (1)..(25): SEQ ID NO: 4250; WAN024B6D; Start 1132; Stop 1156
agagattatagtggagaattgcgat

SEQ ID NO: 377739 - DNA, 25 bp, Artificial
  probe
  misc_feature (1)..(25): SEQ ID NO: 4250; WAN024B6D; Start 97; Stop 121
aatgctctggtgttgaatgaattaa

SEQ ID NO: 377740 - DNA, 25 bp, Artificial
  probe
  misc_feature (1)..(25): SEQ ID NO: 4250; WAN024B6D; Start 95; Stop 119
ttaatgctctggtgttgaatgaatt

SEQ ID NO: 377741 - DNA, 25 bp, Artificial
  probe
  misc_feature (1)..(25): SEQ ID NO: 4250; WAN024B6D; Start 266; Stop 290
ccacagacatctctaactctaccta

SEQ ID NO: 377742 - DNA, 25 bp, Artificial
  probe
  misc_feature (1)..(25): SEQ ID NO: 4250; WAN024B6D; Start 1133; Stop 1157
gagattatagtggagaattgcgatt

SEQ ID NO: 377743 - DNA, 25 bp, Artificial
  probe
  misc_feature (1)..(25): SEQ ID NO: 4250; WAN024B6D; Start 868; Stop 892
tcctctattattggtacgaagccta

SEQ ID NO: 377744 - DNA, 25 bp, Artificial
  probe
  misc_feature (1)..(25): SEQ ID NO: 4250; WAN024B6D; Start 869; Stop 893
cctctattattggtacgaagcctat

SEQ ID NO: 377745 - DNA, 25 bp, Artificial
  probe
  misc_feature (1)..(25): SEQ ID NO: 4250; WAN024B6D; Start 866; Stop 890
tatcctctattattggtacgaagcc

SEQ ID NO: 377746 - DNA, 25 bp, Artificial
  probe
  misc_feature (1)..(25): SEQ ID NO: 4250; WAN024B6D; Start 867; Stop 891
atcctctattattggtacgaagcct

SEQ ID NO: 377747 - DNA, 25 bp, Artificial
  probe
  misc_feature (1)..(25): SEQ ID NO: 4250; WAN024B6D; Start 267; Stop 291
cacagacatctctaactctacctat

SEQ ID NO: 377748 - DNA, 25 bp, Artificial
  probe
  misc_feature (1)..(25): SEQ ID NO: 4250; WAN024B6D; Start 1129; Stop 1153
ttgagagattatagtggagaattgc

SEQ ID NO: 377749 - DNA, 25 bp, Artificial
  probe
  misc_feature (1)..(25): SEQ ID NO: 4250; WAN024B6D; Start 56; Stop 80
ttgttgctggtcaattattgctaat

SEQ ID NO: 377750 - DNA, 25 bp, Artificial
  probe
  misc_feature (1)..(25): SEQ ID NO: 4250; WAN024B6D; Start 96; Stop 120
taatgctctggtgttgaatgaatta

SEQ ID NO: 377751 - DNA, 25 bp, Artificial
  probe
  misc_feature (1)..(25): SEQ ID NO: 4250; WAN024B6D; Start 269; Stop 293
cagacatctctaactctacctatca

SEQ ID NO: 377752 - DNA, 25 bp, Artificial
  probe
  misc_feature (1)..(25): SEQ ID NO: 4250; WAN024B6D; Start 268; Stop 292
acagacatctctaactctacctatc

SEQ ID NO: 377753 - DNA, 25 bp, Artificial
  probe
  misc_feature (1)..(25): SEQ ID NO: 4250; WAN024B6D; Start 843; Stop 867
gctaggtgaattaggaggtcaatta

SEQ ID NO: 377754 - DNA, 25 bp, Artificial
  probe
  misc_feature (1)..(25): SEQ ID NO: 4250; WAN024B6D; Start 263; Stop 287
ttgccacagacatctctaactctac

SEQ ID NO: 377755 - DNA, 25 bp, Artificial
  probe
  misc_feature (1)..(25): SEQ ID NO: 4250; WAN024B6D; Start 262; Stop 286
gttgccacagacatctctaactcta

SEQ ID NO: 377756 - DNA, 25 bp, Artificial
  probe
  misc_feature (1)..(25): SEQ ID NO: 4250; WAN024B6D; Start 91; Stop 115
actattaatgctctggtgttgaatg

SEQ ID NO: 377757 - DNA, 25 bp, Artificial
  probe
  misc_feature (1)..(25): SEQ ID NO: 4250; WAN024B6D; Start 98; Stop 122
atgctctggtgttgaatgaattaat

SEQ ID NO: 377758 - DNA, 25 bp, Artificial
  probe
  misc_feature (1)..(25): SEQ ID NO: 4250; WAN024B6D; Start 94; Stop 118
attaatgctctggtgttgaatgaat

SEQ ID NO: 377759 - DNA, 25 bp, Artificial
  probe
  misc_feature (1)..(25): SEQ ID NO: 4250; WAN024B6D; Start 92; Stop 116
ctattaatgctctggtgttgaatga

SEQ ID NO: 377760 - DNA, 25 bp, Artificial
  probe
  misc_feature (1)..(25): SEQ ID NO: 4250; WAN024B6D; Start 846; Stop 870
aggtgaattaggaggtcaattatcc

SEQ ID NO: 377761 - DNA, 25 bp, Artificial
  probe
  misc_feature (1)..(25): SEQ ID NO: 4250; WAN024B6D; Start 271; Stop 295
gacatctctaactctacctatcaag

SEQ ID NO: 377762 - DNA, 25 bp, Artificial
  probe
  misc_feature (1)..(25): SEQ ID NO: 4250; WAN024B6D; Start 93; Stop 117
tattaatgctctggtgttgaatgaa

SEQ ID NO: 377763 - DNA, 25 bp, Artificial
  probe
  misc_feature (1)..(25): SEQ ID NO: 4250; WAN024B6D; Start 870; Stop 894
ctctattattggtacgaagcctatt

SEQ ID NO: 377764 - DNA, 25 bp, Artificial
  probe
  misc_feature (1)..(25): SEQ ID NO: 4250; WAN024B6D; Start 865; Stop 889
ttatcctctattattggtacgaagc

SEQ ID NO: 377765 - DNA, 25 bp, Artificial
  probe
  misc_feature (1)..(25): SEQ ID NO: 4250; WAN024B6D; Start 272; Stop 296
acatctctaactctacctatcaaga

SEQ ID NO: 377766 - DNA, 25 bp, Artificial
  probe
  misc_feature (1)..(25): SEQ ID NO: 4250; WAN024B6D; Start 270; Stop 294
agacatctctaactctacctatcaa

SEQ ID NO: 377767 - DNA, 25 bp, Artificial
  probe
  misc_feature (1)..(25): SEQ ID NO: 4250; WAN024B6D; Start 427; Stop 451
actcttaatcactatcattggtcat

SEQ ID NO: 377768 - DNA, 25 bp, Artificial
  probe
  misc_feature (1)..(25): SEQ ID NO: 4250; WAN024B6D; Start 90; Stop 114
aactattaatgctctggtgttgaat

SEQ ID NO: 377769 - DNA, 25 bp, Artificial
  probe
  misc_feature (1)..(25): SEQ ID NO: 4251; WAN024CLD; Start 648; Stop 672
cggaagtacgactaatcaagatgta

SEQ ID NO: 377770 - DNA, 25 bp, Artificial
  probe
  misc_feature (1)..(25): SEQ ID NO: 4251; WAN024CLD; Start 652; Stop 676
agtacgactaatcaagatgtaacca

SEQ ID NO: 377771 - DNA, 25 bp, Artificial
  probe
  misc_feature (1)..(25): SEQ ID NO: 4251; WAN024CLD; Start 902; Stop 926
gcgatgtagatacttcttattcaga

SEQ ID NO: 377772 - DNA, 25 bp, Artificial
  probe
  misc_feature (1)..(25): SEQ ID NO: 4251; WAN024CLD; Start 901; Stop 925
agcgatgtagatacttcttattcag

SEQ ID NO: 377773 - DNA, 25 bp, Artificial
  probe
  misc_feature (1)..(25): SEQ ID NO: 4251; WAN024CLD; Start 653; Stop 677
gtacgactaatcaagatgtaaccat

SEQ ID NO: 377774 - DNA, 25 bp, Artificial
  probe
  misc_feature (1)..(25): SEQ ID NO: 4251; WAN024CLD; Start 654; Stop 678
tacgactaatcaagatgtaaccatt

SEQ ID NO: 377775 - DNA, 25 bp, Artificial
  probe
  misc_feature (1)..(25): SEQ ID NO: 4251; WAN024CLD; Start 655; Stop 679
acgactaatcaagatgtaaccatta

SEQ ID NO: 377776 - DNA, 25 bp, Artificial
  probe
  misc_feature (1)..(25): SEQ ID NO: 4251; WAN024CLD; Start 900; Stop 924
aagcgatgtagatacttcttattca

SEQ ID NO: 377777 - DNA, 25 bp, Artificial
  probe
  misc_feature (1)..(25): SEQ ID NO: 4251; WAN024CLD; Start 651; Stop 675
aagtacgactaatcaagatgtaacc

SEQ ID NO: 377778 - DNA, 25 bp, Artificial
  probe
  misc_feature (1)..(25): SEQ ID NO: 4251; WAN024CLD; Start 649; Stop 673
ggaagtacgactaatcaagatgtaa

SEQ ID NO: 377779 - DNA, 25 bp, Artificial
  probe
  misc_feature (1)..(25): SEQ ID NO: 4251; WAN024CLD; Start 887; Stop 911
cgaagtttgaaataagcgatgtaga

SEQ ID NO: 377780 - DNA, 25 bp, Artificial
  probe
  misc_feature (1)..(25): SEQ ID NO: 4251; WAN024CLD; Start 497; Stop 521
caacgagtacatatacggctactat

SEQ ID NO: 377781 - DNA, 25 bp, Artificial
  probe
  misc_feature (1)..(25): SEQ ID NO: 4251; WAN024CLD; Start 886; Stop 910
ccgaagtttgaaataagcgatgtag

SEQ ID NO: 377782 - DNA, 25 bp, Artificial
  probe
  misc_feature (1)..(25): SEQ ID NO: 4251; WAN024CLD; Start 498; Stop 522
aacgagtacatatacggctactatc

SEQ ID NO: 377783 - DNA, 25 bp, Artificial
  probe
  misc_feature (1)..(25): SEQ ID NO: 4251; WAN024CLD; Start 496; Stop 520
acaacgagtacatatacggctacta

SEQ ID NO: 377784 - DNA, 25 bp, Artificial
  probe
  misc_feature (1)..(25): SEQ ID NO: 4251; WAN024CLD; Start 525; Stop 549
tagcgaaagtaagtatcttggacac

SEQ ID NO: 377785 - DNA, 25 bp, Artificial
  probe
  misc_feature (1)..(25): SEQ ID NO: 4251; WAN024CLD; Start 524; Stop 548
atagcgaaagtaagtatcttggaca

SEQ ID NO: 377786 - DNA, 25 bp, Artificial
  probe
  misc_feature (1)..(25): SEQ ID NO: 4251; WAN024CLD; Start 105; Stop 129
agaaggtcagatttcaacagtagaa

SEQ ID NO: 377787 - DNA, 25 bp, Artificial
  probe
  misc_feature (1)..(25): SEQ ID NO: 4251; WAN024CLD; Start 9; Stop 33
cgtaaatgctgaagtcggagaatat

SEQ ID NO: 377788 - DNA, 25 bp, Artificial
  probe
  misc_feature (1)..(25): SEQ ID NO: 4251; WAN024CLD; Start 494; Stop 518
ggacaacgagtacatatacggctac

SEQ ID NO: 377789 - DNA, 25 bp, Artificial
  probe
  misc_feature (1)..(25): SEQ ID NO: 4251; WAN024CLD; Start 923; Stop 947
cagaagctcctgaagatatagaagg

SEQ ID NO: 377790 - DNA, 25 bp, Artificial
  probe
  misc_feature (1)..(25): SEQ ID NO: 4251; WAN024CLD; Start 104; Stop 128
tagaaggtcagatttcaacagtaga

SEQ ID NO: 377791 - DNA, 25 bp, Artificial
  probe
  misc_feature (1)..(25): SEQ ID NO: 4251; WAN024CLD; Start 106; Stop 130
gaaggtcagatttcaacagtagaat

SEQ ID NO: 377792 - DNA, 25 bp, Artificial
  probe
  misc_feature (1)..(25): SEQ ID NO: 4251; WAN024CLD; Start 86; Stop 110
aagaagctcctgaagatatagaagg

SEQ ID NO: 377793 - DNA, 25 bp, Artificial
  probe
  misc_feature (1)..(25): SEQ ID NO: 4251; WAN024CLD; Start 486; Stop 510
aggaatttggacaacgagtacatat

SEQ ID NO: 377794 - DNA, 25 bp, Artificial
  probe
  misc_feature (1)..(25): SEQ ID NO: 4251; WAN024CLD; Start 457; Stop 481
tcactattcaagcaggatatttcaa

SEQ ID NO: 377795 - DNA, 25 bp, Artificial
  probe
  misc_feature (1)..(25): SEQ ID NO: 4251; WAN024CLD; Start 490; Stop 514
atttggacaacgagtacatatacgg

SEQ ID NO: 377796 - DNA, 25 bp, Artificial
  probe
  misc_feature (1)..(25): SEQ ID NO: 4251; WAN024CLD; Start 489; Stop 513
aatttggacaacgagtacatatacg

SEQ ID NO: 377797 - DNA, 25 bp, Artificial
  probe
  misc_feature (1)..(25): SEQ ID NO: 4251; WAN024CLD; Start 485; Stop 509
caggaatttggacaacgagtacata

SEQ ID NO: 377798 - DNA, 25 bp, Artificial
  probe
  misc_feature (1)..(25): SEQ ID NO: 4251; WAN024CLD; Start 650; Stop 674
gaagtacgactaatcaagatgtaac

SEQ ID NO: 377799 - DNA, 25 bp, Artificial
  probe
  misc_feature (1)..(25): SEQ ID NO: 4251; WAN024CLD; Start 493; Stop 517
tggacaacgagtacatatacggcta

SEQ ID NO: 377800 - DNA, 25 bp, Artificial
  probe
  misc_feature (1)..(25): SEQ ID NO: 4251; WAN024CLD; Start 1; Stop 25
gtgtatctcgtaaatgctgaagtcg

SEQ ID NO: 377801 - DNA, 25 bp, Artificial
  probe
  misc_feature (1)..(25): SEQ ID NO: 4251; WAN024CLD; Start 495; Stop 519
gacaacgagtacatatacggctact

SEQ ID NO: 377802 - DNA, 25 bp, Artificial
  probe
  misc_feature (1)..(25): SEQ ID NO: 4252; WAN024DTL; Start 62; Stop 86
tatgaaaccatctactatacggacg

SEQ ID NO: 377803 - DNA, 25 bp, Artificial
  probe
  misc_feature (1)..(25): SEQ ID NO: 4252; WAN024DTL; Start 103; Stop 127
ggaatatggactaatgggagtttct

SEQ ID NO: 377804 - DNA, 25 bp, Artificial
  probe
  misc_feature (1)..(25): SEQ ID NO: 4252; WAN024DTL; Start 109; Stop 133
tggactaatgggagtttctatcttt

SEQ ID NO: 377805 - DNA, 25 bp, Artificial
  probe
  misc_feature (1)..(25): SEQ ID NO: 4252; WAN024DTL; Start 102; Stop 126
cggaatatggactaatgggagtttc

SEQ ID NO: 377806 - DNA, 25 bp, Artificial
  probe
  misc_feature (1)..(25): SEQ ID NO: 4252; WAN024DTL; Start 108; Stop 132
atggactaatgggagtttctatctt

SEQ ID NO: 377807 - DNA, 25 bp, Artificial
  probe
  misc_feature (1)..(25): SEQ ID NO: 4252; WAN024DTL; Start 63; Stop 87
atgaaaccatctactatacggacgg

SEQ ID NO: 377808 - DNA, 25 bp, Artificial
  probe
  misc_feature (1)..(25): SEQ ID NO: 4252; WAN024DTL; Start 110; Stop 134
ggactaatgggagtttctatctttc

SEQ ID NO: 377809 - DNA, 25 bp, Artificial
  probe
  misc_feature (1)..(25): SEQ ID NO: 4252; WAN024DTL; Start 107; Stop 131
tatggactaatgggagtttctatct

SEQ ID NO: 377810 - DNA, 25 bp, Artificial
  probe
  misc_feature (1)..(25): SEQ ID NO: 4252; WAN024DTL; Start 114; Stop 138
taatgggagtttctatctttctagc

SEQ ID NO: 377811 - DNA, 25 bp, Artificial
  probe
  misc_feature (1)..(25): SEQ ID NO: 4252; WAN024DTL; Start 115; Stop 139
aatgggagtttctatctttctagct

SEQ ID NO: 377812 - DNA, 25 bp, Artificial
  probe
  misc_feature (1)..(25): SEQ ID NO: 4252; WAN024DTL; Start 94; Stop 118
gtcaggtgcggaatatggactaatg

SEQ ID NO: 377813 - DNA, 25 bp, Artificial
  probe
  misc_feature (1)..(25): SEQ ID NO: 4252; WAN024DTL; Start 111; Stop 135
gactaatgggagtttctatctttct

SEQ ID NO: 377814 - DNA, 25 bp, Artificial
  probe
  misc_feature (1)..(25): SEQ ID NO: 4252; WAN024DTL; Start 61; Stop 85
gtatgaaaccatctactatacggac

SEQ ID NO: 377815 - DNA, 25 bp, Artificial
  probe
  misc_feature (1)..(25): SEQ ID NO: 4252; WAN024DTL; Start 104; Stop 128
gaatatggactaatgggagtttcta

SEQ ID NO: 377816 - DNA, 25 bp, Artificial
  probe
  misc_feature (1)..(25): SEQ ID NO: 4252; WAN024DTL; Start 118; Stop 142
gggagtttctatctttctagctctc

SEQ ID NO: 377817 - DNA, 25 bp, Artificial
  probe
  misc_feature (1)..(25): SEQ ID NO: 4252; WAN024DTL; Start 117; Stop 141
tgggagtttctatctttctagctct

SEQ ID NO: 377818 - DNA, 25 bp, Artificial
  probe
  misc_feature (1)..(25): SEQ ID NO: 4252; WAN024DTL; Start 116; Stop 140
atgggagtttctatctttctagctc

SEQ ID NO: 377819 - DNA, 25 bp, Artificial
  probe
  misc_feature (1)..(25): SEQ ID NO: 4252; WAN024DTL; Start 119; Stop 143
ggagtttctatctttctagctctct

SEQ ID NO: 377820 - DNA, 25 bp, Artificial
  probe
  misc_feature (1)..(25): SEQ ID NO: 4252; WAN024DTL; Start 106; Stop 130
atatggactaatgggagtttctatc

SEQ ID NO: 377821 - DNA, 25 bp, Artificial
  probe
  misc_feature (1)..(25): SEQ ID NO: 4252; WAN024DTL; Start 101; Stop 125
gcggaatatggactaatgggagttt

SEQ ID NO: 377822 - DNA, 25 bp, Artificial
  probe
  misc_feature (1)..(25): SEQ ID NO: 4252; WAN024DTL; Start 95; Stop 119
tcaggtgcggaatatggactaatgg

SEQ ID NO: 377823 - DNA, 25 bp, Artificial
  probe
  misc_feature (1)..(25): SEQ ID NO: 4252; WAN024DTL; Start 59; Stop 83
cagtatgaaaccatctactatacgg

SEQ ID NO: 377824 - DNA, 25 bp, Artificial
  probe
  misc_feature (1)..(25): SEQ ID NO: 4252; WAN024DTL; Start 60; Stop 84
agtatgaaaccatctactatacgga

SEQ ID NO: 377825 - DNA, 25 bp, Artificial
  probe
  misc_feature (1)..(25): SEQ ID NO: 4252; WAN024DTL; Start 157; Stop 181
ggctctttattttctcttccgtatt

SEQ ID NO: 377826 - DNA, 25 bp, Artificial
  probe
  misc_feature (1)..(25): SEQ ID NO: 4252; WAN024DTL; Start 58; Stop 82
acagtatgaaaccatctactatacg

SEQ ID NO: 377827 - DNA, 25 bp, Artificial
  probe
  misc_feature (1)..(25): SEQ ID NO: 4252; WAN024DTL; Start 105; Stop 129
aatatggactaatgggagtttctat

SEQ ID NO: 377828 - DNA, 25 bp, Artificial
  probe
  misc_feature (1)..(25): SEQ ID NO: 4252; WAN024DTL; Start 160; Stop 184
tctttattttctcttccgtattggg

SEQ ID NO: 377829 - DNA, 25 bp, Artificial
  probe
  misc_feature (1)..(25): SEQ ID NO: 4252; WAN024DTL; Start 70; Stop 94
catctactatacggacggttcgagg

SEQ ID NO: 377830 - DNA, 25 bp, Artificial
  probe
  misc_feature (1)..(25): SEQ ID NO: 4252; WAN024DTL; Start 69; Stop 93
ccatctactatacggacggttcgag

SEQ ID NO: 377831 - DNA, 25 bp, Artificial
  probe
  misc_feature (1)..(25): SEQ ID NO: 4252; WAN024DTL; Start 93; Stop 117
ggtcaggtgcggaatatggactaat

SEQ ID NO: 377832 - DNA, 25 bp, Artificial
  probe
  misc_feature (1)..(25): SEQ ID NO: 4252; WAN024DTL; Start 121; Stop 145
agtttctatctttctagctctcttt

SEQ ID NO: 377833 - DNA, 25 bp, Artificial
  probe
  misc_feature (1)..(25): SEQ ID NO: 4252; WAN024DTL; Start 112; Stop 136
actaatgggagtttctatctttcta

SEQ ID NO: 377834 - DNA, 25 bp, Artificial
  probe
  misc_feature (1)..(25): SEQ ID NO: 4252; WAN024DTL; Start 42; Stop 66
tgctatgtattggtttacagtatga

SEQ ID NO: 377835 - DNA, 25 bp, Artificial
  probe
  misc_feature (1)..(25): SEQ ID NO: 4253; WAN024GB6; Start 1472; Stop 1496
tctctattgaagatgccaactatga

SEQ ID NO: 377836 - DNA, 25 bp, Artificial
  probe
  misc_feature (1)..(25): SEQ ID NO: 4253; WAN024GB6; Start 1471; Stop 1495
ttctctattgaagatgccaactatg

SEQ ID NO: 377837 - DNA, 25 bp, Artificial
  probe
  misc_feature (1)..(25): SEQ ID NO: 4253; WAN024GB6; Start 1342; Stop 1366
aagttccaggctattctacctcttc

SEQ ID NO: 377838 - DNA, 25 bp, Artificial
  probe
  misc_feature (1)..(25): SEQ ID NO: 4253; WAN024GB6; Start 1341; Stop 1365
caagttccaggctattctacctctt

SEQ ID NO: 377839 - DNA, 25 bp, Artificial
  probe
  misc_feature (1)..(25): SEQ ID NO: 4253; WAN024GB6; Start 553; Stop 577
acgacagatttcaagtacaatacca

SEQ ID NO: 377840 - DNA, 25 bp, Artificial
  probe
  misc_feature (1)..(25): SEQ ID NO: 4253; WAN024GB6; Start 554; Stop 578
cgacagatttcaagtacaataccat

SEQ ID NO: 377841 - DNA, 25 bp, Artificial
  probe
  misc_feature (1)..(25): SEQ ID NO: 4253; WAN024GB6; Start 978; Stop 1002
cgttctttctatcttagttcctgaa

SEQ ID NO: 377842 - DNA, 25 bp, Artificial
  probe
  misc_feature (1)..(25): SEQ ID NO: 4253; WAN024GB6; Start 552; Stop 576
tacgacagatttcaagtacaatacc

SEQ ID NO: 377843 - DNA, 25 bp, Artificial
  probe
  misc_feature (1)..(25): SEQ ID NO: 4253; WAN024GB6; Start 548; Stop 572
tttctacgacagatttcaagtacaa

SEQ ID NO: 377844 - DNA, 25 bp, Artificial
  probe
  misc_feature (1)..(25): SEQ ID NO: 4253; WAN024GB6; Start 1469; Stop 1493
acttctctattgaagatgccaacta

SEQ ID NO: 377845 - DNA, 25 bp, Artificial
  probe
  misc_feature (1)..(25): SEQ ID NO: 4253; WAN024GB6; Start 1468; Stop 1492
gacttctctattgaagatgccaact

SEQ ID NO: 377846 - DNA, 25 bp, Artificial
  probe
  misc_feature (1)..(25): SEQ ID NO: 4253; WAN024GB6; Start 549; Stop 573
ttctacgacagatttcaagtacaat

SEQ ID NO: 377847 - DNA, 25 bp, Artificial
  probe
  misc_feature (1)..(25): SEQ ID NO: 4253; WAN024GB6; Start 1343; Stop 1367
agttccaggctattctacctcttcg

SEQ ID NO: 377848 - DNA, 25 bp, Artificial
  probe
  misc_feature (1)..(25): SEQ ID NO: 4253; WAN024GB6; Start 551; Stop 575
ctacgacagatttcaagtacaatac

SEQ ID NO: 377849 - DNA, 25 bp, Artificial
  probe
  misc_feature (1)..(25): SEQ ID NO: 4253; WAN024GB6; Start 1470; Stop 1494
cttctctattgaagatgccaactat

SEQ ID NO: 377850 - DNA, 25 bp, Artificial
  probe
  misc_feature (1)..(25): SEQ ID NO: 4253; WAN024GB6; Start 550; Stop 574
tctacgacagatttcaagtacaata

SEQ ID NO: 377851 - DNA, 25 bp, Artificial
  probe
  misc_feature (1)..(25): SEQ ID NO: 4253; WAN024GB6; Start 555; Stop 579
gacagatttcaagtacaataccatt

SEQ ID NO: 377852 - DNA, 25 bp, Artificial
  probe
  misc_feature (1)..(25): SEQ ID NO: 4253; WAN024GB6; Start 1345; Stop 1369
ttccaggctattctacctcttcgtg

SEQ ID NO: 377853 - DNA, 25 bp, Artificial
  probe
  misc_feature (1)..(25): SEQ ID NO: 4253; WAN024GB6; Start 1344; Stop 1368
gttccaggctattctacctcttcgt

SEQ ID NO: 377854 - DNA, 25 bp, Artificial
  probe
  misc_feature (1)..(25): SEQ ID NO: 4253; WAN024GB6; Start 1276; Stop 1300
aagaatgaactctatctagttgagg

SEQ ID NO: 377855 - DNA, 25 bp, Artificial
  probe
  misc_feature (1)..(25): SEQ ID NO: 4253; WAN024GB6; Start 979; Stop 1003
gttctttctatcttagttcctgaag

SEQ ID NO: 377856 - DNA, 25 bp, Artificial
  probe
  misc_feature (1)..(25): SEQ ID NO: 4253; WAN024GB6; Start 1340; Stop 1364
gcaagttccaggctattctacctct

SEQ ID NO: 377857 - DNA, 25 bp, Artificial
  probe
  misc_feature (1)..(25): SEQ ID NO: 4253; WAN024GB6; Start 556; Stop 580
acagatttcaagtacaataccattt

SEQ ID NO: 377858 - DNA, 25 bp, Artificial
  probe
  misc_feature (1)..(25): SEQ ID NO: 4253; WAN024GB6; Start 1351; Stop 1375
gctattctacctcttcgtggtaagg

SEQ ID NO: 377859 - DNA, 25 bp, Artificial
  probe
  misc_feature (1)..(25): SEQ ID NO: 4253; WAN024GB6; Start 1350; Stop 1374
ggctattctacctcttcgtggtaag

SEQ ID NO: 377860 - DNA, 25 bp, Artificial
  probe
  misc_feature (1)..(25): SEQ ID NO: 4253; WAN024GB6; Start 1677; Stop 1701
gacggacggagaactagaagaactc

SEQ ID NO: 377861 - DNA, 25 bp, Artificial
  probe
  misc_feature (1)..(25): SEQ ID NO: 4253; WAN024GB6; Start 1277; Stop 1301
agaatgaactctatctagttgaggg

SEQ ID NO: 377862 - DNA, 25 bp, Artificial
  probe
  misc_feature (1)..(25): SEQ ID NO: 4253; WAN024GB6; Start 560; Stop 584
atttcaagtacaataccatttcaga

SEQ ID NO: 377863 - DNA, 25 bp, Artificial
  probe
  misc_feature (1)..(25): SEQ ID NO: 4253; WAN024GB6; Start 558; Stop 582
agatttcaagtacaataccatttca

SEQ ID NO: 377864 - DNA, 25 bp, Artificial
  probe
  misc_feature (1)..(25): SEQ ID NO: 4253; WAN024GB6; Start 1349; Stop 1373
aggctattctacctcttcgtggtaa

SEQ ID NO: 377865 - DNA, 25 bp, Artificial
  probe
  misc_feature (1)..(25): SEQ ID NO: 4253; WAN024GB6; Start 1273; Stop 1297
gctaagaatgaactctatctagttg

SEQ ID NO: 377866 - DNA, 25 bp, Artificial
  probe
  misc_feature (1)..(25): SEQ ID NO: 4253; WAN024GB6; Start 559; Stop 583
gatttcaagtacaataccatttcag

SEQ ID NO: 377867 - DNA, 25 bp, Artificial
  probe
  misc_feature (1)..(25): SEQ ID NO: 4253; WAN024GB6; Start 557; Stop 581
cagatttcaagtacaataccatttc

SEQ ID NO: 377868 - DNA, 25 bp, Artificial
  probe
  misc_feature (1)..(25): SEQ ID NO: 4254; WAN024GN2; Start 1068; Stop 1092
ttctcaaggcgtggattatgttatc

SEQ ID NO: 377869 - DNA, 25 bp, Artificial
  probe
  misc_feature (1)..(25): SEQ ID NO: 4254; WAN024GN2; Start 668; Stop 692
atgtagagcatcataagtctgtagc

SEQ ID NO: 377870 - DNA, 25 bp, Artificial
  probe
  misc_feature (1)..(25): SEQ ID NO: 4254; WAN024GN2; Start 1067; Stop 1091
gttctcaaggcgtggattatgttat

SEQ ID NO: 377871 - DNA, 25 bp, Artificial
  probe
  misc_feature (1)..(25): SEQ ID NO: 4254; WAN024GN2; Start 665; Stop 689
tcaatgtagagcatcataagtctgt

SEQ ID NO: 377872 - DNA, 25 bp, Artificial
  probe
  misc_feature (1)..(25): SEQ ID NO: 4254; WAN024GN2; Start 1261; Stop 1285
cttcctcaaggtatgacaagtcttc

SEQ ID NO: 377873 - DNA, 25 bp, Artificial
  probe
  misc_feature (1)..(25): SEQ ID NO: 4254; WAN024GN2; Start 664; Stop 688
atcaatgtagagcatcataagtctg

SEQ ID NO: 377874 - DNA, 25 bp, Artificial
  probe
  misc_feature (1)..(25): SEQ ID NO: 4254; WAN024GN2; Start 561; Stop 585
tcaaggattggtcttcatctacgaa

SEQ ID NO: 377875 - DNA, 25 bp, Artificial
  probe
  misc_feature (1)..(25): SEQ ID NO: 4254; WAN024GN2; Start 1263; Stop 1287
tcctcaaggtatgacaagtcttctt

SEQ ID NO: 377876 - DNA, 25 bp, Artificial
  probe
  misc_feature (1)..(25): SEQ ID NO: 4254; WAN024GN2; Start 1262; Stop 1286
ttcctcaaggtatgacaagtcttct

SEQ ID NO: 377877 - DNA, 25 bp, Artificial
  probe
  misc_feature (1)..(25): SEQ ID NO: 4254; WAN024GN2; Start 1260; Stop 1284
tcttcctcaaggtatgacaagtctt

SEQ ID NO: 377878 - DNA, 25 bp, Artificial
  probe
  misc_feature (1)..(25): SEQ ID NO: 4254; WAN024GN2; Start 868; Stop 892
gttcatacagaagatccaggacttg

SEQ ID NO: 377879 - DNA, 25 bp, Artificial
  probe
  misc_feature (1)..(25): SEQ ID NO: 4254; WAN024GN2; Start 666; Stop 690
caatgtagagcatcataagtctgta

SEQ ID NO: 377880 - DNA, 25 bp, Artificial
  probe
  misc_feature (1)..(25): SEQ ID NO: 4254; WAN024GN2; Start 1066; Stop 1090
tgttctcaaggcgtggattatgtta

SEQ ID NO: 377881 - DNA, 25 bp, Artificial
  probe
  misc_feature (1)..(25): SEQ ID NO: 4254; WAN024GN2; Start 1259; Stop 1283
ctcttcctcaaggtatgacaagtct

SEQ ID NO: 377882 - DNA, 25 bp, Artificial
  probe
  misc_feature (1)..(25): SEQ ID NO: 4254; WAN024GN2; Start 984; Stop 1008
tactcaagttatcaagtcggctgaa

SEQ ID NO: 377883 - DNA, 25 bp, Artificial
  probe
  misc_feature (1)..(25): SEQ ID NO: 4254; WAN024GN2; Start 667; Stop 691
aatgtagagcatcataagtctgtag

SEQ ID NO: 377884 - DNA, 25 bp, Artificial
  probe
  misc_feature (1)..(25): SEQ ID NO: 4254; WAN024GN2; Start 873; Stop 897
tacagaagatccaggacttgttatg

SEQ ID NO: 377885 - DNA, 25 bp, Artificial
  probe
  misc_feature (1)..(25): SEQ ID NO: 4254; WAN024GN2; Start 871; Stop 895
catacagaagatccaggacttgtta

SEQ ID NO: 377886 - DNA, 25 bp, Artificial
  probe
  misc_feature (1)..(25): SEQ ID NO: 4254; WAN024GN2; Start 1258; Stop 1282
actcttcctcaaggtatgacaagtc

SEQ ID NO: 377887 - DNA, 25 bp, Artificial
  probe
  misc_feature (1)..(25): SEQ ID NO: 4254; WAN024GN2; Start 558; Stop 582
tggtcaaggattggtcttcatctac

SEQ ID NO: 377888 - DNA, 25 bp, Artificial
  probe
  misc_feature (1)..(25): SEQ ID NO: 4254; WAN024GN2; Start 557; Stop 581
gtggtcaaggattggtcttcatcta

SEQ ID NO: 377889 - DNA, 25 bp, Artificial
  probe
  misc_feature (1)..(25): SEQ ID NO: 4254; WAN024GN2; Start 560; Stop 584
gtcaaggattggtcttcatctacga

SEQ ID NO: 377890 - DNA, 25 bp, Artificial
  probe
  misc_feature (1)..(25): SEQ ID NO: 4254; WAN024GN2; Start 860; Stop 884
aagtccatgttcatacagaagatcc

SEQ ID NO: 377891 - DNA, 25 bp, Artificial
  probe
  misc_feature (1)..(25): SEQ ID NO: 4254; WAN024GN2; Start 866; Stop 890
atgttcatacagaagatccaggact

SEQ ID NO: 377892 - DNA, 25 bp, Artificial
  probe
  misc_feature (1)..(25): SEQ ID NO: 4254; WAN024GN2; Start 1257; Stop 1281
cactcttcctcaaggtatgacaagt

SEQ ID NO: 377893 - DNA, 25 bp, Artificial
  probe
  misc_feature (1)..(25): SEQ ID NO: 4254; WAN024GN2; Start 663; Stop 687
gatcaatgtagagcatcataagtct

SEQ ID NO: 377894 - DNA, 25 bp, Artificial
  probe
  misc_feature (1)..(25): SEQ ID NO: 4254; WAN024GN2; Start 872; Stop 896
atacagaagatccaggacttgttat

SEQ ID NO: 377895 - DNA, 25 bp, Artificial
  probe
  misc_feature (1)..(25): SEQ ID NO: 4254; WAN024GN2; Start 870; Stop 894
tcatacagaagatccaggacttgtt

SEQ ID NO: 377896 - DNA, 25 bp, Artificial
  probe
  misc_feature (1)..(25): SEQ ID NO: 4254; WAN024GN2; Start 869; Stop 893
ttcatacagaagatccaggacttgt

SEQ ID NO: 377897 - DNA, 25 bp, Artificial
  probe
  misc_feature (1)..(25): SEQ ID NO: 4254; WAN024GN2; Start 867; Stop 891
tgttcatacagaagatccaggactt

SEQ ID NO: 377898 - DNA, 25 bp, Artificial
  probe
  misc_feature (1)..(25): SEQ ID NO: 4254; WAN024GN2; Start 983; Stop 1007
ctactcaagttatcaagtcggctga

SEQ ID NO: 377899 - DNA, 25 bp, Artificial
  probe
  misc_feature (1)..(25): SEQ ID NO: 4254; WAN024GN2; Start 865; Stop 889
catgttcatacagaagatccaggac

SEQ ID NO: 377900 - DNA, 25 bp, Artificial
  probe
  misc_feature (1)..(25): SEQ ID NO: 4254; WAN024GN2; Start 862; Stop 886
gtccatgttcatacagaagatccag

SEQ ID NO: 377901 - DNA, 25 bp, Artificial
  probe
  misc_feature (1)..(25): SEQ ID NO: 4255; WAN024DV3; Start 532; Stop 556
aactggatgattacggataaggaat

SEQ ID NO: 377902 - DNA, 25 bp, Artificial
  probe
  misc_feature (1)..(25): SEQ ID NO: 4255; WAN024DV3; Start 533; Stop 557
actggatgattacggataaggaatt

SEQ ID NO: 377903 - DNA, 25 bp, Artificial
  probe
  misc_feature (1)..(25): SEQ ID NO: 4255; WAN024DV3; Start 1239; Stop 1263
ttaccgcattgagttagaagatgtc

SEQ ID NO: 377904 - DNA, 25 bp, Artificial
  probe
  misc_feature (1)..(25): SEQ ID NO: 4255; WAN024DV3; Start 1522; Stop 1546
ggattgattaacgaggtgaataaga

SEQ ID NO: 377905 - DNA, 25 bp, Artificial
  probe
  misc_feature (1)..(25): SEQ ID NO: 4255; WAN024DV3; Start 1521; Stop 1545
aggattgattaacgaggtgaataag

SEQ ID NO: 377906 - DNA, 25 bp, Artificial
  probe
  misc_feature (1)..(25): SEQ ID NO: 4255; WAN024DV3; Start 1238; Stop 1262
gttaccgcattgagttagaagatgt

SEQ ID NO: 377907 - DNA, 25 bp, Artificial
  probe
  misc_feature (1)..(25): SEQ ID NO: 4255; WAN024DV3; Start 1520; Stop 1544
aaggattgattaacgaggtgaataa

SEQ ID NO: 377908 - DNA, 25 bp, Artificial
  probe
  misc_feature (1)..(25): SEQ ID NO: 4255; WAN024DV3; Start 1240; Stop 1264
taccgcattgagttagaagatgtct

SEQ ID NO: 377909 - DNA, 25 bp, Artificial
  probe
  misc_feature (1)..(25): SEQ ID NO: 4255; WAN024DV3; Start 1243; Stop 1267
cgcattgagttagaagatgtctctc

SEQ ID NO: 377910 - DNA, 25 bp, Artificial
  probe
  misc_feature (1)..(25): SEQ ID NO: 4255; WAN024DV3; Start 1237; Stop 1261
ggttaccgcattgagttagaagatg

SEQ ID NO: 377911 - DNA, 25 bp, Artificial
  probe
  misc_feature (1)..(25): SEQ ID NO: 4255; WAN024DV3; Start 1524; Stop 1548
attgattaacgaggtgaataagaga

SEQ ID NO: 377912 - DNA, 25 bp, Artificial
  probe
  misc_feature (1)..(25): SEQ ID NO: 4255; WAN024DV3; Start 1523; Stop 1547
gattgattaacgaggtgaataagag

SEQ ID NO: 377913 - DNA, 25 bp, Artificial
  probe
  misc_feature (1)..(25): SEQ ID NO: 4255; WAN024DV3; Start 658; Stop 682
ttcactcttccttcagtcatcactc

SEQ ID NO: 377914 - DNA, 25 bp, Artificial
  probe
  misc_feature (1)..(25): SEQ ID NO: 4255; WAN024DV3; Start 984; Stop 1008
ctataccaaggctgattctccaacc

SEQ ID NO: 377915 - DNA, 25 bp, Artificial
  probe
  misc_feature (1)..(25): SEQ ID NO: 4255; WAN024DV3; Start 1014; Stop 1038
cattgacgaggaaggaaataaactg

SEQ ID NO: 377916 - DNA, 25 bp, Artificial
  probe
  misc_feature (1)..(25): SEQ ID NO: 4255; WAN024DV3; Start 531; Stop 555
aaactggatgattacggataaggaa

SEQ ID NO: 377917 - DNA, 25 bp, Artificial
  probe
  misc_feature (1)..(25): SEQ ID NO: 4255; WAN024DV3; Start 1317; Stop 1341
ctataacaaggaccacaaggtacaa

SEQ ID NO: 377918 - DNA, 25 bp, Artificial
  probe
  misc_feature (1)..(25): SEQ ID NO: 4255; WAN024DV3; Start 530; Stop 554
caaactggatgattacggataagga

SEQ ID NO: 377919 - DNA, 25 bp, Artificial
  probe
  misc_feature (1)..(25): SEQ ID NO: 4255; WAN024DV3; Start 1021; Stop 1045
gaggaaggaaataaactgccaaatg

SEQ ID NO: 377920 - DNA, 25 bp, Artificial
  probe
  misc_feature (1)..(25): SEQ ID NO: 4255; WAN024DV3; Start 529; Stop 553
acaaactggatgattacggataagg

SEQ ID NO: 377921 - DNA, 25 bp, Artificial
  probe
  misc_feature (1)..(25): SEQ ID NO: 4255; WAN024DV3; Start 1013; Stop 1037
tcattgacgaggaaggaaataaact

SEQ ID NO: 377922 - DNA, 25 bp, Artificial
  probe
  misc_feature (1)..(25): SEQ ID NO: 4255; WAN024DV3; Start 525; Stop 549
ctttacaaactggatgattacggat

SEQ ID NO: 377923 - DNA, 25 bp, Artificial
  probe
  misc_feature (1)..(25): SEQ ID NO: 4255; WAN024DV3; Start 536; Stop 560
ggatgattacggataaggaatttgc

SEQ ID NO: 377924 - DNA, 25 bp, Artificial
  probe
  misc_feature (1)..(25): SEQ ID NO: 4255; WAN024DV3; Start 1242; Stop 1266
ccgcattgagttagaagatgtctct

SEQ ID NO: 377925 - DNA, 25 bp, Artificial
  probe
  misc_feature (1)..(25): SEQ ID NO: 4255; WAN024DV3; Start 1012; Stop 1036
atcattgacgaggaaggaaataaac

SEQ ID NO: 377926 - DNA, 25 bp, Artificial
  probe
  misc_feature (1)..(25): SEQ ID NO: 4255; WAN024DV3; Start 537; Stop 561
gatgattacggataaggaatttgcg

SEQ ID NO: 377927 - DNA, 25 bp, Artificial
  probe
  misc_feature (1)..(25): SEQ ID NO: 4255; WAN024DV3; Start 20; Stop 44
cagatatgattgaaaccattgagca

SEQ ID NO: 377928 - DNA, 25 bp, Artificial
  probe
  misc_feature (1)..(25): SEQ ID NO: 4255; WAN024DV3; Start 660; Stop 684
cactcttccttcagtcatcactcag

SEQ ID NO: 377929 - DNA, 25 bp, Artificial
  probe
  misc_feature (1)..(25): SEQ ID NO: 4255; WAN024DV3; Start 538; Stop 562
atgattacggataaggaatttgcga

SEQ ID NO: 377930 - DNA, 25 bp, Artificial
  probe
  misc_feature (1)..(25): SEQ ID NO: 4255; WAN024DV3; Start 18; Stop 42
agcagatatgattgaaaccattgag

SEQ ID NO: 377931 - DNA, 25 bp, Artificial
  probe
  misc_feature (1)..(25): SEQ ID NO: 4255; WAN024DV3; Start 816; Stop 840
ctactttgatggtgaagaattgacg

SEQ ID NO: 377932 - DNA, 25 bp, Artificial
  probe
  misc_feature (1)..(25): SEQ ID NO: 4255; WAN024DV3; Start 19; Stop 43
gcagatatgattgaaaccattgagc

SEQ ID NO: 377933 - DNA, 25 bp, Artificial
  probe
  misc_feature (1)..(25): SEQ ID NO: 4255; WAN024DV3; Start 112; Stop 136
ttaaaggctgattcggatagtttgg

SEQ ID NO: 377934 - DNA, 25 bp, Artificial
  probe
  misc_feature (1)..(25): SEQ ID NO: 4256; WAN024EW8; Start 234; Stop 258
agttagagacagaagagattggcta

SEQ ID NO: 377935 - DNA, 25 bp, Artificial
  probe
  misc_feature (1)..(25): SEQ ID NO: 4256; WAN024EW8; Start 242; Stop 266
acagaagagattggctacattgata

SEQ ID NO: 377936 - DNA, 25 bp, Artificial
  probe
  misc_feature (1)..(25): SEQ ID NO: 4256; WAN024EW8; Start 237; Stop 261
tagagacagaagagattggctacat

SEQ ID NO: 377937 - DNA, 25 bp, Artificial
  probe
  misc_feature (1)..(25): SEQ ID NO: 4256; WAN024EW8; Start 235; Stop 259
gttagagacagaagagattggctac

SEQ ID NO: 377938 - DNA, 25 bp, Artificial
  probe
  misc_feature (1)..(25): SEQ ID NO: 4256; WAN024EW8; Start 241; Stop 265
gacagaagagattggctacattgat

SEQ ID NO: 377939 - DNA, 25 bp, Artificial
  probe
  misc_feature (1)..(25): SEQ ID NO: 4256; WAN024EW8; Start 231; Stop 255
cacagttagagacagaagagattgg

SEQ ID NO: 377940 - DNA, 25 bp, Artificial
  probe
  misc_feature (1)..(25): SEQ ID NO: 4256; WAN024EW8; Start 230; Stop 254
ccacagttagagacagaagagattg

SEQ ID NO: 377941 - DNA, 25 bp, Artificial
  probe
  misc_feature (1)..(25): SEQ ID NO: 4256; WAN024EW8; Start 229; Stop 253
tccacagttagagacagaagagatt

SEQ ID NO: 377942 - DNA, 25 bp, Artificial
  probe
  misc_feature (1)..(25): SEQ ID NO: 4256; WAN024EW8; Start 236; Stop 260
ttagagacagaagagattggctaca

SEQ ID NO: 377943 - DNA, 25 bp, Artificial
  probe
  misc_feature (1)..(25): SEQ ID NO: 4256; WAN024EW8; Start 243; Stop 267
cagaagagattggctacattgatag

SEQ ID NO: 377944 - DNA, 25 bp, Artificial
  probe
  misc_feature (1)..(25): SEQ ID NO: 4256; WAN024EW8; Start 224; Stop 248
cctattccacagttagagacagaag

SEQ ID NO: 377945 - DNA, 25 bp, Artificial
  probe
  misc_feature (1)..(25): SEQ ID NO: 4256; WAN024EW8; Start 244; Stop 268
agaagagattggctacattgataga

SEQ ID NO: 377946 - DNA, 25 bp, Artificial
  probe
  misc_feature (1)..(25): SEQ ID NO: 4256; WAN024EW8; Start 223; Stop 247
tcctattccacagttagagacagaa

SEQ ID NO: 377947 - DNA, 25 bp, Artificial
  probe
  misc_feature (1)..(25): SEQ ID NO: 4256; WAN024EW8; Start 228; Stop 252
ttccacagttagagacagaagagat

SEQ ID NO: 377948 - DNA, 25 bp, Artificial
  probe
  misc_feature (1)..(25): SEQ ID NO: 4256; WAN024EW8; Start 227; Stop 251
attccacagttagagacagaagaga

SEQ ID NO: 377949 - DNA, 25 bp, Artificial
  probe
  misc_feature (1)..(25): SEQ ID NO: 4256; WAN024EW8; Start 226; Stop 250
tattccacagttagagacagaagag

SEQ ID NO: 377950 - DNA, 25 bp, Artificial
  probe
  misc_feature (1)..(25): SEQ ID NO: 4256; WAN024EW8; Start 225; Stop 249
ctattccacagttagagacagaaga

SEQ ID NO: 377951 - DNA, 25 bp, Artificial
  probe
  misc_feature (1)..(25): SEQ ID NO: 4256; WAN024EW8; Start 239; Stop 263
gagacagaagagattggctacattg

SEQ ID NO: 377952 - DNA, 25 bp, Artificial
  probe
  misc_feature (1)..(25): SEQ ID NO: 4256; WAN024EW8; Start 238; Stop 262
agagacagaagagattggctacatt

SEQ ID NO: 377953 - DNA, 25 bp, Artificial
  probe
  misc_feature (1)..(25): SEQ ID NO: 4256; WAN024EW8; Start 240; Stop 264
agacagaagagattggctacattga

SEQ ID NO: 377954 - DNA, 25 bp, Artificial
  probe
  misc_feature (1)..(25): SEQ ID NO: 4256; WAN024EW8; Start 245; Stop 269
gaagagattggctacattgatagaa

SEQ ID NO: 377955 - DNA, 25 bp, Artificial
  probe
  misc_feature (1)..(25): SEQ ID NO: 4256; WAN024EW8; Start 233; Stop 257
cagttagagacagaagagattggct

SEQ ID NO: 377956 - DNA, 25 bp, Artificial
  probe
  misc_feature (1)..(25): SEQ ID NO: 4256; WAN024EW8; Start 222; Stop 246
ctcctattccacagttagagacaga

SEQ ID NO: 377957 - DNA, 25 bp, Artificial
  probe
  misc_feature (1)..(25): SEQ ID NO: 4256; WAN024EW8; Start 232; Stop 256
acagttagagacagaagagattggc

SEQ ID NO: 377958 - DNA, 25 bp, Artificial
  probe
  misc_feature (1)..(25): SEQ ID NO: 4256; WAN024EW8; Start 246; Stop 270
aagagattggctacattgatagaat

SEQ ID NO: 377959 - DNA, 25 bp, Artificial
  probe
  misc_feature (1)..(25): SEQ ID NO: 4256; WAN024EW8; Start 247; Stop 271
agagattggctacattgatagaata

SEQ ID NO: 377960 - DNA, 25 bp, Artificial
  probe
  misc_feature (1)..(25): SEQ ID NO: 4256; WAN024EW8; Start 205; Stop 229
tatccgatattgcccatctcctatt

SEQ ID NO: 377961 - DNA, 25 bp, Artificial
  probe
  misc_feature (1)..(25): SEQ ID NO: 4256; WAN024EW8; Start 204; Stop 228
ctatccgatattgcccatctcctat

SEQ ID NO: 377962 - DNA, 25 bp, Artificial
  probe
  misc_feature (1)..(25): SEQ ID NO: 4256; WAN024EW8; Start 206; Stop 230
atccgatattgcccatctcctattc

SEQ ID NO: 377963 - DNA, 25 bp, Artificial
  probe
  misc_feature (1)..(25): SEQ ID NO: 4256; WAN024EW8; Start 211; Stop 235
atattgcccatctcctattccacag

SEQ ID NO: 377964 - DNA, 25 bp, Artificial
  probe
  misc_feature (1)..(25): SEQ ID NO: 4256; WAN024EW8; Start 210; Stop 234
gatattgcccatctcctattccaca

SEQ ID NO: 377965 - DNA, 25 bp, Artificial
  probe
  misc_feature (1)..(25): SEQ ID NO: 4256; WAN024EW8; Start 51; Stop 75
gcaaattcttctacattcaagtgtg

SEQ ID NO: 377966 - DNA, 25 bp, Artificial
  probe
  misc_feature (1)..(25): SEQ ID NO: 4256; WAN024EW8; Start 203; Stop 227
tctatccgatattgcccatctccta

SEQ ID NO: 377967 - DNA, 25 bp, Artificial
  probe
  misc_feature (1)..(25): SEQ ID NO: 4257; WAN024CUG; Start 265; Stop 289
aaccaagttgttcgtagtcattctt

SEQ ID NO: 377968 - DNA, 25 bp, Artificial
  probe
  misc_feature (1)..(25): SEQ ID NO: 4257; WAN024CUG; Start 493; Stop 517
agtgacgatgatgtcttgtaactaa

SEQ ID NO: 377969 - DNA, 25 bp, Artificial
  probe
  misc_feature (1)..(25): SEQ ID NO: 4257; WAN024CUG; Start 492; Stop 516
gagtgacgatgatgtcttgtaacta

SEQ ID NO: 377970 - DNA, 25 bp, Artificial
  probe
  misc_feature (1)..(25): SEQ ID NO: 4257; WAN024CUG; Start 494; Stop 518
gtgacgatgatgtcttgtaactaat

SEQ ID NO: 377971 - DNA, 25 bp, Artificial
  probe
  misc_feature (1)..(25): SEQ ID NO: 4257; WAN024CUG; Start 192; Stop 216
aattcaacacagtggagcttacatt

SEQ ID NO: 377972 - DNA, 25 bp, Artificial
  probe
  misc_feature (1)..(25): SEQ ID NO: 4257; WAN024CUG; Start 491; Stop 515
tgagtgacgatgatgtcttgtaact

SEQ ID NO: 377973 - DNA, 25 bp, Artificial
  probe
  misc_feature (1)..(25): SEQ ID NO: 4257; WAN024CUG; Start 490; Stop 514
gtgagtgacgatgatgtcttgtaac

SEQ ID NO: 377974 - DNA, 25 bp, Artificial
  probe
  misc_feature (1)..(25): SEQ ID NO: 4257; WAN024CUG; Start 3; Stop 27
gtcagcacaaattacgattaaccat

SEQ ID NO: 377975 - DNA, 25 bp, Artificial
  probe
  misc_feature (1)..(25): SEQ ID NO: 4257; WAN024CUG; Start 263; Stop 287
gaaaccaagttgttcgtagtcattc

SEQ ID NO: 377976 - DNA, 25 bp, Artificial
  probe
  misc_feature (1)..(25): SEQ ID NO: 4257; WAN024CUG; Start 4; Stop 28
tcagcacaaattacgattaaccata

SEQ ID NO: 377977 - DNA, 25 bp, Artificial
  probe
  misc_feature (1)..(25): SEQ ID NO: 4257; WAN024CUG; Start 264; Stop 288
aaaccaagttgttcgtagtcattct

SEQ ID NO: 377978 - DNA, 25 bp, Artificial
  probe
  misc_feature (1)..(25): SEQ ID NO: 4257; WAN024CUG; Start 193; Stop 217
attcaacacagtggagcttacattg

SEQ ID NO: 377979 - DNA, 25 bp, Artificial
  probe
  misc_feature (1)..(25): SEQ ID NO: 4257; WAN024CUG; Start 481; Stop 505
aattccaaggtgagtgacgatgatg

SEQ ID NO: 377980 - DNA, 25 bp, Artificial
  probe
  misc_feature (1)..(25): SEQ ID NO: 4257; WAN024CUG; Start 489; Stop 513
ggtgagtgacgatgatgtcttgtaa

SEQ ID NO: 377981 - DNA, 25 bp, Artificial
  probe
  misc_feature (1)..(25): SEQ ID NO: 4257; WAN024CUG; Start 5; Stop 29
cagcacaaattacgattaaccataa

SEQ ID NO: 377982 - DNA, 25 bp, Artificial
  probe
  misc_feature (1)..(25): SEQ ID NO: 4257; WAN024CUG; Start 393; Stop 417
actatggaatagatggcaaacaatc

SEQ ID NO: 377983 - DNA, 25 bp, Artificial
  probe
  misc_feature (1)..(25): SEQ ID NO: 4257; WAN024CUG; Start 271; Stop 295
gttgttcgtagtcattcttgggaag

SEQ ID NO: 377984 - DNA, 25 bp, Artificial
  probe
  misc_feature (1)..(25): SEQ ID NO: 4257; WAN024CUG; Start 262; Stop 286
ggaaaccaagttgttcgtagtcatt

SEQ ID NO: 377985 - DNA, 25 bp, Artificial
  probe
  misc_feature (1)..(25): SEQ ID NO: 4257; WAN024CUG; Start 2; Stop 26
tgtcagcacaaattacgattaacca

SEQ ID NO: 377986 - DNA, 25 bp, Artificial
  probe
  misc_feature (1)..(25): SEQ ID NO: 4257; WAN024CUG; Start 349; Stop 373
aatatgagaaatctgcgagttaaga

SEQ ID NO: 377987 - DNA, 25 bp, Artificial
  probe
  misc_feature (1)..(25): SEQ ID NO: 4257; WAN024CUG; Start 270; Stop 294
agttgttcgtagtcattcttgggaa

SEQ ID NO: 377988 - DNA, 25 bp, Artificial
  probe
  misc_feature (1)..(25): SEQ ID NO: 4257; WAN024CUG; Start 269; Stop 293
aagttgttcgtagtcattcttggga

SEQ ID NO: 377989 - DNA, 25 bp, Artificial
  probe
  misc_feature (1)..(25): SEQ ID NO: 4257; WAN024CUG; Start 391; Stop 415
ctactatggaatagatggcaaacaa

SEQ ID NO: 377990 - DNA, 25 bp, Artificial
  probe
  misc_feature (1)..(25): SEQ ID NO: 4257; WAN024CUG; Start 1; Stop 25
gtgtcagcacaaattacgattaacc

SEQ ID NO: 377991 - DNA, 25 bp, Artificial
  probe
  misc_feature (1)..(25): SEQ ID NO: 4257; WAN024CUG; Start 6; Stop 30
agcacaaattacgattaaccataaa

SEQ ID NO: 377992 - DNA, 25 bp, Artificial
  probe
  misc_feature (1)..(25): SEQ ID NO: 4257; WAN024CUG; Start 488; Stop 512
aggtgagtgacgatgatgtcttgta

SEQ ID NO: 377993 - DNA, 25 bp, Artificial
  probe
  misc_feature (1)..(25): SEQ ID NO: 4257; WAN024CUG; Start 348; Stop 372
aaatatgagaaatctgcgagttaag

SEQ ID NO: 377994 - DNA, 25 bp, Artificial
  probe
  misc_feature (1)..(25): SEQ ID NO: 4257; WAN024CUG; Start 254; Stop 278
ataaagatggaaaccaagttgttcg

SEQ ID NO: 377995 - DNA, 25 bp, Artificial
  probe
  misc_feature (1)..(25): SEQ ID NO: 4257; WAN024CUG; Start 46; Stop 70
cggattgagctagaaggctataatg

SEQ ID NO: 377996 - DNA, 25 bp, Artificial
  probe
  misc_feature (1)..(25): SEQ ID NO: 4257; WAN024CUG; Start 45; Stop 69
tcggattgagctagaaggctataat

SEQ ID NO: 377997 - DNA, 25 bp, Artificial
  probe
  misc_feature (1)..(25): SEQ ID NO: 4257; WAN024CUG; Start 274; Stop 298
gttcgtagtcattcttgggaaggaa

SEQ ID NO: 377998 - DNA, 25 bp, Artificial
  probe
  misc_feature (1)..(25): SEQ ID NO: 4257; WAN024CUG; Start 47; Stop 71
ggattgagctagaaggctataatgc

SEQ ID NO: 377999 - DNA, 25 bp, Artificial
  probe
  misc_feature (1)..(25): SEQ ID NO: 4257; WAN024CUG; Start 44; Stop 68
ttcggattgagctagaaggctataa

SEQ ID NO: 378000 - DNA, 25 bp, Artificial
  probe
  misc_feature (1)..(25): SEQ ID NO: 4258; WAN024EXJ; Start 350; Stop 374
ggattcaagcactcttagataagga

SEQ ID NO: 378001 - DNA, 25 bp, Artificial
  probe
  misc_feature (1)..(25): SEQ ID NO: 4258; WAN024EXJ; Start 349; Stop 373
tggattcaagcactcttagataagg

SEQ ID NO: 378002 - DNA, 25 bp, Artificial
  probe
  misc_feature (1)..(25): SEQ ID NO: 4258; WAN024EXJ; Start 311; Stop 335
aagaatatgacttcaccttgacagt

SEQ ID NO: 378003 - DNA, 25 bp, Artificial
  probe
  misc_feature (1)..(25): SEQ ID NO: 4258; WAN024EXJ; Start 353; Stop 377
ttcaagcactcttagataaggaagt

SEQ ID NO: 378004 - DNA, 25 bp, Artificial
  probe
  misc_feature (1)..(25): SEQ ID NO: 4258; WAN024EXJ; Start 352; Stop 376
attcaagcactcttagataaggaag

SEQ ID NO: 378005 - DNA, 25 bp, Artificial
  probe
  misc_feature (1)..(25): SEQ ID NO: 4258; WAN024EXJ; Start 351; Stop 375
gattcaagcactcttagataaggaa

SEQ ID NO: 378006 - DNA, 25 bp, Artificial
  probe
  misc_feature (1)..(25): SEQ ID NO: 4258; WAN024EXJ; Start 360; Stop 384
actcttagataaggaagtggaccta

SEQ ID NO: 378007 - DNA, 25 bp, Artificial
  probe
  misc_feature (1)..(25): SEQ ID NO: 4258; WAN024EXJ; Start 312; Stop 336
agaatatgacttcaccttgacagtg

SEQ ID NO: 378008 - DNA, 25 bp, Artificial
  probe
  misc_feature (1)..(25): SEQ ID NO: 4258; WAN024EXJ; Start 365; Stop 389
tagataaggaagtggacctaactgg

SEQ ID NO: 378009 - DNA, 25 bp, Artificial
  probe
  misc_feature (1)..(25): SEQ ID NO: 4258; WAN024EXJ; Start 348; Stop 372
gtggattcaagcactcttagataag

SEQ ID NO: 378010 - DNA, 25 bp, Artificial
  probe
  misc_feature (1)..(25): SEQ ID NO: 4258; WAN024EXJ; Start 364; Stop 388
ttagataaggaagtggacctaactg

SEQ ID NO: 378011 - DNA, 25 bp, Artificial
  probe
  misc_feature (1)..(25): SEQ ID NO: 4258; WAN024EXJ; Start 368; Stop 392
ataaggaagtggacctaactggatt

SEQ ID NO: 378012 - DNA, 25 bp, Artificial
  probe
  misc_feature (1)..(25): SEQ ID NO: 4258; WAN024EXJ; Start 808; Stop 832
tatggagcaacttatcaagcggata

SEQ ID NO: 378013 - DNA, 25 bp, Artificial
  probe
  misc_feature (1)..(25): SEQ ID NO: 4258; WAN024EXJ; Start 363; Stop 387
cttagataaggaagtggacctaact

SEQ ID NO: 378014 - DNA, 25 bp, Artificial
  probe
  misc_feature (1)..(25): SEQ ID NO: 4258; WAN024EXJ; Start 362; Stop 386
tcttagataaggaagtggacctaac

SEQ ID NO: 378015 - DNA, 25 bp, Artificial
  probe
  misc_feature (1)..(25): SEQ ID NO: 4258; WAN024EXJ; Start 361; Stop 385
ctcttagataaggaagtggacctaa

SEQ ID NO: 378016 - DNA, 25 bp, Artificial
  probe
  misc_feature (1)..(25): SEQ ID NO: 4258; WAN024EXJ; Start 367; Stop 391
gataaggaagtggacctaactggat

SEQ ID NO: 378017 - DNA, 25 bp, Artificial
  probe
  misc_feature (1)..(25): SEQ ID NO: 4258; WAN024EXJ; Start 223; Stop 247
gatgaagccattgaactcagacaag

SEQ ID NO: 378018 - DNA, 25 bp, Artificial
  probe
  misc_feature (1)..(25): SEQ ID NO: 4258; WAN024EXJ; Start 313; Stop 337
gaatatgacttcaccttgacagtgg

SEQ ID NO: 378019 - DNA, 25 bp, Artificial
  probe
  misc_feature (1)..(25): SEQ ID NO: 4258; WAN024EXJ; Start 715; Stop 739
gtcttggatttgccttatgatttga

SEQ ID NO: 378020 - DNA, 25 bp, Artificial
  probe
  misc_feature (1)..(25): SEQ ID NO: 4258; WAN024EXJ; Start 720; Stop 744
ggatttgccttatgatttgataccg

SEQ ID NO: 378021 - DNA, 25 bp, Artificial
  probe
  misc_feature (1)..(25): SEQ ID NO: 4258; WAN024EXJ; Start 369; Stop 393
taaggaagtggacctaactggattg

SEQ ID NO: 378022 - DNA, 25 bp, Artificial
  probe
  misc_feature (1)..(25): SEQ ID NO: 4258; WAN024EXJ; Start 807; Stop 831
ctatggagcaacttatcaagcggat

SEQ ID NO: 378023 - DNA, 25 bp, Artificial
  probe
  misc_feature (1)..(25): SEQ ID NO: 4258; WAN024EXJ; Start 719; Stop 743
tggatttgccttatgatttgatacc

SEQ ID NO: 378024 - DNA, 25 bp, Artificial
  probe
  misc_feature (1)..(25): SEQ ID NO: 4258; WAN024EXJ; Start 714; Stop 738
ggtcttggatttgccttatgatttg

SEQ ID NO: 378025 - DNA, 25 bp, Artificial
  probe
  misc_feature (1)..(25): SEQ ID NO: 4258; WAN024EXJ; Start 550; Stop 574
tttaatgcccagttagaacggttta

SEQ ID NO: 378026 - DNA, 25 bp, Artificial
  probe
  misc_feature (1)..(25): SEQ ID NO: 4258; WAN024EXJ; Start 489; Stop 513
tgtttgtgttgaaggaatctttacc

SEQ ID NO: 378027 - DNA, 25 bp, Artificial
  probe
  misc_feature (1)..(25): SEQ ID NO: 4258; WAN024EXJ; Start 487; Stop 511
ggtgtttgtgttgaaggaatcttta

SEQ ID NO: 378028 - DNA, 25 bp, Artificial
  probe
  misc_feature (1)..(25): SEQ ID NO: 4258; WAN024EXJ; Start 496; Stop 520
gttgaaggaatctttacccactttg

SEQ ID NO: 378029 - DNA, 25 bp, Artificial
  probe
  misc_feature (1)..(25): SEQ ID NO: 4258; WAN024EXJ; Start 716; Stop 740
tcttggatttgccttatgatttgat

SEQ ID NO: 378030 - DNA, 25 bp, Artificial
  probe
  misc_feature (1)..(25): SEQ ID NO: 4258; WAN024EXJ; Start 495; Stop 519
tgttgaaggaatctttacccacttt

SEQ ID NO: 378031 - DNA, 25 bp, Artificial
  probe
  misc_feature (1)..(25): SEQ ID NO: 4258; WAN024EXJ; Start 490; Stop 514
gtttgtgttgaaggaatctttaccc

SEQ ID NO: 378032 - DNA, 25 bp, Artificial
  probe
  misc_feature (1)..(25): SEQ ID NO: 4258; WAN024EXJ; Start 499; Stop 523
gaaggaatctttacccactttgcta

SEQ ID NO: 378033 - DNA, 25 bp, Artificial
  probe
  misc_feature (1)..(25): SEQ ID NO: 4259; WAN024F38; Start 76; Stop 100
ataacacctccatcatcagcattac

SEQ ID NO: 378034 - DNA, 25 bp, Artificial
  probe
  misc_feature (1)..(25): SEQ ID NO: 4259; WAN024F38; Start 75; Stop 99
tataacacctccatcatcagcatta

SEQ ID NO: 378035 - DNA, 25 bp, Artificial
  probe
  misc_feature (1)..(25): SEQ ID NO: 4259; WAN024F38; Start 77; Stop 101
taacacctccatcatcagcattact

SEQ ID NO: 378036 - DNA, 25 bp, Artificial
  probe
  misc_feature (1)..(25): SEQ ID NO: 4259; WAN024F38; Start 74; Stop 98
ttataacacctccatcatcagcatt

SEQ ID NO: 378037 - DNA, 25 bp, Artificial
  probe
  misc_feature (1)..(25): SEQ ID NO: 4259; WAN024F38; Start 78; Stop 102
aacacctccatcatcagcattactt

SEQ ID NO: 378038 - DNA, 25 bp, Artificial
  probe
  misc_feature (1)..(25): SEQ ID NO: 4259; WAN024F38; Start 103; Stop 127
tgcctatcaattcctttcttaaaca

SEQ ID NO: 378039 - DNA, 25 bp, Artificial
  probe
  misc_feature (1)..(25): SEQ ID NO: 4259; WAN024F38; Start 113; Stop 137
ttcctttcttaaacaactcttctga

SEQ ID NO: 378040 - DNA, 25 bp, Artificial
  probe
  misc_feature (1)..(25): SEQ ID NO: 4259; WAN024F38; Start 80; Stop 104
cacctccatcatcagcattactttg

SEQ ID NO: 378041 - DNA, 25 bp, Artificial
  probe
  misc_feature (1)..(25): SEQ ID NO: 4259; WAN024F38; Start 114; Stop 138
tcctttcttaaacaactcttctgaa

SEQ ID NO: 378042 - DNA, 25 bp, Artificial
  probe
  misc_feature (1)..(25): SEQ ID NO: 4259; WAN024F38; Start 73; Stop 97
tttataacacctccatcatcagcat

SEQ ID NO: 378043 - DNA, 25 bp, Artificial
  probe
  misc_feature (1)..(25): SEQ ID NO: 4259; WAN024F38; Start 99; Stop 123
actttgcctatcaattcctttctta

SEQ ID NO: 378044 - DNA, 25 bp, Artificial
  probe
  misc_feature (1)..(25): SEQ ID NO: 4259; WAN024F38; Start 98; Stop 122
tactttgcctatcaattcctttctt

SEQ ID NO: 378045 - DNA, 25 bp, Artificial
  probe
  misc_feature (1)..(25): SEQ ID NO: 4259; WAN024F38; Start 97; Stop 121
ttactttgcctatcaattcctttct

SEQ ID NO: 378046 - DNA, 25 bp, Artificial
  probe
  misc_feature (1)..(25): SEQ ID NO: 4259; WAN024F38; Start 79; Stop 103
acacctccatcatcagcattacttt

SEQ ID NO: 378047 - DNA, 25 bp, Artificial
  probe
  misc_feature (1)..(25): SEQ ID NO: 4259; WAN024F38; Start 162; Stop 186
tgaattgaaaggtgtcctgaaagat

SEQ ID NO: 378048 - DNA, 25 bp, Artificial
  probe
  misc_feature (1)..(25): SEQ ID NO: 4259; WAN024F38; Start 104; Stop 128
gcctatcaattcctttcttaaacaa

SEQ ID NO: 378049 - DNA, 25 bp, Artificial
  probe
  misc_feature (1)..(25): SEQ ID NO: 4259; WAN024F38; Start 163; Stop 187
gaattgaaaggtgtcctgaaagata

SEQ ID NO: 378050 - DNA, 25 bp, Artificial
  probe
  misc_feature (1)..(25): SEQ ID NO: 4259; WAN024F38; Start 161; Stop 185
ctgaattgaaaggtgtcctgaaaga

SEQ ID NO: 378051 - DNA, 25 bp, Artificial
  probe
  misc_feature (1)..(25): SEQ ID NO: 4259; WAN024F38; Start 160; Stop 184
tctgaattgaaaggtgtcctgaaag

SEQ ID NO: 378052 - DNA, 25 bp, Artificial
  probe
  misc_feature (1)..(25): SEQ ID NO: 4259; WAN024F38; Start 159; Stop 183
ctctgaattgaaaggtgtcctgaaa

SEQ ID NO: 378053 - DNA, 25 bp, Artificial
  probe
  misc_feature (1)..(25): SEQ ID NO: 4259; WAN024F38; Start 112; Stop 136
attcctttcttaaacaactcttctg

SEQ ID NO: 378054 - DNA, 25 bp, Artificial
  probe
  misc_feature (1)..(25): SEQ ID NO: 4259; WAN024F38; Start 102; Stop 126
ttgcctatcaattcctttcttaaac

SEQ ID NO: 378055 - DNA, 25 bp, Artificial
  probe
  misc_feature (1)..(25): SEQ ID NO: 4259; WAN024F38; Start 95; Stop 119
cattactttgcctatcaattccttt

SEQ ID NO: 378056 - DNA, 25 bp, Artificial
  probe
  misc_feature (1)..(25): SEQ ID NO: 4259; WAN024F38; Start 153; Stop 177
ttctagctctgaattgaaaggtgtc

SEQ ID NO: 378057 - DNA, 25 bp, Artificial
  probe
  misc_feature (1)..(25): SEQ ID NO: 4259; WAN024F38; Start 115; Stop 139
cctttcttaaacaactcttctgaat

SEQ ID NO: 378058 - DNA, 25 bp, Artificial
  probe
  misc_feature (1)..(25): SEQ ID NO: 4259; WAN024F38; Start 164; Stop 188
aattgaaaggtgtcctgaaagatat

SEQ ID NO: 378059 - DNA, 25 bp, Artificial
  probe
  misc_feature (1)..(25): SEQ ID NO: 4259; WAN024F38; Start 100; Stop 124
ctttgcctatcaattcctttcttaa

SEQ ID NO: 378060 - DNA, 25 bp, Artificial
  probe
  misc_feature (1)..(25): SEQ ID NO: 4259; WAN024F38; Start 96; Stop 120
attactttgcctatcaattcctttc

SEQ ID NO: 378061 - DNA, 25 bp, Artificial
  probe
  misc_feature (1)..(25): SEQ ID NO: 4259; WAN024F38; Start 109; Stop 133
tcaattcctttcttaaacaactctt

SEQ ID NO: 378062 - DNA, 25 bp, Artificial
  probe
  misc_feature (1)..(25): SEQ ID NO: 4259; WAN024F38; Start 165; Stop 189
attgaaaggtgtcctgaaagatata

SEQ ID NO: 378063 - DNA, 25 bp, Artificial
  probe
  misc_feature (1)..(25): SEQ ID NO: 4259; WAN024F38; Start 110; Stop 134
caattcctttcttaaacaactcttc

SEQ ID NO: 378064 - DNA, 25 bp, Artificial
  probe
  misc_feature (1)..(25): SEQ ID NO: 4259; WAN024F38; Start 101; Stop 125
tttgcctatcaattcctttcttaaa

SEQ ID NO: 378065 - DNA, 25 bp, Artificial
  probe
  misc_feature (1)..(25): SEQ ID NO: 4259; WAN024F38; Start 154; Stop 178
tctagctctgaattgaaaggtgtcc

SEQ ID NO: 378066 - DNA, 25 bp, Artificial
  probe
  misc_feature (1)..(25): SEQ ID NO: 4260; WAN024FB6; Start 212; Stop 236
ttgtccatccttatagtccaccttg

SEQ ID NO: 378067 - DNA, 25 bp, Artificial
  probe
  misc_feature (1)..(25): SEQ ID NO: 4260; WAN024FB6; Start 213; Stop 237
tgtccatccttatagtccaccttga

SEQ ID NO: 378068 - DNA, 25 bp, Artificial
  probe
  misc_feature (1)..(25): SEQ ID NO: 4260; WAN024FB6; Start 128; Stop 152
accgtctttatcactcatttcctta

SEQ ID NO: 378069 - DNA, 25 bp, Artificial
  probe
  misc_feature (1)..(25): SEQ ID NO: 4260; WAN024FB6; Start 127; Stop 151
aaccgtctttatcactcatttcctt

SEQ ID NO: 378070 - DNA, 25 bp, Artificial
  probe
  misc_feature (1)..(25): SEQ ID NO: 4260; WAN024FB6; Start 130; Stop 154
cgtctttatcactcatttccttacc

SEQ ID NO: 378071 - DNA, 25 bp, Artificial
  probe
  misc_feature (1)..(25): SEQ ID NO: 4260; WAN024FB6; Start 129; Stop 153
ccgtctttatcactcatttccttac

SEQ ID NO: 378072 - DNA, 25 bp, Artificial
  probe
  misc_feature (1)..(25): SEQ ID NO: 4260; WAN024FB6; Start 131; Stop 155
gtctttatcactcatttccttaccc

SEQ ID NO: 378073 - DNA, 25 bp, Artificial
  probe
  misc_feature (1)..(25): SEQ ID NO: 4260; WAN024FB6; Start 211; Stop 235
tttgtccatccttatagtccacctt

SEQ ID NO: 378074 - DNA, 25 bp, Artificial
  probe
  misc_feature (1)..(25): SEQ ID NO: 4260; WAN024FB6; Start 126; Stop 150
caaccgtctttatcactcatttcct

SEQ ID NO: 378075 - DNA, 25 bp, Artificial
  probe
  misc_feature (1)..(25): SEQ ID NO: 4260; WAN024FB6; Start 124; Stop 148
tccaaccgtctttatcactcatttc

SEQ ID NO: 378076 - DNA, 25 bp, Artificial
  probe
  misc_feature (1)..(25): SEQ ID NO: 4260; WAN024FB6; Start 123; Stop 147
ctccaaccgtctttatcactcattt

SEQ ID NO: 378077 - DNA, 25 bp, Artificial
  probe
  misc_feature (1)..(25): SEQ ID NO: 4260; WAN024FB6; Start 125; Stop 149
ccaaccgtctttatcactcatttcc

SEQ ID NO: 378078 - DNA, 25 bp, Artificial
  probe
  misc_feature (1)..(25): SEQ ID NO: 4260; WAN024FB6; Start 122; Stop 146
actccaaccgtctttatcactcatt

SEQ ID NO: 378079 - DNA, 25 bp, Artificial
  probe
  misc_feature (1)..(25): SEQ ID NO: 4260; WAN024FB6; Start 158; Stop 182
actatggtaaagactcttcaactct

SEQ ID NO: 378080 - DNA, 25 bp, Artificial
  probe
  misc_feature (1)..(25): SEQ ID NO: 4260; WAN024FB6; Start 156; Stop 180
caactatggtaaagactcttcaact

SEQ ID NO: 378081 - DNA, 25 bp, Artificial
  probe
  misc_feature (1)..(25): SEQ ID NO: 4260; WAN024FB6; Start 157; Stop 181
aactatggtaaagactcttcaactc

SEQ ID NO: 378082 - DNA, 25 bp, Artificial
  probe
  misc_feature (1)..(25): SEQ ID NO: 4260; WAN024FB6; Start 121; Stop 145
cactccaaccgtctttatcactcat

SEQ ID NO: 378083 - DNA, 25 bp, Artificial
  probe
  misc_feature (1)..(25): SEQ ID NO: 4260; WAN024FB6; Start 154; Stop 178
cccaactatggtaaagactcttcaa

SEQ ID NO: 378084 - DNA, 25 bp, Artificial
  probe
  misc_feature (1)..(25): SEQ ID NO: 4260; WAN024FB6; Start 155; Stop 179
ccaactatggtaaagactcttcaac

SEQ ID NO: 378085 - DNA, 25 bp, Artificial
  probe
  misc_feature (1)..(25): SEQ ID NO: 4260; WAN024FB6; Start 162; Stop 186
tggtaaagactcttcaactcttcaa

SEQ ID NO: 378086 - DNA, 25 bp, Artificial
  probe
  misc_feature (1)..(25): SEQ ID NO: 4260; WAN024FB6; Start 161; Stop 185
atggtaaagactcttcaactcttca

SEQ ID NO: 378087 - DNA, 25 bp, Artificial
  probe
  misc_feature (1)..(25): SEQ ID NO: 4260; WAN024FB6; Start 134; Stop 158
tttatcactcatttccttaccccaa

SEQ ID NO: 378088 - DNA, 25 bp, Artificial
  probe
  misc_feature (1)..(25): SEQ ID NO: 4260; WAN024FB6; Start 133; Stop 157
ctttatcactcatttccttacccca

SEQ ID NO: 378089 - DNA, 25 bp, Artificial
  probe
  misc_feature (1)..(25): SEQ ID NO: 4260; WAN024FB6; Start 132; Stop 156
tctttatcactcatttccttacccc

SEQ ID NO: 378090 - DNA, 25 bp, Artificial
  probe
  misc_feature (1)..(25): SEQ ID NO: 4260; WAN024FB6; Start 135; Stop 159
ttatcactcatttccttaccccaac

SEQ ID NO: 378091 - DNA, 25 bp, Artificial
  probe
  misc_feature (1)..(25): SEQ ID NO: 4260; WAN024FB6; Start 163; Stop 187
ggtaaagactcttcaactcttcaaa

SEQ ID NO: 378092 - DNA, 25 bp, Artificial
  probe
  misc_feature (1)..(25): SEQ ID NO: 4260; WAN024FB6; Start 209; Stop 233
cttttgtccatccttatagtccacc

SEQ ID NO: 378093 - DNA, 25 bp, Artificial
  probe
  misc_feature (1)..(25): SEQ ID NO: 4260; WAN024FB6; Start 203; Stop 227
ggtccacttttgtccatccttatag

SEQ ID NO: 378094 - DNA, 25 bp, Artificial
  probe
  misc_feature (1)..(25): SEQ ID NO: 4260; WAN024FB6; Start 173; Stop 197
cttcaactcttcaaaatcaaaggga

SEQ ID NO: 378095 - DNA, 25 bp, Artificial
  probe
  misc_feature (1)..(25): SEQ ID NO: 4260; WAN024FB6; Start 172; Stop 196
tcttcaactcttcaaaatcaaaggg

SEQ ID NO: 378096 - DNA, 25 bp, Artificial
  probe
  misc_feature (1)..(25): SEQ ID NO: 4260; WAN024FB6; Start 138; Stop 162
tcactcatttccttaccccaactat

SEQ ID NO: 378097 - DNA, 25 bp, Artificial
  probe
  misc_feature (1)..(25): SEQ ID NO: 4260; WAN024FB6; Start 137; Stop 161
atcactcatttccttaccccaacta

SEQ ID NO: 378098 - DNA, 25 bp, Artificial
  probe
  misc_feature (1)..(25): SEQ ID NO: 4260; WAN024FB6; Start 136; Stop 160
tatcactcatttccttaccccaact

SEQ ID NO: 378099 - DNA, 25 bp, Artificial
  probe
  misc_feature (1)..(25): SEQ ID NO: 4261; WAN024GDZ; Start 104; Stop 128
tcgttggttcaggatatgtgtataa

SEQ ID NO: 378100 - DNA, 25 bp, Artificial
  probe
  misc_feature (1)..(25): SEQ ID NO: 4261; WAN024GDZ; Start 103; Stop 127
ttcgttggttcaggatatgtgtata

SEQ ID NO: 378101 - DNA, 25 bp, Artificial
  probe
  misc_feature (1)..(25): SEQ ID NO: 4261; WAN024GDZ; Start 386; Stop 410
gttggctctctctaactgctaatag

SEQ ID NO: 378102 - DNA, 25 bp, Artificial
  probe
  misc_feature (1)..(25): SEQ ID NO: 4261; WAN024GDZ; Start 105; Stop 129
cgttggttcaggatatgtgtataat

SEQ ID NO: 378103 - DNA, 25 bp, Artificial
  probe
  misc_feature (1)..(25): SEQ ID NO: 4261; WAN024GDZ; Start 134; Stop 158
tcagtctactcttaacacctcttgg

SEQ ID NO: 378104 - DNA, 25 bp, Artificial
  probe
  misc_feature (1)..(25): SEQ ID NO: 4261; WAN024GDZ; Start 388; Stop 412
tggctctctctaactgctaatagta

SEQ ID NO: 378105 - DNA, 25 bp, Artificial
  probe
  misc_feature (1)..(25): SEQ ID NO: 4261; WAN024GDZ; Start 387; Stop 411
ttggctctctctaactgctaatagt

SEQ ID NO: 378106 - DNA, 25 bp, Artificial
  probe
  misc_feature (1)..(25): SEQ ID NO: 4261; WAN024GDZ; Start 389; Stop 413
ggctctctctaactgctaatagtat

SEQ ID NO: 378107 - DNA, 25 bp, Artificial
  probe
  misc_feature (1)..(25): SEQ ID NO: 4261; WAN024GDZ; Start 446; Stop 470
acattaagttaggttactacgcctt

SEQ ID NO: 378108 - DNA, 25 bp, Artificial
  probe
  misc_feature (1)..(25): SEQ ID NO: 4261; WAN024GDZ; Start 444; Stop 468
atacattaagttaggttactacgcc

SEQ ID NO: 378109 - DNA, 25 bp, Artificial
  probe
  misc_feature (1)..(25): SEQ ID NO: 4261; WAN024GDZ; Start 360; Stop 384
tatcgtaactaagaatcgctatgaa

SEQ ID NO: 378110 - DNA, 25 bp, Artificial
  probe
  misc_feature (1)..(25): SEQ ID NO: 4261; WAN024GDZ; Start 359; Stop 383
ttatcgtaactaagaatcgctatga

SEQ ID NO: 378111 - DNA, 25 bp, Artificial
  probe
  misc_feature (1)..(25): SEQ ID NO: 4261; WAN024GDZ; Start 445; Stop 469
tacattaagttaggttactacgcct

SEQ ID NO: 378112 - DNA, 25 bp, Artificial
  probe
  misc_feature (1)..(25): SEQ ID NO: 4261; WAN024GDZ; Start 136; Stop 160
agtctactcttaacacctcttggtt

SEQ ID NO: 378113 - DNA, 25 bp, Artificial
  probe
  misc_feature (1)..(25): SEQ ID NO: 4261; WAN024GDZ; Start 66; Stop 90
cttgcttgctttcttgtctatcttt

SEQ ID NO: 378114 - DNA, 25 bp, Artificial
  probe
  misc_feature (1)..(25): SEQ ID NO: 4261; WAN024GDZ; Start 59; Stop 83
atgttatcttgcttgctttcttgtc

SEQ ID NO: 378115 - DNA, 25 bp, Artificial
  probe
  misc_feature (1)..(25): SEQ ID NO: 4261; WAN024GDZ; Start 102; Stop 126
tttcgttggttcaggatatgtgtat

SEQ ID NO: 378116 - DNA, 25 bp, Artificial
  probe
  misc_feature (1)..(25): SEQ ID NO: 4261; WAN024GDZ; Start 61; Stop 85
gttatcttgcttgctttcttgtcta

SEQ ID NO: 378117 - DNA, 25 bp, Artificial
  probe
  misc_feature (1)..(25): SEQ ID NO: 4261; WAN024GDZ; Start 64; Stop 88
atcttgcttgctttcttgtctatct

SEQ ID NO: 378118 - DNA, 25 bp, Artificial
  probe
  misc_feature (1)..(25): SEQ ID NO: 4261; WAN024GDZ; Start 58; Stop 82
gatgttatcttgcttgctttcttgt

SEQ ID NO: 378119 - DNA, 25 bp, Artificial
  probe
  misc_feature (1)..(25): SEQ ID NO: 4261; WAN024GDZ; Start 65; Stop 89
tcttgcttgctttcttgtctatctt

SEQ ID NO: 378120 - DNA, 25 bp, Artificial
  probe
  misc_feature (1)..(25): SEQ ID NO: 4261; WAN024GDZ; Start 390; Stop 414
gctctctctaactgctaatagtatt

SEQ ID NO: 378121 - DNA, 25 bp, Artificial
  probe
  misc_feature (1)..(25): SEQ ID NO: 4261; WAN024GDZ; Start 63; Stop 87
tatcttgcttgctttcttgtctatc

SEQ ID NO: 378122 - DNA, 25 bp, Artificial
  probe
  misc_feature (1)..(25): SEQ ID NO: 4261; WAN024GDZ; Start 135; Stop 159
cagtctactcttaacacctcttggt

SEQ ID NO: 378123 - DNA, 25 bp, Artificial
  probe
  misc_feature (1)..(25): SEQ ID NO: 4261; WAN024GDZ; Start 362; Stop 386
tcgtaactaagaatcgctatgaaag

SEQ ID NO: 378124 - DNA, 25 bp, Artificial
  probe
  misc_feature (1)..(25): SEQ ID NO: 4261; WAN024GDZ; Start 60; Stop 84
tgttatcttgcttgctttcttgtct

SEQ ID NO: 378125 - DNA, 25 bp, Artificial
  probe
  misc_feature (1)..(25): SEQ ID NO: 4261; WAN024GDZ; Start 402; Stop 426
tgctaatagtattgggattacgctt

SEQ ID NO: 378126 - DNA, 25 bp, Artificial
  probe
  misc_feature (1)..(25): SEQ ID NO: 4261; WAN024GDZ; Start 403; Stop 427
gctaatagtattgggattacgcttg

SEQ ID NO: 378127 - DNA, 25 bp, Artificial
  probe
  misc_feature (1)..(25): SEQ ID NO: 4261; WAN024GDZ; Start 401; Stop 425
ctgctaatagtattgggattacgct

SEQ ID NO: 378128 - DNA, 25 bp, Artificial
  probe
  misc_feature (1)..(25): SEQ ID NO: 4261; WAN024GDZ; Start 369; Stop 393
taagaatcgctatgaaagttggctc

SEQ ID NO: 378129 - DNA, 25 bp, Artificial
  probe
  misc_feature (1)..(25): SEQ ID NO: 4261; WAN024GDZ; Start 368; Stop 392
ctaagaatcgctatgaaagttggct

SEQ ID NO: 378130 - DNA, 25 bp, Artificial
  probe
  misc_feature (1)..(25): SEQ ID NO: 4261; WAN024GDZ; Start 62; Stop 86
ttatcttgcttgctttcttgtctat

SEQ ID NO: 378131 - DNA, 25 bp, Artificial
  probe
  misc_feature (1)..(25): SEQ ID NO: 4261; WAN024GDZ; Start 546; Stop 570
tgccattgtcaaactctatcatcag

SEQ ID NO: 378132 - DNA, 25 bp, Artificial
  probe
  misc_feature (1)..(25): SEQ ID NO: 4262; WAN024CYR; Start 18; Stop 42
gagacaacttatctacttggagacc

SEQ ID NO: 378133 - DNA, 25 bp, Artificial
  probe
  misc_feature (1)..(25): SEQ ID NO: 4262; WAN024CYR; Start 17; Stop 41
cgagacaacttatctacttggagac

SEQ ID NO: 378134 - DNA, 25 bp, Artificial
  probe
  misc_feature (1)..(25): SEQ ID NO: 4262; WAN024CYR; Start 16; Stop 40
ccgagacaacttatctacttggaga

SEQ ID NO: 378135 - DNA, 25 bp, Artificial
  probe
  misc_feature (1)..(25): SEQ ID NO: 4262; WAN024CYR; Start 12; Stop 36
gagtccgagacaacttatctacttg

SEQ ID NO: 378136 - DNA, 25 bp, Artificial
  probe
  misc_feature (1)..(25): SEQ ID NO: 4262; WAN024CYR; Start 13; Stop 37
agtccgagacaacttatctacttgg

SEQ ID NO: 378137 - DNA, 25 bp, Artificial
  probe
  misc_feature (1)..(25): SEQ ID NO: 4262; WAN024CYR; Start 11; Stop 35
cgagtccgagacaacttatctactt

SEQ ID NO: 378138 - DNA, 25 bp, Artificial
  probe
  misc_feature (1)..(25): SEQ ID NO: 4262; WAN024CYR; Start 19; Stop 43
agacaacttatctacttggagacca

SEQ ID NO: 378139 - DNA, 25 bp, Artificial
  probe
  misc_feature (1)..(25): SEQ ID NO: 4262; WAN024CYR; Start 15; Stop 39
tccgagacaacttatctacttggag

SEQ ID NO: 378140 - DNA, 25 bp, Artificial
  probe
  misc_feature (1)..(25): SEQ ID NO: 4262; WAN024CYR; Start 9; Stop 33
aacgagtccgagacaacttatctac

SEQ ID NO: 378141 - DNA, 25 bp, Artificial
  probe
  misc_feature (1)..(25): SEQ ID NO: 4262; WAN024CYR; Start 14; Stop 38
gtccgagacaacttatctacttgga

SEQ ID NO: 378142 - DNA, 25 bp, Artificial
  probe
  misc_feature (1)..(25): SEQ ID NO: 4262; WAN024CYR; Start 265; Stop 289
gtgaatcatctcgtctgtaaagtcc

SEQ ID NO: 378143 - DNA, 25 bp, Artificial
  probe
  misc_feature (1)..(25): SEQ ID NO: 4262; WAN024CYR; Start 264; Stop 288
ggtgaatcatctcgtctgtaaagtc

SEQ ID NO: 378144 - DNA, 25 bp, Artificial
  probe
  misc_feature (1)..(25): SEQ ID NO: 4262; WAN024CYR; Start 161; Stop 185
ttcttaccatcaatctcaagaccac

SEQ ID NO: 378145 - DNA, 25 bp, Artificial
  probe
  misc_feature (1)..(25): SEQ ID NO: 4262; WAN024CYR; Start 10; Stop 34
acgagtccgagacaacttatctact

SEQ ID NO: 378146 - DNA, 25 bp, Artificial
  probe
  misc_feature (1)..(25): SEQ ID NO: 4262; WAN024CYR; Start 122; Stop 146
gggtccactttgagaatttcataaa

SEQ ID NO: 378147 - DNA, 25 bp, Artificial
  probe
  misc_feature (1)..(25): SEQ ID NO: 4262; WAN024CYR; Start 163; Stop 187
cttaccatcaatctcaagaccacgg

SEQ ID NO: 378148 - DNA, 25 bp, Artificial
  probe
  misc_feature (1)..(25): SEQ ID NO: 4262; WAN024CYR; Start 237; Stop 261
cataaaccttgtcaatctcattacg

SEQ ID NO: 378149 - DNA, 25 bp, Artificial
  probe
  misc_feature (1)..(25): SEQ ID NO: 4262; WAN024CYR; Start 250; Stop 274
aatctcattacgagggtgaatcatc

SEQ ID NO: 378150 - DNA, 25 bp, Artificial
  probe
  misc_feature (1)..(25): SEQ ID NO: 4262; WAN024CYR; Start 126; Stop 150
ccactttgagaatttcataaacagc

SEQ ID NO: 378151 - DNA, 25 bp, Artificial
  probe
  misc_feature (1)..(25): SEQ ID NO: 4262; WAN024CYR; Start 238; Stop 262
ataaaccttgtcaatctcattacga

SEQ ID NO: 378152 - DNA, 25 bp, Artificial
  probe
  misc_feature (1)..(25): SEQ ID NO: 4262; WAN024CYR; Start 121; Stop 145
tgggtccactttgagaatttcataa

SEQ ID NO: 378153 - DNA, 25 bp, Artificial
  probe
  misc_feature (1)..(25): SEQ ID NO: 4262; WAN024CYR; Start 249; Stop 273
caatctcattacgagggtgaatcat

SEQ ID NO: 378154 - DNA, 25 bp, Artificial
  probe
  misc_feature (1)..(25): SEQ ID NO: 4262; WAN024CYR; Start 120; Stop 144
ctgggtccactttgagaatttcata

SEQ ID NO: 378155 - DNA, 25 bp, Artificial
  probe
  misc_feature (1)..(25): SEQ ID NO: 4262; WAN024CYR; Start 251; Stop 275
atctcattacgagggtgaatcatct

SEQ ID NO: 378156 - DNA, 25 bp, Artificial
  probe
  misc_feature (1)..(25): SEQ ID NO: 4262; WAN024CYR; Start 239; Stop 263
taaaccttgtcaatctcattacgag

SEQ ID NO: 378157 - DNA, 25 bp, Artificial
  probe
  misc_feature (1)..(25): SEQ ID NO: 4262; WAN024CYR; Start 247; Stop 271
gtcaatctcattacgagggtgaatc

SEQ ID NO: 378158 - DNA, 25 bp, Artificial
  probe
  misc_feature (1)..(25): SEQ ID NO: 4262; WAN024CYR; Start 123; Stop 147
ggtccactttgagaatttcataaac

SEQ ID NO: 378159 - DNA, 25 bp, Artificial
  probe
  misc_feature (1)..(25): SEQ ID NO: 4262; WAN024CYR; Start 266; Stop 290
tgaatcatctcgtctgtaaagtccc

SEQ ID NO: 378160 - DNA, 25 bp, Artificial
  probe
  misc_feature (1)..(25): SEQ ID NO: 4262; WAN024CYR; Start 262; Stop 286
agggtgaatcatctcgtctgtaaag

SEQ ID NO: 378161 - DNA, 25 bp, Artificial
  probe
  misc_feature (1)..(25): SEQ ID NO: 4262; WAN024CYR; Start 248; Stop 272
tcaatctcattacgagggtgaatca

SEQ ID NO: 378162 - DNA, 25 bp, Artificial
  probe
  misc_feature (1)..(25): SEQ ID NO: 4262; WAN024CYR; Start 263; Stop 287
gggtgaatcatctcgtctgtaaagt

SEQ ID NO: 378163 - DNA, 25 bp, Artificial
  probe
  misc_feature (1)..(25): SEQ ID NO: 4262; WAN024CYR; Start 252; Stop 276
tctcattacgagggtgaatcatctc

SEQ ID NO: 378164 - DNA, 25 bp, Artificial
  probe
  misc_feature (1)..(25): SEQ ID NO: 4262; WAN024CYR; Start 8; Stop 32
aaacgagtccgagacaacttatcta

SEQ ID NO: 378165 - DNA, 25 bp, Artificial
  probe
  misc_feature (1)..(25): SEQ ID NO: 4263; WAN024FZY; Start 217; Stop 241
agtcattcaagagtttatcacgaga

SEQ ID NO: 378166 - DNA, 25 bp, Artificial
  probe
  misc_feature (1)..(25): SEQ ID NO: 4263; WAN024FZY; Start 214; Stop 238
ccaagtcattcaagagtttatcacg

SEQ ID NO: 378167 - DNA, 25 bp, Artificial
  probe
  misc_feature (1)..(25): SEQ ID NO: 4263; WAN024FZY; Start 215; Stop 239
caagtcattcaagagtttatcacga

SEQ ID NO: 378168 - DNA, 25 bp, Artificial
  probe
  misc_feature (1)..(25): SEQ ID NO: 4263; WAN024FZY; Start 213; Stop 237
accaagtcattcaagagtttatcac

SEQ ID NO: 378169 - DNA, 25 bp, Artificial
  probe
  misc_feature (1)..(25): SEQ ID NO: 4263; WAN024FZY; Start 216; Stop 240
aagtcattcaagagtttatcacgag

SEQ ID NO: 378170 - DNA, 25 bp, Artificial
  probe
  misc_feature (1)..(25): SEQ ID NO: 4263; WAN024FZY; Start 218; Stop 242
gtcattcaagagtttatcacgagaa

SEQ ID NO: 378171 - DNA, 25 bp, Artificial
  probe
  misc_feature (1)..(25): SEQ ID NO: 4263; WAN024FZY; Start 207; Stop 231
atatcgaccaagtcattcaagagtt

SEQ ID NO: 378172 - DNA, 25 bp, Artificial
  probe
  misc_feature (1)..(25): SEQ ID NO: 4263; WAN024FZY; Start 206; Stop 230
aatatcgaccaagtcattcaagagt

SEQ ID NO: 378173 - DNA, 25 bp, Artificial
  probe
  misc_feature (1)..(25): SEQ ID NO: 4263; WAN024FZY; Start 219; Stop 243
tcattcaagagtttatcacgagaaa

SEQ ID NO: 378174 - DNA, 25 bp, Artificial
  probe
  misc_feature (1)..(25): SEQ ID NO: 4263; WAN024FZY; Start 205; Stop 229
gaatatcgaccaagtcattcaagag

SEQ ID NO: 378175 - DNA, 25 bp, Artificial
  probe
  misc_feature (1)..(25): SEQ ID NO: 4263; WAN024FZY; Start 222; Stop 246
ttcaagagtttatcacgagaaatct

SEQ ID NO: 378176 - DNA, 25 bp, Artificial
  probe
  misc_feature (1)..(25): SEQ ID NO: 4263; WAN024FZY; Start 211; Stop 235
cgaccaagtcattcaagagtttatc

SEQ ID NO: 378177 - DNA, 25 bp, Artificial
  probe
  misc_feature (1)..(25): SEQ ID NO: 4263; WAN024FZY; Start 13; Stop 37
aaatcgctaaatgatccacttctcc

SEQ ID NO: 378178 - DNA, 25 bp, Artificial
  probe
  misc_feature (1)..(25): SEQ ID NO: 4263; WAN024FZY; Start 212; Stop 236
gaccaagtcattcaagagtttatca

SEQ ID NO: 378179 - DNA, 25 bp, Artificial
  probe
  misc_feature (1)..(25): SEQ ID NO: 4263; WAN024FZY; Start 220; Stop 244
cattcaagagtttatcacgagaaat

SEQ ID NO: 378180 - DNA, 25 bp, Artificial
  probe
  misc_feature (1)..(25): SEQ ID NO: 4263; WAN024FZY; Start 221; Stop 245
attcaagagtttatcacgagaaatc

SEQ ID NO: 378181 - DNA, 25 bp, Artificial
  probe
  misc_feature (1)..(25): SEQ ID NO: 4263; WAN024FZY; Start 223; Stop 247
tcaagagtttatcacgagaaatctc

SEQ ID NO: 378182 - DNA, 25 bp, Artificial
  probe
  misc_feature (1)..(25): SEQ ID NO: 4263; WAN024FZY; Start 96; Stop 120
aattctactcgaaaggcatgttcat

SEQ ID NO: 378183 - DNA, 25 bp, Artificial
  probe
  misc_feature (1)..(25): SEQ ID NO: 4263; WAN024FZY; Start 95; Stop 119
aaattctactcgaaaggcatgttca

SEQ ID NO: 378184 - DNA, 25 bp, Artificial
  probe
  misc_feature (1)..(25): SEQ ID NO: 4263; WAN024FZY; Start 97; Stop 121
attctactcgaaaggcatgttcatc

SEQ ID NO: 378185 - DNA, 25 bp, Artificial
  probe
  misc_feature (1)..(25): SEQ ID NO: 4263; WAN024FZY; Start 14; Stop 38
aatcgctaaatgatccacttctccc

SEQ ID NO: 378186 - DNA, 25 bp, Artificial
  probe
  misc_feature (1)..(25): SEQ ID NO: 4263; WAN024FZY; Start 210; Stop 234
tcgaccaagtcattcaagagtttat

SEQ ID NO: 378187 - DNA, 25 bp, Artificial
  probe
  misc_feature (1)..(25): SEQ ID NO: 4263; WAN024FZY; Start 209; Stop 233
atcgaccaagtcattcaagagttta

SEQ ID NO: 378188 - DNA, 25 bp, Artificial
  probe
  misc_feature (1)..(25): SEQ ID NO: 4263; WAN024FZY; Start 208; Stop 232
tatcgaccaagtcattcaagagttt

SEQ ID NO: 378189 - DNA, 25 bp, Artificial
  probe
  misc_feature (1)..(25): SEQ ID NO: 4263; WAN024FZY; Start 198; Stop 222
tcaaactgaatatcgaccaagtcat

SEQ ID NO: 378190 - DNA, 25 bp, Artificial
  probe
  misc_feature (1)..(25): SEQ ID NO: 4263; WAN024FZY; Start 199; Stop 223
caaactgaatatcgaccaagtcatt

SEQ ID NO: 378191 - DNA, 25 bp, Artificial
  probe
  misc_feature (1)..(25): SEQ ID NO: 4263; WAN024FZY; Start 98; Stop 122
ttctactcgaaaggcatgttcatct

SEQ ID NO: 378192 - DNA, 25 bp, Artificial
  probe
  misc_feature (1)..(25): SEQ ID NO: 4263; WAN024FZY; Start 200; Stop 224
aaactgaatatcgaccaagtcattc

SEQ ID NO: 378193 - DNA, 25 bp, Artificial
  probe
  misc_feature (1)..(25): SEQ ID NO: 4263; WAN024FZY; Start 99; Stop 123
tctactcgaaaggcatgttcatctc

SEQ ID NO: 378194 - DNA, 25 bp, Artificial
  probe
  misc_feature (1)..(25): SEQ ID NO: 4263; WAN024FZY; Start 12; Stop 36
aaaatcgctaaatgatccacttctc

SEQ ID NO: 378195 - DNA, 25 bp, Artificial
  probe
  misc_feature (1)..(25): SEQ ID NO: 4263; WAN024FZY; Start 11; Stop 35
gaaaatcgctaaatgatccacttct

SEQ ID NO: 378196 - DNA, 25 bp, Artificial
  probe
  misc_feature (1)..(25): SEQ ID NO: 4263; WAN024FZY; Start 231; Stop 255
ttatcacgagaaatctctagaccag

SEQ ID NO: 378197 - DNA, 25 bp, Artificial
  probe
  misc_feature (1)..(25): SEQ ID NO: 4263; WAN024FZY; Start 232; Stop 256
tatcacgagaaatctctagaccagg

SEQ ID NO: 378198 - DNA, 25 bp, Artificial
  probe
  misc_feature (1)..(25): SEQ ID NO: 4264; WAN024G8M; Start 232; Stop 256
aaccagtatcctttccaattcattt

SEQ ID NO: 378199 - DNA, 25 bp, Artificial
  probe
  misc_feature (1)..(25): SEQ ID NO: 4264; WAN024G8M; Start 233; Stop 257
accagtatcctttccaattcatttg

SEQ ID NO: 378200 - DNA, 25 bp, Artificial
  probe
  misc_feature (1)..(25): SEQ ID NO: 4264; WAN024G8M; Start 225; Stop 249
tttcactaaccagtatcctttccaa

SEQ ID NO: 378201 - DNA, 25 bp, Artificial
  probe
  misc_feature (1)..(25): SEQ ID NO: 4264; WAN024G8M; Start 226; Stop 250
ttcactaaccagtatcctttccaat

SEQ ID NO: 378202 - DNA, 25 bp, Artificial
  probe
  misc_feature (1)..(25): SEQ ID NO: 4264; WAN024G8M; Start 235; Stop 259
cagtatcctttccaattcatttgcc

SEQ ID NO: 378203 - DNA, 25 bp, Artificial
  probe
  misc_feature (1)..(25): SEQ ID NO: 4264; WAN024G8M; Start 234; Stop 258
ccagtatcctttccaattcatttgc

SEQ ID NO: 378204 - DNA, 25 bp, Artificial
  probe
  misc_feature (1)..(25): SEQ ID NO: 4264; WAN024G8M; Start 229; Stop 253
actaaccagtatcctttccaattca

SEQ ID NO: 378205 - DNA, 25 bp, Artificial
  probe
  misc_feature (1)..(25): SEQ ID NO: 4264; WAN024G8M; Start 227; Stop 251
tcactaaccagtatcctttccaatt

SEQ ID NO: 378206 - DNA, 25 bp, Artificial
  probe
  misc_feature (1)..(25): SEQ ID NO: 4264; WAN024G8M; Start 238; Stop 262
tatcctttccaattcatttgccgta

SEQ ID NO: 378207 - DNA, 25 bp, Artificial
  probe
  misc_feature (1)..(25): SEQ ID NO: 4264; WAN024G8M; Start 228; Stop 252
cactaaccagtatcctttccaattc

SEQ ID NO: 378208 - DNA, 25 bp, Artificial
  probe
  misc_feature (1)..(25): SEQ ID NO: 4264; WAN024G8M; Start 230; Stop 254
ctaaccagtatcctttccaattcat

SEQ ID NO: 378209 - DNA, 25 bp, Artificial
  probe
  misc_feature (1)..(25): SEQ ID NO: 4264; WAN024G8M; Start 92; Stop 116
taggtgtccaacaaatcagaaagat

SEQ ID NO: 378210 - DNA, 25 bp, Artificial
  probe
  misc_feature (1)..(25): SEQ ID NO: 4264; WAN024G8M; Start 89; Stop 113
tagtaggtgtccaacaaatcagaaa

SEQ ID NO: 378211 - DNA, 25 bp, Artificial
  probe
  misc_feature (1)..(25): SEQ ID NO: 4264; WAN024G8M; Start 88; Stop 112
atagtaggtgtccaacaaatcagaa

SEQ ID NO: 378212 - DNA, 25 bp, Artificial
  probe
  misc_feature (1)..(25): SEQ ID NO: 4264; WAN024G8M; Start 239; Stop 263
atcctttccaattcatttgccgtat

SEQ ID NO: 378213 - DNA, 25 bp, Artificial
  probe
  misc_feature (1)..(25): SEQ ID NO: 4264; WAN024G8M; Start 231; Stop 255
taaccagtatcctttccaattcatt

SEQ ID NO: 378214 - DNA, 25 bp, Artificial
  probe
  misc_feature (1)..(25): SEQ ID NO: 4264; WAN024G8M; Start 91; Stop 115
gtaggtgtccaacaaatcagaaaga

SEQ ID NO: 378215 - DNA, 25 bp, Artificial
  probe
  misc_feature (1)..(25): SEQ ID NO: 4264; WAN024G8M; Start 90; Stop 114
agtaggtgtccaacaaatcagaaag

SEQ ID NO: 378216 - DNA, 25 bp, Artificial
  probe
  misc_feature (1)..(25): SEQ ID NO: 4264; WAN024G8M; Start 87; Stop 111
tatagtaggtgtccaacaaatcaga

SEQ ID NO: 378217 - DNA, 25 bp, Artificial
  probe
  misc_feature (1)..(25): SEQ ID NO: 4264; WAN024G8M; Start 236; Stop 260
agtatcctttccaattcatttgccg

SEQ ID NO: 378218 - DNA, 25 bp, Artificial
  probe
  misc_feature (1)..(25): SEQ ID NO: 4264; WAN024G8M; Start 240; Stop 264
tcctttccaattcatttgccgtatc

SEQ ID NO: 378219 - DNA, 25 bp, Artificial
  probe
  misc_feature (1)..(25): SEQ ID NO: 4264; WAN024G8M; Start 86; Stop 110
ttatagtaggtgtccaacaaatcag

SEQ ID NO: 378220 - DNA, 25 bp, Artificial
  probe
  misc_feature (1)..(25): SEQ ID NO: 4264; WAN024G8M; Start 85; Stop 109
cttatagtaggtgtccaacaaatca

SEQ ID NO: 378221 - DNA, 25 bp, Artificial
  probe
  misc_feature (1)..(25): SEQ ID NO: 4264; WAN024G8M; Start 237; Stop 261
gtatcctttccaattcatttgccgt

SEQ ID NO: 378222 - DNA, 25 bp, Artificial
  probe
  misc_feature (1)..(25): SEQ ID NO: 4264; WAN024G8M; Start 93; Stop 117
aggtgtccaacaaatcagaaagatt

SEQ ID NO: 378223 - DNA, 25 bp, Artificial
  probe
  misc_feature (1)..(25): SEQ ID NO: 4264; WAN024G8M; Start 274; Stop 298
accttgaaagaggctttgaagattt

SEQ ID NO: 378224 - DNA, 25 bp, Artificial
  probe
  misc_feature (1)..(25): SEQ ID NO: 4264; WAN024G8M; Start 273; Stop 297
gaccttgaaagaggctttgaagatt

SEQ ID NO: 378225 - DNA, 25 bp, Artificial
  probe
  misc_feature (1)..(25): SEQ ID NO: 4264; WAN024G8M; Start 241; Stop 265
cctttccaattcatttgccgtatcg

SEQ ID NO: 378226 - DNA, 25 bp, Artificial
  probe
  misc_feature (1)..(25): SEQ ID NO: 4264; WAN024G8M; Start 24; Stop 48
tttcaacacgacgaatcagttcact

SEQ ID NO: 378227 - DNA, 25 bp, Artificial
  probe
  misc_feature (1)..(25): SEQ ID NO: 4264; WAN024G8M; Start 16; Stop 40
aagttcattttcaacacgacgaatc

SEQ ID NO: 378228 - DNA, 25 bp, Artificial
  probe
  misc_feature (1)..(25): SEQ ID NO: 4264; WAN024G8M; Start 15; Stop 39
gaagttcattttcaacacgacgaat

SEQ ID NO: 378229 - DNA, 25 bp, Artificial
  probe
  misc_feature (1)..(25): SEQ ID NO: 4264; WAN024G8M; Start 224; Stop 248
ttttcactaaccagtatcctttcca

SEQ ID NO: 378230 - DNA, 25 bp, Artificial
  probe
  misc_feature (1)..(25): SEQ ID NO: 4264; WAN024G8M; Start 272; Stop 296
agaccttgaaagaggctttgaagat

SEQ ID NO: 378231 - DNA, 25 bp, Artificial
  probe
  misc_feature (1)..(25): SEQ ID NO: 4265; WAN024ERH; Start 574; Stop 598
ctgattacacttgagagagaattgg

SEQ ID NO: 378232 - DNA, 25 bp, Artificial
  probe
  misc_feature (1)..(25): SEQ ID NO: 4265; WAN024ERH; Start 568; Stop 592
ggattactgattacacttgagagag

SEQ ID NO: 378233 - DNA, 25 bp, Artificial
  probe
  misc_feature (1)..(25): SEQ ID NO: 4265; WAN024ERH; Start 573; Stop 597
actgattacacttgagagagaattg

SEQ ID NO: 378234 - DNA, 25 bp, Artificial
  probe
  misc_feature (1)..(25): SEQ ID NO: 4265; WAN024ERH; Start 653; Stop 677
ttatcagtaggaatcgtcgtagtac

SEQ ID NO: 378235 - DNA, 25 bp, Artificial
  probe
  misc_feature (1)..(25): SEQ ID NO: 4265; WAN024ERH; Start 365; Stop 389
atcgtcagatattacaagagagtct

SEQ ID NO: 378236 - DNA, 25 bp, Artificial
  probe
  misc_feature (1)..(25): SEQ ID NO: 4265; WAN024ERH; Start 678; Stop 702
tagtattcatgttgtagcaccttca

SEQ ID NO: 378237 - DNA, 25 bp, Artificial
  probe
  misc_feature (1)..(25): SEQ ID NO: 4265; WAN024ERH; Start 909; Stop 933
ccgtatgtgtatggacaatagagag

SEQ ID NO: 378238 - DNA, 25 bp, Artificial
  probe
  misc_feature (1)..(25): SEQ ID NO: 4265; WAN024ERH; Start 905; Stop 929
ttagccgtatgtgtatggacaatag

SEQ ID NO: 378239 - DNA, 25 bp, Artificial
  probe
  misc_feature (1)..(25): SEQ ID NO: 4265; WAN024ERH; Start 910; Stop 934
cgtatgtgtatggacaatagagaga

SEQ ID NO: 378240 - DNA, 25 bp, Artificial
  probe
  misc_feature (1)..(25): SEQ ID NO: 4265; WAN024ERH; Start 677; Stop 701
ctagtattcatgttgtagcaccttc

SEQ ID NO: 378241 - DNA, 25 bp, Artificial
  probe
  misc_feature (1)..(25): SEQ ID NO: 4265; WAN024ERH; Start 906; Stop 930
tagccgtatgtgtatggacaataga

SEQ ID NO: 378242 - DNA, 25 bp, Artificial
  probe
  misc_feature (1)..(25): SEQ ID NO: 4265; WAN024ERH; Start 363; Stop 387
agatcgtcagatattacaagagagt

SEQ ID NO: 378243 - DNA, 25 bp, Artificial
  probe
  misc_feature (1)..(25): SEQ ID NO: 4265; WAN024ERH; Start 679; Stop 703
agtattcatgttgtagcaccttcaa

SEQ ID NO: 378244 - DNA, 25 bp, Artificial
  probe
  misc_feature (1)..(25): SEQ ID NO: 4265; WAN024ERH; Start 366; Stop 390
tcgtcagatattacaagagagtcta

SEQ ID NO: 378245 - DNA, 25 bp, Artificial
  probe
  misc_feature (1)..(25): SEQ ID NO: 4265; WAN024ERH; Start 364; Stop 388
gatcgtcagatattacaagagagtc

SEQ ID NO: 378246 - DNA, 25 bp, Artificial
  probe
  misc_feature (1)..(25): SEQ ID NO: 4265; WAN024ERH; Start 513; Stop 537
aattacacagaataaggttcagcct

SEQ ID NO: 378247 - DNA, 25 bp, Artificial
  probe
  misc_feature (1)..(25): SEQ ID NO: 4265; WAN024ERH; Start 514; Stop 538
attacacagaataaggttcagcctc

SEQ ID NO: 378248 - DNA, 25 bp, Artificial
  probe
  misc_feature (1)..(25): SEQ ID NO: 4265; WAN024ERH; Start 369; Stop 393
tcagatattacaagagagtctagca

SEQ ID NO: 378249 - DNA, 25 bp, Artificial
  probe
  misc_feature (1)..(25): SEQ ID NO: 4265; WAN024ERH; Start 569; Stop 593
gattactgattacacttgagagaga

SEQ ID NO: 378250 - DNA, 25 bp, Artificial
  probe
  misc_feature (1)..(25): SEQ ID NO: 4265; WAN024ERH; Start 368; Stop 392
gtcagatattacaagagagtctagc

SEQ ID NO: 378251 - DNA, 25 bp, Artificial
  probe
  misc_feature (1)..(25): SEQ ID NO: 4265; WAN024ERH; Start 516; Stop 540
tacacagaataaggttcagcctctt

SEQ ID NO: 378252 - DNA, 25 bp, Artificial
  probe
  misc_feature (1)..(25): SEQ ID NO: 4265; WAN024ERH; Start 515; Stop 539
ttacacagaataaggttcagcctct

SEQ ID NO: 378253 - DNA, 25 bp, Artificial
  probe
  misc_feature (1)..(25): SEQ ID NO: 4265; WAN024ERH; Start 367; Stop 391
cgtcagatattacaagagagtctag

SEQ ID NO: 378254 - DNA, 25 bp, Artificial
  probe
  misc_feature (1)..(25): SEQ ID NO: 4265; WAN024ERH; Start 908; Stop 932
gccgtatgtgtatggacaatagaga

SEQ ID NO: 378255 - DNA, 25 bp, Artificial
  probe
  misc_feature (1)..(25): SEQ ID NO: 4265; WAN024ERH; Start 907; Stop 931
agccgtatgtgtatggacaatagag

SEQ ID NO: 378256 - DNA, 25 bp, Artificial
  probe
  misc_feature (1)..(25): SEQ ID NO: 4265; WAN024ERH; Start 362; Stop 386
aagatcgtcagatattacaagagag

SEQ ID NO: 378257 - DNA, 25 bp, Artificial
  probe
  misc_feature (1)..(25): SEQ ID NO: 4265; WAN024ERH; Start 571; Stop 595
ttactgattacacttgagagagaat

SEQ ID NO: 378258 - DNA, 25 bp, Artificial
  probe
  misc_feature (1)..(25): SEQ ID NO: 4265; WAN024ERH; Start 570; Stop 594
attactgattacacttgagagagaa

SEQ ID NO: 378259 - DNA, 25 bp, Artificial
  probe
  misc_feature (1)..(25): SEQ ID NO: 4265; WAN024ERH; Start 566; Stop 590
tgggattactgattacacttgagag

SEQ ID NO: 378260 - DNA, 25 bp, Artificial
  probe
  misc_feature (1)..(25): SEQ ID NO: 4265; WAN024ERH; Start 458; Stop 482
ttcgttcagccattctaaatctact

SEQ ID NO: 378261 - DNA, 25 bp, Artificial
  probe
  misc_feature (1)..(25): SEQ ID NO: 4265; WAN024ERH; Start 370; Stop 394
cagatattacaagagagtctagcaa

SEQ ID NO: 378262 - DNA, 25 bp, Artificial
  probe
  misc_feature (1)..(25): SEQ ID NO: 4265; WAN024ERH; Start 567; Stop 591
gggattactgattacacttgagaga

SEQ ID NO: 378263 - DNA, 25 bp, Artificial
  probe
  misc_feature (1)..(25): SEQ ID NO: 4265; WAN024ERH; Start 565; Stop 589
ttgggattactgattacacttgaga

SEQ ID NO: 378264 - DNA, 25 bp, Artificial
  probe
  misc_feature (1)..(25): SEQ ID NO: 4266; WAN024GEM; Start 70; Stop 94
cttgttcttcttcgattgcttcctt

SEQ ID NO: 378265 - DNA, 25 bp, Artificial
  probe
  misc_feature (1)..(25): SEQ ID NO: 4266; WAN024GEM; Start 204; Stop 228
tcaagttctttcaatcgttggtaag

SEQ ID NO: 378266 - DNA, 25 bp, Artificial
  probe
  misc_feature (1)..(25): SEQ ID NO: 4266; WAN024GEM; Start 201; Stop 225
atttcaagttctttcaatcgttggt

SEQ ID NO: 378267 - DNA, 25 bp, Artificial
  probe
  misc_feature (1)..(25): SEQ ID NO: 4266; WAN024GEM; Start 203; Stop 227
ttcaagttctttcaatcgttggtaa

SEQ ID NO: 378268 - DNA, 25 bp, Artificial
  probe
  misc_feature (1)..(25): SEQ ID NO: 4266; WAN024GEM; Start 202; Stop 226
tttcaagttctttcaatcgttggta

SEQ ID NO: 378269 - DNA, 25 bp, Artificial
  probe
  misc_feature (1)..(25): SEQ ID NO: 4266; WAN024GEM; Start 71; Stop 95
ttgttcttcttcgattgcttccttg

SEQ ID NO: 378270 - DNA, 25 bp, Artificial
  probe
  misc_feature (1)..(25): SEQ ID NO: 4266; WAN024GEM; Start 200; Stop 224
aatttcaagttctttcaatcgttgg

SEQ ID NO: 378271 - DNA, 25 bp, Artificial
  probe
  misc_feature (1)..(25): SEQ ID NO: 4266; WAN024GEM; Start 39; Stop 63
aaatggagcagattatcctttacat

SEQ ID NO: 378272 - DNA, 25 bp, Artificial
  probe
  misc_feature (1)..(25): SEQ ID NO: 4266; WAN024GEM; Start 206; Stop 230
aagttctttcaatcgttggtaagac

SEQ ID NO: 378273 - DNA, 25 bp, Artificial
  probe
  misc_feature (1)..(25): SEQ ID NO: 4266; WAN024GEM; Start 205; Stop 229
caagttctttcaatcgttggtaaga

SEQ ID NO: 378274 - DNA, 25 bp, Artificial
  probe
  misc_feature (1)..(25): SEQ ID NO: 4266; WAN024GEM; Start 72; Stop 96
tgttcttcttcgattgcttccttgg

SEQ ID NO: 378275 - DNA, 25 bp, Artificial
  probe
  misc_feature (1)..(25): SEQ ID NO: 4266; WAN024GEM; Start 105; Stop 129
taccacttgctctgattttctgtat

SEQ ID NO: 378276 - DNA, 25 bp, Artificial
  probe
  misc_feature (1)..(25): SEQ ID NO: 4266; WAN024GEM; Start 104; Stop 128
ataccacttgctctgattttctgta

SEQ ID NO: 378277 - DNA, 25 bp, Artificial
  probe
  misc_feature (1)..(25): SEQ ID NO: 4266; WAN024GEM; Start 42; Stop 66
tggagcagattatcctttacataaa

SEQ ID NO: 378278 - DNA, 25 bp, Artificial
  probe
  misc_feature (1)..(25): SEQ ID NO: 4266; WAN024GEM; Start 112; Stop 136
tgctctgattttctgtatcttttcc

SEQ ID NO: 378279 - DNA, 25 bp, Artificial
  probe
  misc_feature (1)..(25): SEQ ID NO: 4266; WAN024GEM; Start 108; Stop 132
cacttgctctgattttctgtatctt

SEQ ID NO: 378280 - DNA, 25 bp, Artificial
  probe
  misc_feature (1)..(25): SEQ ID NO: 4266; WAN024GEM; Start 107; Stop 131
ccacttgctctgattttctgtatct

SEQ ID NO: 378281 - DNA, 25 bp, Artificial
  probe
  misc_feature (1)..(25): SEQ ID NO: 4266; WAN024GEM; Start 130; Stop 154
cttttcctctatcacctaagccaaa

SEQ ID NO: 378282 - DNA, 25 bp, Artificial
  probe
  misc_feature (1)..(25): SEQ ID NO: 4266; WAN024GEM; Start 113; Stop 137
gctctgattttctgtatcttttcct

SEQ ID NO: 378283 - DNA, 25 bp, Artificial
  probe
  misc_feature (1)..(25): SEQ ID NO: 4266; WAN024GEM; Start 41; Stop 65
atggagcagattatcctttacataa

SEQ ID NO: 378284 - DNA, 25 bp, Artificial
  probe
  misc_feature (1)..(25): SEQ ID NO: 4266; WAN024GEM; Start 40; Stop 64
aatggagcagattatcctttacata

SEQ ID NO: 378285 - DNA, 25 bp, Artificial
  probe
  misc_feature (1)..(25): SEQ ID NO: 4266; WAN024GEM; Start 106; Stop 130
accacttgctctgattttctgtatc

SEQ ID NO: 378286 - DNA, 25 bp, Artificial
  probe
  misc_feature (1)..(25): SEQ ID NO: 4266; WAN024GEM; Start 31; Stop 55
gattggcaaaatggagcagattatc

SEQ ID NO: 378287 - DNA, 25 bp, Artificial
  probe
  misc_feature (1)..(25): SEQ ID NO: 4266; WAN024GEM; Start 127; Stop 151
tatcttttcctctatcacctaagcc

SEQ ID NO: 378288 - DNA, 25 bp, Artificial
  probe
  misc_feature (1)..(25): SEQ ID NO: 4266; WAN024GEM; Start 128; Stop 152
atcttttcctctatcacctaagcca

SEQ ID NO: 378289 - DNA, 25 bp, Artificial
  probe
  misc_feature (1)..(25): SEQ ID NO: 4266; WAN024GEM; Start 103; Stop 127
cataccacttgctctgattttctgt

SEQ ID NO: 378290 - DNA, 25 bp, Artificial
  probe
  misc_feature (1)..(25): SEQ ID NO: 4266; WAN024GEM; Start 122; Stop 146
ttctgtatcttttcctctatcacct

SEQ ID NO: 378291 - DNA, 25 bp, Artificial
  probe
  misc_feature (1)..(25): SEQ ID NO: 4266; WAN024GEM; Start 109; Stop 133
acttgctctgattttctgtatcttt

SEQ ID NO: 378292 - DNA, 25 bp, Artificial
  probe
  misc_feature (1)..(25): SEQ ID NO: 4266; WAN024GEM; Start 69; Stop 93
gcttgttcttcttcgattgcttcct

SEQ ID NO: 378293 - DNA, 25 bp, Artificial
  probe
  misc_feature (1)..(25): SEQ ID NO: 4266; WAN024GEM; Start 129; Stop 153
tcttttcctctatcacctaagccaa

SEQ ID NO: 378294 - DNA, 25 bp, Artificial
  probe
  misc_feature (1)..(25): SEQ ID NO: 4266; WAN024GEM; Start 67; Stop 91
gagcttgttcttcttcgattgcttc

SEQ ID NO: 378295 - DNA, 25 bp, Artificial
  probe
  misc_feature (1)..(25): SEQ ID NO: 4266; WAN024GEM; Start 126; Stop 150
gtatcttttcctctatcacctaagc

SEQ ID NO: 378296 - DNA, 25 bp, Artificial
  probe
  misc_feature (1)..(25): SEQ ID NO: 4266; WAN024GEM; Start 199; Stop 223
aaatttcaagttctttcaatcgttg

SEQ ID NO: 378297 - DNA, 25 bp, Artificial
  probe
  misc_feature (1)..(25): SEQ ID NO: 4267; WAN024CK3; Start 1473; Stop 1497
tcaagtagcgttaggaatagagaat

SEQ ID NO: 378298 - DNA, 25 bp, Artificial
  probe
  misc_feature (1)..(25): SEQ ID NO: 4267; WAN024CK3; Start 1470; Stop 1494
aactcaagtagcgttaggaatagag

SEQ ID NO: 378299 - DNA, 25 bp, Artificial
  probe
  misc_feature (1)..(25): SEQ ID NO: 4267; WAN024CK3; Start 1472; Stop 1496
ctcaagtagcgttaggaatagagaa

SEQ ID NO: 378300 - DNA, 25 bp, Artificial
  probe
  misc_feature (1)..(25): SEQ ID NO: 4267; WAN024CK3; Start 615; Stop 639
aggaacaggtgaggctagaattatt

SEQ ID NO: 378301 - DNA, 25 bp, Artificial
  probe
  misc_feature (1)..(25): SEQ ID NO: 4267; WAN024CK3; Start 1471; Stop 1495
actcaagtagcgttaggaatagaga

SEQ ID NO: 378302 - DNA, 25 bp, Artificial
  probe
  misc_feature (1)..(25): SEQ ID NO: 4267; WAN024CK3; Start 614; Stop 638
caggaacaggtgaggctagaattat

SEQ ID NO: 378303 - DNA, 25 bp, Artificial
  probe
  misc_feature (1)..(25): SEQ ID NO: 4267; WAN024CK3; Start 1474; Stop 1498
caagtagcgttaggaatagagaata

SEQ ID NO: 378304 - DNA, 25 bp, Artificial
  probe
  misc_feature (1)..(25): SEQ ID NO: 4267; WAN024CK3; Start 785; Stop 809
tcactacacattctacacaacttat

SEQ ID NO: 378305 - DNA, 25 bp, Artificial
  probe
  misc_feature (1)..(25): SEQ ID NO: 4267; WAN024CK3; Start 784; Stop 808
atcactacacattctacacaactta

SEQ ID NO: 378306 - DNA, 25 bp, Artificial
  probe
  misc_feature (1)..(25): SEQ ID NO: 4267; WAN024CK3; Start 783; Stop 807
tatcactacacattctacacaactt

SEQ ID NO: 378307 - DNA, 25 bp, Artificial
  probe
  misc_feature (1)..(25): SEQ ID NO: 4267; WAN024CK3; Start 782; Stop 806
ttatcactacacattctacacaact

SEQ ID NO: 378308 - DNA, 25 bp, Artificial
  probe
  misc_feature (1)..(25): SEQ ID NO: 4267; WAN024CK3; Start 1019; Stop 1043
tagtagtgagatatattcctggtgg

SEQ ID NO: 378309 - DNA, 25 bp, Artificial
  probe
  misc_feature (1)..(25): SEQ ID NO: 4267; WAN024CK3; Start 208; Stop 232
tatattggaagttcttcgacagaca

SEQ ID NO: 378310 - DNA, 25 bp, Artificial
  probe
  misc_feature (1)..(25): SEQ ID NO: 4267; WAN024CK3; Start 1020; Stop 1044
agtagtgagatatattcctggtgga

SEQ ID NO: 378311 - DNA, 25 bp, Artificial
  probe
  misc_feature (1)..(25): SEQ ID NO: 4267; WAN024CK3; Start 209; Stop 233
atattggaagttcttcgacagacag

SEQ ID NO: 378312 - DNA, 25 bp, Artificial
  probe
  misc_feature (1)..(25): SEQ ID NO: 4267; WAN024CK3; Start 1021; Stop 1045
gtagtgagatatattcctggtggag

SEQ ID NO: 378313 - DNA, 25 bp, Artificial
  probe
  misc_feature (1)..(25): SEQ ID NO: 4267; WAN024CK3; Start 1406; Stop 1430
gcgtagatagggaaggttatgattt

SEQ ID NO: 378314 - DNA, 25 bp, Artificial
  probe
  misc_feature (1)..(25): SEQ ID NO: 4267; WAN024CK3; Start 37; Stop 61
atagatgaagtggatgggaaacaat

SEQ ID NO: 378315 - DNA, 25 bp, Artificial
  probe
  misc_feature (1)..(25): SEQ ID NO: 4267; WAN024CK3; Start 36; Stop 60
aatagatgaagtggatgggaaacaa

SEQ ID NO: 378316 - DNA, 25 bp, Artificial
  probe
  misc_feature (1)..(25): SEQ ID NO: 4267; WAN024CK3; Start 35; Stop 59
aaatagatgaagtggatgggaaaca

SEQ ID NO: 378317 - DNA, 25 bp, Artificial
  probe
  misc_feature (1)..(25): SEQ ID NO: 4267; WAN024CK3; Start 34; Stop 58
caaatagatgaagtggatgggaaac

SEQ ID NO: 378318 - DNA, 25 bp, Artificial
  probe
  misc_feature (1)..(25): SEQ ID NO: 4267; WAN024CK3; Start 1022; Stop 1046
tagtgagatatattcctggtggagc

SEQ ID NO: 378319 - DNA, 25 bp, Artificial
  probe
  misc_feature (1)..(25): SEQ ID NO: 4267; WAN024CK3; Start 1267; Stop 1291
aatgtttcaggtaataaagggcaaa

SEQ ID NO: 378320 - DNA, 25 bp, Artificial
  probe
  misc_feature (1)..(25): SEQ ID NO: 4267; WAN024CK3; Start 1405; Stop 1429
agcgtagatagggaaggttatgatt

SEQ ID NO: 378321 - DNA, 25 bp, Artificial
  probe
  misc_feature (1)..(25): SEQ ID NO: 4267; WAN024CK3; Start 38; Stop 62
tagatgaagtggatgggaaacaatg

SEQ ID NO: 378322 - DNA, 25 bp, Artificial
  probe
  misc_feature (1)..(25): SEQ ID NO: 4267; WAN024CK3; Start 1552; Stop 1576
ccagaatcatcaatgtttcagtgta

SEQ ID NO: 378323 - DNA, 25 bp, Artificial
  probe
  misc_feature (1)..(25): SEQ ID NO: 4267; WAN024CK3; Start 210; Stop 234
tattggaagttcttcgacagacaga

SEQ ID NO: 378324 - DNA, 25 bp, Artificial
  probe
  misc_feature (1)..(25): SEQ ID NO: 4267; WAN024CK3; Start 1586; Stop 1610
aattagaggcattgttcctaactaa

SEQ ID NO: 378325 - DNA, 25 bp, Artificial
  probe
  misc_feature (1)..(25): SEQ ID NO: 4267; WAN024CK3; Start 207; Stop 231
atatattggaagttcttcgacagac

SEQ ID NO: 378326 - DNA, 25 bp, Artificial
  probe
  misc_feature (1)..(25): SEQ ID NO: 4267; WAN024CK3; Start 1469; Stop 1493
aaactcaagtagcgttaggaataga

SEQ ID NO: 378327 - DNA, 25 bp, Artificial
  probe
  misc_feature (1)..(25): SEQ ID NO: 4267; WAN024CK3; Start 781; Stop 805
attatcactacacattctacacaac

SEQ ID NO: 378328 - DNA, 25 bp, Artificial
  probe
  misc_feature (1)..(25): SEQ ID NO: 4267; WAN024CK3; Start 616; Stop 640
ggaacaggtgaggctagaattattt

SEQ ID NO: 378329 - DNA, 25 bp, Artificial
  probe
  misc_feature (1)..(25): SEQ ID NO: 4267; WAN024CK3; Start 1475; Stop 1499
aagtagcgttaggaatagagaatat

SEQ ID NO: 378330 - DNA, 25 bp, Artificial
  probe
  misc_feature (1)..(25): SEQ ID NO: 4268; WAN024DWN; Start 176; Stop 200
cccaaggatttcgtattcattcaat

SEQ ID NO: 378331 - DNA, 25 bp, Artificial
  probe
  misc_feature (1)..(25): SEQ ID NO: 4268; WAN024DWN; Start 185; Stop 209
ttcgtattcattcaatcccttgttg

SEQ ID NO: 378332 - DNA, 25 bp, Artificial
  probe
  misc_feature (1)..(25): SEQ ID NO: 4268; WAN024DWN; Start 184; Stop 208
tttcgtattcattcaatcccttgtt

SEQ ID NO: 378333 - DNA, 25 bp, Artificial
  probe
  misc_feature (1)..(25): SEQ ID NO: 4268; WAN024DWN; Start 183; Stop 207
atttcgtattcattcaatcccttgt

SEQ ID NO: 378334 - DNA, 25 bp, Artificial
  probe
  misc_feature (1)..(25): SEQ ID NO: 4268; WAN024DWN; Start 186; Stop 210
tcgtattcattcaatcccttgttgg

SEQ ID NO: 378335 - DNA, 25 bp, Artificial
  probe
  misc_feature (1)..(25): SEQ ID NO: 4268; WAN024DWN; Start 187; Stop 211
cgtattcattcaatcccttgttgga

SEQ ID NO: 378336 - DNA, 25 bp, Artificial
  probe
  misc_feature (1)..(25): SEQ ID NO: 4268; WAN024DWN; Start 182; Stop 206
gatttcgtattcattcaatcccttg

SEQ ID NO: 378337 - DNA, 25 bp, Artificial
  probe
  misc_feature (1)..(25): SEQ ID NO: 4268; WAN024DWN; Start 177; Stop 201
ccaaggatttcgtattcattcaatc

SEQ ID NO: 378338 - DNA, 25 bp, Artificial
  probe
  misc_feature (1)..(25): SEQ ID NO: 4268; WAN024DWN; Start 175; Stop 199
ccccaaggatttcgtattcattcaa

SEQ ID NO: 378339 - DNA, 25 bp, Artificial
  probe
  misc_feature (1)..(25): SEQ ID NO: 4268; WAN024DWN; Start 191; Stop 215
ttcattcaatcccttgttggataca

SEQ ID NO: 378340 - DNA, 25 bp, Artificial
  probe
  misc_feature (1)..(25): SEQ ID NO: 4268; WAN024DWN; Start 190; Stop 214
attcattcaatcccttgttggatac

SEQ ID NO: 378341 - DNA, 25 bp, Artificial
  probe
  misc_feature (1)..(25): SEQ ID NO: 4268; WAN024DWN; Start 188; Stop 212
gtattcattcaatcccttgttggat

SEQ ID NO: 378342 - DNA, 25 bp, Artificial
  probe
  misc_feature (1)..(25): SEQ ID NO: 4268; WAN024DWN; Start 194; Stop 218
attcaatcccttgttggatacagtc

SEQ ID NO: 378343 - DNA, 25 bp, Artificial
  probe
  misc_feature (1)..(25): SEQ ID NO: 4268; WAN024DWN; Start 192; Stop 216
tcattcaatcccttgttggatacag

SEQ ID NO: 378344 - DNA, 25 bp, Artificial
  probe
  misc_feature (1)..(25): SEQ ID NO: 4268; WAN024DWN; Start 193; Stop 217
cattcaatcccttgttggatacagt

SEQ ID NO: 378345 - DNA, 25 bp, Artificial
  probe
  misc_feature (1)..(25): SEQ ID NO: 4268; WAN024DWN; Start 195; Stop 219
ttcaatcccttgttggatacagtca

SEQ ID NO: 378346 - DNA, 25 bp, Artificial
  probe
  misc_feature (1)..(25): SEQ ID NO: 4268; WAN024DWN; Start 174; Stop 198
tccccaaggatttcgtattcattca

SEQ ID NO: 378347 - DNA, 25 bp, Artificial
  probe
  misc_feature (1)..(25): SEQ ID NO: 4268; WAN024DWN; Start 151; Stop 175
aaatggtcacggcaatggtgttatc

SEQ ID NO: 378348 - DNA, 25 bp, Artificial
  probe
  misc_feature (1)..(25): SEQ ID NO: 4268; WAN024DWN; Start 189; Stop 213
tattcattcaatcccttgttggata

SEQ ID NO: 378349 - DNA, 25 bp, Artificial
  probe
  misc_feature (1)..(25): SEQ ID NO: 4268; WAN024DWN; Start 58; Stop 82
attcaagtgcaaactcgacttcaaa

SEQ ID NO: 378350 - DNA, 25 bp, Artificial
  probe
  misc_feature (1)..(25): SEQ ID NO: 4268; WAN024DWN; Start 203; Stop 227
cttgttggatacagtcacccctttt

SEQ ID NO: 378351 - DNA, 25 bp, Artificial
  probe
  misc_feature (1)..(25): SEQ ID NO: 4268; WAN024DWN; Start 196; Stop 220
tcaatcccttgttggatacagtcac

SEQ ID NO: 378352 - DNA, 25 bp, Artificial
  probe
  misc_feature (1)..(25): SEQ ID NO: 4268; WAN024DWN; Start 57; Stop 81
cattcaagtgcaaactcgacttcaa

SEQ ID NO: 378353 - DNA, 25 bp, Artificial
  probe
  misc_feature (1)..(25): SEQ ID NO: 4268; WAN024DWN; Start 59; Stop 83
ttcaagtgcaaactcgacttcaaac

SEQ ID NO: 378354 - DNA, 25 bp, Artificial
  probe
  misc_feature (1)..(25): SEQ ID NO: 4268; WAN024DWN; Start 61; Stop 85
caagtgcaaactcgacttcaaactc

SEQ ID NO: 378355 - DNA, 25 bp, Artificial
  probe
  misc_feature (1)..(25): SEQ ID NO: 4268; WAN024DWN; Start 197; Stop 221
caatcccttgttggatacagtcacc

SEQ ID NO: 378356 - DNA, 25 bp, Artificial
  probe
  misc_feature (1)..(25): SEQ ID NO: 4268; WAN024DWN; Start 172; Stop 196
tatccccaaggatttcgtattcatt

SEQ ID NO: 378357 - DNA, 25 bp, Artificial
  probe
  misc_feature (1)..(25): SEQ ID NO: 4268; WAN024DWN; Start 171; Stop 195
ttatccccaaggatttcgtattcat

SEQ ID NO: 378358 - DNA, 25 bp, Artificial
  probe
  misc_feature (1)..(25): SEQ ID NO: 4268; WAN024DWN; Start 170; Stop 194
gttatccccaaggatttcgtattca

SEQ ID NO: 378359 - DNA, 25 bp, Artificial
  probe
  misc_feature (1)..(25): SEQ ID NO: 4268; WAN024DWN; Start 169; Stop 193
tgttatccccaaggatttcgtattc

SEQ ID NO: 378360 - DNA, 25 bp, Artificial
  probe
  misc_feature (1)..(25): SEQ ID NO: 4268; WAN024DWN; Start 168; Stop 192
gtgttatccccaaggatttcgtatt

SEQ ID NO: 378361 - DNA, 25 bp, Artificial
  probe
  misc_feature (1)..(25): SEQ ID NO: 4268; WAN024DWN; Start 173; Stop 197
atccccaaggatttcgtattcattc

SEQ ID NO: 378362 - DNA, 25 bp, Artificial
  probe
  misc_feature (1)..(25): SEQ ID NO: 4268; WAN024DWN; Start 60; Stop 84
tcaagtgcaaactcgacttcaaact

SEQ ID NO: 378363 - DNA, 25 bp, Artificial
  probe
  misc_feature (1)..(25): SEQ ID NO: 4269; WAN024COO; Start 33; Stop 57
gccattaaagttcatcatacccaat

SEQ ID NO: 378364 - DNA, 25 bp, Artificial
  probe
  misc_feature (1)..(25): SEQ ID NO: 4269; WAN024COO; Start 32; Stop 56
agccattaaagttcatcatacccaa

SEQ ID NO: 378365 - DNA, 25 bp, Artificial
  probe
  misc_feature (1)..(25): SEQ ID NO: 4269; WAN024COO; Start 38; Stop 62
taaagttcatcatacccaatttgcc

SEQ ID NO: 378366 - DNA, 25 bp, Artificial
  probe
  misc_feature (1)..(25): SEQ ID NO: 4269; WAN024COO; Start 31; Stop 55
gagccattaaagttcatcataccca

SEQ ID NO: 378367 - DNA, 25 bp, Artificial
  probe
  misc_feature (1)..(25): SEQ ID NO: 4269; WAN024COO; Start 30; Stop 54
ggagccattaaagttcatcataccc

SEQ ID NO: 378368 - DNA, 25 bp, Artificial
  probe
  misc_feature (1)..(25): SEQ ID NO: 4269; WAN024COO; Start 37; Stop 61
ttaaagttcatcatacccaatttgc

SEQ ID NO: 378369 - DNA, 25 bp, Artificial
  probe
  misc_feature (1)..(25): SEQ ID NO: 4269; WAN024COO; Start 29; Stop 53
cggagccattaaagttcatcatacc

SEQ ID NO: 378370 - DNA, 25 bp, Artificial
  probe
  misc_feature (1)..(25): SEQ ID NO: 4269; WAN024COO; Start 28; Stop 52
gcggagccattaaagttcatcatac

SEQ ID NO: 378371 - DNA, 25 bp, Artificial
  probe
  misc_feature (1)..(25): SEQ ID NO: 4269; WAN024COO; Start 27; Stop 51
agcggagccattaaagttcatcata

SEQ ID NO: 378372 - DNA, 25 bp, Artificial
  probe
  misc_feature (1)..(25): SEQ ID NO: 4269; WAN024COO; Start 26; Stop 50
tagcggagccattaaagttcatcat

SEQ ID NO: 378373 - DNA, 25 bp, Artificial
  probe
  misc_feature (1)..(25): SEQ ID NO: 4269; WAN024COO; Start 39; Stop 63
aaagttcatcatacccaatttgccg

SEQ ID NO: 378374 - DNA, 25 bp, Artificial
  probe
  misc_feature (1)..(25): SEQ ID NO: 4269; WAN024COO; Start 34; Stop 58
ccattaaagttcatcatacccaatt

SEQ ID NO: 378375 - DNA, 25 bp, Artificial
  probe
  misc_feature (1)..(25): SEQ ID NO: 4269; WAN024COO; Start 25; Stop 49
gtagcggagccattaaagttcatca

SEQ ID NO: 378376 - DNA, 25 bp, Artificial
  probe
  misc_feature (1)..(25): SEQ ID NO: 4269; WAN024COO; Start 24; Stop 48
ggtagcggagccattaaagttcatc

SEQ ID NO: 378377 - DNA, 25 bp, Artificial
  probe
  misc_feature (1)..(25): SEQ ID NO: 4269; WAN024COO; Start 36; Stop 60
attaaagttcatcatacccaatttg

SEQ ID NO: 378378 - DNA, 25 bp, Artificial
  probe
  misc_feature (1)..(25): SEQ ID NO: 4269; WAN024COO; Start 35; Stop 59
cattaaagttcatcatacccaattt

SEQ ID NO: 378379 - DNA, 25 bp, Artificial
  probe
  misc_feature (1)..(25): SEQ ID NO: 4269; WAN024COO; Start 20; Stop 44
ttacggtagcggagccattaaagtt

SEQ ID NO: 378380 - DNA, 25 bp, Artificial
  probe
  misc_feature (1)..(25): SEQ ID NO: 4269; WAN024COO; Start 40; Stop 64
aagttcatcatacccaatttgccgc

SEQ ID NO: 378381 - DNA, 25 bp, Artificial
  probe
  misc_feature (1)..(25): SEQ ID NO: 4269; WAN024COO; Start 18; Stop 42
tcttacggtagcggagccattaaag

SEQ ID NO: 378382 - DNA, 25 bp, Artificial
  probe
  misc_feature (1)..(25): SEQ ID NO: 4269; WAN024COO; Start 21; Stop 45
tacggtagcggagccattaaagttc

SEQ ID NO: 378383 - DNA, 25 bp, Artificial
  probe
  misc_feature (1)..(25): SEQ ID NO: 4269; WAN024COO; Start 4; Stop 28
tctgtaacccatgctcttacggtag

SEQ ID NO: 378384 - DNA, 25 bp, Artificial
  probe
  misc_feature (1)..(25): SEQ ID NO: 4269; WAN024COO; Start 17; Stop 41
ctcttacggtagcggagccattaaa

SEQ ID NO: 378385 - DNA, 25 bp, Artificial
  probe
  misc_feature (1)..(25): SEQ ID NO: 4269; WAN024COO; Start 19; Stop 43
cttacggtagcggagccattaaagt

SEQ ID NO: 378386 - DNA, 25 bp, Artificial
  probe
  misc_feature (1)..(25): SEQ ID NO: 4269; WAN024COO; Start 3; Stop 27
gtctgtaacccatgctcttacggta

SEQ ID NO: 378387 - DNA, 25 bp, Artificial
  probe
  misc_feature (1)..(25): SEQ ID NO: 4269; WAN024COO; Start 64; Stop 88
ccgttttcgttgatagcttggtttt

SEQ ID NO: 378388 - DNA, 25 bp, Artificial
  probe
  misc_feature (1)..(25): SEQ ID NO: 4269; WAN024COO; Start 5; Stop 29
ctgtaacccatgctcttacggtagc

SEQ ID NO: 378389 - DNA, 25 bp, Artificial
  probe
  misc_feature (1)..(25): SEQ ID NO: 4269; WAN024COO; Start 63; Stop 87
gccgttttcgttgatagcttggttt

SEQ ID NO: 378390 - DNA, 25 bp, Artificial
  probe
  misc_feature (1)..(25): SEQ ID NO: 4270; WAN024GOF; Start 80; Stop 104
tagtcctttcatcaccgataatagc

SEQ ID NO: 378391 - DNA, 25 bp, Artificial
  probe
  misc_feature (1)..(25): SEQ ID NO: 4270; WAN024GOF; Start 77; Stop 101
acatagtcctttcatcaccgataat

SEQ ID NO: 378392 - DNA, 25 bp, Artificial
  probe
  misc_feature (1)..(25): SEQ ID NO: 4270; WAN024GOF; Start 76; Stop 100
tacatagtcctttcatcaccgataa

SEQ ID NO: 378393 - DNA, 25 bp, Artificial
  probe
  misc_feature (1)..(25): SEQ ID NO: 4270; WAN024GOF; Start 75; Stop 99
gtacatagtcctttcatcaccgata

SEQ ID NO: 378394 - DNA, 25 bp, Artificial
  probe
  misc_feature (1)..(25): SEQ ID NO: 4270; WAN024GOF; Start 78; Stop 102
catagtcctttcatcaccgataata

SEQ ID NO: 378395 - DNA, 25 bp, Artificial
  probe
  misc_feature (1)..(25): SEQ ID NO: 4270; WAN024GOF; Start 81; Stop 105
agtcctttcatcaccgataatagcc

SEQ ID NO: 378396 - DNA, 25 bp, Artificial
  probe
  misc_feature (1)..(25): SEQ ID NO: 4270; WAN024GOF; Start 79; Stop 103
atagtcctttcatcaccgataatag

SEQ ID NO: 378397 - DNA, 25 bp, Artificial
  probe
  misc_feature (1)..(25): SEQ ID NO: 4270; WAN024GOF; Start 41; Stop 65
tcttgacctcacgaagttctttctt

SEQ ID NO: 378398 - DNA, 25 bp, Artificial
  probe
  misc_feature (1)..(25): SEQ ID NO: 4270; WAN024GOF; Start 40; Stop 64
ttcttgacctcacgaagttctttct

SEQ ID NO: 378399 - DNA, 25 bp, Artificial
  probe
  misc_feature (1)..(25): SEQ ID NO: 4270; WAN024GOF; Start 96; Stop 120
gataatagccgccagcatagcaatc

SEQ ID NO: 378400 - DNA, 25 bp, Artificial
  probe
  misc_feature (1)..(25): SEQ ID NO: 4270; WAN024GOF; Start 194; Stop 218
ttacgatagcctcagcctgttcttc

SEQ ID NO: 378401 - DNA, 25 bp, Artificial
  probe
  misc_feature (1)..(25): SEQ ID NO: 4270; WAN024GOF; Start 97; Stop 121
ataatagccgccagcatagcaatct

SEQ ID NO: 378402 - DNA, 25 bp, Artificial
  probe
  misc_feature (1)..(25): SEQ ID NO: 4270; WAN024GOF; Start 4; Stop 28
tcttctaaagaactcaaacgaggag

SEQ ID NO: 378403 - DNA, 25 bp, Artificial
  probe
  misc_feature (1)..(25): SEQ ID NO: 4270; WAN024GOF; Start 1; Stop 25
gtgtcttctaaagaactcaaacgag

SEQ ID NO: 378404 - DNA, 25 bp, Artificial
  probe
  misc_feature (1)..(25): SEQ ID NO: 4270; WAN024GOF; Start 62; Stop 86
tcttcatgagattgtacatagtcct

SEQ ID NO: 378405 - DNA, 25 bp, Artificial
  probe
  misc_feature (1)..(25): SEQ ID NO: 4270; WAN024GOF; Start 3; Stop 27
gtcttctaaagaactcaaacgagga

SEQ ID NO: 378406 - DNA, 25 bp, Artificial
  probe
  misc_feature (1)..(25): SEQ ID NO: 4270; WAN024GOF; Start 37; Stop 61
ttcttcttgacctcacgaagttctt

SEQ ID NO: 378407 - DNA, 25 bp, Artificial
  probe
  misc_feature (1)..(25): SEQ ID NO: 4270; WAN024GOF; Start 2; Stop 26
tgtcttctaaagaactcaaacgagg

SEQ ID NO: 378408 - DNA, 25 bp, Artificial
  probe
  misc_feature (1)..(25): SEQ ID NO: 4270; WAN024GOF; Start 82; Stop 106
gtcctttcatcaccgataatagccg

SEQ ID NO: 378409 - DNA, 25 bp, Artificial
  probe
  misc_feature (1)..(25): SEQ ID NO: 4270; WAN024GOF; Start 193; Stop 217
gttacgatagcctcagcctgttctt

SEQ ID NO: 378410 - DNA, 25 bp, Artificial
  probe
  misc_feature (1)..(25): SEQ ID NO: 4270; WAN024GOF; Start 191; Stop 215
aagttacgatagcctcagcctgttc

SEQ ID NO: 378411 - DNA, 25 bp, Artificial
  probe
  misc_feature (1)..(25): SEQ ID NO: 4270; WAN024GOF; Start 98; Stop 122
taatagccgccagcatagcaatctt

SEQ ID NO: 378412 - DNA, 25 bp, Artificial
  probe
  misc_feature (1)..(25): SEQ ID NO: 4270; WAN024GOF; Start 207; Stop 231
agcctgttcttccgtaaaatcatag

SEQ ID NO: 378413 - DNA, 25 bp, Artificial
  probe
  misc_feature (1)..(25): SEQ ID NO: 4270; WAN024GOF; Start 63; Stop 87
cttcatgagattgtacatagtcctt

SEQ ID NO: 378414 - DNA, 25 bp, Artificial
  probe
  misc_feature (1)..(25): SEQ ID NO: 4270; WAN024GOF; Start 61; Stop 85
ttcttcatgagattgtacatagtcc

SEQ ID NO: 378415 - DNA, 25 bp, Artificial
  probe
  misc_feature (1)..(25): SEQ ID NO: 4270; WAN024GOF; Start 206; Stop 230
cagcctgttcttccgtaaaatcata

SEQ ID NO: 378416 - DNA, 25 bp, Artificial
  probe
  misc_feature (1)..(25): SEQ ID NO: 4270; WAN024GOF; Start 72; Stop 96
attgtacatagtcctttcatcaccg

SEQ ID NO: 378417 - DNA, 25 bp, Artificial
  probe
  misc_feature (1)..(25): SEQ ID NO: 4270; WAN024GOF; Start 71; Stop 95
gattgtacatagtcctttcatcacc

SEQ ID NO: 378418 - DNA, 25 bp, Artificial
  probe
  misc_feature (1)..(25): SEQ ID NO: 4270; WAN024GOF; Start 161; Stop 185
catcggtattggtcaaacggtacag

SEQ ID NO: 378419 - DNA, 25 bp, Artificial
  probe
  misc_feature (1)..(25): SEQ ID NO: 4270; WAN024GOF; Start 112; Stop 136
atagcaatcttctcacgaagctctg

SEQ ID NO: 378420 - DNA, 25 bp, Artificial
  probe
  misc_feature (1)..(25): SEQ ID NO: 4270; WAN024GOF; Start 111; Stop 135
catagcaatcttctcacgaagctct

SEQ ID NO: 378421 - DNA, 25 bp, Artificial
  probe
  misc_feature (1)..(25): SEQ ID NO: 4270; WAN024GOF; Start 190; Stop 214
aaagttacgatagcctcagcctgtt

SEQ ID NO: 378422 - DNA, 25 bp, Artificial
  probe
  misc_feature (1)..(25): SEQ ID NO: 4270; WAN024GOF; Start 42; Stop 66
cttgacctcacgaagttctttcttc

SEQ ID NO: 378423 - DNA, 25 bp, Artificial
  probe
  misc_feature (1)..(25): SEQ ID NO: 4271; WAN024GCU; Start 113; Stop 137
attcttcaaatgaaccaaatgttgc

SEQ ID NO: 378424 - DNA, 25 bp, Artificial
  probe
  misc_feature (1)..(25): SEQ ID NO: 4271; WAN024GCU; Start 20; Stop 44
aagtcacttcaagtttcccttcttt

SEQ ID NO: 378425 - DNA, 25 bp, Artificial
  probe
  misc_feature (1)..(25): SEQ ID NO: 4271; WAN024GCU; Start 24; Stop 48
cacttcaagtttcccttctttgttg

SEQ ID NO: 378426 - DNA, 25 bp, Artificial
  probe
  misc_feature (1)..(25): SEQ ID NO: 4271; WAN024GCU; Start 23; Stop 47
tcacttcaagtttcccttctttgtt

SEQ ID NO: 378427 - DNA, 25 bp, Artificial
  probe
  misc_feature (1)..(25): SEQ ID NO: 4271; WAN024GCU; Start 21; Stop 45
agtcacttcaagtttcccttctttg

SEQ ID NO: 378428 - DNA, 25 bp, Artificial
  probe
  misc_feature (1)..(25): SEQ ID NO: 4271; WAN024GCU; Start 29; Stop 53
caagtttcccttctttgttgacaac

SEQ ID NO: 378429 - DNA, 25 bp, Artificial
  probe
  misc_feature (1)..(25): SEQ ID NO: 4271; WAN024GCU; Start 22; Stop 46
gtcacttcaagtttcccttctttgt

SEQ ID NO: 378430 - DNA, 25 bp, Artificial
  probe
  misc_feature (1)..(25): SEQ ID NO: 4271; WAN024GCU; Start 116; Stop 140
cttcaaatgaaccaaatgttgcatc

SEQ ID NO: 378431 - DNA, 25 bp, Artificial
  probe
  misc_feature (1)..(25): SEQ ID NO: 4271; WAN024GCU; Start 30; Stop 54
aagtttcccttctttgttgacaacc

SEQ ID NO: 378432 - DNA, 25 bp, Artificial
  probe
  misc_feature (1)..(25): SEQ ID NO: 4271; WAN024GCU; Start 115; Stop 139
tcttcaaatgaaccaaatgttgcat

SEQ ID NO: 378433 - DNA, 25 bp, Artificial
  probe
  misc_feature (1)..(25): SEQ ID NO: 4271; WAN024GCU; Start 114; Stop 138
ttcttcaaatgaaccaaatgttgca

SEQ ID NO: 378434 - DNA, 25 bp, Artificial
  probe
  misc_feature (1)..(25): SEQ ID NO: 4271; WAN024GCU; Start 32; Stop 56
gtttcccttctttgttgacaaccaa

SEQ ID NO: 378435 - DNA, 25 bp, Artificial
  probe
  misc_feature (1)..(25): SEQ ID NO: 4271; WAN024GCU; Start 112; Stop 136
aattcttcaaatgaaccaaatgttg

SEQ ID NO: 378436 - DNA, 25 bp, Artificial
  probe
  misc_feature (1)..(25): SEQ ID NO: 4271; WAN024GCU; Start 117; Stop 141
ttcaaatgaaccaaatgttgcatcg

SEQ ID NO: 378437 - DNA, 25 bp, Artificial
  probe
  misc_feature (1)..(25): SEQ ID NO: 4271; WAN024GCU; Start 26; Stop 50
cttcaagtttcccttctttgttgac

SEQ ID NO: 378438 - DNA, 25 bp, Artificial
  probe
  misc_feature (1)..(25): SEQ ID NO: 4271; WAN024GCU; Start 222; Stop 246
gccaccattgttgataagtgcttga

SEQ ID NO: 378439 - DNA, 25 bp, Artificial
  probe
  misc_feature (1)..(25): SEQ ID NO: 4271; WAN024GCU; Start 25; Stop 49
acttcaagtttcccttctttgttga

SEQ ID NO: 378440 - DNA, 25 bp, Artificial
  probe
  misc_feature (1)..(25): SEQ ID NO: 4271; WAN024GCU; Start 31; Stop 55
agtttcccttctttgttgacaacca

SEQ ID NO: 378441 - DNA, 25 bp, Artificial
  probe
  misc_feature (1)..(25): SEQ ID NO: 4271; WAN024GCU; Start 4; Stop 28
tcttggtttgctgttgaagtcactt

SEQ ID NO: 378442 - DNA, 25 bp, Artificial
  probe
  misc_feature (1)..(25): SEQ ID NO: 4271; WAN024GCU; Start 118; Stop 142
tcaaatgaaccaaatgttgcatcga

SEQ ID NO: 378443 - DNA, 25 bp, Artificial
  probe
  misc_feature (1)..(25): SEQ ID NO: 4271; WAN024GCU; Start 27; Stop 51
ttcaagtttcccttctttgttgaca

SEQ ID NO: 378444 - DNA, 25 bp, Artificial
  probe
  misc_feature (1)..(25): SEQ ID NO: 4271; WAN024GCU; Start 110; Stop 134
ggaattcttcaaatgaaccaaatgt

SEQ ID NO: 378445 - DNA, 25 bp, Artificial
  probe
  misc_feature (1)..(25): SEQ ID NO: 4271; WAN024GCU; Start 104; Stop 128
ctgcttggaattcttcaaatgaacc

SEQ ID NO: 378446 - DNA, 25 bp, Artificial
  probe
  misc_feature (1)..(25): SEQ ID NO: 4271; WAN024GCU; Start 28; Stop 52
tcaagtttcccttctttgttgacaa

SEQ ID NO: 378447 - DNA, 25 bp, Artificial
  probe
  misc_feature (1)..(25): SEQ ID NO: 4271; WAN024GCU; Start 170; Stop 194
ctgttttctcgggagtcatcaattc

SEQ ID NO: 378448 - DNA, 25 bp, Artificial
  probe
  misc_feature (1)..(25): SEQ ID NO: 4271; WAN024GCU; Start 103; Stop 127
gctgcttggaattcttcaaatgaac

SEQ ID NO: 378449 - DNA, 25 bp, Artificial
  probe
  misc_feature (1)..(25): SEQ ID NO: 4271; WAN024GCU; Start 3; Stop 27
gtcttggtttgctgttgaagtcact

SEQ ID NO: 378450 - DNA, 25 bp, Artificial
  probe
  misc_feature (1)..(25): SEQ ID NO: 4271; WAN024GCU; Start 182; Stop 206
gagtcatcaattcccagaaaagagc

SEQ ID NO: 378451 - DNA, 25 bp, Artificial
  probe
  misc_feature (1)..(25): SEQ ID NO: 4271; WAN024GCU; Start 2; Stop 26
tgtcttggtttgctgttgaagtcac

SEQ ID NO: 378452 - DNA, 25 bp, Artificial
  probe
  misc_feature (1)..(25): SEQ ID NO: 4271; WAN024GCU; Start 1; Stop 25
gtgtcttggtttgctgttgaagtca

SEQ ID NO: 378453 - DNA, 25 bp, Artificial
  probe
  misc_feature (1)..(25): SEQ ID NO: 4271; WAN024GCU; Start 181; Stop 205
ggagtcatcaattcccagaaaagag

SEQ ID NO: 378454 - DNA, 25 bp, Artificial
  probe
  misc_feature (1)..(25): SEQ ID NO: 4271; WAN024GCU; Start 120; Stop 144
aaatgaaccaaatgttgcatcgatt

SEQ ID NO: 378455 - DNA, 25 bp, Artificial
  probe
  misc_feature (1)..(25): SEQ ID NO: 4271; WAN024GCU; Start 109; Stop 133
tggaattcttcaaatgaaccaaatg

SEQ ID NO: 378456 - DNA, 25 bp, Artificial
  probe
  misc_feature (1)..(25): SEQ ID NO: 4272; WAN024COP; Start 81; Stop 105
gcttaccatctacgatataatctgc

SEQ ID NO: 378457 - DNA, 25 bp, Artificial
  probe
  misc_feature (1)..(25): SEQ ID NO: 4272; WAN024COP; Start 74; Stop 98
ttcataggcttaccatctacgatat

SEQ ID NO: 378458 - DNA, 25 bp, Artificial
  probe
  misc_feature (1)..(25): SEQ ID NO: 4272; WAN024COP; Start 80; Stop 104
ggcttaccatctacgatataatctg

SEQ ID NO: 378459 - DNA, 25 bp, Artificial
  probe
  misc_feature (1)..(25): SEQ ID NO: 4272; WAN024COP; Start 79; Stop 103
aggcttaccatctacgatataatct

SEQ ID NO: 378460 - DNA, 25 bp, Artificial
  probe
  misc_feature (1)..(25): SEQ ID NO: 4272; WAN024COP; Start 75; Stop 99
tcataggcttaccatctacgatata

SEQ ID NO: 378461 - DNA, 25 bp, Artificial
  probe
  misc_feature (1)..(25): SEQ ID NO: 4272; WAN024COP; Start 82; Stop 106
cttaccatctacgatataatctgct

SEQ ID NO: 378462 - DNA, 25 bp, Artificial
  probe
  misc_feature (1)..(25): SEQ ID NO: 4272; WAN024COP; Start 76; Stop 100
cataggcttaccatctacgatataa

SEQ ID NO: 378463 - DNA, 25 bp, Artificial
  probe
  misc_feature (1)..(25): SEQ ID NO: 4272; WAN024COP; Start 71; Stop 95
gatttcataggcttaccatctacga

SEQ ID NO: 378464 - DNA, 25 bp, Artificial
  probe
  misc_feature (1)..(25): SEQ ID NO: 4272; WAN024COP; Start 72; Stop 96
atttcataggcttaccatctacgat

SEQ ID NO: 378465 - DNA, 25 bp, Artificial
  probe
  misc_feature (1)..(25): SEQ ID NO: 4272; WAN024COP; Start 78; Stop 102
taggcttaccatctacgatataatc

SEQ ID NO: 378466 - DNA, 25 bp, Artificial
  probe
  misc_feature (1)..(25): SEQ ID NO: 4272; WAN024COP; Start 73; Stop 97
tttcataggcttaccatctacgata

SEQ ID NO: 378467 - DNA, 25 bp, Artificial
  probe
  misc_feature (1)..(25): SEQ ID NO: 4272; WAN024COP; Start 84; Stop 108
taccatctacgatataatctgctaa

SEQ ID NO: 378468 - DNA, 25 bp, Artificial
  probe
  misc_feature (1)..(25): SEQ ID NO: 4272; WAN024COP; Start 83; Stop 107
ttaccatctacgatataatctgcta

SEQ ID NO: 378469 - DNA, 25 bp, Artificial
  probe
  misc_feature (1)..(25): SEQ ID NO: 4272; WAN024COP; Start 77; Stop 101
ataggcttaccatctacgatataat

SEQ ID NO: 378470 - DNA, 25 bp, Artificial
  probe
  misc_feature (1)..(25): SEQ ID NO: 4272; WAN024COP; Start 70; Stop 94
agatttcataggcttaccatctacg

SEQ ID NO: 378471 - DNA, 25 bp, Artificial
  probe
  misc_feature (1)..(25): SEQ ID NO: 4272; WAN024COP; Start 29; Stop 53
tcattctatttaagcaggatatcga

SEQ ID NO: 378472 - DNA, 25 bp, Artificial
  probe
  misc_feature (1)..(25): SEQ ID NO: 4272; WAN024COP; Start 67; Stop 91
tttagatttcataggcttaccatct

SEQ ID NO: 378473 - DNA, 25 bp, Artificial
  probe
  misc_feature (1)..(25): SEQ ID NO: 4272; WAN024COP; Start 2; Stop 26
tgtctttccttaatatggagatagt

SEQ ID NO: 378474 - DNA, 25 bp, Artificial
  probe
  misc_feature (1)..(25): SEQ ID NO: 4272; WAN024COP; Start 28; Stop 52
ttcattctatttaagcaggatatcg

SEQ ID NO: 378475 - DNA, 25 bp, Artificial
  probe
  misc_feature (1)..(25): SEQ ID NO: 4272; WAN024COP; Start 1; Stop 25
gtgtctttccttaatatggagatag

SEQ ID NO: 378476 - DNA, 25 bp, Artificial
  probe
  misc_feature (1)..(25): SEQ ID NO: 4272; WAN024COP; Start 30; Stop 54
cattctatttaagcaggatatcgaa

SEQ ID NO: 378477 - DNA, 25 bp, Artificial
  probe
  misc_feature (1)..(25): SEQ ID NO: 4272; WAN024COP; Start 39; Stop 63
taagcaggatatcgaaaaggttacc

SEQ ID NO: 378478 - DNA, 25 bp, Artificial
  probe
  misc_feature (1)..(25): SEQ ID NO: 4272; WAN024COP; Start 43; Stop 67
caggatatcgaaaaggttaccaatt

SEQ ID NO: 378479 - DNA, 25 bp, Artificial
  probe
  misc_feature (1)..(25): SEQ ID NO: 4272; WAN024COP; Start 38; Stop 62
ttaagcaggatatcgaaaaggttac

SEQ ID NO: 378480 - DNA, 25 bp, Artificial
  probe
  misc_feature (1)..(25): SEQ ID NO: 4272; WAN024COP; Start 66; Stop 90
ttttagatttcataggcttaccatc

SEQ ID NO: 378481 - DNA, 25 bp, Artificial
  probe
  misc_feature (1)..(25): SEQ ID NO: 4272; WAN024COP; Start 42; Stop 66
gcaggatatcgaaaaggttaccaat

SEQ ID NO: 378482 - DNA, 25 bp, Artificial
  probe
  misc_feature (1)..(25): SEQ ID NO: 4272; WAN024COP; Start 36; Stop 60
atttaagcaggatatcgaaaaggtt

SEQ ID NO: 378483 - DNA, 25 bp, Artificial
  probe
  misc_feature (1)..(25): SEQ ID NO: 4272; WAN024COP; Start 44; Stop 68
aggatatcgaaaaggttaccaattt

SEQ ID NO: 378484 - DNA, 25 bp, Artificial
  probe
  misc_feature (1)..(25): SEQ ID NO: 4272; WAN024COP; Start 24; Stop 48
agttttcattctatttaagcaggat

SEQ ID NO: 378485 - DNA, 25 bp, Artificial
  probe
  misc_feature (1)..(25): SEQ ID NO: 4272; WAN024COP; Start 37; Stop 61
tttaagcaggatatcgaaaaggtta

SEQ ID NO: 378486 - DNA, 25 bp, Artificial
  probe
  misc_feature (1)..(25): SEQ ID NO: 4272; WAN024COP; Start 3; Stop 27
gtctttccttaatatggagatagtt

SEQ ID NO: 378487 - DNA, 25 bp, Artificial
  probe
  misc_feature (1)..(25): SEQ ID NO: 4272; WAN024COP; Start 35; Stop 59
tatttaagcaggatatcgaaaaggt

SEQ ID NO: 378488 - DNA, 25 bp, Artificial
  probe
  misc_feature (1)..(25): SEQ ID NO: 4272; WAN024COP; Start 58; Stop 82
gttaccaattttagatttcataggc

SEQ ID NO: 378489 - DNA, 25 bp, Artificial
  probe
  misc_feature (1)..(25): SEQ ID NO: 4274; WAN024GL2; Start 42; Stop 66
tataggaataggtgtaactggtgct

SEQ ID NO: 378490 - DNA, 25 bp, Artificial
  probe
  misc_feature (1)..(25): SEQ ID NO: 4274; WAN024GL2; Start 43; Stop 67
ataggaataggtgtaactggtgctg

SEQ ID NO: 378491 - DNA, 25 bp, Artificial
  probe
  misc_feature (1)..(25): SEQ ID NO: 4274; WAN024GL2; Start 77; Stop 101
ctatacttggaggtgtagcctatgc

SEQ ID NO: 378492 - DNA, 25 bp, Artificial
  probe
  misc_feature (1)..(25): SEQ ID NO: 4274; WAN024GL2; Start 16; Stop 40
ttgacatttctattgggaccatttg

SEQ ID NO: 378493 - DNA, 25 bp, Artificial
  probe
  misc_feature (1)..(25): SEQ ID NO: 4274; WAN024GL2; Start 14; Stop 38
gtttgacatttctattgggaccatt

SEQ ID NO: 378494 - DNA, 25 bp, Artificial
  probe
  misc_feature (1)..(25): SEQ ID NO: 4274; WAN024GL2; Start 19; Stop 43
acatttctattgggaccatttgcta

SEQ ID NO: 378495 - DNA, 25 bp, Artificial
  probe
  misc_feature (1)..(25): SEQ ID NO: 4274; WAN024GL2; Start 20; Stop 44
catttctattgggaccatttgctat

SEQ ID NO: 378496 - DNA, 25 bp, Artificial
  probe
  misc_feature (1)..(25): SEQ ID NO: 4274; WAN024GL2; Start 6; Stop 30
caacaacggtttgacatttctattg

SEQ ID NO: 378497 - DNA, 25 bp, Artificial
  probe
  misc_feature (1)..(25): SEQ ID NO: 4274; WAN024GL2; Start 7; Stop 31
aacaacggtttgacatttctattgg

SEQ ID NO: 378498 - DNA, 25 bp, Artificial
  probe
  misc_feature (1)..(25): SEQ ID NO: 4274; WAN024GL2; Start 41; Stop 65
ctataggaataggtgtaactggtgc

SEQ ID NO: 378499 - DNA, 25 bp, Artificial
  probe
  misc_feature (1)..(25): SEQ ID NO: 4274; WAN024GL2; Start 40; Stop 64
gctataggaataggtgtaactggtg

SEQ ID NO: 378500 - DNA, 25 bp, Artificial
  probe
  misc_feature (1)..(25): SEQ ID NO: 4274; WAN024GL2; Start 38; Stop 62
ttgctataggaataggtgtaactgg

SEQ ID NO: 378501 - DNA, 25 bp, Artificial
  probe
  misc_feature (1)..(25): SEQ ID NO: 4274; WAN024GL2; Start 15; Stop 39
tttgacatttctattgggaccattt

SEQ ID NO: 378502 - DNA, 25 bp, Artificial
  probe
  misc_feature (1)..(25): SEQ ID NO: 4274; WAN024GL2; Start 39; Stop 63
tgctataggaataggtgtaactggt

SEQ ID NO: 378503 - DNA, 25 bp, Artificial
  probe
  misc_feature (1)..(25): SEQ ID NO: 4274; WAN024GL2; Start 5; Stop 29
gcaacaacggtttgacatttctatt

SEQ ID NO: 378504 - DNA, 25 bp, Artificial
  probe
  misc_feature (1)..(25): SEQ ID NO: 4274; WAN024GL2; Start 10; Stop 34
aacggtttgacatttctattgggac

SEQ ID NO: 378505 - DNA, 25 bp, Artificial
  probe
  misc_feature (1)..(25): SEQ ID NO: 4274; WAN024GL2; Start 18; Stop 42
gacatttctattgggaccatttgct

SEQ ID NO: 378506 - DNA, 25 bp, Artificial
  probe
  misc_feature (1)..(25): SEQ ID NO: 4274; WAN024GL2; Start 9; Stop 33
caacggtttgacatttctattggga

SEQ ID NO: 378507 - DNA, 25 bp, Artificial
  probe
  misc_feature (1)..(25): SEQ ID NO: 4274; WAN024GL2; Start 17; Stop 41
tgacatttctattgggaccatttgc

SEQ ID NO: 378508 - DNA, 25 bp, Artificial
  probe
  misc_feature (1)..(25): SEQ ID NO: 4274; WAN024GL2; Start 21; Stop 45
atttctattgggaccatttgctata

SEQ ID NO: 378509 - DNA, 25 bp, Artificial
  probe
  misc_feature (1)..(25): SEQ ID NO: 4274; WAN024GL2; Start 8; Stop 32
acaacggtttgacatttctattggg

SEQ ID NO: 378510 - DNA, 25 bp, Artificial
  probe
  misc_feature (1)..(25): SEQ ID NO: 4274; WAN024GL2; Start 27; Stop 51
attgggaccatttgctataggaata

SEQ ID NO: 378511 - DNA, 25 bp, Artificial
  probe
  misc_feature (1)..(25): SEQ ID NO: 4274; WAN024GL2; Start 26; Stop 50
tattgggaccatttgctataggaat

SEQ ID NO: 378512 - DNA, 25 bp, Artificial
  probe
  misc_feature (1)..(25): SEQ ID NO: 4274; WAN024GL2; Start 44; Stop 68
taggaataggtgtaactggtgctgc

SEQ ID NO: 378513 - DNA, 25 bp, Artificial
  probe
  misc_feature (1)..(25): SEQ ID NO: 4274; WAN024GL2; Start 13; Stop 37
ggtttgacatttctattgggaccat

SEQ ID NO: 378514 - DNA, 25 bp, Artificial
  probe
  misc_feature (1)..(25): SEQ ID NO: 4274; WAN024GL2; Start 28; Stop 52
ttgggaccatttgctataggaatag

SEQ ID NO: 378515 - DNA, 25 bp, Artificial
  probe
  misc_feature (1)..(25): SEQ ID NO: 4274; WAN024GL2; Start 25; Stop 49
ctattgggaccatttgctataggaa

SEQ ID NO: 378516 - DNA, 25 bp, Artificial
  probe
  misc_feature (1)..(25): SEQ ID NO: 4274; WAN024GL2; Start 23; Stop 47
ttctattgggaccatttgctatagg

SEQ ID NO: 378517 - DNA, 25 bp, Artificial
  probe
  misc_feature (1)..(25): SEQ ID NO: 4274; WAN024GL2; Start 78; Stop 102
tatacttggaggtgtagcctatgca

SEQ ID NO: 378518 - DNA, 25 bp, Artificial
  probe
  misc_feature (1)..(25): SEQ ID NO: 4274; WAN024GL2; Start 24; Stop 48
tctattgggaccatttgctatagga

SEQ ID NO: 378519 - DNA, 25 bp, Artificial
  probe
  misc_feature (1)..(25): SEQ ID NO: 4274; WAN024GL2; Start 70; Stop 94
ggtggagctatacttggaggtgtag

SEQ ID NO: 378520 - DNA, 25 bp, Artificial
  probe
  misc_feature (1)..(25): SEQ ID NO: 4274; WAN024GL2; Start 22; Stop 46
tttctattgggaccatttgctatag

SEQ ID NO: 378521 - DNA, 25 bp, Artificial
  probe
  misc_feature (1)..(25): SEQ ID NO: 4274; WAN024GL2; Start 29; Stop 53
tgggaccatttgctataggaatagg

SEQ ID NO: 378522 - DNA, 25 bp, Artificial
  probe
  misc_feature (1)..(25): SEQ ID NO: 4275; WAN024E2B; Start 207; Stop 231
taatctaggtcaggtaagctatcaa

SEQ ID NO: 378523 - DNA, 25 bp, Artificial
  probe
  misc_feature (1)..(25): SEQ ID NO: 4275; WAN024E2B; Start 206; Stop 230
ttaatctaggtcaggtaagctatca

SEQ ID NO: 378524 - DNA, 25 bp, Artificial
  probe
  misc_feature (1)..(25): SEQ ID NO: 4275; WAN024E2B; Start 49; Stop 73
accatagcagccatctttagtcttt

SEQ ID NO: 378525 - DNA, 25 bp, Artificial
  probe
  misc_feature (1)..(25): SEQ ID NO: 4275; WAN024E2B; Start 280; Stop 304
tatgagtttctgtttccttcagtca

SEQ ID NO: 378526 - DNA, 25 bp, Artificial
  probe
  misc_feature (1)..(25): SEQ ID NO: 4275; WAN024E2B; Start 281; Stop 305
atgagtttctgtttccttcagtcaa

SEQ ID NO: 378527 - DNA, 25 bp, Artificial
  probe
  misc_feature (1)..(25): SEQ ID NO: 4275; WAN024E2B; Start 282; Stop 306
tgagtttctgtttccttcagtcaaa

SEQ ID NO: 378528 - DNA, 25 bp, Artificial
  probe
  misc_feature (1)..(25): SEQ ID NO: 4275; WAN024E2B; Start 17; Stop 41
aagttaaggcaggtgttctcctcta

SEQ ID NO: 378529 - DNA, 25 bp, Artificial
  probe
  misc_feature (1)..(25): SEQ ID NO: 4275; WAN024E2B; Start 279; Stop 303
atatgagtttctgtttccttcagtc

SEQ ID NO: 378530 - DNA, 25 bp, Artificial
  probe
  misc_feature (1)..(25): SEQ ID NO: 4275; WAN024E2B; Start 278; Stop 302
aatatgagtttctgtttccttcagt

SEQ ID NO: 378531 - DNA, 25 bp, Artificial
  probe
  misc_feature (1)..(25): SEQ ID NO: 4275; WAN024E2B; Start 48; Stop 72
caccatagcagccatctttagtctt

SEQ ID NO: 378532 - DNA, 25 bp, Artificial
  probe
  misc_feature (1)..(25): SEQ ID NO: 4275; WAN024E2B; Start 208; Stop 232
aatctaggtcaggtaagctatcaaa

SEQ ID NO: 378533 - DNA, 25 bp, Artificial
  probe
  misc_feature (1)..(25): SEQ ID NO: 4275; WAN024E2B; Start 277; Stop 301
caatatgagtttctgtttccttcag

SEQ ID NO: 378534 - DNA, 25 bp, Artificial
  probe
  misc_feature (1)..(25): SEQ ID NO: 4275; WAN024E2B; Start 18; Stop 42
agttaaggcaggtgttctcctctac

SEQ ID NO: 378535 - DNA, 25 bp, Artificial
  probe
  misc_feature (1)..(25): SEQ ID NO: 4275; WAN024E2B; Start 31; Stop 55
gttctcctctacgcagtcaccatag

SEQ ID NO: 378536 - DNA, 25 bp, Artificial
  probe
  misc_feature (1)..(25): SEQ ID NO: 4275; WAN024E2B; Start 47; Stop 71
tcaccatagcagccatctttagtct

SEQ ID NO: 378537 - DNA, 25 bp, Artificial
  probe
  misc_feature (1)..(25): SEQ ID NO: 4275; WAN024E2B; Start 46; Stop 70
gtcaccatagcagccatctttagtc

SEQ ID NO: 378538 - DNA, 25 bp, Artificial
  probe
  misc_feature (1)..(25): SEQ ID NO: 4275; WAN024E2B; Start 44; Stop 68
cagtcaccatagcagccatctttag

SEQ ID NO: 378539 - DNA, 25 bp, Artificial
  probe
  misc_feature (1)..(25): SEQ ID NO: 4275; WAN024E2B; Start 421; Stop 445
caactataatgcgttgaatccagaa

SEQ ID NO: 378540 - DNA, 25 bp, Artificial
  probe
  misc_feature (1)..(25): SEQ ID NO: 4275; WAN024E2B; Start 384; Stop 408
agagaagcctgaaaagaaagagaat

SEQ ID NO: 378541 - DNA, 25 bp, Artificial
  probe
  misc_feature (1)..(25): SEQ ID NO: 4275; WAN024E2B; Start 383; Stop 407
aagagaagcctgaaaagaaagagaa

SEQ ID NO: 378542 - DNA, 25 bp, Artificial
  probe
  misc_feature (1)..(25): SEQ ID NO: 4275; WAN024E2B; Start 51; Stop 75
catagcagccatctttagtcttttg

SEQ ID NO: 378543 - DNA, 25 bp, Artificial
  probe
  misc_feature (1)..(25): SEQ ID NO: 4275; WAN024E2B; Start 52; Stop 76
atagcagccatctttagtcttttgt

SEQ ID NO: 378544 - DNA, 25 bp, Artificial
  probe
  misc_feature (1)..(25): SEQ ID NO: 4275; WAN024E2B; Start 382; Stop 406
gaagagaagcctgaaaagaaagaga

SEQ ID NO: 378545 - DNA, 25 bp, Artificial
  probe
  misc_feature (1)..(25): SEQ ID NO: 4275; WAN024E2B; Start 381; Stop 405
agaagagaagcctgaaaagaaagag

SEQ ID NO: 378546 - DNA, 25 bp, Artificial
  probe
  misc_feature (1)..(25): SEQ ID NO: 4275; WAN024E2B; Start 53; Stop 77
tagcagccatctttagtcttttgtt

SEQ ID NO: 378547 - DNA, 25 bp, Artificial
  probe
  misc_feature (1)..(25): SEQ ID NO: 4275; WAN024E2B; Start 385; Stop 409
gagaagcctgaaaagaaagagaatt

SEQ ID NO: 378548 - DNA, 25 bp, Artificial
  probe
  misc_feature (1)..(25): SEQ ID NO: 4275; WAN024E2B; Start 50; Stop 74
ccatagcagccatctttagtctttt

SEQ ID NO: 378549 - DNA, 25 bp, Artificial
  probe
  misc_feature (1)..(25): SEQ ID NO: 4275; WAN024E2B; Start 45; Stop 69
agtcaccatagcagccatctttagt

SEQ ID NO: 378550 - DNA, 25 bp, Artificial
  probe
  misc_feature (1)..(25): SEQ ID NO: 4275; WAN024E2B; Start 290; Stop 314
tgtttccttcagtcaaaatcaaaga

SEQ ID NO: 378551 - DNA, 25 bp, Artificial
  probe
  misc_feature (1)..(25): SEQ ID NO: 4275; WAN024E2B; Start 205; Stop 229
tttaatctaggtcaggtaagctatc

SEQ ID NO: 378552 - DNA, 25 bp, Artificial
  probe
  misc_feature (1)..(25): SEQ ID NO: 4275; WAN024E2B; Start 30; Stop 54
tgttctcctctacgcagtcaccata

SEQ ID NO: 378553 - DNA, 25 bp, Artificial
  probe
  misc_feature (1)..(25): SEQ ID NO: 4275; WAN024E2B; Start 291; Stop 315
gtttccttcagtcaaaatcaaagaa

SEQ ID NO: 378554 - DNA, 25 bp, Artificial
  probe
  misc_feature (1)..(25): SEQ ID NO: 4275; WAN024E2B; Start 54; Stop 78
agcagccatctttagtcttttgttg

SEQ ID NO: 378555 - DNA, 25 bp, Artificial
  probe
  misc_feature (1)..(25): SEQ ID NO: 4276; WAN024BE5; Start 279; Stop 303
gattaactggttgatgagactgtga

SEQ ID NO: 378556 - DNA, 25 bp, Artificial
  probe
  misc_feature (1)..(25): SEQ ID NO: 4276; WAN024BE5; Start 278; Stop 302
cgattaactggttgatgagactgtg

SEQ ID NO: 378557 - DNA, 25 bp, Artificial
  probe
  misc_feature (1)..(25): SEQ ID NO: 4276; WAN024BE5; Start 123; Stop 147
tatcctccttgatattgaccgagaa

SEQ ID NO: 378558 - DNA, 25 bp, Artificial
  probe
  misc_feature (1)..(25): SEQ ID NO: 4276; WAN024BE5; Start 122; Stop 146
ctatcctccttgatattgaccgaga

SEQ ID NO: 378559 - DNA, 25 bp, Artificial
  probe
  misc_feature (1)..(25): SEQ ID NO: 4276; WAN024BE5; Start 11; Stop 35
cgccacagtattcaacttctacaag

SEQ ID NO: 378560 - DNA, 25 bp, Artificial
  probe
  misc_feature (1)..(25): SEQ ID NO: 4276; WAN024BE5; Start 124; Stop 148
atcctccttgatattgaccgagaac

SEQ ID NO: 378561 - DNA, 25 bp, Artificial
  probe
  misc_feature (1)..(25): SEQ ID NO: 4276; WAN024BE5; Start 10; Stop 34
acgccacagtattcaacttctacaa

SEQ ID NO: 378562 - DNA, 25 bp, Artificial
  probe
  misc_feature (1)..(25): SEQ ID NO: 4276; WAN024BE5; Start 9; Stop 33
aacgccacagtattcaacttctaca

SEQ ID NO: 378563 - DNA, 25 bp, Artificial
  probe
  misc_feature (1)..(25): SEQ ID NO: 4276; WAN024BE5; Start 121; Stop 145
gctatcctccttgatattgaccgag

SEQ ID NO: 378564 - DNA, 25 bp, Artificial
  probe
  misc_feature (1)..(25): SEQ ID NO: 4276; WAN024BE5; Start 277; Stop 301
tcgattaactggttgatgagactgt

SEQ ID NO: 378565 - DNA, 25 bp, Artificial
  probe
  misc_feature (1)..(25): SEQ ID NO: 4276; WAN024BE5; Start 87; Stop 111
agtgctttctggatttacaacaaca

SEQ ID NO: 378566 - DNA, 25 bp, Artificial
  probe
  misc_feature (1)..(25): SEQ ID NO: 4276; WAN024BE5; Start 126; Stop 150
cctccttgatattgaccgagaacag

SEQ ID NO: 378567 - DNA, 25 bp, Artificial
  probe
  misc_feature (1)..(25): SEQ ID NO: 4276; WAN024BE5; Start 125; Stop 149
tcctccttgatattgaccgagaaca

SEQ ID NO: 378568 - DNA, 25 bp, Artificial
  probe
  misc_feature (1)..(25): SEQ ID NO: 4276; WAN024BE5; Start 127; Stop 151
ctccttgatattgaccgagaacagg

SEQ ID NO: 378569 - DNA, 25 bp, Artificial
  probe
  misc_feature (1)..(25): SEQ ID NO: 4276; WAN024BE5; Start 8; Stop 32
aaacgccacagtattcaacttctac

SEQ ID NO: 378570 - DNA, 25 bp, Artificial
  probe
  misc_feature (1)..(25): SEQ ID NO: 4276; WAN024BE5; Start 7; Stop 31
caaacgccacagtattcaacttcta

SEQ ID NO: 378571 - DNA, 25 bp, Artificial
  probe
  misc_feature (1)..(25): SEQ ID NO: 4276; WAN024BE5; Start 18; Stop 42
gtattcaacttctacaagtgcttcc

SEQ ID NO: 378572 - DNA, 25 bp, Artificial
  probe
  misc_feature (1)..(25): SEQ ID NO: 4276; WAN024BE5; Start 15; Stop 39
acagtattcaacttctacaagtgct

SEQ ID NO: 378573 - DNA, 25 bp, Artificial
  probe
  misc_feature (1)..(25): SEQ ID NO: 4276; WAN024BE5; Start 14; Stop 38
cacagtattcaacttctacaagtgc

SEQ ID NO: 378574 - DNA, 25 bp, Artificial
  probe
  misc_feature (1)..(25): SEQ ID NO: 4276; WAN024BE5; Start 13; Stop 37
ccacagtattcaacttctacaagtg

SEQ ID NO: 378575 - DNA, 25 bp, Artificial
  probe
  misc_feature (1)..(25): SEQ ID NO: 4276; WAN024BE5; Start 16; Stop 40
cagtattcaacttctacaagtgctt

SEQ ID NO: 378576 - DNA, 25 bp, Artificial
  probe
  misc_feature (1)..(25): SEQ ID NO: 4276; WAN024BE5; Start 88; Stop 112
gtgctttctggatttacaacaacag

SEQ ID NO: 378577 - DNA, 25 bp, Artificial
  probe
  misc_feature (1)..(25): SEQ ID NO: 4276; WAN024BE5; Start 86; Stop 110
cagtgctttctggatttacaacaac

SEQ ID NO: 378578 - DNA, 25 bp, Artificial
  probe
  misc_feature (1)..(25): SEQ ID NO: 4276; WAN024BE5; Start 17; Stop 41
agtattcaacttctacaagtgcttc

SEQ ID NO: 378579 - DNA, 25 bp, Artificial
  probe
  misc_feature (1)..(25): SEQ ID NO: 4276; WAN024BE5; Start 12; Stop 36
gccacagtattcaacttctacaagt

SEQ ID NO: 378580 - DNA, 25 bp, Artificial
  probe
  misc_feature (1)..(25): SEQ ID NO: 4276; WAN024BE5; Start 96; Stop 120
tggatttacaacaacagctttcata

SEQ ID NO: 378581 - DNA, 25 bp, Artificial
  probe
  misc_feature (1)..(25): SEQ ID NO: 4276; WAN024BE5; Start 97; Stop 121
ggatttacaacaacagctttcatag

SEQ ID NO: 378582 - DNA, 25 bp, Artificial
  probe
  misc_feature (1)..(25): SEQ ID NO: 4276; WAN024BE5; Start 120; Stop 144
agctatcctccttgatattgaccga

SEQ ID NO: 378583 - DNA, 25 bp, Artificial
  probe
  misc_feature (1)..(25): SEQ ID NO: 4276; WAN024BE5; Start 130; Stop 154
cttgatattgaccgagaacagggac

SEQ ID NO: 378584 - DNA, 25 bp, Artificial
  probe
  misc_feature (1)..(25): SEQ ID NO: 4276; WAN024BE5; Start 119; Stop 143
tagctatcctccttgatattgaccg

SEQ ID NO: 378585 - DNA, 25 bp, Artificial
  probe
  misc_feature (1)..(25): SEQ ID NO: 4276; WAN024BE5; Start 93; Stop 117
ttctggatttacaacaacagctttc

SEQ ID NO: 378586 - DNA, 25 bp, Artificial
  probe
  misc_feature (1)..(25): SEQ ID NO: 4276; WAN024BE5; Start 92; Stop 116
tttctggatttacaacaacagcttt

SEQ ID NO: 378587 - DNA, 25 bp, Artificial
  probe
  misc_feature (1)..(25): SEQ ID NO: 4276; WAN024BE5; Start 91; Stop 115
ctttctggatttacaacaacagctt

SEQ ID NO: 378588 - DNA, 25 bp, Artificial
  probe
  misc_feature (1)..(25): SEQ ID NO: 4277; WAN024DI8; Start 434; Stop 458
gtctcaatgtgtctaataccgtctg

SEQ ID NO: 378589 - DNA, 25 bp, Artificial
  probe
  misc_feature (1)..(25): SEQ ID NO: 4277; WAN024DI8; Start 433; Stop 457
agtctcaatgtgtctaataccgtct

SEQ ID NO: 378590 - DNA, 25 bp, Artificial
  probe
  misc_feature (1)..(25): SEQ ID NO: 4277; WAN024DI8; Start 432; Stop 456
cagtctcaatgtgtctaataccgtc

SEQ ID NO: 378591 - DNA, 25 bp, Artificial
  probe
  misc_feature (1)..(25): SEQ ID NO: 4277; WAN024DI8; Start 435; Stop 459
tctcaatgtgtctaataccgtctgc

SEQ ID NO: 378592 - DNA, 25 bp, Artificial
  probe
  misc_feature (1)..(25): SEQ ID NO: 4277; WAN024DI8; Start 428; Stop 452
tccgcagtctcaatgtgtctaatac

SEQ ID NO: 378593 - DNA, 25 bp, Artificial
  probe
  misc_feature (1)..(25): SEQ ID NO: 4277; WAN024DI8; Start 427; Stop 451
gtccgcagtctcaatgtgtctaata

SEQ ID NO: 378594 - DNA, 25 bp, Artificial
  probe
  misc_feature (1)..(25): SEQ ID NO: 4277; WAN024DI8; Start 431; Stop 455
gcagtctcaatgtgtctaataccgt

SEQ ID NO: 378595 - DNA, 25 bp, Artificial
  probe
  misc_feature (1)..(25): SEQ ID NO: 4277; WAN024DI8; Start 447; Stop 471
taataccgtctgcatgattgtctat

SEQ ID NO: 378596 - DNA, 25 bp, Artificial
  probe
  misc_feature (1)..(25): SEQ ID NO: 4277; WAN024DI8; Start 446; Stop 470
ctaataccgtctgcatgattgtcta

SEQ ID NO: 378597 - DNA, 25 bp, Artificial
  probe
  misc_feature (1)..(25): SEQ ID NO: 4277; WAN024DI8; Start 448; Stop 472
aataccgtctgcatgattgtctatg

SEQ ID NO: 378598 - DNA, 25 bp, Artificial
  probe
  misc_feature (1)..(25): SEQ ID NO: 4277; WAN024DI8; Start 445; Stop 469
tctaataccgtctgcatgattgtct

SEQ ID NO: 378599 - DNA, 25 bp, Artificial
  probe
  misc_feature (1)..(25): SEQ ID NO: 4277; WAN024DI8; Start 444; Stop 468
gtctaataccgtctgcatgattgtc

SEQ ID NO: 378600 - DNA, 25 bp, Artificial
  probe
  misc_feature (1)..(25): SEQ ID NO: 4277; WAN024DI8; Start 429; Stop 453
ccgcagtctcaatgtgtctaatacc

SEQ ID NO: 378601 - DNA, 25 bp, Artificial
  probe
  misc_feature (1)..(25): SEQ ID NO: 4277; WAN024DI8; Start 442; Stop 466
gtgtctaataccgtctgcatgattg

SEQ ID NO: 378602 - DNA, 25 bp, Artificial
  probe
  misc_feature (1)..(25): SEQ ID NO: 4277; WAN024DI8; Start 449; Stop 473
ataccgtctgcatgattgtctatga

SEQ ID NO: 378603 - DNA, 25 bp, Artificial
  probe
  misc_feature (1)..(25): SEQ ID NO: 4277; WAN024DI8; Start 440; Stop 464
atgtgtctaataccgtctgcatgat

SEQ ID NO: 378604 - DNA, 25 bp, Artificial
  probe
  misc_feature (1)..(25): SEQ ID NO: 4277; WAN024DI8; Start 443; Stop 467
tgtctaataccgtctgcatgattgt

SEQ ID NO: 378605 - DNA, 25 bp, Artificial
  probe
  misc_feature (1)..(25): SEQ ID NO: 4277; WAN024DI8; Start 441; Stop 465
tgtgtctaataccgtctgcatgatt

SEQ ID NO: 378606 - DNA, 25 bp, Artificial
  probe
  misc_feature (1)..(25): SEQ ID NO: 4277; WAN024DI8; Start 438; Stop 462
caatgtgtctaataccgtctgcatg

SEQ ID NO: 378607 - DNA, 25 bp, Artificial
  probe
  misc_feature (1)..(25): SEQ ID NO: 4277; WAN024DI8; Start 430; Stop 454
cgcagtctcaatgtgtctaataccg

SEQ ID NO: 378608 - DNA, 25 bp, Artificial
  probe
  misc_feature (1)..(25): SEQ ID NO: 4277; WAN024DI8; Start 439; Stop 463
aatgtgtctaataccgtctgcatga

SEQ ID NO: 378609 - DNA, 25 bp, Artificial
  probe
  misc_feature (1)..(25): SEQ ID NO: 4277; WAN024DI8; Start 437; Stop 461
tcaatgtgtctaataccgtctgcat

SEQ ID NO: 378610 - DNA, 25 bp, Artificial
  probe
  misc_feature (1)..(25): SEQ ID NO: 4277; WAN024DI8; Start 450; Stop 474
taccgtctgcatgattgtctatgag

SEQ ID NO: 378611 - DNA, 25 bp, Artificial
  probe
  misc_feature (1)..(25): SEQ ID NO: 4277; WAN024DI8; Start 436; Stop 460
ctcaatgtgtctaataccgtctgca

SEQ ID NO: 378612 - DNA, 25 bp, Artificial
  probe
  misc_feature (1)..(25): SEQ ID NO: 4277; WAN024DI8; Start 456; Stop 480
ctgcatgattgtctatgaggctctt

SEQ ID NO: 378613 - DNA, 25 bp, Artificial
  probe
  misc_feature (1)..(25): SEQ ID NO: 4277; WAN024DI8; Start 457; Stop 481
tgcatgattgtctatgaggctcttc

SEQ ID NO: 378614 - DNA, 25 bp, Artificial
  probe
  misc_feature (1)..(25): SEQ ID NO: 4277; WAN024DI8; Start 426; Stop 450
tgtccgcagtctcaatgtgtctaat

SEQ ID NO: 378615 - DNA, 25 bp, Artificial
  probe
  misc_feature (1)..(25): SEQ ID NO: 4277; WAN024DI8; Start 425; Stop 449
atgtccgcagtctcaatgtgtctaa

SEQ ID NO: 378616 - DNA, 25 bp, Artificial
  probe
  misc_feature (1)..(25): SEQ ID NO: 4277; WAN024DI8; Start 459; Stop 483
catgattgtctatgaggctcttcgc

SEQ ID NO: 378617 - DNA, 25 bp, Artificial
  probe
  misc_feature (1)..(25): SEQ ID NO: 4277; WAN024DI8; Start 458; Stop 482
gcatgattgtctatgaggctcttcg

SEQ ID NO: 378618 - DNA, 25 bp, Artificial
  probe
  misc_feature (1)..(25): SEQ ID NO: 4277; WAN024DI8; Start 454; Stop 478
gtctgcatgattgtctatgaggctc

SEQ ID NO: 378619 - DNA, 25 bp, Artificial
  probe
  misc_feature (1)..(25): SEQ ID NO: 4277; WAN024DI8; Start 455; Stop 479
tctgcatgattgtctatgaggctct

SEQ ID NO: 378620 - DNA, 25 bp, Artificial
  probe
  misc_feature (1)..(25): SEQ ID NO: 4277; WAN024DI8; Start 517; Stop 541
acctatgaagtggataaattgaaat

SEQ ID NO: 378621 - DNA, 25 bp, Artificial
  probe
  misc_feature (1)..(25): SEQ ID NO: 4278; WAN024CDQ; Start 54; Stop 78
caaggatggtcaatacagttacaag

SEQ ID NO: 378622 - DNA, 25 bp, Artificial
  probe
  misc_feature (1)..(25): SEQ ID NO: 4278; WAN024CDQ; Start 55; Stop 79
aaggatggtcaatacagttacaagc

SEQ ID NO: 378623 - DNA, 25 bp, Artificial
  probe
  misc_feature (1)..(25): SEQ ID NO: 4278; WAN024CDQ; Start 53; Stop 77
gcaaggatggtcaatacagttacaa

SEQ ID NO: 378624 - DNA, 25 bp, Artificial
  probe
  misc_feature (1)..(25): SEQ ID NO: 4278; WAN024CDQ; Start 63; Stop 87
tcaatacagttacaagcggagtcaa

SEQ ID NO: 378625 - DNA, 25 bp, Artificial
  probe
  misc_feature (1)..(25): SEQ ID NO: 4278; WAN024CDQ; Start 146; Stop 170
gcttcgtagtaggttggatcaattc

SEQ ID NO: 378626 - DNA, 25 bp, Artificial
  probe
  misc_feature (1)..(25): SEQ ID NO: 4278; WAN024CDQ; Start 64; Stop 88
caatacagttacaagcggagtcaac

SEQ ID NO: 378627 - DNA, 25 bp, Artificial
  probe
  misc_feature (1)..(25): SEQ ID NO: 4278; WAN024CDQ; Start 185; Stop 209
tagtacatgacactgctatatccaa

SEQ ID NO: 378628 - DNA, 25 bp, Artificial
  probe
  misc_feature (1)..(25): SEQ ID NO: 4278; WAN024CDQ; Start 145; Stop 169
tgcttcgtagtaggttggatcaatt

SEQ ID NO: 378629 - DNA, 25 bp, Artificial
  probe
  misc_feature (1)..(25): SEQ ID NO: 4278; WAN024CDQ; Start 62; Stop 86
gtcaatacagttacaagcggagtca

SEQ ID NO: 378630 - DNA, 25 bp, Artificial
  probe
  misc_feature (1)..(25): SEQ ID NO: 4278; WAN024CDQ; Start 59; Stop 83
atggtcaatacagttacaagcggag

SEQ ID NO: 378631 - DNA, 25 bp, Artificial
  probe
  misc_feature (1)..(25): SEQ ID NO: 4278; WAN024CDQ; Start 58; Stop 82
gatggtcaatacagttacaagcgga

SEQ ID NO: 378632 - DNA, 25 bp, Artificial
  probe
  misc_feature (1)..(25): SEQ ID NO: 4278; WAN024CDQ; Start 56; Stop 80
aggatggtcaatacagttacaagcg

SEQ ID NO: 378633 - DNA, 25 bp, Artificial
  probe
  misc_feature (1)..(25): SEQ ID NO: 4278; WAN024CDQ; Start 184; Stop 208
atagtacatgacactgctatatcca

SEQ ID NO: 378634 - DNA, 25 bp, Artificial
  probe
  misc_feature (1)..(25): SEQ ID NO: 4278; WAN024CDQ; Start 147; Stop 171
cttcgtagtaggttggatcaattcc

SEQ ID NO: 378635 - DNA, 25 bp, Artificial
  probe
  misc_feature (1)..(25): SEQ ID NO: 4278; WAN024CDQ; Start 183; Stop 207
catagtacatgacactgctatatcc

SEQ ID NO: 378636 - DNA, 25 bp, Artificial
  probe
  misc_feature (1)..(25): SEQ ID NO: 4278; WAN024CDQ; Start 181; Stop 205
cgcatagtacatgacactgctatat

SEQ ID NO: 378637 - DNA, 25 bp, Artificial
  probe
  misc_feature (1)..(25): SEQ ID NO: 4278; WAN024CDQ; Start 202; Stop 226
atatccaaagcctttccaaatacct

SEQ ID NO: 378638 - DNA, 25 bp, Artificial
  probe
  misc_feature (1)..(25): SEQ ID NO: 4278; WAN024CDQ; Start 144; Stop 168
ctgcttcgtagtaggttggatcaat

SEQ ID NO: 378639 - DNA, 25 bp, Artificial
  probe
  misc_feature (1)..(25): SEQ ID NO: 4278; WAN024CDQ; Start 182; Stop 206
gcatagtacatgacactgctatatc

SEQ ID NO: 378640 - DNA, 25 bp, Artificial
  probe
  misc_feature (1)..(25): SEQ ID NO: 4278; WAN024CDQ; Start 203; Stop 227
tatccaaagcctttccaaataccta

SEQ ID NO: 378641 - DNA, 25 bp, Artificial
  probe
  misc_feature (1)..(25): SEQ ID NO: 4278; WAN024CDQ; Start 173; Stop 197
atgatcgtcgcatagtacatgacac

SEQ ID NO: 378642 - DNA, 25 bp, Artificial
  probe
  misc_feature (1)..(25): SEQ ID NO: 4278; WAN024CDQ; Start 204; Stop 228
atccaaagcctttccaaatacctag

SEQ ID NO: 378643 - DNA, 25 bp, Artificial
  probe
  misc_feature (1)..(25): SEQ ID NO: 4278; WAN024CDQ; Start 180; Stop 204
tcgcatagtacatgacactgctata

SEQ ID NO: 378644 - DNA, 25 bp, Artificial
  probe
  misc_feature (1)..(25): SEQ ID NO: 4278; WAN024CDQ; Start 201; Stop 225
tatatccaaagcctttccaaatacc

SEQ ID NO: 378645 - DNA, 25 bp, Artificial
  probe
  misc_feature (1)..(25): SEQ ID NO: 4278; WAN024CDQ; Start 5; Stop 29
gggatttgatagaagagaccgaagt

SEQ ID NO: 378646 - DNA, 25 bp, Artificial
  probe
  misc_feature (1)..(25): SEQ ID NO: 4278; WAN024CDQ; Start 4; Stop 28
tgggatttgatagaagagaccgaag

SEQ ID NO: 378647 - DNA, 25 bp, Artificial
  probe
  misc_feature (1)..(25): SEQ ID NO: 4278; WAN024CDQ; Start 61; Stop 85
ggtcaatacagttacaagcggagtc

SEQ ID NO: 378648 - DNA, 25 bp, Artificial
  probe
  misc_feature (1)..(25): SEQ ID NO: 4278; WAN024CDQ; Start 187; Stop 211
gtacatgacactgctatatccaaag

SEQ ID NO: 378649 - DNA, 25 bp, Artificial
  probe
  misc_feature (1)..(25): SEQ ID NO: 4278; WAN024CDQ; Start 3; Stop 27
gtgggatttgatagaagagaccgaa

SEQ ID NO: 378650 - DNA, 25 bp, Artificial
  probe
  misc_feature (1)..(25): SEQ ID NO: 4278; WAN024CDQ; Start 52; Stop 76
tgcaaggatggtcaatacagttaca

SEQ ID NO: 378651 - DNA, 25 bp, Artificial
  probe
  misc_feature (1)..(25): SEQ ID NO: 4278; WAN024CDQ; Start 6; Stop 30
ggatttgatagaagagaccgaagtc

SEQ ID NO: 378652 - DNA, 25 bp, Artificial
  probe
  misc_feature (1)..(25): SEQ ID NO: 4278; WAN024CDQ; Start 175; Stop 199
gatcgtcgcatagtacatgacactg

SEQ ID NO: 378653 - DNA, 25 bp, Artificial
  probe
  misc_feature (1)..(25): SEQ ID NO: 4278; WAN024CDQ; Start 57; Stop 81
ggatggtcaatacagttacaagcgg

SEQ ID NO: 378654 - DNA, 25 bp, Artificial
  probe
  misc_feature (1)..(25): SEQ ID NO: 4279; WAN024FHI; Start 235; Stop 259
cggaacgatactatgaaggtcaatt

SEQ ID NO: 378655 - DNA, 25 bp, Artificial
  probe
  misc_feature (1)..(25): SEQ ID NO: 4279; WAN024FHI; Start 33; Stop 57
cttcaaggtagataacatcaacgcc

SEQ ID NO: 378656 - DNA, 25 bp, Artificial
  probe
  misc_feature (1)..(25): SEQ ID NO: 4279; WAN024FHI; Start 34; Stop 58
ttcaaggtagataacatcaacgccg

SEQ ID NO: 378657 - DNA, 25 bp, Artificial
  probe
  misc_feature (1)..(25): SEQ ID NO: 4279; WAN024FHI; Start 32; Stop 56
ccttcaaggtagataacatcaacgc

SEQ ID NO: 378658 - DNA, 25 bp, Artificial
  probe
  misc_feature (1)..(25): SEQ ID NO: 4279; WAN024FHI; Start 236; Stop 260
ggaacgatactatgaaggtcaattt

SEQ ID NO: 378659 - DNA, 25 bp, Artificial
  probe
  misc_feature (1)..(25): SEQ ID NO: 4279; WAN024FHI; Start 234; Stop 258
tcggaacgatactatgaaggtcaat

SEQ ID NO: 378660 - DNA, 25 bp, Artificial
  probe
  misc_feature (1)..(25): SEQ ID NO: 4279; WAN024FHI; Start 185; Stop 209
ttcttaacgtcttcaggaagtggtt

SEQ ID NO: 378661 - DNA, 25 bp, Artificial
  probe
  misc_feature (1)..(25): SEQ ID NO: 4279; WAN024FHI; Start 186; Stop 210
tcttaacgtcttcaggaagtggttc

SEQ ID NO: 378662 - DNA, 25 bp, Artificial
  probe
  misc_feature (1)..(25): SEQ ID NO: 4279; WAN024FHI; Start 193; Stop 217
gtcttcaggaagtggttcgtattcg

SEQ ID NO: 378663 - DNA, 25 bp, Artificial
  probe
  misc_feature (1)..(25): SEQ ID NO: 4279; WAN024FHI; Start 192; Stop 216
cgtcttcaggaagtggttcgtattc

SEQ ID NO: 378664 - DNA, 25 bp, Artificial
  probe
  misc_feature (1)..(25): SEQ ID NO: 4279; WAN024FHI; Start 195; Stop 219
cttcaggaagtggttcgtattcgtg

SEQ ID NO: 378665 - DNA, 25 bp, Artificial
  probe
  misc_feature (1)..(25): SEQ ID NO: 4279; WAN024FHI; Start 36; Stop 60
caaggtagataacatcaacgccgtc

SEQ ID NO: 378666 - DNA, 25 bp, Artificial
  probe
  misc_feature (1)..(25): SEQ ID NO: 4279; WAN024FHI; Start 134; Stop 158
cctgtttcaaggttgataccgttat

SEQ ID NO: 378667 - DNA, 25 bp, Artificial
  probe
  misc_feature (1)..(25): SEQ ID NO: 4279; WAN024FHI; Start 136; Stop 160
tgtttcaaggttgataccgttatag

SEQ ID NO: 378668 - DNA, 25 bp, Artificial
  probe
  misc_feature (1)..(25): SEQ ID NO: 4279; WAN024FHI; Start 135; Stop 159
ctgtttcaaggttgataccgttata

SEQ ID NO: 378669 - DNA, 25 bp, Artificial
  probe
  misc_feature (1)..(25): SEQ ID NO: 4279; WAN024FHI; Start 194; Stop 218
tcttcaggaagtggttcgtattcgt

SEQ ID NO: 378670 - DNA, 25 bp, Artificial
  probe
  misc_feature (1)..(25): SEQ ID NO: 4279; WAN024FHI; Start 196; Stop 220
ttcaggaagtggttcgtattcgtgt

SEQ ID NO: 378671 - DNA, 25 bp, Artificial
  probe
  misc_feature (1)..(25): SEQ ID NO: 4279; WAN024FHI; Start 137; Stop 161
gtttcaaggttgataccgttataga

SEQ ID NO: 378672 - DNA, 25 bp, Artificial
  probe
  misc_feature (1)..(25): SEQ ID NO: 4279; WAN024FHI; Start 85; Stop 109
ttcagttttcttggcattttctacc

SEQ ID NO: 378673 - DNA, 25 bp, Artificial
  probe
  misc_feature (1)..(25): SEQ ID NO: 4279; WAN024FHI; Start 81; Stop 105
tgttttcagttttcttggcattttc

SEQ ID NO: 378674 - DNA, 25 bp, Artificial
  probe
  misc_feature (1)..(25): SEQ ID NO: 4279; WAN024FHI; Start 78; Stop 102
ctttgttttcagttttcttggcatt

SEQ ID NO: 378675 - DNA, 25 bp, Artificial
  probe
  misc_feature (1)..(25): SEQ ID NO: 4279; WAN024FHI; Start 77; Stop 101
tctttgttttcagttttcttggcat

SEQ ID NO: 378676 - DNA, 25 bp, Artificial
  probe
  misc_feature (1)..(25): SEQ ID NO: 4279; WAN024FHI; Start 35; Stop 59
tcaaggtagataacatcaacgccgt

SEQ ID NO: 378677 - DNA, 25 bp, Artificial
  probe
  misc_feature (1)..(25): SEQ ID NO: 4279; WAN024FHI; Start 82; Stop 106
gttttcagttttcttggcattttct

SEQ ID NO: 378678 - DNA, 25 bp, Artificial
  probe
  misc_feature (1)..(25): SEQ ID NO: 4279; WAN024FHI; Start 80; Stop 104
ttgttttcagttttcttggcatttt

SEQ ID NO: 378679 - DNA, 25 bp, Artificial
  probe
  misc_feature (1)..(25): SEQ ID NO: 4279; WAN024FHI; Start 79; Stop 103
tttgttttcagttttcttggcattt

SEQ ID NO: 378680 - DNA, 25 bp, Artificial
  probe
  misc_feature (1)..(25): SEQ ID NO: 4279; WAN024FHI; Start 75; Stop 99
agtctttgttttcagttttcttggc

SEQ ID NO: 378681 - DNA, 25 bp, Artificial
  probe
  misc_feature (1)..(25): SEQ ID NO: 4279; WAN024FHI; Start 139; Stop 163
ttcaaggttgataccgttatagaaa

SEQ ID NO: 378682 - DNA, 25 bp, Artificial
  probe
  misc_feature (1)..(25): SEQ ID NO: 4279; WAN024FHI; Start 138; Stop 162
tttcaaggttgataccgttatagaa

SEQ ID NO: 378683 - DNA, 25 bp, Artificial
  probe
  misc_feature (1)..(25): SEQ ID NO: 4279; WAN024FHI; Start 76; Stop 100
gtctttgttttcagttttcttggca

SEQ ID NO: 378684 - DNA, 25 bp, Artificial
  probe
  misc_feature (1)..(25): SEQ ID NO: 4279; WAN024FHI; Start 68; Stop 92
gcgaagtagtctttgttttcagttt

SEQ ID NO: 378685 - DNA, 25 bp, Artificial
  probe
  misc_feature (1)..(25): SEQ ID NO: 4279; WAN024FHI; Start 184; Stop 208
tttcttaacgtcttcaggaagtggt

SEQ ID NO: 378686 - DNA, 25 bp, Artificial
  probe
  misc_feature (1)..(25): SEQ ID NO: 4279; WAN024FHI; Start 84; Stop 108
tttcagttttcttggcattttctac

SEQ ID NO: 378687 - DNA, 25 bp, Artificial
  probe
  misc_feature (1)..(25): SEQ ID NO: 4280; WAN024GHC; Start 73; Stop 97
atgactgaacactcaatatgccaac

SEQ ID NO: 378688 - DNA, 25 bp, Artificial
  probe
  misc_feature (1)..(25): SEQ ID NO: 4280; WAN024GHC; Start 72; Stop 96
catgactgaacactcaatatgccaa

SEQ ID NO: 378689 - DNA, 25 bp, Artificial
  probe
  misc_feature (1)..(25): SEQ ID NO: 4280; WAN024GHC; Start 68; Stop 92
tcgacatgactgaacactcaatatg

SEQ ID NO: 378690 - DNA, 25 bp, Artificial
  probe
  misc_feature (1)..(25): SEQ ID NO: 4280; WAN024GHC; Start 70; Stop 94
gacatgactgaacactcaatatgcc

SEQ ID NO: 378691 - DNA, 25 bp, Artificial
  probe
  misc_feature (1)..(25): SEQ ID NO: 4280; WAN024GHC; Start 69; Stop 93
cgacatgactgaacactcaatatgc

SEQ ID NO: 378692 - DNA, 25 bp, Artificial
  probe
  misc_feature (1)..(25): SEQ ID NO: 4280; WAN024GHC; Start 71; Stop 95
acatgactgaacactcaatatgcca

SEQ ID NO: 378693 - DNA, 25 bp, Artificial
  probe
  misc_feature (1)..(25): SEQ ID NO: 4280; WAN024GHC; Start 74; Stop 98
tgactgaacactcaatatgccaacc

SEQ ID NO: 378694 - DNA, 25 bp, Artificial
  probe
  misc_feature (1)..(25): SEQ ID NO: 4280; WAN024GHC; Start 35; Stop 59
cgtggatatcaatggtatcacctaa

SEQ ID NO: 378695 - DNA, 25 bp, Artificial
  probe
  misc_feature (1)..(25): SEQ ID NO: 4280; WAN024GHC; Start 128; Stop 152
aagaaatctcacctggtttggaaga

SEQ ID NO: 378696 - DNA, 25 bp, Artificial
  probe
  misc_feature (1)..(25): SEQ ID NO: 4280; WAN024GHC; Start 127; Stop 151
caagaaatctcacctggtttggaag

SEQ ID NO: 378697 - DNA, 25 bp, Artificial
  probe
  misc_feature (1)..(25): SEQ ID NO: 4280; WAN024GHC; Start 115; Stop 139
caaggactatcccaagaaatctcac

SEQ ID NO: 378698 - DNA, 25 bp, Artificial
  probe
  misc_feature (1)..(25): SEQ ID NO: 4280; WAN024GHC; Start 34; Stop 58
ccgtggatatcaatggtatcaccta

SEQ ID NO: 378699 - DNA, 25 bp, Artificial
  probe
  misc_feature (1)..(25): SEQ ID NO: 4280; WAN024GHC; Start 116; Stop 140
aaggactatcccaagaaatctcacc

SEQ ID NO: 378700 - DNA, 25 bp, Artificial
  probe
  misc_feature (1)..(25): SEQ ID NO: 4280; WAN024GHC; Start 114; Stop 138
ccaaggactatcccaagaaatctca

SEQ ID NO: 378701 - DNA, 25 bp, Artificial
  probe
  misc_feature (1)..(25): SEQ ID NO: 4280; WAN024GHC; Start 122; Stop 146
tatcccaagaaatctcacctggttt

SEQ ID NO: 378702 - DNA, 25 bp, Artificial
  probe
  misc_feature (1)..(25): SEQ ID NO: 4280; WAN024GHC; Start 121; Stop 145
ctatcccaagaaatctcacctggtt

SEQ ID NO: 378703 - DNA, 25 bp, Artificial
  probe
  misc_feature (1)..(25): SEQ ID NO: 4280; WAN024GHC; Start 224; Stop 248
gctccaaatcttccaaggttttatt

SEQ ID NO: 378704 - DNA, 25 bp, Artificial
  probe
  misc_feature (1)..(25): SEQ ID NO: 4280; WAN024GHC; Start 118; Stop 142
ggactatcccaagaaatctcacctg

SEQ ID NO: 378705 - DNA, 25 bp, Artificial
  probe
  misc_feature (1)..(25): SEQ ID NO: 4280; WAN024GHC; Start 113; Stop 137
cccaaggactatcccaagaaatctc

SEQ ID NO: 378706 - DNA, 25 bp, Artificial
  probe
  misc_feature (1)..(25): SEQ ID NO: 4280; WAN024GHC; Start 117; Stop 141
aggactatcccaagaaatctcacct

SEQ ID NO: 378707 - DNA, 25 bp, Artificial
  probe
  misc_feature (1)..(25): SEQ ID NO: 4280; WAN024GHC; Start 129; Stop 153
agaaatctcacctggtttggaagat

SEQ ID NO: 378708 - DNA, 25 bp, Artificial
  probe
  misc_feature (1)..(25): SEQ ID NO: 4280; WAN024GHC; Start 119; Stop 143
gactatcccaagaaatctcacctgg

SEQ ID NO: 378709 - DNA, 25 bp, Artificial
  probe
  misc_feature (1)..(25): SEQ ID NO: 4280; WAN024GHC; Start 230; Stop 254
aatcttccaaggttttattagccaa

SEQ ID NO: 378710 - DNA, 25 bp, Artificial
  probe
  misc_feature (1)..(25): SEQ ID NO: 4280; WAN024GHC; Start 236; Stop 260
ccaaggttttattagccaatttagc

SEQ ID NO: 378711 - DNA, 25 bp, Artificial
  probe
  misc_feature (1)..(25): SEQ ID NO: 4280; WAN024GHC; Start 229; Stop 253
aaatcttccaaggttttattagcca

SEQ ID NO: 378712 - DNA, 25 bp, Artificial
  probe
  misc_feature (1)..(25): SEQ ID NO: 4280; WAN024GHC; Start 231; Stop 255
atcttccaaggttttattagccaat

SEQ ID NO: 378713 - DNA, 25 bp, Artificial
  probe
  misc_feature (1)..(25): SEQ ID NO: 4280; WAN024GHC; Start 228; Stop 252
caaatcttccaaggttttattagcc

SEQ ID NO: 378714 - DNA, 25 bp, Artificial
  probe
  misc_feature (1)..(25): SEQ ID NO: 4280; WAN024GHC; Start 227; Stop 251
ccaaatcttccaaggttttattagc

SEQ ID NO: 378715 - DNA, 25 bp, Artificial
  probe
  misc_feature (1)..(25): SEQ ID NO: 4280; WAN024GHC; Start 232; Stop 256
tcttccaaggttttattagccaatt

SEQ ID NO: 378716 - DNA, 25 bp, Artificial
  probe
  misc_feature (1)..(25): SEQ ID NO: 4280; WAN024GHC; Start 237; Stop 261
caaggttttattagccaatttagca

SEQ ID NO: 378717 - DNA, 25 bp, Artificial
  probe
  misc_feature (1)..(25): SEQ ID NO: 4280; WAN024GHC; Start 233; Stop 257
cttccaaggttttattagccaattt

SEQ ID NO: 378718 - DNA, 25 bp, Artificial
  probe
  misc_feature (1)..(25): SEQ ID NO: 4280; WAN024GHC; Start 32; Stop 56
caccgtggatatcaatggtatcacc

SEQ ID NO: 378719 - DNA, 25 bp, Artificial
  probe
  misc_feature (1)..(25): SEQ ID NO: 4280; WAN024GHC; Start 31; Stop 55
ccaccgtggatatcaatggtatcac

SEQ ID NO: 378720 - DNA, 25 bp, Artificial
  probe
  misc_feature (1)..(25): SEQ ID NO: 4281; WAN024DX7; Start 94; Stop 118
agacagaccattagcctactagaac

SEQ ID NO: 378721 - DNA, 25 bp, Artificial
  probe
  misc_feature (1)..(25): SEQ ID NO: 4281; WAN024DX7; Start 93; Stop 117
cagacagaccattagcctactagaa

SEQ ID NO: 378722 - DNA, 25 bp, Artificial
  probe
  misc_feature (1)..(25): SEQ ID NO: 4281; WAN024DX7; Start 90; Stop 114
ttccagacagaccattagcctacta

SEQ ID NO: 378723 - DNA, 25 bp, Artificial
  probe
  misc_feature (1)..(25): SEQ ID NO: 4281; WAN024DX7; Start 95; Stop 119
gacagaccattagcctactagaacg

SEQ ID NO: 378724 - DNA, 25 bp, Artificial
  probe
  misc_feature (1)..(25): SEQ ID NO: 4281; WAN024DX7; Start 92; Stop 116
ccagacagaccattagcctactaga

SEQ ID NO: 378725 - DNA, 25 bp, Artificial
  probe
  misc_feature (1)..(25): SEQ ID NO: 4281; WAN024DX7; Start 91; Stop 115
tccagacagaccattagcctactag

SEQ ID NO: 378726 - DNA, 25 bp, Artificial
  probe
  misc_feature (1)..(25): SEQ ID NO: 4281; WAN024DX7; Start 96; Stop 120
acagaccattagcctactagaacgg

SEQ ID NO: 378727 - DNA, 25 bp, Artificial
  probe
  misc_feature (1)..(25): SEQ ID NO: 4281; WAN024DX7; Start 102; Stop 126
cattagcctactagaacgggatgag

SEQ ID NO: 378728 - DNA, 25 bp, Artificial
  probe
  misc_feature (1)..(25): SEQ ID NO: 4281; WAN024DX7; Start 88; Stop 112
gtttccagacagaccattagcctac

SEQ ID NO: 378729 - DNA, 25 bp, Artificial
  probe
  misc_feature (1)..(25): SEQ ID NO: 4281; WAN024DX7; Start 89; Stop 113
tttccagacagaccattagcctact

SEQ ID NO: 378730 - DNA, 25 bp, Artificial
  probe
  misc_feature (1)..(25): SEQ ID NO: 4281; WAN024DX7; Start 103; Stop 127
attagcctactagaacgggatgagt

SEQ ID NO: 378731 - DNA, 25 bp, Artificial
  probe
  misc_feature (1)..(25): SEQ ID NO: 4281; WAN024DX7; Start 104; Stop 128
ttagcctactagaacgggatgagta

SEQ ID NO: 378732 - DNA, 25 bp, Artificial
  probe
  misc_feature (1)..(25): SEQ ID NO: 4281; WAN024DX7; Start 99; Stop 123
gaccattagcctactagaacgggat

SEQ ID NO: 378733 - DNA, 25 bp, Artificial
  probe
  misc_feature (1)..(25): SEQ ID NO: 4281; WAN024DX7; Start 132; Stop 156
cccatccattatcattgccctgaaa

SEQ ID NO: 378734 - DNA, 25 bp, Artificial
  probe
  misc_feature (1)..(25): SEQ ID NO: 4281; WAN024DX7; Start 101; Stop 125
ccattagcctactagaacgggatga

SEQ ID NO: 378735 - DNA, 25 bp, Artificial
  probe
  misc_feature (1)..(25): SEQ ID NO: 4281; WAN024DX7; Start 184; Stop 208
gaatcggtatttcgtttggaggagg

SEQ ID NO: 378736 - DNA, 25 bp, Artificial
  probe
  misc_feature (1)..(25): SEQ ID NO: 4281; WAN024DX7; Start 134; Stop 158
catccattatcattgccctgaaaat

SEQ ID NO: 378737 - DNA, 25 bp, Artificial
  probe
  misc_feature (1)..(25): SEQ ID NO: 4281; WAN024DX7; Start 185; Stop 209
aatcggtatttcgtttggaggagga

SEQ ID NO: 378738 - DNA, 25 bp, Artificial
  probe
  misc_feature (1)..(25): SEQ ID NO: 4281; WAN024DX7; Start 105; Stop 129
tagcctactagaacgggatgagtac

SEQ ID NO: 378739 - DNA, 25 bp, Artificial
  probe
  misc_feature (1)..(25): SEQ ID NO: 4281; WAN024DX7; Start 100; Stop 124
accattagcctactagaacgggatg

SEQ ID NO: 378740 - DNA, 25 bp, Artificial
  probe
  misc_feature (1)..(25): SEQ ID NO: 4281; WAN024DX7; Start 143; Stop 167
tcattgccctgaaaatatctcaaat

SEQ ID NO: 378741 - DNA, 25 bp, Artificial
  probe
  misc_feature (1)..(25): SEQ ID NO: 4281; WAN024DX7; Start 142; Stop 166
atcattgccctgaaaatatctcaaa

SEQ ID NO: 378742 - DNA, 25 bp, Artificial
  probe
  misc_feature (1)..(25): SEQ ID NO: 4281; WAN024DX7; Start 124; Stop 148
gagtacaccccatccattatcattg

SEQ ID NO: 378743 - DNA, 25 bp, Artificial
  probe
  misc_feature (1)..(25): SEQ ID NO: 4281; WAN024DX7; Start 136; Stop 160
tccattatcattgccctgaaaatat

SEQ ID NO: 378744 - DNA, 25 bp, Artificial
  probe
  misc_feature (1)..(25): SEQ ID NO: 4281; WAN024DX7; Start 135; Stop 159
atccattatcattgccctgaaaata

SEQ ID NO: 378745 - DNA, 25 bp, Artificial
  probe
  misc_feature (1)..(25): SEQ ID NO: 4281; WAN024DX7; Start 133; Stop 157
ccatccattatcattgccctgaaaa

SEQ ID NO: 378746 - DNA, 25 bp, Artificial
  probe
  misc_feature (1)..(25): SEQ ID NO: 4281; WAN024DX7; Start 144; Stop 168
cattgccctgaaaatatctcaaatt

SEQ ID NO: 378747 - DNA, 25 bp, Artificial
  probe
  misc_feature (1)..(25): SEQ ID NO: 4281; WAN024DX7; Start 141; Stop 165
tatcattgccctgaaaatatctcaa

SEQ ID NO: 378748 - DNA, 25 bp, Artificial
  probe
  misc_feature (1)..(25): SEQ ID NO: 4281; WAN024DX7; Start 140; Stop 164
ttatcattgccctgaaaatatctca

SEQ ID NO: 378749 - DNA, 25 bp, Artificial
  probe
  misc_feature (1)..(25): SEQ ID NO: 4281; WAN024DX7; Start 137; Stop 161
ccattatcattgccctgaaaatatc

SEQ ID NO: 378750 - DNA, 25 bp, Artificial
  probe
  misc_feature (1)..(25): SEQ ID NO: 4281; WAN024DX7; Start 123; Stop 147
tgagtacaccccatccattatcatt

SEQ ID NO: 378751 - DNA, 25 bp, Artificial
  probe
  misc_feature (1)..(25): SEQ ID NO: 4281; WAN024DX7; Start 97; Stop 121
cagaccattagcctactagaacggg

SEQ ID NO: 378752 - DNA, 25 bp, Artificial
  probe
  misc_feature (1)..(25): SEQ ID NO: 4281; WAN024DX7; Start 98; Stop 122
agaccattagcctactagaacggga

SEQ ID NO: 378753 - DNA, 25 bp, Artificial
  probe
  misc_feature (1)..(25): SEQ ID NO: 4282; WAN024G8O; Start 61; Stop 85
tgttccagtctcatcagttgttatt

SEQ ID NO: 378754 - DNA, 25 bp, Artificial
  probe
  misc_feature (1)..(25): SEQ ID NO: 4282; WAN024G8O; Start 60; Stop 84
ctgttccagtctcatcagttgttat

SEQ ID NO: 378755 - DNA, 25 bp, Artificial
  probe
  misc_feature (1)..(25): SEQ ID NO: 4282; WAN024G8O; Start 65; Stop 89
ccagtctcatcagttgttatttacc

SEQ ID NO: 378756 - DNA, 25 bp, Artificial
  probe
  misc_feature (1)..(25): SEQ ID NO: 4282; WAN024G8O; Start 62; Stop 86
gttccagtctcatcagttgttattt

SEQ ID NO: 378757 - DNA, 25 bp, Artificial
  probe
  misc_feature (1)..(25): SEQ ID NO: 4282; WAN024G8O; Start 241; Stop 265
gcattgatacgagtaatccacaatt

SEQ ID NO: 378758 - DNA, 25 bp, Artificial
  probe
  misc_feature (1)..(25): SEQ ID NO: 4282; WAN024G8O; Start 59; Stop 83
cctgttccagtctcatcagttgtta

SEQ ID NO: 378759 - DNA, 25 bp, Artificial
  probe
  misc_feature (1)..(25): SEQ ID NO: 4282; WAN024G8O; Start 66; Stop 90
cagtctcatcagttgttatttacca

SEQ ID NO: 378760 - DNA, 25 bp, Artificial
  probe
  misc_feature (1)..(25): SEQ ID NO: 4282; WAN024G8O; Start 64; Stop 88
tccagtctcatcagttgttatttac

SEQ ID NO: 378761 - DNA, 25 bp, Artificial
  probe
  misc_feature (1)..(25): SEQ ID NO: 4282; WAN024G8O; Start 244; Stop 268
ttgatacgagtaatccacaatttgc

SEQ ID NO: 378762 - DNA, 25 bp, Artificial
  probe
  misc_feature (1)..(25): SEQ ID NO: 4282; WAN024G8O; Start 56; Stop 80
aatcctgttccagtctcatcagttg

SEQ ID NO: 378763 - DNA, 25 bp, Artificial
  probe
  misc_feature (1)..(25): SEQ ID NO: 4282; WAN024G8O; Start 55; Stop 79
caatcctgttccagtctcatcagtt

SEQ ID NO: 378764 - DNA, 25 bp, Artificial
  probe
  misc_feature (1)..(25): SEQ ID NO: 4282; WAN024G8O; Start 240; Stop 264
cgcattgatacgagtaatccacaat

SEQ ID NO: 378765 - DNA, 25 bp, Artificial
  probe
  misc_feature (1)..(25): SEQ ID NO: 4282; WAN024G8O; Start 245; Stop 269
tgatacgagtaatccacaatttgcg

SEQ ID NO: 378766 - DNA, 25 bp, Artificial
  probe
  misc_feature (1)..(25): SEQ ID NO: 4282; WAN024G8O; Start 239; Stop 263
ccgcattgatacgagtaatccacaa

SEQ ID NO: 378767 - DNA, 25 bp, Artificial
  probe
  misc_feature (1)..(25): SEQ ID NO: 4282; WAN024G8O; Start 13; Stop 37
tttgaagccatatctttctccttta

SEQ ID NO: 378768 - DNA, 25 bp, Artificial
  probe
  misc_feature (1)..(25): SEQ ID NO: 4282; WAN024G8O; Start 53; Stop 77
gacaatcctgttccagtctcatcag

SEQ ID NO: 378769 - DNA, 25 bp, Artificial
  probe
  misc_feature (1)..(25): SEQ ID NO: 4282; WAN024G8O; Start 63; Stop 87
ttccagtctcatcagttgttattta

SEQ ID NO: 378770 - DNA, 25 bp, Artificial
  probe
  misc_feature (1)..(25): SEQ ID NO: 4282; WAN024G8O; Start 15; Stop 39
tgaagccatatctttctcctttatt

SEQ ID NO: 378771 - DNA, 25 bp, Artificial
  probe
  misc_feature (1)..(25): SEQ ID NO: 4282; WAN024G8O; Start 14; Stop 38
ttgaagccatatctttctcctttat

SEQ ID NO: 378772 - DNA, 25 bp, Artificial
  probe
  misc_feature (1)..(25): SEQ ID NO: 4282; WAN024G8O; Start 69; Stop 93
tctcatcagttgttatttaccaagt

SEQ ID NO: 378773 - DNA, 25 bp, Artificial
  probe
  misc_feature (1)..(25): SEQ ID NO: 4282; WAN024G8O; Start 67; Stop 91
agtctcatcagttgttatttaccaa

SEQ ID NO: 378774 - DNA, 25 bp, Artificial
  probe
  misc_feature (1)..(25): SEQ ID NO: 4282; WAN024G8O; Start 68; Stop 92
gtctcatcagttgttatttaccaag

SEQ ID NO: 378775 - DNA, 25 bp, Artificial
  probe
  misc_feature (1)..(25): SEQ ID NO: 4282; WAN024G8O; Start 246; Stop 270
gatacgagtaatccacaatttgcgg

SEQ ID NO: 378776 - DNA, 25 bp, Artificial
  probe
  misc_feature (1)..(25): SEQ ID NO: 4282; WAN024G8O; Start 70; Stop 94
ctcatcagttgttatttaccaagtt

SEQ ID NO: 378777 - DNA, 25 bp, Artificial
  probe
  misc_feature (1)..(25): SEQ ID NO: 4282; WAN024G8O; Start 57; Stop 81
atcctgttccagtctcatcagttgt

SEQ ID NO: 378778 - DNA, 25 bp, Artificial
  probe
  misc_feature (1)..(25): SEQ ID NO: 4282; WAN024G8O; Start 54; Stop 78
acaatcctgttccagtctcatcagt

SEQ ID NO: 378779 - DNA, 25 bp, Artificial
  probe
  misc_feature (1)..(25): SEQ ID NO: 4282; WAN024G8O; Start 58; Stop 82
tcctgttccagtctcatcagttgtt

SEQ ID NO: 378780 - DNA, 25 bp, Artificial
  probe
  misc_feature (1)..(25): SEQ ID NO: 4282; WAN024G8O; Start 16; Stop 40
gaagccatatctttctcctttattt

SEQ ID NO: 378781 - DNA, 25 bp, Artificial
  probe
  misc_feature (1)..(25): SEQ ID NO: 4282; WAN024G8O; Start 71; Stop 95
tcatcagttgttatttaccaagttt

SEQ ID NO: 378782 - DNA, 25 bp, Artificial
  probe
  misc_feature (1)..(25): SEQ ID NO: 4282; WAN024G8O; Start 251; Stop 275
gagtaatccacaatttgcggaagtc

SEQ ID NO: 378783 - DNA, 25 bp, Artificial
  probe
  misc_feature (1)..(25): SEQ ID NO: 4282; WAN024G8O; Start 247; Stop 271
atacgagtaatccacaatttgcgga

SEQ ID NO: 378784 - DNA, 25 bp, Artificial
  probe
  misc_feature (1)..(25): SEQ ID NO: 4282; WAN024G8O; Start 205; Stop 229
aattgtgagtatgaaagtccgttca

SEQ ID NO: 378785 - DNA, 25 bp, Artificial
  probe
  misc_feature (1)..(25): SEQ ID NO: 4282; WAN024G8O; Start 12; Stop 36
ttttgaagccatatctttctccttt

SEQ ID NO: 378786 - DNA, 25 bp, Artificial
  probe
  misc_feature (1)..(25): SEQ ID NO: 4283; WAN024C3U; Start 78; Stop 102
aatccgttctagctggtatttgaaa

SEQ ID NO: 378787 - DNA, 25 bp, Artificial
  probe
  misc_feature (1)..(25): SEQ ID NO: 4283; WAN024C3U; Start 77; Stop 101
aaatccgttctagctggtatttgaa

SEQ ID NO: 378788 - DNA, 25 bp, Artificial
  probe
  misc_feature (1)..(25): SEQ ID NO: 4283; WAN024C3U; Start 72; Stop 96
atgtcaaatccgttctagctggtat

SEQ ID NO: 378789 - DNA, 25 bp, Artificial
  probe
  misc_feature (1)..(25): SEQ ID NO: 4283; WAN024C3U; Start 74; Stop 98
gtcaaatccgttctagctggtattt

SEQ ID NO: 378790 - DNA, 25 bp, Artificial
  probe
  misc_feature (1)..(25): SEQ ID NO: 4283; WAN024C3U; Start 73; Stop 97
tgtcaaatccgttctagctggtatt

SEQ ID NO: 378791 - DNA, 25 bp, Artificial
  probe
  misc_feature (1)..(25): SEQ ID NO: 4283; WAN024C3U; Start 71; Stop 95
catgtcaaatccgttctagctggta

SEQ ID NO: 378792 - DNA, 25 bp, Artificial
  probe
  misc_feature (1)..(25): SEQ ID NO: 4283; WAN024C3U; Start 79; Stop 103
atccgttctagctggtatttgaaaa

SEQ ID NO: 378793 - DNA, 25 bp, Artificial
  probe
  misc_feature (1)..(25): SEQ ID NO: 4283; WAN024C3U; Start 68; Stop 92
ttgcatgtcaaatccgttctagctg

SEQ ID NO: 378794 - DNA, 25 bp, Artificial
  probe
  misc_feature (1)..(25): SEQ ID NO: 4283; WAN024C3U; Start 41; Stop 65
ttctttcaaaagagacctgtttctt

SEQ ID NO: 378795 - DNA, 25 bp, Artificial
  probe
  misc_feature (1)..(25): SEQ ID NO: 4283; WAN024C3U; Start 40; Stop 64
attctttcaaaagagacctgtttct

SEQ ID NO: 378796 - DNA, 25 bp, Artificial
  probe
  misc_feature (1)..(25): SEQ ID NO: 4283; WAN024C3U; Start 67; Stop 91
tttgcatgtcaaatccgttctagct

SEQ ID NO: 378797 - DNA, 25 bp, Artificial
  probe
  misc_feature (1)..(25): SEQ ID NO: 4283; WAN024C3U; Start 76; Stop 100
caaatccgttctagctggtatttga

SEQ ID NO: 378798 - DNA, 25 bp, Artificial
  probe
  misc_feature (1)..(25): SEQ ID NO: 4283; WAN024C3U; Start 75; Stop 99
tcaaatccgttctagctggtatttg

SEQ ID NO: 378799 - DNA, 25 bp, Artificial
  probe
  misc_feature (1)..(25): SEQ ID NO: 4283; WAN024C3U; Start 39; Stop 63
tattctttcaaaagagacctgtttc

SEQ ID NO: 378800 - DNA, 25 bp, Artificial
  probe
  misc_feature (1)..(25): SEQ ID NO: 4283; WAN024C3U; Start 38; Stop 62
ttattctttcaaaagagacctgttt

SEQ ID NO: 378801 - DNA, 25 bp, Artificial
  probe
  misc_feature (1)..(25): SEQ ID NO: 4283; WAN024C3U; Start 37; Stop 61
tttattctttcaaaagagacctgtt

SEQ ID NO: 378802 - DNA, 25 bp, Artificial
  probe
  misc_feature (1)..(25): SEQ ID NO: 4283; WAN024C3U; Start 36; Stop 60
ttttattctttcaaaagagacctgt

SEQ ID NO: 378803 - DNA, 25 bp, Artificial
  probe
  misc_feature (1)..(25): SEQ ID NO: 4283; WAN024C3U; Start 14; Stop 38
aaagagcagtcttatctgaaatttt

SEQ ID NO: 378804 - DNA, 25 bp, Artificial
  probe
  misc_feature (1)..(25): SEQ ID NO: 4283; WAN024C3U; Start 13; Stop 37
aaaagagcagtcttatctgaaattt

SEQ ID NO: 378805 - DNA, 25 bp, Artificial
  probe
  misc_feature (1)..(25): SEQ ID NO: 4283; WAN024C3U; Start 66; Stop 90
ttttgcatgtcaaatccgttctagc

SEQ ID NO: 378806 - DNA, 25 bp, Artificial
  probe
  misc_feature (1)..(25): SEQ ID NO: 4283; WAN024C3U; Start 42; Stop 66
tctttcaaaagagacctgtttcttt

SEQ ID NO: 378807 - DNA, 25 bp, Artificial
  probe
  misc_feature (1)..(25): SEQ ID NO: 4284; WAN024CVS; Start 23; Stop 47
ctgccttcttgatgatagagagtat

SEQ ID NO: 378808 - DNA, 25 bp, Artificial
  probe
  misc_feature (1)..(25): SEQ ID NO: 4284; WAN024CVS; Start 24; Stop 48
tgccttcttgatgatagagagtatt

SEQ ID NO: 378809 - DNA, 25 bp, Artificial
  probe
  misc_feature (1)..(25): SEQ ID NO: 4284; WAN024CVS; Start 22; Stop 46
actgccttcttgatgatagagagta

SEQ ID NO: 378810 - DNA, 25 bp, Artificial
  probe
  misc_feature (1)..(25): SEQ ID NO: 4284; WAN024CVS; Start 11; Stop 35
ttctaattgtcactgccttcttgat

SEQ ID NO: 378811 - DNA, 25 bp, Artificial
  probe
  misc_feature (1)..(25): SEQ ID NO: 4284; WAN024CVS; Start 15; Stop 39
aattgtcactgccttcttgatgata

SEQ ID NO: 378812 - DNA, 25 bp, Artificial
  probe
  misc_feature (1)..(25): SEQ ID NO: 4284; WAN024CVS; Start 14; Stop 38
taattgtcactgccttcttgatgat

SEQ ID NO: 378813 - DNA, 25 bp, Artificial
  probe
  misc_feature (1)..(25): SEQ ID NO: 4284; WAN024CVS; Start 16; Stop 40
attgtcactgccttcttgatgatag

SEQ ID NO: 378814 - DNA, 25 bp, Artificial
  probe
  misc_feature (1)..(25): SEQ ID NO: 4284; WAN024CVS; Start 13; Stop 37
ctaattgtcactgccttcttgatga

SEQ ID NO: 378815 - DNA, 25 bp, Artificial
  probe
  misc_feature (1)..(25): SEQ ID NO: 4284; WAN024CVS; Start 12; Stop 36
tctaattgtcactgccttcttgatg

SEQ ID NO: 378816 - DNA, 25 bp, Artificial
  probe
  misc_feature (1)..(25): SEQ ID NO: 4284; WAN024CVS; Start 10; Stop 34
gttctaattgtcactgccttcttga

SEQ ID NO: 378817 - DNA, 25 bp, Artificial
  probe
  misc_feature (1)..(25): SEQ ID NO: 4284; WAN024CVS; Start 20; Stop 44
tcactgccttcttgatgatagagag

SEQ ID NO: 378818 - DNA, 25 bp, Artificial
  probe
  misc_feature (1)..(25): SEQ ID NO: 4284; WAN024CVS; Start 17; Stop 41
ttgtcactgccttcttgatgataga

SEQ ID NO: 378819 - DNA, 25 bp, Artificial
  probe
  misc_feature (1)..(25): SEQ ID NO: 4284; WAN024CVS; Start 21; Stop 45
cactgccttcttgatgatagagagt

SEQ ID NO: 378820 - DNA, 25 bp, Artificial
  probe
  misc_feature (1)..(25): SEQ ID NO: 4284; WAN024CVS; Start 19; Stop 43
gtcactgccttcttgatgatagaga

SEQ ID NO: 378821 - DNA, 25 bp, Artificial
  probe
  misc_feature (1)..(25): SEQ ID NO: 4284; WAN024CVS; Start 9; Stop 33
cgttctaattgtcactgccttcttg

SEQ ID NO: 378822 - DNA, 25 bp, Artificial
  probe
  misc_feature (1)..(25): SEQ ID NO: 4284; WAN024CVS; Start 8; Stop 32
tcgttctaattgtcactgccttctt

SEQ ID NO: 378823 - DNA, 25 bp, Artificial
  probe
  misc_feature (1)..(25): SEQ ID NO: 4284; WAN024CVS; Start 18; Stop 42
tgtcactgccttcttgatgatagag

SEQ ID NO: 378824 - DNA, 25 bp, Artificial
  probe
  misc_feature (1)..(25): SEQ ID NO: 4284; WAN024CVS; Start 7; Stop 31
gtcgttctaattgtcactgccttct

SEQ ID NO: 378825 - DNA, 25 bp, Artificial
  probe
  misc_feature (1)..(25): SEQ ID NO: 4284; WAN024CVS; Start 1; Stop 25
gtgtgtgtcgttctaattgtcactg

SEQ ID NO: 378826 - DNA, 25 bp, Artificial
  probe
  misc_feature (1)..(25): SEQ ID NO: 4284; WAN024CVS; Start 6; Stop 30
tgtcgttctaattgtcactgccttc

SEQ ID NO: 378827 - DNA, 25 bp, Artificial
  probe
  misc_feature (1)..(25): SEQ ID NO: 4284; WAN024CVS; Start 160; Stop 184
atccttccttcagaatttacagttt

SEQ ID NO: 378828 - DNA, 25 bp, Artificial
  probe
  misc_feature (1)..(25): SEQ ID NO: 4284; WAN024CVS; Start 158; Stop 182
tgatccttccttcagaatttacagt

SEQ ID NO: 378829 - DNA, 25 bp, Artificial
  probe
  misc_feature (1)..(25): SEQ ID NO: 4284; WAN024CVS; Start 156; Stop 180
agtgatccttccttcagaatttaca

SEQ ID NO: 378830 - DNA, 25 bp, Artificial
  probe
  misc_feature (1)..(25): SEQ ID NO: 4284; WAN024CVS; Start 25; Stop 49
gccttcttgatgatagagagtattt

SEQ ID NO: 378831 - DNA, 25 bp, Artificial
  probe
  misc_feature (1)..(25): SEQ ID NO: 4284; WAN024CVS; Start 159; Stop 183
gatccttccttcagaatttacagtt

SEQ ID NO: 378832 - DNA, 25 bp, Artificial
  probe
  misc_feature (1)..(25): SEQ ID NO: 4284; WAN024CVS; Start 157; Stop 181
gtgatccttccttcagaatttacag

SEQ ID NO: 378833 - DNA, 25 bp, Artificial
  probe
  misc_feature (1)..(25): SEQ ID NO: 4284; WAN024CVS; Start 155; Stop 179
aagtgatccttccttcagaatttac

SEQ ID NO: 378834 - DNA, 25 bp, Artificial
  probe
  misc_feature (1)..(25): SEQ ID NO: 4284; WAN024CVS; Start 77; Stop 101
tatttagaggaaacagtagtccagc

SEQ ID NO: 378835 - DNA, 25 bp, Artificial
  probe
  misc_feature (1)..(25): SEQ ID NO: 4284; WAN024CVS; Start 152; Stop 176
aagaagtgatccttccttcagaatt

SEQ ID NO: 378836 - DNA, 25 bp, Artificial
  probe
  misc_feature (1)..(25): SEQ ID NO: 4284; WAN024CVS; Start 151; Stop 175
gaagaagtgatccttccttcagaat

SEQ ID NO: 378837 - DNA, 25 bp, Artificial
  probe
  misc_feature (1)..(25): SEQ ID NO: 4284; WAN024CVS; Start 143; Stop 167
attctgttgaagaagtgatccttcc

SEQ ID NO: 378838 - DNA, 25 bp, Artificial
  probe
  misc_feature (1)..(25): SEQ ID NO: 4284; WAN024CVS; Start 142; Stop 166
aattctgttgaagaagtgatccttc

SEQ ID NO: 378839 - DNA, 25 bp, Artificial
  probe
  misc_feature (1)..(25): SEQ ID NO: 4284; WAN024CVS; Start 106; Stop 130
ccgtgttggaatgataaattactta

SEQ ID NO: 378840 - DNA, 25 bp, Artificial
  probe
  misc_feature (1)..(25): SEQ ID NO: 4285; WAN024GAI; Start 514; Stop 538
aatggtgttgacgatggctattata

SEQ ID NO: 378841 - DNA, 25 bp, Artificial
  probe
  misc_feature (1)..(25): SEQ ID NO: 4285; WAN024GAI; Start 529; Stop 553
ggctattatacgactcctgatatgg

SEQ ID NO: 378842 - DNA, 25 bp, Artificial
  probe
  misc_feature (1)..(25): SEQ ID NO: 4285; WAN024GAI; Start 528; Stop 552
tggctattatacgactcctgatatg

SEQ ID NO: 378843 - DNA, 25 bp, Artificial
  probe
  misc_feature (1)..(25): SEQ ID NO: 4285; WAN024GAI; Start 515; Stop 539
atggtgttgacgatggctattatac

SEQ ID NO: 378844 - DNA, 25 bp, Artificial
  probe
  misc_feature (1)..(25): SEQ ID NO: 4285; WAN024GAI; Start 526; Stop 550
gatggctattatacgactcctgata

SEQ ID NO: 378845 - DNA, 25 bp, Artificial
  probe
  misc_feature (1)..(25): SEQ ID NO: 4285; WAN024GAI; Start 520; Stop 544
gttgacgatggctattatacgactc

SEQ ID NO: 378846 - DNA, 25 bp, Artificial
  probe
  misc_feature (1)..(25): SEQ ID NO: 4285; WAN024GAI; Start 460; Stop 484
gttgctcttaaccagattaaccaat

SEQ ID NO: 378847 - DNA, 25 bp, Artificial
  probe
  misc_feature (1)..(25): SEQ ID NO: 4285; WAN024GAI; Start 527; Stop 551
atggctattatacgactcctgatat

SEQ ID NO: 378848 - DNA, 25 bp, Artificial
  probe
  misc_feature (1)..(25): SEQ ID NO: 4285; WAN024GAI; Start 525; Stop 549
cgatggctattatacgactcctgat

SEQ ID NO: 378849 - DNA, 25 bp, Artificial
  probe
  misc_feature (1)..(25): SEQ ID NO: 4285; WAN024GAI; Start 337; Stop 361
aataagaatgttacagttgtgacca

SEQ ID NO: 378850 - DNA, 25 bp, Artificial
  probe
  misc_feature (1)..(25): SEQ ID NO: 4285; WAN024GAI; Start 519; Stop 543
tgttgacgatggctattatacgact

SEQ ID NO: 378851 - DNA, 25 bp, Artificial
  probe
  misc_feature (1)..(25): SEQ ID NO: 4285; WAN024GAI; Start 518; Stop 542
gtgttgacgatggctattatacgac

SEQ ID NO: 378852 - DNA, 25 bp, Artificial
  probe
  misc_feature (1)..(25): SEQ ID NO: 4285; WAN024GAI; Start 461; Stop 485
ttgctcttaaccagattaaccaatt

SEQ ID NO: 378853 - DNA, 25 bp, Artificial
  probe
  misc_feature (1)..(25): SEQ ID NO: 4285; WAN024GAI; Start 459; Stop 483
cgttgctcttaaccagattaaccaa

SEQ ID NO: 378854 - DNA, 25 bp, Artificial
  probe
  misc_feature (1)..(25): SEQ ID NO: 4285; WAN024GAI; Start 521; Stop 545
ttgacgatggctattatacgactcc

SEQ ID NO: 378855 - DNA, 25 bp, Artificial
  probe
  misc_feature (1)..(25): SEQ ID NO: 4285; WAN024GAI; Start 338; Stop 362
ataagaatgttacagttgtgaccaa

SEQ ID NO: 378856 - DNA, 25 bp, Artificial
  probe
  misc_feature (1)..(25): SEQ ID NO: 4285; WAN024GAI; Start 332; Stop 356
tggtcaataagaatgttacagttgt

SEQ ID NO: 378857 - DNA, 25 bp, Artificial
  probe
  misc_feature (1)..(25): SEQ ID NO: 4285; WAN024GAI; Start 336; Stop 360
caataagaatgttacagttgtgacc

SEQ ID NO: 378858 - DNA, 25 bp, Artificial
  probe
  misc_feature (1)..(25): SEQ ID NO: 4285; WAN024GAI; Start 333; Stop 357
ggtcaataagaatgttacagttgtg

SEQ ID NO: 378859 - DNA, 25 bp, Artificial
  probe
  misc_feature (1)..(25): SEQ ID NO: 4285; WAN024GAI; Start 523; Stop 547
gacgatggctattatacgactcctg

SEQ ID NO: 378860 - DNA, 25 bp, Artificial
  probe
  misc_feature (1)..(25): SEQ ID NO: 4285; WAN024GAI; Start 517; Stop 541
ggtgttgacgatggctattatacga

SEQ ID NO: 378861 - DNA, 25 bp, Artificial
  probe
  misc_feature (1)..(25): SEQ ID NO: 4285; WAN024GAI; Start 530; Stop 554
gctattatacgactcctgatatgga

SEQ ID NO: 378862 - DNA, 25 bp, Artificial
  probe
  misc_feature (1)..(25): SEQ ID NO: 4285; WAN024GAI; Start 331; Stop 355
ttggtcaataagaatgttacagttg

SEQ ID NO: 378863 - DNA, 25 bp, Artificial
  probe
  misc_feature (1)..(25): SEQ ID NO: 4285; WAN024GAI; Start 524; Stop 548
acgatggctattatacgactcctga

SEQ ID NO: 378864 - DNA, 25 bp, Artificial
  probe
  misc_feature (1)..(25): SEQ ID NO: 4285; WAN024GAI; Start 522; Stop 546
tgacgatggctattatacgactcct

SEQ ID NO: 378865 - DNA, 25 bp, Artificial
  probe
  misc_feature (1)..(25): SEQ ID NO: 4285; WAN024GAI; Start 516; Stop 540
tggtgttgacgatggctattatacg

SEQ ID NO: 378866 - DNA, 25 bp, Artificial
  probe
  misc_feature (1)..(25): SEQ ID NO: 4285; WAN024GAI; Start 335; Stop 359
tcaataagaatgttacagttgtgac

SEQ ID NO: 378867 - DNA, 25 bp, Artificial
  probe
  misc_feature (1)..(25): SEQ ID NO: 4285; WAN024GAI; Start 334; Stop 358
gtcaataagaatgttacagttgtga

SEQ ID NO: 378868 - DNA, 25 bp, Artificial
  probe
  misc_feature (1)..(25): SEQ ID NO: 4285; WAN024GAI; Start 185; Stop 209
tacaggaagaagaaaccattcaaga

SEQ ID NO: 378869 - DNA, 25 bp, Artificial
  probe
  misc_feature (1)..(25): SEQ ID NO: 4285; WAN024GAI; Start 187; Stop 211
caggaagaagaaaccattcaagaaa

SEQ ID NO: 378870 - DNA, 25 bp, Artificial
  probe
  misc_feature (1)..(25): SEQ ID NO: 4285; WAN024GAI; Start 186; Stop 210
acaggaagaagaaaccattcaagaa

SEQ ID NO: 378871 - DNA, 25 bp, Artificial
  probe
  misc_feature (1)..(25): SEQ ID NO: 4285; WAN024GAI; Start 184; Stop 208
ttacaggaagaagaaaccattcaag

SEQ ID NO: 378872 - DNA, 25 bp, Artificial
  probe
  misc_feature (1)..(25): SEQ ID NO: 4285; WAN024GAI; Start 183; Stop 207
cttacaggaagaagaaaccattcaa

SEQ ID NO: 378873 - DNA, 25 bp, Artificial
  probe
  misc_feature (1)..(25): SEQ ID NO: 4286; WAN024A5Z; Start 26; Stop 50
tttattatggaaatgttgggttcat

SEQ ID NO: 378874 - DNA, 25 bp, Artificial
  probe
  misc_feature (1)..(25): SEQ ID NO: 4286; WAN024A5Z; Start 22; Stop 46
gcgttttattatggaaatgttgggt

SEQ ID NO: 378875 - DNA, 25 bp, Artificial
  probe
  misc_feature (1)..(25): SEQ ID NO: 4286; WAN024A5Z; Start 21; Stop 45
tgcgttttattatggaaatgttggg

SEQ ID NO: 378876 - DNA, 25 bp, Artificial
  probe
  misc_feature (1)..(25): SEQ ID NO: 4286; WAN024A5Z; Start 20; Stop 44
atgcgttttattatggaaatgttgg

SEQ ID NO: 378877 - DNA, 25 bp, Artificial
  probe
  misc_feature (1)..(25): SEQ ID NO: 4286; WAN024A5Z; Start 23; Stop 47
cgttttattatggaaatgttgggtt

SEQ ID NO: 378878 - DNA, 25 bp, Artificial
  probe
  misc_feature (1)..(25): SEQ ID NO: 4286; WAN024A5Z; Start 27; Stop 51
ttattatggaaatgttgggttcatt

SEQ ID NO: 378879 - DNA, 25 bp, Artificial
  probe
  misc_feature (1)..(25): SEQ ID NO: 4286; WAN024A5Z; Start 25; Stop 49
ttttattatggaaatgttgggttca

SEQ ID NO: 378880 - DNA, 25 bp, Artificial
  probe
  misc_feature (1)..(25): SEQ ID NO: 4286; WAN024A5Z; Start 24; Stop 48
gttttattatggaaatgttgggttc

SEQ ID NO: 378881 - DNA, 25 bp, Artificial
  probe
  misc_feature (1)..(25): SEQ ID NO: 4286; WAN024A5Z; Start 19; Stop 43
tatgcgttttattatggaaatgttg

SEQ ID NO: 378882 - DNA, 25 bp, Artificial
  probe
  misc_feature (1)..(25): SEQ ID NO: 4286; WAN024A5Z; Start 38; Stop 62
atgttgggttcattttctcttaaaa

SEQ ID NO: 378883 - DNA, 25 bp, Artificial
  probe
  misc_feature (1)..(25): SEQ ID NO: 4286; WAN024A5Z; Start 13; Stop 37
tgctaatatgcgttttattatggaa

SEQ ID NO: 378884 - DNA, 25 bp, Artificial
  probe
  misc_feature (1)..(25): SEQ ID NO: 4286; WAN024A5Z; Start 12; Stop 36
ttgctaatatgcgttttattatgga

SEQ ID NO: 378885 - DNA, 25 bp, Artificial
  probe
  misc_feature (1)..(25): SEQ ID NO: 4286; WAN024A5Z; Start 11; Stop 35
cttgctaatatgcgttttattatgg

SEQ ID NO: 378886 - DNA, 25 bp, Artificial
  probe
  misc_feature (1)..(25): SEQ ID NO: 4286; WAN024A5Z; Start 37; Stop 61
aatgttgggttcattttctcttaaa

SEQ ID NO: 378887 - DNA, 25 bp, Artificial
  probe
  misc_feature (1)..(25): SEQ ID NO: 4286; WAN024A5Z; Start 18; Stop 42
atatgcgttttattatggaaatgtt

SEQ ID NO: 378888 - DNA, 25 bp, Artificial
  probe
  misc_feature (1)..(25): SEQ ID NO: 4286; WAN024A5Z; Start 14; Stop 38
gctaatatgcgttttattatggaaa

SEQ ID NO: 378889 - DNA, 25 bp, Artificial
  probe
  misc_feature (1)..(25): SEQ ID NO: 4286; WAN024A5Z; Start 10; Stop 34
acttgctaatatgcgttttattatg

SEQ ID NO: 378890 - DNA, 25 bp, Artificial
  probe
  misc_feature (1)..(25): SEQ ID NO: 4286; WAN024A5Z; Start 17; Stop 41
aatatgcgttttattatggaaatgt

SEQ ID NO: 378891 - DNA, 25 bp, Artificial
  probe
  misc_feature (1)..(25): SEQ ID NO: 4286; WAN024A5Z; Start 39; Stop 63
tgttgggttcattttctcttaaaat

SEQ ID NO: 378892 - DNA, 25 bp, Artificial
  probe
  misc_feature (1)..(25): SEQ ID NO: 4286; WAN024A5Z; Start 42; Stop 66
tgggttcattttctcttaaaattga

SEQ ID NO: 378893 - DNA, 25 bp, Artificial
  probe
  misc_feature (1)..(25): SEQ ID NO: 4286; WAN024A5Z; Start 28; Stop 52
tattatggaaatgttgggttcattt

SEQ ID NO: 378894 - DNA, 25 bp, Artificial
  probe
  misc_feature (1)..(25): SEQ ID NO: 4286; WAN024A5Z; Start 9; Stop 33
aacttgctaatatgcgttttattat

SEQ ID NO: 378895 - DNA, 25 bp, Artificial
  probe
  misc_feature (1)..(25): SEQ ID NO: 4286; WAN024A5Z; Start 34; Stop 58
ggaaatgttgggttcattttctctt

SEQ ID NO: 378896 - DNA, 25 bp, Artificial
  probe
  misc_feature (1)..(25): SEQ ID NO: 4286; WAN024A5Z; Start 32; Stop 56
atggaaatgttgggttcattttctc

SEQ ID NO: 378897 - DNA, 25 bp, Artificial
  probe
  misc_feature (1)..(25): SEQ ID NO: 4286; WAN024A5Z; Start 31; Stop 55
tatggaaatgttgggttcattttct

SEQ ID NO: 378898 - DNA, 25 bp, Artificial
  probe
  misc_feature (1)..(25): SEQ ID NO: 4286; WAN024A5Z; Start 41; Stop 65
ttgggttcattttctcttaaaattg

SEQ ID NO: 378899 - DNA, 25 bp, Artificial
  probe
  misc_feature (1)..(25): SEQ ID NO: 4286; WAN024A5Z; Start 40; Stop 64
gttgggttcattttctcttaaaatt

SEQ ID NO: 378900 - DNA, 25 bp, Artificial
  probe
  misc_feature (1)..(25): SEQ ID NO: 4286; WAN024A5Z; Start 33; Stop 57
tggaaatgttgggttcattttctct

SEQ ID NO: 378901 - DNA, 25 bp, Artificial
  probe
  misc_feature (1)..(25): SEQ ID NO: 4286; WAN024A5Z; Start 8; Stop 32
aaacttgctaatatgcgttttatta

SEQ ID NO: 378902 - DNA, 25 bp, Artificial
  probe
  misc_feature (1)..(25): SEQ ID NO: 4286; WAN024A5Z; Start 30; Stop 54
ttatggaaatgttgggttcattttc

SEQ ID NO: 378903 - DNA, 25 bp, Artificial
  probe
  misc_feature (1)..(25): SEQ ID NO: 4286; WAN024A5Z; Start 43; Stop 67
gggttcattttctcttaaaattgat

SEQ ID NO: 378904 - DNA, 25 bp, Artificial
  probe
  misc_feature (1)..(25): SEQ ID NO: 4286; WAN024A5Z; Start 35; Stop 59
gaaatgttgggttcattttctctta

SEQ ID NO: 378905 - DNA, 25 bp, Artificial
  probe
  misc_feature (1)..(25): SEQ ID NO: 4286; WAN024A5Z; Start 29; Stop 53
attatggaaatgttgggttcatttt

SEQ ID NO: 378906 - DNA, 25 bp, Artificial
  probe
  misc_feature (1)..(25): SEQ ID NO: 4287; WAN024GJC-M; Start 192; Stop 216
gaattgatgaacacagttgatgagt

SEQ ID NO: 378907 - DNA, 25 bp, Artificial
  probe
  misc_feature (1)..(25): SEQ ID NO: 4287; WAN024GJC-M; Start 189; Stop 213
atggaattgatgaacacagttgatg

SEQ ID NO: 378908 - DNA, 25 bp, Artificial
  probe
  misc_feature (1)..(25): SEQ ID NO: 4287; WAN024GJC-M; Start 185; Stop 209
cgttatggaattgatgaacacagtt

SEQ ID NO: 378909 - DNA, 25 bp, Artificial
  probe
  misc_feature (1)..(25): SEQ ID NO: 4287; WAN024GJC-M; Start 183; Stop 207
atcgttatggaattgatgaacacag

SEQ ID NO: 378910 - DNA, 25 bp, Artificial
  probe
  misc_feature (1)..(25): SEQ ID NO: 4287; WAN024GJC-M; Start 191; Stop 215
ggaattgatgaacacagttgatgag

SEQ ID NO: 378911 - DNA, 25 bp, Artificial
  probe
  misc_feature (1)..(25): SEQ ID NO: 4287; WAN024GJC-M; Start 184; Stop 208
tcgttatggaattgatgaacacagt

SEQ ID NO: 378912 - DNA, 25 bp, Artificial
  probe
  misc_feature (1)..(25): SEQ ID NO: 4287; WAN024GJC-M; Start 190; Stop 214
tggaattgatgaacacagttgatga

SEQ ID NO: 378913 - DNA, 25 bp, Artificial
  probe
  misc_feature (1)..(25): SEQ ID NO: 4287; WAN024GJC-M; Start 186; Stop 210
gttatggaattgatgaacacagttg

SEQ ID NO: 378914 - DNA, 25 bp, Artificial
  probe
  misc_feature (1)..(25): SEQ ID NO: 4287; WAN024GJC-M; Start 187; Stop 211
ttatggaattgatgaacacagttga

SEQ ID NO: 378915 - DNA, 25 bp, Artificial
  probe
  misc_feature (1)..(25): SEQ ID NO: 4287; WAN024GJC-M; Start 127; Stop 151
cagttatccaaggttcagcacttaa

SEQ ID NO: 378916 - DNA, 25 bp, Artificial
  probe
  misc_feature (1)..(25): SEQ ID NO: 4287; WAN024GJC-M; Start 193; Stop 217
aattgatgaacacagttgatgagta

SEQ ID NO: 378917 - DNA, 25 bp, Artificial
  probe
  misc_feature (1)..(25): SEQ ID NO: 4287; WAN024GJC-M; Start 188; Stop 212
tatggaattgatgaacacagttgat

SEQ ID NO: 378918 - DNA, 25 bp, Artificial
  probe
  misc_feature (1)..(25): SEQ ID NO: 4287; WAN024GJC-M; Start 194; Stop 218
attgatgaacacagttgatgagtat

SEQ ID NO: 378919 - DNA, 25 bp, Artificial
  probe
  misc_feature (1)..(25): SEQ ID NO: 4287; WAN024GJC-M; Start 120; Stop 144
gatcttccagttatccaaggttcag

SEQ ID NO: 378920 - DNA, 25 bp, Artificial
  probe
  misc_feature (1)..(25): SEQ ID NO: 4287; WAN024GJC-M; Start 50; Stop 74
cgaagaattgcttgaattggttgaa

SEQ ID NO: 378921 - DNA, 25 bp, Artificial
  probe
  misc_feature (1)..(25): SEQ ID NO: 4287; WAN024GJC-M; Start 87; Stop 111
gacctattgtcagaatacgacttcc

SEQ ID NO: 378922 - DNA, 25 bp, Artificial
  probe
  misc_feature (1)..(25): SEQ ID NO: 4287; WAN024GJC-M; Start 195; Stop 219
ttgatgaacacagttgatgagtata

SEQ ID NO: 378923 - DNA, 25 bp, Artificial
  probe
  misc_feature (1)..(25): SEQ ID NO: 4287; WAN024GJC-M; Start 196; Stop 220
tgatgaacacagttgatgagtatat

SEQ ID NO: 378924 - DNA, 25 bp, Artificial
  probe
  misc_feature (1)..(25): SEQ ID NO: 4287; WAN024GJC-M; Start 48; Stop 72
gacgaagaattgcttgaattggttg

SEQ ID NO: 378925 - DNA, 25 bp, Artificial
  probe
  misc_feature (1)..(25): SEQ ID NO: 4287; WAN024GJC-M; Start 121; Stop 145
atcttccagttatccaaggttcagc

SEQ ID NO: 378926 - DNA, 25 bp, Artificial
  probe
  misc_feature (1)..(25): SEQ ID NO: 4287; WAN024GJC-M; Start 49; Stop 73
acgaagaattgcttgaattggttga

SEQ ID NO: 378927 - DNA, 25 bp, Artificial
  probe
  misc_feature (1)..(25): SEQ ID NO: 4287; WAN024GJC-M; Start 43; Stop 67
ttgacgacgaagaattgcttgaatt

SEQ ID NO: 378928 - DNA, 25 bp, Artificial
  probe
  misc_feature (1)..(25): SEQ ID NO: 4287; WAN024GJC-M; Start 154; Stop 178
ctcttgaaggtgactctaaatacga

SEQ ID NO: 378929 - DNA, 25 bp, Artificial
  probe
  misc_feature (1)..(25): SEQ ID NO: 4287; WAN024GJC-M; Start 42; Stop 66
gttgacgacgaagaattgcttgaat

SEQ ID NO: 378930 - DNA, 25 bp, Artificial
  probe
  misc_feature (1)..(25): SEQ ID NO: 4287; WAN024GJC-M; Start 155; Stop 179
tcttgaaggtgactctaaatacgaa

SEQ ID NO: 378931 - DNA, 25 bp, Artificial
  probe
  misc_feature (1)..(25): SEQ ID NO: 4287; WAN024GJC-M; Start 126; Stop 150
ccagttatccaaggttcagcactta

SEQ ID NO: 378932 - DNA, 25 bp, Artificial
  probe
  misc_feature (1)..(25): SEQ ID NO: 4287; WAN024GJC-M; Start 119; Stop 143
cgatcttccagttatccaaggttca

SEQ ID NO: 378933 - DNA, 25 bp, Artificial
  probe
  misc_feature (1)..(25): SEQ ID NO: 4287; WAN024GJC-M; Start 118; Stop 142
acgatcttccagttatccaaggttc

SEQ ID NO: 378934 - DNA, 25 bp, Artificial
  probe
  misc_feature (1)..(25): SEQ ID NO: 4287; WAN024GJC-M; Start 117; Stop 141
gacgatcttccagttatccaaggtt

SEQ ID NO: 378935 - DNA, 25 bp, Artificial
  probe
  misc_feature (1)..(25): SEQ ID NO: 4287; WAN024GJC-M; Start 59; Stop 83
gcttgaattggttgaaatggaaatc

SEQ ID NO: 378936 - DNA, 25 bp, Artificial
  probe
  misc_feature (1)..(25): SEQ ID NO: 4287; WAN024GJC-M; Start 58; Stop 82
tgcttgaattggttgaaatggaaat

SEQ ID NO: 378937 - DNA, 25 bp, Artificial
  probe
  misc_feature (1)..(25): SEQ ID NO: 4287; WAN024GJC-M; Start 56; Stop 80
attgcttgaattggttgaaatggaa

SEQ ID NO: 378938 - DNA, 25 bp, Artificial
  probe
  misc_feature (1)..(25): SEQ ID NO: 4287; WAN024GJC-M; Start 129; Stop 153
gttatccaaggttcagcacttaaag

SEQ ID NO: 378939 - DNA, 25 bp, Artificial
  probe
  misc_feature (1)..(25): SEQ ID NO: 4288; WAN024CAP; Start 223; Stop 247
gcaatggttaaggcagacataatcc

SEQ ID NO: 378940 - DNA, 25 bp, Artificial
  probe
  misc_feature (1)..(25): SEQ ID NO: 4288; WAN024CAP; Start 222; Stop 246
cgcaatggttaaggcagacataatc

SEQ ID NO: 378941 - DNA, 25 bp, Artificial
  probe
  misc_feature (1)..(25): SEQ ID NO: 4288; WAN024CAP; Start 224; Stop 248
caatggttaaggcagacataatcca

SEQ ID NO: 378942 - DNA, 25 bp, Artificial
  probe
  misc_feature (1)..(25): SEQ ID NO: 4288; WAN024CAP; Start 228; Stop 252
ggttaaggcagacataatccatttg

SEQ ID NO: 378943 - DNA, 25 bp, Artificial
  probe
  misc_feature (1)..(25): SEQ ID NO: 4288; WAN024CAP; Start 231; Stop 255
taaggcagacataatccatttgacc

SEQ ID NO: 378944 - DNA, 25 bp, Artificial
  probe
  misc_feature (1)..(25): SEQ ID NO: 4288; WAN024CAP; Start 230; Stop 254
ttaaggcagacataatccatttgac

SEQ ID NO: 378945 - DNA, 25 bp, Artificial
  probe
  misc_feature (1)..(25): SEQ ID NO: 4288; WAN024CAP; Start 229; Stop 253
gttaaggcagacataatccatttga

SEQ ID NO: 378946 - DNA, 25 bp, Artificial
  probe
  misc_feature (1)..(25): SEQ ID NO: 4288; WAN024CAP; Start 221; Stop 245
tcgcaatggttaaggcagacataat

SEQ ID NO: 378947 - DNA, 25 bp, Artificial
  probe
  misc_feature (1)..(25): SEQ ID NO: 4288; WAN024CAP; Start 23; Stop 47
cttctgtgttaaagttgacggtctt

SEQ ID NO: 378948 - DNA, 25 bp, Artificial
  probe
  misc_feature (1)..(25): SEQ ID NO: 4288; WAN024CAP; Start 3; Stop 27
gttaaagtcaaacagagcgtcttct

SEQ ID NO: 378949 - DNA, 25 bp, Artificial
  probe
  misc_feature (1)..(25): SEQ ID NO: 4288; WAN024CAP; Start 233; Stop 257
aggcagacataatccatttgaccat

SEQ ID NO: 378950 - DNA, 25 bp, Artificial
  probe
  misc_feature (1)..(25): SEQ ID NO: 4288; WAN024CAP; Start 232; Stop 256
aaggcagacataatccatttgacca

SEQ ID NO: 378951 - DNA, 25 bp, Artificial
  probe
  misc_feature (1)..(25): SEQ ID NO: 4288; WAN024CAP; Start 22; Stop 46
tcttctgtgttaaagttgacggtct

SEQ ID NO: 378952 - DNA, 25 bp, Artificial
  probe
  misc_feature (1)..(25): SEQ ID NO: 4288; WAN024CAP; Start 172; Stop 196
gaactgtattctggatgcttgaccg

SEQ ID NO: 378953 - DNA, 25 bp, Artificial
  probe
  misc_feature (1)..(25): SEQ ID NO: 4288; WAN024CAP; Start 227; Stop 251
tggttaaggcagacataatccattt

SEQ ID NO: 378954 - DNA, 25 bp, Artificial
  probe
  misc_feature (1)..(25): SEQ ID NO: 4288; WAN024CAP; Start 16; Stop 40
agagcgtcttctgtgttaaagttga

SEQ ID NO: 378955 - DNA, 25 bp, Artificial
  probe
  misc_feature (1)..(25): SEQ ID NO: 4288; WAN024CAP; Start 63; Stop 87
ccaaagtgaattgatggctgaaatt

SEQ ID NO: 378956 - DNA, 25 bp, Artificial
  probe
  misc_feature (1)..(25): SEQ ID NO: 4288; WAN024CAP; Start 21; Stop 45
gtcttctgtgttaaagttgacggtc

SEQ ID NO: 378957 - DNA, 25 bp, Artificial
  probe
  misc_feature (1)..(25): SEQ ID NO: 4288; WAN024CAP; Start 171; Stop 195
agaactgtattctggatgcttgacc

SEQ ID NO: 378958 - DNA, 25 bp, Artificial
  probe
  misc_feature (1)..(25): SEQ ID NO: 4288; WAN024CAP; Start 236; Stop 260
cagacataatccatttgaccatgcc

SEQ ID NO: 378959 - DNA, 25 bp, Artificial
  probe
  misc_feature (1)..(25): SEQ ID NO: 4288; WAN024CAP; Start 234; Stop 258
ggcagacataatccatttgaccatg

SEQ ID NO: 378960 - DNA, 25 bp, Artificial
  probe
  misc_feature (1)..(25): SEQ ID NO: 4288; WAN024CAP; Start 30; Stop 54
gttaaagttgacggtctttctcttt

SEQ ID NO: 378961 - DNA, 25 bp, Artificial
  probe
  misc_feature (1)..(25): SEQ ID NO: 4288; WAN024CAP; Start 29; Stop 53
tgttaaagttgacggtctttctctt

SEQ ID NO: 378962 - DNA, 25 bp, Artificial
  probe
  misc_feature (1)..(25): SEQ ID NO: 4288; WAN024CAP; Start 220; Stop 244
gtcgcaatggttaaggcagacataa

SEQ ID NO: 378963 - DNA, 25 bp, Artificial
  probe
  misc_feature (1)..(25): SEQ ID NO: 4288; WAN024CAP; Start 62; Stop 86
accaaagtgaattgatggctgaaat

SEQ ID NO: 378964 - DNA, 25 bp, Artificial
  probe
  misc_feature (1)..(25): SEQ ID NO: 4288; WAN024CAP; Start 17; Stop 41
gagcgtcttctgtgttaaagttgac

SEQ ID NO: 378965 - DNA, 25 bp, Artificial
  probe
  misc_feature (1)..(25): SEQ ID NO: 4288; WAN024CAP; Start 24; Stop 48
ttctgtgttaaagttgacggtcttt

SEQ ID NO: 378966 - DNA, 25 bp, Artificial
  probe
  misc_feature (1)..(25): SEQ ID NO: 4288; WAN024CAP; Start 28; Stop 52
gtgttaaagttgacggtctttctct

SEQ ID NO: 378967 - DNA, 25 bp, Artificial
  probe
  misc_feature (1)..(25): SEQ ID NO: 4288; WAN024CAP; Start 64; Stop 88
caaagtgaattgatggctgaaattt

SEQ ID NO: 378968 - DNA, 25 bp, Artificial
  probe
  misc_feature (1)..(25): SEQ ID NO: 4288; WAN024CAP; Start 27; Stop 51
tgtgttaaagttgacggtctttctc

SEQ ID NO: 378969 - DNA, 25 bp, Artificial
  probe
  misc_feature (1)..(25): SEQ ID NO: 4288; WAN024CAP; Start 26; Stop 50
ctgtgttaaagttgacggtctttct

SEQ ID NO: 378970 - DNA, 25 bp, Artificial
  probe
  misc_feature (1)..(25): SEQ ID NO: 4288; WAN024CAP; Start 25; Stop 49
tctgtgttaaagttgacggtctttc

SEQ ID NO: 378971 - DNA, 25 bp, Artificial
  probe
  misc_feature (1)..(25): SEQ ID NO: 4288; WAN024CAP; Start 241; Stop 265
ataatccatttgaccatgccgtcta

SEQ ID NO: 378972 - DNA, 25 bp, Artificial
  probe
  misc_feature (1)..(25): SEQ ID NO: 4289; WAN024CDF; Start 1352; Stop 1376
cttcctatgcgatgccagatagtaa

SEQ ID NO: 378973 - DNA, 25 bp, Artificial
  probe
  misc_feature (1)..(25): SEQ ID NO: 4289; WAN024CDF; Start 1353; Stop 1377
ttcctatgcgatgccagatagtaac

SEQ ID NO: 378974 - DNA, 25 bp, Artificial
  probe
  misc_feature (1)..(25): SEQ ID NO: 4289; WAN024CDF; Start 1358; Stop 1382
atgcgatgccagatagtaacctcta

SEQ ID NO: 378975 - DNA, 25 bp, Artificial
  probe
  misc_feature (1)..(25): SEQ ID NO: 4289; WAN024CDF; Start 1357; Stop 1381
tatgcgatgccagatagtaacctct

SEQ ID NO: 378976 - DNA, 25 bp, Artificial
  probe
  misc_feature (1)..(25): SEQ ID NO: 4289; WAN024CDF; Start 1386; Stop 1410
gatggaaattaacgacagtagcctt

SEQ ID NO: 378977 - DNA, 25 bp, Artificial
  probe
  misc_feature (1)..(25): SEQ ID NO: 4289; WAN024CDF; Start 1387; Stop 1411
atggaaattaacgacagtagccttg

SEQ ID NO: 378978 - DNA, 25 bp, Artificial
  probe
  misc_feature (1)..(25): SEQ ID NO: 4289; WAN024CDF; Start 1356; Stop 1380
ctatgcgatgccagatagtaacctc

SEQ ID NO: 378979 - DNA, 25 bp, Artificial
  probe
  misc_feature (1)..(25): SEQ ID NO: 4289; WAN024CDF; Start 1269; Stop 1293
cttggtcaatgctcagttagaaagt

SEQ ID NO: 378980 - DNA, 25 bp, Artificial
  probe
  misc_feature (1)..(25): SEQ ID NO: 4289; WAN024CDF; Start 1270; Stop 1294
ttggtcaatgctcagttagaaagtg

SEQ ID NO: 378981 - DNA, 25 bp, Artificial
  probe
  misc_feature (1)..(25): SEQ ID NO: 4289; WAN024CDF; Start 1261; Stop 1285
atgataaacttggtcaatgctcagt

SEQ ID NO: 378982 - DNA, 25 bp, Artificial
  probe
  misc_feature (1)..(25): SEQ ID NO: 4289; WAN024CDF; Start 1268; Stop 1292
acttggtcaatgctcagttagaaag

SEQ ID NO: 378983 - DNA, 25 bp, Artificial
  probe
  misc_feature (1)..(25): SEQ ID NO: 4289; WAN024CDF; Start 1359; Stop 1383
tgcgatgccagatagtaacctctat

SEQ ID NO: 378984 - DNA, 25 bp, Artificial
  probe
  misc_feature (1)..(25): SEQ ID NO: 4289; WAN024CDF; Start 1273; Stop 1297
gtcaatgctcagttagaaagtggtg

SEQ ID NO: 378985 - DNA, 25 bp, Artificial
  probe
  misc_feature (1)..(25): SEQ ID NO: 4289; WAN024CDF; Start 1385; Stop 1409
tgatggaaattaacgacagtagcct

SEQ ID NO: 378986 - DNA, 25 bp, Artificial
  probe
  misc_feature (1)..(25): SEQ ID NO: 4289; WAN024CDF; Start 1276; Stop 1300
aatgctcagttagaaagtggtggaa

SEQ ID NO: 378987 - DNA, 25 bp, Artificial
  probe
  misc_feature (1)..(25): SEQ ID NO: 4289; WAN024CDF; Start 1392; Stop 1416
aattaacgacagtagccttgcatct

SEQ ID NO: 378988 - DNA, 25 bp, Artificial
  probe
  misc_feature (1)..(25): SEQ ID NO: 4289; WAN024CDF; Start 1351; Stop 1375
ccttcctatgcgatgccagatagta

SEQ ID NO: 378989 - DNA, 25 bp, Artificial
  probe
  misc_feature (1)..(25): SEQ ID NO: 4289; WAN024CDF; Start 1348; Stop 1372
cttccttcctatgcgatgccagata

SEQ ID NO: 378990 - DNA, 25 bp, Artificial
  probe
  misc_feature (1)..(25): SEQ ID NO: 4289; WAN024CDF; Start 1275; Stop 1299
caatgctcagttagaaagtggtgga

SEQ ID NO: 378991 - DNA, 25 bp, Artificial
  probe
  misc_feature (1)..(25): SEQ ID NO: 4289; WAN024CDF; Start 1274; Stop 1298
tcaatgctcagttagaaagtggtgg

SEQ ID NO: 378992 - DNA, 25 bp, Artificial
  probe
  misc_feature (1)..(25): SEQ ID NO: 4289; WAN024CDF; Start 1272; Stop 1296
ggtcaatgctcagttagaaagtggt

SEQ ID NO: 378993 - DNA, 25 bp, Artificial
  probe
  misc_feature (1)..(25): SEQ ID NO: 4289; WAN024CDF; Start 1271; Stop 1295
tggtcaatgctcagttagaaagtgg

SEQ ID NO: 378994 - DNA, 25 bp, Artificial
  probe
  misc_feature (1)..(25): SEQ ID NO: 4289; WAN024CDF; Start 1285; Stop 1309
ttagaaagtggtggaacgtacaaag

SEQ ID NO: 378995 - DNA, 25 bp, Artificial
  probe
  misc_feature (1)..(25): SEQ ID NO: 4289; WAN024CDF; Start 811; Stop 835
gatgcttatgtaccaatcgcagatg

SEQ ID NO: 378996 - DNA, 25 bp, Artificial
  probe
  misc_feature (1)..(25): SEQ ID NO: 4289; WAN024CDF; Start 1355; Stop 1379
cctatgcgatgccagatagtaacct

SEQ ID NO: 378997 - DNA, 25 bp, Artificial
  probe
  misc_feature (1)..(25): SEQ ID NO: 4289; WAN024CDF; Start 1354; Stop 1378
tcctatgcgatgccagatagtaacc

SEQ ID NO: 378998 - DNA, 25 bp, Artificial
  probe
  misc_feature (1)..(25): SEQ ID NO: 4289; WAN024CDF; Start 1277; Stop 1301
atgctcagttagaaagtggtggaac

SEQ ID NO: 378999 - DNA, 25 bp, Artificial
  probe
  misc_feature (1)..(25): SEQ ID NO: 4289; WAN024CDF; Start 1284; Stop 1308
gttagaaagtggtggaacgtacaaa

SEQ ID NO: 379000 - DNA, 25 bp, Artificial
  probe
  misc_feature (1)..(25): SEQ ID NO: 4289; WAN024CDF; Start 810; Stop 834
tgatgcttatgtaccaatcgcagat

SEQ ID NO: 379001 - DNA, 25 bp, Artificial
  probe
  misc_feature (1)..(25): SEQ ID NO: 4289; WAN024CDF; Start 525; Stop 549
gagtttgattgcaggagagactaag

SEQ ID NO: 379002 - DNA, 25 bp, Artificial
  probe
  misc_feature (1)..(25): SEQ ID NO: 4289; WAN024CDF; Start 1391; Stop 1415
aaattaacgacagtagccttgcatc

SEQ ID NO: 379003 - DNA, 25 bp, Artificial
  probe
  misc_feature (1)..(25): SEQ ID NO: 4289; WAN024CDF; Start 1390; Stop 1414
gaaattaacgacagtagccttgcat

SEQ ID NO: 379004 - DNA, 25 bp, Artificial
  probe
  misc_feature (1)..(25): SEQ ID NO: 4289; WAN024CDF; Start 1349; Stop 1373
ttccttcctatgcgatgccagatag

SEQ ID NO: 379005 - DNA, 25 bp, Artificial
  probe
  misc_feature (1)..(25): SEQ ID NO: 4291; WAN024GM8; Start 54; Stop 78
tttaggatataaaacagggttcgga

SEQ ID NO: 379006 - DNA, 25 bp, Artificial
  probe
  misc_feature (1)..(25): SEQ ID NO: 4291; WAN024GM8; Start 53; Stop 77
ttttaggatataaaacagggttcgg

SEQ ID NO: 379007 - DNA, 25 bp, Artificial
  probe
  misc_feature (1)..(25): SEQ ID NO: 4291; WAN024GM8; Start 28; Stop 52
tttgttcgtcaaatggcagctcttt

SEQ ID NO: 379008 - DNA, 25 bp, Artificial
  probe
  misc_feature (1)..(25): SEQ ID NO: 4291; WAN024GM8; Start 29; Stop 53
ttgttcgtcaaatggcagctctttt

SEQ ID NO: 379009 - DNA, 25 bp, Artificial
  probe
  misc_feature (1)..(25): SEQ ID NO: 4291; WAN024GM8; Start 27; Stop 51
ttttgttcgtcaaatggcagctctt

SEQ ID NO: 379010 - DNA, 25 bp, Artificial
  probe
  misc_feature (1)..(25): SEQ ID NO: 4291; WAN024GM8; Start 1; Stop 25
gtgttaatttcagaaattacatcac

SEQ ID NO: 379011 - DNA, 25 bp, Artificial
  probe
  misc_feature (1)..(25): SEQ ID NO: 4291; WAN024GM8; Start 2; Stop 26
tgttaatttcagaaattacatcact

SEQ ID NO: 379012 - DNA, 25 bp, Artificial
  probe
  misc_feature (1)..(25): SEQ ID NO: 4292; WAN024C5B; Start 860; Stop 884
atatccttcgcttccactctatcta

SEQ ID NO: 379013 - DNA, 25 bp, Artificial
  probe
  misc_feature (1)..(25): SEQ ID NO: 4292; WAN024C5B; Start 1775; Stop 1799
aagtagaaggttcagataagttgct

SEQ ID NO: 379014 - DNA, 25 bp, Artificial
  probe
  misc_feature (1)..(25): SEQ ID NO: 4292; WAN024C5B; Start 416; Stop 440
gttggtattcagtatcagacgaaga

SEQ ID NO: 379015 - DNA, 25 bp, Artificial
  probe
  misc_feature (1)..(25): SEQ ID NO: 4292; WAN024C5B; Start 861; Stop 885
tatccttcgcttccactctatctac

SEQ ID NO: 379016 - DNA, 25 bp, Artificial
  probe
  misc_feature (1)..(25): SEQ ID NO: 4292; WAN024C5B; Start 1776; Stop 1800
agtagaaggttcagataagttgctt

SEQ ID NO: 379017 - DNA, 25 bp, Artificial
  probe
  misc_feature (1)..(25): SEQ ID NO: 4292; WAN024C5B; Start 417; Stop 441
ttggtattcagtatcagacgaagaa

SEQ ID NO: 379018 - DNA, 25 bp, Artificial
  probe
  misc_feature (1)..(25): SEQ ID NO: 4292; WAN024C5B; Start 1114; Stop 1138
aactatgaattggctaatgaccttg

SEQ ID NO: 379019 - DNA, 25 bp, Artificial
  probe
  misc_feature (1)..(25): SEQ ID NO: 4292; WAN024C5B; Start 177; Stop 201
ttatctgacaggtcttgatgaacat

SEQ ID NO: 379020 - DNA, 25 bp, Artificial
  probe
  misc_feature (1)..(25): SEQ ID NO: 4292; WAN024C5B; Start 1115; Stop 1139
actatgaattggctaatgaccttgg

SEQ ID NO: 379021 - DNA, 25 bp, Artificial
  probe
  misc_feature (1)..(25): SEQ ID NO: 4292; WAN024C5B; Start 415; Stop 439
ggttggtattcagtatcagacgaag

SEQ ID NO: 379022 - DNA, 25 bp, Artificial
  probe
  misc_feature (1)..(25): SEQ ID NO: 4292; WAN024C5B; Start 1783; Stop 1807
ggttcagataagttgcttcaattcc

SEQ ID NO: 379023 - DNA, 25 bp, Artificial
  probe
  misc_feature (1)..(25): SEQ ID NO: 4292; WAN024C5B; Start 1782; Stop 1806
aggttcagataagttgcttcaattc

SEQ ID NO: 379024 - DNA, 25 bp, Artificial
  probe
  misc_feature (1)..(25): SEQ ID NO: 4292; WAN024C5B; Start 1005; Stop 1029
aatgttggtagagcgttatggacta

SEQ ID NO: 379025 - DNA, 25 bp, Artificial
  probe
  misc_feature (1)..(25): SEQ ID NO: 4292; WAN024C5B; Start 1112; Stop 1136
tcaactatgaattggctaatgacct

SEQ ID NO: 379026 - DNA, 25 bp, Artificial
  probe
  misc_feature (1)..(25): SEQ ID NO: 4292; WAN024C5B; Start 1784; Stop 1808
gttcagataagttgcttcaattccg

SEQ ID NO: 379027 - DNA, 25 bp, Artificial
  probe
  misc_feature (1)..(25): SEQ ID NO: 4292; WAN024C5B; Start 1113; Stop 1137
caactatgaattggctaatgacctt

SEQ ID NO: 379028 - DNA, 25 bp, Artificial
  probe
  misc_feature (1)..(25): SEQ ID NO: 4292; WAN024C5B; Start 1028; Stop 1052
tagatccacttcgttactacctcat

SEQ ID NO: 379029 - DNA, 25 bp, Artificial
  probe
  misc_feature (1)..(25): SEQ ID NO: 4292; WAN024C5B; Start 1781; Stop 1805
aaggttcagataagttgcttcaatt

SEQ ID NO: 379030 - DNA, 25 bp, Artificial
  probe
  misc_feature (1)..(25): SEQ ID NO: 4292; WAN024C5B; Start 101; Stop 125
atatcggttctgcctacacaactat

SEQ ID NO: 379031 - DNA, 25 bp, Artificial
  probe
  misc_feature (1)..(25): SEQ ID NO: 4292; WAN024C5B; Start 1442; Stop 1466
tagttgctcacttgattgaaccatt

SEQ ID NO: 379032 - DNA, 25 bp, Artificial
  probe
  misc_feature (1)..(25): SEQ ID NO: 4292; WAN024C5B; Start 1111; Stop 1135
atcaactatgaattggctaatgacc

SEQ ID NO: 379033 - DNA, 25 bp, Artificial
  probe
  misc_feature (1)..(25): SEQ ID NO: 4292; WAN024C5B; Start 414; Stop 438
tggttggtattcagtatcagacgaa

SEQ ID NO: 379034 - DNA, 25 bp, Artificial
  probe
  misc_feature (1)..(25): SEQ ID NO: 4292; WAN024C5B; Start 1027; Stop 1051
ctagatccacttcgttactacctca

SEQ ID NO: 379035 - DNA, 25 bp, Artificial
  probe
  misc_feature (1)..(25): SEQ ID NO: 4292; WAN024C5B; Start 1026; Stop 1050
actagatccacttcgttactacctc

SEQ ID NO: 379036 - DNA, 25 bp, Artificial
  probe
  misc_feature (1)..(25): SEQ ID NO: 4292; WAN024C5B; Start 1025; Stop 1049
gactagatccacttcgttactacct

SEQ ID NO: 379037 - DNA, 25 bp, Artificial
  probe
  misc_feature (1)..(25): SEQ ID NO: 4292; WAN024C5B; Start 1107; Stop 1131
ccgtatcaactatgaattggctaat

SEQ ID NO: 379038 - DNA, 25 bp, Artificial
  probe
  misc_feature (1)..(25): SEQ ID NO: 4292; WAN024C5B; Start 178; Stop 202
tatctgacaggtcttgatgaacatg

SEQ ID NO: 379039 - DNA, 25 bp, Artificial
  probe
  misc_feature (1)..(25): SEQ ID NO: 4292; WAN024C5B; Start 320; Stop 344
ttatccgtacaactgatgactacca

SEQ ID NO: 379040 - DNA, 25 bp, Artificial
  probe
  misc_feature (1)..(25): SEQ ID NO: 4292; WAN024C5B; Start 321; Stop 345
tatccgtacaactgatgactaccat

SEQ ID NO: 379041 - DNA, 25 bp, Artificial
  probe
  misc_feature (1)..(25): SEQ ID NO: 4292; WAN024C5B; Start 1319; Stop 1343
ggactctgatctctcgtaccaataa

SEQ ID NO: 379042 - DNA, 25 bp, Artificial
  probe
  misc_feature (1)..(25): SEQ ID NO: 4292; WAN024C5B; Start 1441; Stop 1465
gtagttgctcacttgattgaaccat

SEQ ID NO: 379043 - DNA, 25 bp, Artificial
  probe
  misc_feature (1)..(25): SEQ ID NO: 4292; WAN024C5B; Start 1009; Stop 1033
ttggtagagcgttatggactagatc

SEQ ID NO: 379044 - DNA, 25 bp, Artificial
  probe
  misc_feature (1)..(25): SEQ ID NO: 4292; WAN024C5B; Start 1008; Stop 1032
gttggtagagcgttatggactagat

SEQ ID NO: 379045 - DNA, 25 bp, Artificial
  probe
  misc_feature (1)..(25): SEQ ID NO: 4293; WAN024GBW; Start 280; Stop 304
attactcaagaggaattgttagacc

SEQ ID NO: 379046 - DNA, 25 bp, Artificial
  probe
  misc_feature (1)..(25): SEQ ID NO: 4293; WAN024GBW; Start 290; Stop 314
aggaattgttagacctgattgctaa

SEQ ID NO: 379047 - DNA, 25 bp, Artificial
  probe
  misc_feature (1)..(25): SEQ ID NO: 4293; WAN024GBW; Start 284; Stop 308
ctcaagaggaattgttagacctgat

SEQ ID NO: 379048 - DNA, 25 bp, Artificial
  probe
  misc_feature (1)..(25): SEQ ID NO: 4293; WAN024GBW; Start 289; Stop 313
gaggaattgttagacctgattgcta

SEQ ID NO: 379049 - DNA, 25 bp, Artificial
  probe
  misc_feature (1)..(25): SEQ ID NO: 4293; WAN024GBW; Start 282; Stop 306
tactcaagaggaattgttagacctg

SEQ ID NO: 379050 - DNA, 25 bp, Artificial
  probe
  misc_feature (1)..(25): SEQ ID NO: 4293; WAN024GBW; Start 286; Stop 310
caagaggaattgttagacctgattg

SEQ ID NO: 379051 - DNA, 25 bp, Artificial
  probe
  misc_feature (1)..(25): SEQ ID NO: 4293; WAN024GBW; Start 285; Stop 309
tcaagaggaattgttagacctgatt

SEQ ID NO: 379052 - DNA, 25 bp, Artificial
  probe
  misc_feature (1)..(25): SEQ ID NO: 4293; WAN024GBW; Start 281; Stop 305
ttactcaagaggaattgttagacct

SEQ ID NO: 379053 - DNA, 25 bp, Artificial
  probe
  misc_feature (1)..(25): SEQ ID NO: 4293; WAN024GBW; Start 287; Stop 311
aagaggaattgttagacctgattgc

SEQ ID NO: 379054 - DNA, 25 bp, Artificial
  probe
  misc_feature (1)..(25): SEQ ID NO: 4293; WAN024GBW; Start 283; Stop 307
actcaagaggaattgttagacctga

SEQ ID NO: 379055 - DNA, 25 bp, Artificial
  probe
  misc_feature (1)..(25): SEQ ID NO: 4293; WAN024GBW; Start 288; Stop 312
agaggaattgttagacctgattgct

SEQ ID NO: 379056 - DNA, 25 bp, Artificial
  probe
  misc_feature (1)..(25): SEQ ID NO: 4293; WAN024GBW; Start 64; Stop 88
atgacacagattattgatgggaaag

SEQ ID NO: 379057 - DNA, 25 bp, Artificial
  probe
  misc_feature (1)..(25): SEQ ID NO: 4293; WAN024GBW; Start 65; Stop 89
tgacacagattattgatgggaaagc

SEQ ID NO: 379058 - DNA, 25 bp, Artificial
  probe
  misc_feature (1)..(25): SEQ ID NO: 4293; WAN024GBW; Start 60; Stop 84
tgatatgacacagattattgatggg

SEQ ID NO: 379059 - DNA, 25 bp, Artificial
  probe
  misc_feature (1)..(25): SEQ ID NO: 4293; WAN024GBW; Start 59; Stop 83
gtgatatgacacagattattgatgg

SEQ ID NO: 379060 - DNA, 25 bp, Artificial
  probe
  misc_feature (1)..(25): SEQ ID NO: 4293; WAN024GBW; Start 61; Stop 85
gatatgacacagattattgatggga

SEQ ID NO: 379061 - DNA, 25 bp, Artificial
  probe
  misc_feature (1)..(25): SEQ ID NO: 4293; WAN024GBW; Start 63; Stop 87
tatgacacagattattgatgggaaa

SEQ ID NO: 379062 - DNA, 25 bp, Artificial
  probe
  misc_feature (1)..(25): SEQ ID NO: 4293; WAN024GBW; Start 52; Stop 76
aagagaagtgatatgacacagatta

SEQ ID NO: 379063 - DNA, 25 bp, Artificial
  probe
  misc_feature (1)..(25): SEQ ID NO: 4293; WAN024GBW; Start 291; Stop 315
ggaattgttagacctgattgctaaa

SEQ ID NO: 379064 - DNA, 25 bp, Artificial
  probe
  misc_feature (1)..(25): SEQ ID NO: 4293; WAN024GBW; Start 62; Stop 86
atatgacacagattattgatgggaa

SEQ ID NO: 379065 - DNA, 25 bp, Artificial
  probe
  misc_feature (1)..(25): SEQ ID NO: 4293; WAN024GBW; Start 53; Stop 77
agagaagtgatatgacacagattat

SEQ ID NO: 379066 - DNA, 25 bp, Artificial
  probe
  misc_feature (1)..(25): SEQ ID NO: 4293; WAN024GBW; Start 66; Stop 90
gacacagattattgatgggaaagct

SEQ ID NO: 379067 - DNA, 25 bp, Artificial
  probe
  misc_feature (1)..(25): SEQ ID NO: 4293; WAN024GBW; Start 58; Stop 82
agtgatatgacacagattattgatg

SEQ ID NO: 379068 - DNA, 25 bp, Artificial
  probe
  misc_feature (1)..(25): SEQ ID NO: 4293; WAN024GBW; Start 56; Stop 80
gaagtgatatgacacagattattga

SEQ ID NO: 379069 - DNA, 25 bp, Artificial
  probe
  misc_feature (1)..(25): SEQ ID NO: 4293; WAN024GBW; Start 55; Stop 79
agaagtgatatgacacagattattg

SEQ ID NO: 379070 - DNA, 25 bp, Artificial
  probe
  misc_feature (1)..(25): SEQ ID NO: 4293; WAN024GBW; Start 154; Stop 178
ctagtgcctggtttggtagtgattt

SEQ ID NO: 379071 - DNA, 25 bp, Artificial
  probe
  misc_feature (1)..(25): SEQ ID NO: 4293; WAN024GBW; Start 51; Stop 75
aaagagaagtgatatgacacagatt

SEQ ID NO: 379072 - DNA, 25 bp, Artificial
  probe
  misc_feature (1)..(25): SEQ ID NO: 4293; WAN024GBW; Start 54; Stop 78
gagaagtgatatgacacagattatt

SEQ ID NO: 379073 - DNA, 25 bp, Artificial
  probe
  misc_feature (1)..(25): SEQ ID NO: 4293; WAN024GBW; Start 292; Stop 316
gaattgttagacctgattgctaaat

SEQ ID NO: 379074 - DNA, 25 bp, Artificial
  probe
  misc_feature (1)..(25): SEQ ID NO: 4293; WAN024GBW; Start 57; Stop 81
aagtgatatgacacagattattgat

SEQ ID NO: 379075 - DNA, 25 bp, Artificial
  probe
  misc_feature (1)..(25): SEQ ID NO: 4293; WAN024GBW; Start 153; Stop 177
tctagtgcctggtttggtagtgatt

SEQ ID NO: 379076 - DNA, 25 bp, Artificial
  probe
  misc_feature (1)..(25): SEQ ID NO: 4293; WAN024GBW; Start 155; Stop 179
tagtgcctggtttggtagtgatttt

SEQ ID NO: 379077 - DNA, 25 bp, Artificial
  probe
  misc_feature (1)..(25): SEQ ID NO: 4293; WAN024GBW; Start 293; Stop 317
aattgttagacctgattgctaaata

SEQ ID NO: 379078 - DNA, 25 bp, Artificial
  probe
  misc_feature (1)..(25): SEQ ID NO: 4294; WAN024CWE; Start 37; Stop 61
gcttcctctaataactgcgaataca

SEQ ID NO: 379079 - DNA, 25 bp, Artificial
  probe
  misc_feature (1)..(25): SEQ ID NO: 4294; WAN024CWE; Start 38; Stop 62
cttcctctaataactgcgaatacaa

SEQ ID NO: 379080 - DNA, 25 bp, Artificial
  probe
  misc_feature (1)..(25): SEQ ID NO: 4294; WAN024CWE; Start 40; Stop 64
tcctctaataactgcgaatacaatt

SEQ ID NO: 379081 - DNA, 25 bp, Artificial
  probe
  misc_feature (1)..(25): SEQ ID NO: 4294; WAN024CWE; Start 39; Stop 63
ttcctctaataactgcgaatacaat

SEQ ID NO: 379082 - DNA, 25 bp, Artificial
  probe
  misc_feature (1)..(25): SEQ ID NO: 4294; WAN024CWE; Start 32; Stop 56
caatagcttcctctaataactgcga

SEQ ID NO: 379083 - DNA, 25 bp, Artificial
  probe
  misc_feature (1)..(25): SEQ ID NO: 4294; WAN024CWE; Start 33; Stop 57
aatagcttcctctaataactgcgaa

SEQ ID NO: 379084 - DNA, 25 bp, Artificial
  probe
  misc_feature (1)..(25): SEQ ID NO: 4294; WAN024CWE; Start 34; Stop 58
atagcttcctctaataactgcgaat

SEQ ID NO: 379085 - DNA, 25 bp, Artificial
  probe
  misc_feature (1)..(25): SEQ ID NO: 4294; WAN024CWE; Start 36; Stop 60
agcttcctctaataactgcgaatac

SEQ ID NO: 379086 - DNA, 25 bp, Artificial
  probe
  misc_feature (1)..(25): SEQ ID NO: 4294; WAN024CWE; Start 35; Stop 59
tagcttcctctaataactgcgaata

SEQ ID NO: 379087 - DNA, 25 bp, Artificial
  probe
  misc_feature (1)..(25): SEQ ID NO: 4294; WAN024CWE; Start 67; Stop 91
aaaccaacagaatcaatgaaaccag

SEQ ID NO: 379088 - DNA, 25 bp, Artificial
  probe
  misc_feature (1)..(25): SEQ ID NO: 4294; WAN024CWE; Start 14; Stop 38
cattaccgtttcgtttagcaatagc

SEQ ID NO: 379089 - DNA, 25 bp, Artificial
  probe
  misc_feature (1)..(25): SEQ ID NO: 4294; WAN024CWE; Start 13; Stop 37
gcattaccgtttcgtttagcaatag

SEQ ID NO: 379090 - DNA, 25 bp, Artificial
  probe
  misc_feature (1)..(25): SEQ ID NO: 4294; WAN024CWE; Start 68; Stop 92
aaccaacagaatcaatgaaaccaga

SEQ ID NO: 379091 - DNA, 25 bp, Artificial
  probe
  misc_feature (1)..(25): SEQ ID NO: 4294; WAN024CWE; Start 12; Stop 36
agcattaccgtttcgtttagcaata

SEQ ID NO: 379092 - DNA, 25 bp, Artificial
  probe
  misc_feature (1)..(25): SEQ ID NO: 4294; WAN024CWE; Start 11; Stop 35
tagcattaccgtttcgtttagcaat

SEQ ID NO: 379093 - DNA, 25 bp, Artificial
  probe
  misc_feature (1)..(25): SEQ ID NO: 4294; WAN024CWE; Start 159; Stop 183
agagcccaattctgtaaatccttta

SEQ ID NO: 379094 - DNA, 25 bp, Artificial
  probe
  misc_feature (1)..(25): SEQ ID NO: 4294; WAN024CWE; Start 10; Stop 34
ttagcattaccgtttcgtttagcaa

SEQ ID NO: 379095 - DNA, 25 bp, Artificial
  probe
  misc_feature (1)..(25): SEQ ID NO: 4294; WAN024CWE; Start 70; Stop 94
ccaacagaatcaatgaaaccagact

SEQ ID NO: 379096 - DNA, 25 bp, Artificial
  probe
  misc_feature (1)..(25): SEQ ID NO: 4294; WAN024CWE; Start 160; Stop 184
gagcccaattctgtaaatcctttaa

SEQ ID NO: 379097 - DNA, 25 bp, Artificial
  probe
  misc_feature (1)..(25): SEQ ID NO: 4294; WAN024CWE; Start 69; Stop 93
accaacagaatcaatgaaaccagac

SEQ ID NO: 379098 - DNA, 25 bp, Artificial
  probe
  misc_feature (1)..(25): SEQ ID NO: 4294; WAN024CWE; Start 41; Stop 65
cctctaataactgcgaatacaattc

SEQ ID NO: 379099 - DNA, 25 bp, Artificial
  probe
  misc_feature (1)..(25): SEQ ID NO: 4294; WAN024CWE; Start 164; Stop 188
ccaattctgtaaatcctttaatcgc

SEQ ID NO: 379100 - DNA, 25 bp, Artificial
  probe
  misc_feature (1)..(25): SEQ ID NO: 4294; WAN024CWE; Start 161; Stop 185
agcccaattctgtaaatcctttaat

SEQ ID NO: 379101 - DNA, 25 bp, Artificial
  probe
  misc_feature (1)..(25): SEQ ID NO: 4294; WAN024CWE; Start 168; Stop 192
ttctgtaaatcctttaatcgcttct

SEQ ID NO: 379102 - DNA, 25 bp, Artificial
  probe
  misc_feature (1)..(25): SEQ ID NO: 4294; WAN024CWE; Start 162; Stop 186
gcccaattctgtaaatcctttaatc

SEQ ID NO: 379103 - DNA, 25 bp, Artificial
  probe
  misc_feature (1)..(25): SEQ ID NO: 4294; WAN024CWE; Start 177; Stop 201
tcctttaatcgcttctaatctcttt

SEQ ID NO: 379104 - DNA, 25 bp, Artificial
  probe
  misc_feature (1)..(25): SEQ ID NO: 4294; WAN024CWE; Start 9; Stop 33
gttagcattaccgtttcgtttagca

SEQ ID NO: 379105 - DNA, 25 bp, Artificial
  probe
  misc_feature (1)..(25): SEQ ID NO: 4294; WAN024CWE; Start 71; Stop 95
caacagaatcaatgaaaccagactg

SEQ ID NO: 379106 - DNA, 25 bp, Artificial
  probe
  misc_feature (1)..(25): SEQ ID NO: 4294; WAN024CWE; Start 176; Stop 200
atcctttaatcgcttctaatctctt

SEQ ID NO: 379107 - DNA, 25 bp, Artificial
  probe
  misc_feature (1)..(25): SEQ ID NO: 4294; WAN024CWE; Start 175; Stop 199
aatcctttaatcgcttctaatctct

SEQ ID NO: 379108 - DNA, 25 bp, Artificial
  probe
  misc_feature (1)..(25): SEQ ID NO: 4294; WAN024CWE; Start 163; Stop 187
cccaattctgtaaatcctttaatcg

SEQ ID NO: 379109 - DNA, 25 bp, Artificial
  probe
  misc_feature (1)..(25): SEQ ID NO: 4294; WAN024CWE; Start 165; Stop 189
caattctgtaaatcctttaatcgct

SEQ ID NO: 379110 - DNA, 25 bp, Artificial
  probe
  misc_feature (1)..(25): SEQ ID NO: 4294; WAN024CWE; Start 42; Stop 66
ctctaataactgcgaatacaattca

SEQ ID NO: 379111 - DNA, 25 bp, Artificial
  probe
  misc_feature (1)..(25): SEQ ID NO: 4295; WAN024EZQ; Start 463; Stop 487
attgatacggttctacttacgagag

SEQ ID NO: 379112 - DNA, 25 bp, Artificial
  probe
  misc_feature (1)..(25): SEQ ID NO: 4295; WAN024EZQ; Start 462; Stop 486
gattgatacggttctacttacgaga

SEQ ID NO: 379113 - DNA, 25 bp, Artificial
  probe
  misc_feature (1)..(25): SEQ ID NO: 4295; WAN024EZQ; Start 461; Stop 485
agattgatacggttctacttacgag

SEQ ID NO: 379114 - DNA, 25 bp, Artificial
  probe
  misc_feature (1)..(25): SEQ ID NO: 4295; WAN024EZQ; Start 460; Stop 484
gagattgatacggttctacttacga

SEQ ID NO: 379115 - DNA, 25 bp, Artificial
  probe
  misc_feature (1)..(25): SEQ ID NO: 4295; WAN024EZQ; Start 459; Stop 483
tgagattgatacggttctacttacg

SEQ ID NO: 379116 - DNA, 25 bp, Artificial
  probe
  misc_feature (1)..(25): SEQ ID NO: 4295; WAN024EZQ; Start 742; Stop 766
ctcattcgtagatggttacctaagg

SEQ ID NO: 379117 - DNA, 25 bp, Artificial
  probe
  misc_feature (1)..(25): SEQ ID NO: 4295; WAN024EZQ; Start 741; Stop 765
gctcattcgtagatggttacctaag

SEQ ID NO: 379118 - DNA, 25 bp, Artificial
  probe
  misc_feature (1)..(25): SEQ ID NO: 4295; WAN024EZQ; Start 525; Stop 549
gagtagacatcagatcatccgattg

SEQ ID NO: 379119 - DNA, 25 bp, Artificial
  probe
  misc_feature (1)..(25): SEQ ID NO: 4295; WAN024EZQ; Start 524; Stop 548
agagtagacatcagatcatccgatt

SEQ ID NO: 379120 - DNA, 25 bp, Artificial
  probe
  misc_feature (1)..(25): SEQ ID NO: 4295; WAN024EZQ; Start 523; Stop 547
aagagtagacatcagatcatccgat

SEQ ID NO: 379121 - DNA, 25 bp, Artificial
  probe
  misc_feature (1)..(25): SEQ ID NO: 4295; WAN024EZQ; Start 719; Stop 743
gaactaatgagaatcacaacaggct

SEQ ID NO: 379122 - DNA, 25 bp, Artificial
  probe
  misc_feature (1)..(25): SEQ ID NO: 4295; WAN024EZQ; Start 720; Stop 744
aactaatgagaatcacaacaggctc

SEQ ID NO: 379123 - DNA, 25 bp, Artificial
  probe
  misc_feature (1)..(25): SEQ ID NO: 4295; WAN024EZQ; Start 428; Stop 452
ctatcaatcttcgcttggagaatgg

SEQ ID NO: 379124 - DNA, 25 bp, Artificial
  probe
  misc_feature (1)..(25): SEQ ID NO: 4295; WAN024EZQ; Start 464; Stop 488
ttgatacggttctacttacgagagc

SEQ ID NO: 379125 - DNA, 25 bp, Artificial
  probe
  misc_feature (1)..(25): SEQ ID NO: 4295; WAN024EZQ; Start 458; Stop 482
atgagattgatacggttctacttac

SEQ ID NO: 379126 - DNA, 25 bp, Artificial
  probe
  misc_feature (1)..(25): SEQ ID NO: 4295; WAN024EZQ; Start 730; Stop 754
aatcacaacaggctcattcgtagat

SEQ ID NO: 379127 - DNA, 25 bp, Artificial
  probe
  misc_feature (1)..(25): SEQ ID NO: 4295; WAN024EZQ; Start 740; Stop 764
ggctcattcgtagatggttacctaa

SEQ ID NO: 379128 - DNA, 25 bp, Artificial
  probe
  misc_feature (1)..(25): SEQ ID NO: 4295; WAN024EZQ; Start 718; Stop 742
ggaactaatgagaatcacaacaggc

SEQ ID NO: 379129 - DNA, 25 bp, Artificial
  probe
  misc_feature (1)..(25): SEQ ID NO: 4295; WAN024EZQ; Start 427; Stop 451
gctatcaatcttcgcttggagaatg

SEQ ID NO: 379130 - DNA, 25 bp, Artificial
  probe
  misc_feature (1)..(25): SEQ ID NO: 4295; WAN024EZQ; Start 440; Stop 464
gcttggagaatgggtattatgagat

SEQ ID NO: 379131 - DNA, 25 bp, Artificial
  probe
  misc_feature (1)..(25): SEQ ID NO: 4295; WAN024EZQ; Start 736; Stop 760
aacaggctcattcgtagatggttac

SEQ ID NO: 379132 - DNA, 25 bp, Artificial
  probe
  misc_feature (1)..(25): SEQ ID NO: 4295; WAN024EZQ; Start 735; Stop 759
caacaggctcattcgtagatggtta

SEQ ID NO: 379133 - DNA, 25 bp, Artificial
  probe
  misc_feature (1)..(25): SEQ ID NO: 4295; WAN024EZQ; Start 456; Stop 480
ttatgagattgatacggttctactt

SEQ ID NO: 379134 - DNA, 25 bp, Artificial
  probe
  misc_feature (1)..(25): SEQ ID NO: 4295; WAN024EZQ; Start 39; Stop 63
cacagagatgcaagacaattatact

SEQ ID NO: 379135 - DNA, 25 bp, Artificial
  probe
  misc_feature (1)..(25): SEQ ID NO: 4295; WAN024EZQ; Start 443; Stop 467
tggagaatgggtattatgagattga

SEQ ID NO: 379136 - DNA, 25 bp, Artificial
  probe
  misc_feature (1)..(25): SEQ ID NO: 4295; WAN024EZQ; Start 452; Stop 476
ggtattatgagattgatacggttct

SEQ ID NO: 379137 - DNA, 25 bp, Artificial
  probe
  misc_feature (1)..(25): SEQ ID NO: 4295; WAN024EZQ; Start 731; Stop 755
atcacaacaggctcattcgtagatg

SEQ ID NO: 379138 - DNA, 25 bp, Artificial
  probe
  misc_feature (1)..(25): SEQ ID NO: 4295; WAN024EZQ; Start 455; Stop 479
attatgagattgatacggttctact

SEQ ID NO: 379139 - DNA, 25 bp, Artificial
  probe
  misc_feature (1)..(25): SEQ ID NO: 4295; WAN024EZQ; Start 164; Stop 188
ctcctcaaactatccacactgaaat

SEQ ID NO: 379140 - DNA, 25 bp, Artificial
  probe
  misc_feature (1)..(25): SEQ ID NO: 4295; WAN024EZQ; Start 745; Stop 769
attcgtagatggttacctaagggaa

SEQ ID NO: 379141 - DNA, 25 bp, Artificial
  probe
  misc_feature (1)..(25): SEQ ID NO: 4295; WAN024EZQ; Start 442; Stop 466
ttggagaatgggtattatgagattg

SEQ ID NO: 379142 - DNA, 25 bp, Artificial
  probe
  misc_feature (1)..(25): SEQ ID NO: 4295; WAN024EZQ; Start 173; Stop 197
ctatccacactgaaatcaagcgtag

SEQ ID NO: 379143 - DNA, 25 bp, Artificial
  probe
  misc_feature (1)..(25): SEQ ID NO: 4295; WAN024EZQ; Start 521; Stop 545
gaaagagtagacatcagatcatccg

SEQ ID NO: 379144 - DNA, 25 bp, Artificial
  probe
  misc_feature (1)..(25): SEQ ID NO: 4296; WAN024EZV; Start 564; Stop 588
ggagaatgggcattatgagattgat

SEQ ID NO: 379145 - DNA, 25 bp, Artificial
  probe
  misc_feature (1)..(25): SEQ ID NO: 4296; WAN024EZV; Start 561; Stop 585
cttggagaatgggcattatgagatt

SEQ ID NO: 379146 - DNA, 25 bp, Artificial
  probe
  misc_feature (1)..(25): SEQ ID NO: 4296; WAN024EZV; Start 562; Stop 586
ttggagaatgggcattatgagattg

SEQ ID NO: 379147 - DNA, 25 bp, Artificial
  probe
  misc_feature (1)..(25): SEQ ID NO: 4296; WAN024EZV; Start 566; Stop 590
agaatgggcattatgagattgatac

SEQ ID NO: 379148 - DNA, 25 bp, Artificial
  probe
  misc_feature (1)..(25): SEQ ID NO: 4296; WAN024EZV; Start 565; Stop 589
gagaatgggcattatgagattgata

SEQ ID NO: 379149 - DNA, 25 bp, Artificial
  probe
  misc_feature (1)..(25): SEQ ID NO: 4296; WAN024EZV; Start 563; Stop 587
tggagaatgggcattatgagattga

SEQ ID NO: 379150 - DNA, 25 bp, Artificial
  probe
  misc_feature (1)..(25): SEQ ID NO: 4296; WAN024EZV; Start 393; Stop 417
cgtgggaatttcaaccatttactat

SEQ ID NO: 379151 - DNA, 25 bp, Artificial
  probe
  misc_feature (1)..(25): SEQ ID NO: 4296; WAN024EZV; Start 396; Stop 420
gggaatttcaaccatttactattgg

SEQ ID NO: 379152 - DNA, 25 bp, Artificial
  probe
  misc_feature (1)..(25): SEQ ID NO: 4296; WAN024EZV; Start 560; Stop 584
gcttggagaatgggcattatgagat

SEQ ID NO: 379153 - DNA, 25 bp, Artificial
  probe
  misc_feature (1)..(25): SEQ ID NO: 4296; WAN024EZV; Start 395; Stop 419
tgggaatttcaaccatttactattg

SEQ ID NO: 379154 - DNA, 25 bp, Artificial
  probe
  misc_feature (1)..(25): SEQ ID NO: 4296; WAN024EZV; Start 394; Stop 418
gtgggaatttcaaccatttactatt

SEQ ID NO: 379155 - DNA, 25 bp, Artificial
  probe
  misc_feature (1)..(25): SEQ ID NO: 4296; WAN024EZV; Start 397; Stop 421
ggaatttcaaccatttactattgga

SEQ ID NO: 379156 - DNA, 25 bp, Artificial
  probe
  misc_feature (1)..(25): SEQ ID NO: 4296; WAN024EZV; Start 390; Stop 414
taacgtgggaatttcaaccatttac

SEQ ID NO: 379157 - DNA, 25 bp, Artificial
  probe
  misc_feature (1)..(25): SEQ ID NO: 4296; WAN024EZV; Start 389; Stop 413
ttaacgtgggaatttcaaccattta

SEQ ID NO: 379158 - DNA, 25 bp, Artificial
  probe
  misc_feature (1)..(25): SEQ ID NO: 4296; WAN024EZV; Start 392; Stop 416
acgtgggaatttcaaccatttacta

SEQ ID NO: 379159 - DNA, 25 bp, Artificial
  probe
  misc_feature (1)..(25): SEQ ID NO: 4296; WAN024EZV; Start 391; Stop 415
aacgtgggaatttcaaccatttact

SEQ ID NO: 379160 - DNA, 25 bp, Artificial
  probe
  misc_feature (1)..(25): SEQ ID NO: 4296; WAN024EZV; Start 403; Stop 427
tcaaccatttactattggattcatc

SEQ ID NO: 379161 - DNA, 25 bp, Artificial
  probe
  misc_feature (1)..(25): SEQ ID NO: 4296; WAN024EZV; Start 401; Stop 425
tttcaaccatttactattggattca

SEQ ID NO: 379162 - DNA, 25 bp, Artificial
  probe
  misc_feature (1)..(25): SEQ ID NO: 4296; WAN024EZV; Start 388; Stop 412
gttaacgtgggaatttcaaccattt

SEQ ID NO: 379163 - DNA, 25 bp, Artificial
  probe
  misc_feature (1)..(25): SEQ ID NO: 4296; WAN024EZV; Start 402; Stop 426
ttcaaccatttactattggattcat

SEQ ID NO: 379164 - DNA, 25 bp, Artificial
  probe
  misc_feature (1)..(25): SEQ ID NO: 4296; WAN024EZV; Start 557; Stop 581
ttcgcttggagaatgggcattatga

SEQ ID NO: 379165 - DNA, 25 bp, Artificial
  probe
  misc_feature (1)..(25): SEQ ID NO: 4296; WAN024EZV; Start 400; Stop 424
atttcaaccatttactattggattc

SEQ ID NO: 379166 - DNA, 25 bp, Artificial
  probe
  misc_feature (1)..(25): SEQ ID NO: 4296; WAN024EZV; Start 398; Stop 422
gaatttcaaccatttactattggat

SEQ ID NO: 379167 - DNA, 25 bp, Artificial
  probe
  misc_feature (1)..(25): SEQ ID NO: 4296; WAN024EZV; Start 559; Stop 583
cgcttggagaatgggcattatgaga

SEQ ID NO: 379168 - DNA, 25 bp, Artificial
  probe
  misc_feature (1)..(25): SEQ ID NO: 4296; WAN024EZV; Start 558; Stop 582
tcgcttggagaatgggcattatgag

SEQ ID NO: 379169 - DNA, 25 bp, Artificial
  probe
  misc_feature (1)..(25): SEQ ID NO: 4296; WAN024EZV; Start 380; Stop 404
ctaaaggggttaacgtgggaatttc

SEQ ID NO: 379170 - DNA, 25 bp, Artificial
  probe
  misc_feature (1)..(25): SEQ ID NO: 4296; WAN024EZV; Start 381; Stop 405
taaaggggttaacgtgggaatttca

SEQ ID NO: 379171 - DNA, 25 bp, Artificial
  probe
  misc_feature (1)..(25): SEQ ID NO: 4296; WAN024EZV; Start 399; Stop 423
aatttcaaccatttactattggatt

SEQ ID NO: 379172 - DNA, 25 bp, Artificial
  probe
  misc_feature (1)..(25): SEQ ID NO: 4296; WAN024EZV; Start 382; Stop 406
aaaggggttaacgtgggaatttcaa

SEQ ID NO: 379173 - DNA, 25 bp, Artificial
  probe
  misc_feature (1)..(25): SEQ ID NO: 4296; WAN024EZV; Start 387; Stop 411
ggttaacgtgggaatttcaaccatt

SEQ ID NO: 379174 - DNA, 25 bp, Artificial
  probe
  misc_feature (1)..(25): SEQ ID NO: 4296; WAN024EZV; Start 379; Stop 403
gctaaaggggttaacgtgggaattt

SEQ ID NO: 379175 - DNA, 25 bp, Artificial
  probe
  misc_feature (1)..(25): SEQ ID NO: 4296; WAN024EZV; Start 383; Stop 407
aaggggttaacgtgggaatttcaac

SEQ ID NO: 379176 - DNA, 25 bp, Artificial
  probe
  misc_feature (1)..(25): SEQ ID NO: 4296; WAN024EZV; Start 386; Stop 410
gggttaacgtgggaatttcaaccat

SEQ ID NO: 379177 - DNA, 25 bp, Artificial
  probe
  misc_feature (1)..(25): SEQ ID NO: 4296; WAN024EZV; Start 378; Stop 402
ggctaaaggggttaacgtgggaatt

SEQ ID NO: 379178 - DNA, 25 bp, Artificial
  probe
  misc_feature (1)..(25): SEQ ID NO: 4297; WAN024A9A; Start 32; Stop 56
gctatacttgaagagttgactatgc

SEQ ID NO: 379179 - DNA, 25 bp, Artificial
  probe
  misc_feature (1)..(25): SEQ ID NO: 4297; WAN024A9A; Start 23; Stop 47
aggagatatgctatacttgaagagt

SEQ ID NO: 379180 - DNA, 25 bp, Artificial
  probe
  misc_feature (1)..(25): SEQ ID NO: 4297; WAN024A9A; Start 31; Stop 55
tgctatacttgaagagttgactatg

SEQ ID NO: 379181 - DNA, 25 bp, Artificial
  probe
  misc_feature (1)..(25): SEQ ID NO: 4297; WAN024A9A; Start 24; Stop 48
ggagatatgctatacttgaagagtt

SEQ ID NO: 379182 - DNA, 25 bp, Artificial
  probe
  misc_feature (1)..(25): SEQ ID NO: 4297; WAN024A9A; Start 93; Stop 117
ttattcaagtttaagtggttcgtcc

SEQ ID NO: 379183 - DNA, 25 bp, Artificial
  probe
  misc_feature (1)..(25): SEQ ID NO: 4297; WAN024A9A; Start 94; Stop 118
tattcaagtttaagtggttcgtccc

SEQ ID NO: 379184 - DNA, 25 bp, Artificial
  probe
  misc_feature (1)..(25): SEQ ID NO: 4297; WAN024A9A; Start 30; Stop 54
atgctatacttgaagagttgactat

SEQ ID NO: 379185 - DNA, 25 bp, Artificial
  probe
  misc_feature (1)..(25): SEQ ID NO: 4297; WAN024A9A; Start 28; Stop 52
atatgctatacttgaagagttgact

SEQ ID NO: 379186 - DNA, 25 bp, Artificial
  probe
  misc_feature (1)..(25): SEQ ID NO: 4297; WAN024A9A; Start 27; Stop 51
gatatgctatacttgaagagttgac

SEQ ID NO: 379187 - DNA, 25 bp, Artificial
  probe
  misc_feature (1)..(25): SEQ ID NO: 4297; WAN024A9A; Start 35; Stop 59
atacttgaagagttgactatgcacg

SEQ ID NO: 379188 - DNA, 25 bp, Artificial
  probe
  misc_feature (1)..(25): SEQ ID NO: 4297; WAN024A9A; Start 26; Stop 50
agatatgctatacttgaagagttga

SEQ ID NO: 379189 - DNA, 25 bp, Artificial
  probe
  misc_feature (1)..(25): SEQ ID NO: 4297; WAN024A9A; Start 38; Stop 62
cttgaagagttgactatgcacgatc

SEQ ID NO: 379190 - DNA, 25 bp, Artificial
  probe
  misc_feature (1)..(25): SEQ ID NO: 4297; WAN024A9A; Start 22; Stop 46
taggagatatgctatacttgaagag

SEQ ID NO: 379191 - DNA, 25 bp, Artificial
  probe
  misc_feature (1)..(25): SEQ ID NO: 4297; WAN024A9A; Start 25; Stop 49
gagatatgctatacttgaagagttg

SEQ ID NO: 379192 - DNA, 25 bp, Artificial
  probe
  misc_feature (1)..(25): SEQ ID NO: 4297; WAN024A9A; Start 34; Stop 58
tatacttgaagagttgactatgcac

SEQ ID NO: 379193 - DNA, 25 bp, Artificial
  probe
  misc_feature (1)..(25): SEQ ID NO: 4297; WAN024A9A; Start 36; Stop 60
tacttgaagagttgactatgcacga

SEQ ID NO: 379194 - DNA, 25 bp, Artificial
  probe
  misc_feature (1)..(25): SEQ ID NO: 4297; WAN024A9A; Start 29; Stop 53
tatgctatacttgaagagttgacta

SEQ ID NO: 379195 - DNA, 25 bp, Artificial
  probe
  misc_feature (1)..(25): SEQ ID NO: 4297; WAN024A9A; Start 92; Stop 116
attattcaagtttaagtggttcgtc

SEQ ID NO: 379196 - DNA, 25 bp, Artificial
  probe
  misc_feature (1)..(25): SEQ ID NO: 4297; WAN024A9A; Start 91; Stop 115
gattattcaagtttaagtggttcgt

SEQ ID NO: 379197 - DNA, 25 bp, Artificial
  probe
  misc_feature (1)..(25): SEQ ID NO: 4297; WAN024A9A; Start 33; Stop 57
ctatacttgaagagttgactatgca

SEQ ID NO: 379198 - DNA, 25 bp, Artificial
  probe
  misc_feature (1)..(25): SEQ ID NO: 4297; WAN024A9A; Start 76; Stop 100
cgaacatcgttgcttgattattcaa

SEQ ID NO: 379199 - DNA, 25 bp, Artificial
  probe
  misc_feature (1)..(25): SEQ ID NO: 4297; WAN024A9A; Start 90; Stop 114
tgattattcaagtttaagtggttcg

SEQ ID NO: 379200 - DNA, 25 bp, Artificial
  probe
  misc_feature (1)..(25): SEQ ID NO: 4297; WAN024A9A; Start 37; Stop 61
acttgaagagttgactatgcacgat

SEQ ID NO: 379201 - DNA, 25 bp, Artificial
  probe
  misc_feature (1)..(25): SEQ ID NO: 4297; WAN024A9A; Start 39; Stop 63
ttgaagagttgactatgcacgatcc

SEQ ID NO: 379202 - DNA, 25 bp, Artificial
  probe
  misc_feature (1)..(25): SEQ ID NO: 4297; WAN024A9A; Start 41; Stop 65
gaagagttgactatgcacgatcctg

SEQ ID NO: 379203 - DNA, 25 bp, Artificial
  probe
  misc_feature (1)..(25): SEQ ID NO: 4297; WAN024A9A; Start 21; Stop 45
ataggagatatgctatacttgaaga

SEQ ID NO: 379204 - DNA, 25 bp, Artificial
  probe
  misc_feature (1)..(25): SEQ ID NO: 4297; WAN024A9A; Start 40; Stop 64
tgaagagttgactatgcacgatcct

SEQ ID NO: 379205 - DNA, 25 bp, Artificial
  probe
  misc_feature (1)..(25): SEQ ID NO: 4297; WAN024A9A; Start 42; Stop 66
aagagttgactatgcacgatcctgt

SEQ ID NO: 379206 - DNA, 25 bp, Artificial
  probe
  misc_feature (1)..(25): SEQ ID NO: 4297; WAN024A9A; Start 95; Stop 119
attcaagtttaagtggttcgtccca

SEQ ID NO: 379207 - DNA, 25 bp, Artificial
  probe
  misc_feature (1)..(25): SEQ ID NO: 4297; WAN024A9A; Start 20; Stop 44
aataggagatatgctatacttgaag

SEQ ID NO: 379208 - DNA, 25 bp, Artificial
  probe
  misc_feature (1)..(25): SEQ ID NO: 4297; WAN024A9A; Start 9; Stop 33
acttgtaagaaaataggagatatgc

SEQ ID NO: 379209 - DNA, 25 bp, Artificial
  probe
  misc_feature (1)..(25): SEQ ID NO: 4297; WAN024A9A; Start 43; Stop 67
agagttgactatgcacgatcctgtg

SEQ ID NO: 379210 - DNA, 25 bp, Artificial
  probe
  misc_feature (1)..(25): SEQ ID NO: 4297; WAN024A9A; Start 10; Stop 34
cttgtaagaaaataggagatatgct

SEQ ID NO: 379211 - DNA, 25 bp, Artificial
  probe
  misc_feature (1)..(25): SEQ ID NO: 4298; WAN024DUI; Start 96; Stop 120
cgttgataaccaagtcagaagaact

SEQ ID NO: 379212 - DNA, 25 bp, Artificial
  probe
  misc_feature (1)..(25): SEQ ID NO: 4298; WAN024DUI; Start 95; Stop 119
ccgttgataaccaagtcagaagaac

SEQ ID NO: 379213 - DNA, 25 bp, Artificial
  probe
  misc_feature (1)..(25): SEQ ID NO: 4298; WAN024DUI; Start 94; Stop 118
tccgttgataaccaagtcagaagaa

SEQ ID NO: 379214 - DNA, 25 bp, Artificial
  probe
  misc_feature (1)..(25): SEQ ID NO: 4298; WAN024DUI; Start 93; Stop 117
ttccgttgataaccaagtcagaaga

SEQ ID NO: 379215 - DNA, 25 bp, Artificial
  probe
  misc_feature (1)..(25): SEQ ID NO: 4298; WAN024DUI; Start 134; Stop 158
aatttcaaatcaacatccactccag

SEQ ID NO: 379216 - DNA, 25 bp, Artificial
  probe
  misc_feature (1)..(25): SEQ ID NO: 4298; WAN024DUI; Start 133; Stop 157
caatttcaaatcaacatccactcca

SEQ ID NO: 379217 - DNA, 25 bp, Artificial
  probe
  misc_feature (1)..(25): SEQ ID NO: 4298; WAN024DUI; Start 120; Stop 144
tttcttctggtggcaatttcaaatc

SEQ ID NO: 379218 - DNA, 25 bp, Artificial
  probe
  misc_feature (1)..(25): SEQ ID NO: 4298; WAN024DUI; Start 119; Stop 143
ctttcttctggtggcaatttcaaat

SEQ ID NO: 379219 - DNA, 25 bp, Artificial
  probe
  misc_feature (1)..(25): SEQ ID NO: 4298; WAN024DUI; Start 132; Stop 156
gcaatttcaaatcaacatccactcc

SEQ ID NO: 379220 - DNA, 25 bp, Artificial
  probe
  misc_feature (1)..(25): SEQ ID NO: 4298; WAN024DUI; Start 131; Stop 155
ggcaatttcaaatcaacatccactc

SEQ ID NO: 379221 - DNA, 25 bp, Artificial
  probe
  misc_feature (1)..(25): SEQ ID NO: 4298; WAN024DUI; Start 126; Stop 150
ctggtggcaatttcaaatcaacatc

SEQ ID NO: 379222 - DNA, 25 bp, Artificial
  probe
  misc_feature (1)..(25): SEQ ID NO: 4298; WAN024DUI; Start 123; Stop 147
cttctggtggcaatttcaaatcaac

SEQ ID NO: 379223 - DNA, 25 bp, Artificial
  probe
  misc_feature (1)..(25): SEQ ID NO: 4298; WAN024DUI; Start 122; Stop 146
tcttctggtggcaatttcaaatcaa

SEQ ID NO: 379224 - DNA, 25 bp, Artificial
  probe
  misc_feature (1)..(25): SEQ ID NO: 4298; WAN024DUI; Start 121; Stop 145
ttcttctggtggcaatttcaaatca

SEQ ID NO: 379225 - DNA, 25 bp, Artificial
  probe
  misc_feature (1)..(25): SEQ ID NO: 4298; WAN024DUI; Start 44; Stop 68
tccaatttcttagccatgtagtctt

SEQ ID NO: 379226 - DNA, 25 bp, Artificial
  probe
  misc_feature (1)..(25): SEQ ID NO: 4298; WAN024DUI; Start 43; Stop 67
ttccaatttcttagccatgtagtct

SEQ ID NO: 379227 - DNA, 25 bp, Artificial
  probe
  misc_feature (1)..(25): SEQ ID NO: 4298; WAN024DUI; Start 92; Stop 116
tttccgttgataaccaagtcagaag

SEQ ID NO: 379228 - DNA, 25 bp, Artificial
  probe
  misc_feature (1)..(25): SEQ ID NO: 4298; WAN024DUI; Start 91; Stop 115
ctttccgttgataaccaagtcagaa

SEQ ID NO: 379229 - DNA, 25 bp, Artificial
  probe
  misc_feature (1)..(25): SEQ ID NO: 4298; WAN024DUI; Start 42; Stop 66
tttccaatttcttagccatgtagtc

SEQ ID NO: 379230 - DNA, 25 bp, Artificial
  probe
  misc_feature (1)..(25): SEQ ID NO: 4298; WAN024DUI; Start 118; Stop 142
actttcttctggtggcaatttcaaa

SEQ ID NO: 379231 - DNA, 25 bp, Artificial
  probe
  misc_feature (1)..(25): SEQ ID NO: 4298; WAN024DUI; Start 117; Stop 141
aactttcttctggtggcaatttcaa

SEQ ID NO: 379232 - DNA, 25 bp, Artificial
  probe
  misc_feature (1)..(25): SEQ ID NO: 4298; WAN024DUI; Start 125; Stop 149
tctggtggcaatttcaaatcaacat

SEQ ID NO: 379233 - DNA, 25 bp, Artificial
  probe
  misc_feature (1)..(25): SEQ ID NO: 4298; WAN024DUI; Start 135; Stop 159
atttcaaatcaacatccactccagc

SEQ ID NO: 379234 - DNA, 25 bp, Artificial
  probe
  misc_feature (1)..(25): SEQ ID NO: 4298; WAN024DUI; Start 45; Stop 69
ccaatttcttagccatgtagtcttg

SEQ ID NO: 379235 - DNA, 25 bp, Artificial
  probe
  misc_feature (1)..(25): SEQ ID NO: 4298; WAN024DUI; Start 124; Stop 148
ttctggtggcaatttcaaatcaaca

SEQ ID NO: 379236 - DNA, 25 bp, Artificial
  probe
  misc_feature (1)..(25): SEQ ID NO: 4298; WAN024DUI; Start 97; Stop 121
gttgataaccaagtcagaagaactt

SEQ ID NO: 379237 - DNA, 25 bp, Artificial
  probe
  misc_feature (1)..(25): SEQ ID NO: 4298; WAN024DUI; Start 116; Stop 140
gaactttcttctggtggcaatttca

SEQ ID NO: 379238 - DNA, 25 bp, Artificial
  probe
  misc_feature (1)..(25): SEQ ID NO: 4298; WAN024DUI; Start 153; Stop 177
ctccagcttctttgaaataaccttt

SEQ ID NO: 379239 - DNA, 25 bp, Artificial
  probe
  misc_feature (1)..(25): SEQ ID NO: 4298; WAN024DUI; Start 148; Stop 172
atccactccagcttctttgaaataa

SEQ ID NO: 379240 - DNA, 25 bp, Artificial
  probe
  misc_feature (1)..(25): SEQ ID NO: 4298; WAN024DUI; Start 190; Stop 214
ataaagccctgtgtggttggtattt

SEQ ID NO: 379241 - DNA, 25 bp, Artificial
  probe
  misc_feature (1)..(25): SEQ ID NO: 4298; WAN024DUI; Start 152; Stop 176
actccagcttctttgaaataacctt

SEQ ID NO: 379242 - DNA, 25 bp, Artificial
  probe
  misc_feature (1)..(25): SEQ ID NO: 4298; WAN024DUI; Start 147; Stop 171
catccactccagcttctttgaaata

SEQ ID NO: 379243 - DNA, 25 bp, Artificial
  probe
  misc_feature (1)..(25): SEQ ID NO: 4298; WAN024DUI; Start 151; Stop 175
cactccagcttctttgaaataacct

SEQ ID NO: 379244 - DNA, 25 bp, Artificial
  probe
  misc_feature (1)..(25): SEQ ID NO: 4299; WAN024G3V; Start 46; Stop 70
catatcgtaggcagaagtgtagtaa

SEQ ID NO: 379245 - DNA, 25 bp, Artificial
  probe
  misc_feature (1)..(25): SEQ ID NO: 4299; WAN024G3V; Start 42; Stop 66
tatccatatcgtaggcagaagtgta

SEQ ID NO: 379246 - DNA, 25 bp, Artificial
  probe
  misc_feature (1)..(25): SEQ ID NO: 4299; WAN024G3V; Start 47; Stop 71
atatcgtaggcagaagtgtagtaag

SEQ ID NO: 379247 - DNA, 25 bp, Artificial
  probe
  misc_feature (1)..(25): SEQ ID NO: 4299; WAN024G3V; Start 52; Stop 76
gtaggcagaagtgtagtaaggaatg

SEQ ID NO: 379248 - DNA, 25 bp, Artificial
  probe
  misc_feature (1)..(25): SEQ ID NO: 4299; WAN024G3V; Start 40; Stop 64
catatccatatcgtaggcagaagtg

SEQ ID NO: 379249 - DNA, 25 bp, Artificial
  probe
  misc_feature (1)..(25): SEQ ID NO: 4299; WAN024G3V; Start 41; Stop 65
atatccatatcgtaggcagaagtgt

SEQ ID NO: 379250 - DNA, 25 bp, Artificial
  probe
  misc_feature (1)..(25): SEQ ID NO: 4299; WAN024G3V; Start 48; Stop 72
tatcgtaggcagaagtgtagtaagg

SEQ ID NO: 379251 - DNA, 25 bp, Artificial
  probe
  misc_feature (1)..(25): SEQ ID NO: 4299; WAN024G3V; Start 45; Stop 69
ccatatcgtaggcagaagtgtagta

SEQ ID NO: 379252 - DNA, 25 bp, Artificial
  probe
  misc_feature (1)..(25): SEQ ID NO: 4299; WAN024G3V; Start 53; Stop 77
taggcagaagtgtagtaaggaatgg

SEQ ID NO: 379253 - DNA, 25 bp, Artificial
  probe
  misc_feature (1)..(25): SEQ ID NO: 4299; WAN024G3V; Start 43; Stop 67
atccatatcgtaggcagaagtgtag

SEQ ID NO: 379254 - DNA, 25 bp, Artificial
  probe
  misc_feature (1)..(25): SEQ ID NO: 4299; WAN024G3V; Start 51; Stop 75
cgtaggcagaagtgtagtaaggaat

SEQ ID NO: 379255 - DNA, 25 bp, Artificial
  probe
  misc_feature (1)..(25): SEQ ID NO: 4299; WAN024G3V; Start 39; Stop 63
gcatatccatatcgtaggcagaagt

SEQ ID NO: 379256 - DNA, 25 bp, Artificial
  probe
  misc_feature (1)..(25): SEQ ID NO: 4299; WAN024G3V; Start 55; Stop 79
ggcagaagtgtagtaaggaatggtt

SEQ ID NO: 379257 - DNA, 25 bp, Artificial
  probe
  misc_feature (1)..(25): SEQ ID NO: 4299; WAN024G3V; Start 49; Stop 73
atcgtaggcagaagtgtagtaagga

SEQ ID NO: 379258 - DNA, 25 bp, Artificial
  probe
  misc_feature (1)..(25): SEQ ID NO: 4299; WAN024G3V; Start 178; Stop 202
gtcgttgatatagctgatagaacca

SEQ ID NO: 379259 - DNA, 25 bp, Artificial
  probe
  misc_feature (1)..(25): SEQ ID NO: 4299; WAN024G3V; Start 44; Stop 68
tccatatcgtaggcagaagtgtagt

SEQ ID NO: 379260 - DNA, 25 bp, Artificial
  probe
  misc_feature (1)..(25): SEQ ID NO: 4299; WAN024G3V; Start 50; Stop 74
tcgtaggcagaagtgtagtaaggaa

SEQ ID NO: 379261 - DNA, 25 bp, Artificial
  probe
  misc_feature (1)..(25): SEQ ID NO: 4299; WAN024G3V; Start 179; Stop 203
tcgttgatatagctgatagaaccat

SEQ ID NO: 379262 - DNA, 25 bp, Artificial
  probe
  misc_feature (1)..(25): SEQ ID NO: 4299; WAN024G3V; Start 177; Stop 201
cgtcgttgatatagctgatagaacc

SEQ ID NO: 379263 - DNA, 25 bp, Artificial
  probe
  misc_feature (1)..(25): SEQ ID NO: 4299; WAN024G3V; Start 175; Stop 199
aacgtcgttgatatagctgatagaa

SEQ ID NO: 379264 - DNA, 25 bp, Artificial
  probe
  misc_feature (1)..(25): SEQ ID NO: 4299; WAN024G3V; Start 176; Stop 200
acgtcgttgatatagctgatagaac

SEQ ID NO: 379265 - DNA, 25 bp, Artificial
  probe
  misc_feature (1)..(25): SEQ ID NO: 4299; WAN024G3V; Start 60; Stop 84
aagtgtagtaaggaatggtttctgt

SEQ ID NO: 379266 - DNA, 25 bp, Artificial
  probe
  misc_feature (1)..(25): SEQ ID NO: 4299; WAN024G3V; Start 180; Stop 204
cgttgatatagctgatagaaccatt

SEQ ID NO: 379267 - DNA, 25 bp, Artificial
  probe
  misc_feature (1)..(25): SEQ ID NO: 4299; WAN024G3V; Start 56; Stop 80
gcagaagtgtagtaaggaatggttt

SEQ ID NO: 379268 - DNA, 25 bp, Artificial
  probe
  misc_feature (1)..(25): SEQ ID NO: 4299; WAN024G3V; Start 28; Stop 52
gatgactttacgcatatccatatcg

SEQ ID NO: 379269 - DNA, 25 bp, Artificial
  probe
  misc_feature (1)..(25): SEQ ID NO: 4299; WAN024G3V; Start 27; Stop 51
cgatgactttacgcatatccatatc

SEQ ID NO: 379270 - DNA, 25 bp, Artificial
  probe
  misc_feature (1)..(25): SEQ ID NO: 4299; WAN024G3V; Start 59; Stop 83
gaagtgtagtaaggaatggtttctg

SEQ ID NO: 379271 - DNA, 25 bp, Artificial
  probe
  misc_feature (1)..(25): SEQ ID NO: 4299; WAN024G3V; Start 57; Stop 81
cagaagtgtagtaaggaatggtttc

SEQ ID NO: 379272 - DNA, 25 bp, Artificial
  probe
  misc_feature (1)..(25): SEQ ID NO: 4299; WAN024G3V; Start 38; Stop 62
cgcatatccatatcgtaggcagaag

SEQ ID NO: 379273 - DNA, 25 bp, Artificial
  probe
  misc_feature (1)..(25): SEQ ID NO: 4299; WAN024G3V; Start 66; Stop 90
agtaaggaatggtttctgtagacaa

SEQ ID NO: 379274 - DNA, 25 bp, Artificial
  probe
  misc_feature (1)..(25): SEQ ID NO: 4299; WAN024G3V; Start 61; Stop 85
agtgtagtaaggaatggtttctgta

SEQ ID NO: 379275 - DNA, 25 bp, Artificial
  probe
  misc_feature (1)..(25): SEQ ID NO: 4299; WAN024G3V; Start 67; Stop 91
gtaaggaatggtttctgtagacaag

SEQ ID NO: 379276 - DNA, 25 bp, Artificial
  probe
  misc_feature (1)..(25): SEQ ID NO: 4299; WAN024G3V; Start 54; Stop 78
aggcagaagtgtagtaaggaatggt

SEQ ID NO: 379277 - DNA, 25 bp, Artificial
  probe
  misc_feature (1)..(25): SEQ ID NO: 4300; WAN024CHY; Start 61; Stop 85
ttcatcatcaaccaagtaagtctga

SEQ ID NO: 379278 - DNA, 25 bp, Artificial
  probe
  misc_feature (1)..(25): SEQ ID NO: 4300; WAN024CHY; Start 66; Stop 90
catcaaccaagtaagtctgaccata

SEQ ID NO: 379279 - DNA, 25 bp, Artificial
  probe
  misc_feature (1)..(25): SEQ ID NO: 4300; WAN024CHY; Start 67; Stop 91
atcaaccaagtaagtctgaccataa

SEQ ID NO: 379280 - DNA, 25 bp, Artificial
  probe
  misc_feature (1)..(25): SEQ ID NO: 4300; WAN024CHY; Start 62; Stop 86
tcatcatcaaccaagtaagtctgac

SEQ ID NO: 379281 - DNA, 25 bp, Artificial
  probe
  misc_feature (1)..(25): SEQ ID NO: 4300; WAN024CHY; Start 63; Stop 87
catcatcaaccaagtaagtctgacc

SEQ ID NO: 379282 - DNA, 25 bp, Artificial
  probe
  misc_feature (1)..(25): SEQ ID NO: 4300; WAN024CHY; Start 65; Stop 89
tcatcaaccaagtaagtctgaccat

SEQ ID NO: 379283 - DNA, 25 bp, Artificial
  probe
  misc_feature (1)..(25): SEQ ID NO: 4300; WAN024CHY; Start 64; Stop 88
atcatcaaccaagtaagtctgacca

SEQ ID NO: 379284 - DNA, 25 bp, Artificial
  probe
  misc_feature (1)..(25): SEQ ID NO: 4300; WAN024CHY; Start 60; Stop 84
tttcatcatcaaccaagtaagtctg

SEQ ID NO: 379285 - DNA, 25 bp, Artificial
  probe
  misc_feature (1)..(25): SEQ ID NO: 4300; WAN024CHY; Start 69; Stop 93
caaccaagtaagtctgaccataaag

SEQ ID NO: 379286 - DNA, 25 bp, Artificial
  probe
  misc_feature (1)..(25): SEQ ID NO: 4300; WAN024CHY; Start 38; Stop 62
ttaacacccttaccgtagaaagttt

SEQ ID NO: 379287 - DNA, 25 bp, Artificial
  probe
  misc_feature (1)..(25): SEQ ID NO: 4300; WAN024CHY; Start 37; Stop 61
tttaacacccttaccgtagaaagtt

SEQ ID NO: 379288 - DNA, 25 bp, Artificial
  probe
  misc_feature (1)..(25): SEQ ID NO: 4300; WAN024CHY; Start 59; Stop 83
gtttcatcatcaaccaagtaagtct

SEQ ID NO: 379289 - DNA, 25 bp, Artificial
  probe
  misc_feature (1)..(25): SEQ ID NO: 4300; WAN024CHY; Start 58; Stop 82
agtttcatcatcaaccaagtaagtc

SEQ ID NO: 379290 - DNA, 25 bp, Artificial
  probe
  misc_feature (1)..(25): SEQ ID NO: 4300; WAN024CHY; Start 70; Stop 94
aaccaagtaagtctgaccataaaga

SEQ ID NO: 379291 - DNA, 25 bp, Artificial
  probe
  misc_feature (1)..(25): SEQ ID NO: 4300; WAN024CHY; Start 68; Stop 92
tcaaccaagtaagtctgaccataaa

SEQ ID NO: 379292 - DNA, 25 bp, Artificial
  probe
  misc_feature (1)..(25): SEQ ID NO: 4300; WAN024CHY; Start 57; Stop 81
aagtttcatcatcaaccaagtaagt

SEQ ID NO: 379293 - DNA, 25 bp, Artificial
  probe
  misc_feature (1)..(25): SEQ ID NO: 4300; WAN024CHY; Start 45; Stop 69
ccttaccgtagaaagtttcatcatc

SEQ ID NO: 379294 - DNA, 25 bp, Artificial
  probe
  misc_feature (1)..(25): SEQ ID NO: 4300; WAN024CHY; Start 51; Stop 75
cgtagaaagtttcatcatcaaccaa

SEQ ID NO: 379295 - DNA, 25 bp, Artificial
  probe
  misc_feature (1)..(25): SEQ ID NO: 4300; WAN024CHY; Start 44; Stop 68
cccttaccgtagaaagtttcatcat

SEQ ID NO: 379296 - DNA, 25 bp, Artificial
  probe
  misc_feature (1)..(25): SEQ ID NO: 4300; WAN024CHY; Start 39; Stop 63
taacacccttaccgtagaaagtttc

SEQ ID NO: 379297 - DNA, 25 bp, Artificial
  probe
  misc_feature (1)..(25): SEQ ID NO: 4300; WAN024CHY; Start 138; Stop 162
ggtatttagccaaacggatgtcaaa

SEQ ID NO: 379298 - DNA, 25 bp, Artificial
  probe
  misc_feature (1)..(25): SEQ ID NO: 4300; WAN024CHY; Start 48; Stop 72
taccgtagaaagtttcatcatcaac

SEQ ID NO: 379299 - DNA, 25 bp, Artificial
  probe
  misc_feature (1)..(25): SEQ ID NO: 4300; WAN024CHY; Start 46; Stop 70
cttaccgtagaaagtttcatcatca

SEQ ID NO: 379300 - DNA, 25 bp, Artificial
  probe
  misc_feature (1)..(25): SEQ ID NO: 4300; WAN024CHY; Start 50; Stop 74
ccgtagaaagtttcatcatcaacca

SEQ ID NO: 379301 - DNA, 25 bp, Artificial
  probe
  misc_feature (1)..(25): SEQ ID NO: 4300; WAN024CHY; Start 49; Stop 73
accgtagaaagtttcatcatcaacc

SEQ ID NO: 379302 - DNA, 25 bp, Artificial
  probe
  misc_feature (1)..(25): SEQ ID NO: 4300; WAN024CHY; Start 42; Stop 66
cacccttaccgtagaaagtttcatc

SEQ ID NO: 379303 - DNA, 25 bp, Artificial
  probe
  misc_feature (1)..(25): SEQ ID NO: 4300; WAN024CHY; Start 54; Stop 78
agaaagtttcatcatcaaccaagta

SEQ ID NO: 379304 - DNA, 25 bp, Artificial
  probe
  misc_feature (1)..(25): SEQ ID NO: 4300; WAN024CHY; Start 53; Stop 77
tagaaagtttcatcatcaaccaagt

SEQ ID NO: 379305 - DNA, 25 bp, Artificial
  probe
  misc_feature (1)..(25): SEQ ID NO: 4300; WAN024CHY; Start 47; Stop 71
ttaccgtagaaagtttcatcatcaa

SEQ ID NO: 379306 - DNA, 25 bp, Artificial
  probe
  misc_feature (1)..(25): SEQ ID NO: 4300; WAN024CHY; Start 132; Stop 156
aaaggaggtatttagccaaacggat

SEQ ID NO: 379307 - DNA, 25 bp, Artificial
  probe
  misc_feature (1)..(25): SEQ ID NO: 4300; WAN024CHY; Start 43; Stop 67
acccttaccgtagaaagtttcatca

SEQ ID NO: 379308 - DNA, 25 bp, Artificial
  probe
  misc_feature (1)..(25): SEQ ID NO: 4300; WAN024CHY; Start 56; Stop 80
aaagtttcatcatcaaccaagtaag

SEQ ID NO: 379309 - DNA, 25 bp, Artificial
  probe
  misc_feature (1)..(25): SEQ ID NO: 4300; WAN024CHY; Start 52; Stop 76
gtagaaagtttcatcatcaaccaag

SEQ ID NO: 379310 - DNA, 25 bp, Artificial
  probe
  misc_feature (1)..(25): SEQ ID NO: 4301; WAN024FJC; Start 264; Stop 288
tgatggcaaattcttcttcttgttt

SEQ ID NO: 379311 - DNA, 25 bp, Artificial
  probe
  misc_feature (1)..(25): SEQ ID NO: 4301; WAN024FJC; Start 263; Stop 287
gtgatggcaaattcttcttcttgtt

SEQ ID NO: 379312 - DNA, 25 bp, Artificial
  probe
  misc_feature (1)..(25): SEQ ID NO: 4301; WAN024FJC; Start 261; Stop 285
ttgtgatggcaaattcttcttcttg

SEQ ID NO: 379313 - DNA, 25 bp, Artificial
  probe
  misc_feature (1)..(25): SEQ ID NO: 4301; WAN024FJC; Start 260; Stop 284
gttgtgatggcaaattcttcttctt

SEQ ID NO: 379314 - DNA, 25 bp, Artificial
  probe
  misc_feature (1)..(25): SEQ ID NO: 4301; WAN024FJC; Start 258; Stop 282
aagttgtgatggcaaattcttcttc

SEQ ID NO: 379315 - DNA, 25 bp, Artificial
  probe
  misc_feature (1)..(25): SEQ ID NO: 4301; WAN024FJC; Start 288; Stop 312
tgtcaatctcaagaaccgtttcatt

SEQ ID NO: 379316 - DNA, 25 bp, Artificial
  probe
  misc_feature (1)..(25): SEQ ID NO: 4301; WAN024FJC; Start 285; Stop 309
gtttgtcaatctcaagaaccgtttc

SEQ ID NO: 379317 - DNA, 25 bp, Artificial
  probe
  misc_feature (1)..(25): SEQ ID NO: 4301; WAN024FJC; Start 287; Stop 311
ttgtcaatctcaagaaccgtttcat

SEQ ID NO: 379318 - DNA, 25 bp, Artificial
  probe
  misc_feature (1)..(25): SEQ ID NO: 4301; WAN024FJC; Start 275; Stop 299
tcttcttcttgtttgtcaatctcaa

SEQ ID NO: 379319 - DNA, 25 bp, Artificial
  probe
  misc_feature (1)..(25): SEQ ID NO: 4301; WAN024FJC; Start 274; Stop 298
ttcttcttcttgtttgtcaatctca

SEQ ID NO: 379320 - DNA, 25 bp, Artificial
  probe
  misc_feature (1)..(25): SEQ ID NO: 4301; WAN024FJC; Start 259; Stop 283
agttgtgatggcaaattcttcttct

SEQ ID NO: 379321 - DNA, 25 bp, Artificial
  probe
  misc_feature (1)..(25): SEQ ID NO: 4301; WAN024FJC; Start 286; Stop 310
tttgtcaatctcaagaaccgtttca

SEQ ID NO: 379322 - DNA, 25 bp, Artificial
  probe
  misc_feature (1)..(25): SEQ ID NO: 4301; WAN024FJC; Start 262; Stop 286
tgtgatggcaaattcttcttcttgt

SEQ ID NO: 379323 - DNA, 25 bp, Artificial
  probe
  misc_feature (1)..(25): SEQ ID NO: 4301; WAN024FJC; Start 284; Stop 308
tgtttgtcaatctcaagaaccgttt

SEQ ID NO: 379324 - DNA, 25 bp, Artificial
  probe
  misc_feature (1)..(25): SEQ ID NO: 4301; WAN024FJC; Start 283; Stop 307
ttgtttgtcaatctcaagaaccgtt

SEQ ID NO: 379325 - DNA, 25 bp, Artificial
  probe
  misc_feature (1)..(25): SEQ ID NO: 4301; WAN024FJC; Start 104; Stop 128
atcgtcactttcttaccagcgtatt

SEQ ID NO: 379326 - DNA, 25 bp, Artificial
  probe
  misc_feature (1)..(25): SEQ ID NO: 4301; WAN024FJC; Start 103; Stop 127
aatcgtcactttcttaccagcgtat

SEQ ID NO: 379327 - DNA, 25 bp, Artificial
  probe
  misc_feature (1)..(25): SEQ ID NO: 4301; WAN024FJC; Start 16; Stop 40
gaaattatctctgcggtgaacaagg

SEQ ID NO: 379328 - DNA, 25 bp, Artificial
  probe
  misc_feature (1)..(25): SEQ ID NO: 4301; WAN024FJC; Start 15; Stop 39
ggaaattatctctgcggtgaacaag

SEQ ID NO: 379329 - DNA, 25 bp, Artificial
  probe
  misc_feature (1)..(25): SEQ ID NO: 4301; WAN024FJC; Start 273; Stop 297
attcttcttcttgtttgtcaatctc

SEQ ID NO: 379330 - DNA, 25 bp, Artificial
  probe
  misc_feature (1)..(25): SEQ ID NO: 4301; WAN024FJC; Start 135; Stop 159
tgttagaaacgtggtagtggatatt

SEQ ID NO: 379331 - DNA, 25 bp, Artificial
  probe
  misc_feature (1)..(25): SEQ ID NO: 4301; WAN024FJC; Start 133; Stop 157
aatgttagaaacgtggtagtggata

SEQ ID NO: 379332 - DNA, 25 bp, Artificial
  probe
  misc_feature (1)..(25): SEQ ID NO: 4301; WAN024FJC; Start 272; Stop 296
aattcttcttcttgtttgtcaatct

SEQ ID NO: 379333 - DNA, 25 bp, Artificial
  probe
  misc_feature (1)..(25): SEQ ID NO: 4301; WAN024FJC; Start 134; Stop 158
atgttagaaacgtggtagtggatat

SEQ ID NO: 379334 - DNA, 25 bp, Artificial
  probe
  misc_feature (1)..(25): SEQ ID NO: 4301; WAN024FJC; Start 124; Stop 148
gtattgctgaatgttagaaacgtgg

SEQ ID NO: 379335 - DNA, 25 bp, Artificial
  probe
  misc_feature (1)..(25): SEQ ID NO: 4301; WAN024FJC; Start 132; Stop 156
gaatgttagaaacgtggtagtggat

SEQ ID NO: 379336 - DNA, 25 bp, Artificial
  probe
  misc_feature (1)..(25): SEQ ID NO: 4301; WAN024FJC; Start 212; Stop 236
ccacccatagcgatgataactgttt

SEQ ID NO: 379337 - DNA, 25 bp, Artificial
  probe
  misc_feature (1)..(25): SEQ ID NO: 4301; WAN024FJC; Start 102; Stop 126
gaatcgtcactttcttaccagcgta

SEQ ID NO: 379338 - DNA, 25 bp, Artificial
  probe
  misc_feature (1)..(25): SEQ ID NO: 4301; WAN024FJC; Start 126; Stop 150
attgctgaatgttagaaacgtggta

SEQ ID NO: 379339 - DNA, 25 bp, Artificial
  probe
  misc_feature (1)..(25): SEQ ID NO: 4301; WAN024FJC; Start 125; Stop 149
tattgctgaatgttagaaacgtggt

SEQ ID NO: 379340 - DNA, 25 bp, Artificial
  probe
  misc_feature (1)..(25): SEQ ID NO: 4301; WAN024FJC; Start 289; Stop 313
gtcaatctcaagaaccgtttcattg

SEQ ID NO: 379341 - DNA, 25 bp, Artificial
  probe
  misc_feature (1)..(25): SEQ ID NO: 4301; WAN024FJC; Start 105; Stop 129
tcgtcactttcttaccagcgtattg

SEQ ID NO: 379342 - DNA, 25 bp, Artificial
  probe
  misc_feature (1)..(25): SEQ ID NO: 4301; WAN024FJC; Start 136; Stop 160
gttagaaacgtggtagtggatattt

SEQ ID NO: 379343 - DNA, 25 bp, Artificial
  probe
  misc_feature (1)..(25): SEQ ID NO: 4302; WAN024C4D; Start 1658; Stop 1682
cttattatacttcggcacattggtt

SEQ ID NO: 379344 - DNA, 25 bp, Artificial
  probe
  misc_feature (1)..(25): SEQ ID NO: 4302; WAN024C4D; Start 2863; Stop 2887
gcgattaagtggattgaagaacatt

SEQ ID NO: 379345 - DNA, 25 bp, Artificial
  probe
  misc_feature (1)..(25): SEQ ID NO: 4302; WAN024C4D; Start 2794; Stop 2818
gattcactatggtctaatgctcaag

SEQ ID NO: 379346 - DNA, 25 bp, Artificial
  probe
  misc_feature (1)..(25): SEQ ID NO: 4302; WAN024C4D; Start 1440; Stop 1464
aggagatacattaacaggtaagtgg

SEQ ID NO: 379347 - DNA, 25 bp, Artificial
  probe
  misc_feature (1)..(25): SEQ ID NO: 4302; WAN024C4D; Start 1657; Stop 1681
ccttattatacttcggcacattggt

SEQ ID NO: 379348 - DNA, 25 bp, Artificial
  probe
  misc_feature (1)..(25): SEQ ID NO: 4302; WAN024C4D; Start 1438; Stop 1462
ggaggagatacattaacaggtaagt

SEQ ID NO: 379349 - DNA, 25 bp, Artificial
  probe
  misc_feature (1)..(25): SEQ ID NO: 4302; WAN024C4D; Start 2797; Stop 2821
tcactatggtctaatgctcaagatg

SEQ ID NO: 379350 - DNA, 25 bp, Artificial
  probe
  misc_feature (1)..(25): SEQ ID NO: 4302; WAN024C4D; Start 1661; Stop 1685
attatacttcggcacattggttaag

SEQ ID NO: 379351 - DNA, 25 bp, Artificial
  probe
  misc_feature (1)..(25): SEQ ID NO: 4302; WAN024C4D; Start 1639; Stop 1663
tacactgctggtaatatgccttatt

SEQ ID NO: 379352 - DNA, 25 bp, Artificial
  probe
  misc_feature (1)..(25): SEQ ID NO: 4302; WAN024C4D; Start 2862; Stop 2886
tgcgattaagtggattgaagaacat

SEQ ID NO: 379353 - DNA, 25 bp, Artificial
  probe
  misc_feature (1)..(25): SEQ ID NO: 4302; WAN024C4D; Start 2796; Stop 2820
ttcactatggtctaatgctcaagat

SEQ ID NO: 379354 - DNA, 25 bp, Artificial
  probe
  misc_feature (1)..(25): SEQ ID NO: 4302; WAN024C4D; Start 2795; Stop 2819
attcactatggtctaatgctcaaga

SEQ ID NO: 379355 - DNA, 25 bp, Artificial
  probe
  misc_feature (1)..(25): SEQ ID NO: 4302; WAN024C4D; Start 2793; Stop 2817
agattcactatggtctaatgctcaa

SEQ ID NO: 379356 - DNA, 25 bp, Artificial
  probe
  misc_feature (1)..(25): SEQ ID NO: 4302; WAN024C4D; Start 2792; Stop 2816
aagattcactatggtctaatgctca

SEQ ID NO: 379357 - DNA, 25 bp, Artificial
  probe
  misc_feature (1)..(25): SEQ ID NO: 4302; WAN024C4D; Start 1320; Stop 1344
tcctaatgattggtcagaagttgat

SEQ ID NO: 379358 - DNA, 25 bp, Artificial
  probe
  misc_feature (1)..(25): SEQ ID NO: 4302; WAN024C4D; Start 1319; Stop 1343
atcctaatgattggtcagaagttga

SEQ ID NO: 379359 - DNA, 25 bp, Artificial
  probe
  misc_feature (1)..(25): SEQ ID NO: 4302; WAN024C4D; Start 2496; Stop 2520
tggtagccgtattcagattaaggaa

SEQ ID NO: 379360 - DNA, 25 bp, Artificial
  probe
  misc_feature (1)..(25): SEQ ID NO: 4302; WAN024C4D; Start 1439; Stop 1463
gaggagatacattaacaggtaagtg

SEQ ID NO: 379361 - DNA, 25 bp, Artificial
  probe
  misc_feature (1)..(25): SEQ ID NO: 4302; WAN024C4D; Start 2113; Stop 2137
ggagatagacaatggttgactgaac

SEQ ID NO: 379362 - DNA, 25 bp, Artificial
  probe
  misc_feature (1)..(25): SEQ ID NO: 4302; WAN024C4D; Start 2112; Stop 2136
aggagatagacaatggttgactgaa

SEQ ID NO: 379363 - DNA, 25 bp, Artificial
  probe
  misc_feature (1)..(25): SEQ ID NO: 4302; WAN024C4D; Start 2111; Stop 2135
aaggagatagacaatggttgactga

SEQ ID NO: 379364 - DNA, 25 bp, Artificial
  probe
  misc_feature (1)..(25): SEQ ID NO: 4302; WAN024C4D; Start 2110; Stop 2134
caaggagatagacaatggttgactg

SEQ ID NO: 379365 - DNA, 25 bp, Artificial
  probe
  misc_feature (1)..(25): SEQ ID NO: 4302; WAN024C4D; Start 1659; Stop 1683
ttattatacttcggcacattggtta

SEQ ID NO: 379366 - DNA, 25 bp, Artificial
  probe
  misc_feature (1)..(25): SEQ ID NO: 4302; WAN024C4D; Start 2048; Stop 2072
cttggaagtggtatgagacaggtaa

SEQ ID NO: 379367 - DNA, 25 bp, Artificial
  probe
  misc_feature (1)..(25): SEQ ID NO: 4302; WAN024C4D; Start 1660; Stop 1684
tattatacttcggcacattggttaa

SEQ ID NO: 379368 - DNA, 25 bp, Artificial
  probe
  misc_feature (1)..(25): SEQ ID NO: 4302; WAN024C4D; Start 2798; Stop 2822
cactatggtctaatgctcaagatgc

SEQ ID NO: 379369 - DNA, 25 bp, Artificial
  probe
  misc_feature (1)..(25): SEQ ID NO: 4302; WAN024C4D; Start 2861; Stop 2885
gtgcgattaagtggattgaagaaca

SEQ ID NO: 379370 - DNA, 25 bp, Artificial
  probe
  misc_feature (1)..(25): SEQ ID NO: 4302; WAN024C4D; Start 1502; Stop 1526
tacagttacatccagatgatcttcc

SEQ ID NO: 379371 - DNA, 25 bp, Artificial
  probe
  misc_feature (1)..(25): SEQ ID NO: 4302; WAN024C4D; Start 1504; Stop 1528
cagttacatccagatgatcttccta

SEQ ID NO: 379372 - DNA, 25 bp, Artificial
  probe
  misc_feature (1)..(25): SEQ ID NO: 4302; WAN024C4D; Start 2106; Stop 2130
aagtcaaggagatagacaatggttg

SEQ ID NO: 379373 - DNA, 25 bp, Artificial
  probe
  misc_feature (1)..(25): SEQ ID NO: 4302; WAN024C4D; Start 2137; Stop 2161
ccagagtctatgctaggagaagaag

SEQ ID NO: 379374 - DNA, 25 bp, Artificial
  probe
  misc_feature (1)..(25): SEQ ID NO: 4302; WAN024C4D; Start 1503; Stop 1527
acagttacatccagatgatcttcct

SEQ ID NO: 379375 - DNA, 25 bp, Artificial
  probe
  misc_feature (1)..(25): SEQ ID NO: 4302; WAN024C4D; Start 1640; Stop 1664
acactgctggtaatatgccttatta

SEQ ID NO: 379376 - DNA, 25 bp, Artificial
  probe
  misc_feature (1)..(25): SEQ ID NO: 4303; WAN024F7W; Start 36; Stop 60
aaaacagtgttttgagcagcctacg

SEQ ID NO: 379377 - DNA, 25 bp, Artificial
  probe
  misc_feature (1)..(25): SEQ ID NO: 4304; WAN024F2A; Start 33; Stop 57
gataatccttgtcgtcataccagtt

SEQ ID NO: 379378 - DNA, 25 bp, Artificial
  probe
  misc_feature (1)..(25): SEQ ID NO: 4304; WAN024F2A; Start 259; Stop 283
ctctcttctgttcattcttcacaac

SEQ ID NO: 379379 - DNA, 25 bp, Artificial
  probe
  misc_feature (1)..(25): SEQ ID NO: 4304; WAN024F2A; Start 262; Stop 286
tcttctgttcattcttcacaacctt

SEQ ID NO: 379380 - DNA, 25 bp, Artificial
  probe
  misc_feature (1)..(25): SEQ ID NO: 4304; WAN024F2A; Start 258; Stop 282
cctctcttctgttcattcttcacaa

SEQ ID NO: 379381 - DNA, 25 bp, Artificial
  probe
  misc_feature (1)..(25): SEQ ID NO: 4304; WAN024F2A; Start 261; Stop 285
ctcttctgttcattcttcacaacct

SEQ ID NO: 379382 - DNA, 25 bp, Artificial
  probe
  misc_feature (1)..(25): SEQ ID NO: 4304; WAN024F2A; Start 260; Stop 284
tctcttctgttcattcttcacaacc

SEQ ID NO: 379383 - DNA, 25 bp, Artificial
  probe
  misc_feature (1)..(25): SEQ ID NO: 4304; WAN024F2A; Start 255; Stop 279
ctgcctctcttctgttcattcttca

SEQ ID NO: 379384 - DNA, 25 bp, Artificial
  probe
  misc_feature (1)..(25): SEQ ID NO: 4304; WAN024F2A; Start 254; Stop 278
actgcctctcttctgttcattcttc

SEQ ID NO: 379385 - DNA, 25 bp, Artificial
  probe
  misc_feature (1)..(25): SEQ ID NO: 4304; WAN024F2A; Start 253; Stop 277
gactgcctctcttctgttcattctt

SEQ ID NO: 379386 - DNA, 25 bp, Artificial
  probe
  misc_feature (1)..(25): SEQ ID NO: 4304; WAN024F2A; Start 256; Stop 280
tgcctctcttctgttcattcttcac

SEQ ID NO: 379387 - DNA, 25 bp, Artificial
  probe
  misc_feature (1)..(25): SEQ ID NO: 4304; WAN024F2A; Start 34; Stop 58
ataatccttgtcgtcataccagttt

SEQ ID NO: 379388 - DNA, 25 bp, Artificial
  probe
  misc_feature (1)..(25): SEQ ID NO: 4304; WAN024F2A; Start 99; Stop 123
tttcttctttcacttcacgaatgac

SEQ ID NO: 379389 - DNA, 25 bp, Artificial
  probe
  misc_feature (1)..(25): SEQ ID NO: 4304; WAN024F2A; Start 98; Stop 122
gtttcttctttcacttcacgaatga

SEQ ID NO: 379390 - DNA, 25 bp, Artificial
  probe
  misc_feature (1)..(25): SEQ ID NO: 4304; WAN024F2A; Start 97; Stop 121
agtttcttctttcacttcacgaatg

SEQ ID NO: 379391 - DNA, 25 bp, Artificial
  probe
  misc_feature (1)..(25): SEQ ID NO: 4304; WAN024F2A; Start 96; Stop 120
cagtttcttctttcacttcacgaat

SEQ ID NO: 379392 - DNA, 25 bp, Artificial
  probe
  misc_feature (1)..(25): SEQ ID NO: 4304; WAN024F2A; Start 89; Stop 113
atcagaccagtttcttctttcactt

SEQ ID NO: 379393 - DNA, 25 bp, Artificial
  probe
  misc_feature (1)..(25): SEQ ID NO: 4304; WAN024F2A; Start 257; Stop 281
gcctctcttctgttcattcttcaca

SEQ ID NO: 379394 - DNA, 25 bp, Artificial
  probe
  misc_feature (1)..(25): SEQ ID NO: 4304; WAN024F2A; Start 100; Stop 124
ttcttctttcacttcacgaatgaca

SEQ ID NO: 379395 - DNA, 25 bp, Artificial
  probe
  misc_feature (1)..(25): SEQ ID NO: 4304; WAN024F2A; Start 90; Stop 114
tcagaccagtttcttctttcacttc

SEQ ID NO: 379396 - DNA, 25 bp, Artificial
  probe
  misc_feature (1)..(25): SEQ ID NO: 4304; WAN024F2A; Start 263; Stop 287
cttctgttcattcttcacaaccttt

SEQ ID NO: 379397 - DNA, 25 bp, Artificial
  probe
  misc_feature (1)..(25): SEQ ID NO: 4304; WAN024F2A; Start 92; Stop 116
agaccagtttcttctttcacttcac

SEQ ID NO: 379398 - DNA, 25 bp, Artificial
  probe
  misc_feature (1)..(25): SEQ ID NO: 4304; WAN024F2A; Start 91; Stop 115
cagaccagtttcttctttcacttca

SEQ ID NO: 379399 - DNA, 25 bp, Artificial
  probe
  misc_feature (1)..(25): SEQ ID NO: 4304; WAN024F2A; Start 101; Stop 125
tcttctttcacttcacgaatgacag

SEQ ID NO: 379400 - DNA, 25 bp, Artificial
  probe
  misc_feature (1)..(25): SEQ ID NO: 4304; WAN024F2A; Start 88; Stop 112
gatcagaccagtttcttctttcact

SEQ ID NO: 379401 - DNA, 25 bp, Artificial
  probe
  misc_feature (1)..(25): SEQ ID NO: 4304; WAN024F2A; Start 265; Stop 289
tctgttcattcttcacaacctttaa

SEQ ID NO: 379402 - DNA, 25 bp, Artificial
  probe
  misc_feature (1)..(25): SEQ ID NO: 4304; WAN024F2A; Start 264; Stop 288
ttctgttcattcttcacaaccttta

SEQ ID NO: 379403 - DNA, 25 bp, Artificial
  probe
  misc_feature (1)..(25): SEQ ID NO: 4304; WAN024F2A; Start 95; Stop 119
ccagtttcttctttcacttcacgaa

SEQ ID NO: 379404 - DNA, 25 bp, Artificial
  probe
  misc_feature (1)..(25): SEQ ID NO: 4304; WAN024F2A; Start 268; Stop 292
gttcattcttcacaacctttaatct

SEQ ID NO: 379405 - DNA, 25 bp, Artificial
  probe
  misc_feature (1)..(25): SEQ ID NO: 4304; WAN024F2A; Start 32; Stop 56
cgataatccttgtcgtcataccagt

SEQ ID NO: 379406 - DNA, 25 bp, Artificial
  probe
  misc_feature (1)..(25): SEQ ID NO: 4304; WAN024F2A; Start 267; Stop 291
tgttcattcttcacaacctttaatc

SEQ ID NO: 379407 - DNA, 25 bp, Artificial
  probe
  misc_feature (1)..(25): SEQ ID NO: 4304; WAN024F2A; Start 266; Stop 290
ctgttcattcttcacaacctttaat

SEQ ID NO: 379408 - DNA, 25 bp, Artificial
  probe
  misc_feature (1)..(25): SEQ ID NO: 4304; WAN024F2A; Start 93; Stop 117
gaccagtttcttctttcacttcacg

SEQ ID NO: 379409 - DNA, 25 bp, Artificial
  probe
  misc_feature (1)..(25): SEQ ID NO: 4304; WAN024F2A; Start 291; Stop 315
ctttaatcataatgcagacttcccg

SEQ ID NO: 379410 - DNA, 25 bp, Artificial
  probe
  misc_feature (1)..(25): SEQ ID NO: 4305; WAN024FHU; Start 63; Stop 87
tagtcacttcttcacgaatagatgg

SEQ ID NO: 379411 - DNA, 25 bp, Artificial
  probe
  misc_feature (1)..(25): SEQ ID NO: 4305; WAN024FHU; Start 2; Stop 26
tgttcttcaatcaattccaacttgt

SEQ ID NO: 379412 - DNA, 25 bp, Artificial
  probe
  misc_feature (1)..(25): SEQ ID NO: 4305; WAN024FHU; Start 1; Stop 25
gtgttcttcaatcaattccaacttg

SEQ ID NO: 379413 - DNA, 25 bp, Artificial
  probe
  misc_feature (1)..(25): SEQ ID NO: 4305; WAN024FHU; Start 62; Stop 86
ttagtcacttcttcacgaatagatg

SEQ ID NO: 379414 - DNA, 25 bp, Artificial
  probe
  misc_feature (1)..(25): SEQ ID NO: 4305; WAN024FHU; Start 6; Stop 30
cttcaatcaattccaacttgtaagg

SEQ ID NO: 379415 - DNA, 25 bp, Artificial
  probe
  misc_feature (1)..(25): SEQ ID NO: 4305; WAN024FHU; Start 3; Stop 27
gttcttcaatcaattccaacttgta

SEQ ID NO: 379416 - DNA, 25 bp, Artificial
  probe
  misc_feature (1)..(25): SEQ ID NO: 4305; WAN024FHU; Start 5; Stop 29
tcttcaatcaattccaacttgtaag

SEQ ID NO: 379417 - DNA, 25 bp, Artificial
  probe
  misc_feature (1)..(25): SEQ ID NO: 4305; WAN024FHU; Start 169; Stop 193
agtatcgtagtagaaaccatcttcg

SEQ ID NO: 379418 - DNA, 25 bp, Artificial
  probe
  misc_feature (1)..(25): SEQ ID NO: 4305; WAN024FHU; Start 166; Stop 190
gtcagtatcgtagtagaaaccatct

SEQ ID NO: 379419 - DNA, 25 bp, Artificial
  probe
  misc_feature (1)..(25): SEQ ID NO: 4305; WAN024FHU; Start 4; Stop 28
ttcttcaatcaattccaacttgtaa

SEQ ID NO: 379420 - DNA, 25 bp, Artificial
  probe
  misc_feature (1)..(25): SEQ ID NO: 4305; WAN024FHU; Start 13; Stop 37
caattccaacttgtaagggtcattt

SEQ ID NO: 379421 - DNA, 25 bp, Artificial
  probe
  misc_feature (1)..(25): SEQ ID NO: 4305; WAN024FHU; Start 9; Stop 33
caatcaattccaacttgtaagggtc

SEQ ID NO: 379422 - DNA, 25 bp, Artificial
  probe
  misc_feature (1)..(25): SEQ ID NO: 4305; WAN024FHU; Start 7; Stop 31
ttcaatcaattccaacttgtaaggg

SEQ ID NO: 379423 - DNA, 25 bp, Artificial
  probe
  misc_feature (1)..(25): SEQ ID NO: 4305; WAN024FHU; Start 11; Stop 35
atcaattccaacttgtaagggtcat

SEQ ID NO: 379424 - DNA, 25 bp, Artificial
  probe
  misc_feature (1)..(25): SEQ ID NO: 4305; WAN024FHU; Start 12; Stop 36
tcaattccaacttgtaagggtcatt

SEQ ID NO: 379425 - DNA, 25 bp, Artificial
  probe
  misc_feature (1)..(25): SEQ ID NO: 4305; WAN024FHU; Start 10; Stop 34
aatcaattccaacttgtaagggtca

SEQ ID NO: 379426 - DNA, 25 bp, Artificial
  probe
  misc_feature (1)..(25): SEQ ID NO: 4305; WAN024FHU; Start 8; Stop 32
tcaatcaattccaacttgtaagggt

SEQ ID NO: 379427 - DNA, 25 bp, Artificial
  probe
  misc_feature (1)..(25): SEQ ID NO: 4305; WAN024FHU; Start 167; Stop 191
tcagtatcgtagtagaaaccatctt

SEQ ID NO: 379428 - DNA, 25 bp, Artificial
  probe
  misc_feature (1)..(25): SEQ ID NO: 4305; WAN024FHU; Start 58; Stop 82
gtctttagtcacttcttcacgaata

SEQ ID NO: 379429 - DNA, 25 bp, Artificial
  probe
  misc_feature (1)..(25): SEQ ID NO: 4305; WAN024FHU; Start 168; Stop 192
cagtatcgtagtagaaaccatcttc

SEQ ID NO: 379430 - DNA, 25 bp, Artificial
  probe
  misc_feature (1)..(25): SEQ ID NO: 4305; WAN024FHU; Start 66; Stop 90
tcacttcttcacgaatagatgggaa

SEQ ID NO: 379431 - DNA, 25 bp, Artificial
  probe
  misc_feature (1)..(25): SEQ ID NO: 4305; WAN024FHU; Start 59; Stop 83
tctttagtcacttcttcacgaatag

SEQ ID NO: 379432 - DNA, 25 bp, Artificial
  probe
  misc_feature (1)..(25): SEQ ID NO: 4305; WAN024FHU; Start 60; Stop 84
ctttagtcacttcttcacgaataga

SEQ ID NO: 379433 - DNA, 25 bp, Artificial
  probe
  misc_feature (1)..(25): SEQ ID NO: 4305; WAN024FHU; Start 129; Stop 153
gaggaaggtcttcgttagagatttg

SEQ ID NO: 379434 - DNA, 25 bp, Artificial
  probe
  misc_feature (1)..(25): SEQ ID NO: 4305; WAN024FHU; Start 130; Stop 154
aggaaggtcttcgttagagatttga

SEQ ID NO: 379435 - DNA, 25 bp, Artificial
  probe
  misc_feature (1)..(25): SEQ ID NO: 4305; WAN024FHU; Start 65; Stop 89
gtcacttcttcacgaatagatggga

SEQ ID NO: 379436 - DNA, 25 bp, Artificial
  probe
  misc_feature (1)..(25): SEQ ID NO: 4305; WAN024FHU; Start 64; Stop 88
agtcacttcttcacgaatagatggg

SEQ ID NO: 379437 - DNA, 25 bp, Artificial
  probe
  misc_feature (1)..(25): SEQ ID NO: 4305; WAN024FHU; Start 61; Stop 85
tttagtcacttcttcacgaatagat

SEQ ID NO: 379438 - DNA, 25 bp, Artificial
  probe
  misc_feature (1)..(25): SEQ ID NO: 4305; WAN024FHU; Start 131; Stop 155
ggaaggtcttcgttagagatttgac

SEQ ID NO: 379439 - DNA, 25 bp, Artificial
  probe
  misc_feature (1)..(25): SEQ ID NO: 4305; WAN024FHU; Start 53; Stop 77
gcctcgtctttagtcacttcttcac

SEQ ID NO: 379440 - DNA, 25 bp, Artificial
  probe
  misc_feature (1)..(25): SEQ ID NO: 4305; WAN024FHU; Start 84; Stop 108
atgggaagttttctttgacgatttt

SEQ ID NO: 379441 - DNA, 25 bp, Artificial
  probe
  misc_feature (1)..(25): SEQ ID NO: 4305; WAN024FHU; Start 83; Stop 107
gatgggaagttttctttgacgattt

SEQ ID NO: 379442 - DNA, 25 bp, Artificial
  probe
  misc_feature (1)..(25): SEQ ID NO: 4305; WAN024FHU; Start 14; Stop 38
aattccaacttgtaagggtcatttt

SEQ ID NO: 379443 - DNA, 25 bp, Artificial
  probe
  misc_feature (1)..(25): SEQ ID NO: 4306; WAN024AY4; Start 614; Stop 638
atgatgtagtagagattgccaagag

SEQ ID NO: 379444 - DNA, 25 bp, Artificial
  probe
  misc_feature (1)..(25): SEQ ID NO: 4306; WAN024AY4; Start 613; Stop 637
aatgatgtagtagagattgccaaga

SEQ ID NO: 379445 - DNA, 25 bp, Artificial
  probe
  misc_feature (1)..(25): SEQ ID NO: 4306; WAN024AY4; Start 616; Stop 640
gatgtagtagagattgccaagagta

SEQ ID NO: 379446 - DNA, 25 bp, Artificial
  probe
  misc_feature (1)..(25): SEQ ID NO: 4306; WAN024AY4; Start 618; Stop 642
tgtagtagagattgccaagagtatt

SEQ ID NO: 379447 - DNA, 25 bp, Artificial
  probe
  misc_feature (1)..(25): SEQ ID NO: 4306; WAN024AY4; Start 615; Stop 639
tgatgtagtagagattgccaagagt

SEQ ID NO: 379448 - DNA, 25 bp, Artificial
  probe
  misc_feature (1)..(25): SEQ ID NO: 4306; WAN024AY4; Start 617; Stop 641
atgtagtagagattgccaagagtat

SEQ ID NO: 379449 - DNA, 25 bp, Artificial
  probe
  misc_feature (1)..(25): SEQ ID NO: 4306; WAN024AY4; Start 612; Stop 636
taatgatgtagtagagattgccaag

SEQ ID NO: 379450 - DNA, 25 bp, Artificial
  probe
  misc_feature (1)..(25): SEQ ID NO: 4306; WAN024AY4; Start 619; Stop 643
gtagtagagattgccaagagtatta

SEQ ID NO: 379451 - DNA, 25 bp, Artificial
  probe
  misc_feature (1)..(25): SEQ ID NO: 4306; WAN024AY4; Start 34; Stop 58
tttattcagtgttgtgtattgggtg

SEQ ID NO: 379452 - DNA, 25 bp, Artificial
  probe
  misc_feature (1)..(25): SEQ ID NO: 4306; WAN024AY4; Start 624; Stop 648
agagattgccaagagtattaaacca

SEQ ID NO: 379453 - DNA, 25 bp, Artificial
  probe
  misc_feature (1)..(25): SEQ ID NO: 4306; WAN024AY4; Start 586; Stop 610
gcagttacaggtctctatttctatg

SEQ ID NO: 379454 - DNA, 25 bp, Artificial
  probe
  misc_feature (1)..(25): SEQ ID NO: 4306; WAN024AY4; Start 628; Stop 652
attgccaagagtattaaaccaagtc

SEQ ID NO: 379455 - DNA, 25 bp, Artificial
  probe
  misc_feature (1)..(25): SEQ ID NO: 4306; WAN024AY4; Start 627; Stop 651
gattgccaagagtattaaaccaagt

SEQ ID NO: 379456 - DNA, 25 bp, Artificial
  probe
  misc_feature (1)..(25): SEQ ID NO: 4306; WAN024AY4; Start 626; Stop 650
agattgccaagagtattaaaccaag

SEQ ID NO: 379457 - DNA, 25 bp, Artificial
  probe
  misc_feature (1)..(25): SEQ ID NO: 4306; WAN024AY4; Start 625; Stop 649
gagattgccaagagtattaaaccaa

SEQ ID NO: 379458 - DNA, 25 bp, Artificial
  probe
  misc_feature (1)..(25): SEQ ID NO: 4306; WAN024AY4; Start 35; Stop 59
ttattcagtgttgtgtattgggtga

SEQ ID NO: 379459 - DNA, 25 bp, Artificial
  probe
  misc_feature (1)..(25): SEQ ID NO: 4306; WAN024AY4; Start 620; Stop 644
tagtagagattgccaagagtattaa

SEQ ID NO: 379460 - DNA, 25 bp, Artificial
  probe
  misc_feature (1)..(25): SEQ ID NO: 4306; WAN024AY4; Start 623; Stop 647
tagagattgccaagagtattaaacc

SEQ ID NO: 379461 - DNA, 25 bp, Artificial
  probe
  misc_feature (1)..(25): SEQ ID NO: 4306; WAN024AY4; Start 634; Stop 658
aagagtattaaaccaagtcctcgtg

SEQ ID NO: 379462 - DNA, 25 bp, Artificial
  probe
  misc_feature (1)..(25): SEQ ID NO: 4306; WAN024AY4; Start 633; Stop 657
caagagtattaaaccaagtcctcgt

SEQ ID NO: 379463 - DNA, 25 bp, Artificial
  probe
  misc_feature (1)..(25): SEQ ID NO: 4306; WAN024AY4; Start 629; Stop 653
ttgccaagagtattaaaccaagtcc

SEQ ID NO: 379464 - DNA, 25 bp, Artificial
  probe
  misc_feature (1)..(25): SEQ ID NO: 4306; WAN024AY4; Start 66; Stop 90
aggaacgattgtacttatgaaaggt

SEQ ID NO: 379465 - DNA, 25 bp, Artificial
  probe
  misc_feature (1)..(25): SEQ ID NO: 4306; WAN024AY4; Start 61; Stop 85
acgaaaggaacgattgtacttatga

SEQ ID NO: 379466 - DNA, 25 bp, Artificial
  probe
  misc_feature (1)..(25): SEQ ID NO: 4306; WAN024AY4; Start 60; Stop 84
aacgaaaggaacgattgtacttatg

SEQ ID NO: 379467 - DNA, 25 bp, Artificial
  probe
  misc_feature (1)..(25): SEQ ID NO: 4306; WAN024AY4; Start 58; Stop 82
gaaacgaaaggaacgattgtactta

SEQ ID NO: 379468 - DNA, 25 bp, Artificial
  probe
  misc_feature (1)..(25): SEQ ID NO: 4306; WAN024AY4; Start 62; Stop 86
cgaaaggaacgattgtacttatgaa

SEQ ID NO: 379469 - DNA, 25 bp, Artificial
  probe
  misc_feature (1)..(25): SEQ ID NO: 4306; WAN024AY4; Start 630; Stop 654
tgccaagagtattaaaccaagtcct

SEQ ID NO: 379470 - DNA, 25 bp, Artificial
  probe
  misc_feature (1)..(25): SEQ ID NO: 4306; WAN024AY4; Start 632; Stop 656
ccaagagtattaaaccaagtcctcg

SEQ ID NO: 379471 - DNA, 25 bp, Artificial
  probe
  misc_feature (1)..(25): SEQ ID NO: 4306; WAN024AY4; Start 65; Stop 89
aaggaacgattgtacttatgaaagg

SEQ ID NO: 379472 - DNA, 25 bp, Artificial
  probe
  misc_feature (1)..(25): SEQ ID NO: 4306; WAN024AY4; Start 59; Stop 83
aaacgaaaggaacgattgtacttat

SEQ ID NO: 379473 - DNA, 25 bp, Artificial
  probe
  misc_feature (1)..(25): SEQ ID NO: 4306; WAN024AY4; Start 631; Stop 655
gccaagagtattaaaccaagtcctc

SEQ ID NO: 379474 - DNA, 25 bp, Artificial
  probe
  misc_feature (1)..(25): SEQ ID NO: 4306; WAN024AY4; Start 57; Stop 81
tgaaacgaaaggaacgattgtactt

SEQ ID NO: 379475 - DNA, 25 bp, Artificial
  probe
  misc_feature (1)..(25): SEQ ID NO: 4306; WAN024AY4; Start 67; Stop 91
ggaacgattgtacttatgaaaggta

SEQ ID NO: 379476 - DNA, 25 bp, Artificial
  probe
  misc_feature (1)..(25): SEQ ID NO: 4307; WAN024DRB; Start 22; Stop 46
cagaaattgatctctaacattacca

SEQ ID NO: 379477 - DNA, 25 bp, Artificial
  probe
  misc_feature (1)..(25): SEQ ID NO: 4307; WAN024DRB; Start 21; Stop 45
tcagaaattgatctctaacattacc

SEQ ID NO: 379478 - DNA, 25 bp, Artificial
  probe
  misc_feature (1)..(25): SEQ ID NO: 4307; WAN024DRB; Start 23; Stop 47
agaaattgatctctaacattaccaa

SEQ ID NO: 379479 - DNA, 25 bp, Artificial
  probe
  misc_feature (1)..(25): SEQ ID NO: 4307; WAN024DRB; Start 20; Stop 44
ttcagaaattgatctctaacattac

SEQ ID NO: 379480 - DNA, 25 bp, Artificial
  probe
  misc_feature (1)..(25): SEQ ID NO: 4307; WAN024DRB; Start 58; Stop 82
aaatatcttgacaagcaagggaaaa

SEQ ID NO: 379481 - DNA, 25 bp, Artificial
  probe
  misc_feature (1)..(25): SEQ ID NO: 4307; WAN024DRB; Start 57; Stop 81
aaaatatcttgacaagcaagggaaa

SEQ ID NO: 379482 - DNA, 25 bp, Artificial
  probe
  misc_feature (1)..(25): SEQ ID NO: 4307; WAN024DRB; Start 60; Stop 84
atatcttgacaagcaagggaaaatt

SEQ ID NO: 379483 - DNA, 25 bp, Artificial
  probe
  misc_feature (1)..(25): SEQ ID NO: 4307; WAN024DRB; Start 59; Stop 83
aatatcttgacaagcaagggaaaat

SEQ ID NO: 379484 - DNA, 25 bp, Artificial
  probe
  misc_feature (1)..(25): SEQ ID NO: 4307; WAN024DRB; Start 24; Stop 48
gaaattgatctctaacattaccaat

SEQ ID NO: 379485 - DNA, 25 bp, Artificial
  probe
  misc_feature (1)..(25): SEQ ID NO: 4307; WAN024DRB; Start 61; Stop 85
tatcttgacaagcaagggaaaattt

SEQ ID NO: 379486 - DNA, 25 bp, Artificial
  probe
  misc_feature (1)..(25): SEQ ID NO: 4307; WAN024DRB; Start 71; Stop 95
agcaagggaaaattttgttacaact

SEQ ID NO: 379487 - DNA, 25 bp, Artificial
  probe
  misc_feature (1)..(25): SEQ ID NO: 4307; WAN024DRB; Start 70; Stop 94
aagcaagggaaaattttgttacaac

SEQ ID NO: 379488 - DNA, 25 bp, Artificial
  probe
  misc_feature (1)..(25): SEQ ID NO: 4307; WAN024DRB; Start 69; Stop 93
caagcaagggaaaattttgttacaa

SEQ ID NO: 379489 - DNA, 25 bp, Artificial
  probe
  misc_feature (1)..(25): SEQ ID NO: 4307; WAN024DRB; Start 72; Stop 96
gcaagggaaaattttgttacaacta

SEQ ID NO: 379490 - DNA, 25 bp, Artificial
  probe
  misc_feature (1)..(25): SEQ ID NO: 4307; WAN024DRB; Start 73; Stop 97
caagggaaaattttgttacaactaa

SEQ ID NO: 379491 - DNA, 25 bp, Artificial
  probe
  misc_feature (1)..(25): SEQ ID NO: 4307; WAN024DRB; Start 68; Stop 92
acaagcaagggaaaattttgttaca

SEQ ID NO: 379492 - DNA, 25 bp, Artificial
  probe
  misc_feature (1)..(25): SEQ ID NO: 4307; WAN024DRB; Start 67; Stop 91
gacaagcaagggaaaattttgttac

SEQ ID NO: 379493 - DNA, 25 bp, Artificial
  probe
  misc_feature (1)..(25): SEQ ID NO: 4307; WAN024DRB; Start 66; Stop 90
tgacaagcaagggaaaattttgtta

SEQ ID NO: 379494 - DNA, 25 bp, Artificial
  probe
  misc_feature (1)..(25): SEQ ID NO: 4307; WAN024DRB; Start 75; Stop 99
agggaaaattttgttacaactaact

SEQ ID NO: 379495 - DNA, 25 bp, Artificial
  probe
  misc_feature (1)..(25): SEQ ID NO: 4307; WAN024DRB; Start 65; Stop 89
ttgacaagcaagggaaaattttgtt

SEQ ID NO: 379496 - DNA, 25 bp, Artificial
  probe
  misc_feature (1)..(25): SEQ ID NO: 4307; WAN024DRB; Start 62; Stop 86
atcttgacaagcaagggaaaatttt

SEQ ID NO: 379497 - DNA, 25 bp, Artificial
  probe
  misc_feature (1)..(25): SEQ ID NO: 4307; WAN024DRB; Start 63; Stop 87
tcttgacaagcaagggaaaattttg

SEQ ID NO: 379498 - DNA, 25 bp, Artificial
  probe
  misc_feature (1)..(25): SEQ ID NO: 4307; WAN024DRB; Start 64; Stop 88
cttgacaagcaagggaaaattttgt

SEQ ID NO: 379499 - DNA, 25 bp, Artificial
  probe
  misc_feature (1)..(25): SEQ ID NO: 4307; WAN024DRB; Start 74; Stop 98
aagggaaaattttgttacaactaac

SEQ ID NO: 379500 - DNA, 25 bp, Artificial
  probe
  misc_feature (1)..(25): SEQ ID NO: 4307; WAN024DRB; Start 76; Stop 100
gggaaaattttgttacaactaacta

SEQ ID NO: 379501 - DNA, 25 bp, Artificial
  probe
  misc_feature (1)..(25): SEQ ID NO: 4308; WAN024CTJ; Start 98; Stop 122
tactcataatccttaacaccgacag

SEQ ID NO: 379502 - DNA, 25 bp, Artificial
  probe
  misc_feature (1)..(25): SEQ ID NO: 4308; WAN024CTJ; Start 97; Stop 121
atactcataatccttaacaccgaca

SEQ ID NO: 379503 - DNA, 25 bp, Artificial
  probe
  misc_feature (1)..(25): SEQ ID NO: 4308; WAN024CTJ; Start 96; Stop 120
catactcataatccttaacaccgac

SEQ ID NO: 379504 - DNA, 25 bp, Artificial
  probe
  misc_feature (1)..(25): SEQ ID NO: 4308; WAN024CTJ; Start 95; Stop 119
tcatactcataatccttaacaccga

SEQ ID NO: 379505 - DNA, 25 bp, Artificial
  probe
  misc_feature (1)..(25): SEQ ID NO: 4308; WAN024CTJ; Start 99; Stop 123
actcataatccttaacaccgacaga

SEQ ID NO: 379506 - DNA, 25 bp, Artificial
  probe
  misc_feature (1)..(25): SEQ ID NO: 4308; WAN024CTJ; Start 94; Stop 118
atcatactcataatccttaacaccg

SEQ ID NO: 379507 - DNA, 25 bp, Artificial
  probe
  misc_feature (1)..(25): SEQ ID NO: 4308; WAN024CTJ; Start 32; Stop 56
tgaccatgagcaatatcaatagtga

SEQ ID NO: 379508 - DNA, 25 bp, Artificial
  probe
  misc_feature (1)..(25): SEQ ID NO: 4308; WAN024CTJ; Start 29; Stop 53
gcatgaccatgagcaatatcaatag

SEQ ID NO: 379509 - DNA, 25 bp, Artificial
  probe
  misc_feature (1)..(25): SEQ ID NO: 4308; WAN024CTJ; Start 31; Stop 55
atgaccatgagcaatatcaatagtg

SEQ ID NO: 379510 - DNA, 25 bp, Artificial
  probe
  misc_feature (1)..(25): SEQ ID NO: 4308; WAN024CTJ; Start 30; Stop 54
catgaccatgagcaatatcaatagt

SEQ ID NO: 379511 - DNA, 25 bp, Artificial
  probe
  misc_feature (1)..(25): SEQ ID NO: 4308; WAN024CTJ; Start 28; Stop 52
cgcatgaccatgagcaatatcaata

SEQ ID NO: 379512 - DNA, 25 bp, Artificial
  probe
  misc_feature (1)..(25): SEQ ID NO: 4308; WAN024CTJ; Start 194; Stop 218
tgcataatgtagaagtaaccacctt

SEQ ID NO: 379513 - DNA, 25 bp, Artificial
  probe
  misc_feature (1)..(25): SEQ ID NO: 4308; WAN024CTJ; Start 199; Stop 223
aatgtagaagtaaccacctttagcc

SEQ ID NO: 379514 - DNA, 25 bp, Artificial
  probe
  misc_feature (1)..(25): SEQ ID NO: 4308; WAN024CTJ; Start 195; Stop 219
gcataatgtagaagtaaccaccttt

SEQ ID NO: 379515 - DNA, 25 bp, Artificial
  probe
  misc_feature (1)..(25): SEQ ID NO: 4308; WAN024CTJ; Start 200; Stop 224
atgtagaagtaaccacctttagcca

SEQ ID NO: 379516 - DNA, 25 bp, Artificial
  probe
  misc_feature (1)..(25): SEQ ID NO: 4308; WAN024CTJ; Start 203; Stop 227
tagaagtaaccacctttagccagtt

SEQ ID NO: 379517 - DNA, 25 bp, Artificial
  probe
  misc_feature (1)..(25): SEQ ID NO: 4308; WAN024CTJ; Start 198; Stop 222
taatgtagaagtaaccacctttagc

SEQ ID NO: 379518 - DNA, 25 bp, Artificial
  probe
  misc_feature (1)..(25): SEQ ID NO: 4308; WAN024CTJ; Start 193; Stop 217
gtgcataatgtagaagtaaccacct

SEQ ID NO: 379519 - DNA, 25 bp, Artificial
  probe
  misc_feature (1)..(25): SEQ ID NO: 4308; WAN024CTJ; Start 24; Stop 48
tatccgcatgaccatgagcaatatc

SEQ ID NO: 379520 - DNA, 25 bp, Artificial
  probe
  misc_feature (1)..(25): SEQ ID NO: 4308; WAN024CTJ; Start 23; Stop 47
ctatccgcatgaccatgagcaatat

SEQ ID NO: 379521 - DNA, 25 bp, Artificial
  probe
  misc_feature (1)..(25): SEQ ID NO: 4308; WAN024CTJ; Start 5; Stop 29
tgaatcatagaaatcacgctatccg

SEQ ID NO: 379522 - DNA, 25 bp, Artificial
  probe
  misc_feature (1)..(25): SEQ ID NO: 4308; WAN024CTJ; Start 4; Stop 28
ttgaatcatagaaatcacgctatcc

SEQ ID NO: 379523 - DNA, 25 bp, Artificial
  probe
  misc_feature (1)..(25): SEQ ID NO: 4308; WAN024CTJ; Start 202; Stop 226
gtagaagtaaccacctttagccagt

SEQ ID NO: 379524 - DNA, 25 bp, Artificial
  probe
  misc_feature (1)..(25): SEQ ID NO: 4308; WAN024CTJ; Start 201; Stop 225
tgtagaagtaaccacctttagccag

SEQ ID NO: 379525 - DNA, 25 bp, Artificial
  probe
  misc_feature (1)..(25): SEQ ID NO: 4308; WAN024CTJ; Start 2; Stop 26
tgttgaatcatagaaatcacgctat

SEQ ID NO: 379526 - DNA, 25 bp, Artificial
  probe
  misc_feature (1)..(25): SEQ ID NO: 4308; WAN024CTJ; Start 1; Stop 25
gtgttgaatcatagaaatcacgcta

SEQ ID NO: 379527 - DNA, 25 bp, Artificial
  probe
  misc_feature (1)..(25): SEQ ID NO: 4308; WAN024CTJ; Start 93; Stop 117
aatcatactcataatccttaacacc

SEQ ID NO: 379528 - DNA, 25 bp, Artificial
  probe
  misc_feature (1)..(25): SEQ ID NO: 4308; WAN024CTJ; Start 33; Stop 57
gaccatgagcaatatcaatagtgat

SEQ ID NO: 379529 - DNA, 25 bp, Artificial
  probe
  misc_feature (1)..(25): SEQ ID NO: 4308; WAN024CTJ; Start 3; Stop 27
gttgaatcatagaaatcacgctatc

SEQ ID NO: 379530 - DNA, 25 bp, Artificial
  probe
  misc_feature (1)..(25): SEQ ID NO: 4308; WAN024CTJ; Start 189; Stop 213
aacggtgcataatgtagaagtaacc

SEQ ID NO: 379531 - DNA, 25 bp, Artificial
  probe
  misc_feature (1)..(25): SEQ ID NO: 4308; WAN024CTJ; Start 6; Stop 30
gaatcatagaaatcacgctatccgc

SEQ ID NO: 379532 - DNA, 25 bp, Artificial
  probe
  misc_feature (1)..(25): SEQ ID NO: 4308; WAN024CTJ; Start 188; Stop 212
aaacggtgcataatgtagaagtaac

SEQ ID NO: 379533 - DNA, 25 bp, Artificial
  probe
  misc_feature (1)..(25): SEQ ID NO: 4308; WAN024CTJ; Start 204; Stop 228
agaagtaaccacctttagccagttg

SEQ ID NO: 379534 - DNA, 25 bp, Artificial
  probe
  misc_feature (1)..(25): SEQ ID NO: 4309; WAN024FM2; Start 213; Stop 237
actgaagactcttataccaggagaa

SEQ ID NO: 379535 - DNA, 25 bp, Artificial
  probe
  misc_feature (1)..(25): SEQ ID NO: 4309; WAN024FM2; Start 210; Stop 234
actactgaagactcttataccagga

SEQ ID NO: 379536 - DNA, 25 bp, Artificial
  probe
  misc_feature (1)..(25): SEQ ID NO: 4309; WAN024FM2; Start 212; Stop 236
tactgaagactcttataccaggaga

SEQ ID NO: 379537 - DNA, 25 bp, Artificial
  probe
  misc_feature (1)..(25): SEQ ID NO: 4309; WAN024FM2; Start 211; Stop 235
ctactgaagactcttataccaggag

SEQ ID NO: 379538 - DNA, 25 bp, Artificial
  probe
  misc_feature (1)..(25): SEQ ID NO: 4309; WAN024FM2; Start 209; Stop 233
aactactgaagactcttataccagg

SEQ ID NO: 379539 - DNA, 25 bp, Artificial
  probe
  misc_feature (1)..(25): SEQ ID NO: 4309; WAN024FM2; Start 214; Stop 238
ctgaagactcttataccaggagaaa

SEQ ID NO: 379540 - DNA, 25 bp, Artificial
  probe
  misc_feature (1)..(25): SEQ ID NO: 4309; WAN024FM2; Start 106; Stop 130
gacttgaataatgtcttgaaacagg

SEQ ID NO: 379541 - DNA, 25 bp, Artificial
  probe
  misc_feature (1)..(25): SEQ ID NO: 4309; WAN024FM2; Start 100; Stop 124
gcaaatgacttgaataatgtcttga

SEQ ID NO: 379542 - DNA, 25 bp, Artificial
  probe
  misc_feature (1)..(25): SEQ ID NO: 4309; WAN024FM2; Start 99; Stop 123
agcaaatgacttgaataatgtcttg

SEQ ID NO: 379543 - DNA, 25 bp, Artificial
  probe
  misc_feature (1)..(25): SEQ ID NO: 4309; WAN024FM2; Start 105; Stop 129
tgacttgaataatgtcttgaaacag

SEQ ID NO: 379544 - DNA, 25 bp, Artificial
  probe
  misc_feature (1)..(25): SEQ ID NO: 4309; WAN024FM2; Start 178; Stop 202
tctaaagctaaagatgatgacagag

SEQ ID NO: 379545 - DNA, 25 bp, Artificial
  probe
  misc_feature (1)..(25): SEQ ID NO: 4309; WAN024FM2; Start 208; Stop 232
aaactactgaagactcttataccag

SEQ ID NO: 379546 - DNA, 25 bp, Artificial
  probe
  misc_feature (1)..(25): SEQ ID NO: 4309; WAN024FM2; Start 104; Stop 128
atgacttgaataatgtcttgaaaca

SEQ ID NO: 379547 - DNA, 25 bp, Artificial
  probe
  misc_feature (1)..(25): SEQ ID NO: 4309; WAN024FM2; Start 177; Stop 201
ttctaaagctaaagatgatgacaga

SEQ ID NO: 379548 - DNA, 25 bp, Artificial
  probe
  misc_feature (1)..(25): SEQ ID NO: 4309; WAN024FM2; Start 137; Stop 161
aagatactcctaataccccaacttg

SEQ ID NO: 379549 - DNA, 25 bp, Artificial
  probe
  misc_feature (1)..(25): SEQ ID NO: 4309; WAN024FM2; Start 176; Stop 200
cttctaaagctaaagatgatgacag

SEQ ID NO: 379550 - DNA, 25 bp, Artificial
  probe
  misc_feature (1)..(25): SEQ ID NO: 4309; WAN024FM2; Start 136; Stop 160
aaagatactcctaataccccaactt

SEQ ID NO: 379551 - DNA, 25 bp, Artificial
  probe
  misc_feature (1)..(25): SEQ ID NO: 4309; WAN024FM2; Start 98; Stop 122
tagcaaatgacttgaataatgtctt

SEQ ID NO: 379552 - DNA, 25 bp, Artificial
  probe
  misc_feature (1)..(25): SEQ ID NO: 4309; WAN024FM2; Start 2; Stop 26
tgttgaatgttgaccaggatttcat

SEQ ID NO: 379553 - DNA, 25 bp, Artificial
  probe
  misc_feature (1)..(25): SEQ ID NO: 4309; WAN024FM2; Start 54; Stop 78
ttcagactggaagaaaactttcaca

SEQ ID NO: 379554 - DNA, 25 bp, Artificial
  probe
  misc_feature (1)..(25): SEQ ID NO: 4309; WAN024FM2; Start 3; Stop 27
gttgaatgttgaccaggatttcatg

SEQ ID NO: 379555 - DNA, 25 bp, Artificial
  probe
  misc_feature (1)..(25): SEQ ID NO: 4309; WAN024FM2; Start 135; Stop 159
taaagatactcctaataccccaact

SEQ ID NO: 379556 - DNA, 25 bp, Artificial
  probe
  misc_feature (1)..(25): SEQ ID NO: 4309; WAN024FM2; Start 132; Stop 156
tgataaagatactcctaatacccca

SEQ ID NO: 379557 - DNA, 25 bp, Artificial
  probe
  misc_feature (1)..(25): SEQ ID NO: 4309; WAN024FM2; Start 13; Stop 37
gaccaggatttcatgagcatatcta

SEQ ID NO: 379558 - DNA, 25 bp, Artificial
  probe
  misc_feature (1)..(25): SEQ ID NO: 4309; WAN024FM2; Start 207; Stop 231
taaactactgaagactcttatacca

SEQ ID NO: 379559 - DNA, 25 bp, Artificial
  probe
  misc_feature (1)..(25): SEQ ID NO: 4309; WAN024FM2; Start 14; Stop 38
accaggatttcatgagcatatctaa

SEQ ID NO: 379560 - DNA, 25 bp, Artificial
  probe
  misc_feature (1)..(25): SEQ ID NO: 4309; WAN024FM2; Start 1; Stop 25
gtgttgaatgttgaccaggatttca

SEQ ID NO: 379561 - DNA, 25 bp, Artificial
  probe
  misc_feature (1)..(25): SEQ ID NO: 4309; WAN024FM2; Start 15; Stop 39
ccaggatttcatgagcatatctaag

SEQ ID NO: 379562 - DNA, 25 bp, Artificial
  probe
  misc_feature (1)..(25): SEQ ID NO: 4309; WAN024FM2; Start 215; Stop 239
tgaagactcttataccaggagaaaa

SEQ ID NO: 379563 - DNA, 25 bp, Artificial
  probe
  misc_feature (1)..(25): SEQ ID NO: 4309; WAN024FM2; Start 103; Stop 127
aatgacttgaataatgtcttgaaac

SEQ ID NO: 379564 - DNA, 25 bp, Artificial
  probe
  misc_feature (1)..(25): SEQ ID NO: 4309; WAN024FM2; Start 101; Stop 125
caaatgacttgaataatgtcttgaa

SEQ ID NO: 379565 - DNA, 25 bp, Artificial
  probe
  misc_feature (1)..(25): SEQ ID NO: 4309; WAN024FM2; Start 55; Stop 79
tcagactggaagaaaactttcacag

SEQ ID NO: 379566 - DNA, 25 bp, Artificial
  probe
  misc_feature (1)..(25): SEQ ID NO: 4309; WAN024FM2; Start 16; Stop 40
caggatttcatgagcatatctaagt

SEQ ID NO: 379567 - DNA, 25 bp, Artificial
  probe
  misc_feature (1)..(25): SEQ ID NO: 4310; WAN024GDC; Start 301; Stop 325
cttcttgagttggaacatagagttg

SEQ ID NO: 379568 - DNA, 25 bp, Artificial
  probe
  misc_feature (1)..(25): SEQ ID NO: 4310; WAN024GDC; Start 300; Stop 324
acttcttgagttggaacatagagtt

SEQ ID NO: 379569 - DNA, 25 bp, Artificial
  probe
  misc_feature (1)..(25): SEQ ID NO: 4310; WAN024GDC; Start 299; Stop 323
cacttcttgagttggaacatagagt

SEQ ID NO: 379570 - DNA, 25 bp, Artificial
  probe
  misc_feature (1)..(25): SEQ ID NO: 4310; WAN024GDC; Start 302; Stop 326
ttcttgagttggaacatagagttgt

SEQ ID NO: 379571 - DNA, 25 bp, Artificial
  probe
  misc_feature (1)..(25): SEQ ID NO: 4310; WAN024GDC; Start 303; Stop 327
tcttgagttggaacatagagttgta

SEQ ID NO: 379572 - DNA, 25 bp, Artificial
  probe
  misc_feature (1)..(25): SEQ ID NO: 4310; WAN024GDC; Start 304; Stop 328
cttgagttggaacatagagttgtaa

SEQ ID NO: 379573 - DNA, 25 bp, Artificial
  probe
  misc_feature (1)..(25): SEQ ID NO: 4310; WAN024GDC; Start 298; Stop 322
ccacttcttgagttggaacatagag

SEQ ID NO: 379574 - DNA, 25 bp, Artificial
  probe
  misc_feature (1)..(25): SEQ ID NO: 4310; WAN024GDC; Start 230; Stop 254
ctcttggatatgacaaaccctaact

SEQ ID NO: 379575 - DNA, 25 bp, Artificial
  probe
  misc_feature (1)..(25): SEQ ID NO: 4310; WAN024GDC; Start 229; Stop 253
actcttggatatgacaaaccctaac

SEQ ID NO: 379576 - DNA, 25 bp, Artificial
  probe
  misc_feature (1)..(25): SEQ ID NO: 4310; WAN024GDC; Start 227; Stop 251
caactcttggatatgacaaacccta

SEQ ID NO: 379577 - DNA, 25 bp, Artificial
  probe
  misc_feature (1)..(25): SEQ ID NO: 4310; WAN024GDC; Start 231; Stop 255
tcttggatatgacaaaccctaactt

SEQ ID NO: 379578 - DNA, 25 bp, Artificial
  probe
  misc_feature (1)..(25): SEQ ID NO: 4310; WAN024GDC; Start 228; Stop 252
aactcttggatatgacaaaccctaa

SEQ ID NO: 379579 - DNA, 25 bp, Artificial
  probe
  misc_feature (1)..(25): SEQ ID NO: 4310; WAN024GDC; Start 232; Stop 256
cttggatatgacaaaccctaacttt

SEQ ID NO: 379580 - DNA, 25 bp, Artificial
  probe
  misc_feature (1)..(25): SEQ ID NO: 4310; WAN024GDC; Start 4; Stop 28
ttgactgctccagacttcacttctc

SEQ ID NO: 379581 - DNA, 25 bp, Artificial
  probe
  misc_feature (1)..(25): SEQ ID NO: 4310; WAN024GDC; Start 233; Stop 257
ttggatatgacaaaccctaactttt

SEQ ID NO: 379582 - DNA, 25 bp, Artificial
  probe
  misc_feature (1)..(25): SEQ ID NO: 4310; WAN024GDC; Start 116; Stop 140
aatagtctgttaagaatataccgaa

SEQ ID NO: 379583 - DNA, 25 bp, Artificial
  probe
  misc_feature (1)..(25): SEQ ID NO: 4310; WAN024GDC; Start 3; Stop 27
gttgactgctccagacttcacttct

SEQ ID NO: 379584 - DNA, 25 bp, Artificial
  probe
  misc_feature (1)..(25): SEQ ID NO: 4310; WAN024GDC; Start 119; Stop 143
agtctgttaagaatataccgaatta

SEQ ID NO: 379585 - DNA, 25 bp, Artificial
  probe
  misc_feature (1)..(25): SEQ ID NO: 4310; WAN024GDC; Start 118; Stop 142
tagtctgttaagaatataccgaatt

SEQ ID NO: 379586 - DNA, 25 bp, Artificial
  probe
  misc_feature (1)..(25): SEQ ID NO: 4310; WAN024GDC; Start 117; Stop 141
atagtctgttaagaatataccgaat

SEQ ID NO: 379587 - DNA, 25 bp, Artificial
  probe
  misc_feature (1)..(25): SEQ ID NO: 4310; WAN024GDC; Start 2; Stop 26
tgttgactgctccagacttcacttc

SEQ ID NO: 379588 - DNA, 25 bp, Artificial
  probe
  misc_feature (1)..(25): SEQ ID NO: 4310; WAN024GDC; Start 296; Stop 320
ctccacttcttgagttggaacatag

SEQ ID NO: 379589 - DNA, 25 bp, Artificial
  probe
  misc_feature (1)..(25): SEQ ID NO: 4310; WAN024GDC; Start 297; Stop 321
tccacttcttgagttggaacataga

SEQ ID NO: 379590 - DNA, 25 bp, Artificial
  probe
  misc_feature (1)..(25): SEQ ID NO: 4310; WAN024GDC; Start 287; Stop 311
gaccaattgctccacttcttgagtt

SEQ ID NO: 379591 - DNA, 25 bp, Artificial
  probe
  misc_feature (1)..(25): SEQ ID NO: 4310; WAN024GDC; Start 1; Stop 25
gtgttgactgctccagacttcactt

SEQ ID NO: 379592 - DNA, 25 bp, Artificial
  probe
  misc_feature (1)..(25): SEQ ID NO: 4310; WAN024GDC; Start 288; Stop 312
accaattgctccacttcttgagttg

SEQ ID NO: 379593 - DNA, 25 bp, Artificial
  probe
  misc_feature (1)..(25): SEQ ID NO: 4310; WAN024GDC; Start 135; Stop 159
accgaattatcagaaaattgtcaat

SEQ ID NO: 379594 - DNA, 25 bp, Artificial
  probe
  misc_feature (1)..(25): SEQ ID NO: 4310; WAN024GDC; Start 200; Stop 224
ataaagattgcccacaaagggtgtt

SEQ ID NO: 379595 - DNA, 25 bp, Artificial
  probe
  misc_feature (1)..(25): SEQ ID NO: 4310; WAN024GDC; Start 136; Stop 160
ccgaattatcagaaaattgtcaatg

SEQ ID NO: 379596 - DNA, 25 bp, Artificial
  probe
  misc_feature (1)..(25): SEQ ID NO: 4310; WAN024GDC; Start 201; Stop 225
taaagattgcccacaaagggtgttt

SEQ ID NO: 379597 - DNA, 25 bp, Artificial
  probe
  misc_feature (1)..(25): SEQ ID NO: 4310; WAN024GDC; Start 211; Stop 235
ccacaaagggtgtttccaactcttg

SEQ ID NO: 379598 - DNA, 25 bp, Artificial
  probe
  misc_feature (1)..(25): SEQ ID NO: 4310; WAN024GDC; Start 134; Stop 158
taccgaattatcagaaaattgtcaa

SEQ ID NO: 379599 - DNA, 25 bp, Artificial
  probe
  misc_feature (1)..(25): SEQ ID NO: 4310; WAN024GDC; Start 115; Stop 139
aaatagtctgttaagaatataccga

SEQ ID NO: 379600 - DNA, 25 bp, Artificial
  probe
  misc_feature (1)..(25): SEQ ID NO: 4311; WAN024GER; Start 193; Stop 217
attggagagacttggctgagtgata

SEQ ID NO: 379601 - DNA, 25 bp, Artificial
  probe
  misc_feature (1)..(25): SEQ ID NO: 4311; WAN024GER; Start 194; Stop 218
ttggagagacttggctgagtgataa

SEQ ID NO: 379602 - DNA, 25 bp, Artificial
  probe
  misc_feature (1)..(25): SEQ ID NO: 4311; WAN024GER; Start 201; Stop 225
gacttggctgagtgataaagagttg

SEQ ID NO: 379603 - DNA, 25 bp, Artificial
  probe
  misc_feature (1)..(25): SEQ ID NO: 4311; WAN024GER; Start 200; Stop 224
agacttggctgagtgataaagagtt

SEQ ID NO: 379604 - DNA, 25 bp, Artificial
  probe
  misc_feature (1)..(25): SEQ ID NO: 4311; WAN024GER; Start 198; Stop 222
agagacttggctgagtgataaagag

SEQ ID NO: 379605 - DNA, 25 bp, Artificial
  probe
  misc_feature (1)..(25): SEQ ID NO: 4311; WAN024GER; Start 197; Stop 221
gagagacttggctgagtgataaaga

SEQ ID NO: 379606 - DNA, 25 bp, Artificial
  probe
  misc_feature (1)..(25): SEQ ID NO: 4311; WAN024GER; Start 199; Stop 223
gagacttggctgagtgataaagagt

SEQ ID NO: 379607 - DNA, 25 bp, Artificial
  probe
  misc_feature (1)..(25): SEQ ID NO: 4311; WAN024GER; Start 3; Stop 27
gttgagacgaaacgctaaagagttc

SEQ ID NO: 379608 - DNA, 25 bp, Artificial
  probe
  misc_feature (1)..(25): SEQ ID NO: 4311; WAN024GER; Start 204; Stop 228
ttggctgagtgataaagagttgctt

SEQ ID NO: 379609 - DNA, 25 bp, Artificial
  probe
  misc_feature (1)..(25): SEQ ID NO: 4311; WAN024GER; Start 196; Stop 220
ggagagacttggctgagtgataaag

SEQ ID NO: 379610 - DNA, 25 bp, Artificial
  probe
  misc_feature (1)..(25): SEQ ID NO: 4311; WAN024GER; Start 2; Stop 26
tgttgagacgaaacgctaaagagtt

SEQ ID NO: 379611 - DNA, 25 bp, Artificial
  probe
  misc_feature (1)..(25): SEQ ID NO: 4311; WAN024GER; Start 208; Stop 232
ctgagtgataaagagttgcttggct

SEQ ID NO: 379612 - DNA, 25 bp, Artificial
  probe
  misc_feature (1)..(25): SEQ ID NO: 4311; WAN024GER; Start 203; Stop 227
cttggctgagtgataaagagttgct

SEQ ID NO: 379613 - DNA, 25 bp, Artificial
  probe
  misc_feature (1)..(25): SEQ ID NO: 4311; WAN024GER; Start 209; Stop 233
tgagtgataaagagttgcttggctg

SEQ ID NO: 379614 - DNA, 25 bp, Artificial
  probe
  misc_feature (1)..(25): SEQ ID NO: 4311; WAN024GER; Start 205; Stop 229
tggctgagtgataaagagttgcttg

SEQ ID NO: 379615 - DNA, 25 bp, Artificial
  probe
  misc_feature (1)..(25): SEQ ID NO: 4311; WAN024GER; Start 195; Stop 219
tggagagacttggctgagtgataaa

SEQ ID NO: 379616 - DNA, 25 bp, Artificial
  probe
  misc_feature (1)..(25): SEQ ID NO: 4311; WAN024GER; Start 192; Stop 216
cattggagagacttggctgagtgat

SEQ ID NO: 379617 - DNA, 25 bp, Artificial
  probe
  misc_feature (1)..(25): SEQ ID NO: 4311; WAN024GER; Start 202; Stop 226
acttggctgagtgataaagagttgc

SEQ ID NO: 379618 - DNA, 25 bp, Artificial
  probe
  misc_feature (1)..(25): SEQ ID NO: 4311; WAN024GER; Start 147; Stop 171
ggataaagatctcaatgcccatttc

SEQ ID NO: 379619 - DNA, 25 bp, Artificial
  probe
  misc_feature (1)..(25): SEQ ID NO: 4311; WAN024GER; Start 148; Stop 172
gataaagatctcaatgcccatttca

SEQ ID NO: 379620 - DNA, 25 bp, Artificial
  probe
  misc_feature (1)..(25): SEQ ID NO: 4311; WAN024GER; Start 1; Stop 25
gtgttgagacgaaacgctaaagagt

SEQ ID NO: 379621 - DNA, 25 bp, Artificial
  probe
  misc_feature (1)..(25): SEQ ID NO: 4311; WAN024GER; Start 161; Stop 185
atgcccatttcattttccaaatctc

SEQ ID NO: 379622 - DNA, 25 bp, Artificial
  probe
  misc_feature (1)..(25): SEQ ID NO: 4311; WAN024GER; Start 149; Stop 173
ataaagatctcaatgcccatttcat

SEQ ID NO: 379623 - DNA, 25 bp, Artificial
  probe
  misc_feature (1)..(25): SEQ ID NO: 4311; WAN024GER; Start 146; Stop 170
cggataaagatctcaatgcccattt

SEQ ID NO: 379624 - DNA, 25 bp, Artificial
  probe
  misc_feature (1)..(25): SEQ ID NO: 4311; WAN024GER; Start 206; Stop 230
ggctgagtgataaagagttgcttgg

SEQ ID NO: 379625 - DNA, 25 bp, Artificial
  probe
  misc_feature (1)..(25): SEQ ID NO: 4311; WAN024GER; Start 167; Stop 191
atttcattttccaaatctcgcactg

SEQ ID NO: 379626 - DNA, 25 bp, Artificial
  probe
  misc_feature (1)..(25): SEQ ID NO: 4311; WAN024GER; Start 166; Stop 190
catttcattttccaaatctcgcact

SEQ ID NO: 379627 - DNA, 25 bp, Artificial
  probe
  misc_feature (1)..(25): SEQ ID NO: 4311; WAN024GER; Start 247; Stop 271
gccagtttcgacgattttgataata

SEQ ID NO: 379628 - DNA, 25 bp, Artificial
  probe
  misc_feature (1)..(25): SEQ ID NO: 4311; WAN024GER; Start 165; Stop 189
ccatttcattttccaaatctcgcac

SEQ ID NO: 379629 - DNA, 25 bp, Artificial
  probe
  misc_feature (1)..(25): SEQ ID NO: 4311; WAN024GER; Start 246; Stop 270
agccagtttcgacgattttgataat

SEQ ID NO: 379630 - DNA, 25 bp, Artificial
  probe
  misc_feature (1)..(25): SEQ ID NO: 4311; WAN024GER; Start 210; Stop 234
gagtgataaagagttgcttggctgc

SEQ ID NO: 379631 - DNA, 25 bp, Artificial
  probe
  misc_feature (1)..(25): SEQ ID NO: 4311; WAN024GER; Start 207; Stop 231
gctgagtgataaagagttgcttggc

SEQ ID NO: 379632 - DNA, 25 bp, Artificial
  probe
  misc_feature (1)..(25): SEQ ID NO: 4311; WAN024GER; Start 137; Stop 161
ttgggattgcggataaagatctcaa

SEQ ID NO: 379633 - DNA, 25 bp, Artificial
  probe
  misc_feature (1)..(25): SEQ ID NO: 4312; WAN024DXG; Start 39; Stop 63
gaatgtcaagatagtgatgaaggct

SEQ ID NO: 379634 - DNA, 25 bp, Artificial
  probe
  misc_feature (1)..(25): SEQ ID NO: 4312; WAN024DXG; Start 38; Stop 62
agaatgtcaagatagtgatgaaggc

SEQ ID NO: 379635 - DNA, 25 bp, Artificial
  probe
  misc_feature (1)..(25): SEQ ID NO: 4312; WAN024DXG; Start 40; Stop 64
aatgtcaagatagtgatgaaggctg

SEQ ID NO: 379636 - DNA, 25 bp, Artificial
  probe
  misc_feature (1)..(25): SEQ ID NO: 4312; WAN024DXG; Start 37; Stop 61
gagaatgtcaagatagtgatgaagg

SEQ ID NO: 379637 - DNA, 25 bp, Artificial
  probe
  misc_feature (1)..(25): SEQ ID NO: 4312; WAN024DXG; Start 36; Stop 60
tgagaatgtcaagatagtgatgaag

SEQ ID NO: 379638 - DNA, 25 bp, Artificial
  probe
  misc_feature (1)..(25): SEQ ID NO: 4312; WAN024DXG; Start 138; Stop 162
agctgtgaagataccaattacgatt

SEQ ID NO: 379639 - DNA, 25 bp, Artificial
  probe
  misc_feature (1)..(25): SEQ ID NO: 4312; WAN024DXG; Start 137; Stop 161
tagctgtgaagataccaattacgat

SEQ ID NO: 379640 - DNA, 25 bp, Artificial
  probe
  misc_feature (1)..(25): SEQ ID NO: 4312; WAN024DXG; Start 136; Stop 160
atagctgtgaagataccaattacga

SEQ ID NO: 379641 - DNA, 25 bp, Artificial
  probe
  misc_feature (1)..(25): SEQ ID NO: 4312; WAN024DXG; Start 135; Stop 159
gatagctgtgaagataccaattacg

SEQ ID NO: 379642 - DNA, 25 bp, Artificial
  probe
  misc_feature (1)..(25): SEQ ID NO: 4312; WAN024DXG; Start 131; Stop 155
caatgatagctgtgaagataccaat

SEQ ID NO: 379643 - DNA, 25 bp, Artificial
  probe
  misc_feature (1)..(25): SEQ ID NO: 4312; WAN024DXG; Start 130; Stop 154
gcaatgatagctgtgaagataccaa

SEQ ID NO: 379644 - DNA, 25 bp, Artificial
  probe
  misc_feature (1)..(25): SEQ ID NO: 4312; WAN024DXG; Start 127; Stop 151
ttggcaatgatagctgtgaagatac

SEQ ID NO: 379645 - DNA, 25 bp, Artificial
  probe
  misc_feature (1)..(25): SEQ ID NO: 4312; WAN024DXG; Start 126; Stop 150
gttggcaatgatagctgtgaagata

SEQ ID NO: 379646 - DNA, 25 bp, Artificial
  probe
  misc_feature (1)..(25): SEQ ID NO: 4312; WAN024DXG; Start 41; Stop 65
atgtcaagatagtgatgaaggctgg

SEQ ID NO: 379647 - DNA, 25 bp, Artificial
  probe
  misc_feature (1)..(25): SEQ ID NO: 4312; WAN024DXG; Start 194; Stop 218
tagtccaagaaagaacagaaccaaa

SEQ ID NO: 379648 - DNA, 25 bp, Artificial
  probe
  misc_feature (1)..(25): SEQ ID NO: 4312; WAN024DXG; Start 193; Stop 217
atagtccaagaaagaacagaaccaa

SEQ ID NO: 379649 - DNA, 25 bp, Artificial
  probe
  misc_feature (1)..(25): SEQ ID NO: 4312; WAN024DXG; Start 185; Stop 209
cccaaatgatagtccaagaaagaac

SEQ ID NO: 379650 - DNA, 25 bp, Artificial
  probe
  misc_feature (1)..(25): SEQ ID NO: 4312; WAN024DXG; Start 106; Stop 130
tttcctttgataaatggttggttgg

SEQ ID NO: 379651 - DNA, 25 bp, Artificial
  probe
  misc_feature (1)..(25): SEQ ID NO: 4312; WAN024DXG; Start 192; Stop 216
gatagtccaagaaagaacagaacca

SEQ ID NO: 379652 - DNA, 25 bp, Artificial
  probe
  misc_feature (1)..(25): SEQ ID NO: 4312; WAN024DXG; Start 191; Stop 215
tgatagtccaagaaagaacagaacc

SEQ ID NO: 379653 - DNA, 25 bp, Artificial
  probe
  misc_feature (1)..(25): SEQ ID NO: 4312; WAN024DXG; Start 134; Stop 158
tgatagctgtgaagataccaattac

SEQ ID NO: 379654 - DNA, 25 bp, Artificial
  probe
  misc_feature (1)..(25): SEQ ID NO: 4312; WAN024DXG; Start 186; Stop 210
ccaaatgatagtccaagaaagaaca

SEQ ID NO: 379655 - DNA, 25 bp, Artificial
  probe
  misc_feature (1)..(25): SEQ ID NO: 4312; WAN024DXG; Start 181; Stop 205
aaagcccaaatgatagtccaagaaa

SEQ ID NO: 379656 - DNA, 25 bp, Artificial
  probe
  misc_feature (1)..(25): SEQ ID NO: 4312; WAN024DXG; Start 139; Stop 163
gctgtgaagataccaattacgattt

SEQ ID NO: 379657 - DNA, 25 bp, Artificial
  probe
  misc_feature (1)..(25): SEQ ID NO: 4312; WAN024DXG; Start 132; Stop 156
aatgatagctgtgaagataccaatt

SEQ ID NO: 379658 - DNA, 25 bp, Artificial
  probe
  misc_feature (1)..(25): SEQ ID NO: 4312; WAN024DXG; Start 190; Stop 214
atgatagtccaagaaagaacagaac

SEQ ID NO: 379659 - DNA, 25 bp, Artificial
  probe
  misc_feature (1)..(25): SEQ ID NO: 4312; WAN024DXG; Start 184; Stop 208
gcccaaatgatagtccaagaaagaa

SEQ ID NO: 379660 - DNA, 25 bp, Artificial
  probe
  misc_feature (1)..(25): SEQ ID NO: 4312; WAN024DXG; Start 182; Stop 206
aagcccaaatgatagtccaagaaag

SEQ ID NO: 379661 - DNA, 25 bp, Artificial
  probe
  misc_feature (1)..(25): SEQ ID NO: 4312; WAN024DXG; Start 195; Stop 219
agtccaagaaagaacagaaccaaag

SEQ ID NO: 379662 - DNA, 25 bp, Artificial
  probe
  misc_feature (1)..(25): SEQ ID NO: 4312; WAN024DXG; Start 115; Stop 139
ataaatggttggttggcaatgatag

SEQ ID NO: 379663 - DNA, 25 bp, Artificial
  probe
  misc_feature (1)..(25): SEQ ID NO: 4312; WAN024DXG; Start 114; Stop 138
gataaatggttggttggcaatgata

SEQ ID NO: 379664 - DNA, 25 bp, Artificial
  probe
  misc_feature (1)..(25): SEQ ID NO: 4312; WAN024DXG; Start 180; Stop 204
caaagcccaaatgatagtccaagaa

SEQ ID NO: 379665 - DNA, 25 bp, Artificial
  probe
  misc_feature (1)..(25): SEQ ID NO: 4312; WAN024DXG; Start 110; Stop 134
ctttgataaatggttggttggcaat

SEQ ID NO: 379666 - DNA, 25 bp, Artificial
  probe
  misc_feature (1)..(25): SEQ ID NO: 4313; WAN024GK2; Start 218; Stop 242
ttgaaccaccaacaaggataacttc

SEQ ID NO: 379667 - DNA, 25 bp, Artificial
  probe
  misc_feature (1)..(25): SEQ ID NO: 4313; WAN024GK2; Start 148; Stop 172
gggtttactgatttgtttggttctt

SEQ ID NO: 379668 - DNA, 25 bp, Artificial
  probe
  misc_feature (1)..(25): SEQ ID NO: 4313; WAN024GK2; Start 20; Stop 44
ttgtaaatactccacccattgtttc

SEQ ID NO: 379669 - DNA, 25 bp, Artificial
  probe
  misc_feature (1)..(25): SEQ ID NO: 4313; WAN024GK2; Start 147; Stop 171
agggtttactgatttgtttggttct

SEQ ID NO: 379670 - DNA, 25 bp, Artificial
  probe
  misc_feature (1)..(25): SEQ ID NO: 4313; WAN024GK2; Start 85; Stop 109
tccttgacatcaccagtaatcacac

SEQ ID NO: 379671 - DNA, 25 bp, Artificial
  probe
  misc_feature (1)..(25): SEQ ID NO: 4313; WAN024GK2; Start 19; Stop 43
tttgtaaatactccacccattgttt

SEQ ID NO: 379672 - DNA, 25 bp, Artificial
  probe
  misc_feature (1)..(25): SEQ ID NO: 4313; WAN024GK2; Start 131; Stop 155
tagcaactacttcatcagggtttac

SEQ ID NO: 379673 - DNA, 25 bp, Artificial
  probe
  misc_feature (1)..(25): SEQ ID NO: 4313; WAN024GK2; Start 58; Stop 82
aatggcgttacatcaagaaggacaa

SEQ ID NO: 379674 - DNA, 25 bp, Artificial
  probe
  misc_feature (1)..(25): SEQ ID NO: 4313; WAN024GK2; Start 130; Stop 154
atagcaactacttcatcagggttta

SEQ ID NO: 379675 - DNA, 25 bp, Artificial
  probe
  misc_feature (1)..(25): SEQ ID NO: 4313; WAN024GK2; Start 87; Stop 111
cttgacatcaccagtaatcacacca

SEQ ID NO: 379676 - DNA, 25 bp, Artificial
  probe
  misc_feature (1)..(25): SEQ ID NO: 4313; WAN024GK2; Start 53; Stop 77
gtgacaatggcgttacatcaagaag

SEQ ID NO: 379677 - DNA, 25 bp, Artificial
  probe
  misc_feature (1)..(25): SEQ ID NO: 4313; WAN024GK2; Start 21; Stop 45
tgtaaatactccacccattgtttcg

SEQ ID NO: 379678 - DNA, 25 bp, Artificial
  probe
  misc_feature (1)..(25): SEQ ID NO: 4313; WAN024GK2; Start 129; Stop 153
catagcaactacttcatcagggttt

SEQ ID NO: 379679 - DNA, 25 bp, Artificial
  probe
  misc_feature (1)..(25): SEQ ID NO: 4313; WAN024GK2; Start 149; Stop 173
ggtttactgatttgtttggttcttt

SEQ ID NO: 379680 - DNA, 25 bp, Artificial
  probe
  misc_feature (1)..(25): SEQ ID NO: 4313; WAN024GK2; Start 84; Stop 108
gtccttgacatcaccagtaatcaca

SEQ ID NO: 379681 - DNA, 25 bp, Artificial
  probe
  misc_feature (1)..(25): SEQ ID NO: 4313; WAN024GK2; Start 88; Stop 112
ttgacatcaccagtaatcacaccac

SEQ ID NO: 379682 - DNA, 25 bp, Artificial
  probe
  misc_feature (1)..(25): SEQ ID NO: 4313; WAN024GK2; Start 52; Stop 76
agtgacaatggcgttacatcaagaa

SEQ ID NO: 379683 - DNA, 25 bp, Artificial
  probe
  misc_feature (1)..(25): SEQ ID NO: 4313; WAN024GK2; Start 51; Stop 75
aagtgacaatggcgttacatcaaga

SEQ ID NO: 379684 - DNA, 25 bp, Artificial
  probe
  misc_feature (1)..(25): SEQ ID NO: 4313; WAN024GK2; Start 50; Stop 74
caagtgacaatggcgttacatcaag

SEQ ID NO: 379685 - DNA, 25 bp, Artificial
  probe
  misc_feature (1)..(25): SEQ ID NO: 4313; WAN024GK2; Start 221; Stop 245
aaccaccaacaaggataacttcgtc

SEQ ID NO: 379686 - DNA, 25 bp, Artificial
  probe
  misc_feature (1)..(25): SEQ ID NO: 4313; WAN024GK2; Start 220; Stop 244
gaaccaccaacaaggataacttcgt

SEQ ID NO: 379687 - DNA, 25 bp, Artificial
  probe
  misc_feature (1)..(25): SEQ ID NO: 4313; WAN024GK2; Start 219; Stop 243
tgaaccaccaacaaggataacttcg

SEQ ID NO: 379688 - DNA, 25 bp, Artificial
  probe
  misc_feature (1)..(25): SEQ ID NO: 4313; WAN024GK2; Start 132; Stop 156
agcaactacttcatcagggtttact

SEQ ID NO: 379689 - DNA, 25 bp, Artificial
  probe
  misc_feature (1)..(25): SEQ ID NO: 4313; WAN024GK2; Start 55; Stop 79
gacaatggcgttacatcaagaagga

SEQ ID NO: 379690 - DNA, 25 bp, Artificial
  probe
  misc_feature (1)..(25): SEQ ID NO: 4313; WAN024GK2; Start 92; Stop 116
catcaccagtaatcacaccaccttg

SEQ ID NO: 379691 - DNA, 25 bp, Artificial
  probe
  misc_feature (1)..(25): SEQ ID NO: 4313; WAN024GK2; Start 146; Stop 170
cagggtttactgatttgtttggttc

SEQ ID NO: 379692 - DNA, 25 bp, Artificial
  probe
  misc_feature (1)..(25): SEQ ID NO: 4313; WAN024GK2; Start 86; Stop 110
ccttgacatcaccagtaatcacacc

SEQ ID NO: 379693 - DNA, 25 bp, Artificial
  probe
  misc_feature (1)..(25): SEQ ID NO: 4313; WAN024GK2; Start 57; Stop 81
caatggcgttacatcaagaaggaca

SEQ ID NO: 379694 - DNA, 25 bp, Artificial
  probe
  misc_feature (1)..(25): SEQ ID NO: 4313; WAN024GK2; Start 56; Stop 80
acaatggcgttacatcaagaaggac

SEQ ID NO: 379695 - DNA, 25 bp, Artificial
  probe
  misc_feature (1)..(25): SEQ ID NO: 4313; WAN024GK2; Start 225; Stop 249
accaacaaggataacttcgtcgatt

SEQ ID NO: 379696 - DNA, 25 bp, Artificial
  probe
  misc_feature (1)..(25): SEQ ID NO: 4313; WAN024GK2; Start 59; Stop 83
atggcgttacatcaagaaggacaac

SEQ ID NO: 379697 - DNA, 25 bp, Artificial
  probe
  misc_feature (1)..(25): SEQ ID NO: 4313; WAN024GK2; Start 97; Stop 121
ccagtaatcacaccaccttggatag

SEQ ID NO: 379698 - DNA, 25 bp, Artificial
  probe
  misc_feature (1)..(25): SEQ ID NO: 4313; WAN024GK2; Start 24; Stop 48
aaatactccacccattgtttcgata

SEQ ID NO: 379699 - DNA, 25 bp, Artificial
  probe
  misc_feature (1)..(25): SEQ ID NO: 4314; WAN024CM8; Start 36; Stop 60
ggtgtatgccaatgactttgataag

SEQ ID NO: 379700 - DNA, 25 bp, Artificial
  probe
  misc_feature (1)..(25): SEQ ID NO: 4314; WAN024CM8; Start 25; Stop 49
gagttcatagtggtgtatgccaatg

SEQ ID NO: 379701 - DNA, 25 bp, Artificial
  probe
  misc_feature (1)..(25): SEQ ID NO: 4314; WAN024CM8; Start 27; Stop 51
gttcatagtggtgtatgccaatgac

SEQ ID NO: 379702 - DNA, 25 bp, Artificial
  probe
  misc_feature (1)..(25): SEQ ID NO: 4314; WAN024CM8; Start 35; Stop 59
tggtgtatgccaatgactttgataa

SEQ ID NO: 379703 - DNA, 25 bp, Artificial
  probe
  misc_feature (1)..(25): SEQ ID NO: 4314; WAN024CM8; Start 29; Stop 53
tcatagtggtgtatgccaatgactt

SEQ ID NO: 379704 - DNA, 25 bp, Artificial
  probe
  misc_feature (1)..(25): SEQ ID NO: 4314; WAN024CM8; Start 28; Stop 52
ttcatagtggtgtatgccaatgact

SEQ ID NO: 379705 - DNA, 25 bp, Artificial
  probe
  misc_feature (1)..(25): SEQ ID NO: 4314; WAN024CM8; Start 26; Stop 50
agttcatagtggtgtatgccaatga

SEQ ID NO: 379706 - DNA, 25 bp, Artificial
  probe
  misc_feature (1)..(25): SEQ ID NO: 4314; WAN024CM8; Start 24; Stop 48
cgagttcatagtggtgtatgccaat

SEQ ID NO: 379707 - DNA, 25 bp, Artificial
  probe
  misc_feature (1)..(25): SEQ ID NO: 4314; WAN024CM8; Start 34; Stop 58
gtggtgtatgccaatgactttgata

SEQ ID NO: 379708 - DNA, 25 bp, Artificial
  probe
  misc_feature (1)..(25): SEQ ID NO: 4314; WAN024CM8; Start 31; Stop 55
atagtggtgtatgccaatgactttg

SEQ ID NO: 379709 - DNA, 25 bp, Artificial
  probe
  misc_feature (1)..(25): SEQ ID NO: 4314; WAN024CM8; Start 30; Stop 54
catagtggtgtatgccaatgacttt

SEQ ID NO: 379710 - DNA, 25 bp, Artificial
  probe
  misc_feature (1)..(25): SEQ ID NO: 4314; WAN024CM8; Start 21; Stop 45
caacgagttcatagtggtgtatgcc

SEQ ID NO: 379711 - DNA, 25 bp, Artificial
  probe
  misc_feature (1)..(25): SEQ ID NO: 4314; WAN024CM8; Start 32; Stop 56
tagtggtgtatgccaatgactttga

SEQ ID NO: 379712 - DNA, 25 bp, Artificial
  probe
  misc_feature (1)..(25): SEQ ID NO: 4314; WAN024CM8; Start 37; Stop 61
gtgtatgccaatgactttgataagt

SEQ ID NO: 379713 - DNA, 25 bp, Artificial
  probe
  misc_feature (1)..(25): SEQ ID NO: 4314; WAN024CM8; Start 20; Stop 44
ccaacgagttcatagtggtgtatgc

SEQ ID NO: 379714 - DNA, 25 bp, Artificial
  probe
  misc_feature (1)..(25): SEQ ID NO: 4314; WAN024CM8; Start 33; Stop 57
agtggtgtatgccaatgactttgat

SEQ ID NO: 379715 - DNA, 25 bp, Artificial
  probe
  misc_feature (1)..(25): SEQ ID NO: 4314; WAN024CM8; Start 23; Stop 47
acgagttcatagtggtgtatgccaa

SEQ ID NO: 379716 - DNA, 25 bp, Artificial
  probe
  misc_feature (1)..(25): SEQ ID NO: 4314; WAN024CM8; Start 22; Stop 46
aacgagttcatagtggtgtatgcca

SEQ ID NO: 379717 - DNA, 25 bp, Artificial
  probe
  misc_feature (1)..(25): SEQ ID NO: 4314; WAN024CM8; Start 13; Stop 37
gaacagaccaacgagttcatagtgg

SEQ ID NO: 379718 - DNA, 25 bp, Artificial
  probe
  misc_feature (1)..(25): SEQ ID NO: 4314; WAN024CM8; Start 18; Stop 42
gaccaacgagttcatagtggtgtat

SEQ ID NO: 379719 - DNA, 25 bp, Artificial
  probe
  misc_feature (1)..(25): SEQ ID NO: 4314; WAN024CM8; Start 19; Stop 43
accaacgagttcatagtggtgtatg

SEQ ID NO: 379720 - DNA, 25 bp, Artificial
  probe
  misc_feature (1)..(25): SEQ ID NO: 4314; WAN024CM8; Start 5; Stop 29
tgggatttgaacagaccaacgagtt

SEQ ID NO: 379721 - DNA, 25 bp, Artificial
  probe
  misc_feature (1)..(25): SEQ ID NO: 4314; WAN024CM8; Start 17; Stop 41
agaccaacgagttcatagtggtgta

SEQ ID NO: 379722 - DNA, 25 bp, Artificial
  probe
  misc_feature (1)..(25): SEQ ID NO: 4314; WAN024CM8; Start 6; Stop 30
gggatttgaacagaccaacgagttc

SEQ ID NO: 379723 - DNA, 25 bp, Artificial
  probe
  misc_feature (1)..(25): SEQ ID NO: 4314; WAN024CM8; Start 14; Stop 38
aacagaccaacgagttcatagtggt

SEQ ID NO: 379724 - DNA, 25 bp, Artificial
  probe
  misc_feature (1)..(25): SEQ ID NO: 4314; WAN024CM8; Start 16; Stop 40
cagaccaacgagttcatagtggtgt

SEQ ID NO: 379725 - DNA, 25 bp, Artificial
  probe
  misc_feature (1)..(25): SEQ ID NO: 4314; WAN024CM8; Start 15; Stop 39
acagaccaacgagttcatagtggtg

SEQ ID NO: 379726 - DNA, 25 bp, Artificial
  probe
  misc_feature (1)..(25): SEQ ID NO: 4314; WAN024CM8; Start 4; Stop 28
ttgggatttgaacagaccaacgagt

SEQ ID NO: 379727 - DNA, 25 bp, Artificial
  probe
  misc_feature (1)..(25): SEQ ID NO: 4315; WAN024CNY; Start 80; Stop 104
gacaatactttcgcctgttcctcta

SEQ ID NO: 379728 - DNA, 25 bp, Artificial
  probe
  misc_feature (1)..(25): SEQ ID NO: 4315; WAN024CNY; Start 81; Stop 105
acaatactttcgcctgttcctctag

SEQ ID NO: 379729 - DNA, 25 bp, Artificial
  probe
  misc_feature (1)..(25): SEQ ID NO: 4315; WAN024CNY; Start 1; Stop 25
gtgttgtataggtcgaaactaattt

SEQ ID NO: 379730 - DNA, 25 bp, Artificial
  probe
  misc_feature (1)..(25): SEQ ID NO: 4315; WAN024CNY; Start 64; Stop 88
cgttatcaaaatgctcgacaatact

SEQ ID NO: 379731 - DNA, 25 bp, Artificial
  probe
  misc_feature (1)..(25): SEQ ID NO: 4315; WAN024CNY; Start 5; Stop 29
tgtataggtcgaaactaattttgca

SEQ ID NO: 379732 - DNA, 25 bp, Artificial
  probe
  misc_feature (1)..(25): SEQ ID NO: 4315; WAN024CNY; Start 65; Stop 89
gttatcaaaatgctcgacaatactt

SEQ ID NO: 379733 - DNA, 25 bp, Artificial
  probe
  misc_feature (1)..(25): SEQ ID NO: 4315; WAN024CNY; Start 67; Stop 91
tatcaaaatgctcgacaatactttc

SEQ ID NO: 379734 - DNA, 25 bp, Artificial
  probe
  misc_feature (1)..(25): SEQ ID NO: 4315; WAN024CNY; Start 4; Stop 28
ttgtataggtcgaaactaattttgc

SEQ ID NO: 379735 - DNA, 25 bp, Artificial
  probe
  misc_feature (1)..(25): SEQ ID NO: 4315; WAN024CNY; Start 56; Stop 80
tgagatatcgttatcaaaatgctcg

SEQ ID NO: 379736 - DNA, 25 bp, Artificial
  probe
  misc_feature (1)..(25): SEQ ID NO: 4315; WAN024CNY; Start 66; Stop 90
ttatcaaaatgctcgacaatacttt

SEQ ID NO: 379737 - DNA, 25 bp, Artificial
  probe
  misc_feature (1)..(25): SEQ ID NO: 4315; WAN024CNY; Start 10; Stop 34
aggtcgaaactaattttgcatattt

SEQ ID NO: 379738 - DNA, 25 bp, Artificial
  probe
  misc_feature (1)..(25): SEQ ID NO: 4315; WAN024CNY; Start 6; Stop 30
gtataggtcgaaactaattttgcat

SEQ ID NO: 379739 - DNA, 25 bp, Artificial
  probe
  misc_feature (1)..(25): SEQ ID NO: 4315; WAN024CNY; Start 47; Stop 71
aagtgcttttgagatatcgttatca

SEQ ID NO: 379740 - DNA, 25 bp, Artificial
  probe
  misc_feature (1)..(25): SEQ ID NO: 4315; WAN024CNY; Start 63; Stop 87
tcgttatcaaaatgctcgacaatac

SEQ ID NO: 379741 - DNA, 25 bp, Artificial
  probe
  misc_feature (1)..(25): SEQ ID NO: 4315; WAN024CNY; Start 68; Stop 92
atcaaaatgctcgacaatactttcg

SEQ ID NO: 379742 - DNA, 25 bp, Artificial
  probe
  misc_feature (1)..(25): SEQ ID NO: 4315; WAN024CNY; Start 62; Stop 86
atcgttatcaaaatgctcgacaata

SEQ ID NO: 379743 - DNA, 25 bp, Artificial
  probe
  misc_feature (1)..(25): SEQ ID NO: 4315; WAN024CNY; Start 61; Stop 85
tatcgttatcaaaatgctcgacaat

SEQ ID NO: 379744 - DNA, 25 bp, Artificial
  probe
  misc_feature (1)..(25): SEQ ID NO: 4315; WAN024CNY; Start 60; Stop 84
atatcgttatcaaaatgctcgacaa

SEQ ID NO: 379745 - DNA, 25 bp, Artificial
  probe
  misc_feature (1)..(25): SEQ ID NO: 4315; WAN024CNY; Start 11; Stop 35
ggtcgaaactaattttgcatatttt

SEQ ID NO: 379746 - DNA, 25 bp, Artificial
  probe
  misc_feature (1)..(25): SEQ ID NO: 4315; WAN024CNY; Start 9; Stop 33
taggtcgaaactaattttgcatatt

SEQ ID NO: 379747 - DNA, 25 bp, Artificial
  probe
  misc_feature (1)..(25): SEQ ID NO: 4315; WAN024CNY; Start 46; Stop 70
aaagtgcttttgagatatcgttatc

SEQ ID NO: 379748 - DNA, 25 bp, Artificial
  probe
  misc_feature (1)..(25): SEQ ID NO: 4315; WAN024CNY; Start 59; Stop 83
gatatcgttatcaaaatgctcgaca

SEQ ID NO: 379749 - DNA, 25 bp, Artificial
  probe
  misc_feature (1)..(25): SEQ ID NO: 4315; WAN024CNY; Start 58; Stop 82
agatatcgttatcaaaatgctcgac

SEQ ID NO: 379750 - DNA, 25 bp, Artificial
  probe
  misc_feature (1)..(25): SEQ ID NO: 4315; WAN024CNY; Start 57; Stop 81
gagatatcgttatcaaaatgctcga

SEQ ID NO: 379751 - DNA, 25 bp, Artificial
  probe
  misc_feature (1)..(25): SEQ ID NO: 4315; WAN024CNY; Start 8; Stop 32
ataggtcgaaactaattttgcatat

SEQ ID NO: 379752 - DNA, 25 bp, Artificial
  probe
  misc_feature (1)..(25): SEQ ID NO: 4315; WAN024CNY; Start 2; Stop 26
tgttgtataggtcgaaactaatttt

SEQ ID NO: 379753 - DNA, 25 bp, Artificial
  probe
  misc_feature (1)..(25): SEQ ID NO: 4315; WAN024CNY; Start 3; Stop 27
gttgtataggtcgaaactaattttg

SEQ ID NO: 379754 - DNA, 25 bp, Artificial
  probe
  misc_feature (1)..(25): SEQ ID NO: 4315; WAN024CNY; Start 45; Stop 69
aaaagtgcttttgagatatcgttat

SEQ ID NO: 379755 - DNA, 25 bp, Artificial
  probe
  misc_feature (1)..(25): SEQ ID NO: 4315; WAN024CNY; Start 72; Stop 96
aaatgctcgacaatactttcgcctg

SEQ ID NO: 379756 - DNA, 25 bp, Artificial
  probe
  misc_feature (1)..(25): SEQ ID NO: 4315; WAN024CNY; Start 48; Stop 72
agtgcttttgagatatcgttatcaa

SEQ ID NO: 379757 - DNA, 25 bp, Artificial
  probe
  misc_feature (1)..(25): SEQ ID NO: 4315; WAN024CNY; Start 7; Stop 31
tataggtcgaaactaattttgcata

SEQ ID NO: 379758 - DNA, 25 bp, Artificial
  probe
  misc_feature (1)..(25): SEQ ID NO: 4315; WAN024CNY; Start 69; Stop 93
tcaaaatgctcgacaatactttcgc

SEQ ID NO: 379759 - DNA, 25 bp, Artificial
  probe
  misc_feature (1)..(25): SEQ ID NO: 4315; WAN024CNY; Start 79; Stop 103
cgacaatactttcgcctgttcctct

SEQ ID NO: 379760 - DNA, 25 bp, Artificial
  probe
  misc_feature (1)..(25): SEQ ID NO: 4316; WAN024G3Q; Start 290; Stop 314
tccatccagtcactcatatagtagt

SEQ ID NO: 379761 - DNA, 25 bp, Artificial
  probe
  misc_feature (1)..(25): SEQ ID NO: 4316; WAN024G3Q; Start 291; Stop 315
ccatccagtcactcatatagtagtt

SEQ ID NO: 379762 - DNA, 25 bp, Artificial
  probe
  misc_feature (1)..(25): SEQ ID NO: 4316; WAN024G3Q; Start 289; Stop 313
ttccatccagtcactcatatagtag

SEQ ID NO: 379763 - DNA, 25 bp, Artificial
  probe
  misc_feature (1)..(25): SEQ ID NO: 4316; WAN024G3Q; Start 288; Stop 312
cttccatccagtcactcatatagta

SEQ ID NO: 379764 - DNA, 25 bp, Artificial
  probe
  misc_feature (1)..(25): SEQ ID NO: 4316; WAN024G3Q; Start 287; Stop 311
gcttccatccagtcactcatatagt

SEQ ID NO: 379765 - DNA, 25 bp, Artificial
  probe
  misc_feature (1)..(25): SEQ ID NO: 4316; WAN024G3Q; Start 294; Stop 318
tccagtcactcatatagtagttgat

SEQ ID NO: 379766 - DNA, 25 bp, Artificial
  probe
  misc_feature (1)..(25): SEQ ID NO: 4316; WAN024G3Q; Start 293; Stop 317
atccagtcactcatatagtagttga

SEQ ID NO: 379767 - DNA, 25 bp, Artificial
  probe
  misc_feature (1)..(25): SEQ ID NO: 4316; WAN024G3Q; Start 292; Stop 316
catccagtcactcatatagtagttg

SEQ ID NO: 379768 - DNA, 25 bp, Artificial
  probe
  misc_feature (1)..(25): SEQ ID NO: 4316; WAN024G3Q; Start 286; Stop 310
ggcttccatccagtcactcatatag

SEQ ID NO: 379769 - DNA, 25 bp, Artificial
  probe
  misc_feature (1)..(25): SEQ ID NO: 4316; WAN024G3Q; Start 285; Stop 309
aggcttccatccagtcactcatata

SEQ ID NO: 379770 - DNA, 25 bp, Artificial
  probe
  misc_feature (1)..(25): SEQ ID NO: 4316; WAN024G3Q; Start 295; Stop 319
ccagtcactcatatagtagttgatt

SEQ ID NO: 379771 - DNA, 25 bp, Artificial
  probe
  misc_feature (1)..(25): SEQ ID NO: 4316; WAN024G3Q; Start 105; Stop 129
taggataatctttcttcacacgcat

SEQ ID NO: 379772 - DNA, 25 bp, Artificial
  probe
  misc_feature (1)..(25): SEQ ID NO: 4316; WAN024G3Q; Start 103; Stop 127
gttaggataatctttcttcacacgc

SEQ ID NO: 379773 - DNA, 25 bp, Artificial
  probe
  misc_feature (1)..(25): SEQ ID NO: 4316; WAN024G3Q; Start 104; Stop 128
ttaggataatctttcttcacacgca

SEQ ID NO: 379774 - DNA, 25 bp, Artificial
  probe
  misc_feature (1)..(25): SEQ ID NO: 4316; WAN024G3Q; Start 264; Stop 288
taatttcagtttctccatcaaaggc

SEQ ID NO: 379775 - DNA, 25 bp, Artificial
  probe
  misc_feature (1)..(25): SEQ ID NO: 4316; WAN024G3Q; Start 212; Stop 236
acacctttgatttgatacttagagc

SEQ ID NO: 379776 - DNA, 25 bp, Artificial
  probe
  misc_feature (1)..(25): SEQ ID NO: 4316; WAN024G3Q; Start 298; Stop 322
gtcactcatatagtagttgattcct

SEQ ID NO: 379777 - DNA, 25 bp, Artificial
  probe
  misc_feature (1)..(25): SEQ ID NO: 4316; WAN024G3Q; Start 297; Stop 321
agtcactcatatagtagttgattcc

SEQ ID NO: 379778 - DNA, 25 bp, Artificial
  probe
  misc_feature (1)..(25): SEQ ID NO: 4316; WAN024G3Q; Start 266; Stop 290
atttcagtttctccatcaaaggctt

SEQ ID NO: 379779 - DNA, 25 bp, Artificial
  probe
  misc_feature (1)..(25): SEQ ID NO: 4316; WAN024G3Q; Start 154; Stop 178
gtagataatccaatcccaatccgtg

SEQ ID NO: 379780 - DNA, 25 bp, Artificial
  probe
  misc_feature (1)..(25): SEQ ID NO: 4316; WAN024G3Q; Start 102; Stop 126
agttaggataatctttcttcacacg

SEQ ID NO: 379781 - DNA, 25 bp, Artificial
  probe
  misc_feature (1)..(25): SEQ ID NO: 4316; WAN024G3Q; Start 207; Stop 231
gaccaacacctttgatttgatactt

SEQ ID NO: 379782 - DNA, 25 bp, Artificial
  probe
  misc_feature (1)..(25): SEQ ID NO: 4316; WAN024G3Q; Start 265; Stop 289
aatttcagtttctccatcaaaggct

SEQ ID NO: 379783 - DNA, 25 bp, Artificial
  probe
  misc_feature (1)..(25): SEQ ID NO: 4316; WAN024G3Q; Start 284; Stop 308
aaggcttccatccagtcactcatat

SEQ ID NO: 379784 - DNA, 25 bp, Artificial
  probe
  misc_feature (1)..(25): SEQ ID NO: 4316; WAN024G3Q; Start 55; Stop 79
ctcatctttatagccgagaccattt

SEQ ID NO: 379785 - DNA, 25 bp, Artificial
  probe
  misc_feature (1)..(25): SEQ ID NO: 4316; WAN024G3Q; Start 267; Stop 291
tttcagtttctccatcaaaggcttc

SEQ ID NO: 379786 - DNA, 25 bp, Artificial
  probe
  misc_feature (1)..(25): SEQ ID NO: 4316; WAN024G3Q; Start 208; Stop 232
accaacacctttgatttgatactta

SEQ ID NO: 379787 - DNA, 25 bp, Artificial
  probe
  misc_feature (1)..(25): SEQ ID NO: 4316; WAN024G3Q; Start 206; Stop 230
cgaccaacacctttgatttgatact

SEQ ID NO: 379788 - DNA, 25 bp, Artificial
  probe
  misc_feature (1)..(25): SEQ ID NO: 4316; WAN024G3Q; Start 204; Stop 228
gacgaccaacacctttgatttgata

SEQ ID NO: 379789 - DNA, 25 bp, Artificial
  probe
  misc_feature (1)..(25): SEQ ID NO: 4316; WAN024G3Q; Start 153; Stop 177
ggtagataatccaatcccaatccgt

SEQ ID NO: 379790 - DNA, 25 bp, Artificial
  probe
  misc_feature (1)..(25): SEQ ID NO: 4316; WAN024G3Q; Start 24; Stop 48
gaccatcatcgtaaacagtgttatc

SEQ ID NO: 379791 - DNA, 25 bp, Artificial
  probe
  misc_feature (1)..(25): SEQ ID NO: 4316; WAN024G3Q; Start 54; Stop 78
actcatctttatagccgagaccatt

SEQ ID NO: 379792 - DNA, 25 bp, Artificial
  probe
  misc_feature (1)..(25): SEQ ID NO: 4316; WAN024G3Q; Start 53; Stop 77
aactcatctttatagccgagaccat

SEQ ID NO: 379793 - DNA, 25 bp, Artificial
  probe
  misc_feature (1)..(25): SEQ ID NO: 4317; WAN024FNL; Start 118; Stop 142
gctatcgttgcttattatggtagtg

SEQ ID NO: 379794 - DNA, 25 bp, Artificial
  probe
  misc_feature (1)..(25): SEQ ID NO: 4317; WAN024FNL; Start 119; Stop 143
ctatcgttgcttattatggtagtga

SEQ ID NO: 379795 - DNA, 25 bp, Artificial
  probe
  misc_feature (1)..(25): SEQ ID NO: 4317; WAN024FNL; Start 520; Stop 544
aacgagtcttatattcagcgatcta

SEQ ID NO: 379796 - DNA, 25 bp, Artificial
  probe
  misc_feature (1)..(25): SEQ ID NO: 4317; WAN024FNL; Start 521; Stop 545
acgagtcttatattcagcgatctat

SEQ ID NO: 379797 - DNA, 25 bp, Artificial
  probe
  misc_feature (1)..(25): SEQ ID NO: 4317; WAN024FNL; Start 653; Stop 677
agaatatgtcaactgaacaggtgaa

SEQ ID NO: 379798 - DNA, 25 bp, Artificial
  probe
  misc_feature (1)..(25): SEQ ID NO: 4317; WAN024FNL; Start 652; Stop 676
gagaatatgtcaactgaacaggtga

SEQ ID NO: 379799 - DNA, 25 bp, Artificial
  probe
  misc_feature (1)..(25): SEQ ID NO: 4317; WAN024FNL; Start 651; Stop 675
tgagaatatgtcaactgaacaggtg

SEQ ID NO: 379800 - DNA, 25 bp, Artificial
  probe
  misc_feature (1)..(25): SEQ ID NO: 4317; WAN024FNL; Start 120; Stop 144
tatcgttgcttattatggtagtgaa

SEQ ID NO: 379801 - DNA, 25 bp, Artificial
  probe
  misc_feature (1)..(25): SEQ ID NO: 4317; WAN024FNL; Start 522; Stop 546
cgagtcttatattcagcgatctatt

SEQ ID NO: 379802 - DNA, 25 bp, Artificial
  probe
  misc_feature (1)..(25): SEQ ID NO: 4317; WAN024FNL; Start 296; Stop 320
tatggtggatgagcgttgacaatta

SEQ ID NO: 379803 - DNA, 25 bp, Artificial
  probe
  misc_feature (1)..(25): SEQ ID NO: 4317; WAN024FNL; Start 161; Stop 185
tgaatcctgcgtttagagaatatgt

SEQ ID NO: 379804 - DNA, 25 bp, Artificial
  probe
  misc_feature (1)..(25): SEQ ID NO: 4317; WAN024FNL; Start 160; Stop 184
gtgaatcctgcgtttagagaatatg

SEQ ID NO: 379805 - DNA, 25 bp, Artificial
  probe
  misc_feature (1)..(25): SEQ ID NO: 4317; WAN024FNL; Start 159; Stop 183
ggtgaatcctgcgtttagagaatat

SEQ ID NO: 379806 - DNA, 25 bp, Artificial
  probe
  misc_feature (1)..(25): SEQ ID NO: 4317; WAN024FNL; Start 297; Stop 321
atggtggatgagcgttgacaattat

SEQ ID NO: 379807 - DNA, 25 bp, Artificial
  probe
  misc_feature (1)..(25): SEQ ID NO: 4317; WAN024FNL; Start 162; Stop 186
gaatcctgcgtttagagaatatgtt

SEQ ID NO: 379808 - DNA, 25 bp, Artificial
  probe
  misc_feature (1)..(25): SEQ ID NO: 4317; WAN024FNL; Start 127; Stop 151
gcttattatggtagtgaaagtgctc

SEQ ID NO: 379809 - DNA, 25 bp, Artificial
  probe
  misc_feature (1)..(25): SEQ ID NO: 4317; WAN024FNL; Start 126; Stop 150
tgcttattatggtagtgaaagtgct

SEQ ID NO: 379810 - DNA, 25 bp, Artificial
  probe
  misc_feature (1)..(25): SEQ ID NO: 4317; WAN024FNL; Start 125; Stop 149
ttgcttattatggtagtgaaagtgc

SEQ ID NO: 379811 - DNA, 25 bp, Artificial
  probe
  misc_feature (1)..(25): SEQ ID NO: 4317; WAN024FNL; Start 123; Stop 147
cgttgcttattatggtagtgaaagt

SEQ ID NO: 379812 - DNA, 25 bp, Artificial
  probe
  misc_feature (1)..(25): SEQ ID NO: 4317; WAN024FNL; Start 72; Stop 96
gctcgtccatcaattagtttattct

SEQ ID NO: 379813 - DNA, 25 bp, Artificial
  probe
  misc_feature (1)..(25): SEQ ID NO: 4317; WAN024FNL; Start 164; Stop 188
atcctgcgtttagagaatatgtttc

SEQ ID NO: 379814 - DNA, 25 bp, Artificial
  probe
  misc_feature (1)..(25): SEQ ID NO: 4317; WAN024FNL; Start 128; Stop 152
cttattatggtagtgaaagtgctcc

SEQ ID NO: 379815 - DNA, 25 bp, Artificial
  probe
  misc_feature (1)..(25): SEQ ID NO: 4317; WAN024FNL; Start 122; Stop 146
tcgttgcttattatggtagtgaaag

SEQ ID NO: 379816 - DNA, 25 bp, Artificial
  probe
  misc_feature (1)..(25): SEQ ID NO: 4317; WAN024FNL; Start 163; Stop 187
aatcctgcgtttagagaatatgttt

SEQ ID NO: 379817 - DNA, 25 bp, Artificial
  probe
  misc_feature (1)..(25): SEQ ID NO: 4317; WAN024FNL; Start 863; Stop 887
ccaacattattgagaccctgaaatc

SEQ ID NO: 379818 - DNA, 25 bp, Artificial
  probe
  misc_feature (1)..(25): SEQ ID NO: 4317; WAN024FNL; Start 298; Stop 322
tggtggatgagcgttgacaattatt

SEQ ID NO: 379819 - DNA, 25 bp, Artificial
  probe
  misc_feature (1)..(25): SEQ ID NO: 4317; WAN024FNL; Start 121; Stop 145
atcgttgcttattatggtagtgaaa

SEQ ID NO: 379820 - DNA, 25 bp, Artificial
  probe
  misc_feature (1)..(25): SEQ ID NO: 4317; WAN024FNL; Start 302; Stop 326
ggatgagcgttgacaattatttgaa

SEQ ID NO: 379821 - DNA, 25 bp, Artificial
  probe
  misc_feature (1)..(25): SEQ ID NO: 4317; WAN024FNL; Start 312; Stop 336
tgacaattatttgaagcgtaatggt

SEQ ID NO: 379822 - DNA, 25 bp, Artificial
  probe
  misc_feature (1)..(25): SEQ ID NO: 4317; WAN024FNL; Start 453; Stop 477
tgaatacgccaagcaatttcttcta

SEQ ID NO: 379823 - DNA, 25 bp, Artificial
  probe
  misc_feature (1)..(25): SEQ ID NO: 4317; WAN024FNL; Start 303; Stop 327
gatgagcgttgacaattatttgaag

SEQ ID NO: 379824 - DNA, 25 bp, Artificial
  probe
  misc_feature (1)..(25): SEQ ID NO: 4317; WAN024FNL; Start 519; Stop 543
aaacgagtcttatattcagcgatct

SEQ ID NO: 379825 - DNA, 25 bp, Artificial
  probe
  misc_feature (1)..(25): SEQ ID NO: 4317; WAN024FNL; Start 454; Stop 478
gaatacgccaagcaatttcttctag

SEQ ID NO: 379826 - DNA, 25 bp, Artificial
  probe
  misc_feature (1)..(25): SEQ ID NO: 4318; WAN024COK; Start 1876; Stop 1900
gacttagaggatgttgttgtggata

SEQ ID NO: 379827 - DNA, 25 bp, Artificial
  probe
  misc_feature (1)..(25): SEQ ID NO: 4318; WAN024COK; Start 1320; Stop 1344
aatgtctcaactctattcgtctctc

SEQ ID NO: 379828 - DNA, 25 bp, Artificial
  probe
  misc_feature (1)..(25): SEQ ID NO: 4318; WAN024COK; Start 1321; Stop 1345
atgtctcaactctattcgtctctct

SEQ ID NO: 379829 - DNA, 25 bp, Artificial
  probe
  misc_feature (1)..(25): SEQ ID NO: 4318; WAN024COK; Start 1877; Stop 1901
acttagaggatgttgttgtggatat

SEQ ID NO: 379830 - DNA, 25 bp, Artificial
  probe
  misc_feature (1)..(25): SEQ ID NO: 4318; WAN024COK; Start 1322; Stop 1346
tgtctcaactctattcgtctctctt

SEQ ID NO: 379831 - DNA, 25 bp, Artificial
  probe
  misc_feature (1)..(25): SEQ ID NO: 4318; WAN024COK; Start 1905; Stop 1929
tgagagatatacagaagaggtagcg

SEQ ID NO: 379832 - DNA, 25 bp, Artificial
  probe
  misc_feature (1)..(25): SEQ ID NO: 4318; WAN024COK; Start 1904; Stop 1928
ttgagagatatacagaagaggtagc

SEQ ID NO: 379833 - DNA, 25 bp, Artificial
  probe
  misc_feature (1)..(25): SEQ ID NO: 4318; WAN024COK; Start 1325; Stop 1349
ctcaactctattcgtctctcttgtt

SEQ ID NO: 379834 - DNA, 25 bp, Artificial
  probe
  misc_feature (1)..(25): SEQ ID NO: 4318; WAN024COK; Start 1323; Stop 1347
gtctcaactctattcgtctctcttg

SEQ ID NO: 379835 - DNA, 25 bp, Artificial
  probe
  misc_feature (1)..(25): SEQ ID NO: 4318; WAN024COK; Start 1906; Stop 1930
gagagatatacagaagaggtagcgg

SEQ ID NO: 379836 - DNA, 25 bp, Artificial
  probe
  misc_feature (1)..(25): SEQ ID NO: 4318; WAN024COK; Start 1324; Stop 1348
tctcaactctattcgtctctcttgt

SEQ ID NO: 379837 - DNA, 25 bp, Artificial
  probe
  misc_feature (1)..(25): SEQ ID NO: 4318; WAN024COK; Start 1852; Stop 1876
aatcgtctaatagatggttctcgtg

SEQ ID NO: 379838 - DNA, 25 bp, Artificial
  probe
  misc_feature (1)..(25): SEQ ID NO: 4318; WAN024COK; Start 931; Stop 955
aatgagatggtactggttgataagg

SEQ ID NO: 379839 - DNA, 25 bp, Artificial
  probe
  misc_feature (1)..(25): SEQ ID NO: 4318; WAN024COK; Start 1875; Stop 1899
tgacttagaggatgttgttgtggat

SEQ ID NO: 379840 - DNA, 25 bp, Artificial
  probe
  misc_feature (1)..(25): SEQ ID NO: 4318; WAN024COK; Start 1860; Stop 1884
aatagatggttctcgtgacttagag

SEQ ID NO: 379841 - DNA, 25 bp, Artificial
  probe
  misc_feature (1)..(25): SEQ ID NO: 4318; WAN024COK; Start 1853; Stop 1877
atcgtctaatagatggttctcgtga

SEQ ID NO: 379842 - DNA, 25 bp, Artificial
  probe
  misc_feature (1)..(25): SEQ ID NO: 4318; WAN024COK; Start 1859; Stop 1883
taatagatggttctcgtgacttaga

SEQ ID NO: 379843 - DNA, 25 bp, Artificial
  probe
  misc_feature (1)..(25): SEQ ID NO: 4318; WAN024COK; Start 1156; Stop 1180
aatatgtctgtagtacgcattccaa

SEQ ID NO: 379844 - DNA, 25 bp, Artificial
  probe
  misc_feature (1)..(25): SEQ ID NO: 4318; WAN024COK; Start 701; Stop 725
atgcgatcattgatacacttgtaac

SEQ ID NO: 379845 - DNA, 25 bp, Artificial
  probe
  misc_feature (1)..(25): SEQ ID NO: 4318; WAN024COK; Start 1901; Stop 1925
tcattgagagatatacagaagaggt

SEQ ID NO: 379846 - DNA, 25 bp, Artificial
  probe
  misc_feature (1)..(25): SEQ ID NO: 4318; WAN024COK; Start 702; Stop 726
tgcgatcattgatacacttgtaaca

SEQ ID NO: 379847 - DNA, 25 bp, Artificial
  probe
  misc_feature (1)..(25): SEQ ID NO: 4318; WAN024COK; Start 698; Stop 722
actatgcgatcattgatacacttgt

SEQ ID NO: 379848 - DNA, 25 bp, Artificial
  probe
  misc_feature (1)..(25): SEQ ID NO: 4318; WAN024COK; Start 1157; Stop 1181
atatgtctgtagtacgcattccaac

SEQ ID NO: 379849 - DNA, 25 bp, Artificial
  probe
  misc_feature (1)..(25): SEQ ID NO: 4318; WAN024COK; Start 1155; Stop 1179
caatatgtctgtagtacgcattcca

SEQ ID NO: 379850 - DNA, 25 bp, Artificial
  probe
  misc_feature (1)..(25): SEQ ID NO: 4318; WAN024COK; Start 1861; Stop 1885
atagatggttctcgtgacttagagg

SEQ ID NO: 379851 - DNA, 25 bp, Artificial
  probe
  misc_feature (1)..(25): SEQ ID NO: 4318; WAN024COK; Start 675; Stop 699
ttctcctcgtgttcagtctaattac

SEQ ID NO: 379852 - DNA, 25 bp, Artificial
  probe
  misc_feature (1)..(25): SEQ ID NO: 4318; WAN024COK; Start 674; Stop 698
gttctcctcgtgttcagtctaatta

SEQ ID NO: 379853 - DNA, 25 bp, Artificial
  probe
  misc_feature (1)..(25): SEQ ID NO: 4318; WAN024COK; Start 1857; Stop 1881
tctaatagatggttctcgtgactta

SEQ ID NO: 379854 - DNA, 25 bp, Artificial
  probe
  misc_feature (1)..(25): SEQ ID NO: 4318; WAN024COK; Start 703; Stop 727
gcgatcattgatacacttgtaacaa

SEQ ID NO: 379855 - DNA, 25 bp, Artificial
  probe
  misc_feature (1)..(25): SEQ ID NO: 4318; WAN024COK; Start 699; Stop 723
ctatgcgatcattgatacacttgta

SEQ ID NO: 379856 - DNA, 25 bp, Artificial
  probe
  misc_feature (1)..(25): SEQ ID NO: 4318; WAN024COK; Start 697; Stop 721
tactatgcgatcattgatacacttg

SEQ ID NO: 379857 - DNA, 25 bp, Artificial
  probe
  misc_feature (1)..(25): SEQ ID NO: 4318; WAN024COK; Start 1856; Stop 1880
gtctaatagatggttctcgtgactt

SEQ ID NO: 379858 - DNA, 25 bp, Artificial
  probe
  misc_feature (1)..(25): SEQ ID NO: 4318; WAN024COK; Start 710; Stop 734
ttgatacacttgtaacaaccttggt

SEQ ID NO: 379859 - DNA, 25 bp, Artificial
  probe
  misc_feature (1)..(25): SEQ ID NO: 4319; WAN024DB8; Start 460; Stop 484
tttagtttgttccgtcagtttaagg

SEQ ID NO: 379860 - DNA, 25 bp, Artificial
  probe
  misc_feature (1)..(25): SEQ ID NO: 4319; WAN024DB8; Start 511; Stop 535
cgggattatcttgaatttcggtatg

SEQ ID NO: 379861 - DNA, 25 bp, Artificial
  probe
  misc_feature (1)..(25): SEQ ID NO: 4319; WAN024DB8; Start 152; Stop 176
caagtctggaagaaagtcaatatgc

SEQ ID NO: 379862 - DNA, 25 bp, Artificial
  probe
  misc_feature (1)..(25): SEQ ID NO: 4319; WAN024DB8; Start 151; Stop 175
gcaagtctggaagaaagtcaatatg

SEQ ID NO: 379863 - DNA, 25 bp, Artificial
  probe
  misc_feature (1)..(25): SEQ ID NO: 4319; WAN024DB8; Start 461; Stop 485
ttagtttgttccgtcagtttaaggg

SEQ ID NO: 379864 - DNA, 25 bp, Artificial
  probe
  misc_feature (1)..(25): SEQ ID NO: 4319; WAN024DB8; Start 512; Stop 536
gggattatcttgaatttcggtatgt

SEQ ID NO: 379865 - DNA, 25 bp, Artificial
  probe
  misc_feature (1)..(25): SEQ ID NO: 4319; WAN024DB8; Start 150; Stop 174
ggcaagtctggaagaaagtcaatat

SEQ ID NO: 379866 - DNA, 25 bp, Artificial
  probe
  misc_feature (1)..(25): SEQ ID NO: 4319; WAN024DB8; Start 510; Stop 534
gcgggattatcttgaatttcggtat

SEQ ID NO: 379867 - DNA, 25 bp, Artificial
  probe
  misc_feature (1)..(25): SEQ ID NO: 4319; WAN024DB8; Start 475; Stop 499
cagtttaagggaagtgatcgttaca

SEQ ID NO: 379868 - DNA, 25 bp, Artificial
  probe
  misc_feature (1)..(25): SEQ ID NO: 4319; WAN024DB8; Start 506; Stop 530
aaatgcgggattatcttgaatttcg

SEQ ID NO: 379869 - DNA, 25 bp, Artificial
  probe
  misc_feature (1)..(25): SEQ ID NO: 4319; WAN024DB8; Start 459; Stop 483
atttagtttgttccgtcagtttaag

SEQ ID NO: 379870 - DNA, 25 bp, Artificial
  probe
  misc_feature (1)..(25): SEQ ID NO: 4319; WAN024DB8; Start 458; Stop 482
gatttagtttgttccgtcagtttaa

SEQ ID NO: 379871 - DNA, 25 bp, Artificial
  probe
  misc_feature (1)..(25): SEQ ID NO: 4319; WAN024DB8; Start 333; Stop 357
aggatttatgacagaggttgttaga

SEQ ID NO: 379872 - DNA, 25 bp, Artificial
  probe
  misc_feature (1)..(25): SEQ ID NO: 4319; WAN024DB8; Start 474; Stop 498
tcagtttaagggaagtgatcgttac

SEQ ID NO: 379873 - DNA, 25 bp, Artificial
  probe
  misc_feature (1)..(25): SEQ ID NO: 4319; WAN024DB8; Start 473; Stop 497
gtcagtttaagggaagtgatcgtta

SEQ ID NO: 379874 - DNA, 25 bp, Artificial
  probe
  misc_feature (1)..(25): SEQ ID NO: 4319; WAN024DB8; Start 507; Stop 531
aatgcgggattatcttgaatttcgg

SEQ ID NO: 379875 - DNA, 25 bp, Artificial
  probe
  misc_feature (1)..(25): SEQ ID NO: 4319; WAN024DB8; Start 331; Stop 355
caaggatttatgacagaggttgtta

SEQ ID NO: 379876 - DNA, 25 bp, Artificial
  probe
  misc_feature (1)..(25): SEQ ID NO: 4319; WAN024DB8; Start 149; Stop 173
aggcaagtctggaagaaagtcaata

SEQ ID NO: 379877 - DNA, 25 bp, Artificial
  probe
  misc_feature (1)..(25): SEQ ID NO: 4319; WAN024DB8; Start 334; Stop 358
ggatttatgacagaggttgttagaa

SEQ ID NO: 379878 - DNA, 25 bp, Artificial
  probe
  misc_feature (1)..(25): SEQ ID NO: 4319; WAN024DB8; Start 332; Stop 356
aaggatttatgacagaggttgttag

SEQ ID NO: 379879 - DNA, 25 bp, Artificial
  probe
  misc_feature (1)..(25): SEQ ID NO: 4319; WAN024DB8; Start 330; Stop 354
gcaaggatttatgacagaggttgtt

SEQ ID NO: 379880 - DNA, 25 bp, Artificial
  probe
  misc_feature (1)..(25): SEQ ID NO: 4319; WAN024DB8; Start 450; Stop 474
taagtctggatttagtttgttccgt

SEQ ID NO: 379881 - DNA, 25 bp, Artificial
  probe
  misc_feature (1)..(25): SEQ ID NO: 4319; WAN024DB8; Start 457; Stop 481
ggatttagtttgttccgtcagttta

SEQ ID NO: 379882 - DNA, 25 bp, Artificial
  probe
  misc_feature (1)..(25): SEQ ID NO: 4319; WAN024DB8; Start 449; Stop 473
ttaagtctggatttagtttgttccg

SEQ ID NO: 379883 - DNA, 25 bp, Artificial
  probe
  misc_feature (1)..(25): SEQ ID NO: 4319; WAN024DB8; Start 509; Stop 533
tgcgggattatcttgaatttcggta

SEQ ID NO: 379884 - DNA, 25 bp, Artificial
  probe
  misc_feature (1)..(25): SEQ ID NO: 4319; WAN024DB8; Start 478; Stop 502
tttaagggaagtgatcgttacacaa

SEQ ID NO: 379885 - DNA, 25 bp, Artificial
  probe
  misc_feature (1)..(25): SEQ ID NO: 4319; WAN024DB8; Start 456; Stop 480
tggatttagtttgttccgtcagttt

SEQ ID NO: 379886 - DNA, 25 bp, Artificial
  probe
  misc_feature (1)..(25): SEQ ID NO: 4319; WAN024DB8; Start 479; Stop 503
ttaagggaagtgatcgttacacaag

SEQ ID NO: 379887 - DNA, 25 bp, Artificial
  probe
  misc_feature (1)..(25): SEQ ID NO: 4319; WAN024DB8; Start 476; Stop 500
agtttaagggaagtgatcgttacac

SEQ ID NO: 379888 - DNA, 25 bp, Artificial
  probe
  misc_feature (1)..(25): SEQ ID NO: 4319; WAN024DB8; Start 451; Stop 475
aagtctggatttagtttgttccgtc

SEQ ID NO: 379889 - DNA, 25 bp, Artificial
  probe
  misc_feature (1)..(25): SEQ ID NO: 4319; WAN024DB8; Start 477; Stop 501
gtttaagggaagtgatcgttacaca

SEQ ID NO: 379890 - DNA, 25 bp, Artificial
  probe
  misc_feature (1)..(25): SEQ ID NO: 4319; WAN024DB8; Start 455; Stop 479
ctggatttagtttgttccgtcagtt

SEQ ID NO: 379891 - DNA, 25 bp, Artificial
  probe
  misc_feature (1)..(25): SEQ ID NO: 4319; WAN024DB8; Start 480; Stop 504
taagggaagtgatcgttacacaaga

SEQ ID NO: 379892 - DNA, 25 bp, Artificial
  probe
  misc_feature (1)..(25): SEQ ID NO: 4320; WAN024FRU; Start 159; Stop 183
tcccataaatatccatcaagacacc

SEQ ID NO: 379893 - DNA, 25 bp, Artificial
  probe
  misc_feature (1)..(25): SEQ ID NO: 4320; WAN024FRU; Start 155; Stop 179
cccatcccataaatatccatcaaga

SEQ ID NO: 379894 - DNA, 25 bp, Artificial
  probe
  misc_feature (1)..(25): SEQ ID NO: 4320; WAN024FRU; Start 161; Stop 185
ccataaatatccatcaagacaccgt

SEQ ID NO: 379895 - DNA, 25 bp, Artificial
  probe
  misc_feature (1)..(25): SEQ ID NO: 4320; WAN024FRU; Start 162; Stop 186
cataaatatccatcaagacaccgtg

SEQ ID NO: 379896 - DNA, 25 bp, Artificial
  probe
  misc_feature (1)..(25): SEQ ID NO: 4320; WAN024FRU; Start 156; Stop 180
ccatcccataaatatccatcaagac

SEQ ID NO: 379897 - DNA, 25 bp, Artificial
  probe
  misc_feature (1)..(25): SEQ ID NO: 4320; WAN024FRU; Start 119; Stop 143
ctcttaccaattccactatctccct

SEQ ID NO: 379898 - DNA, 25 bp, Artificial
  probe
  misc_feature (1)..(25): SEQ ID NO: 4320; WAN024FRU; Start 160; Stop 184
cccataaatatccatcaagacaccg

SEQ ID NO: 379899 - DNA, 25 bp, Artificial
  probe
  misc_feature (1)..(25): SEQ ID NO: 4320; WAN024FRU; Start 154; Stop 178
gcccatcccataaatatccatcaag

SEQ ID NO: 379900 - DNA, 25 bp, Artificial
  probe
  misc_feature (1)..(25): SEQ ID NO: 4320; WAN024FRU; Start 122; Stop 146
ttaccaattccactatctccctgaa

SEQ ID NO: 379901 - DNA, 25 bp, Artificial
  probe
  misc_feature (1)..(25): SEQ ID NO: 4320; WAN024FRU; Start 121; Stop 145
cttaccaattccactatctccctga

SEQ ID NO: 379902 - DNA, 25 bp, Artificial
  probe
  misc_feature (1)..(25): SEQ ID NO: 4320; WAN024FRU; Start 120; Stop 144
tcttaccaattccactatctccctg

SEQ ID NO: 379903 - DNA, 25 bp, Artificial
  probe
  misc_feature (1)..(25): SEQ ID NO: 4320; WAN024FRU; Start 163; Stop 187
ataaatatccatcaagacaccgtgc

SEQ ID NO: 379904 - DNA, 25 bp, Artificial
  probe
  misc_feature (1)..(25): SEQ ID NO: 4320; WAN024FRU; Start 158; Stop 182
atcccataaatatccatcaagacac

SEQ ID NO: 379905 - DNA, 25 bp, Artificial
  probe
  misc_feature (1)..(25): SEQ ID NO: 4320; WAN024FRU; Start 157; Stop 181
catcccataaatatccatcaagaca

SEQ ID NO: 379906 - DNA, 25 bp, Artificial
  probe
  misc_feature (1)..(25): SEQ ID NO: 4320; WAN024FRU; Start 146; Stop 170
atcaagacgcccatcccataaatat

SEQ ID NO: 379907 - DNA, 25 bp, Artificial
  probe
  misc_feature (1)..(25): SEQ ID NO: 4320; WAN024FRU; Start 129; Stop 153
ttccactatctccctgaatcaagac

SEQ ID NO: 379908 - DNA, 25 bp, Artificial
  probe
  misc_feature (1)..(25): SEQ ID NO: 4320; WAN024FRU; Start 145; Stop 169
aatcaagacgcccatcccataaata

SEQ ID NO: 379909 - DNA, 25 bp, Artificial
  probe
  misc_feature (1)..(25): SEQ ID NO: 4320; WAN024FRU; Start 32; Stop 56
agagtaatctcatccttggcaaaga

SEQ ID NO: 379910 - DNA, 25 bp, Artificial
  probe
  misc_feature (1)..(25): SEQ ID NO: 4320; WAN024FRU; Start 147; Stop 171
tcaagacgcccatcccataaatatc

SEQ ID NO: 379911 - DNA, 25 bp, Artificial
  probe
  misc_feature (1)..(25): SEQ ID NO: 4320; WAN024FRU; Start 127; Stop 151
aattccactatctccctgaatcaag

SEQ ID NO: 379912 - DNA, 25 bp, Artificial
  probe
  misc_feature (1)..(25): SEQ ID NO: 4320; WAN024FRU; Start 126; Stop 150
caattccactatctccctgaatcaa

SEQ ID NO: 379913 - DNA, 25 bp, Artificial
  probe
  misc_feature (1)..(25): SEQ ID NO: 4320; WAN024FRU; Start 207; Stop 231
aacgagaatccagatagctagataa

SEQ ID NO: 379914 - DNA, 25 bp, Artificial
  probe
  misc_feature (1)..(25): SEQ ID NO: 4320; WAN024FRU; Start 128; Stop 152
attccactatctccctgaatcaaga

SEQ ID NO: 379915 - DNA, 25 bp, Artificial
  probe
  misc_feature (1)..(25): SEQ ID NO: 4320; WAN024FRU; Start 123; Stop 147
taccaattccactatctccctgaat

SEQ ID NO: 379916 - DNA, 25 bp, Artificial
  probe
  misc_feature (1)..(25): SEQ ID NO: 4320; WAN024FRU; Start 153; Stop 177
cgcccatcccataaatatccatcaa

SEQ ID NO: 379917 - DNA, 25 bp, Artificial
  probe
  misc_feature (1)..(25): SEQ ID NO: 4320; WAN024FRU; Start 34; Stop 58
agtaatctcatccttggcaaagata

SEQ ID NO: 379918 - DNA, 25 bp, Artificial
  probe
  misc_feature (1)..(25): SEQ ID NO: 4320; WAN024FRU; Start 33; Stop 57
gagtaatctcatccttggcaaagat

SEQ ID NO: 379919 - DNA, 25 bp, Artificial
  probe
  misc_feature (1)..(25): SEQ ID NO: 4320; WAN024FRU; Start 151; Stop 175
gacgcccatcccataaatatccatc

SEQ ID NO: 379920 - DNA, 25 bp, Artificial
  probe
  misc_feature (1)..(25): SEQ ID NO: 4320; WAN024FRU; Start 125; Stop 149
ccaattccactatctccctgaatca

SEQ ID NO: 379921 - DNA, 25 bp, Artificial
  probe
  misc_feature (1)..(25): SEQ ID NO: 4320; WAN024FRU; Start 124; Stop 148
accaattccactatctccctgaatc

SEQ ID NO: 379922 - DNA, 25 bp, Artificial
  probe
  misc_feature (1)..(25): SEQ ID NO: 4320; WAN024FRU; Start 144; Stop 168
gaatcaagacgcccatcccataaat

SEQ ID NO: 379923 - DNA, 25 bp, Artificial
  probe
  misc_feature (1)..(25): SEQ ID NO: 4320; WAN024FRU; Start 35; Stop 59
gtaatctcatccttggcaaagatat

SEQ ID NO: 379924 - DNA, 25 bp, Artificial
  probe
  misc_feature (1)..(25): SEQ ID NO: 4320; WAN024FRU; Start 148; Stop 172
caagacgcccatcccataaatatcc

SEQ ID NO: 379925 - DNA, 25 bp, Artificial
  probe
  misc_feature (1)..(25): SEQ ID NO: 4321; WAN024GJ5; Start 216; Stop 240
cgataaccttgtagataatgctgtg

SEQ ID NO: 379926 - DNA, 25 bp, Artificial
  probe
  misc_feature (1)..(25): SEQ ID NO: 4321; WAN024GJ5; Start 226; Stop 250
gtagataatgctgtgaagacggatt

SEQ ID NO: 379927 - DNA, 25 bp, Artificial
  probe
  misc_feature (1)..(25): SEQ ID NO: 4321; WAN024GJ5; Start 11; Stop 35
cttgcgagttcaccatcatagataa

SEQ ID NO: 379928 - DNA, 25 bp, Artificial
  probe
  misc_feature (1)..(25): SEQ ID NO: 4321; WAN024GJ5; Start 220; Stop 244
aaccttgtagataatgctgtgaaga

SEQ ID NO: 379929 - DNA, 25 bp, Artificial
  probe
  misc_feature (1)..(25): SEQ ID NO: 4321; WAN024GJ5; Start 221; Stop 245
accttgtagataatgctgtgaagac

SEQ ID NO: 379930 - DNA, 25 bp, Artificial
  probe
  misc_feature (1)..(25): SEQ ID NO: 4321; WAN024GJ5; Start 16; Stop 40
gagttcaccatcatagataacgaca

SEQ ID NO: 379931 - DNA, 25 bp, Artificial
  probe
  misc_feature (1)..(25): SEQ ID NO: 4321; WAN024GJ5; Start 28; Stop 52
atagataacgacaccatcacggata

SEQ ID NO: 379932 - DNA, 25 bp, Artificial
  probe
  misc_feature (1)..(25): SEQ ID NO: 4321; WAN024GJ5; Start 17; Stop 41
agttcaccatcatagataacgacac

SEQ ID NO: 379933 - DNA, 25 bp, Artificial
  probe
  misc_feature (1)..(25): SEQ ID NO: 4321; WAN024GJ5; Start 29; Stop 53
tagataacgacaccatcacggataa

SEQ ID NO: 379934 - DNA, 25 bp, Artificial
  probe
  misc_feature (1)..(25): SEQ ID NO: 4321; WAN024GJ5; Start 23; Stop 47
ccatcatagataacgacaccatcac

SEQ ID NO: 379935 - DNA, 25 bp, Artificial
  probe
  misc_feature (1)..(25): SEQ ID NO: 4321; WAN024GJ5; Start 21; Stop 45
caccatcatagataacgacaccatc

SEQ ID NO: 379936 - DNA, 25 bp, Artificial
  probe
  misc_feature (1)..(25): SEQ ID NO: 4321; WAN024GJ5; Start 22; Stop 46
accatcatagataacgacaccatca

SEQ ID NO: 379937 - DNA, 25 bp, Artificial
  probe
  misc_feature (1)..(25): SEQ ID NO: 4321; WAN024GJ5; Start 20; Stop 44
tcaccatcatagataacgacaccat

SEQ ID NO: 379938 - DNA, 25 bp, Artificial
  probe
  misc_feature (1)..(25): SEQ ID NO: 4321; WAN024GJ5; Start 12; Stop 36
ttgcgagttcaccatcatagataac

SEQ ID NO: 379939 - DNA, 25 bp, Artificial
  probe
  misc_feature (1)..(25): SEQ ID NO: 4321; WAN024GJ5; Start 24; Stop 48
catcatagataacgacaccatcacg

SEQ ID NO: 379940 - DNA, 25 bp, Artificial
  probe
  misc_feature (1)..(25): SEQ ID NO: 4321; WAN024GJ5; Start 15; Stop 39
cgagttcaccatcatagataacgac

SEQ ID NO: 379941 - DNA, 25 bp, Artificial
  probe
  misc_feature (1)..(25): SEQ ID NO: 4321; WAN024GJ5; Start 225; Stop 249
tgtagataatgctgtgaagacggat

SEQ ID NO: 379942 - DNA, 25 bp, Artificial
  probe
  misc_feature (1)..(25): SEQ ID NO: 4321; WAN024GJ5; Start 217; Stop 241
gataaccttgtagataatgctgtga

SEQ ID NO: 379943 - DNA, 25 bp, Artificial
  probe
  misc_feature (1)..(25): SEQ ID NO: 4321; WAN024GJ5; Start 19; Stop 43
ttcaccatcatagataacgacacca

SEQ ID NO: 379944 - DNA, 25 bp, Artificial
  probe
  misc_feature (1)..(25): SEQ ID NO: 4321; WAN024GJ5; Start 219; Stop 243
taaccttgtagataatgctgtgaag

SEQ ID NO: 379945 - DNA, 25 bp, Artificial
  probe
  misc_feature (1)..(25): SEQ ID NO: 4321; WAN024GJ5; Start 18; Stop 42
gttcaccatcatagataacgacacc

SEQ ID NO: 379946 - DNA, 25 bp, Artificial
  probe
  misc_feature (1)..(25): SEQ ID NO: 4321; WAN024GJ5; Start 223; Stop 247
cttgtagataatgctgtgaagacgg

SEQ ID NO: 379947 - DNA, 25 bp, Artificial
  probe
  misc_feature (1)..(25): SEQ ID NO: 4321; WAN024GJ5; Start 222; Stop 246
ccttgtagataatgctgtgaagacg

SEQ ID NO: 379948 - DNA, 25 bp, Artificial
  probe
  misc_feature (1)..(25): SEQ ID NO: 4321; WAN024GJ5; Start 224; Stop 248
ttgtagataatgctgtgaagacgga

SEQ ID NO: 379949 - DNA, 25 bp, Artificial
  probe
  misc_feature (1)..(25): SEQ ID NO: 4321; WAN024GJ5; Start 218; Stop 242
ataaccttgtagataatgctgtgaa

SEQ ID NO: 379950 - DNA, 25 bp, Artificial
  probe
  misc_feature (1)..(25): SEQ ID NO: 4321; WAN024GJ5; Start 27; Stop 51
catagataacgacaccatcacggat

SEQ ID NO: 379951 - DNA, 25 bp, Artificial
  probe
  misc_feature (1)..(25): SEQ ID NO: 4321; WAN024GJ5; Start 25; Stop 49
atcatagataacgacaccatcacgg

SEQ ID NO: 379952 - DNA, 25 bp, Artificial
  probe
  misc_feature (1)..(25): SEQ ID NO: 4321; WAN024GJ5; Start 30; Stop 54
agataacgacaccatcacggataac

SEQ ID NO: 379953 - DNA, 25 bp, Artificial
  probe
  misc_feature (1)..(25): SEQ ID NO: 4321; WAN024GJ5; Start 215; Stop 239
tcgataaccttgtagataatgctgt

SEQ ID NO: 379954 - DNA, 25 bp, Artificial
  probe
  misc_feature (1)..(25): SEQ ID NO: 4321; WAN024GJ5; Start 205; Stop 229
ttccatctcttcgataaccttgtag

SEQ ID NO: 379955 - DNA, 25 bp, Artificial
  probe
  misc_feature (1)..(25): SEQ ID NO: 4321; WAN024GJ5; Start 204; Stop 228
cttccatctcttcgataaccttgta

SEQ ID NO: 379956 - DNA, 25 bp, Artificial
  probe
  misc_feature (1)..(25): SEQ ID NO: 4321; WAN024GJ5; Start 201; Stop 225
cttcttccatctcttcgataacctt

SEQ ID NO: 379957 - DNA, 25 bp, Artificial
  probe
  misc_feature (1)..(25): SEQ ID NO: 4321; WAN024GJ5; Start 198; Stop 222
tagcttcttccatctcttcgataac

SEQ ID NO: 379958 - DNA, 25 bp, Artificial
  probe
  misc_feature (1)..(25): SEQ ID NO: 4322; WAN024G4M; Start 190; Stop 214
cttacgcattggtgtcattggaata

SEQ ID NO: 379959 - DNA, 25 bp, Artificial
  probe
  misc_feature (1)..(25): SEQ ID NO: 4322; WAN024G4M; Start 191; Stop 215
ttacgcattggtgtcattggaatac

SEQ ID NO: 379960 - DNA, 25 bp, Artificial
  probe
  misc_feature (1)..(25): SEQ ID NO: 4322; WAN024G4M; Start 37; Stop 61
aaggtctgttacagtagtcttcttc

SEQ ID NO: 379961 - DNA, 25 bp, Artificial
  probe
  misc_feature (1)..(25): SEQ ID NO: 4322; WAN024G4M; Start 102; Stop 126
gagccaacatttcagtcatatcaac

SEQ ID NO: 379962 - DNA, 25 bp, Artificial
  probe
  misc_feature (1)..(25): SEQ ID NO: 4322; WAN024G4M; Start 101; Stop 125
agagccaacatttcagtcatatcaa

SEQ ID NO: 379963 - DNA, 25 bp, Artificial
  probe
  misc_feature (1)..(25): SEQ ID NO: 4322; WAN024G4M; Start 100; Stop 124
aagagccaacatttcagtcatatca

SEQ ID NO: 379964 - DNA, 25 bp, Artificial
  probe
  misc_feature (1)..(25): SEQ ID NO: 4322; WAN024G4M; Start 44; Stop 68
gttacagtagtcttcttcccagttg

SEQ ID NO: 379965 - DNA, 25 bp, Artificial
  probe
  misc_feature (1)..(25): SEQ ID NO: 4322; WAN024G4M; Start 184; Stop 208
aataaccttacgcattggtgtcatt

SEQ ID NO: 379966 - DNA, 25 bp, Artificial
  probe
  misc_feature (1)..(25): SEQ ID NO: 4322; WAN024G4M; Start 99; Stop 123
gaagagccaacatttcagtcatatc

SEQ ID NO: 379967 - DNA, 25 bp, Artificial
  probe
  misc_feature (1)..(25): SEQ ID NO: 4322; WAN024G4M; Start 155; Stop 179
gtcaagtaagattcaaccatgcgtt

SEQ ID NO: 379968 - DNA, 25 bp, Artificial
  probe
  misc_feature (1)..(25): SEQ ID NO: 4322; WAN024G4M; Start 153; Stop 177
cagtcaagtaagattcaaccatgcg

SEQ ID NO: 379969 - DNA, 25 bp, Artificial
  probe
  misc_feature (1)..(25): SEQ ID NO: 4322; WAN024G4M; Start 151; Stop 175
cgcagtcaagtaagattcaaccatg

SEQ ID NO: 379970 - DNA, 25 bp, Artificial
  probe
  misc_feature (1)..(25): SEQ ID NO: 4322; WAN024G4M; Start 38; Stop 62
aggtctgttacagtagtcttcttcc

SEQ ID NO: 379971 - DNA, 25 bp, Artificial
  probe
  misc_feature (1)..(25): SEQ ID NO: 4322; WAN024G4M; Start 43; Stop 67
tgttacagtagtcttcttcccagtt

SEQ ID NO: 379972 - DNA, 25 bp, Artificial
  probe
  misc_feature (1)..(25): SEQ ID NO: 4322; WAN024G4M; Start 104; Stop 128
gccaacatttcagtcatatcaactt

SEQ ID NO: 379973 - DNA, 25 bp, Artificial
  probe
  misc_feature (1)..(25): SEQ ID NO: 4322; WAN024G4M; Start 185; Stop 209
ataaccttacgcattggtgtcattg

SEQ ID NO: 379974 - DNA, 25 bp, Artificial
  probe
  misc_feature (1)..(25): SEQ ID NO: 4322; WAN024G4M; Start 103; Stop 127
agccaacatttcagtcatatcaact

SEQ ID NO: 379975 - DNA, 25 bp, Artificial
  probe
  misc_feature (1)..(25): SEQ ID NO: 4322; WAN024G4M; Start 154; Stop 178
agtcaagtaagattcaaccatgcgt

SEQ ID NO: 379976 - DNA, 25 bp, Artificial
  probe
  misc_feature (1)..(25): SEQ ID NO: 4322; WAN024G4M; Start 98; Stop 122
cgaagagccaacatttcagtcatat

SEQ ID NO: 379977 - DNA, 25 bp, Artificial
  probe
  misc_feature (1)..(25): SEQ ID NO: 4322; WAN024G4M; Start 7; Stop 31
cataagagtcttaacaactgcaagc

SEQ ID NO: 379978 - DNA, 25 bp, Artificial
  probe
  misc_feature (1)..(25): SEQ ID NO: 4322; WAN024G4M; Start 6; Stop 30
tcataagagtcttaacaactgcaag

SEQ ID NO: 379979 - DNA, 25 bp, Artificial
  probe
  misc_feature (1)..(25): SEQ ID NO: 4322; WAN024G4M; Start 105; Stop 129
ccaacatttcagtcatatcaacttc

SEQ ID NO: 379980 - DNA, 25 bp, Artificial
  probe
  misc_feature (1)..(25): SEQ ID NO: 4322; WAN024G4M; Start 183; Stop 207
caataaccttacgcattggtgtcat

SEQ ID NO: 379981 - DNA, 25 bp, Artificial
  probe
  misc_feature (1)..(25): SEQ ID NO: 4322; WAN024G4M; Start 5; Stop 29
ttcataagagtcttaacaactgcaa

SEQ ID NO: 379982 - DNA, 25 bp, Artificial
  probe
  misc_feature (1)..(25): SEQ ID NO: 4322; WAN024G4M; Start 45; Stop 69
ttacagtagtcttcttcccagttgc

SEQ ID NO: 379983 - DNA, 25 bp, Artificial
  probe
  misc_feature (1)..(25): SEQ ID NO: 4322; WAN024G4M; Start 192; Stop 216
tacgcattggtgtcattggaatacg

SEQ ID NO: 379984 - DNA, 25 bp, Artificial
  probe
  misc_feature (1)..(25): SEQ ID NO: 4322; WAN024G4M; Start 94; Stop 118
cttacgaagagccaacatttcagtc

SEQ ID NO: 379985 - DNA, 25 bp, Artificial
  probe
  misc_feature (1)..(25): SEQ ID NO: 4322; WAN024G4M; Start 8; Stop 32
ataagagtcttaacaactgcaagcg

SEQ ID NO: 379986 - DNA, 25 bp, Artificial
  probe
  misc_feature (1)..(25): SEQ ID NO: 4322; WAN024G4M; Start 189; Stop 213
ccttacgcattggtgtcattggaat

SEQ ID NO: 379987 - DNA, 25 bp, Artificial
  probe
  misc_feature (1)..(25): SEQ ID NO: 4322; WAN024G4M; Start 106; Stop 130
caacatttcagtcatatcaacttca

SEQ ID NO: 379988 - DNA, 25 bp, Artificial
  probe
  misc_feature (1)..(25): SEQ ID NO: 4322; WAN024G4M; Start 74; Stop 98
atgattggctcaagaaccttcttac

SEQ ID NO: 379989 - DNA, 25 bp, Artificial
  probe
  misc_feature (1)..(25): SEQ ID NO: 4322; WAN024G4M; Start 73; Stop 97
catgattggctcaagaaccttctta

SEQ ID NO: 379990 - DNA, 25 bp, Artificial
  probe
  misc_feature (1)..(25): SEQ ID NO: 4322; WAN024G4M; Start 97; Stop 121
acgaagagccaacatttcagtcata

SEQ ID NO: 379991 - DNA, 25 bp, Artificial
  probe
  misc_feature (1)..(25): SEQ ID NO: 4323; WAN024G8K; Start 19; Stop 43
gataatcaaggtagcctggatatgg

SEQ ID NO: 379992 - DNA, 25 bp, Artificial
  probe
  misc_feature (1)..(25): SEQ ID NO: 4323; WAN024G8K; Start 18; Stop 42
cgataatcaaggtagcctggatatg

SEQ ID NO: 379993 - DNA, 25 bp, Artificial
  probe
  misc_feature (1)..(25): SEQ ID NO: 4323; WAN024G8K; Start 20; Stop 44
ataatcaaggtagcctggatatggt

SEQ ID NO: 379994 - DNA, 25 bp, Artificial
  probe
  misc_feature (1)..(25): SEQ ID NO: 4323; WAN024G8K; Start 21; Stop 45
taatcaaggtagcctggatatggtc

SEQ ID NO: 379995 - DNA, 25 bp, Artificial
  probe
  misc_feature (1)..(25): SEQ ID NO: 4323; WAN024G8K; Start 17; Stop 41
tcgataatcaaggtagcctggatat

SEQ ID NO: 379996 - DNA, 25 bp, Artificial
  probe
  misc_feature (1)..(25): SEQ ID NO: 4323; WAN024G8K; Start 16; Stop 40
ttcgataatcaaggtagcctggata

SEQ ID NO: 379997 - DNA, 25 bp, Artificial
  probe
  misc_feature (1)..(25): SEQ ID NO: 4323; WAN024G8K; Start 22; Stop 46
aatcaaggtagcctggatatggtct

SEQ ID NO: 379998 - DNA, 25 bp, Artificial
  probe
  misc_feature (1)..(25): SEQ ID NO: 4323; WAN024G8K; Start 147; Stop 171
ccatgataaaggtagaaggttgagc

SEQ ID NO: 379999 - DNA, 25 bp, Artificial
  probe
  misc_feature (1)..(25): SEQ ID NO: 4323; WAN024G8K; Start 149; Stop 173
atgataaaggtagaaggttgagctg

SEQ ID NO: 380000 - DNA, 25 bp, Artificial
  probe
  misc_feature (1)..(25): SEQ ID NO: 4323; WAN024G8K; Start 148; Stop 172
catgataaaggtagaaggttgagct

SEQ ID NO: 380001 - DNA, 25 bp, Artificial
  probe
  misc_feature (1)..(25): SEQ ID NO: 4323; WAN024G8K; Start 23; Stop 47
atcaaggtagcctggatatggtctc

SEQ ID NO: 380002 - DNA, 25 bp, Artificial
  probe
  misc_feature (1)..(25): SEQ ID NO: 4323; WAN024G8K; Start 152; Stop 176
ataaaggtagaaggttgagctggat

SEQ ID NO: 380003 - DNA, 25 bp, Artificial
  probe
  misc_feature (1)..(25): SEQ ID NO: 4323; WAN024G8K; Start 153; Stop 177
taaaggtagaaggttgagctggatt

SEQ ID NO: 380004 - DNA, 25 bp, Artificial
  probe
  misc_feature (1)..(25): SEQ ID NO: 4323; WAN024G8K; Start 146; Stop 170
accatgataaaggtagaaggttgag

SEQ ID NO: 380005 - DNA, 25 bp, Artificial
  probe
  misc_feature (1)..(25): SEQ ID NO: 4323; WAN024G8K; Start 151; Stop 175
gataaaggtagaaggttgagctgga

SEQ ID NO: 380006 - DNA, 25 bp, Artificial
  probe
  misc_feature (1)..(25): SEQ ID NO: 4323; WAN024G8K; Start 150; Stop 174
tgataaaggtagaaggttgagctgg

SEQ ID NO: 380007 - DNA, 25 bp, Artificial
  probe
  misc_feature (1)..(25): SEQ ID NO: 4323; WAN024G8K; Start 154; Stop 178
aaaggtagaaggttgagctggattt

SEQ ID NO: 380008 - DNA, 25 bp, Artificial
  probe
  misc_feature (1)..(25): SEQ ID NO: 4323; WAN024G8K; Start 10; Stop 34
cataatttcgataatcaaggtagcc

SEQ ID NO: 380009 - DNA, 25 bp, Artificial
  probe
  misc_feature (1)..(25): SEQ ID NO: 4323; WAN024G8K; Start 9; Stop 33
ccataatttcgataatcaaggtagc

SEQ ID NO: 380010 - DNA, 25 bp, Artificial
  probe
  misc_feature (1)..(25): SEQ ID NO: 4323; WAN024G8K; Start 94; Stop 118
ttccacttgctcaatcgactcaatc

SEQ ID NO: 380011 - DNA, 25 bp, Artificial
  probe
  misc_feature (1)..(25): SEQ ID NO: 4323; WAN024G8K; Start 13; Stop 37
aatttcgataatcaaggtagcctgg

SEQ ID NO: 380012 - DNA, 25 bp, Artificial
  probe
  misc_feature (1)..(25): SEQ ID NO: 4323; WAN024G8K; Start 12; Stop 36
taatttcgataatcaaggtagcctg

SEQ ID NO: 380013 - DNA, 25 bp, Artificial
  probe
  misc_feature (1)..(25): SEQ ID NO: 4323; WAN024G8K; Start 74; Stop 98
atttccacaatacggtcattttcca

SEQ ID NO: 380014 - DNA, 25 bp, Artificial
  probe
  misc_feature (1)..(25): SEQ ID NO: 4323; WAN024G8K; Start 15; Stop 39
tttcgataatcaaggtagcctggat

SEQ ID NO: 380015 - DNA, 25 bp, Artificial
  probe
  misc_feature (1)..(25): SEQ ID NO: 4323; WAN024G8K; Start 14; Stop 38
atttcgataatcaaggtagcctgga

SEQ ID NO: 380016 - DNA, 25 bp, Artificial
  probe
  misc_feature (1)..(25): SEQ ID NO: 4323; WAN024G8K; Start 8; Stop 32
cccataatttcgataatcaaggtag

SEQ ID NO: 380017 - DNA, 25 bp, Artificial
  probe
  misc_feature (1)..(25): SEQ ID NO: 4323; WAN024G8K; Start 11; Stop 35
ataatttcgataatcaaggtagcct

SEQ ID NO: 380018 - DNA, 25 bp, Artificial
  probe
  misc_feature (1)..(25): SEQ ID NO: 4323; WAN024G8K; Start 274; Stop 298
caactcttgttcaaaaggctgattg

SEQ ID NO: 380019 - DNA, 25 bp, Artificial
  probe
  misc_feature (1)..(25): SEQ ID NO: 4323; WAN024G8K; Start 75; Stop 99
tttccacaatacggtcattttccac

SEQ ID NO: 380020 - DNA, 25 bp, Artificial
  probe
  misc_feature (1)..(25): SEQ ID NO: 4323; WAN024G8K; Start 97; Stop 121
cacttgctcaatcgactcaatcagg

SEQ ID NO: 380021 - DNA, 25 bp, Artificial
  probe
  misc_feature (1)..(25): SEQ ID NO: 4323; WAN024G8K; Start 96; Stop 120
ccacttgctcaatcgactcaatcag

SEQ ID NO: 380022 - DNA, 25 bp, Artificial
  probe
  misc_feature (1)..(25): SEQ ID NO: 4323; WAN024G8K; Start 286; Stop 310
aaaaggctgattgattttctggatg

SEQ ID NO: 380023 - DNA, 25 bp, Artificial
  probe
  misc_feature (1)..(25): SEQ ID NO: 4323; WAN024G8K; Start 285; Stop 309
caaaaggctgattgattttctggat

SEQ ID NO: 380024 - DNA, 25 bp, Artificial
  probe
  misc_feature (1)..(25): SEQ ID NO: 4324; WAN024BF9; Start 97; Stop 121
attggaggtattatgctacacttaa

SEQ ID NO: 380025 - DNA, 25 bp, Artificial
  probe
  misc_feature (1)..(25): SEQ ID NO: 4324; WAN024BF9; Start 96; Stop 120
aattggaggtattatgctacactta

SEQ ID NO: 380026 - DNA, 25 bp, Artificial
  probe
  misc_feature (1)..(25): SEQ ID NO: 4324; WAN024BF9; Start 30; Stop 54
ggtttcaaatgctacagttagacaa

SEQ ID NO: 380027 - DNA, 25 bp, Artificial
  probe
  misc_feature (1)..(25): SEQ ID NO: 4324; WAN024BF9; Start 29; Stop 53
tggtttcaaatgctacagttagaca

SEQ ID NO: 380028 - DNA, 25 bp, Artificial
  probe
  misc_feature (1)..(25): SEQ ID NO: 4324; WAN024BF9; Start 74; Stop 98
aaagtgaatgtttcctaagagcaat

SEQ ID NO: 380029 - DNA, 25 bp, Artificial
  probe
  misc_feature (1)..(25): SEQ ID NO: 4324; WAN024BF9; Start 75; Stop 99
aagtgaatgtttcctaagagcaatt

SEQ ID NO: 380030 - DNA, 25 bp, Artificial
  probe
  misc_feature (1)..(25): SEQ ID NO: 4324; WAN024BF9; Start 31; Stop 55
gtttcaaatgctacagttagacaaa

SEQ ID NO: 380031 - DNA, 25 bp, Artificial
  probe
  misc_feature (1)..(25): SEQ ID NO: 4324; WAN024BF9; Start 32; Stop 56
tttcaaatgctacagttagacaaac

SEQ ID NO: 380032 - DNA, 25 bp, Artificial
  probe
  misc_feature (1)..(25): SEQ ID NO: 4324; WAN024BF9; Start 28; Stop 52
ctggtttcaaatgctacagttagac

SEQ ID NO: 380033 - DNA, 25 bp, Artificial
  probe
  misc_feature (1)..(25): SEQ ID NO: 4324; WAN024BF9; Start 27; Stop 51
tctggtttcaaatgctacagttaga

SEQ ID NO: 380034 - DNA, 25 bp, Artificial
  probe
  misc_feature (1)..(25): SEQ ID NO: 4324; WAN024BF9; Start 26; Stop 50
atctggtttcaaatgctacagttag

SEQ ID NO: 380035 - DNA, 25 bp, Artificial
  probe
  misc_feature (1)..(25): SEQ ID NO: 4324; WAN024BF9; Start 24; Stop 48
ttatctggtttcaaatgctacagtt

SEQ ID NO: 380036 - DNA, 25 bp, Artificial
  probe
  misc_feature (1)..(25): SEQ ID NO: 4324; WAN024BF9; Start 98; Stop 122
ttggaggtattatgctacacttaaa

SEQ ID NO: 380037 - DNA, 25 bp, Artificial
  probe
  misc_feature (1)..(25): SEQ ID NO: 4324; WAN024BF9; Start 95; Stop 119
caattggaggtattatgctacactt

SEQ ID NO: 380038 - DNA, 25 bp, Artificial
  probe
  misc_feature (1)..(25): SEQ ID NO: 4324; WAN024BF9; Start 25; Stop 49
tatctggtttcaaatgctacagtta

SEQ ID NO: 380039 - DNA, 25 bp, Artificial
  probe
  misc_feature (1)..(25): SEQ ID NO: 4324; WAN024BF9; Start 71; Stop 95
cagaaagtgaatgtttcctaagagc

SEQ ID NO: 380040 - DNA, 25 bp, Artificial
  probe
  misc_feature (1)..(25): SEQ ID NO: 4324; WAN024BF9; Start 70; Stop 94
gcagaaagtgaatgtttcctaagag

SEQ ID NO: 380041 - DNA, 25 bp, Artificial
  probe
  misc_feature (1)..(25): SEQ ID NO: 4324; WAN024BF9; Start 73; Stop 97
gaaagtgaatgtttcctaagagcaa

SEQ ID NO: 380042 - DNA, 25 bp, Artificial
  probe
  misc_feature (1)..(25): SEQ ID NO: 4324; WAN024BF9; Start 72; Stop 96
agaaagtgaatgtttcctaagagca

SEQ ID NO: 380043 - DNA, 25 bp, Artificial
  probe
  misc_feature (1)..(25): SEQ ID NO: 4324; WAN024BF9; Start 69; Stop 93
agcagaaagtgaatgtttcctaaga

SEQ ID NO: 380044 - DNA, 25 bp, Artificial
  probe
  misc_feature (1)..(25): SEQ ID NO: 4324; WAN024BF9; Start 65; Stop 89
aaatagcagaaagtgaatgtttcct

SEQ ID NO: 380045 - DNA, 25 bp, Artificial
  probe
  misc_feature (1)..(25): SEQ ID NO: 4324; WAN024BF9; Start 68; Stop 92
tagcagaaagtgaatgtttcctaag

SEQ ID NO: 380046 - DNA, 25 bp, Artificial
  probe
  misc_feature (1)..(25): SEQ ID NO: 4324; WAN024BF9; Start 87; Stop 111
cctaagagcaattggaggtattatg

SEQ ID NO: 380047 - DNA, 25 bp, Artificial
  probe
  misc_feature (1)..(25): SEQ ID NO: 4324; WAN024BF9; Start 85; Stop 109
ttcctaagagcaattggaggtatta

SEQ ID NO: 380048 - DNA, 25 bp, Artificial
  probe
  misc_feature (1)..(25): SEQ ID NO: 4324; WAN024BF9; Start 86; Stop 110
tcctaagagcaattggaggtattat

SEQ ID NO: 380049 - DNA, 25 bp, Artificial
  probe
  misc_feature (1)..(25): SEQ ID NO: 4324; WAN024BF9; Start 67; Stop 91
atagcagaaagtgaatgtttcctaa

SEQ ID NO: 380050 - DNA, 25 bp, Artificial
  probe
  misc_feature (1)..(25): SEQ ID NO: 4324; WAN024BF9; Start 66; Stop 90
aatagcagaaagtgaatgtttccta

SEQ ID NO: 380051 - DNA, 25 bp, Artificial
  probe
  misc_feature (1)..(25): SEQ ID NO: 4324; WAN024BF9; Start 34; Stop 58
tcaaatgctacagttagacaaactt

SEQ ID NO: 380052 - DNA, 25 bp, Artificial
  probe
  misc_feature (1)..(25): SEQ ID NO: 4324; WAN024BF9; Start 33; Stop 57
ttcaaatgctacagttagacaaact

SEQ ID NO: 380053 - DNA, 25 bp, Artificial
  probe
  misc_feature (1)..(25): SEQ ID NO: 4324; WAN024BF9; Start 76; Stop 100
agtgaatgtttcctaagagcaattg

SEQ ID NO: 380054 - DNA, 25 bp, Artificial
  probe
  misc_feature (1)..(25): SEQ ID NO: 4324; WAN024BF9; Start 77; Stop 101
gtgaatgtttcctaagagcaattgg

SEQ ID NO: 380055 - DNA, 25 bp, Artificial
  probe
  misc_feature (1)..(25): SEQ ID NO: 4324; WAN024BF9; Start 88; Stop 112
ctaagagcaattggaggtattatgc

SEQ ID NO: 380056 - DNA, 25 bp, Artificial
  probe
  misc_feature (1)..(25): SEQ ID NO: 4324; WAN024BF9; Start 94; Stop 118
gcaattggaggtattatgctacact

SEQ ID NO: 380057 - DNA, 25 bp, Artificial
  probe
  misc_feature (1)..(25): SEQ ID NO: 4325; WAN024GGE; Start 13; Stop 37
ccagttattgatgaattgagcgtta

SEQ ID NO: 380058 - DNA, 25 bp, Artificial
  probe
  misc_feature (1)..(25): SEQ ID NO: 4325; WAN024GGE; Start 19; Stop 43
attgatgaattgagcgttagaagtt

SEQ ID NO: 380059 - DNA, 25 bp, Artificial
  probe
  misc_feature (1)..(25): SEQ ID NO: 4325; WAN024GGE; Start 20; Stop 44
ttgatgaattgagcgttagaagttc

SEQ ID NO: 380060 - DNA, 25 bp, Artificial
  probe
  misc_feature (1)..(25): SEQ ID NO: 4325; WAN024GGE; Start 12; Stop 36
tccagttattgatgaattgagcgtt

SEQ ID NO: 380061 - DNA, 25 bp, Artificial
  probe
  misc_feature (1)..(25): SEQ ID NO: 4325; WAN024GGE; Start 14; Stop 38
cagttattgatgaattgagcgttag

SEQ ID NO: 380062 - DNA, 25 bp, Artificial
  probe
  misc_feature (1)..(25): SEQ ID NO: 4325; WAN024GGE; Start 11; Stop 35
ttccagttattgatgaattgagcgt

SEQ ID NO: 380063 - DNA, 25 bp, Artificial
  probe
  misc_feature (1)..(25): SEQ ID NO: 4325; WAN024GGE; Start 18; Stop 42
tattgatgaattgagcgttagaagt

SEQ ID NO: 380064 - DNA, 25 bp, Artificial
  probe
  misc_feature (1)..(25): SEQ ID NO: 4325; WAN024GGE; Start 15; Stop 39
agttattgatgaattgagcgttaga

SEQ ID NO: 380065 - DNA, 25 bp, Artificial
  probe
  misc_feature (1)..(25): SEQ ID NO: 4325; WAN024GGE; Start 21; Stop 45
tgatgaattgagcgttagaagttcc

SEQ ID NO: 380066 - DNA, 25 bp, Artificial
  probe
  misc_feature (1)..(25): SEQ ID NO: 4325; WAN024GGE; Start 16; Stop 40
gttattgatgaattgagcgttagaa

SEQ ID NO: 380067 - DNA, 25 bp, Artificial
  probe
  misc_feature (1)..(25): SEQ ID NO: 4325; WAN024GGE; Start 17; Stop 41
ttattgatgaattgagcgttagaag

SEQ ID NO: 380068 - DNA, 25 bp, Artificial
  probe
  misc_feature (1)..(25): SEQ ID NO: 4325; WAN024GGE; Start 22; Stop 46
gatgaattgagcgttagaagttccg

SEQ ID NO: 380069 - DNA, 25 bp, Artificial
  probe
  misc_feature (1)..(25): SEQ ID NO: 4325; WAN024GGE; Start 10; Stop 34
attccagttattgatgaattgagcg

SEQ ID NO: 380070 - DNA, 25 bp, Artificial
  probe
  misc_feature (1)..(25): SEQ ID NO: 4325; WAN024GGE; Start 257; Stop 281
aattgaatctcgtagtcgctgagtt

SEQ ID NO: 380071 - DNA, 25 bp, Artificial
  probe
  misc_feature (1)..(25): SEQ ID NO: 4325; WAN024GGE; Start 134; Stop 158
gaaattggaagcgagtaaaggtatt

SEQ ID NO: 380072 - DNA, 25 bp, Artificial
  probe
  misc_feature (1)..(25): SEQ ID NO: 4325; WAN024GGE; Start 76; Stop 100
ctggtcaagagaagtcaaaggattt

SEQ ID NO: 380073 - DNA, 25 bp, Artificial
  probe
  misc_feature (1)..(25): SEQ ID NO: 4325; WAN024GGE; Start 9; Stop 33
gattccagttattgatgaattgagc

SEQ ID NO: 380074 - DNA, 25 bp, Artificial
  probe
  misc_feature (1)..(25): SEQ ID NO: 4325; WAN024GGE; Start 247; Stop 271
ggttctttggaattgaatctcgtag

SEQ ID NO: 380075 - DNA, 25 bp, Artificial
  probe
  misc_feature (1)..(25): SEQ ID NO: 4325; WAN024GGE; Start 250; Stop 274
tctttggaattgaatctcgtagtcg

SEQ ID NO: 380076 - DNA, 25 bp, Artificial
  probe
  misc_feature (1)..(25): SEQ ID NO: 4325; WAN024GGE; Start 248; Stop 272
gttctttggaattgaatctcgtagt

SEQ ID NO: 380077 - DNA, 25 bp, Artificial
  probe
  misc_feature (1)..(25): SEQ ID NO: 4325; WAN024GGE; Start 133; Stop 157
ggaaattggaagcgagtaaaggtat

SEQ ID NO: 380078 - DNA, 25 bp, Artificial
  probe
  misc_feature (1)..(25): SEQ ID NO: 4325; WAN024GGE; Start 249; Stop 273
ttctttggaattgaatctcgtagtc

SEQ ID NO: 380079 - DNA, 25 bp, Artificial
  probe
  misc_feature (1)..(25): SEQ ID NO: 4325; WAN024GGE; Start 256; Stop 280
gaattgaatctcgtagtcgctgagt

SEQ ID NO: 380080 - DNA, 25 bp, Artificial
  probe
  misc_feature (1)..(25): SEQ ID NO: 4325; WAN024GGE; Start 253; Stop 277
ttggaattgaatctcgtagtcgctg

SEQ ID NO: 380081 - DNA, 25 bp, Artificial
  probe
  misc_feature (1)..(25): SEQ ID NO: 4325; WAN024GGE; Start 127; Stop 151
attgttggaaattggaagcgagtaa

SEQ ID NO: 380082 - DNA, 25 bp, Artificial
  probe
  misc_feature (1)..(25): SEQ ID NO: 4325; WAN024GGE; Start 74; Stop 98
atctggtcaagagaagtcaaaggat

SEQ ID NO: 380083 - DNA, 25 bp, Artificial
  probe
  misc_feature (1)..(25): SEQ ID NO: 4325; WAN024GGE; Start 128; Stop 152
ttgttggaaattggaagcgagtaaa

SEQ ID NO: 380084 - DNA, 25 bp, Artificial
  probe
  misc_feature (1)..(25): SEQ ID NO: 4325; WAN024GGE; Start 246; Stop 270
cggttctttggaattgaatctcgta

SEQ ID NO: 380085 - DNA, 25 bp, Artificial
  probe
  misc_feature (1)..(25): SEQ ID NO: 4325; WAN024GGE; Start 75; Stop 99
tctggtcaagagaagtcaaaggatt

SEQ ID NO: 380086 - DNA, 25 bp, Artificial
  probe
  misc_feature (1)..(25): SEQ ID NO: 4325; WAN024GGE; Start 126; Stop 150
gattgttggaaattggaagcgagta

SEQ ID NO: 380087 - DNA, 25 bp, Artificial
  probe
  misc_feature (1)..(25): SEQ ID NO: 4325; WAN024GGE; Start 135; Stop 159
aaattggaagcgagtaaaggtattt

SEQ ID NO: 380088 - DNA, 25 bp, Artificial
  probe
  misc_feature (1)..(25): SEQ ID NO: 4325; WAN024GGE; Start 129; Stop 153
tgttggaaattggaagcgagtaaag

SEQ ID NO: 380089 - DNA, 25 bp, Artificial
  probe
  misc_feature (1)..(25): SEQ ID NO: 4325; WAN024GGE; Start 132; Stop 156
tggaaattggaagcgagtaaaggta

SEQ ID NO: 380090 - DNA, 25 bp, Artificial
  probe
  misc_feature (1)..(25): SEQ ID NO: 4326; WAN024F5L; Start 21; Stop 45
ccaacttcttcatctcatcaatacg

SEQ ID NO: 380091 - DNA, 25 bp, Artificial
  probe
  misc_feature (1)..(25): SEQ ID NO: 4326; WAN024F5L; Start 18; Stop 42
tcaccaacttcttcatctcatcaat

SEQ ID NO: 380092 - DNA, 25 bp, Artificial
  probe
  misc_feature (1)..(25): SEQ ID NO: 4326; WAN024F5L; Start 17; Stop 41
ttcaccaacttcttcatctcatcaa

SEQ ID NO: 380093 - DNA, 25 bp, Artificial
  probe
  misc_feature (1)..(25): SEQ ID NO: 4326; WAN024F5L; Start 20; Stop 44
accaacttcttcatctcatcaatac

SEQ ID NO: 380094 - DNA, 25 bp, Artificial
  probe
  misc_feature (1)..(25): SEQ ID NO: 4326; WAN024F5L; Start 19; Stop 43
caccaacttcttcatctcatcaata

SEQ ID NO: 380095 - DNA, 25 bp, Artificial
  probe
  misc_feature (1)..(25): SEQ ID NO: 4326; WAN024F5L; Start 257; Stop 281
gctcctgtaataacgcttgacatag

SEQ ID NO: 380096 - DNA, 25 bp, Artificial
  probe
  misc_feature (1)..(25): SEQ ID NO: 4326; WAN024F5L; Start 54; Stop 78
tcacatcatacttggcttggtagtc

SEQ ID NO: 380097 - DNA, 25 bp, Artificial
  probe
  misc_feature (1)..(25): SEQ ID NO: 4326; WAN024F5L; Start 26; Stop 50
ttcttcatctcatcaatacgtgcta

SEQ ID NO: 380098 - DNA, 25 bp, Artificial
  probe
  misc_feature (1)..(25): SEQ ID NO: 4326; WAN024F5L; Start 27; Stop 51
tcttcatctcatcaatacgtgctac

SEQ ID NO: 380099 - DNA, 25 bp, Artificial
  probe
  misc_feature (1)..(25): SEQ ID NO: 4326; WAN024F5L; Start 16; Stop 40
tttcaccaacttcttcatctcatca

SEQ ID NO: 380100 - DNA, 25 bp, Artificial
  probe
  misc_feature (1)..(25): SEQ ID NO: 4326; WAN024F5L; Start 23; Stop 47
aacttcttcatctcatcaatacgtg

SEQ ID NO: 380101 - DNA, 25 bp, Artificial
  probe
  misc_feature (1)..(25): SEQ ID NO: 4326; WAN024F5L; Start 22; Stop 46
caacttcttcatctcatcaatacgt

SEQ ID NO: 380102 - DNA, 25 bp, Artificial
  probe
  misc_feature (1)..(25): SEQ ID NO: 4326; WAN024F5L; Start 15; Stop 39
atttcaccaacttcttcatctcatc

SEQ ID NO: 380103 - DNA, 25 bp, Artificial
  probe
  misc_feature (1)..(25): SEQ ID NO: 4326; WAN024F5L; Start 53; Stop 77
gtcacatcatacttggcttggtagt

SEQ ID NO: 380104 - DNA, 25 bp, Artificial
  probe
  misc_feature (1)..(25): SEQ ID NO: 4326; WAN024F5L; Start 25; Stop 49
cttcttcatctcatcaatacgtgct

SEQ ID NO: 380105 - DNA, 25 bp, Artificial
  probe
  misc_feature (1)..(25): SEQ ID NO: 4326; WAN024F5L; Start 245; Stop 269
aagaagatttcggctcctgtaataa

SEQ ID NO: 380106 - DNA, 25 bp, Artificial
  probe
  misc_feature (1)..(25): SEQ ID NO: 4326; WAN024F5L; Start 24; Stop 48
acttcttcatctcatcaatacgtgc

SEQ ID NO: 380107 - DNA, 25 bp, Artificial
  probe
  misc_feature (1)..(25): SEQ ID NO: 4326; WAN024F5L; Start 246; Stop 270
agaagatttcggctcctgtaataac

SEQ ID NO: 380108 - DNA, 25 bp, Artificial
  probe
  misc_feature (1)..(25): SEQ ID NO: 4326; WAN024F5L; Start 244; Stop 268
caagaagatttcggctcctgtaata

SEQ ID NO: 380109 - DNA, 25 bp, Artificial
  probe
  misc_feature (1)..(25): SEQ ID NO: 4326; WAN024F5L; Start 52; Stop 76
ggtcacatcatacttggcttggtag

SEQ ID NO: 380110 - DNA, 25 bp, Artificial
  probe
  misc_feature (1)..(25): SEQ ID NO: 4326; WAN024F5L; Start 317; Stop 341
aagtgttctggatttgtaaagcgtt

SEQ ID NO: 380111 - DNA, 25 bp, Artificial
  probe
  misc_feature (1)..(25): SEQ ID NO: 4326; WAN024F5L; Start 13; Stop 37
ttatttcaccaacttcttcatctca

SEQ ID NO: 380112 - DNA, 25 bp, Artificial
  probe
  misc_feature (1)..(25): SEQ ID NO: 4326; WAN024F5L; Start 318; Stop 342
agtgttctggatttgtaaagcgttt

SEQ ID NO: 380113 - DNA, 25 bp, Artificial
  probe
  misc_feature (1)..(25): SEQ ID NO: 4326; WAN024F5L; Start 256; Stop 280
ggctcctgtaataacgcttgacata

SEQ ID NO: 380114 - DNA, 25 bp, Artificial
  probe
  misc_feature (1)..(25): SEQ ID NO: 4326; WAN024F5L; Start 14; Stop 38
tatttcaccaacttcttcatctcat

SEQ ID NO: 380115 - DNA, 25 bp, Artificial
  probe
  misc_feature (1)..(25): SEQ ID NO: 4326; WAN024F5L; Start 205; Stop 229
tgccaattcttcttcgacattcaag

SEQ ID NO: 380116 - DNA, 25 bp, Artificial
  probe
  misc_feature (1)..(25): SEQ ID NO: 4326; WAN024F5L; Start 264; Stop 288
taataacgcttgacatagccagttc

SEQ ID NO: 380117 - DNA, 25 bp, Artificial
  probe
  misc_feature (1)..(25): SEQ ID NO: 4326; WAN024F5L; Start 204; Stop 228
gtgccaattcttcttcgacattcaa

SEQ ID NO: 380118 - DNA, 25 bp, Artificial
  probe
  misc_feature (1)..(25): SEQ ID NO: 4326; WAN024F5L; Start 48; Stop 72
ctacggtcacatcatacttggcttg

SEQ ID NO: 380119 - DNA, 25 bp, Artificial
  probe
  misc_feature (1)..(25): SEQ ID NO: 4326; WAN024F5L; Start 247; Stop 271
gaagatttcggctcctgtaataacg

SEQ ID NO: 380120 - DNA, 25 bp, Artificial
  probe
  misc_feature (1)..(25): SEQ ID NO: 4326; WAN024F5L; Start 263; Stop 287
gtaataacgcttgacatagccagtt

SEQ ID NO: 380121 - DNA, 25 bp, Artificial
  probe
  misc_feature (1)..(25): SEQ ID NO: 4326; WAN024F5L; Start 258; Stop 282
ctcctgtaataacgcttgacatagc

SEQ ID NO: 380122 - DNA, 25 bp, Artificial
  probe
  misc_feature (1)..(25): SEQ ID NO: 4326; WAN024F5L; Start 1; Stop 25
gtgtttctgtgtttatttcaccaac

SEQ ID NO: 380123 - DNA, 25 bp, Artificial
  probe
  misc_feature (1)..(25): SEQ ID NO: 4327; WAN024D9L; Start 11; Stop 35
agtcgcaagtgaacaatagtgtctg

SEQ ID NO: 380124 - DNA, 25 bp, Artificial
  probe
  misc_feature (1)..(25): SEQ ID NO: 4327; WAN024D9L; Start 10; Stop 34
cagtcgcaagtgaacaatagtgtct

SEQ ID NO: 380125 - DNA, 25 bp, Artificial
  probe
  misc_feature (1)..(25): SEQ ID NO: 4327; WAN024D9L; Start 5; Stop 29
ttgaccagtcgcaagtgaacaatag

SEQ ID NO: 380126 - DNA, 25 bp, Artificial
  probe
  misc_feature (1)..(25): SEQ ID NO: 4327; WAN024D9L; Start 16; Stop 40
caagtgaacaatagtgtctgccgtt

SEQ ID NO: 380127 - DNA, 25 bp, Artificial
  probe
  misc_feature (1)..(25): SEQ ID NO: 4327; WAN024D9L; Start 7; Stop 31
gaccagtcgcaagtgaacaatagtg

SEQ ID NO: 380128 - DNA, 25 bp, Artificial
  probe
  misc_feature (1)..(25): SEQ ID NO: 4327; WAN024D9L; Start 44; Stop 68
agaaagaaagtcttcatcatgggaa

SEQ ID NO: 380129 - DNA, 25 bp, Artificial
  probe
  misc_feature (1)..(25): SEQ ID NO: 4327; WAN024D9L; Start 47; Stop 71
aagaaagtcttcatcatgggaaatg

SEQ ID NO: 380130 - DNA, 25 bp, Artificial
  probe
  misc_feature (1)..(25): SEQ ID NO: 4327; WAN024D9L; Start 45; Stop 69
gaaagaaagtcttcatcatgggaaa

SEQ ID NO: 380131 - DNA, 25 bp, Artificial
  probe
  misc_feature (1)..(25): SEQ ID NO: 4327; WAN024D9L; Start 4; Stop 28
tttgaccagtcgcaagtgaacaata

SEQ ID NO: 380132 - DNA, 25 bp, Artificial
  probe
  misc_feature (1)..(25): SEQ ID NO: 4327; WAN024D9L; Start 43; Stop 67
cagaaagaaagtcttcatcatggga

SEQ ID NO: 380133 - DNA, 25 bp, Artificial
  probe
  misc_feature (1)..(25): SEQ ID NO: 4327; WAN024D9L; Start 42; Stop 66
tcagaaagaaagtcttcatcatggg

SEQ ID NO: 380134 - DNA, 25 bp, Artificial
  probe
  misc_feature (1)..(25): SEQ ID NO: 4327; WAN024D9L; Start 41; Stop 65
ttcagaaagaaagtcttcatcatgg

SEQ ID NO: 380135 - DNA, 25 bp, Artificial
  probe
  misc_feature (1)..(25): SEQ ID NO: 4327; WAN024D9L; Start 62; Stop 86
atgggaaatgaaaataacggtttgc

SEQ ID NO: 380136 - DNA, 25 bp, Artificial
  probe
  misc_feature (1)..(25): SEQ ID NO: 4327; WAN024D9L; Start 48; Stop 72
agaaagtcttcatcatgggaaatga

SEQ ID NO: 380137 - DNA, 25 bp, Artificial
  probe
  misc_feature (1)..(25): SEQ ID NO: 4327; WAN024D9L; Start 6; Stop 30
tgaccagtcgcaagtgaacaatagt

SEQ ID NO: 380138 - DNA, 25 bp, Artificial
  probe
  misc_feature (1)..(25): SEQ ID NO: 4327; WAN024D9L; Start 9; Stop 33
ccagtcgcaagtgaacaatagtgtc

SEQ ID NO: 380139 - DNA, 25 bp, Artificial
  probe
  misc_feature (1)..(25): SEQ ID NO: 4327; WAN024D9L; Start 46; Stop 70
aaagaaagtcttcatcatgggaaat

SEQ ID NO: 380140 - DNA, 25 bp, Artificial
  probe
  misc_feature (1)..(25): SEQ ID NO: 4327; WAN024D9L; Start 17; Stop 41
aagtgaacaatagtgtctgccgttt

SEQ ID NO: 380141 - DNA, 25 bp, Artificial
  probe
  misc_feature (1)..(25): SEQ ID NO: 4327; WAN024D9L; Start 66; Stop 90
gaaatgaaaataacggtttgcctgg

SEQ ID NO: 380142 - DNA, 25 bp, Artificial
  probe
  misc_feature (1)..(25): SEQ ID NO: 4327; WAN024D9L; Start 65; Stop 89
ggaaatgaaaataacggtttgcctg

SEQ ID NO: 380143 - DNA, 25 bp, Artificial
  probe
  misc_feature (1)..(25): SEQ ID NO: 4327; WAN024D9L; Start 61; Stop 85
catgggaaatgaaaataacggtttg

SEQ ID NO: 380144 - DNA, 25 bp, Artificial
  probe
  misc_feature (1)..(25): SEQ ID NO: 4327; WAN024D9L; Start 67; Stop 91
aaatgaaaataacggtttgcctggt

SEQ ID NO: 380145 - DNA, 25 bp, Artificial
  probe
  misc_feature (1)..(25): SEQ ID NO: 4327; WAN024D9L; Start 40; Stop 64
tttcagaaagaaagtcttcatcatg

SEQ ID NO: 380146 - DNA, 25 bp, Artificial
  probe
  misc_feature (1)..(25): SEQ ID NO: 4327; WAN024D9L; Start 8; Stop 32
accagtcgcaagtgaacaatagtgt

SEQ ID NO: 380147 - DNA, 25 bp, Artificial
  probe
  misc_feature (1)..(25): SEQ ID NO: 4327; WAN024D9L; Start 71; Stop 95
gaaaataacggtttgcctggtcttt

SEQ ID NO: 380148 - DNA, 25 bp, Artificial
  probe
  misc_feature (1)..(25): SEQ ID NO: 4327; WAN024D9L; Start 68; Stop 92
aatgaaaataacggtttgcctggtc

SEQ ID NO: 380149 - DNA, 25 bp, Artificial
  probe
  misc_feature (1)..(25): SEQ ID NO: 4327; WAN024D9L; Start 64; Stop 88
gggaaatgaaaataacggtttgcct

SEQ ID NO: 380150 - DNA, 25 bp, Artificial
  probe
  misc_feature (1)..(25): SEQ ID NO: 4327; WAN024D9L; Start 73; Stop 97
aaataacggtttgcctggtcttttg

SEQ ID NO: 380151 - DNA, 25 bp, Artificial
  probe
  misc_feature (1)..(25): SEQ ID NO: 4327; WAN024D9L; Start 63; Stop 87
tgggaaatgaaaataacggtttgcc

SEQ ID NO: 380152 - DNA, 25 bp, Artificial
  probe
  misc_feature (1)..(25): SEQ ID NO: 4327; WAN024D9L; Start 72; Stop 96
aaaataacggtttgcctggtctttt

SEQ ID NO: 380153 - DNA, 25 bp, Artificial
  probe
  misc_feature (1)..(25): SEQ ID NO: 4327; WAN024D9L; Start 69; Stop 93
atgaaaataacggtttgcctggtct

SEQ ID NO: 380154 - DNA, 25 bp, Artificial
  probe
  misc_feature (1)..(25): SEQ ID NO: 4327; WAN024D9L; Start 36; Stop 60
ccgttttcagaaagaaagtcttcat

SEQ ID NO: 380155 - DNA, 25 bp, Artificial
  probe
  misc_feature (1)..(25): SEQ ID NO: 4327; WAN024D9L; Start 3; Stop 27
gtttgaccagtcgcaagtgaacaat

SEQ ID NO: 380156 - DNA, 25 bp, Artificial
  probe
  misc_feature (1)..(25): SEQ ID NO: 4328; WAN024BEA; Start 15; Stop 39
ttcgtcagttctatccacaacctta

SEQ ID NO: 380157 - DNA, 25 bp, Artificial
  probe
  misc_feature (1)..(25): SEQ ID NO: 4328; WAN024BEA; Start 16; Stop 40
tcgtcagttctatccacaaccttaa

SEQ ID NO: 380158 - DNA, 25 bp, Artificial
  probe
  misc_feature (1)..(25): SEQ ID NO: 4328; WAN024BEA; Start 14; Stop 38
cttcgtcagttctatccacaacctt

SEQ ID NO: 380159 - DNA, 25 bp, Artificial
  probe
  misc_feature (1)..(25): SEQ ID NO: 4328; WAN024BEA; Start 17; Stop 41
cgtcagttctatccacaaccttaaa

SEQ ID NO: 380160 - DNA, 25 bp, Artificial
  probe
  misc_feature (1)..(25): SEQ ID NO: 4328; WAN024BEA; Start 20; Stop 44
cagttctatccacaaccttaaaacg

SEQ ID NO: 380161 - DNA, 25 bp, Artificial
  probe
  misc_feature (1)..(25): SEQ ID NO: 4328; WAN024BEA; Start 21; Stop 45
agttctatccacaaccttaaaacgg

SEQ ID NO: 380162 - DNA, 25 bp, Artificial
  probe
  misc_feature (1)..(25): SEQ ID NO: 4328; WAN024BEA; Start 19; Stop 43
tcagttctatccacaaccttaaaac

SEQ ID NO: 380163 - DNA, 25 bp, Artificial
  probe
  misc_feature (1)..(25): SEQ ID NO: 4328; WAN024BEA; Start 18; Stop 42
gtcagttctatccacaaccttaaaa

SEQ ID NO: 380164 - DNA, 25 bp, Artificial
  probe
  misc_feature (1)..(25): SEQ ID NO: 4328; WAN024BEA; Start 56; Stop 80
agtctgtgcctagctttctagtttg

SEQ ID NO: 380165 - DNA, 25 bp, Artificial
  probe
  misc_feature (1)..(25): SEQ ID NO: 4328; WAN024BEA; Start 55; Stop 79
cagtctgtgcctagctttctagttt

SEQ ID NO: 380166 - DNA, 25 bp, Artificial
  probe
  misc_feature (1)..(25): SEQ ID NO: 4328; WAN024BEA; Start 23; Stop 47
ttctatccacaaccttaaaacggtg

SEQ ID NO: 380167 - DNA, 25 bp, Artificial
  probe
  misc_feature (1)..(25): SEQ ID NO: 4328; WAN024BEA; Start 22; Stop 46
gttctatccacaaccttaaaacggt

SEQ ID NO: 380168 - DNA, 25 bp, Artificial
  probe
  misc_feature (1)..(25): SEQ ID NO: 4328; WAN024BEA; Start 25; Stop 49
ctatccacaaccttaaaacggtgtt

SEQ ID NO: 380169 - DNA, 25 bp, Artificial
  probe
  misc_feature (1)..(25): SEQ ID NO: 4328; WAN024BEA; Start 26; Stop 50
tatccacaaccttaaaacggtgttt

SEQ ID NO: 380170 - DNA, 25 bp, Artificial
  probe
  misc_feature (1)..(25): SEQ ID NO: 4328; WAN024BEA; Start 24; Stop 48
tctatccacaaccttaaaacggtgt

SEQ ID NO: 380171 - DNA, 25 bp, Artificial
  probe
  misc_feature (1)..(25): SEQ ID NO: 4328; WAN024BEA; Start 60; Stop 84
tgtgcctagctttctagtttgcttt

SEQ ID NO: 380172 - DNA, 25 bp, Artificial
  probe
  misc_feature (1)..(25): SEQ ID NO: 4328; WAN024BEA; Start 59; Stop 83
ctgtgcctagctttctagtttgctt

SEQ ID NO: 380173 - DNA, 25 bp, Artificial
  probe
  misc_feature (1)..(25): SEQ ID NO: 4328; WAN024BEA; Start 57; Stop 81
gtctgtgcctagctttctagtttgc

SEQ ID NO: 380174 - DNA, 25 bp, Artificial
  probe
  misc_feature (1)..(25): SEQ ID NO: 4328; WAN024BEA; Start 61; Stop 85
gtgcctagctttctagtttgctttt

SEQ ID NO: 380175 - DNA, 25 bp, Artificial
  probe
  misc_feature (1)..(25): SEQ ID NO: 4328; WAN024BEA; Start 58; Stop 82
tctgtgcctagctttctagtttgct

SEQ ID NO: 380176 - DNA, 25 bp, Artificial
  probe
  misc_feature (1)..(25): SEQ ID NO: 4328; WAN024BEA; Start 54; Stop 78
gcagtctgtgcctagctttctagtt

SEQ ID NO: 380177 - DNA, 25 bp, Artificial
  probe
  misc_feature (1)..(25): SEQ ID NO: 4328; WAN024BEA; Start 52; Stop 76
gagcagtctgtgcctagctttctag

SEQ ID NO: 380178 - DNA, 25 bp, Artificial
  probe
  misc_feature (1)..(25): SEQ ID NO: 4328; WAN024BEA; Start 30; Stop 54
cacaaccttaaaacggtgttttgag

SEQ ID NO: 380179 - DNA, 25 bp, Artificial
  probe
  misc_feature (1)..(25): SEQ ID NO: 4328; WAN024BEA; Start 27; Stop 51
atccacaaccttaaaacggtgtttt

SEQ ID NO: 380180 - DNA, 25 bp, Artificial
  probe
  misc_feature (1)..(25): SEQ ID NO: 4328; WAN024BEA; Start 36; Stop 60
cttaaaacggtgttttgagcagtct

SEQ ID NO: 380181 - DNA, 25 bp, Artificial
  probe
  misc_feature (1)..(25): SEQ ID NO: 4328; WAN024BEA; Start 37; Stop 61
ttaaaacggtgttttgagcagtctg

SEQ ID NO: 380182 - DNA, 25 bp, Artificial
  probe
  misc_feature (1)..(25): SEQ ID NO: 4328; WAN024BEA; Start 33; Stop 57
aaccttaaaacggtgttttgagcag

SEQ ID NO: 380183 - DNA, 25 bp, Artificial
  probe
  misc_feature (1)..(25): SEQ ID NO: 4328; WAN024BEA; Start 29; Stop 53
ccacaaccttaaaacggtgttttga

SEQ ID NO: 380184 - DNA, 25 bp, Artificial
  probe
  misc_feature (1)..(25): SEQ ID NO: 4328; WAN024BEA; Start 28; Stop 52
tccacaaccttaaaacggtgttttg

SEQ ID NO: 380185 - DNA, 25 bp, Artificial
  probe
  misc_feature (1)..(25): SEQ ID NO: 4328; WAN024BEA; Start 32; Stop 56
caaccttaaaacggtgttttgagca

SEQ ID NO: 380186 - DNA, 25 bp, Artificial
  probe
  misc_feature (1)..(25): SEQ ID NO: 4328; WAN024BEA; Start 31; Stop 55
acaaccttaaaacggtgttttgagc

SEQ ID NO: 380187 - DNA, 25 bp, Artificial
  probe
  misc_feature (1)..(25): SEQ ID NO: 4328; WAN024BEA; Start 35; Stop 59
ccttaaaacggtgttttgagcagtc

SEQ ID NO: 380188 - DNA, 25 bp, Artificial
  probe
  misc_feature (1)..(25): SEQ ID NO: 4328; WAN024BEA; Start 48; Stop 72
ttttgagcagtctgtgcctagcttt

SEQ ID NO: 380189 - DNA, 25 bp, Artificial
  probe
  misc_feature (1)..(25): SEQ ID NO: 4329; WAN024EVO; Start 37; Stop 61
gttggctctataatatttgtagtgg

SEQ ID NO: 380190 - DNA, 25 bp, Artificial
  probe
  misc_feature (1)..(25): SEQ ID NO: 4329; WAN024EVO; Start 36; Stop 60
tgttggctctataatatttgtagtg

SEQ ID NO: 380191 - DNA, 25 bp, Artificial
  probe
  misc_feature (1)..(25): SEQ ID NO: 4329; WAN024EVO; Start 35; Stop 59
ttgttggctctataatatttgtagt

SEQ ID NO: 380192 - DNA, 25 bp, Artificial
  probe
  misc_feature (1)..(25): SEQ ID NO: 4329; WAN024EVO; Start 69; Stop 93
ccctatagatattatggagcctatt

SEQ ID NO: 380193 - DNA, 25 bp, Artificial
  probe
  misc_feature (1)..(25): SEQ ID NO: 4329; WAN024EVO; Start 66; Stop 90
atcccctatagatattatggagcct

SEQ ID NO: 380194 - DNA, 25 bp, Artificial
  probe
  misc_feature (1)..(25): SEQ ID NO: 4329; WAN024EVO; Start 67; Stop 91
tcccctatagatattatggagccta

SEQ ID NO: 380195 - DNA, 25 bp, Artificial
  probe
  misc_feature (1)..(25): SEQ ID NO: 4329; WAN024EVO; Start 65; Stop 89
aatcccctatagatattatggagcc

SEQ ID NO: 380196 - DNA, 25 bp, Artificial
  probe
  misc_feature (1)..(25): SEQ ID NO: 4329; WAN024EVO; Start 68; Stop 92
cccctatagatattatggagcctat

SEQ ID NO: 380197 - DNA, 25 bp, Artificial
  probe
  misc_feature (1)..(25): SEQ ID NO: 4329; WAN024EVO; Start 83; Stop 107
tggagcctattttattgctaactaa

SEQ ID NO: 380198 - DNA, 25 bp, Artificial
  probe
  misc_feature (1)..(25): SEQ ID NO: 4329; WAN024EVO; Start 51; Stop 75
atttgtagtgggtaaatcccctata

SEQ ID NO: 380199 - DNA, 25 bp, Artificial
  probe
  misc_feature (1)..(25): SEQ ID NO: 4329; WAN024EVO; Start 82; Stop 106
atggagcctattttattgctaacta

SEQ ID NO: 380200 - DNA, 25 bp, Artificial
  probe
  misc_feature (1)..(25): SEQ ID NO: 4329; WAN024EVO; Start 81; Stop 105
tatggagcctattttattgctaact

SEQ ID NO: 380201 - DNA, 25 bp, Artificial
  probe
  misc_feature (1)..(25): SEQ ID NO: 4329; WAN024EVO; Start 54; Stop 78
tgtagtgggtaaatcccctatagat

SEQ ID NO: 380202 - DNA, 25 bp, Artificial
  probe
  misc_feature (1)..(25): SEQ ID NO: 4329; WAN024EVO; Start 53; Stop 77
ttgtagtgggtaaatcccctataga

SEQ ID NO: 380203 - DNA, 25 bp, Artificial
  probe
  misc_feature (1)..(25): SEQ ID NO: 4329; WAN024EVO; Start 52; Stop 76
tttgtagtgggtaaatcccctatag

SEQ ID NO: 380204 - DNA, 25 bp, Artificial
  probe
  misc_feature (1)..(25): SEQ ID NO: 4329; WAN024EVO; Start 80; Stop 104
ttatggagcctattttattgctaac

SEQ ID NO: 380205 - DNA, 25 bp, Artificial
  probe
  misc_feature (1)..(25): SEQ ID NO: 4329; WAN024EVO; Start 34; Stop 58
attgttggctctataatatttgtag

SEQ ID NO: 380206 - DNA, 25 bp, Artificial
  probe
  misc_feature (1)..(25): SEQ ID NO: 4329; WAN024EVO; Start 84; Stop 108
ggagcctattttattgctaactaat

SEQ ID NO: 380207 - DNA, 25 bp, Artificial
  probe
  misc_feature (1)..(25): SEQ ID NO: 4329; WAN024EVO; Start 64; Stop 88
aaatcccctatagatattatggagc

SEQ ID NO: 380208 - DNA, 25 bp, Artificial
  probe
  misc_feature (1)..(25): SEQ ID NO: 4329; WAN024EVO; Start 55; Stop 79
gtagtgggtaaatcccctatagata

SEQ ID NO: 380209 - DNA, 25 bp, Artificial
  probe
  misc_feature (1)..(25): SEQ ID NO: 4329; WAN024EVO; Start 57; Stop 81
agtgggtaaatcccctatagatatt

SEQ ID NO: 380210 - DNA, 25 bp, Artificial
  probe
  misc_feature (1)..(25): SEQ ID NO: 4329; WAN024EVO; Start 79; Stop 103
attatggagcctattttattgctaa

SEQ ID NO: 380211 - DNA, 25 bp, Artificial
  probe
  misc_feature (1)..(25): SEQ ID NO: 4329; WAN024EVO; Start 70; Stop 94
cctatagatattatggagcctattt

SEQ ID NO: 380212 - DNA, 25 bp, Artificial
  probe
  misc_feature (1)..(25): SEQ ID NO: 4329; WAN024EVO; Start 56; Stop 80
tagtgggtaaatcccctatagatat

SEQ ID NO: 380213 - DNA, 25 bp, Artificial
  probe
  misc_feature (1)..(25): SEQ ID NO: 4329; WAN024EVO; Start 61; Stop 85
ggtaaatcccctatagatattatgg

SEQ ID NO: 380214 - DNA, 25 bp, Artificial
  probe
  misc_feature (1)..(25): SEQ ID NO: 4329; WAN024EVO; Start 58; Stop 82
gtgggtaaatcccctatagatatta

SEQ ID NO: 380215 - DNA, 25 bp, Artificial
  probe
  misc_feature (1)..(25): SEQ ID NO: 4329; WAN024EVO; Start 59; Stop 83
tgggtaaatcccctatagatattat

SEQ ID NO: 380216 - DNA, 25 bp, Artificial
  probe
  misc_feature (1)..(25): SEQ ID NO: 4329; WAN024EVO; Start 60; Stop 84
gggtaaatcccctatagatattatg

SEQ ID NO: 380217 - DNA, 25 bp, Artificial
  probe
  misc_feature (1)..(25): SEQ ID NO: 4330; WAN024G6I; Start 240; Stop 264
gagttcctggtcagatacttcttga

SEQ ID NO: 380218 - DNA, 25 bp, Artificial
  probe
  misc_feature (1)..(25): SEQ ID NO: 4330; WAN024G6I; Start 239; Stop 263
agagttcctggtcagatacttcttg

SEQ ID NO: 380219 - DNA, 25 bp, Artificial
  probe
  misc_feature (1)..(25): SEQ ID NO: 4330; WAN024G6I; Start 238; Stop 262
cagagttcctggtcagatacttctt

SEQ ID NO: 380220 - DNA, 25 bp, Artificial
  probe
  misc_feature (1)..(25): SEQ ID NO: 4330; WAN024G6I; Start 167; Stop 191
caactagagcatccaagagtccttc

SEQ ID NO: 380221 - DNA, 25 bp, Artificial
  probe
  misc_feature (1)..(25): SEQ ID NO: 4330; WAN024G6I; Start 166; Stop 190
tcaactagagcatccaagagtcctt

SEQ ID NO: 380222 - DNA, 25 bp, Artificial
  probe
  misc_feature (1)..(25): SEQ ID NO: 4330; WAN024G6I; Start 170; Stop 194
ctagagcatccaagagtccttcctt

SEQ ID NO: 380223 - DNA, 25 bp, Artificial
  probe
  misc_feature (1)..(25): SEQ ID NO: 4330; WAN024G6I; Start 165; Stop 189
ctcaactagagcatccaagagtcct

SEQ ID NO: 380224 - DNA, 25 bp, Artificial
  probe
  misc_feature (1)..(25): SEQ ID NO: 4330; WAN024G6I; Start 168; Stop 192
aactagagcatccaagagtccttcc

SEQ ID NO: 380225 - DNA, 25 bp, Artificial
  probe
  misc_feature (1)..(25): SEQ ID NO: 4330; WAN024G6I; Start 33; Stop 57
gagcttggactctgtaatggtatcc

SEQ ID NO: 380226 - DNA, 25 bp, Artificial
  probe
  misc_feature (1)..(25): SEQ ID NO: 4330; WAN024G6I; Start 171; Stop 195
tagagcatccaagagtccttccttt

SEQ ID NO: 380227 - DNA, 25 bp, Artificial
  probe
  misc_feature (1)..(25): SEQ ID NO: 4330; WAN024G6I; Start 31; Stop 55
aagagcttggactctgtaatggtat

SEQ ID NO: 380228 - DNA, 25 bp, Artificial
  probe
  misc_feature (1)..(25): SEQ ID NO: 4330; WAN024G6I; Start 164; Stop 188
cctcaactagagcatccaagagtcc

SEQ ID NO: 380229 - DNA, 25 bp, Artificial
  probe
  misc_feature (1)..(25): SEQ ID NO: 4330; WAN024G6I; Start 32; Stop 56
agagcttggactctgtaatggtatc

SEQ ID NO: 380230 - DNA, 25 bp, Artificial
  probe
  misc_feature (1)..(25): SEQ ID NO: 4330; WAN024G6I; Start 169; Stop 193
actagagcatccaagagtccttcct

SEQ ID NO: 380231 - DNA, 25 bp, Artificial
  probe
  misc_feature (1)..(25): SEQ ID NO: 4330; WAN024G6I; Start 30; Stop 54
caagagcttggactctgtaatggta

SEQ ID NO: 380232 - DNA, 25 bp, Artificial
  probe
  misc_feature (1)..(25): SEQ ID NO: 4330; WAN024G6I; Start 188; Stop 212
cttccttttcactgacaaaatcctt

SEQ ID NO: 380233 - DNA, 25 bp, Artificial
  probe
  misc_feature (1)..(25): SEQ ID NO: 4330; WAN024G6I; Start 185; Stop 209
gtccttccttttcactgacaaaatc

SEQ ID NO: 380234 - DNA, 25 bp, Artificial
  probe
  misc_feature (1)..(25): SEQ ID NO: 4330; WAN024G6I; Start 191; Stop 215
ccttttcactgacaaaatccttagc

SEQ ID NO: 380235 - DNA, 25 bp, Artificial
  probe
  misc_feature (1)..(25): SEQ ID NO: 4330; WAN024G6I; Start 184; Stop 208
agtccttccttttcactgacaaaat

SEQ ID NO: 380236 - DNA, 25 bp, Artificial
  probe
  misc_feature (1)..(25): SEQ ID NO: 4330; WAN024G6I; Start 190; Stop 214
tccttttcactgacaaaatccttag

SEQ ID NO: 380237 - DNA, 25 bp, Artificial
  probe
  misc_feature (1)..(25): SEQ ID NO: 4330; WAN024G6I; Start 28; Stop 52
ttcaagagcttggactctgtaatgg

SEQ ID NO: 380238 - DNA, 25 bp, Artificial
  probe
  misc_feature (1)..(25): SEQ ID NO: 4330; WAN024G6I; Start 163; Stop 187
gcctcaactagagcatccaagagtc

SEQ ID NO: 380239 - DNA, 25 bp, Artificial
  probe
  misc_feature (1)..(25): SEQ ID NO: 4330; WAN024G6I; Start 189; Stop 213
ttccttttcactgacaaaatcctta

SEQ ID NO: 380240 - DNA, 25 bp, Artificial
  probe
  misc_feature (1)..(25): SEQ ID NO: 4330; WAN024G6I; Start 183; Stop 207
gagtccttccttttcactgacaaaa

SEQ ID NO: 380241 - DNA, 25 bp, Artificial
  probe
  misc_feature (1)..(25): SEQ ID NO: 4330; WAN024G6I; Start 187; Stop 211
ccttccttttcactgacaaaatcct

SEQ ID NO: 380242 - DNA, 25 bp, Artificial
  probe
  misc_feature (1)..(25): SEQ ID NO: 4330; WAN024G6I; Start 186; Stop 210
tccttccttttcactgacaaaatcc

SEQ ID NO: 380243 - DNA, 25 bp, Artificial
  probe
  misc_feature (1)..(25): SEQ ID NO: 4330; WAN024G6I; Start 194; Stop 218
tttcactgacaaaatccttagcttg

SEQ ID NO: 380244 - DNA, 25 bp, Artificial
  probe
  misc_feature (1)..(25): SEQ ID NO: 4330; WAN024G6I; Start 42; Stop 66
ctctgtaatggtatccagtgccgag

SEQ ID NO: 380245 - DNA, 25 bp, Artificial
  probe
  misc_feature (1)..(25): SEQ ID NO: 4330; WAN024G6I; Start 39; Stop 63
ggactctgtaatggtatccagtgcc

SEQ ID NO: 380246 - DNA, 25 bp, Artificial
  probe
  misc_feature (1)..(25): SEQ ID NO: 4330; WAN024G6I; Start 26; Stop 50
ctttcaagagcttggactctgtaat

SEQ ID NO: 380247 - DNA, 25 bp, Artificial
  probe
  misc_feature (1)..(25): SEQ ID NO: 4330; WAN024G6I; Start 177; Stop 201
atccaagagtccttccttttcactg

SEQ ID NO: 380248 - DNA, 25 bp, Artificial
  probe
  misc_feature (1)..(25): SEQ ID NO: 4330; WAN024G6I; Start 176; Stop 200
catccaagagtccttccttttcact

SEQ ID NO: 380249 - DNA, 25 bp, Artificial
  probe
  misc_feature (1)..(25): SEQ ID NO: 4330; WAN024G6I; Start 27; Stop 51
tttcaagagcttggactctgtaatg

SEQ ID NO: 380250 - DNA, 25 bp, Artificial
  probe
  misc_feature (1)..(25): SEQ ID NO: 4331; WAN024FDR; Start 739; Stop 763
gatgtgattgtggctaatatcttgg

SEQ ID NO: 380251 - DNA, 25 bp, Artificial
  probe
  misc_feature (1)..(25): SEQ ID NO: 4331; WAN024FDR; Start 740; Stop 764
atgtgattgtggctaatatcttggc

SEQ ID NO: 380252 - DNA, 25 bp, Artificial
  probe
  misc_feature (1)..(25): SEQ ID NO: 4331; WAN024FDR; Start 351; Stop 375
caactggaagaagtattatgaaccg

SEQ ID NO: 380253 - DNA, 25 bp, Artificial
  probe
  misc_feature (1)..(25): SEQ ID NO: 4331; WAN024FDR; Start 346; Stop 370
gctgacaactggaagaagtattatg

SEQ ID NO: 380254 - DNA, 25 bp, Artificial
  probe
  misc_feature (1)..(25): SEQ ID NO: 4331; WAN024FDR; Start 345; Stop 369
ggctgacaactggaagaagtattat

SEQ ID NO: 380255 - DNA, 25 bp, Artificial
  probe
  misc_feature (1)..(25): SEQ ID NO: 4331; WAN024FDR; Start 735; Stop 759
ggcagatgtgattgtggctaatatc

SEQ ID NO: 380256 - DNA, 25 bp, Artificial
  probe
  misc_feature (1)..(25): SEQ ID NO: 4331; WAN024FDR; Start 350; Stop 374
acaactggaagaagtattatgaacc

SEQ ID NO: 380257 - DNA, 25 bp, Artificial
  probe
  misc_feature (1)..(25): SEQ ID NO: 4331; WAN024FDR; Start 734; Stop 758
aggcagatgtgattgtggctaatat

SEQ ID NO: 380258 - DNA, 25 bp, Artificial
  probe
  misc_feature (1)..(25): SEQ ID NO: 4331; WAN024FDR; Start 347; Stop 371
ctgacaactggaagaagtattatga

SEQ ID NO: 380259 - DNA, 25 bp, Artificial
  probe
  misc_feature (1)..(25): SEQ ID NO: 4331; WAN024FDR; Start 348; Stop 372
tgacaactggaagaagtattatgaa

SEQ ID NO: 380260 - DNA, 25 bp, Artificial
  probe
  misc_feature (1)..(25): SEQ ID NO: 4331; WAN024FDR; Start 733; Stop 757
gaggcagatgtgattgtggctaata

SEQ ID NO: 380261 - DNA, 25 bp, Artificial
  probe
  misc_feature (1)..(25): SEQ ID NO: 4331; WAN024FDR; Start 829; Stop 853
atgagtggcattatcaaggacaagt

SEQ ID NO: 380262 - DNA, 25 bp, Artificial
  probe
  misc_feature (1)..(25): SEQ ID NO: 4331; WAN024FDR; Start 745; Stop 769
attgtggctaatatcttggcggata

SEQ ID NO: 380263 - DNA, 25 bp, Artificial
  probe
  misc_feature (1)..(25): SEQ ID NO: 4331; WAN024FDR; Start 349; Stop 373
gacaactggaagaagtattatgaac

SEQ ID NO: 380264 - DNA, 25 bp, Artificial
  probe
  misc_feature (1)..(25): SEQ ID NO: 4331; WAN024FDR; Start 917; Stop 941
gggaatggaatacctgtgtctttaa

SEQ ID NO: 380265 - DNA, 25 bp, Artificial
  probe
  misc_feature (1)..(25): SEQ ID NO: 4331; WAN024FDR; Start 11; Stop 35
ggcttggtatcttaatgatggaaac

SEQ ID NO: 380266 - DNA, 25 bp, Artificial
  probe
  misc_feature (1)..(25): SEQ ID NO: 4331; WAN024FDR; Start 5; Stop 29
tttacgggcttggtatcttaatgat

SEQ ID NO: 380267 - DNA, 25 bp, Artificial
  probe
  misc_feature (1)..(25): SEQ ID NO: 4331; WAN024FDR; Start 918; Stop 942
ggaatggaatacctgtgtctttaag

SEQ ID NO: 380268 - DNA, 25 bp, Artificial
  probe
  misc_feature (1)..(25): SEQ ID NO: 4331; WAN024FDR; Start 828; Stop 852
catgagtggcattatcaaggacaag

SEQ ID NO: 380269 - DNA, 25 bp, Artificial
  probe
  misc_feature (1)..(25): SEQ ID NO: 4331; WAN024FDR; Start 12; Stop 36
gcttggtatcttaatgatggaaaca

SEQ ID NO: 380270 - DNA, 25 bp, Artificial
  probe
  misc_feature (1)..(25): SEQ ID NO: 4331; WAN024FDR; Start 6; Stop 30
ttacgggcttggtatcttaatgatg

SEQ ID NO: 380271 - DNA, 25 bp, Artificial
  probe
  misc_feature (1)..(25): SEQ ID NO: 4331; WAN024FDR; Start 10; Stop 34
gggcttggtatcttaatgatggaaa

SEQ ID NO: 380272 - DNA, 25 bp, Artificial
  probe
  misc_feature (1)..(25): SEQ ID NO: 4331; WAN024FDR; Start 744; Stop 768
gattgtggctaatatcttggcggat

SEQ ID NO: 380273 - DNA, 25 bp, Artificial
  probe
  misc_feature (1)..(25): SEQ ID NO: 4331; WAN024FDR; Start 738; Stop 762
agatgtgattgtggctaatatcttg

SEQ ID NO: 380274 - DNA, 25 bp, Artificial
  probe
  misc_feature (1)..(25): SEQ ID NO: 4331; WAN024FDR; Start 737; Stop 761
cagatgtgattgtggctaatatctt

SEQ ID NO: 380275 - DNA, 25 bp, Artificial
  probe
  misc_feature (1)..(25): SEQ ID NO: 4331; WAN024FDR; Start 736; Stop 760
gcagatgtgattgtggctaatatct

SEQ ID NO: 380276 - DNA, 25 bp, Artificial
  probe
  misc_feature (1)..(25): SEQ ID NO: 4331; WAN024FDR; Start 830; Stop 854
tgagtggcattatcaaggacaagtg

SEQ ID NO: 380277 - DNA, 25 bp, Artificial
  probe
  misc_feature (1)..(25): SEQ ID NO: 4331; WAN024FDR; Start 19; Stop 43
atcttaatgatggaaacatggcaag

SEQ ID NO: 380278 - DNA, 25 bp, Artificial
  probe
  misc_feature (1)..(25): SEQ ID NO: 4331; WAN024FDR; Start 16; Stop 40
ggtatcttaatgatggaaacatggc

SEQ ID NO: 380279 - DNA, 25 bp, Artificial
  probe
  misc_feature (1)..(25): SEQ ID NO: 4331; WAN024FDR; Start 741; Stop 765
tgtgattgtggctaatatcttggcg

SEQ ID NO: 380280 - DNA, 25 bp, Artificial
  probe
  misc_feature (1)..(25): SEQ ID NO: 4331; WAN024FDR; Start 21; Stop 45
cttaatgatggaaacatggcaagag

SEQ ID NO: 380281 - DNA, 25 bp, Artificial
  probe
  misc_feature (1)..(25): SEQ ID NO: 4331; WAN024FDR; Start 17; Stop 41
gtatcttaatgatggaaacatggca

SEQ ID NO: 380282 - DNA, 25 bp, Artificial
  probe
  misc_feature (1)..(25): SEQ ID NO: 4331; WAN024FDR; Start 22; Stop 46
ttaatgatggaaacatggcaagagt

SEQ ID NO: 380283 - DNA, 25 bp, Artificial
  probe
  misc_feature (1)..(25): SEQ ID NO: 4332; WAN024DP7; Start 34; Stop 58
tacacagacaaattcccagttatga

SEQ ID NO: 380284 - DNA, 25 bp, Artificial
  probe
  misc_feature (1)..(25): SEQ ID NO: 4332; WAN024DP7; Start 37; Stop 61
acagacaaattcccagttatgagta

SEQ ID NO: 380285 - DNA, 25 bp, Artificial
  probe
  misc_feature (1)..(25): SEQ ID NO: 4332; WAN024DP7; Start 33; Stop 57
ttacacagacaaattcccagttatg

SEQ ID NO: 380286 - DNA, 25 bp, Artificial
  probe
  misc_feature (1)..(25): SEQ ID NO: 4332; WAN024DP7; Start 36; Stop 60
cacagacaaattcccagttatgagt

SEQ ID NO: 380287 - DNA, 25 bp, Artificial
  probe
  misc_feature (1)..(25): SEQ ID NO: 4332; WAN024DP7; Start 35; Stop 59
acacagacaaattcccagttatgag

SEQ ID NO: 380288 - DNA, 25 bp, Artificial
  probe
  misc_feature (1)..(25): SEQ ID NO: 4332; WAN024DP7; Start 38; Stop 62
cagacaaattcccagttatgagtat

SEQ ID NO: 380289 - DNA, 25 bp, Artificial
  probe
  misc_feature (1)..(25): SEQ ID NO: 4332; WAN024DP7; Start 32; Stop 56
tttacacagacaaattcccagttat

SEQ ID NO: 380290 - DNA, 25 bp, Artificial
  probe
  misc_feature (1)..(25): SEQ ID NO: 4332; WAN024DP7; Start 39; Stop 63
agacaaattcccagttatgagtatt

SEQ ID NO: 380291 - DNA, 25 bp, Artificial
  probe
  misc_feature (1)..(25): SEQ ID NO: 4332; WAN024DP7; Start 31; Stop 55
ttttacacagacaaattcccagtta

SEQ ID NO: 380292 - DNA, 25 bp, Artificial
  probe
  misc_feature (1)..(25): SEQ ID NO: 4332; WAN024DP7; Start 8; Stop 32
ataaataccatctatctcgctattt

SEQ ID NO: 380293 - DNA, 25 bp, Artificial
  probe
  misc_feature (1)..(25): SEQ ID NO: 4332; WAN024DP7; Start 9; Stop 33
taaataccatctatctcgctatttt

SEQ ID NO: 380294 - DNA, 25 bp, Artificial
  probe
  misc_feature (1)..(25): SEQ ID NO: 4332; WAN024DP7; Start 5; Stop 29
tttataaataccatctatctcgcta

SEQ ID NO: 380295 - DNA, 25 bp, Artificial
  probe
  misc_feature (1)..(25): SEQ ID NO: 4332; WAN024DP7; Start 3; Stop 27
gttttataaataccatctatctcgc

SEQ ID NO: 380296 - DNA, 25 bp, Artificial
  probe
  misc_feature (1)..(25): SEQ ID NO: 4332; WAN024DP7; Start 4; Stop 28
ttttataaataccatctatctcgct

SEQ ID NO: 380297 - DNA, 25 bp, Artificial
  probe
  misc_feature (1)..(25): SEQ ID NO: 4333; WAN024CYA; Start 79; Stop 103
ttggcattgtccataatagcaagtg

SEQ ID NO: 380298 - DNA, 25 bp, Artificial
  probe
  misc_feature (1)..(25): SEQ ID NO: 4333; WAN024CYA; Start 78; Stop 102
tttggcattgtccataatagcaagt

SEQ ID NO: 380299 - DNA, 25 bp, Artificial
  probe
  misc_feature (1)..(25): SEQ ID NO: 4333; WAN024CYA; Start 83; Stop 107
cattgtccataatagcaagtgcaaa

SEQ ID NO: 380300 - DNA, 25 bp, Artificial
  probe
  misc_feature (1)..(25): SEQ ID NO: 4333; WAN024CYA; Start 191; Stop 215
aaatacttgctccagtagttgtaaa

SEQ ID NO: 380301 - DNA, 25 bp, Artificial
  probe
  misc_feature (1)..(25): SEQ ID NO: 4333; WAN024CYA; Start 281; Stop 305
gaccaccaaagaaagaccaaaggat

SEQ ID NO: 380302 - DNA, 25 bp, Artificial
  probe
  misc_feature (1)..(25): SEQ ID NO: 4333; WAN024CYA; Start 44; Stop 68
gaacctcagccttcatcacctctag

SEQ ID NO: 380303 - DNA, 25 bp, Artificial
  probe
  misc_feature (1)..(25): SEQ ID NO: 4333; WAN024CYA; Start 282; Stop 306
accaccaaagaaagaccaaaggatc

SEQ ID NO: 380304 - DNA, 25 bp, Artificial
  probe
  misc_feature (1)..(25): SEQ ID NO: 4333; WAN024CYA; Start 279; Stop 303
gagaccaccaaagaaagaccaaagg

SEQ ID NO: 380305 - DNA, 25 bp, Artificial
  probe
  misc_feature (1)..(25): SEQ ID NO: 4333; WAN024CYA; Start 278; Stop 302
ggagaccaccaaagaaagaccaaag

SEQ ID NO: 380306 - DNA, 25 bp, Artificial
  probe
  misc_feature (1)..(25): SEQ ID NO: 4333; WAN024CYA; Start 280; Stop 304
agaccaccaaagaaagaccaaagga

SEQ ID NO: 380307 - DNA, 25 bp, Artificial
  probe
  misc_feature (1)..(25): SEQ ID NO: 4333; WAN024CYA; Start 82; Stop 106
gcattgtccataatagcaagtgcaa

SEQ ID NO: 380308 - DNA, 25 bp, Artificial
  probe
  misc_feature (1)..(25): SEQ ID NO: 4333; WAN024CYA; Start 325; Stop 349
aagactccctccttggcataaatcc

SEQ ID NO: 380309 - DNA, 25 bp, Artificial
  probe
  misc_feature (1)..(25): SEQ ID NO: 4333; WAN024CYA; Start 332; Stop 356
cctccttggcataaatccgttgatt

SEQ ID NO: 380310 - DNA, 25 bp, Artificial
  probe
  misc_feature (1)..(25): SEQ ID NO: 4333; WAN024CYA; Start 188; Stop 212
tcaaaatacttgctccagtagttgt

SEQ ID NO: 380311 - DNA, 25 bp, Artificial
  probe
  misc_feature (1)..(25): SEQ ID NO: 4333; WAN024CYA; Start 77; Stop 101
ttttggcattgtccataatagcaag

SEQ ID NO: 380312 - DNA, 25 bp, Artificial
  probe
  misc_feature (1)..(25): SEQ ID NO: 4333; WAN024CYA; Start 187; Stop 211
ttcaaaatacttgctccagtagttg

SEQ ID NO: 380313 - DNA, 25 bp, Artificial
  probe
  misc_feature (1)..(25): SEQ ID NO: 4333; WAN024CYA; Start 186; Stop 210
gttcaaaatacttgctccagtagtt

SEQ ID NO: 380314 - DNA, 25 bp, Artificial
  probe
  misc_feature (1)..(25): SEQ ID NO: 4333; WAN024CYA; Start 189; Stop 213
caaaatacttgctccagtagttgta

SEQ ID NO: 380315 - DNA, 25 bp, Artificial
  probe
  misc_feature (1)..(25): SEQ ID NO: 4333; WAN024CYA; Start 6; Stop 30
ttttagtttggatacaaccttgcca

SEQ ID NO: 380316 - DNA, 25 bp, Artificial
  probe
  misc_feature (1)..(25): SEQ ID NO: 4333; WAN024CYA; Start 184; Stop 208
tcgttcaaaatacttgctccagtag

SEQ ID NO: 380317 - DNA, 25 bp, Artificial
  probe
  misc_feature (1)..(25): SEQ ID NO: 4333; WAN024CYA; Start 185; Stop 209
cgttcaaaatacttgctccagtagt

SEQ ID NO: 380318 - DNA, 25 bp, Artificial
  probe
  misc_feature (1)..(25): SEQ ID NO: 4333; WAN024CYA; Start 183; Stop 207
gtcgttcaaaatacttgctccagta

SEQ ID NO: 380319 - DNA, 25 bp, Artificial
  probe
  misc_feature (1)..(25): SEQ ID NO: 4333; WAN024CYA; Start 80; Stop 104
tggcattgtccataatagcaagtgc

SEQ ID NO: 380320 - DNA, 25 bp, Artificial
  probe
  misc_feature (1)..(25): SEQ ID NO: 4333; WAN024CYA; Start 84; Stop 108
attgtccataatagcaagtgcaaaa

SEQ ID NO: 380321 - DNA, 25 bp, Artificial
  probe
  misc_feature (1)..(25): SEQ ID NO: 4333; WAN024CYA; Start 190; Stop 214
aaaatacttgctccagtagttgtaa

SEQ ID NO: 380322 - DNA, 25 bp, Artificial
  probe
  misc_feature (1)..(25): SEQ ID NO: 4333; WAN024CYA; Start 178; Stop 202
gaaacgtcgttcaaaatacttgctc

SEQ ID NO: 380323 - DNA, 25 bp, Artificial
  probe
  misc_feature (1)..(25): SEQ ID NO: 4333; WAN024CYA; Start 7; Stop 31
tttagtttggatacaaccttgccaa

SEQ ID NO: 380324 - DNA, 25 bp, Artificial
  probe
  misc_feature (1)..(25): SEQ ID NO: 4333; WAN024CYA; Start 277; Stop 301
gggagaccaccaaagaaagaccaaa

SEQ ID NO: 380325 - DNA, 25 bp, Artificial
  probe
  misc_feature (1)..(25): SEQ ID NO: 4333; WAN024CYA; Start 331; Stop 355
ccctccttggcataaatccgttgat

SEQ ID NO: 380326 - DNA, 25 bp, Artificial
  probe
  misc_feature (1)..(25): SEQ ID NO: 4333; WAN024CYA; Start 288; Stop 312
aaagaaagaccaaaggatccaacag

SEQ ID NO: 380327 - DNA, 25 bp, Artificial
  probe
  misc_feature (1)..(25): SEQ ID NO: 4333; WAN024CYA; Start 81; Stop 105
ggcattgtccataatagcaagtgca

SEQ ID NO: 380328 - DNA, 25 bp, Artificial
  probe
  misc_feature (1)..(25): SEQ ID NO: 4333; WAN024CYA; Start 287; Stop 311
caaagaaagaccaaaggatccaaca

SEQ ID NO: 380329 - DNA, 25 bp, Artificial
  probe
  misc_feature (1)..(25): SEQ ID NO: 4333; WAN024CYA; Start 179; Stop 203
aaacgtcgttcaaaatacttgctcc

SEQ ID NO: 380330 - DNA, 25 bp, Artificial
  probe
  misc_feature (1)..(25): SEQ ID NO: 4334; WAN024F7N; Start 51; Stop 75
cgtaggtatggttactgacttcgtc

SEQ ID NO: 380331 - DNA, 25 bp, Artificial
  probe
  misc_feature (1)..(25): SEQ ID NO: 4334; WAN024F7N; Start 47; Stop 71
ttgccgtaggtatggttactgactt

SEQ ID NO: 380332 - DNA, 25 bp, Artificial
  probe
  misc_feature (1)..(25): SEQ ID NO: 4334; WAN024F7N; Start 50; Stop 74
ccgtaggtatggttactgacttcgt

SEQ ID NO: 380333 - DNA, 25 bp, Artificial
  probe
  misc_feature (1)..(25): SEQ ID NO: 4334; WAN024F7N; Start 48; Stop 72
tgccgtaggtatggttactgacttc

SEQ ID NO: 380334 - DNA, 25 bp, Artificial
  probe
  misc_feature (1)..(25): SEQ ID NO: 4334; WAN024F7N; Start 46; Stop 70
cttgccgtaggtatggttactgact

SEQ ID NO: 380335 - DNA, 25 bp, Artificial
  probe
  misc_feature (1)..(25): SEQ ID NO: 4334; WAN024F7N; Start 49; Stop 73
gccgtaggtatggttactgacttcg

SEQ ID NO: 380336 - DNA, 25 bp, Artificial
  probe
  misc_feature (1)..(25): SEQ ID NO: 4334; WAN024F7N; Start 52; Stop 76
gtaggtatggttactgacttcgtca

SEQ ID NO: 380337 - DNA, 25 bp, Artificial
  probe
  misc_feature (1)..(25): SEQ ID NO: 4334; WAN024F7N; Start 45; Stop 69
ccttgccgtaggtatggttactgac

SEQ ID NO: 380338 - DNA, 25 bp, Artificial
  probe
  misc_feature (1)..(25): SEQ ID NO: 4335; WAN024A5L; Start 23; Stop 47
tagactttgggctctactaggtaaa

SEQ ID NO: 380339 - DNA, 25 bp, Artificial
  probe
  misc_feature (1)..(25): SEQ ID NO: 4335; WAN024A5L; Start 22; Stop 46
atagactttgggctctactaggtaa

SEQ ID NO: 380340 - DNA, 25 bp, Artificial
  probe
  misc_feature (1)..(25): SEQ ID NO: 4335; WAN024A5L; Start 17; Stop 41
ttgacatagactttgggctctacta

SEQ ID NO: 380341 - DNA, 25 bp, Artificial
  probe
  misc_feature (1)..(25): SEQ ID NO: 4335; WAN024A5L; Start 21; Stop 45
catagactttgggctctactaggta

SEQ ID NO: 380342 - DNA, 25 bp, Artificial
  probe
  misc_feature (1)..(25): SEQ ID NO: 4335; WAN024A5L; Start 18; Stop 42
tgacatagactttgggctctactag

SEQ ID NO: 380343 - DNA, 25 bp, Artificial
  probe
  misc_feature (1)..(25): SEQ ID NO: 4335; WAN024A5L; Start 16; Stop 40
tttgacatagactttgggctctact

SEQ ID NO: 380344 - DNA, 25 bp, Artificial
  probe
  misc_feature (1)..(25): SEQ ID NO: 4335; WAN024A5L; Start 19; Stop 43
gacatagactttgggctctactagg

SEQ ID NO: 380345 - DNA, 25 bp, Artificial
  probe
  misc_feature (1)..(25): SEQ ID NO: 4335; WAN024A5L; Start 24; Stop 48
agactttgggctctactaggtaaag

SEQ ID NO: 380346 - DNA, 25 bp, Artificial
  probe
  misc_feature (1)..(25): SEQ ID NO: 4335; WAN024A5L; Start 20; Stop 44
acatagactttgggctctactaggt

SEQ ID NO: 380347 - DNA, 25 bp, Artificial
  probe
  misc_feature (1)..(25): SEQ ID NO: 4335; WAN024A5L; Start 15; Stop 39
ttttgacatagactttgggctctac

SEQ ID NO: 380348 - DNA, 25 bp, Artificial
  probe
  misc_feature (1)..(25): SEQ ID NO: 4335; WAN024A5L; Start 27; Stop 51
ctttgggctctactaggtaaagtag

SEQ ID NO: 380349 - DNA, 25 bp, Artificial
  probe
  misc_feature (1)..(25): SEQ ID NO: 4335; WAN024A5L; Start 26; Stop 50
actttgggctctactaggtaaagta

SEQ ID NO: 380350 - DNA, 25 bp, Artificial
  probe
  misc_feature (1)..(25): SEQ ID NO: 4335; WAN024A5L; Start 25; Stop 49
gactttgggctctactaggtaaagt

SEQ ID NO: 380351 - DNA, 25 bp, Artificial
  probe
  misc_feature (1)..(25): SEQ ID NO: 4336; WAN024A8Z; Start 51; Stop 75
aaaatcccttttaggtcaagttaaa

SEQ ID NO: 380352 - DNA, 25 bp, Artificial
  probe
  misc_feature (1)..(25): SEQ ID NO: 4336; WAN024A8Z; Start 52; Stop 76
aaatcccttttaggtcaagttaaaa

SEQ ID NO: 380353 - DNA, 25 bp, Artificial
  probe
  misc_feature (1)..(25): SEQ ID NO: 4336; WAN024A8Z; Start 50; Stop 74
taaaatcccttttaggtcaagttaa

SEQ ID NO: 380354 - DNA, 25 bp, Artificial
  probe
  misc_feature (1)..(25): SEQ ID NO: 4337; WAN0249G8; Start 125; Stop 149
actgtgtttatggagagatgacaat

SEQ ID NO: 380355 - DNA, 25 bp, Artificial
  probe
  misc_feature (1)..(25): SEQ ID NO: 4337; WAN0249G8; Start 124; Stop 148
tactgtgtttatggagagatgacaa

SEQ ID NO: 380356 - DNA, 25 bp, Artificial
  probe
  misc_feature (1)..(25): SEQ ID NO: 4337; WAN0249G8; Start 123; Stop 147
atactgtgtttatggagagatgaca

SEQ ID NO: 380357 - DNA, 25 bp, Artificial
  probe
  misc_feature (1)..(25): SEQ ID NO: 4337; WAN0249G8; Start 126; Stop 150
ctgtgtttatggagagatgacaatt

SEQ ID NO: 380358 - DNA, 25 bp, Artificial
  probe
  misc_feature (1)..(25): SEQ ID NO: 4337; WAN0249G8; Start 127; Stop 151
tgtgtttatggagagatgacaattt

SEQ ID NO: 380359 - DNA, 25 bp, Artificial
  probe
  misc_feature (1)..(25): SEQ ID NO: 4337; WAN0249G8; Start 122; Stop 146
tatactgtgtttatggagagatgac

SEQ ID NO: 380360 - DNA, 25 bp, Artificial
  probe
  misc_feature (1)..(25): SEQ ID NO: 4337; WAN0249G8; Start 121; Stop 145
atatactgtgtttatggagagatga

SEQ ID NO: 380361 - DNA, 25 bp, Artificial
  probe
  misc_feature (1)..(25): SEQ ID NO: 4337; WAN0249G8; Start 119; Stop 143
tgatatactgtgtttatggagagat

SEQ ID NO: 380362 - DNA, 25 bp, Artificial
  probe
  misc_feature (1)..(25): SEQ ID NO: 4337; WAN0249G8; Start 118; Stop 142
atgatatactgtgtttatggagaga

SEQ ID NO: 380363 - DNA, 25 bp, Artificial
  probe
  misc_feature (1)..(25): SEQ ID NO: 4337; WAN0249G8; Start 120; Stop 144
gatatactgtgtttatggagagatg

SEQ ID NO: 380364 - DNA, 25 bp, Artificial
  probe
  misc_feature (1)..(25): SEQ ID NO: 4337; WAN0249G8; Start 128; Stop 152
gtgtttatggagagatgacaattta

SEQ ID NO: 380365 - DNA, 25 bp, Artificial
  probe
  misc_feature (1)..(25): SEQ ID NO: 4337; WAN0249G8; Start 117; Stop 141
aatgatatactgtgtttatggagag

SEQ ID NO: 380366 - DNA, 25 bp, Artificial
  probe
  misc_feature (1)..(25): SEQ ID NO: 4337; WAN0249G8; Start 116; Stop 140
aaatgatatactgtgtttatggaga

SEQ ID NO: 380367 - DNA, 25 bp, Artificial
  probe
  misc_feature (1)..(25): SEQ ID NO: 4337; WAN0249G8; Start 129; Stop 153
tgtttatggagagatgacaatttat

SEQ ID NO: 380368 - DNA, 25 bp, Artificial
  probe
  misc_feature (1)..(25): SEQ ID NO: 4337; WAN0249G8; Start 115; Stop 139
aaaatgatatactgtgtttatggag

SEQ ID NO: 380369 - DNA, 25 bp, Artificial
  probe
  misc_feature (1)..(25): SEQ ID NO: 4337; WAN0249G8; Start 136; Stop 160
ggagagatgacaatttataaaatgt

SEQ ID NO: 380370 - DNA, 25 bp, Artificial
  probe
  misc_feature (1)..(25): SEQ ID NO: 4337; WAN0249G8; Start 135; Stop 159
tggagagatgacaatttataaaatg

SEQ ID NO: 380371 - DNA, 25 bp, Artificial
  probe
  misc_feature (1)..(25): SEQ ID NO: 4338; WAN024AQ8; Start 12; Stop 36
gcaagacctttctatatgtccactt

SEQ ID NO: 380372 - DNA, 25 bp, Artificial
  probe
  misc_feature (1)..(25): SEQ ID NO: 4338; WAN024AQ8; Start 13; Stop 37
caagacctttctatatgtccacttt

SEQ ID NO: 380373 - DNA, 25 bp, Artificial
  probe
  misc_feature (1)..(25): SEQ ID NO: 4338; WAN024AQ8; Start 15; Stop 39
agacctttctatatgtccactttaa

SEQ ID NO: 380374 - DNA, 25 bp, Artificial
  probe
  misc_feature (1)..(25): SEQ ID NO: 4338; WAN024AQ8; Start 14; Stop 38
aagacctttctatatgtccacttta

SEQ ID NO: 380375 - DNA, 25 bp, Artificial
  probe
  misc_feature (1)..(25): SEQ ID NO: 4338; WAN024AQ8; Start 11; Stop 35
tgcaagacctttctatatgtccact

SEQ ID NO: 380376 - DNA, 25 bp, Artificial
  probe
  misc_feature (1)..(25): SEQ ID NO: 4338; WAN024AQ8; Start 16; Stop 40
gacctttctatatgtccactttaaa

SEQ ID NO: 380377 - DNA, 25 bp, Artificial
  probe
  misc_feature (1)..(25): SEQ ID NO: 4338; WAN024AQ8; Start 10; Stop 34
ttgcaagacctttctatatgtccac

SEQ ID NO: 380378 - DNA, 25 bp, Artificial
  probe
  misc_feature (1)..(25): SEQ ID NO: 4338; WAN024AQ8; Start 17; Stop 41
acctttctatatgtccactttaaaa

SEQ ID NO: 380379 - DNA, 25 bp, Artificial
  probe
  misc_feature (1)..(25): SEQ ID NO: 4339; WAN0249DQ; Start 4; Stop 28
acctcgtagaatgatagaaaactca

SEQ ID NO: 380380 - DNA, 25 bp, Artificial
  probe
  misc_feature (1)..(25): SEQ ID NO: 4339; WAN0249DQ; Start 5; Stop 29
cctcgtagaatgatagaaaactcag

SEQ ID NO: 380381 - DNA, 25 bp, Artificial
  probe
  misc_feature (1)..(25): SEQ ID NO: 4339; WAN0249DQ; Start 6; Stop 30
ctcgtagaatgatagaaaactcagt

SEQ ID NO: 380382 - DNA, 25 bp, Artificial
  probe
  misc_feature (1)..(25): SEQ ID NO: 4339; WAN0249DQ; Start 3; Stop 27
tacctcgtagaatgatagaaaactc

SEQ ID NO: 380383 - DNA, 25 bp, Artificial
  probe
  misc_feature (1)..(25): SEQ ID NO: 4339; WAN0249DQ; Start 11; Stop 35
agaatgatagaaaactcagttggtt

SEQ ID NO: 380384 - DNA, 25 bp, Artificial
  probe
  misc_feature (1)..(25): SEQ ID NO: 4339; WAN0249DQ; Start 2; Stop 26
ttacctcgtagaatgatagaaaact

SEQ ID NO: 380385 - DNA, 25 bp, Artificial
  probe
  misc_feature (1)..(25): SEQ ID NO: 4339; WAN0249DQ; Start 1; Stop 25
gttacctcgtagaatgatagaaaac

SEQ ID NO: 380386 - DNA, 25 bp, Artificial
  probe
  misc_feature (1)..(25): SEQ ID NO: 4339; WAN0249DQ; Start 8; Stop 32
cgtagaatgatagaaaactcagttg

SEQ ID NO: 380387 - DNA, 25 bp, Artificial
  probe
  misc_feature (1)..(25): SEQ ID NO: 4339; WAN0249DQ; Start 7; Stop 31
tcgtagaatgatagaaaactcagtt

SEQ ID NO: 380388 - DNA, 25 bp, Artificial
  probe
  misc_feature (1)..(25): SEQ ID NO: 4339; WAN0249DQ; Start 10; Stop 34
tagaatgatagaaaactcagttggt

SEQ ID NO: 380389 - DNA, 25 bp, Artificial
  probe
  misc_feature (1)..(25): SEQ ID NO: 4339; WAN0249DQ; Start 9; Stop 33
gtagaatgatagaaaactcagttgg

SEQ ID NO: 380390 - DNA, 25 bp, Artificial
  probe
  misc_feature (1)..(25): SEQ ID NO: 4339; WAN0249DQ; Start 12; Stop 36
gaatgatagaaaactcagttggtta

SEQ ID NO: 380391 - DNA, 25 bp, Artificial
  probe
  misc_feature (1)..(25): SEQ ID NO: 4339; WAN0249DQ; Start 36; Stop 60
aacccaactgagttttgaagtttta

SEQ ID NO: 380392 - DNA, 25 bp, Artificial
  probe
  misc_feature (1)..(25): SEQ ID NO: 4339; WAN0249DQ; Start 35; Stop 59
taacccaactgagttttgaagtttt

SEQ ID NO: 380393 - DNA, 25 bp, Artificial
  probe
  misc_feature (1)..(25): SEQ ID NO: 4339; WAN0249DQ; Start 34; Stop 58
ttaacccaactgagttttgaagttt

SEQ ID NO: 380394 - DNA, 25 bp, Artificial
  probe
  misc_feature (1)..(25): SEQ ID NO: 4339; WAN0249DQ; Start 37; Stop 61
acccaactgagttttgaagttttat

SEQ ID NO: 380395 - DNA, 25 bp, Artificial
  probe
  misc_feature (1)..(25): SEQ ID NO: 4339; WAN0249DQ; Start 13; Stop 37
aatgatagaaaactcagttggttaa

SEQ ID NO: 380396 - DNA, 25 bp, Artificial
  probe
  misc_feature (1)..(25): SEQ ID NO: 4339; WAN0249DQ; Start 14; Stop 38
atgatagaaaactcagttggttaac

SEQ ID NO: 380397 - DNA, 25 bp, Artificial
  probe
  misc_feature (1)..(25): SEQ ID NO: 4339; WAN0249DQ; Start 33; Stop 57
gttaacccaactgagttttgaagtt

SEQ ID NO: 380398 - DNA, 25 bp, Artificial
  probe
  misc_feature (1)..(25): SEQ ID NO: 4340; WAN024AGG; Start 112; Stop 136
agaagtgttagagctacattgtatt

SEQ ID NO: 380399 - DNA, 25 bp, Artificial
  probe
  misc_feature (1)..(25): SEQ ID NO: 4340; WAN024AGG; Start 111; Stop 135
aagaagtgttagagctacattgtat

SEQ ID NO: 380400 - DNA, 25 bp, Artificial
  probe
  misc_feature (1)..(25): SEQ ID NO: 4340; WAN024AGG; Start 108; Stop 132
ggaaagaagtgttagagctacattg

SEQ ID NO: 380401 - DNA, 25 bp, Artificial
  probe
  misc_feature (1)..(25): SEQ ID NO: 4340; WAN024AGG; Start 107; Stop 131
aggaaagaagtgttagagctacatt

SEQ ID NO: 380402 - DNA, 25 bp, Artificial
  probe
  misc_feature (1)..(25): SEQ ID NO: 4340; WAN024AGG; Start 105; Stop 129
ctaggaaagaagtgttagagctaca

SEQ ID NO: 380403 - DNA, 25 bp, Artificial
  probe
  misc_feature (1)..(25): SEQ ID NO: 4340; WAN024AGG; Start 109; Stop 133
gaaagaagtgttagagctacattgt

SEQ ID NO: 380404 - DNA, 25 bp, Artificial
  probe
  misc_feature (1)..(25): SEQ ID NO: 4340; WAN024AGG; Start 106; Stop 130
taggaaagaagtgttagagctacat

SEQ ID NO: 380405 - DNA, 25 bp, Artificial
  probe
  misc_feature (1)..(25): SEQ ID NO: 4340; WAN024AGG; Start 110; Stop 134
aaagaagtgttagagctacattgta

SEQ ID NO: 380406 - DNA, 25 bp, Artificial
  probe
  misc_feature (1)..(25): SEQ ID NO: 4340; WAN024AGG; Start 113; Stop 137
gaagtgttagagctacattgtattt

SEQ ID NO: 380407 - DNA, 25 bp, Artificial
  probe
  misc_feature (1)..(25): SEQ ID NO: 4340; WAN024AGG; Start 104; Stop 128
cctaggaaagaagtgttagagctac

SEQ ID NO: 380408 - DNA, 25 bp, Artificial
  probe
  misc_feature (1)..(25): SEQ ID NO: 4340; WAN024AGG; Start 114; Stop 138
aagtgttagagctacattgtatttt

SEQ ID NO: 380409 - DNA, 25 bp, Artificial
  probe
  misc_feature (1)..(25): SEQ ID NO: 4340; WAN024AGG; Start 153; Stop 177
gatatttgtaagaaaagagaagtga

SEQ ID NO: 380410 - DNA, 25 bp, Artificial
  probe
  misc_feature (1)..(25): SEQ ID NO: 4340; WAN024AGG; Start 152; Stop 176
agatatttgtaagaaaagagaagtg

SEQ ID NO: 380411 - DNA, 25 bp, Artificial
  probe
  misc_feature (1)..(25): SEQ ID NO: 4341; WAN0249YO; Start 50; Stop 74
attatggattatcaacaaggaggaa

SEQ ID NO: 380412 - DNA, 25 bp, Artificial
  probe
  misc_feature (1)..(25): SEQ ID NO: 4341; WAN0249YO; Start 49; Stop 73
tattatggattatcaacaaggagga

SEQ ID NO: 380413 - DNA, 25 bp, Artificial
  probe
  misc_feature (1)..(25): SEQ ID NO: 4341; WAN0249YO; Start 51; Stop 75
ttatggattatcaacaaggaggaaa

SEQ ID NO: 380414 - DNA, 25 bp, Artificial
  probe
  misc_feature (1)..(25): SEQ ID NO: 4341; WAN0249YO; Start 48; Stop 72
atattatggattatcaacaaggagg

SEQ ID NO: 380415 - DNA, 25 bp, Artificial
  probe
  misc_feature (1)..(25): SEQ ID NO: 4341; WAN0249YO; Start 52; Stop 76
tatggattatcaacaaggaggaaaa

SEQ ID NO: 380416 - DNA, 25 bp, Artificial
  probe
  misc_feature (1)..(25): SEQ ID NO: 4341; WAN0249YO; Start 1; Stop 25
gttaggaaaagtatcatagattgct

SEQ ID NO: 380417 - DNA, 25 bp, Artificial
  probe
  misc_feature (1)..(25): SEQ ID NO: 4341; WAN0249YO; Start 2; Stop 26
ttaggaaaagtatcatagattgctt

SEQ ID NO: 380418 - DNA, 25 bp, Artificial
  probe
  misc_feature (1)..(25): SEQ ID NO: 4341; WAN0249YO; Start 3; Stop 27
taggaaaagtatcatagattgcttt

SEQ ID NO: 380419 - DNA, 25 bp, Artificial
  probe
  misc_feature (1)..(25): SEQ ID NO: 4341; WAN0249YO; Start 4; Stop 28
aggaaaagtatcatagattgctttt

SEQ ID NO: 380420 - DNA, 25 bp, Artificial
  probe
  misc_feature (1)..(25): SEQ ID NO: 4342; WAN024AP4; Start 1; Stop 25
gttagtgaggcagttagctagttcg

SEQ ID NO: 380421 - DNA, 25 bp, Artificial
  probe
  misc_feature (1)..(25): SEQ ID NO: 4342; WAN024AP4; Start 29; Stop 53
aatagcgactagcgtccaacaattt

SEQ ID NO: 380422 - DNA, 25 bp, Artificial
  probe
  misc_feature (1)..(25): SEQ ID NO: 4342; WAN024AP4; Start 28; Stop 52
aaatagcgactagcgtccaacaatt

SEQ ID NO: 380423 - DNA, 25 bp, Artificial
  probe
  misc_feature (1)..(25): SEQ ID NO: 4342; WAN024AP4; Start 30; Stop 54
atagcgactagcgtccaacaatttg

SEQ ID NO: 380424 - DNA, 25 bp, Artificial
  probe
  misc_feature (1)..(25): SEQ ID NO: 4342; WAN024AP4; Start 27; Stop 51
caaatagcgactagcgtccaacaat

SEQ ID NO: 380425 - DNA, 25 bp, Artificial
  probe
  misc_feature (1)..(25): SEQ ID NO: 4342; WAN024AP4; Start 2; Stop 26
ttagtgaggcagttagctagttcgc

SEQ ID NO: 380426 - DNA, 25 bp, Artificial
  probe
  misc_feature (1)..(25): SEQ ID NO: 4342; WAN024AP4; Start 57; Stop 81
actttagttccaattgttggtactg

SEQ ID NO: 380427 - DNA, 25 bp, Artificial
  probe
  misc_feature (1)..(25): SEQ ID NO: 4342; WAN024AP4; Start 59; Stop 83
tttagttccaattgttggtactgag

SEQ ID NO: 380428 - DNA, 25 bp, Artificial
  probe
  misc_feature (1)..(25): SEQ ID NO: 4342; WAN024AP4; Start 58; Stop 82
ctttagttccaattgttggtactga

SEQ ID NO: 380429 - DNA, 25 bp, Artificial
  probe
  misc_feature (1)..(25): SEQ ID NO: 4342; WAN024AP4; Start 56; Stop 80
aactttagttccaattgttggtact

SEQ ID NO: 380430 - DNA, 25 bp, Artificial
  probe
  misc_feature (1)..(25): SEQ ID NO: 4342; WAN024AP4; Start 55; Stop 79
gaactttagttccaattgttggtac

SEQ ID NO: 380431 - DNA, 25 bp, Artificial
  probe
  misc_feature (1)..(25): SEQ ID NO: 4342; WAN024AP4; Start 9; Stop 33
ggcagttagctagttcgccaaatag

SEQ ID NO: 380432 - DNA, 25 bp, Artificial
  probe
  misc_feature (1)..(25): SEQ ID NO: 4342; WAN024AP4; Start 8; Stop 32
aggcagttagctagttcgccaaata

SEQ ID NO: 380433 - DNA, 25 bp, Artificial
  probe
  misc_feature (1)..(25): SEQ ID NO: 4342; WAN024AP4; Start 10; Stop 34
gcagttagctagttcgccaaatagc

SEQ ID NO: 380434 - DNA, 25 bp, Artificial
  probe
  misc_feature (1)..(25): SEQ ID NO: 4342; WAN024AP4; Start 11; Stop 35
cagttagctagttcgccaaatagcg

SEQ ID NO: 380435 - DNA, 25 bp, Artificial
  probe
  misc_feature (1)..(25): SEQ ID NO: 4343; WAN024A7G; Start 40; Stop 64
ataagaatcaatagtaaagcaggct

SEQ ID NO: 380436 - DNA, 25 bp, Artificial
  probe
  misc_feature (1)..(25): SEQ ID NO: 4343; WAN024A7G; Start 49; Stop 73
aatagtaaagcaggcttagatggtc

SEQ ID NO: 380437 - DNA, 25 bp, Artificial
  probe
  misc_feature (1)..(25): SEQ ID NO: 4343; WAN024A7G; Start 47; Stop 71
tcaatagtaaagcaggcttagatgg

SEQ ID NO: 380438 - DNA, 25 bp, Artificial
  probe
  misc_feature (1)..(25): SEQ ID NO: 4343; WAN024A7G; Start 48; Stop 72
caatagtaaagcaggcttagatggt

SEQ ID NO: 380439 - DNA, 25 bp, Artificial
  probe
  misc_feature (1)..(25): SEQ ID NO: 4343; WAN024A7G; Start 50; Stop 74
atagtaaagcaggcttagatggtct

SEQ ID NO: 380440 - DNA, 25 bp, Artificial
  probe
  misc_feature (1)..(25): SEQ ID NO: 4343; WAN024A7G; Start 46; Stop 70
atcaatagtaaagcaggcttagatg

SEQ ID NO: 380441 - DNA, 25 bp, Artificial
  probe
  misc_feature (1)..(25): SEQ ID NO: 4343; WAN024A7G; Start 44; Stop 68
gaatcaatagtaaagcaggcttaga

SEQ ID NO: 380442 - DNA, 25 bp, Artificial
  probe
  misc_feature (1)..(25): SEQ ID NO: 4343; WAN024A7G; Start 43; Stop 67
agaatcaatagtaaagcaggcttag

SEQ ID NO: 380443 - DNA, 25 bp, Artificial
  probe
  misc_feature (1)..(25): SEQ ID NO: 4343; WAN024A7G; Start 2; Stop 26
ttatcagaaatgcctttccttgttc

SEQ ID NO: 380444 - DNA, 25 bp, Artificial
  probe
  misc_feature (1)..(25): SEQ ID NO: 4343; WAN024A7G; Start 1; Stop 25
gttatcagaaatgcctttccttgtt

SEQ ID NO: 380445 - DNA, 25 bp, Artificial
  probe
  misc_feature (1)..(25): SEQ ID NO: 4343; WAN024A7G; Start 3; Stop 27
tatcagaaatgcctttccttgttca

SEQ ID NO: 380446 - DNA, 25 bp, Artificial
  probe
  misc_feature (1)..(25): SEQ ID NO: 4343; WAN024A7G; Start 42; Stop 66
aagaatcaatagtaaagcaggctta

SEQ ID NO: 380447 - DNA, 25 bp, Artificial
  probe
  misc_feature (1)..(25): SEQ ID NO: 4343; WAN024A7G; Start 41; Stop 65
taagaatcaatagtaaagcaggctt

SEQ ID NO: 380448 - DNA, 25 bp, Artificial
  probe
  misc_feature (1)..(25): SEQ ID NO: 4343; WAN024A7G; Start 45; Stop 69
aatcaatagtaaagcaggcttagat

SEQ ID NO: 380449 - DNA, 25 bp, Artificial
  probe
  misc_feature (1)..(25): SEQ ID NO: 4343; WAN024A7G; Start 39; Stop 63
tataagaatcaatagtaaagcaggc

SEQ ID NO: 380450 - DNA, 25 bp, Artificial
  probe
  misc_feature (1)..(25): SEQ ID NO: 4343; WAN024A7G; Start 51; Stop 75
tagtaaagcaggcttagatggtctg

SEQ ID NO: 380451 - DNA, 25 bp, Artificial
  probe
  misc_feature (1)..(25): SEQ ID NO: 4343; WAN024A7G; Start 4; Stop 28
atcagaaatgcctttccttgttcac

SEQ ID NO: 380452 - DNA, 25 bp, Artificial
  probe
  misc_feature (1)..(25): SEQ ID NO: 4343; WAN024A7G; Start 6; Stop 30
cagaaatgcctttccttgttcacag

SEQ ID NO: 380453 - DNA, 25 bp, Artificial
  probe
  misc_feature (1)..(25): SEQ ID NO: 4343; WAN024A7G; Start 5; Stop 29
tcagaaatgcctttccttgttcaca

SEQ ID NO: 380454 - DNA, 25 bp, Artificial
  probe
  misc_feature (1)..(25): SEQ ID NO: 4343; WAN024A7G; Start 7; Stop 31
agaaatgcctttccttgttcacagg

SEQ ID NO: 380455 - DNA, 25 bp, Artificial
  probe
  misc_feature (1)..(25): SEQ ID NO: 4343; WAN024A7G; Start 8; Stop 32
gaaatgcctttccttgttcacagga

SEQ ID NO: 380456 - DNA, 25 bp, Artificial
  probe
  misc_feature (1)..(25): SEQ ID NO: 4343; WAN024A7G; Start 19; Stop 43
ccttgttcacaggaaatttatataa

SEQ ID NO: 380457 - DNA, 25 bp, Artificial
  probe
  misc_feature (1)..(25): SEQ ID NO: 4343; WAN024A7G; Start 18; Stop 42
tccttgttcacaggaaatttatata

SEQ ID NO: 380458 - DNA, 25 bp, Artificial
  probe
  misc_feature (1)..(25): SEQ ID NO: 4345; WAN0249YA; Start 43; Stop 67
ttataatggagcggttacaaagaac

SEQ ID NO: 380459 - DNA, 25 bp, Artificial
  probe
  misc_feature (1)..(25): SEQ ID NO: 4345; WAN0249YA; Start 42; Stop 66
tttataatggagcggttacaaagaa

SEQ ID NO: 380460 - DNA, 25 bp, Artificial
  probe
  misc_feature (1)..(25): SEQ ID NO: 4345; WAN0249YA; Start 12; Stop 36
cctaatagtataccggaagagtgaa

SEQ ID NO: 380461 - DNA, 25 bp, Artificial
  probe
  misc_feature (1)..(25): SEQ ID NO: 4345; WAN0249YA; Start 11; Stop 35
tcctaatagtataccggaagagtga

SEQ ID NO: 380462 - DNA, 25 bp, Artificial
  probe
  misc_feature (1)..(25): SEQ ID NO: 4345; WAN0249YA; Start 17; Stop 41
tagtataccggaagagtgaaaggat

SEQ ID NO: 380463 - DNA, 25 bp, Artificial
  probe
  misc_feature (1)..(25): SEQ ID NO: 4345; WAN0249YA; Start 16; Stop 40
atagtataccggaagagtgaaagga

SEQ ID NO: 380464 - DNA, 25 bp, Artificial
  probe
  misc_feature (1)..(25): SEQ ID NO: 4345; WAN0249YA; Start 19; Stop 43
gtataccggaagagtgaaaggattt

SEQ ID NO: 380465 - DNA, 25 bp, Artificial
  probe
  misc_feature (1)..(25): SEQ ID NO: 4345; WAN0249YA; Start 15; Stop 39
aatagtataccggaagagtgaaagg

SEQ ID NO: 380466 - DNA, 25 bp, Artificial
  probe
  misc_feature (1)..(25): SEQ ID NO: 4345; WAN0249YA; Start 18; Stop 42
agtataccggaagagtgaaaggatt

SEQ ID NO: 380467 - DNA, 25 bp, Artificial
  probe
  misc_feature (1)..(25): SEQ ID NO: 4345; WAN0249YA; Start 37; Stop 61
aggattttataatggagcggttaca

SEQ ID NO: 380468 - DNA, 25 bp, Artificial
  probe
  misc_feature (1)..(25): SEQ ID NO: 4345; WAN0249YA; Start 34; Stop 58
gaaaggattttataatggagcggtt

SEQ ID NO: 380469 - DNA, 25 bp, Artificial
  probe
  misc_feature (1)..(25): SEQ ID NO: 4345; WAN0249YA; Start 32; Stop 56
gtgaaaggattttataatggagcgg

SEQ ID NO: 380470 - DNA, 25 bp, Artificial
  probe
  misc_feature (1)..(25): SEQ ID NO: 4345; WAN0249YA; Start 38; Stop 62
ggattttataatggagcggttacaa

SEQ ID NO: 380471 - DNA, 25 bp, Artificial
  probe
  misc_feature (1)..(25): SEQ ID NO: 4345; WAN0249YA; Start 33; Stop 57
tgaaaggattttataatggagcggt

SEQ ID NO: 380472 - DNA, 25 bp, Artificial
  probe
  misc_feature (1)..(25): SEQ ID NO: 4345; WAN0249YA; Start 31; Stop 55
agtgaaaggattttataatggagcg

SEQ ID NO: 380473 - DNA, 25 bp, Artificial
  probe
  misc_feature (1)..(25): SEQ ID NO: 4345; WAN0249YA; Start 36; Stop 60
aaggattttataatggagcggttac

SEQ ID NO: 380474 - DNA, 25 bp, Artificial
  probe
  misc_feature (1)..(25): SEQ ID NO: 4345; WAN0249YA; Start 41; Stop 65
ttttataatggagcggttacaaaga

SEQ ID NO: 380475 - DNA, 25 bp, Artificial
  probe
  misc_feature (1)..(25): SEQ ID NO: 4345; WAN0249YA; Start 35; Stop 59
aaaggattttataatggagcggtta

SEQ ID NO: 380476 - DNA, 25 bp, Artificial
  probe
  misc_feature (1)..(25): SEQ ID NO: 4345; WAN0249YA; Start 40; Stop 64
attttataatggagcggttacaaag

SEQ ID NO: 380477 - DNA, 25 bp, Artificial
  probe
  misc_feature (1)..(25): SEQ ID NO: 4345; WAN0249YA; Start 39; Stop 63
gattttataatggagcggttacaaa

SEQ ID NO: 380478 - DNA, 25 bp, Artificial
  probe
  misc_feature (1)..(25): SEQ ID NO: 4345; WAN0249YA; Start 30; Stop 54
gagtgaaaggattttataatggagc

SEQ ID NO: 380479 - DNA, 25 bp, Artificial
  probe
  misc_feature (1)..(25): SEQ ID NO: 4345; WAN0249YA; Start 14; Stop 38
taatagtataccggaagagtgaaag

SEQ ID NO: 380480 - DNA, 25 bp, Artificial
  probe
  misc_feature (1)..(25): SEQ ID NO: 4345; WAN0249YA; Start 13; Stop 37
ctaatagtataccggaagagtgaaa

SEQ ID NO: 380481 - DNA, 25 bp, Artificial
  probe
  misc_feature (1)..(25): SEQ ID NO: 4345; WAN0249YA; Start 10; Stop 34
ttcctaatagtataccggaagagtg

SEQ ID NO: 380482 - DNA, 25 bp, Artificial
  probe
  misc_feature (1)..(25): SEQ ID NO: 4345; WAN0249YA; Start 53; Stop 77
gcggttacaaagaacctactttcta

SEQ ID NO: 380483 - DNA, 25 bp, Artificial
  probe
  misc_feature (1)..(25): SEQ ID NO: 4345; WAN0249YA; Start 44; Stop 68
tataatggagcggttacaaagaacc

SEQ ID NO: 380484 - DNA, 25 bp, Artificial
  probe
  misc_feature (1)..(25): SEQ ID NO: 4345; WAN0249YA; Start 25; Stop 49
cggaagagtgaaaggattttataat

SEQ ID NO: 380485 - DNA, 25 bp, Artificial
  probe
  misc_feature (1)..(25): SEQ ID NO: 4345; WAN0249YA; Start 23; Stop 47
accggaagagtgaaaggattttata

SEQ ID NO: 380486 - DNA, 25 bp, Artificial
  probe
  misc_feature (1)..(25): SEQ ID NO: 4345; WAN0249YA; Start 22; Stop 46
taccggaagagtgaaaggattttat

SEQ ID NO: 380487 - DNA, 25 bp, Artificial
  probe
  misc_feature (1)..(25): SEQ ID NO: 4345; WAN0249YA; Start 21; Stop 45
ataccggaagagtgaaaggatttta

SEQ ID NO: 380488 - DNA, 25 bp, Artificial
  probe
  misc_feature (1)..(25): SEQ ID NO: 4345; WAN0249YA; Start 20; Stop 44
tataccggaagagtgaaaggatttt

SEQ ID NO: 380489 - DNA, 25 bp, Artificial
  probe
  misc_feature (1)..(25): SEQ ID NO: 4345; WAN0249YA; Start 54; Stop 78
cggttacaaagaacctactttctat

SEQ ID NO: 380490 - DNA, 25 bp, Artificial
  probe
  misc_feature (1)..(25): SEQ ID NO: 4345; WAN0249YA; Start 46; Stop 70
taatggagcggttacaaagaaccta

SEQ ID NO: 380491 - DNA, 25 bp, Artificial
  probe
  misc_feature (1)..(25): SEQ ID NO: 4346; WAN0249XM; Start 149; Stop 173
ctagtataacacaagaccagagcaa

SEQ ID NO: 380492 - DNA, 25 bp, Artificial
  probe
  misc_feature (1)..(25): SEQ ID NO: 4346; WAN0249XM; Start 147; Stop 171
atctagtataacacaagaccagagc

SEQ ID NO: 380493 - DNA, 25 bp, Artificial
  probe
  misc_feature (1)..(25): SEQ ID NO: 4346; WAN0249XM; Start 148; Stop 172
tctagtataacacaagaccagagca

SEQ ID NO: 380494 - DNA, 25 bp, Artificial
  probe
  misc_feature (1)..(25): SEQ ID NO: 4346; WAN0249XM; Start 143; Stop 167
acctatctagtataacacaagacca

SEQ ID NO: 380495 - DNA, 25 bp, Artificial
  probe
  misc_feature (1)..(25): SEQ ID NO: 4346; WAN0249XM; Start 140; Stop 164
gcaacctatctagtataacacaaga

SEQ ID NO: 380496 - DNA, 25 bp, Artificial
  probe
  misc_feature (1)..(25): SEQ ID NO: 4346; WAN0249XM; Start 144; Stop 168
cctatctagtataacacaagaccag

SEQ ID NO: 380497 - DNA, 25 bp, Artificial
  probe
  misc_feature (1)..(25): SEQ ID NO: 4346; WAN0249XM; Start 150; Stop 174
tagtataacacaagaccagagcaaa

SEQ ID NO: 380498 - DNA, 25 bp, Artificial
  probe
  misc_feature (1)..(25): SEQ ID NO: 4346; WAN0249XM; Start 142; Stop 166
aacctatctagtataacacaagacc

SEQ ID NO: 380499 - DNA, 25 bp, Artificial
  probe
  misc_feature (1)..(25): SEQ ID NO: 4346; WAN0249XM; Start 139; Stop 163
tgcaacctatctagtataacacaag

SEQ ID NO: 380500 - DNA, 25 bp, Artificial
  probe
  misc_feature (1)..(25): SEQ ID NO: 4346; WAN0249XM; Start 2; Stop 26
ttattcttctttctaaaggtggtgc

SEQ ID NO: 380501 - DNA, 25 bp, Artificial
  probe
  misc_feature (1)..(25): SEQ ID NO: 4346; WAN0249XM; Start 3; Stop 27
tattcttctttctaaaggtggtgcg

SEQ ID NO: 380502 - DNA, 25 bp, Artificial
  probe
  misc_feature (1)..(25): SEQ ID NO: 4346; WAN0249XM; Start 146; Stop 170
tatctagtataacacaagaccagag

SEQ ID NO: 380503 - DNA, 25 bp, Artificial
  probe
  misc_feature (1)..(25): SEQ ID NO: 4346; WAN0249XM; Start 145; Stop 169
ctatctagtataacacaagaccaga

SEQ ID NO: 380504 - DNA, 25 bp, Artificial
  probe
  misc_feature (1)..(25): SEQ ID NO: 4346; WAN0249XM; Start 141; Stop 165
caacctatctagtataacacaagac

SEQ ID NO: 380505 - DNA, 25 bp, Artificial
  probe
  misc_feature (1)..(25): SEQ ID NO: 4346; WAN0249XM; Start 1; Stop 25
gttattcttctttctaaaggtggtg

SEQ ID NO: 380506 - DNA, 25 bp, Artificial
  probe
  misc_feature (1)..(25): SEQ ID NO: 4346; WAN0249XM; Start 4; Stop 28
attcttctttctaaaggtggtgcga

SEQ ID NO: 380507 - DNA, 25 bp, Artificial
  probe
  misc_feature (1)..(25): SEQ ID NO: 4346; WAN0249XM; Start 5; Stop 29
ttcttctttctaaaggtggtgcgaa

SEQ ID NO: 380508 - DNA, 25 bp, Artificial
  probe
  misc_feature (1)..(25): SEQ ID NO: 4346; WAN0249XM; Start 155; Stop 179
taacacaagaccagagcaaaagata

SEQ ID NO: 380509 - DNA, 25 bp, Artificial
  probe
  misc_feature (1)..(25): SEQ ID NO: 4346; WAN0249XM; Start 153; Stop 177
tataacacaagaccagagcaaaaga

SEQ ID NO: 380510 - DNA, 25 bp, Artificial
  probe
  misc_feature (1)..(25): SEQ ID NO: 4346; WAN0249XM; Start 152; Stop 176
gtataacacaagaccagagcaaaag

SEQ ID NO: 380511 - DNA, 25 bp, Artificial
  probe
  misc_feature (1)..(25): SEQ ID NO: 4346; WAN0249XM; Start 151; Stop 175
agtataacacaagaccagagcaaaa

SEQ ID NO: 380512 - DNA, 25 bp, Artificial
  probe
  misc_feature (1)..(25): SEQ ID NO: 4346; WAN0249XM; Start 154; Stop 178
ataacacaagaccagagcaaaagat

SEQ ID NO: 380513 - DNA, 25 bp, Artificial
  probe
  misc_feature (1)..(25): SEQ ID NO: 4346; WAN0249XM; Start 171; Stop 195
caaaagatagccccatttctacaga

SEQ ID NO: 380514 - DNA, 25 bp, Artificial
  probe
  misc_feature (1)..(25): SEQ ID NO: 4346; WAN0249XM; Start 156; Stop 180
aacacaagaccagagcaaaagatag

SEQ ID NO: 380515 - DNA, 25 bp, Artificial
  probe
  misc_feature (1)..(25): SEQ ID NO: 4346; WAN0249XM; Start 172; Stop 196
aaaagatagccccatttctacagaa

SEQ ID NO: 380516 - DNA, 25 bp, Artificial
  probe
  misc_feature (1)..(25): SEQ ID NO: 4346; WAN0249XM; Start 168; Stop 192
gagcaaaagatagccccatttctac

SEQ ID NO: 380517 - DNA, 25 bp, Artificial
  probe
  misc_feature (1)..(25): SEQ ID NO: 4346; WAN0249XM; Start 167; Stop 191
agagcaaaagatagccccatttcta

SEQ ID NO: 380518 - DNA, 25 bp, Artificial
  probe
  misc_feature (1)..(25): SEQ ID NO: 4346; WAN0249XM; Start 170; Stop 194
gcaaaagatagccccatttctacag

SEQ ID NO: 380519 - DNA, 25 bp, Artificial
  probe
  misc_feature (1)..(25): SEQ ID NO: 4346; WAN0249XM; Start 91; Stop 115
ataaaatcgtgttgcttcttttcca

SEQ ID NO: 380520 - DNA, 25 bp, Artificial
  probe
  misc_feature (1)..(25): SEQ ID NO: 4346; WAN0249XM; Start 92; Stop 116
taaaatcgtgttgcttcttttccac

SEQ ID NO: 380521 - DNA, 25 bp, Artificial
  probe
  misc_feature (1)..(25): SEQ ID NO: 4346; WAN0249XM; Start 169; Stop 193
agcaaaagatagccccatttctaca

SEQ ID NO: 380522 - DNA, 25 bp, Artificial
  probe
  misc_feature (1)..(25): SEQ ID NO: 4346; WAN0249XM; Start 90; Stop 114
tataaaatcgtgttgcttcttttcc

SEQ ID NO: 380523 - DNA, 25 bp, Artificial
  probe
  misc_feature (1)..(25): SEQ ID NO: 4346; WAN0249XM; Start 87; Stop 111
agatataaaatcgtgttgcttcttt

SEQ ID NO: 380524 - DNA, 25 bp, Artificial
  probe
  misc_feature (1)..(25): SEQ ID NO: 4347; WAN0249RV; Start 2; Stop 26
ttcctaagacaagagctaacagact

SEQ ID NO: 380525 - DNA, 25 bp, Artificial
  probe
  misc_feature (1)..(25): SEQ ID NO: 4347; WAN0249RV; Start 1; Stop 25
gttcctaagacaagagctaacagac

SEQ ID NO: 380526 - DNA, 25 bp, Artificial
  probe
  misc_feature (1)..(25): SEQ ID NO: 4347; WAN0249RV; Start 3; Stop 27
tcctaagacaagagctaacagactg

SEQ ID NO: 380527 - DNA, 25 bp, Artificial
  probe
  misc_feature (1)..(25): SEQ ID NO: 4347; WAN0249RV; Start 4; Stop 28
cctaagacaagagctaacagactgg

SEQ ID NO: 380528 - DNA, 25 bp, Artificial
  probe
  misc_feature (1)..(25): SEQ ID NO: 4347; WAN0249RV; Start 5; Stop 29
ctaagacaagagctaacagactggc

SEQ ID NO: 380529 - DNA, 25 bp, Artificial
  probe
  misc_feature (1)..(25): SEQ ID NO: 4347; WAN0249RV; Start 21; Stop 45
cagactggccgtcaataatagtatt

SEQ ID NO: 380530 - DNA, 25 bp, Artificial
  probe
  misc_feature (1)..(25): SEQ ID NO: 4347; WAN0249RV; Start 17; Stop 41
ctaacagactggccgtcaataatag

SEQ ID NO: 380531 - DNA, 25 bp, Artificial
  probe
  misc_feature (1)..(25): SEQ ID NO: 4347; WAN0249RV; Start 20; Stop 44
acagactggccgtcaataatagtat

SEQ ID NO: 380532 - DNA, 25 bp, Artificial
  probe
  misc_feature (1)..(25): SEQ ID NO: 4347; WAN0249RV; Start 19; Stop 43
aacagactggccgtcaataatagta

SEQ ID NO: 380533 - DNA, 25 bp, Artificial
  probe
  misc_feature (1)..(25): SEQ ID NO: 4347; WAN0249RV; Start 18; Stop 42
taacagactggccgtcaataatagt

SEQ ID NO: 380534 - DNA, 25 bp, Artificial
  probe
  misc_feature (1)..(25): SEQ ID NO: 4347; WAN0249RV; Start 56; Stop 80
tcatcattactccttaactagtgtt

SEQ ID NO: 380535 - DNA, 25 bp, Artificial
  probe
  misc_feature (1)..(25): SEQ ID NO: 4347; WAN0249RV; Start 55; Stop 79
ttcatcattactccttaactagtgt

SEQ ID NO: 380536 - DNA, 25 bp, Artificial
  probe
  misc_feature (1)..(25): SEQ ID NO: 4347; WAN0249RV; Start 75; Stop 99
agtgtttaactgattaattagccag

SEQ ID NO: 380537 - DNA, 25 bp, Artificial
  probe
  misc_feature (1)..(25): SEQ ID NO: 4347; WAN0249RV; Start 16; Stop 40
gctaacagactggccgtcaataata

SEQ ID NO: 380538 - DNA, 25 bp, Artificial
  probe
  misc_feature (1)..(25): SEQ ID NO: 4347; WAN0249RV; Start 26; Stop 50
tggccgtcaataatagtattgttct

SEQ ID NO: 380539 - DNA, 25 bp, Artificial
  probe
  misc_feature (1)..(25): SEQ ID NO: 4347; WAN0249RV; Start 25; Stop 49
ctggccgtcaataatagtattgttc

SEQ ID NO: 380540 - DNA, 25 bp, Artificial
  probe
  misc_feature (1)..(25): SEQ ID NO: 4347; WAN0249RV; Start 24; Stop 48
actggccgtcaataatagtattgtt

SEQ ID NO: 380541 - DNA, 25 bp, Artificial
  probe
  misc_feature (1)..(25): SEQ ID NO: 4347; WAN0249RV; Start 22; Stop 46
agactggccgtcaataatagtattg

SEQ ID NO: 380542 - DNA, 25 bp, Artificial
  probe
  misc_feature (1)..(25): SEQ ID NO: 4347; WAN0249RV; Start 23; Stop 47
gactggccgtcaataatagtattgt

SEQ ID NO: 380543 - DNA, 25 bp, Artificial
  probe
  misc_feature (1)..(25): SEQ ID NO: 4347; WAN0249RV; Start 27; Stop 51
ggccgtcaataatagtattgttctt

SEQ ID NO: 380544 - DNA, 25 bp, Artificial
  probe
  misc_feature (1)..(25): SEQ ID NO: 4347; WAN0249RV; Start 74; Stop 98
tagtgtttaactgattaattagcca

SEQ ID NO: 380545 - DNA, 25 bp, Artificial
  probe
  misc_feature (1)..(25): SEQ ID NO: 4347; WAN0249RV; Start 6; Stop 30
taagacaagagctaacagactggcc

SEQ ID NO: 380546 - DNA, 25 bp, Artificial
  probe
  misc_feature (1)..(25): SEQ ID NO: 4347; WAN0249RV; Start 64; Stop 88
actccttaactagtgtttaactgat

SEQ ID NO: 380547 - DNA, 25 bp, Artificial
  probe
  misc_feature (1)..(25): SEQ ID NO: 4347; WAN0249RV; Start 28; Stop 52
gccgtcaataatagtattgttcttt

SEQ ID NO: 380548 - DNA, 25 bp, Artificial
  probe
  misc_feature (1)..(25): SEQ ID NO: 4347; WAN0249RV; Start 73; Stop 97
ctagtgtttaactgattaattagcc

SEQ ID NO: 380549 - DNA, 25 bp, Artificial
  probe
  misc_feature (1)..(25): SEQ ID NO: 4347; WAN0249RV; Start 15; Stop 39
agctaacagactggccgtcaataat

SEQ ID NO: 380550 - DNA, 25 bp, Artificial
  probe
  misc_feature (1)..(25): SEQ ID NO: 4347; WAN0249RV; Start 63; Stop 87
tactccttaactagtgtttaactga

SEQ ID NO: 380551 - DNA, 25 bp, Artificial
  probe
  misc_feature (1)..(25): SEQ ID NO: 4347; WAN0249RV; Start 57; Stop 81
catcattactccttaactagtgttt

SEQ ID NO: 380552 - DNA, 25 bp, Artificial
  probe
  misc_feature (1)..(25): SEQ ID NO: 4347; WAN0249RV; Start 65; Stop 89
ctccttaactagtgtttaactgatt

SEQ ID NO: 380553 - DNA, 25 bp, Artificial
  probe
  misc_feature (1)..(25): SEQ ID NO: 4347; WAN0249RV; Start 76; Stop 100
gtgtttaactgattaattagccagt

SEQ ID NO: 380554 - DNA, 25 bp, Artificial
  probe
  misc_feature (1)..(25): SEQ ID NO: 4347; WAN0249RV; Start 54; Stop 78
tttcatcattactccttaactagtg

SEQ ID NO: 380555 - DNA, 25 bp, Artificial
  probe
  misc_feature (1)..(25): SEQ ID NO: 4347; WAN0249RV; Start 14; Stop 38
gagctaacagactggccgtcaataa

SEQ ID NO: 380556 - DNA, 25 bp, Artificial
  probe
  misc_feature (1)..(25): SEQ ID NO: 4347; WAN0249RV; Start 62; Stop 86
ttactccttaactagtgtttaactg

SEQ ID NO: 380557 - DNA, 25 bp, Artificial
  probe
  misc_feature (1)..(25): SEQ ID NO: 4348; WAN0249RW; Start 132; Stop 156
agtctgttagctcttgtcttaggaa

SEQ ID NO: 380558 - DNA, 25 bp, Artificial
  probe
  misc_feature (1)..(25): SEQ ID NO: 4348; WAN0249RW; Start 133; Stop 157
gtctgttagctcttgtcttaggaac

SEQ ID NO: 380559 - DNA, 25 bp, Artificial
  probe
  misc_feature (1)..(25): SEQ ID NO: 4348; WAN0249RW; Start 131; Stop 155
cagtctgttagctcttgtcttagga

SEQ ID NO: 380560 - DNA, 25 bp, Artificial
  probe
  misc_feature (1)..(25): SEQ ID NO: 4348; WAN0249RW; Start 130; Stop 154
ccagtctgttagctcttgtcttagg

SEQ ID NO: 380561 - DNA, 25 bp, Artificial
  probe
  misc_feature (1)..(25): SEQ ID NO: 4348; WAN0249RW; Start 129; Stop 153
gccagtctgttagctcttgtcttag

SEQ ID NO: 380562 - DNA, 25 bp, Artificial
  probe
  misc_feature (1)..(25): SEQ ID NO: 4348; WAN0249RW; Start 113; Stop 137
aatactattattgacggccagtctg

SEQ ID NO: 380563 - DNA, 25 bp, Artificial
  probe
  misc_feature (1)..(25): SEQ ID NO: 4348; WAN0249RW; Start 117; Stop 141
ctattattgacggccagtctgttag

SEQ ID NO: 380564 - DNA, 25 bp, Artificial
  probe
  misc_feature (1)..(25): SEQ ID NO: 4348; WAN0249RW; Start 114; Stop 138
atactattattgacggccagtctgt

SEQ ID NO: 380565 - DNA, 25 bp, Artificial
  probe
  misc_feature (1)..(25): SEQ ID NO: 4348; WAN0249RW; Start 116; Stop 140
actattattgacggccagtctgtta

SEQ ID NO: 380566 - DNA, 25 bp, Artificial
  probe
  misc_feature (1)..(25): SEQ ID NO: 4348; WAN0249RW; Start 115; Stop 139
tactattattgacggccagtctgtt

SEQ ID NO: 380567 - DNA, 25 bp, Artificial
  probe
  misc_feature (1)..(25): SEQ ID NO: 4348; WAN0249RW; Start 79; Stop 103
acactagttaaggagtaatgatgaa

SEQ ID NO: 380568 - DNA, 25 bp, Artificial
  probe
  misc_feature (1)..(25): SEQ ID NO: 4348; WAN0249RW; Start 78; Stop 102
aacactagttaaggagtaatgatga

SEQ ID NO: 380569 - DNA, 25 bp, Artificial
  probe
  misc_feature (1)..(25): SEQ ID NO: 4348; WAN0249RW; Start 59; Stop 83
ctggctaattaatcagttaaacact

SEQ ID NO: 380570 - DNA, 25 bp, Artificial
  probe
  misc_feature (1)..(25): SEQ ID NO: 4348; WAN0249RW; Start 118; Stop 142
tattattgacggccagtctgttagc

SEQ ID NO: 380571 - DNA, 25 bp, Artificial
  probe
  misc_feature (1)..(25): SEQ ID NO: 4348; WAN0249RW; Start 110; Stop 134
aacaatactattattgacggccagt

SEQ ID NO: 380572 - DNA, 25 bp, Artificial
  probe
  misc_feature (1)..(25): SEQ ID NO: 4348; WAN0249RW; Start 109; Stop 133
gaacaatactattattgacggccag

SEQ ID NO: 380573 - DNA, 25 bp, Artificial
  probe
  misc_feature (1)..(25): SEQ ID NO: 4348; WAN0249RW; Start 108; Stop 132
agaacaatactattattgacggcca

SEQ ID NO: 380574 - DNA, 25 bp, Artificial
  probe
  misc_feature (1)..(25): SEQ ID NO: 4348; WAN0249RW; Start 112; Stop 136
caatactattattgacggccagtct

SEQ ID NO: 380575 - DNA, 25 bp, Artificial
  probe
  misc_feature (1)..(25): SEQ ID NO: 4348; WAN0249RW; Start 111; Stop 135
acaatactattattgacggccagtc

SEQ ID NO: 380576 - DNA, 25 bp, Artificial
  probe
  misc_feature (1)..(25): SEQ ID NO: 4348; WAN0249RW; Start 107; Stop 131
aagaacaatactattattgacggcc

SEQ ID NO: 380577 - DNA, 25 bp, Artificial
  probe
  misc_feature (1)..(25): SEQ ID NO: 4348; WAN0249RW; Start 60; Stop 84
tggctaattaatcagttaaacacta

SEQ ID NO: 380578 - DNA, 25 bp, Artificial
  probe
  misc_feature (1)..(25): SEQ ID NO: 4348; WAN0249RW; Start 128; Stop 152
ggccagtctgttagctcttgtctta

SEQ ID NO: 380579 - DNA, 25 bp, Artificial
  probe
  misc_feature (1)..(25): SEQ ID NO: 4348; WAN0249RW; Start 70; Stop 94
atcagttaaacactagttaaggagt

SEQ ID NO: 380580 - DNA, 25 bp, Artificial
  probe
  misc_feature (1)..(25): SEQ ID NO: 4348; WAN0249RW; Start 106; Stop 130
aaagaacaatactattattgacggc

SEQ ID NO: 380581 - DNA, 25 bp, Artificial
  probe
  misc_feature (1)..(25): SEQ ID NO: 4348; WAN0249RW; Start 61; Stop 85
ggctaattaatcagttaaacactag

SEQ ID NO: 380582 - DNA, 25 bp, Artificial
  probe
  misc_feature (1)..(25): SEQ ID NO: 4348; WAN0249RW; Start 119; Stop 143
attattgacggccagtctgttagct

SEQ ID NO: 380583 - DNA, 25 bp, Artificial
  probe
  misc_feature (1)..(25): SEQ ID NO: 4348; WAN0249RW; Start 71; Stop 95
tcagttaaacactagttaaggagta

SEQ ID NO: 380584 - DNA, 25 bp, Artificial
  probe
  misc_feature (1)..(25): SEQ ID NO: 4348; WAN0249RW; Start 77; Stop 101
aaacactagttaaggagtaatgatg

SEQ ID NO: 380585 - DNA, 25 bp, Artificial
  probe
  misc_feature (1)..(25): SEQ ID NO: 4348; WAN0249RW; Start 69; Stop 93
aatcagttaaacactagttaaggag

SEQ ID NO: 380586 - DNA, 25 bp, Artificial
  probe
  misc_feature (1)..(25): SEQ ID NO: 4348; WAN0249RW; Start 58; Stop 82
actggctaattaatcagttaaacac

SEQ ID NO: 380587 - DNA, 25 bp, Artificial
  probe
  misc_feature (1)..(25): SEQ ID NO: 4348; WAN0249RW; Start 80; Stop 104
cactagttaaggagtaatgatgaaa

SEQ ID NO: 380588 - DNA, 25 bp, Artificial
  probe
  misc_feature (1)..(25): SEQ ID NO: 4348; WAN0249RW; Start 120; Stop 144
ttattgacggccagtctgttagctc

SEQ ID NO: 380589 - DNA, 25 bp, Artificial
  probe
  misc_feature (1)..(25): SEQ ID NO: 4348; WAN0249RW; Start 72; Stop 96
cagttaaacactagttaaggagtaa

SEQ ID NO: 380590 - DNA, 25 bp, Artificial
  probe
  misc_feature (1)..(25): SEQ ID NO: 4349; WAN0249SS; Start 67; Stop 91
taaacgcctcttcaaatatagtaaa

SEQ ID NO: 380591 - DNA, 25 bp, Artificial
  probe
  misc_feature (1)..(25): SEQ ID NO: 4349; WAN0249SS; Start 66; Stop 90
ttaaacgcctcttcaaatatagtaa

SEQ ID NO: 380592 - DNA, 25 bp, Artificial
  probe
  misc_feature (1)..(25): SEQ ID NO: 4349; WAN0249SS; Start 28; Stop 52
gatgtctttcctctagaacgagttt

SEQ ID NO: 380593 - DNA, 25 bp, Artificial
  probe
  misc_feature (1)..(25): SEQ ID NO: 4349; WAN0249SS; Start 42; Stop 66
agaacgagttttatgtcagatagtt

SEQ ID NO: 380594 - DNA, 25 bp, Artificial
  probe
  misc_feature (1)..(25): SEQ ID NO: 4349; WAN0249SS; Start 70; Stop 94
acgcctcttcaaatatagtaaaatg

SEQ ID NO: 380595 - DNA, 25 bp, Artificial
  probe
  misc_feature (1)..(25): SEQ ID NO: 4349; WAN0249SS; Start 41; Stop 65
tagaacgagttttatgtcagatagt

SEQ ID NO: 380596 - DNA, 25 bp, Artificial
  probe
  misc_feature (1)..(25): SEQ ID NO: 4349; WAN0249SS; Start 43; Stop 67
gaacgagttttatgtcagatagttt

SEQ ID NO: 380597 - DNA, 25 bp, Artificial
  probe
  misc_feature (1)..(25): SEQ ID NO: 4349; WAN0249SS; Start 65; Stop 89
tttaaacgcctcttcaaatatagta

SEQ ID NO: 380598 - DNA, 25 bp, Artificial
  probe
  misc_feature (1)..(25): SEQ ID NO: 4349; WAN0249SS; Start 27; Stop 51
ggatgtctttcctctagaacgagtt

SEQ ID NO: 380599 - DNA, 25 bp, Artificial
  probe
  misc_feature (1)..(25): SEQ ID NO: 4349; WAN0249SS; Start 68; Stop 92
aaacgcctcttcaaatatagtaaaa

SEQ ID NO: 380600 - DNA, 25 bp, Artificial
  probe
  misc_feature (1)..(25): SEQ ID NO: 4349; WAN0249SS; Start 71; Stop 95
cgcctcttcaaatatagtaaaatga

SEQ ID NO: 380601 - DNA, 25 bp, Artificial
  probe
  misc_feature (1)..(25): SEQ ID NO: 4349; WAN0249SS; Start 69; Stop 93
aacgcctcttcaaatatagtaaaat

SEQ ID NO: 380602 - DNA, 25 bp, Artificial
  probe
  misc_feature (1)..(25): SEQ ID NO: 4349; WAN0249SS; Start 40; Stop 64
ctagaacgagttttatgtcagatag

SEQ ID NO: 380603 - DNA, 25 bp, Artificial
  probe
  misc_feature (1)..(25): SEQ ID NO: 4349; WAN0249SS; Start 37; Stop 61
cctctagaacgagttttatgtcaga

SEQ ID NO: 380604 - DNA, 25 bp, Artificial
  probe
  misc_feature (1)..(25): SEQ ID NO: 4349; WAN0249SS; Start 36; Stop 60
tcctctagaacgagttttatgtcag

SEQ ID NO: 380605 - DNA, 25 bp, Artificial
  probe
  misc_feature (1)..(25): SEQ ID NO: 4349; WAN0249SS; Start 29; Stop 53
atgtctttcctctagaacgagtttt

SEQ ID NO: 380606 - DNA, 25 bp, Artificial
  probe
  misc_feature (1)..(25): SEQ ID NO: 4349; WAN0249SS; Start 45; Stop 69
acgagttttatgtcagatagtttaa

SEQ ID NO: 380607 - DNA, 25 bp, Artificial
  probe
  misc_feature (1)..(25): SEQ ID NO: 4349; WAN0249SS; Start 35; Stop 59
ttcctctagaacgagttttatgtca

SEQ ID NO: 380608 - DNA, 25 bp, Artificial
  probe
  misc_feature (1)..(25): SEQ ID NO: 4349; WAN0249SS; Start 30; Stop 54
tgtctttcctctagaacgagtttta

SEQ ID NO: 380609 - DNA, 25 bp, Artificial
  probe
  misc_feature (1)..(25): SEQ ID NO: 4349; WAN0249SS; Start 44; Stop 68
aacgagttttatgtcagatagttta

SEQ ID NO: 380610 - DNA, 25 bp, Artificial
  probe
  misc_feature (1)..(25): SEQ ID NO: 4349; WAN0249SS; Start 34; Stop 58
tttcctctagaacgagttttatgtc

SEQ ID NO: 380611 - DNA, 25 bp, Artificial
  probe
  misc_feature (1)..(25): SEQ ID NO: 4349; WAN0249SS; Start 33; Stop 57
ctttcctctagaacgagttttatgt

SEQ ID NO: 380612 - DNA, 25 bp, Artificial
  probe
  misc_feature (1)..(25): SEQ ID NO: 4349; WAN0249SS; Start 32; Stop 56
tctttcctctagaacgagttttatg

SEQ ID NO: 380613 - DNA, 25 bp, Artificial
  probe
  misc_feature (1)..(25): SEQ ID NO: 4349; WAN0249SS; Start 31; Stop 55
gtctttcctctagaacgagttttat

SEQ ID NO: 380614 - DNA, 25 bp, Artificial
  probe
  misc_feature (1)..(25): SEQ ID NO: 4349; WAN0249SS; Start 38; Stop 62
ctctagaacgagttttatgtcagat

SEQ ID NO: 380615 - DNA, 25 bp, Artificial
  probe
  misc_feature (1)..(25): SEQ ID NO: 4349; WAN0249SS; Start 23; Stop 47
taaaggatgtctttcctctagaacg

SEQ ID NO: 380616 - DNA, 25 bp, Artificial
  probe
  misc_feature (1)..(25): SEQ ID NO: 4349; WAN0249SS; Start 24; Stop 48
aaaggatgtctttcctctagaacga

SEQ ID NO: 380617 - DNA, 25 bp, Artificial
  probe
  misc_feature (1)..(25): SEQ ID NO: 4349; WAN0249SS; Start 25; Stop 49
aaggatgtctttcctctagaacgag

SEQ ID NO: 380618 - DNA, 25 bp, Artificial
  probe
  misc_feature (1)..(25): SEQ ID NO: 4349; WAN0249SS; Start 39; Stop 63
tctagaacgagttttatgtcagata

SEQ ID NO: 380619 - DNA, 25 bp, Artificial
  probe
  misc_feature (1)..(25): SEQ ID NO: 4349; WAN0249SS; Start 22; Stop 46
ttaaaggatgtctttcctctagaac

SEQ ID NO: 380620 - DNA, 25 bp, Artificial
  probe
  misc_feature (1)..(25): SEQ ID NO: 4349; WAN0249SS; Start 26; Stop 50
aggatgtctttcctctagaacgagt

SEQ ID NO: 380621 - DNA, 25 bp, Artificial
  probe
  misc_feature (1)..(25): SEQ ID NO: 4349; WAN0249SS; Start 21; Stop 45
tttaaaggatgtctttcctctagaa

SEQ ID NO: 380622 - DNA, 25 bp, Artificial
  probe
  misc_feature (1)..(25): SEQ ID NO: 4349; WAN0249SS; Start 46; Stop 70
cgagttttatgtcagatagtttaaa

SEQ ID NO: 380623 - DNA, 25 bp, Artificial
  probe
  misc_feature (1)..(25): SEQ ID NO: 4350; WAN0249FP; Start 176; Stop 200
ttacactttgttagacatcaggagg

SEQ ID NO: 380624 - DNA, 25 bp, Artificial
  probe
  misc_feature (1)..(25): SEQ ID NO: 4350; WAN0249FP; Start 179; Stop 203
cactttgttagacatcaggaggaaa

SEQ ID NO: 380625 - DNA, 25 bp, Artificial
  probe
  misc_feature (1)..(25): SEQ ID NO: 4350; WAN0249FP; Start 177; Stop 201
tacactttgttagacatcaggagga

SEQ ID NO: 380626 - DNA, 25 bp, Artificial
  probe
  misc_feature (1)..(25): SEQ ID NO: 4350; WAN0249FP; Start 175; Stop 199
tttacactttgttagacatcaggag

SEQ ID NO: 380627 - DNA, 25 bp, Artificial
  probe
  misc_feature (1)..(25): SEQ ID NO: 4350; WAN0249FP; Start 178; Stop 202
acactttgttagacatcaggaggaa

SEQ ID NO: 380628 - DNA, 25 bp, Artificial
  probe
  misc_feature (1)..(25): SEQ ID NO: 4350; WAN0249FP; Start 180; Stop 204
actttgttagacatcaggaggaaaa

SEQ ID NO: 380629 - DNA, 25 bp, Artificial
  probe
  misc_feature (1)..(25): SEQ ID NO: 4350; WAN0249FP; Start 174; Stop 198
ttttacactttgttagacatcagga

SEQ ID NO: 380630 - DNA, 25 bp, Artificial
  probe
  misc_feature (1)..(25): SEQ ID NO: 4350; WAN0249FP; Start 133; Stop 157
aaagcgttttcttgaatgtttattt

SEQ ID NO: 380631 - DNA, 25 bp, Artificial
  probe
  misc_feature (1)..(25): SEQ ID NO: 4350; WAN0249FP; Start 135; Stop 159
agcgttttcttgaatgtttatttaa

SEQ ID NO: 380632 - DNA, 25 bp, Artificial
  probe
  misc_feature (1)..(25): SEQ ID NO: 4350; WAN0249FP; Start 134; Stop 158
aagcgttttcttgaatgtttattta

SEQ ID NO: 380633 - DNA, 25 bp, Artificial
  probe
  misc_feature (1)..(25): SEQ ID NO: 4350; WAN0249FP; Start 149; Stop 173
tgtttatttaagaaagtagttggtt

SEQ ID NO: 380634 - DNA, 25 bp, Artificial
  probe
  misc_feature (1)..(25): SEQ ID NO: 4350; WAN0249FP; Start 136; Stop 160
gcgttttcttgaatgtttatttaag

SEQ ID NO: 380635 - DNA, 25 bp, Artificial
  probe
  misc_feature (1)..(25): SEQ ID NO: 4350; WAN0249FP; Start 132; Stop 156
gaaagcgttttcttgaatgtttatt

SEQ ID NO: 380636 - DNA, 25 bp, Artificial
  probe
  misc_feature (1)..(25): SEQ ID NO: 4350; WAN0249FP; Start 131; Stop 155
agaaagcgttttcttgaatgtttat

SEQ ID NO: 380637 - DNA, 25 bp, Artificial
  probe
  misc_feature (1)..(25): SEQ ID NO: 4350; WAN0249FP; Start 129; Stop 153
atagaaagcgttttcttgaatgttt

SEQ ID NO: 380638 - DNA, 25 bp, Artificial
  probe
  misc_feature (1)..(25): SEQ ID NO: 4350; WAN0249FP; Start 128; Stop 152
aatagaaagcgttttcttgaatgtt

SEQ ID NO: 380639 - DNA, 25 bp, Artificial
  probe
  misc_feature (1)..(25): SEQ ID NO: 4350; WAN0249FP; Start 127; Stop 151
aaatagaaagcgttttcttgaatgt

SEQ ID NO: 380640 - DNA, 25 bp, Artificial
  probe
  misc_feature (1)..(25): SEQ ID NO: 4350; WAN0249FP; Start 130; Stop 154
tagaaagcgttttcttgaatgttta

SEQ ID NO: 380641 - DNA, 25 bp, Artificial
  probe
  misc_feature (1)..(25): SEQ ID NO: 4350; WAN0249FP; Start 137; Stop 161
cgttttcttgaatgtttatttaaga

SEQ ID NO: 380642 - DNA, 25 bp, Artificial
  probe
  misc_feature (1)..(25): SEQ ID NO: 4350; WAN0249FP; Start 126; Stop 150
taaatagaaagcgttttcttgaatg

SEQ ID NO: 380643 - DNA, 25 bp, Artificial
  probe
  misc_feature (1)..(25): SEQ ID NO: 4350; WAN0249FP; Start 125; Stop 149
ataaatagaaagcgttttcttgaat

SEQ ID NO: 380644 - DNA, 25 bp, Artificial
  probe
  misc_feature (1)..(25): SEQ ID NO: 4350; WAN0249FP; Start 124; Stop 148
tataaatagaaagcgttttcttgaa

SEQ ID NO: 380645 - DNA, 25 bp, Artificial
  probe
  misc_feature (1)..(25): SEQ ID NO: 4350; WAN0249FP; Start 123; Stop 147
atataaatagaaagcgttttcttga

SEQ ID NO: 380646 - DNA, 25 bp, Artificial
  probe
  misc_feature (1)..(25): SEQ ID NO: 4350; WAN0249FP; Start 61; Stop 85
tcttgaaaacatgtacaatatttca

SEQ ID NO: 380647 - DNA, 25 bp, Artificial
  probe
  misc_feature (1)..(25): SEQ ID NO: 4352; WAN0249DU; Start 126; Stop 150
aaaagaaagaaaagaggaaacttcg

SEQ ID NO: 380648 - DNA, 25 bp, Artificial
  probe
  misc_feature (1)..(25): SEQ ID NO: 4352; WAN0249DU; Start 127; Stop 151
aaagaaagaaaagaggaaacttcga

SEQ ID NO: 380649 - DNA, 25 bp, Artificial
  probe
  misc_feature (1)..(25): SEQ ID NO: 4352; WAN0249DU; Start 53; Stop 77
atttacccctgtaacatttgacaaa

SEQ ID NO: 380650 - DNA, 25 bp, Artificial
  probe
  misc_feature (1)..(25): SEQ ID NO: 4352; WAN0249DU; Start 52; Stop 76
tatttacccctgtaacatttgacaa

SEQ ID NO: 380651 - DNA, 25 bp, Artificial
  probe
  misc_feature (1)..(25): SEQ ID NO: 4352; WAN0249DU; Start 51; Stop 75
ttatttacccctgtaacatttgaca

SEQ ID NO: 380652 - DNA, 25 bp, Artificial
  probe
  misc_feature (1)..(25): SEQ ID NO: 4352; WAN0249DU; Start 57; Stop 81
acccctgtaacatttgacaaatttt

SEQ ID NO: 380653 - DNA, 25 bp, Artificial
  probe
  misc_feature (1)..(25): SEQ ID NO: 4352; WAN0249DU; Start 55; Stop 79
ttacccctgtaacatttgacaaatt

SEQ ID NO: 380654 - DNA, 25 bp, Artificial
  probe
  misc_feature (1)..(25): SEQ ID NO: 4352; WAN0249DU; Start 54; Stop 78
tttacccctgtaacatttgacaaat

SEQ ID NO: 380655 - DNA, 25 bp, Artificial
  probe
  misc_feature (1)..(25): SEQ ID NO: 4352; WAN0249DU; Start 56; Stop 80
tacccctgtaacatttgacaaattt

SEQ ID NO: 380656 - DNA, 25 bp, Artificial
  probe
  misc_feature (1)..(25): SEQ ID NO: 4352; WAN0249DU; Start 50; Stop 74
tttatttacccctgtaacatttgac

SEQ ID NO: 380657 - DNA, 25 bp, Artificial
  probe
  misc_feature (1)..(25): SEQ ID NO: 4352; WAN0249DU; Start 49; Stop 73
ttttatttacccctgtaacatttga

SEQ ID NO: 380658 - DNA, 25 bp, Artificial
  probe
  misc_feature (1)..(25): SEQ ID NO: 4353; WAN0249FA; Start 45; Stop 69
tcacggggttcagatacttatttag

SEQ ID NO: 380659 - DNA, 25 bp, Artificial
  probe
  misc_feature (1)..(25): SEQ ID NO: 4353; WAN0249FA; Start 43; Stop 67
tttcacggggttcagatacttattt

SEQ ID NO: 380660 - DNA, 25 bp, Artificial
  probe
  misc_feature (1)..(25): SEQ ID NO: 4353; WAN0249FA; Start 42; Stop 66
ttttcacggggttcagatacttatt

SEQ ID NO: 380661 - DNA, 25 bp, Artificial
  probe
  misc_feature (1)..(25): SEQ ID NO: 4353; WAN0249FA; Start 44; Stop 68
ttcacggggttcagatacttattta

SEQ ID NO: 380662 - DNA, 25 bp, Artificial
  probe
  misc_feature (1)..(25): SEQ ID NO: 4353; WAN0249FA; Start 41; Stop 65
gttttcacggggttcagatacttat

SEQ ID NO: 380663 - DNA, 25 bp, Artificial
  probe
  misc_feature (1)..(25): SEQ ID NO: 4353; WAN0249FA; Start 46; Stop 70
cacggggttcagatacttatttagt

SEQ ID NO: 380664 - DNA, 25 bp, Artificial
  probe
  misc_feature (1)..(25): SEQ ID NO: 4353; WAN0249FA; Start 47; Stop 71
acggggttcagatacttatttagtt

SEQ ID NO: 380665 - DNA, 25 bp, Artificial
  probe
  misc_feature (1)..(25): SEQ ID NO: 4353; WAN0249FA; Start 50; Stop 74
gggttcagatacttatttagttcaa

SEQ ID NO: 380666 - DNA, 25 bp, Artificial
  probe
  misc_feature (1)..(25): SEQ ID NO: 4353; WAN0249FA; Start 48; Stop 72
cggggttcagatacttatttagttc

SEQ ID NO: 380667 - DNA, 25 bp, Artificial
  probe
  misc_feature (1)..(25): SEQ ID NO: 4353; WAN0249FA; Start 54; Stop 78
tcagatacttatttagttcaagagc

SEQ ID NO: 380668 - DNA, 25 bp, Artificial
  probe
  misc_feature (1)..(25): SEQ ID NO: 4353; WAN0249FA; Start 40; Stop 64
agttttcacggggttcagatactta

SEQ ID NO: 380669 - DNA, 25 bp, Artificial
  probe
  misc_feature (1)..(25): SEQ ID NO: 4353; WAN0249FA; Start 49; Stop 73
ggggttcagatacttatttagttca

SEQ ID NO: 380670 - DNA, 25 bp, Artificial
  probe
  misc_feature (1)..(25): SEQ ID NO: 4353; WAN0249FA; Start 57; Stop 81
gatacttatttagttcaagagctga

SEQ ID NO: 380671 - DNA, 25 bp, Artificial
  probe
  misc_feature (1)..(25): SEQ ID NO: 4353; WAN0249FA; Start 56; Stop 80
agatacttatttagttcaagagctg

SEQ ID NO: 380672 - DNA, 25 bp, Artificial
  probe
  misc_feature (1)..(25): SEQ ID NO: 4353; WAN0249FA; Start 55; Stop 79
cagatacttatttagttcaagagct

SEQ ID NO: 380673 - DNA, 25 bp, Artificial
  probe
  misc_feature (1)..(25): SEQ ID NO: 4353; WAN0249FA; Start 39; Stop 63
cagttttcacggggttcagatactt

SEQ ID NO: 380674 - DNA, 25 bp, Artificial
  probe
  misc_feature (1)..(25): SEQ ID NO: 4353; WAN0249FA; Start 51; Stop 75
ggttcagatacttatttagttcaag

SEQ ID NO: 380675 - DNA, 25 bp, Artificial
  probe
  misc_feature (1)..(25): SEQ ID NO: 4353; WAN0249FA; Start 58; Stop 82
atacttatttagttcaagagctgaa

SEQ ID NO: 380676 - DNA, 25 bp, Artificial
  probe
  misc_feature (1)..(25): SEQ ID NO: 4353; WAN0249FA; Start 38; Stop 62
ccagttttcacggggttcagatact

SEQ ID NO: 380677 - DNA, 25 bp, Artificial
  probe
  misc_feature (1)..(25): SEQ ID NO: 4353; WAN0249FA; Start 3; Stop 27
ttattttctcctgttaaattgtcag

SEQ ID NO: 380678 - DNA, 25 bp, Artificial
  probe
  misc_feature (1)..(25): SEQ ID NO: 4353; WAN0249FA; Start 13; Stop 37
ctgttaaattgtcaggccagaacgg

SEQ ID NO: 380679 - DNA, 25 bp, Artificial
  probe
  misc_feature (1)..(25): SEQ ID NO: 4353; WAN0249FA; Start 2; Stop 26
tttattttctcctgttaaattgtca

SEQ ID NO: 380680 - DNA, 25 bp, Artificial
  probe
  misc_feature (1)..(25): SEQ ID NO: 4353; WAN0249FA; Start 1; Stop 25
gtttattttctcctgttaaattgtc

SEQ ID NO: 380681 - DNA, 25 bp, Artificial
  probe
  misc_feature (1)..(25): SEQ ID NO: 4353; WAN0249FA; Start 5; Stop 29
attttctcctgttaaattgtcaggc

SEQ ID NO: 380682 - DNA, 25 bp, Artificial
  probe
  misc_feature (1)..(25): SEQ ID NO: 4353; WAN0249FA; Start 7; Stop 31
tttctcctgttaaattgtcaggcca

SEQ ID NO: 380683 - DNA, 25 bp, Artificial
  probe
  misc_feature (1)..(25): SEQ ID NO: 4353; WAN0249FA; Start 10; Stop 34
ctcctgttaaattgtcaggccagaa

SEQ ID NO: 380684 - DNA, 25 bp, Artificial
  probe
  misc_feature (1)..(25): SEQ ID NO: 4353; WAN0249FA; Start 8; Stop 32
ttctcctgttaaattgtcaggccag

SEQ ID NO: 380685 - DNA, 25 bp, Artificial
  probe
  misc_feature (1)..(25): SEQ ID NO: 4353; WAN0249FA; Start 11; Stop 35
tcctgttaaattgtcaggccagaac

SEQ ID NO: 380686 - DNA, 25 bp, Artificial
  probe
  misc_feature (1)..(25): SEQ ID NO: 4353; WAN0249FA; Start 4; Stop 28
tattttctcctgttaaattgtcagg

SEQ ID NO: 380687 - DNA, 25 bp, Artificial
  probe
  misc_feature (1)..(25): SEQ ID NO: 4353; WAN0249FA; Start 9; Stop 33
tctcctgttaaattgtcaggccaga

SEQ ID NO: 380688 - DNA, 25 bp, Artificial
  probe
  misc_feature (1)..(25): SEQ ID NO: 4353; WAN0249FA; Start 6; Stop 30
ttttctcctgttaaattgtcaggcc

SEQ ID NO: 380689 - DNA, 25 bp, Artificial
  probe
  misc_feature (1)..(25): SEQ ID NO: 4353; WAN0249FA; Start 12; Stop 36
cctgttaaattgtcaggccagaacg

SEQ ID NO: 380690 - DNA, 25 bp, Artificial
  probe
  misc_feature (1)..(25): SEQ ID NO: 4354; WAN024A36; Start 43; Stop 67
aatcagtcatcttggtatgctcctg

SEQ ID NO: 380691 - DNA, 25 bp, Artificial
  probe
  misc_feature (1)..(25): SEQ ID NO: 4354; WAN024A36; Start 42; Stop 66
aaatcagtcatcttggtatgctcct

SEQ ID NO: 380692 - DNA, 25 bp, Artificial
  probe
  misc_feature (1)..(25): SEQ ID NO: 4354; WAN024A36; Start 52; Stop 76
tcttggtatgctcctgctttcacta

SEQ ID NO: 380693 - DNA, 25 bp, Artificial
  probe
  misc_feature (1)..(25): SEQ ID NO: 4354; WAN024A36; Start 41; Stop 65
aaaatcagtcatcttggtatgctcc

SEQ ID NO: 380694 - DNA, 25 bp, Artificial
  probe
  misc_feature (1)..(25): SEQ ID NO: 4354; WAN024A36; Start 48; Stop 72
gtcatcttggtatgctcctgctttc

SEQ ID NO: 380695 - DNA, 25 bp, Artificial
  probe
  misc_feature (1)..(25): SEQ ID NO: 4354; WAN024A36; Start 51; Stop 75
atcttggtatgctcctgctttcact

SEQ ID NO: 380696 - DNA, 25 bp, Artificial
  probe
  misc_feature (1)..(25): SEQ ID NO: 4354; WAN024A36; Start 44; Stop 68
atcagtcatcttggtatgctcctgc

SEQ ID NO: 380697 - DNA, 25 bp, Artificial
  probe
  misc_feature (1)..(25): SEQ ID NO: 4354; WAN024A36; Start 50; Stop 74
catcttggtatgctcctgctttcac

SEQ ID NO: 380698 - DNA, 25 bp, Artificial
  probe
  misc_feature (1)..(25): SEQ ID NO: 4354; WAN024A36; Start 49; Stop 73
tcatcttggtatgctcctgctttca

SEQ ID NO: 380699 - DNA, 25 bp, Artificial
  probe
  misc_feature (1)..(25): SEQ ID NO: 4354; WAN024A36; Start 47; Stop 71
agtcatcttggtatgctcctgcttt

SEQ ID NO: 380700 - DNA, 25 bp, Artificial
  probe
  misc_feature (1)..(25): SEQ ID NO: 4354; WAN024A36; Start 46; Stop 70
cagtcatcttggtatgctcctgctt

SEQ ID NO: 380701 - DNA, 25 bp, Artificial
  probe
  misc_feature (1)..(25): SEQ ID NO: 4354; WAN024A36; Start 18; Stop 42
tttgcatacctaaaatacagtaaaa

SEQ ID NO: 380702 - DNA, 25 bp, Artificial
  probe
  misc_feature (1)..(25): SEQ ID NO: 4354; WAN024A36; Start 17; Stop 41
ttttgcatacctaaaatacagtaaa

SEQ ID NO: 380703 - DNA, 25 bp, Artificial
  probe
  misc_feature (1)..(25): SEQ ID NO: 4354; WAN024A36; Start 16; Stop 40
attttgcatacctaaaatacagtaa

SEQ ID NO: 380704 - DNA, 25 bp, Artificial
  probe
  misc_feature (1)..(25): SEQ ID NO: 4354; WAN024A36; Start 14; Stop 38
ttattttgcatacctaaaatacagt

SEQ ID NO: 380705 - DNA, 25 bp, Artificial
  probe
  misc_feature (1)..(25): SEQ ID NO: 4355; WAN0249KX; Start 3; Stop 27
ttcctcctacctatctattcgtatt

SEQ ID NO: 380706 - DNA, 25 bp, Artificial
  probe
  misc_feature (1)..(25): SEQ ID NO: 4355; WAN0249KX; Start 1; Stop 25
gtttcctcctacctatctattcgta

SEQ ID NO: 380707 - DNA, 25 bp, Artificial
  probe
  misc_feature (1)..(25): SEQ ID NO: 4355; WAN0249KX; Start 4; Stop 28
tcctcctacctatctattcgtattt

SEQ ID NO: 380708 - DNA, 25 bp, Artificial
  probe
  misc_feature (1)..(25): SEQ ID NO: 4355; WAN0249KX; Start 2; Stop 26
tttcctcctacctatctattcgtat

SEQ ID NO: 380709 - DNA, 25 bp, Artificial
  probe
  misc_feature (1)..(25): SEQ ID NO: 4355; WAN0249KX; Start 5; Stop 29
cctcctacctatctattcgtatttt

SEQ ID NO: 380710 - DNA, 25 bp, Artificial
  probe
  misc_feature (1)..(25): SEQ ID NO: 4355; WAN0249KX; Start 42; Stop 66
gcaggaattttcctacgattgattt

SEQ ID NO: 380711 - DNA, 25 bp, Artificial
  probe
  misc_feature (1)..(25): SEQ ID NO: 4355; WAN0249KX; Start 43; Stop 67
caggaattttcctacgattgatttt

SEQ ID NO: 380712 - DNA, 25 bp, Artificial
  probe
  misc_feature (1)..(25): SEQ ID NO: 4355; WAN0249KX; Start 41; Stop 65
cgcaggaattttcctacgattgatt

SEQ ID NO: 380713 - DNA, 25 bp, Artificial
  probe
  misc_feature (1)..(25): SEQ ID NO: 4355; WAN0249KX; Start 36; Stop 60
aaaatcgcaggaattttcctacgat

SEQ ID NO: 380714 - DNA, 25 bp, Artificial
  probe
  misc_feature (1)..(25): SEQ ID NO: 4355; WAN0249KX; Start 40; Stop 64
tcgcaggaattttcctacgattgat

SEQ ID NO: 380715 - DNA, 25 bp, Artificial
  probe
  misc_feature (1)..(25): SEQ ID NO: 4355; WAN0249KX; Start 39; Stop 63
atcgcaggaattttcctacgattga

SEQ ID NO: 380716 - DNA, 25 bp, Artificial
  probe
  misc_feature (1)..(25): SEQ ID NO: 4356; WAN0249ZK; Start 15; Stop 39
ttactataaaataagcgattagggg

SEQ ID NO: 380717 - DNA, 25 bp, Artificial
  probe
  misc_feature (1)..(25): SEQ ID NO: 4357; WAN024ABH; Start 6; Stop 30
ttgcttcacgtccatttctaaattt

SEQ ID NO: 380718 - DNA, 25 bp, Artificial
  probe
  misc_feature (1)..(25): SEQ ID NO: 4357; WAN024ABH; Start 5; Stop 29
cttgcttcacgtccatttctaaatt

SEQ ID NO: 380719 - DNA, 25 bp, Artificial
  probe
  misc_feature (1)..(25): SEQ ID NO: 4357; WAN024ABH; Start 4; Stop 28
tcttgcttcacgtccatttctaaat

SEQ ID NO: 380720 - DNA, 25 bp, Artificial
  probe
  misc_feature (1)..(25): SEQ ID NO: 4357; WAN024ABH; Start 3; Stop 27
ttcttgcttcacgtccatttctaaa

SEQ ID NO: 380721 - DNA, 25 bp, Artificial
  probe
  misc_feature (1)..(25): SEQ ID NO: 4357; WAN024ABH; Start 2; Stop 26
tttcttgcttcacgtccatttctaa

SEQ ID NO: 380722 - DNA, 25 bp, Artificial
  probe
  misc_feature (1)..(25): SEQ ID NO: 4357; WAN024ABH; Start 1; Stop 25
gtttcttgcttcacgtccatttcta

SEQ ID NO: 380723 - DNA, 25 bp, Artificial
  probe
  misc_feature (1)..(25): SEQ ID NO: 4357; WAN024ABH; Start 7; Stop 31
tgcttcacgtccatttctaaatttt

SEQ ID NO: 380724 - DNA, 25 bp, Artificial
  probe
  misc_feature (1)..(25): SEQ ID NO: 4357; WAN024ABH; Start 56; Stop 80
tttcttaagctttaaacggcaaaat

SEQ ID NO: 380725 - DNA, 25 bp, Artificial
  probe
  misc_feature (1)..(25): SEQ ID NO: 4357; WAN024ABH; Start 54; Stop 78
attttcttaagctttaaacggcaaa

SEQ ID NO: 380726 - DNA, 25 bp, Artificial
  probe
  misc_feature (1)..(25): SEQ ID NO: 4357; WAN024ABH; Start 53; Stop 77
aattttcttaagctttaaacggcaa

SEQ ID NO: 380727 - DNA, 25 bp, Artificial
  probe
  misc_feature (1)..(25): SEQ ID NO: 4357; WAN024ABH; Start 55; Stop 79
ttttcttaagctttaaacggcaaaa

SEQ ID NO: 380728 - DNA, 25 bp, Artificial
  probe
  misc_feature (1)..(25): SEQ ID NO: 4357; WAN024ABH; Start 52; Stop 76
taattttcttaagctttaaacggca

SEQ ID NO: 380729 - DNA, 25 bp, Artificial
  probe
  misc_feature (1)..(25): SEQ ID NO: 4357; WAN024ABH; Start 51; Stop 75
ataattttcttaagctttaaacggc

SEQ ID NO: 380730 - DNA, 25 bp, Artificial
  probe
  misc_feature (1)..(25): SEQ ID NO: 4357; WAN024ABH; Start 50; Stop 74
cataattttcttaagctttaaacgg

SEQ ID NO: 380731 - DNA, 25 bp, Artificial
  probe
  misc_feature (1)..(25): SEQ ID NO: 4358; WAN024AEE; Start 3; Stop 27
ttgactacctcccataattttctga

SEQ ID NO: 380732 - DNA, 25 bp, Artificial
  probe
  misc_feature (1)..(25): SEQ ID NO: 4358; WAN024AEE; Start 4; Stop 28
tgactacctcccataattttctgat

SEQ ID NO: 380733 - DNA, 25 bp, Artificial
  probe
  misc_feature (1)..(25): SEQ ID NO: 4358; WAN024AEE; Start 2; Stop 26
tttgactacctcccataattttctg

SEQ ID NO: 380734 - DNA, 25 bp, Artificial
  probe
  misc_feature (1)..(25): SEQ ID NO: 4358; WAN024AEE; Start 1; Stop 25
gtttgactacctcccataattttct

SEQ ID NO: 380735 - DNA, 25 bp, Artificial
  probe
  misc_feature (1)..(25): SEQ ID NO: 4358; WAN024AEE; Start 5; Stop 29
gactacctcccataattttctgata

SEQ ID NO: 380736 - DNA, 25 bp, Artificial
  probe
  misc_feature (1)..(25): SEQ ID NO: 4358; WAN024AEE; Start 9; Stop 33
acctcccataattttctgataatga

SEQ ID NO: 380737 - DNA, 25 bp, Artificial
  probe
  misc_feature (1)..(25): SEQ ID NO: 4358; WAN024AEE; Start 6; Stop 30
actacctcccataattttctgataa

SEQ ID NO: 380738 - DNA, 25 bp, Artificial
  probe
  misc_feature (1)..(25): SEQ ID NO: 4358; WAN024AEE; Start 10; Stop 34
cctcccataattttctgataatgat

SEQ ID NO: 380739 - DNA, 25 bp, Artificial
  probe
  misc_feature (1)..(25): SEQ ID NO: 4358; WAN024AEE; Start 8; Stop 32
tacctcccataattttctgataatg

SEQ ID NO: 380740 - DNA, 25 bp, Artificial
  probe
  misc_feature (1)..(25): SEQ ID NO: 4358; WAN024AEE; Start 7; Stop 31
ctacctcccataattttctgataat

SEQ ID NO: 380741 - DNA, 25 bp, Artificial
  probe
  misc_feature (1)..(25): SEQ ID NO: 4358; WAN024AEE; Start 96; Stop 120
tctcttagctactcaatttgaaatt

SEQ ID NO: 380742 - DNA, 25 bp, Artificial
  probe
  misc_feature (1)..(25): SEQ ID NO: 4358; WAN024AEE; Start 95; Stop 119
atctcttagctactcaatttgaaat

SEQ ID NO: 380743 - DNA, 25 bp, Artificial
  probe
  misc_feature (1)..(25): SEQ ID NO: 4358; WAN024AEE; Start 94; Stop 118
tatctcttagctactcaatttgaaa

SEQ ID NO: 380744 - DNA, 25 bp, Artificial
  probe
  misc_feature (1)..(25): SEQ ID NO: 4358; WAN024AEE; Start 93; Stop 117
ttatctcttagctactcaatttgaa

SEQ ID NO: 380745 - DNA, 25 bp, Artificial
  probe
  misc_feature (1)..(25): SEQ ID NO: 4358; WAN024AEE; Start 92; Stop 116
attatctcttagctactcaatttga

SEQ ID NO: 380746 - DNA, 25 bp, Artificial
  probe
  misc_feature (1)..(25): SEQ ID NO: 4358; WAN024AEE; Start 11; Stop 35
ctcccataattttctgataatgatt

SEQ ID NO: 380747 - DNA, 25 bp, Artificial
  probe
  misc_feature (1)..(25): SEQ ID NO: 4358; WAN024AEE; Start 87; Stop 111
gctatattatctcttagctactcaa

SEQ ID NO: 380748 - DNA, 25 bp, Artificial
  probe
  misc_feature (1)..(25): SEQ ID NO: 4359; WAN024CIK; Start 579; Stop 603
ggcggttagataagtctgaagttaa

SEQ ID NO: 380749 - DNA, 25 bp, Artificial
  probe
  misc_feature (1)..(25): SEQ ID NO: 4359; WAN024CIK; Start 433; Stop 457
ttgtaagagaagaacgagtgtgaga

SEQ ID NO: 380750 - DNA, 25 bp, Artificial
  probe
  misc_feature (1)..(25): SEQ ID NO: 4359; WAN024CIK; Start 578; Stop 602
aggcggttagataagtctgaagtta

SEQ ID NO: 380751 - DNA, 25 bp, Artificial
  probe
  misc_feature (1)..(25): SEQ ID NO: 4359; WAN024CIK; Start 689; Stop 713
aatgcgtagatatatggaggaacac

SEQ ID NO: 380752 - DNA, 25 bp, Artificial
  probe
  misc_feature (1)..(25): SEQ ID NO: 4359; WAN024CIK; Start 432; Stop 456
gttgtaagagaagaacgagtgtgag

SEQ ID NO: 380753 - DNA, 25 bp, Artificial
  probe
  misc_feature (1)..(25): SEQ ID NO: 4359; WAN024CIK; Start 436; Stop 460
taagagaagaacgagtgtgagagtg

SEQ ID NO: 380754 - DNA, 25 bp, Artificial
  probe
  misc_feature (1)..(25): SEQ ID NO: 4359; WAN024CIK; Start 435; Stop 459
gtaagagaagaacgagtgtgagagt

SEQ ID NO: 380755 - DNA, 25 bp, Artificial
  probe
  misc_feature (1)..(25): SEQ ID NO: 4359; WAN024CIK; Start 434; Stop 458
tgtaagagaagaacgagtgtgagag

SEQ ID NO: 380756 - DNA, 25 bp, Artificial
  probe
  misc_feature (1)..(25): SEQ ID NO: 4359; WAN024CIK; Start 430; Stop 454
ctgttgtaagagaagaacgagtgtg

SEQ ID NO: 380757 - DNA, 25 bp, Artificial
  probe
  misc_feature (1)..(25): SEQ ID NO: 4359; WAN024CIK; Start 429; Stop 453
tctgttgtaagagaagaacgagtgt

SEQ ID NO: 380758 - DNA, 25 bp, Artificial
  probe
  misc_feature (1)..(25): SEQ ID NO: 4359; WAN024CIK; Start 431; Stop 455
tgttgtaagagaagaacgagtgtga

SEQ ID NO: 380759 - DNA, 25 bp, Artificial
  probe
  misc_feature (1)..(25): SEQ ID NO: 4359; WAN024CIK; Start 1322; Stop 1346
catgaagtcggaatcgctagtaatc

SEQ ID NO: 380760 - DNA, 25 bp, Artificial
  probe
  misc_feature (1)..(25): SEQ ID NO: 4359; WAN024CIK; Start 1320; Stop 1344
tacatgaagtcggaatcgctagtaa

SEQ ID NO: 380761 - DNA, 25 bp, Artificial
  probe
  misc_feature (1)..(25): SEQ ID NO: 4359; WAN024CIK; Start 690; Stop 714
atgcgtagatatatggaggaacacc

SEQ ID NO: 380762 - DNA, 25 bp, Artificial
  probe
  misc_feature (1)..(25): SEQ ID NO: 4359; WAN024CIK; Start 1319; Stop 1343
ctacatgaagtcggaatcgctagta

SEQ ID NO: 380763 - DNA, 25 bp, Artificial
  probe
  misc_feature (1)..(25): SEQ ID NO: 4359; WAN024CIK; Start 1321; Stop 1345
acatgaagtcggaatcgctagtaat

SEQ ID NO: 380764 - DNA, 25 bp, Artificial
  probe
  misc_feature (1)..(25): SEQ ID NO: 4359; WAN024CIK; Start 39; Stop 63
taatacatgcaagtagaacgctgaa

SEQ ID NO: 380765 - DNA, 25 bp, Artificial
  probe
  misc_feature (1)..(25): SEQ ID NO: 4359; WAN024CIK; Start 1271; Stop 1295
ctaatctcttaaagccagtctcagt

SEQ ID NO: 380766 - DNA, 25 bp, Artificial
  probe
  misc_feature (1)..(25): SEQ ID NO: 4359; WAN024CIK; Start 587; Stop 611
gataagtctgaagttaaaggctgtg

SEQ ID NO: 380767 - DNA, 25 bp, Artificial
  probe
  misc_feature (1)..(25): SEQ ID NO: 4359; WAN024CIK; Start 1323; Stop 1347
atgaagtcggaatcgctagtaatcg

SEQ ID NO: 380768 - DNA, 25 bp, Artificial
  probe
  misc_feature (1)..(25): SEQ ID NO: 4359; WAN024CIK; Start 1273; Stop 1297
aatctcttaaagccagtctcagttc

SEQ ID NO: 380769 - DNA, 25 bp, Artificial
  probe
  misc_feature (1)..(25): SEQ ID NO: 4359; WAN024CIK; Start 1272; Stop 1296
taatctcttaaagccagtctcagtt

SEQ ID NO: 380770 - DNA, 25 bp, Artificial
  probe
  misc_feature (1)..(25): SEQ ID NO: 4359; WAN024CIK; Start 588; Stop 612
ataagtctgaagttaaaggctgtgg

SEQ ID NO: 380771 - DNA, 25 bp, Artificial
  probe
  misc_feature (1)..(25): SEQ ID NO: 4359; WAN024CIK; Start 38; Stop 62
ctaatacatgcaagtagaacgctga

SEQ ID NO: 380772 - DNA, 25 bp, Artificial
  probe
  misc_feature (1)..(25): SEQ ID NO: 4359; WAN024CIK; Start 1485; Stop 1509
gaagtcgtaacaaggtagccgtatc

SEQ ID NO: 380773 - DNA, 25 bp, Artificial
  probe
  misc_feature (1)..(25): SEQ ID NO: 4359; WAN024CIK; Start 586; Stop 610
agataagtctgaagttaaaggctgt

SEQ ID NO: 380774 - DNA, 25 bp, Artificial
  probe
  misc_feature (1)..(25): SEQ ID NO: 4359; WAN024CIK; Start 577; Stop 601
caggcggttagataagtctgaagtt

SEQ ID NO: 380775 - DNA, 25 bp, Artificial
  probe
  misc_feature (1)..(25): SEQ ID NO: 4359; WAN024CIK; Start 624; Stop 648
taggctttggaaactgtttaacttg

SEQ ID NO: 380776 - DNA, 25 bp, Artificial
  probe
  misc_feature (1)..(25): SEQ ID NO: 4359; WAN024CIK; Start 623; Stop 647
gtaggctttggaaactgtttaactt

SEQ ID NO: 380777 - DNA, 25 bp, Artificial
  probe
  misc_feature (1)..(25): SEQ ID NO: 4359; WAN024CIK; Start 580; Stop 604
gcggttagataagtctgaagttaaa

SEQ ID NO: 380778 - DNA, 25 bp, Artificial
  probe
  misc_feature (1)..(25): SEQ ID NO: 4359; WAN024CIK; Start 685; Stop 709
gtgaaatgcgtagatatatggagga

SEQ ID NO: 380779 - DNA, 25 bp, Artificial
  probe
  misc_feature (1)..(25): SEQ ID NO: 4359; WAN024CIK; Start 40; Stop 64
aatacatgcaagtagaacgctgaag

SEQ ID NO: 380780 - DNA, 25 bp, Artificial
  probe
  misc_feature (1)..(25): SEQ ID NO: 4359; WAN024CIK; Start 688; Stop 712
aaatgcgtagatatatggaggaaca

SEQ ID NO: 380781 - DNA, 25 bp, Artificial
  probe
  misc_feature (1)..(25): SEQ ID NO: 4360; WAN024ANT; Start 135; Stop 159
tccatttcttcattcaaacgcttta

SEQ ID NO: 380782 - DNA, 25 bp, Artificial
  probe
  misc_feature (1)..(25): SEQ ID NO: 4360; WAN024ANT; Start 134; Stop 158
ttccatttcttcattcaaacgcttt

SEQ ID NO: 380783 - DNA, 25 bp, Artificial
  probe
  misc_feature (1)..(25): SEQ ID NO: 4360; WAN024ANT; Start 133; Stop 157
tttccatttcttcattcaaacgctt

SEQ ID NO: 380784 - DNA, 25 bp, Artificial
  probe
  misc_feature (1)..(25): SEQ ID NO: 4360; WAN024ANT; Start 132; Stop 156
ctttccatttcttcattcaaacgct

SEQ ID NO: 380785 - DNA, 25 bp, Artificial
  probe
  misc_feature (1)..(25): SEQ ID NO: 4360; WAN024ANT; Start 131; Stop 155
actttccatttcttcattcaaacgc

SEQ ID NO: 380786 - DNA, 25 bp, Artificial
  probe
  misc_feature (1)..(25): SEQ ID NO: 4360; WAN024ANT; Start 136; Stop 160
ccatttcttcattcaaacgctttat

SEQ ID NO: 380787 - DNA, 25 bp, Artificial
  probe
  misc_feature (1)..(25): SEQ ID NO: 4360; WAN024ANT; Start 196; Stop 220
atcactttctaattccaactgttcc

SEQ ID NO: 380788 - DNA, 25 bp, Artificial
  probe
  misc_feature (1)..(25): SEQ ID NO: 4360; WAN024ANT; Start 197; Stop 221
tcactttctaattccaactgttccc

SEQ ID NO: 380789 - DNA, 25 bp, Artificial
  probe
  misc_feature (1)..(25): SEQ ID NO: 4360; WAN024ANT; Start 114; Stop 138
tcatcgtcaacttatttactttcca

SEQ ID NO: 380790 - DNA, 25 bp, Artificial
  probe
  misc_feature (1)..(25): SEQ ID NO: 4360; WAN024ANT; Start 130; Stop 154
tactttccatttcttcattcaaacg

SEQ ID NO: 380791 - DNA, 25 bp, Artificial
  probe
  misc_feature (1)..(25): SEQ ID NO: 4360; WAN024ANT; Start 193; Stop 217
cctatcactttctaattccaactgt

SEQ ID NO: 380792 - DNA, 25 bp, Artificial
  probe
  misc_feature (1)..(25): SEQ ID NO: 4360; WAN024ANT; Start 192; Stop 216
acctatcactttctaattccaactg

SEQ ID NO: 380793 - DNA, 25 bp, Artificial
  probe
  misc_feature (1)..(25): SEQ ID NO: 4360; WAN024ANT; Start 115; Stop 139
catcgtcaacttatttactttccat

SEQ ID NO: 380794 - DNA, 25 bp, Artificial
  probe
  misc_feature (1)..(25): SEQ ID NO: 4360; WAN024ANT; Start 113; Stop 137
ttcatcgtcaacttatttactttcc

SEQ ID NO: 380795 - DNA, 25 bp, Artificial
  probe
  misc_feature (1)..(25): SEQ ID NO: 4360; WAN024ANT; Start 158; Stop 182
tataaacttattcagcttcaacgcc

SEQ ID NO: 380796 - DNA, 25 bp, Artificial
  probe
  misc_feature (1)..(25): SEQ ID NO: 4360; WAN024ANT; Start 159; Stop 183
ataaacttattcagcttcaacgcca

SEQ ID NO: 380797 - DNA, 25 bp, Artificial
  probe
  misc_feature (1)..(25): SEQ ID NO: 4360; WAN024ANT; Start 117; Stop 141
tcgtcaacttatttactttccattt

SEQ ID NO: 380798 - DNA, 25 bp, Artificial
  probe
  misc_feature (1)..(25): SEQ ID NO: 4360; WAN024ANT; Start 118; Stop 142
cgtcaacttatttactttccatttc

SEQ ID NO: 380799 - DNA, 25 bp, Artificial
  probe
  misc_feature (1)..(25): SEQ ID NO: 4360; WAN024ANT; Start 157; Stop 181
ttataaacttattcagcttcaacgc

SEQ ID NO: 380800 - DNA, 25 bp, Artificial
  probe
  misc_feature (1)..(25): SEQ ID NO: 4360; WAN024ANT; Start 116; Stop 140
atcgtcaacttatttactttccatt

SEQ ID NO: 380801 - DNA, 25 bp, Artificial
  probe
  misc_feature (1)..(25): SEQ ID NO: 4360; WAN024ANT; Start 195; Stop 219
tatcactttctaattccaactgttc

SEQ ID NO: 380802 - DNA, 25 bp, Artificial
  probe
  misc_feature (1)..(25): SEQ ID NO: 4360; WAN024ANT; Start 191; Stop 215
tacctatcactttctaattccaact

SEQ ID NO: 380803 - DNA, 25 bp, Artificial
  probe
  misc_feature (1)..(25): SEQ ID NO: 4360; WAN024ANT; Start 162; Stop 186
aacttattcagcttcaacgccactt

SEQ ID NO: 380804 - DNA, 25 bp, Artificial
  probe
  misc_feature (1)..(25): SEQ ID NO: 4360; WAN024ANT; Start 194; Stop 218
ctatcactttctaattccaactgtt

SEQ ID NO: 380805 - DNA, 25 bp, Artificial
  probe
  misc_feature (1)..(25): SEQ ID NO: 4360; WAN024ANT; Start 188; Stop 212
tcatacctatcactttctaattcca

SEQ ID NO: 380806 - DNA, 25 bp, Artificial
  probe
  misc_feature (1)..(25): SEQ ID NO: 4360; WAN024ANT; Start 160; Stop 184
taaacttattcagcttcaacgccac

SEQ ID NO: 380807 - DNA, 25 bp, Artificial
  probe
  misc_feature (1)..(25): SEQ ID NO: 4360; WAN024ANT; Start 137; Stop 161
catttcttcattcaaacgctttata

SEQ ID NO: 380808 - DNA, 25 bp, Artificial
  probe
  misc_feature (1)..(25): SEQ ID NO: 4360; WAN024ANT; Start 180; Stop 204
gccacttttcatacctatcactttc

SEQ ID NO: 380809 - DNA, 25 bp, Artificial
  probe
  misc_feature (1)..(25): SEQ ID NO: 4360; WAN024ANT; Start 200; Stop 224
ctttctaattccaactgttccccta

SEQ ID NO: 380810 - DNA, 25 bp, Artificial
  probe
  misc_feature (1)..(25): SEQ ID NO: 4360; WAN024ANT; Start 129; Stop 153
ttactttccatttcttcattcaaac

SEQ ID NO: 380811 - DNA, 25 bp, Artificial
  probe
  misc_feature (1)..(25): SEQ ID NO: 4360; WAN024ANT; Start 201; Stop 225
tttctaattccaactgttcccctag

SEQ ID NO: 380812 - DNA, 25 bp, Artificial
  probe
  misc_feature (1)..(25): SEQ ID NO: 4360; WAN024ANT; Start 179; Stop 203
cgccacttttcatacctatcacttt

SEQ ID NO: 380813 - DNA, 25 bp, Artificial
  probe
  misc_feature (1)..(25): SEQ ID NO: 4360; WAN024ANT; Start 173; Stop 197
cttcaacgccacttttcatacctat

SEQ ID NO: 380814 - DNA, 25 bp, Artificial
  probe
  misc_feature (1)..(25): SEQ ID NO: 4361; WAN0249QU; Start 249; Stop 273
atagcgaggagcatatagtggataa

SEQ ID NO: 380815 - DNA, 25 bp, Artificial
  probe
  misc_feature (1)..(25): SEQ ID NO: 4361; WAN0249QU; Start 260; Stop 284
catatagtggataaggtagcgagaa

SEQ ID NO: 380816 - DNA, 25 bp, Artificial
  probe
  misc_feature (1)..(25): SEQ ID NO: 4361; WAN0249QU; Start 254; Stop 278
gaggagcatatagtggataaggtag

SEQ ID NO: 380817 - DNA, 25 bp, Artificial
  probe
  misc_feature (1)..(25): SEQ ID NO: 4361; WAN0249QU; Start 253; Stop 277
cgaggagcatatagtggataaggta

SEQ ID NO: 380818 - DNA, 25 bp, Artificial
  probe
  misc_feature (1)..(25): SEQ ID NO: 4361; WAN0249QU; Start 248; Stop 272
gatagcgaggagcatatagtggata

SEQ ID NO: 380819 - DNA, 25 bp, Artificial
  probe
  misc_feature (1)..(25): SEQ ID NO: 4361; WAN0249QU; Start 255; Stop 279
aggagcatatagtggataaggtagc

SEQ ID NO: 380820 - DNA, 25 bp, Artificial
  probe
  misc_feature (1)..(25): SEQ ID NO: 4361; WAN0249QU; Start 250; Stop 274
tagcgaggagcatatagtggataag

SEQ ID NO: 380821 - DNA, 25 bp, Artificial
  probe
  misc_feature (1)..(25): SEQ ID NO: 4361; WAN0249QU; Start 259; Stop 283
gcatatagtggataaggtagcgaga

SEQ ID NO: 380822 - DNA, 25 bp, Artificial
  probe
  misc_feature (1)..(25): SEQ ID NO: 4361; WAN0249QU; Start 258; Stop 282
agcatatagtggataaggtagcgag

SEQ ID NO: 380823 - DNA, 25 bp, Artificial
  probe
  misc_feature (1)..(25): SEQ ID NO: 4361; WAN0249QU; Start 257; Stop 281
gagcatatagtggataaggtagcga

SEQ ID NO: 380824 - DNA, 25 bp, Artificial
  probe
  misc_feature (1)..(25): SEQ ID NO: 4361; WAN0249QU; Start 256; Stop 280
ggagcatatagtggataaggtagcg

SEQ ID NO: 380825 - DNA, 25 bp, Artificial
  probe
  misc_feature (1)..(25): SEQ ID NO: 4361; WAN0249QU; Start 247; Stop 271
tgatagcgaggagcatatagtggat

SEQ ID NO: 380826 - DNA, 25 bp, Artificial
  probe
  misc_feature (1)..(25): SEQ ID NO: 4361; WAN0249QU; Start 207; Stop 231
gagaaagcaatagtgaaatcgtagg

SEQ ID NO: 380827 - DNA, 25 bp, Artificial
  probe
  misc_feature (1)..(25): SEQ ID NO: 4361; WAN0249QU; Start 205; Stop 229
cagagaaagcaatagtgaaatcgta

SEQ ID NO: 380828 - DNA, 25 bp, Artificial
  probe
  misc_feature (1)..(25): SEQ ID NO: 4361; WAN0249QU; Start 206; Stop 230
agagaaagcaatagtgaaatcgtag

SEQ ID NO: 380829 - DNA, 25 bp, Artificial
  probe
  misc_feature (1)..(25): SEQ ID NO: 4361; WAN0249QU; Start 263; Stop 287
atagtggataaggtagcgagaaatt

SEQ ID NO: 380830 - DNA, 25 bp, Artificial
  probe
  misc_feature (1)..(25): SEQ ID NO: 4361; WAN0249QU; Start 187; Stop 211
gcaggaaataagaattgtcagagaa

SEQ ID NO: 380831 - DNA, 25 bp, Artificial
  probe
  misc_feature (1)..(25): SEQ ID NO: 4361; WAN0249QU; Start 129; Stop 153
tgactatcgtgaggtagcggattaa

SEQ ID NO: 380832 - DNA, 25 bp, Artificial
  probe
  misc_feature (1)..(25): SEQ ID NO: 4361; WAN0249QU; Start 218; Stop 242
agtgaaatcgtaggctatgaataga

SEQ ID NO: 380833 - DNA, 25 bp, Artificial
  probe
  misc_feature (1)..(25): SEQ ID NO: 4361; WAN0249QU; Start 186; Stop 210
cgcaggaaataagaattgtcagaga

SEQ ID NO: 380834 - DNA, 25 bp, Artificial
  probe
  misc_feature (1)..(25): SEQ ID NO: 4361; WAN0249QU; Start 262; Stop 286
tatagtggataaggtagcgagaaat

SEQ ID NO: 380835 - DNA, 25 bp, Artificial
  probe
  misc_feature (1)..(25): SEQ ID NO: 4361; WAN0249QU; Start 208; Stop 232
agaaagcaatagtgaaatcgtaggc

SEQ ID NO: 380836 - DNA, 25 bp, Artificial
  probe
  misc_feature (1)..(25): SEQ ID NO: 4361; WAN0249QU; Start 261; Stop 285
atatagtggataaggtagcgagaaa

SEQ ID NO: 380837 - DNA, 25 bp, Artificial
  probe
  misc_feature (1)..(25): SEQ ID NO: 4361; WAN0249QU; Start 203; Stop 227
gtcagagaaagcaatagtgaaatcg

SEQ ID NO: 380838 - DNA, 25 bp, Artificial
  probe
  misc_feature (1)..(25): SEQ ID NO: 4361; WAN0249QU; Start 204; Stop 228
tcagagaaagcaatagtgaaatcgt

SEQ ID NO: 380839 - DNA, 25 bp, Artificial
  probe
  misc_feature (1)..(25): SEQ ID NO: 4361; WAN0249QU; Start 7; Stop 31
taagtttgaaatcttctaccttggg

SEQ ID NO: 380840 - DNA, 25 bp, Artificial
  probe
  misc_feature (1)..(25): SEQ ID NO: 4361; WAN0249QU; Start 202; Stop 226
tgtcagagaaagcaatagtgaaatc

SEQ ID NO: 380841 - DNA, 25 bp, Artificial
  probe
  misc_feature (1)..(25): SEQ ID NO: 4361; WAN0249QU; Start 185; Stop 209
acgcaggaaataagaattgtcagag

SEQ ID NO: 380842 - DNA, 25 bp, Artificial
  probe
  misc_feature (1)..(25): SEQ ID NO: 4361; WAN0249QU; Start 128; Stop 152
ctgactatcgtgaggtagcggatta

SEQ ID NO: 380843 - DNA, 25 bp, Artificial
  probe
  misc_feature (1)..(25): SEQ ID NO: 4361; WAN0249QU; Start 219; Stop 243
gtgaaatcgtaggctatgaatagaa

SEQ ID NO: 380844 - DNA, 25 bp, Artificial
  probe
  misc_feature (1)..(25): SEQ ID NO: 4361; WAN0249QU; Start 190; Stop 214
ggaaataagaattgtcagagaaagc

SEQ ID NO: 380845 - DNA, 25 bp, Artificial
  probe
  misc_feature (1)..(25): SEQ ID NO: 4361; WAN0249QU; Start 251; Stop 275
agcgaggagcatatagtggataagg

SEQ ID NO: 380846 - DNA, 25 bp, Artificial
  probe
  misc_feature (1)..(25): SEQ ID NO: 4361; WAN0249QU; Start 246; Stop 270
gtgatagcgaggagcatatagtgga

SEQ ID NO: 380847 - DNA, 25 bp, Artificial
  probe
  misc_feature (1)..(25): SEQ ID NO: 4362; WAN024AD9; Start 25; Stop 49
tagaattgtttacttacagtcaagc

SEQ ID NO: 380848 - DNA, 25 bp, Artificial
  probe
  misc_feature (1)..(25): SEQ ID NO: 4362; WAN024AD9; Start 26; Stop 50
agaattgtttacttacagtcaagct

SEQ ID NO: 380849 - DNA, 25 bp, Artificial
  probe
  misc_feature (1)..(25): SEQ ID NO: 4362; WAN024AD9; Start 22; Stop 46
tcctagaattgtttacttacagtca

SEQ ID NO: 380850 - DNA, 25 bp, Artificial
  probe
  misc_feature (1)..(25): SEQ ID NO: 4362; WAN024AD9; Start 23; Stop 47
cctagaattgtttacttacagtcaa

SEQ ID NO: 380851 - DNA, 25 bp, Artificial
  probe
  misc_feature (1)..(25): SEQ ID NO: 4362; WAN024AD9; Start 27; Stop 51
gaattgtttacttacagtcaagcta

SEQ ID NO: 380852 - DNA, 25 bp, Artificial
  probe
  misc_feature (1)..(25): SEQ ID NO: 4362; WAN024AD9; Start 21; Stop 45
ttcctagaattgtttacttacagtc

SEQ ID NO: 380853 - DNA, 25 bp, Artificial
  probe
  misc_feature (1)..(25): SEQ ID NO: 4362; WAN024AD9; Start 20; Stop 44
tttcctagaattgtttacttacagt

SEQ ID NO: 380854 - DNA, 25 bp, Artificial
  probe
  misc_feature (1)..(25): SEQ ID NO: 4362; WAN024AD9; Start 24; Stop 48
ctagaattgtttacttacagtcaag

SEQ ID NO: 380855 - DNA, 25 bp, Artificial
  probe
  misc_feature (1)..(25): SEQ ID NO: 4362; WAN024AD9; Start 9; Stop 33
tcctccaaatatttcctagaattgt

SEQ ID NO: 380856 - DNA, 25 bp, Artificial
  probe
  misc_feature (1)..(25): SEQ ID NO: 4362; WAN024AD9; Start 10; Stop 34
cctccaaatatttcctagaattgtt

SEQ ID NO: 380857 - DNA, 25 bp, Artificial
  probe
  misc_feature (1)..(25): SEQ ID NO: 4362; WAN024AD9; Start 8; Stop 32
ttcctccaaatatttcctagaattg

SEQ ID NO: 380858 - DNA, 25 bp, Artificial
  probe
  misc_feature (1)..(25): SEQ ID NO: 4362; WAN024AD9; Start 19; Stop 43
atttcctagaattgtttacttacag

SEQ ID NO: 380859 - DNA, 25 bp, Artificial
  probe
  misc_feature (1)..(25): SEQ ID NO: 4362; WAN024AD9; Start 7; Stop 31
tttcctccaaatatttcctagaatt

SEQ ID NO: 380860 - DNA, 25 bp, Artificial
  probe
  misc_feature (1)..(25): SEQ ID NO: 4362; WAN024AD9; Start 6; Stop 30
atttcctccaaatatttcctagaat

SEQ ID NO: 380861 - DNA, 25 bp, Artificial
  probe
  misc_feature (1)..(25): SEQ ID NO: 4362; WAN024AD9; Start 11; Stop 35
ctccaaatatttcctagaattgttt

SEQ ID NO: 380862 - DNA, 25 bp, Artificial
  probe
  misc_feature (1)..(25): SEQ ID NO: 4362; WAN024AD9; Start 5; Stop 29
tatttcctccaaatatttcctagaa

SEQ ID NO: 380863 - DNA, 25 bp, Artificial
  probe
  misc_feature (1)..(25): SEQ ID NO: 4362; WAN024AD9; Start 4; Stop 28
ttatttcctccaaatatttcctaga

SEQ ID NO: 380864 - DNA, 25 bp, Artificial
  probe
  misc_feature (1)..(25): SEQ ID NO: 4362; WAN024AD9; Start 1; Stop 25
gttttatttcctccaaatatttcct

SEQ ID NO: 380865 - DNA, 25 bp, Artificial
  probe
  misc_feature (1)..(25): SEQ ID NO: 4363; WAN0249FD; Start 17; Stop 41
atgtgaacgcttacttgaataatgt

SEQ ID NO: 380866 - DNA, 25 bp, Artificial
  probe
  misc_feature (1)..(25): SEQ ID NO: 4363; WAN0249FD; Start 18; Stop 42
tgtgaacgcttacttgaataatgtt

SEQ ID NO: 380867 - DNA, 25 bp, Artificial
  probe
  misc_feature (1)..(25): SEQ ID NO: 4363; WAN0249FD; Start 16; Stop 40
tatgtgaacgcttacttgaataatg

SEQ ID NO: 380868 - DNA, 25 bp, Artificial
  probe
  misc_feature (1)..(25): SEQ ID NO: 4363; WAN0249FD; Start 13; Stop 37
caatatgtgaacgcttacttgaata

SEQ ID NO: 380869 - DNA, 25 bp, Artificial
  probe
  misc_feature (1)..(25): SEQ ID NO: 4363; WAN0249FD; Start 14; Stop 38
aatatgtgaacgcttacttgaataa

SEQ ID NO: 380870 - DNA, 25 bp, Artificial
  probe
  misc_feature (1)..(25): SEQ ID NO: 4363; WAN0249FD; Start 15; Stop 39
atatgtgaacgcttacttgaataat

SEQ ID NO: 380871 - DNA, 25 bp, Artificial
  probe
  misc_feature (1)..(25): SEQ ID NO: 4363; WAN0249FD; Start 104; Stop 128
gttgaaatgataaattaggaggagc

SEQ ID NO: 380872 - DNA, 25 bp, Artificial
  probe
  misc_feature (1)..(25): SEQ ID NO: 4363; WAN0249FD; Start 12; Stop 36
tcaatatgtgaacgcttacttgaat

SEQ ID NO: 380873 - DNA, 25 bp, Artificial
  probe
  misc_feature (1)..(25): SEQ ID NO: 4363; WAN0249FD; Start 106; Stop 130
tgaaatgataaattaggaggagctt

SEQ ID NO: 380874 - DNA, 25 bp, Artificial
  probe
  misc_feature (1)..(25): SEQ ID NO: 4363; WAN0249FD; Start 105; Stop 129
ttgaaatgataaattaggaggagct

SEQ ID NO: 380875 - DNA, 25 bp, Artificial
  probe
  misc_feature (1)..(25): SEQ ID NO: 4363; WAN0249FD; Start 19; Stop 43
gtgaacgcttacttgaataatgttc

SEQ ID NO: 380876 - DNA, 25 bp, Artificial
  probe
  misc_feature (1)..(25): SEQ ID NO: 4363; WAN0249FD; Start 103; Stop 127
agttgaaatgataaattaggaggag

SEQ ID NO: 380877 - DNA, 25 bp, Artificial
  probe
  misc_feature (1)..(25): SEQ ID NO: 4363; WAN0249FD; Start 10; Stop 34
tttcaatatgtgaacgcttacttga

SEQ ID NO: 380878 - DNA, 25 bp, Artificial
  probe
  misc_feature (1)..(25): SEQ ID NO: 4363; WAN0249FD; Start 78; Stop 102
attcctccaatttgtgctataatat

SEQ ID NO: 380879 - DNA, 25 bp, Artificial
  probe
  misc_feature (1)..(25): SEQ ID NO: 4363; WAN0249FD; Start 77; Stop 101
aattcctccaatttgtgctataata

SEQ ID NO: 380880 - DNA, 25 bp, Artificial
  probe
  misc_feature (1)..(25): SEQ ID NO: 4363; WAN0249FD; Start 81; Stop 105
cctccaatttgtgctataatatagt

SEQ ID NO: 380881 - DNA, 25 bp, Artificial
  probe
  misc_feature (1)..(25): SEQ ID NO: 4363; WAN0249FD; Start 79; Stop 103
ttcctccaatttgtgctataatata

SEQ ID NO: 380882 - DNA, 25 bp, Artificial
  probe
  misc_feature (1)..(25): SEQ ID NO: 4363; WAN0249FD; Start 80; Stop 104
tcctccaatttgtgctataatatag

SEQ ID NO: 380883 - DNA, 25 bp, Artificial
  probe
  misc_feature (1)..(25): SEQ ID NO: 4363; WAN0249FD; Start 39; Stop 63
tgttcaaatgttaacccaatattca

SEQ ID NO: 380884 - DNA, 25 bp, Artificial
  probe
  misc_feature (1)..(25): SEQ ID NO: 4363; WAN0249FD; Start 102; Stop 126
tagttgaaatgataaattaggagga

SEQ ID NO: 380885 - DNA, 25 bp, Artificial
  probe
  misc_feature (1)..(25): SEQ ID NO: 4363; WAN0249FD; Start 76; Stop 100
aaattcctccaatttgtgctataat

SEQ ID NO: 380886 - DNA, 25 bp, Artificial
  probe
  misc_feature (1)..(25): SEQ ID NO: 4363; WAN0249FD; Start 11; Stop 35
ttcaatatgtgaacgcttacttgaa

SEQ ID NO: 380887 - DNA, 25 bp, Artificial
  probe
  misc_feature (1)..(25): SEQ ID NO: 4363; WAN0249FD; Start 33; Stop 57
gaataatgttcaaatgttaacccaa

SEQ ID NO: 380888 - DNA, 25 bp, Artificial
  probe
  misc_feature (1)..(25): SEQ ID NO: 4363; WAN0249FD; Start 9; Stop 33
ttttcaatatgtgaacgcttacttg

SEQ ID NO: 380889 - DNA, 25 bp, Artificial
  probe
  misc_feature (1)..(25): SEQ ID NO: 4363; WAN0249FD; Start 21; Stop 45
gaacgcttacttgaataatgttcaa

SEQ ID NO: 380890 - DNA, 25 bp, Artificial
  probe
  misc_feature (1)..(25): SEQ ID NO: 4363; WAN0249FD; Start 40; Stop 64
gttcaaatgttaacccaatattcat

SEQ ID NO: 380891 - DNA, 25 bp, Artificial
  probe
  misc_feature (1)..(25): SEQ ID NO: 4363; WAN0249FD; Start 38; Stop 62
atgttcaaatgttaacccaatattc

SEQ ID NO: 380892 - DNA, 25 bp, Artificial
  probe
  misc_feature (1)..(25): SEQ ID NO: 4363; WAN0249FD; Start 84; Stop 108
ccaatttgtgctataatatagttga

SEQ ID NO: 380893 - DNA, 25 bp, Artificial
  probe
  misc_feature (1)..(25): SEQ ID NO: 4363; WAN0249FD; Start 83; Stop 107
tccaatttgtgctataatatagttg

SEQ ID NO: 380894 - DNA, 25 bp, Artificial
  probe
  misc_feature (1)..(25): SEQ ID NO: 4363; WAN0249FD; Start 32; Stop 56
tgaataatgttcaaatgttaaccca

SEQ ID NO: 380895 - DNA, 25 bp, Artificial
  probe
  misc_feature (1)..(25): SEQ ID NO: 4363; WAN0249FD; Start 37; Stop 61
aatgttcaaatgttaacccaatatt

SEQ ID NO: 380896 - DNA, 25 bp, Artificial
  probe
  misc_feature (1)..(25): SEQ ID NO: 4363; WAN0249FD; Start 34; Stop 58
aataatgttcaaatgttaacccaat

SEQ ID NO: 380897 - DNA, 25 bp, Artificial
  probe
  misc_feature (1)..(25): SEQ ID NO: 4363; WAN0249FD; Start 82; Stop 106
ctccaatttgtgctataatatagtt

SEQ ID NO: 380898 - DNA, 25 bp, Artificial
  probe
  misc_feature (1)..(25): SEQ ID NO: 4365; WAN0249V7; Start 76; Stop 100
gaagaatccccattttgaaaaggaa

SEQ ID NO: 380899 - DNA, 25 bp, Artificial
  probe
  misc_feature (1)..(25): SEQ ID NO: 4365; WAN0249V7; Start 73; Stop 97
aaggaagaatccccattttgaaaag

SEQ ID NO: 380900 - DNA, 25 bp, Artificial
  probe
  misc_feature (1)..(25): SEQ ID NO: 4365; WAN0249V7; Start 72; Stop 96
caaggaagaatccccattttgaaaa

SEQ ID NO: 380901 - DNA, 25 bp, Artificial
  probe
  misc_feature (1)..(25): SEQ ID NO: 4365; WAN0249V7; Start 68; Stop 92
ttttcaaggaagaatccccattttg

SEQ ID NO: 380902 - DNA, 25 bp, Artificial
  probe
  misc_feature (1)..(25): SEQ ID NO: 4365; WAN0249V7; Start 78; Stop 102
agaatccccattttgaaaaggaaaa

SEQ ID NO: 380903 - DNA, 25 bp, Artificial
  probe
  misc_feature (1)..(25): SEQ ID NO: 4365; WAN0249V7; Start 77; Stop 101
aagaatccccattttgaaaaggaaa

SEQ ID NO: 380904 - DNA, 25 bp, Artificial
  probe
  misc_feature (1)..(25): SEQ ID NO: 4365; WAN0249V7; Start 67; Stop 91
attttcaaggaagaatccccatttt

SEQ ID NO: 380905 - DNA, 25 bp, Artificial
  probe
  misc_feature (1)..(25): SEQ ID NO: 4365; WAN0249V7; Start 75; Stop 99
ggaagaatccccattttgaaaagga

SEQ ID NO: 380906 - DNA, 25 bp, Artificial
  probe
  misc_feature (1)..(25): SEQ ID NO: 4365; WAN0249V7; Start 74; Stop 98
aggaagaatccccattttgaaaagg

SEQ ID NO: 380907 - DNA, 25 bp, Artificial
  probe
  misc_feature (1)..(25): SEQ ID NO: 4365; WAN0249V7; Start 66; Stop 90
tattttcaaggaagaatccccattt

SEQ ID NO: 380908 - DNA, 25 bp, Artificial
  probe
  misc_feature (1)..(25): SEQ ID NO: 4365; WAN0249V7; Start 65; Stop 89
ttattttcaaggaagaatccccatt

SEQ ID NO: 380909 - DNA, 25 bp, Artificial
  probe
  misc_feature (1)..(25): SEQ ID NO: 4365; WAN0249V7; Start 63; Stop 87
gattattttcaaggaagaatcccca

SEQ ID NO: 380910 - DNA, 25 bp, Artificial
  probe
  misc_feature (1)..(25): SEQ ID NO: 4365; WAN0249V7; Start 62; Stop 86
tgattattttcaaggaagaatcccc

SEQ ID NO: 380911 - DNA, 25 bp, Artificial
  probe
  misc_feature (1)..(25): SEQ ID NO: 4365; WAN0249V7; Start 64; Stop 88
attattttcaaggaagaatccccat

SEQ ID NO: 380912 - DNA, 25 bp, Artificial
  probe
  misc_feature (1)..(25): SEQ ID NO: 4365; WAN0249V7; Start 52; Stop 76
gcacaattactgattattttcaagg

SEQ ID NO: 380913 - DNA, 25 bp, Artificial
  probe
  misc_feature (1)..(25): SEQ ID NO: 4365; WAN0249V7; Start 32; Stop 56
agaatgttcctttaattttagcaca

SEQ ID NO: 380914 - DNA, 25 bp, Artificial
  probe
  misc_feature (1)..(25): SEQ ID NO: 4365; WAN0249V7; Start 61; Stop 85
ctgattattttcaaggaagaatccc

SEQ ID NO: 380915 - DNA, 25 bp, Artificial
  probe
  misc_feature (1)..(25): SEQ ID NO: 4365; WAN0249V7; Start 71; Stop 95
tcaaggaagaatccccattttgaaa

SEQ ID NO: 380916 - DNA, 25 bp, Artificial
  probe
  misc_feature (1)..(25): SEQ ID NO: 4365; WAN0249V7; Start 69; Stop 93
tttcaaggaagaatccccattttga

SEQ ID NO: 380917 - DNA, 25 bp, Artificial
  probe
  misc_feature (1)..(25): SEQ ID NO: 4365; WAN0249V7; Start 33; Stop 57
gaatgttcctttaattttagcacaa

SEQ ID NO: 380918 - DNA, 25 bp, Artificial
  probe
  misc_feature (1)..(25): SEQ ID NO: 4365; WAN0249V7; Start 60; Stop 84
actgattattttcaaggaagaatcc

SEQ ID NO: 380919 - DNA, 25 bp, Artificial
  probe
  misc_feature (1)..(25): SEQ ID NO: 4365; WAN0249V7; Start 51; Stop 75
agcacaattactgattattttcaag

SEQ ID NO: 380920 - DNA, 25 bp, Artificial
  probe
  misc_feature (1)..(25): SEQ ID NO: 4365; WAN0249V7; Start 20; Stop 44
tccgaatattttagaatgttccttt

SEQ ID NO: 380921 - DNA, 25 bp, Artificial
  probe
  misc_feature (1)..(25): SEQ ID NO: 4365; WAN0249V7; Start 19; Stop 43
ttccgaatattttagaatgttcctt

SEQ ID NO: 380922 - DNA, 25 bp, Artificial
  probe
  misc_feature (1)..(25): SEQ ID NO: 4365; WAN0249V7; Start 31; Stop 55
tagaatgttcctttaattttagcac

SEQ ID NO: 380923 - DNA, 25 bp, Artificial
  probe
  misc_feature (1)..(25): SEQ ID NO: 4365; WAN0249V7; Start 35; Stop 59
atgttcctttaattttagcacaatt

SEQ ID NO: 380924 - DNA, 25 bp, Artificial
  probe
  misc_feature (1)..(25): SEQ ID NO: 4365; WAN0249V7; Start 34; Stop 58
aatgttcctttaattttagcacaat

SEQ ID NO: 380925 - DNA, 25 bp, Artificial
  probe
  misc_feature (1)..(25): SEQ ID NO: 4365; WAN0249V7; Start 53; Stop 77
cacaattactgattattttcaagga

SEQ ID NO: 380926 - DNA, 25 bp, Artificial
  probe
  misc_feature (1)..(25): SEQ ID NO: 4365; WAN0249V7; Start 18; Stop 42
attccgaatattttagaatgttcct

SEQ ID NO: 380927 - DNA, 25 bp, Artificial
  probe
  misc_feature (1)..(25): SEQ ID NO: 4365; WAN0249V7; Start 30; Stop 54
ttagaatgttcctttaattttagca

SEQ ID NO: 380928 - DNA, 25 bp, Artificial
  probe
  misc_feature (1)..(25): SEQ ID NO: 4365; WAN0249V7; Start 50; Stop 74
tagcacaattactgattattttcaa

SEQ ID NO: 380929 - DNA, 25 bp, Artificial
  probe
  misc_feature (1)..(25): SEQ ID NO: 4365; WAN0249V7; Start 49; Stop 73
ttagcacaattactgattattttca

SEQ ID NO: 380930 - DNA, 25 bp, Artificial
  probe
  misc_feature (1)..(25): SEQ ID NO: 4365; WAN0249V7; Start 40; Stop 64
cctttaattttagcacaattactga

SEQ ID NO: 380931 - DNA, 25 bp, Artificial
  probe
  misc_feature (1)..(25): SEQ ID NO: 4366; WAN024ANA; Start 3; Stop 27
accaagaagctatccatcataattg

SEQ ID NO: 380932 - DNA, 25 bp, Artificial
  probe
  misc_feature (1)..(25): SEQ ID NO: 4366; WAN024ANA; Start 2; Stop 26
aaccaagaagctatccatcataatt

SEQ ID NO: 380933 - DNA, 25 bp, Artificial
  probe
  misc_feature (1)..(25): SEQ ID NO: 4366; WAN024ANA; Start 64; Stop 88
gaatgaaactgaaagagtattctgc

SEQ ID NO: 380934 - DNA, 25 bp, Artificial
  probe
  misc_feature (1)..(25): SEQ ID NO: 4366; WAN024ANA; Start 65; Stop 89
aatgaaactgaaagagtattctgca

SEQ ID NO: 380935 - DNA, 25 bp, Artificial
  probe
  misc_feature (1)..(25): SEQ ID NO: 4366; WAN024ANA; Start 63; Stop 87
tgaatgaaactgaaagagtattctg

SEQ ID NO: 380936 - DNA, 25 bp, Artificial
  probe
  misc_feature (1)..(25): SEQ ID NO: 4366; WAN024ANA; Start 4; Stop 28
ccaagaagctatccatcataattgg

SEQ ID NO: 380937 - DNA, 25 bp, Artificial
  probe
  misc_feature (1)..(25): SEQ ID NO: 4366; WAN024ANA; Start 5; Stop 29
caagaagctatccatcataattgga

SEQ ID NO: 380938 - DNA, 25 bp, Artificial
  probe
  misc_feature (1)..(25): SEQ ID NO: 4367; WAN024A3V; Start 72; Stop 96
ccatttatacaagagttgaaagcgt

SEQ ID NO: 380939 - DNA, 25 bp, Artificial
  probe
  misc_feature (1)..(25): SEQ ID NO: 4367; WAN024A3V; Start 71; Stop 95
tccatttatacaagagttgaaagcg

SEQ ID NO: 380940 - DNA, 25 bp, Artificial
  probe
  misc_feature (1)..(25): SEQ ID NO: 4367; WAN024A3V; Start 73; Stop 97
catttatacaagagttgaaagcgtt

SEQ ID NO: 380941 - DNA, 25 bp, Artificial
  probe
  misc_feature (1)..(25): SEQ ID NO: 4367; WAN024A3V; Start 74; Stop 98
atttatacaagagttgaaagcgttc

SEQ ID NO: 380942 - DNA, 25 bp, Artificial
  probe
  misc_feature (1)..(25): SEQ ID NO: 4367; WAN024A3V; Start 70; Stop 94
ttccatttatacaagagttgaaagc

SEQ ID NO: 380943 - DNA, 25 bp, Artificial
  probe
  misc_feature (1)..(25): SEQ ID NO: 4367; WAN024A3V; Start 75; Stop 99
tttatacaagagttgaaagcgttca

SEQ ID NO: 380944 - DNA, 25 bp, Artificial
  probe
  misc_feature (1)..(25): SEQ ID NO: 4367; WAN024A3V; Start 19; Stop 43
cgtaaaaggaataattgtcaagcaa

SEQ ID NO: 380945 - DNA, 25 bp, Artificial
  probe
  misc_feature (1)..(25): SEQ ID NO: 4367; WAN024A3V; Start 69; Stop 93
cttccatttatacaagagttgaaag

SEQ ID NO: 380946 - DNA, 25 bp, Artificial
  probe
  misc_feature (1)..(25): SEQ ID NO: 4367; WAN024A3V; Start 18; Stop 42
acgtaaaaggaataattgtcaagca

SEQ ID NO: 380947 - DNA, 25 bp, Artificial
  probe
  misc_feature (1)..(25): SEQ ID NO: 4367; WAN024A3V; Start 17; Stop 41
cacgtaaaaggaataattgtcaagc

SEQ ID NO: 380948 - DNA, 25 bp, Artificial
  probe
  misc_feature (1)..(25): SEQ ID NO: 4367; WAN024A3V; Start 88; Stop 112
tgaaagcgttcaatagaacattgct

SEQ ID NO: 380949 - DNA, 25 bp, Artificial
  probe
  misc_feature (1)..(25): SEQ ID NO: 4367; WAN024A3V; Start 68; Stop 92
tcttccatttatacaagagttgaaa

SEQ ID NO: 380950 - DNA, 25 bp, Artificial
  probe
  misc_feature (1)..(25): SEQ ID NO: 4367; WAN024A3V; Start 67; Stop 91
ttcttccatttatacaagagttgaa

SEQ ID NO: 380951 - DNA, 25 bp, Artificial
  probe
  misc_feature (1)..(25): SEQ ID NO: 4367; WAN024A3V; Start 66; Stop 90
tttcttccatttatacaagagttga

SEQ ID NO: 380952 - DNA, 25 bp, Artificial
  probe
  misc_feature (1)..(25): SEQ ID NO: 4367; WAN024A3V; Start 20; Stop 44
gtaaaaggaataattgtcaagcaaa

SEQ ID NO: 380953 - DNA, 25 bp, Artificial
  probe
  misc_feature (1)..(25): SEQ ID NO: 4367; WAN024A3V; Start 16; Stop 40
acacgtaaaaggaataattgtcaag

SEQ ID NO: 380954 - DNA, 25 bp, Artificial
  probe
  misc_feature (1)..(25): SEQ ID NO: 4367; WAN024A3V; Start 89; Stop 113
gaaagcgttcaatagaacattgctt

SEQ ID NO: 380955 - DNA, 25 bp, Artificial
  probe
  misc_feature (1)..(25): SEQ ID NO: 4367; WAN024A3V; Start 21; Stop 45
taaaaggaataattgtcaagcaaaa

SEQ ID NO: 380956 - DNA, 25 bp, Artificial
  probe
  misc_feature (1)..(25): SEQ ID NO: 4367; WAN024A3V; Start 15; Stop 39
tacacgtaaaaggaataattgtcaa

SEQ ID NO: 380957 - DNA, 25 bp, Artificial
  probe
  misc_feature (1)..(25): SEQ ID NO: 4367; WAN024A3V; Start 86; Stop 110
gttgaaagcgttcaatagaacattg

SEQ ID NO: 380958 - DNA, 25 bp, Artificial
  probe
  misc_feature (1)..(25): SEQ ID NO: 4367; WAN024A3V; Start 85; Stop 109
agttgaaagcgttcaatagaacatt

SEQ ID NO: 380959 - DNA, 25 bp, Artificial
  probe
  misc_feature (1)..(25): SEQ ID NO: 4367; WAN024A3V; Start 84; Stop 108
gagttgaaagcgttcaatagaacat

SEQ ID NO: 380960 - DNA, 25 bp, Artificial
  probe
  misc_feature (1)..(25): SEQ ID NO: 4367; WAN024A3V; Start 82; Stop 106
aagagttgaaagcgttcaatagaac

SEQ ID NO: 380961 - DNA, 25 bp, Artificial
  probe
  misc_feature (1)..(25): SEQ ID NO: 4367; WAN024A3V; Start 81; Stop 105
caagagttgaaagcgttcaatagaa

SEQ ID NO: 380962 - DNA, 25 bp, Artificial
  probe
  misc_feature (1)..(25): SEQ ID NO: 4367; WAN024A3V; Start 79; Stop 103
tacaagagttgaaagcgttcaatag

SEQ ID NO: 380963 - DNA, 25 bp, Artificial
  probe
  misc_feature (1)..(25): SEQ ID NO: 4367; WAN024A3V; Start 76; Stop 100
ttatacaagagttgaaagcgttcaa

SEQ ID NO: 380964 - DNA, 25 bp, Artificial
  probe
  misc_feature (1)..(25): SEQ ID NO: 4367; WAN024A3V; Start 83; Stop 107
agagttgaaagcgttcaatagaaca

SEQ ID NO: 380965 - DNA, 25 bp, Artificial
  probe
  misc_feature (1)..(25): SEQ ID NO: 4367; WAN024A3V; Start 80; Stop 104
acaagagttgaaagcgttcaataga

SEQ ID NO: 380966 - DNA, 25 bp, Artificial
  probe
  misc_feature (1)..(25): SEQ ID NO: 4367; WAN024A3V; Start 78; Stop 102
atacaagagttgaaagcgttcaata

SEQ ID NO: 380967 - DNA, 25 bp, Artificial
  probe
  misc_feature (1)..(25): SEQ ID NO: 4367; WAN024A3V; Start 77; Stop 101
tatacaagagttgaaagcgttcaat

SEQ ID NO: 380968 - DNA, 25 bp, Artificial
  probe
  misc_feature (1)..(25): SEQ ID NO: 4367; WAN024A3V; Start 87; Stop 111
ttgaaagcgttcaatagaacattgc

SEQ ID NO: 380969 - DNA, 25 bp, Artificial
  probe
  misc_feature (1)..(25): SEQ ID NO: 4367; WAN024A3V; Start 91; Stop 115
aagcgttcaatagaacattgctttt

SEQ ID NO: 380970 - DNA, 25 bp, Artificial
  probe
  misc_feature (1)..(25): SEQ ID NO: 4367; WAN024A3V; Start 65; Stop 89
ttttcttccatttatacaagagttg

SEQ ID NO: 380971 - DNA, 25 bp, Artificial
  probe
  misc_feature (1)..(25): SEQ ID NO: 4368; WAN024ANS; Start 97; Stop 121
tgacaagctaattttgaagtgataa

SEQ ID NO: 380972 - DNA, 25 bp, Artificial
  probe
  misc_feature (1)..(25): SEQ ID NO: 4368; WAN024ANS; Start 96; Stop 120
ttgacaagctaattttgaagtgata

SEQ ID NO: 380973 - DNA, 25 bp, Artificial
  probe
  misc_feature (1)..(25): SEQ ID NO: 4368; WAN024ANS; Start 98; Stop 122
gacaagctaattttgaagtgataaa

SEQ ID NO: 380974 - DNA, 25 bp, Artificial
  probe
  misc_feature (1)..(25): SEQ ID NO: 4368; WAN024ANS; Start 111; Stop 135
tgaagtgataaaataaatgcaagaa

SEQ ID NO: 380975 - DNA, 25 bp, Artificial
  probe
  misc_feature (1)..(25): SEQ ID NO: 4368; WAN024ANS; Start 110; Stop 134
ttgaagtgataaaataaatgcaaga

SEQ ID NO: 380976 - DNA, 25 bp, Artificial
  probe
  misc_feature (1)..(25): SEQ ID NO: 4368; WAN024ANS; Start 99; Stop 123
acaagctaattttgaagtgataaaa

SEQ ID NO: 380977 - DNA, 25 bp, Artificial
  probe
  misc_feature (1)..(25): SEQ ID NO: 4368; WAN024ANS; Start 114; Stop 138
agtgataaaataaatgcaagaaaac

SEQ ID NO: 380978 - DNA, 25 bp, Artificial
  probe
  misc_feature (1)..(25): SEQ ID NO: 4368; WAN024ANS; Start 109; Stop 133
tttgaagtgataaaataaatgcaag

SEQ ID NO: 380979 - DNA, 25 bp, Artificial
  probe
  misc_feature (1)..(25): SEQ ID NO: 4369; WAN024B5B; Start 261; Stop 285
cattgagcttacgaataacagttga

SEQ ID NO: 380980 - DNA, 25 bp, Artificial
  probe
  misc_feature (1)..(25): SEQ ID NO: 4369; WAN024B5B; Start 260; Stop 284
tcattgagcttacgaataacagttg

SEQ ID NO: 380981 - DNA, 25 bp, Artificial
  probe
  misc_feature (1)..(25): SEQ ID NO: 4369; WAN024B5B; Start 259; Stop 283
atcattgagcttacgaataacagtt

SEQ ID NO: 380982 - DNA, 25 bp, Artificial
  probe
  misc_feature (1)..(25): SEQ ID NO: 4369; WAN024B5B; Start 258; Stop 282
aatcattgagcttacgaataacagt

SEQ ID NO: 380983 - DNA, 25 bp, Artificial
  probe
  misc_feature (1)..(25): SEQ ID NO: 4369; WAN024B5B; Start 199; Stop 223
agcatactcatcccaagacataatc

SEQ ID NO: 380984 - DNA, 25 bp, Artificial
  probe
  misc_feature (1)..(25): SEQ ID NO: 4369; WAN024B5B; Start 198; Stop 222
aagcatactcatcccaagacataat

SEQ ID NO: 380985 - DNA, 25 bp, Artificial
  probe
  misc_feature (1)..(25): SEQ ID NO: 4369; WAN024B5B; Start 197; Stop 221
aaagcatactcatcccaagacataa

SEQ ID NO: 380986 - DNA, 25 bp, Artificial
  probe
  misc_feature (1)..(25): SEQ ID NO: 4369; WAN024B5B; Start 203; Stop 227
tactcatcccaagacataatctcag

SEQ ID NO: 380987 - DNA, 25 bp, Artificial
  probe
  misc_feature (1)..(25): SEQ ID NO: 4369; WAN024B5B; Start 202; Stop 226
atactcatcccaagacataatctca

SEQ ID NO: 380988 - DNA, 25 bp, Artificial
  probe
  misc_feature (1)..(25): SEQ ID NO: 4369; WAN024B5B; Start 201; Stop 225
catactcatcccaagacataatctc

SEQ ID NO: 380989 - DNA, 25 bp, Artificial
  probe
  misc_feature (1)..(25): SEQ ID NO: 4369; WAN024B5B; Start 204; Stop 228
actcatcccaagacataatctcagg

SEQ ID NO: 380990 - DNA, 25 bp, Artificial
  probe
  misc_feature (1)..(25): SEQ ID NO: 4369; WAN024B5B; Start 208; Stop 232
atcccaagacataatctcaggaaga

SEQ ID NO: 380991 - DNA, 25 bp, Artificial
  probe
  misc_feature (1)..(25): SEQ ID NO: 4369; WAN024B5B; Start 207; Stop 231
catcccaagacataatctcaggaag

SEQ ID NO: 380992 - DNA, 25 bp, Artificial
  probe
  misc_feature (1)..(25): SEQ ID NO: 4369; WAN024B5B; Start 206; Stop 230
tcatcccaagacataatctcaggaa

SEQ ID NO: 380993 - DNA, 25 bp, Artificial
  probe
  misc_feature (1)..(25): SEQ ID NO: 4369; WAN024B5B; Start 205; Stop 229
ctcatcccaagacataatctcagga

SEQ ID NO: 380994 - DNA, 25 bp, Artificial
  probe
  misc_feature (1)..(25): SEQ ID NO: 4369; WAN024B5B; Start 174; Stop 198
tgaagctcatctttccctttgtaaa

SEQ ID NO: 380995 - DNA, 25 bp, Artificial
  probe
  misc_feature (1)..(25): SEQ ID NO: 4369; WAN024B5B; Start 209; Stop 233
tcccaagacataatctcaggaagac

SEQ ID NO: 380996 - DNA, 25 bp, Artificial
  probe
  misc_feature (1)..(25): SEQ ID NO: 4369; WAN024B5B; Start 257; Stop 281
aaatcattgagcttacgaataacag

SEQ ID NO: 380997 - DNA, 25 bp, Artificial
  probe
  misc_feature (1)..(25): SEQ ID NO: 4369; WAN024B5B; Start 196; Stop 220
aaaagcatactcatcccaagacata

SEQ ID NO: 380998 - DNA, 25 bp, Artificial
  probe
  misc_feature (1)..(25): SEQ ID NO: 4369; WAN024B5B; Start 195; Stop 219
taaaagcatactcatcccaagacat

SEQ ID NO: 380999 - DNA, 25 bp, Artificial
  probe
  misc_feature (1)..(25): SEQ ID NO: 4369; WAN024B5B; Start 194; Stop 218
gtaaaagcatactcatcccaagaca

SEQ ID NO: 381000 - DNA, 25 bp, Artificial
  probe
  misc_feature (1)..(25): SEQ ID NO: 4369; WAN024B5B; Start 193; Stop 217
tgtaaaagcatactcatcccaagac

SEQ ID NO: 381001 - DNA, 25 bp, Artificial
  probe
  misc_feature (1)..(25): SEQ ID NO: 4369; WAN024B5B; Start 34; Stop 58
agggctaaacatatccatagtaata

SEQ ID NO: 381002 - DNA, 25 bp, Artificial
  probe
  misc_feature (1)..(25): SEQ ID NO: 4369; WAN024B5B; Start 192; Stop 216
ttgtaaaagcatactcatcccaaga

SEQ ID NO: 381003 - DNA, 25 bp, Artificial
  probe
  misc_feature (1)..(25): SEQ ID NO: 4369; WAN024B5B; Start 191; Stop 215
tttgtaaaagcatactcatcccaag

SEQ ID NO: 381004 - DNA, 25 bp, Artificial
  probe
  misc_feature (1)..(25): SEQ ID NO: 4369; WAN024B5B; Start 173; Stop 197
atgaagctcatctttccctttgtaa

SEQ ID NO: 381005 - DNA, 25 bp, Artificial
  probe
  misc_feature (1)..(25): SEQ ID NO: 4369; WAN024B5B; Start 172; Stop 196
aatgaagctcatctttccctttgta

SEQ ID NO: 381006 - DNA, 25 bp, Artificial
  probe
  misc_feature (1)..(25): SEQ ID NO: 4369; WAN024B5B; Start 35; Stop 59
gggctaaacatatccatagtaataa

SEQ ID NO: 381007 - DNA, 25 bp, Artificial
  probe
  misc_feature (1)..(25): SEQ ID NO: 4369; WAN024B5B; Start 175; Stop 199
gaagctcatctttccctttgtaaaa

SEQ ID NO: 381008 - DNA, 25 bp, Artificial
  probe
  misc_feature (1)..(25): SEQ ID NO: 4369; WAN024B5B; Start 171; Stop 195
caatgaagctcatctttccctttgt

SEQ ID NO: 381009 - DNA, 25 bp, Artificial
  probe
  misc_feature (1)..(25): SEQ ID NO: 4369; WAN024B5B; Start 251; Stop 275
aagtgaaaatcattgagcttacgaa

SEQ ID NO: 381010 - DNA, 25 bp, Artificial
  probe
  misc_feature (1)..(25): SEQ ID NO: 4369; WAN024B5B; Start 250; Stop 274
aaagtgaaaatcattgagcttacga

SEQ ID NO: 381011 - DNA, 25 bp, Artificial
  probe
  misc_feature (1)..(25): SEQ ID NO: 4369; WAN024B5B; Start 252; Stop 276
agtgaaaatcattgagcttacgaat

SEQ ID NO: 381012 - DNA, 25 bp, Artificial
  probe
  misc_feature (1)..(25): SEQ ID NO: 4370; WAN024FR3; Start 295; Stop 319
ttaagaataaggacagcggagaatt

SEQ ID NO: 381013 - DNA, 25 bp, Artificial
  probe
  misc_feature (1)..(25): SEQ ID NO: 4370; WAN024FR3; Start 1443; Stop 1467
aagattatcaatagccagagccttc

SEQ ID NO: 381014 - DNA, 25 bp, Artificial
  probe
  misc_feature (1)..(25): SEQ ID NO: 4370; WAN024FR3; Start 1491; Stop 1515
cttagatgagataacagcaagcctt

SEQ ID NO: 381015 - DNA, 25 bp, Artificial
  probe
  misc_feature (1)..(25): SEQ ID NO: 4370; WAN024FR3; Start 1445; Stop 1469
gattatcaatagccagagccttctt

SEQ ID NO: 381016 - DNA, 25 bp, Artificial
  probe
  misc_feature (1)..(25): SEQ ID NO: 4370; WAN024FR3; Start 1447; Stop 1471
ttatcaatagccagagccttcttaa

SEQ ID NO: 381017 - DNA, 25 bp, Artificial
  probe
  misc_feature (1)..(25): SEQ ID NO: 4370; WAN024FR3; Start 1446; Stop 1470
attatcaatagccagagccttctta

SEQ ID NO: 381018 - DNA, 25 bp, Artificial
  probe
  misc_feature (1)..(25): SEQ ID NO: 4370; WAN024FR3; Start 1444; Stop 1468
agattatcaatagccagagccttct

SEQ ID NO: 381019 - DNA, 25 bp, Artificial
  probe
  misc_feature (1)..(25): SEQ ID NO: 4370; WAN024FR3; Start 1490; Stop 1514
tcttagatgagataacagcaagcct

SEQ ID NO: 381020 - DNA, 25 bp, Artificial
  probe
  misc_feature (1)..(25): SEQ ID NO: 4370; WAN024FR3; Start 122; Stop 146
acatgcttcctgccatattacttat

SEQ ID NO: 381021 - DNA, 25 bp, Artificial
  probe
  misc_feature (1)..(25): SEQ ID NO: 4370; WAN024FR3; Start 121; Stop 145
aacatgcttcctgccatattactta

SEQ ID NO: 381022 - DNA, 25 bp, Artificial
  probe
  misc_feature (1)..(25): SEQ ID NO: 4370; WAN024FR3; Start 125; Stop 149
tgcttcctgccatattacttatgat

SEQ ID NO: 381023 - DNA, 25 bp, Artificial
  probe
  misc_feature (1)..(25): SEQ ID NO: 4370; WAN024FR3; Start 124; Stop 148
atgcttcctgccatattacttatga

SEQ ID NO: 381024 - DNA, 25 bp, Artificial
  probe
  misc_feature (1)..(25): SEQ ID NO: 4370; WAN024FR3; Start 1492; Stop 1516
ttagatgagataacagcaagccttg

SEQ ID NO: 381025 - DNA, 25 bp, Artificial
  probe
  misc_feature (1)..(25): SEQ ID NO: 4370; WAN024FR3; Start 381; Stop 405
catggctgatattgaaggcatagag

SEQ ID NO: 381026 - DNA, 25 bp, Artificial
  probe
  misc_feature (1)..(25): SEQ ID NO: 4370; WAN024FR3; Start 126; Stop 150
gcttcctgccatattacttatgatt

SEQ ID NO: 381027 - DNA, 25 bp, Artificial
  probe
  misc_feature (1)..(25): SEQ ID NO: 4370; WAN024FR3; Start 1493; Stop 1517
tagatgagataacagcaagccttga

SEQ ID NO: 381028 - DNA, 25 bp, Artificial
  probe
  misc_feature (1)..(25): SEQ ID NO: 4370; WAN024FR3; Start 123; Stop 147
catgcttcctgccatattacttatg

SEQ ID NO: 381029 - DNA, 25 bp, Artificial
  probe
  misc_feature (1)..(25): SEQ ID NO: 4370; WAN024FR3; Start 380; Stop 404
tcatggctgatattgaaggcataga

SEQ ID NO: 381030 - DNA, 25 bp, Artificial
  probe
  misc_feature (1)..(25): SEQ ID NO: 4370; WAN024FR3; Start 969; Stop 993
agatttacaagaaggcgatgactat

SEQ ID NO: 381031 - DNA, 25 bp, Artificial
  probe
  misc_feature (1)..(25): SEQ ID NO: 4370; WAN024FR3; Start 968; Stop 992
aagatttacaagaaggcgatgacta

SEQ ID NO: 381032 - DNA, 25 bp, Artificial
  probe
  misc_feature (1)..(25): SEQ ID NO: 4370; WAN024FR3; Start 357; Stop 381
catttccgacatttcacaaacaatc

SEQ ID NO: 381033 - DNA, 25 bp, Artificial
  probe
  misc_feature (1)..(25): SEQ ID NO: 4370; WAN024FR3; Start 1439; Stop 1463
gacaaagattatcaatagccagagc

SEQ ID NO: 381034 - DNA, 25 bp, Artificial
  probe
  misc_feature (1)..(25): SEQ ID NO: 4370; WAN024FR3; Start 359; Stop 383
tttccgacatttcacaaacaatcat

SEQ ID NO: 381035 - DNA, 25 bp, Artificial
  probe
  misc_feature (1)..(25): SEQ ID NO: 4370; WAN024FR3; Start 358; Stop 382
atttccgacatttcacaaacaatca

SEQ ID NO: 381036 - DNA, 25 bp, Artificial
  probe
  misc_feature (1)..(25): SEQ ID NO: 4370; WAN024FR3; Start 356; Stop 380
acatttccgacatttcacaaacaat

SEQ ID NO: 381037 - DNA, 25 bp, Artificial
  probe
  misc_feature (1)..(25): SEQ ID NO: 4370; WAN024FR3; Start 976; Stop 1000
caagaaggcgatgactatagcttaa

SEQ ID NO: 381038 - DNA, 25 bp, Artificial
  probe
  misc_feature (1)..(25): SEQ ID NO: 4370; WAN024FR3; Start 294; Stop 318
tttaagaataaggacagcggagaat

SEQ ID NO: 381039 - DNA, 25 bp, Artificial
  probe
  misc_feature (1)..(25): SEQ ID NO: 4370; WAN024FR3; Start 293; Stop 317
atttaagaataaggacagcggagaa

SEQ ID NO: 381040 - DNA, 25 bp, Artificial
  probe
  misc_feature (1)..(25): SEQ ID NO: 4370; WAN024FR3; Start 292; Stop 316
gatttaagaataaggacagcggaga

SEQ ID NO: 381041 - DNA, 25 bp, Artificial
  probe
  misc_feature (1)..(25): SEQ ID NO: 4370; WAN024FR3; Start 291; Stop 315
agatttaagaataaggacagcggag

SEQ ID NO: 381042 - DNA, 25 bp, Artificial
  probe
  misc_feature (1)..(25): SEQ ID NO: 4370; WAN024FR3; Start 1441; Stop 1465
caaagattatcaatagccagagcct

SEQ ID NO: 381043 - DNA, 25 bp, Artificial
  probe
  misc_feature (1)..(25): SEQ ID NO: 4370; WAN024FR3; Start 1423; Stop 1447
ctatcaggaggagaaagacaaagat

SEQ ID NO: 381044 - DNA, 25 bp, Artificial
  probe
  misc_feature (1)..(25): SEQ ID NO: 4370; WAN024FR3; Start 780; Stop 804
atctcttgctgttgtgatatttgtc

SEQ ID NO: 381045 - DNA, 25 bp, Artificial
  probe
  misc_feature (1)..(25): SEQ ID NO: 4371; WAN024FL2; Start 1341; Stop 1365
tgttccagtagatgatattgttcgt

SEQ ID NO: 381046 - DNA, 25 bp, Artificial
  probe
  misc_feature (1)..(25): SEQ ID NO: 4371; WAN024FL2; Start 1342; Stop 1366
gttccagtagatgatattgttcgtt

SEQ ID NO: 381047 - DNA, 25 bp, Artificial
  probe
  misc_feature (1)..(25): SEQ ID NO: 4371; WAN024FL2; Start 974; Stop 998
atatctcagcctatatcgcaaccaa

SEQ ID NO: 381048 - DNA, 25 bp, Artificial
  probe
  misc_feature (1)..(25): SEQ ID NO: 4371; WAN024FL2; Start 1340; Stop 1364
ctgttccagtagatgatattgttcg

SEQ ID NO: 381049 - DNA, 25 bp, Artificial
  probe
  misc_feature (1)..(25): SEQ ID NO: 4371; WAN024FL2; Start 916; Stop 940
gatgaacttggtggtggatcaatta

SEQ ID NO: 381050 - DNA, 25 bp, Artificial
  probe
  misc_feature (1)..(25): SEQ ID NO: 4371; WAN024FL2; Start 975; Stop 999
tatctcagcctatatcgcaaccaac

SEQ ID NO: 381051 - DNA, 25 bp, Artificial
  probe
  misc_feature (1)..(25): SEQ ID NO: 4371; WAN024FL2; Start 917; Stop 941
atgaacttggtggtggatcaattac

SEQ ID NO: 381052 - DNA, 25 bp, Artificial
  probe
  misc_feature (1)..(25): SEQ ID NO: 4371; WAN024FL2; Start 1083; Stop 1107
atctgtatctcgtgtaggtggttct

SEQ ID NO: 381053 - DNA, 25 bp, Artificial
  probe
  misc_feature (1)..(25): SEQ ID NO: 4371; WAN024FL2; Start 1082; Stop 1106
catctgtatctcgtgtaggtggttc

SEQ ID NO: 381054 - DNA, 25 bp, Artificial
  probe
  misc_feature (1)..(25): SEQ ID NO: 4371; WAN024FL2; Start 1079; Stop 1103
gttcatctgtatctcgtgtaggtgg

SEQ ID NO: 381055 - DNA, 25 bp, Artificial
  probe
  misc_feature (1)..(25): SEQ ID NO: 4371; WAN024FL2; Start 1078; Stop 1102
ggttcatctgtatctcgtgtaggtg

SEQ ID NO: 381056 - DNA, 25 bp, Artificial
  probe
  misc_feature (1)..(25): SEQ ID NO: 4371; WAN024FL2; Start 919; Stop 943
gaacttggtggtggatcaattacag

SEQ ID NO: 381057 - DNA, 25 bp, Artificial
  probe
  misc_feature (1)..(25): SEQ ID NO: 4371; WAN024FL2; Start 1081; Stop 1105
tcatctgtatctcgtgtaggtggtt

SEQ ID NO: 381058 - DNA, 25 bp, Artificial
  probe
  misc_feature (1)..(25): SEQ ID NO: 4371; WAN024FL2; Start 1080; Stop 1104
ttcatctgtatctcgtgtaggtggt

SEQ ID NO: 381059 - DNA, 25 bp, Artificial
  probe
  misc_feature (1)..(25): SEQ ID NO: 4371; WAN024FL2; Start 205; Stop 229
acagacgttggtattatcatcctag

SEQ ID NO: 381060 - DNA, 25 bp, Artificial
  probe
  misc_feature (1)..(25): SEQ ID NO: 4371; WAN024FL2; Start 1345; Stop 1369
ccagtagatgatattgttcgtttcg

SEQ ID NO: 381061 - DNA, 25 bp, Artificial
  probe
  misc_feature (1)..(25): SEQ ID NO: 4371; WAN024FL2; Start 730; Stop 754
gctatggcggaagaatttatgtatc

SEQ ID NO: 381062 - DNA, 25 bp, Artificial
  probe
  misc_feature (1)..(25): SEQ ID NO: 4371; WAN024FL2; Start 1302; Stop 1326
aaccattctttatgctttgacacat

SEQ ID NO: 381063 - DNA, 25 bp, Artificial
  probe
  misc_feature (1)..(25): SEQ ID NO: 4371; WAN024FL2; Start 733; Stop 757
atggcggaagaatttatgtatcaag

SEQ ID NO: 381064 - DNA, 25 bp, Artificial
  probe
  misc_feature (1)..(25): SEQ ID NO: 4371; WAN024FL2; Start 1177; Stop 1201
gaagcctttactaagtttggttctg

SEQ ID NO: 381065 - DNA, 25 bp, Artificial
  probe
  misc_feature (1)..(25): SEQ ID NO: 4371; WAN024FL2; Start 934; Stop 958
tcaattacagccctaccatttatcg

SEQ ID NO: 381066 - DNA, 25 bp, Artificial
  probe
  misc_feature (1)..(25): SEQ ID NO: 4371; WAN024FL2; Start 1178; Stop 1202
aagcctttactaagtttggttctga

SEQ ID NO: 381067 - DNA, 25 bp, Artificial
  probe
  misc_feature (1)..(25): SEQ ID NO: 4371; WAN024FL2; Start 204; Stop 228
aacagacgttggtattatcatccta

SEQ ID NO: 381068 - DNA, 25 bp, Artificial
  probe
  misc_feature (1)..(25): SEQ ID NO: 4371; WAN024FL2; Start 1301; Stop 1325
taaccattctttatgctttgacaca

SEQ ID NO: 381069 - DNA, 25 bp, Artificial
  probe
  misc_feature (1)..(25): SEQ ID NO: 4371; WAN024FL2; Start 1174; Stop 1198
ttggaagcctttactaagtttggtt

SEQ ID NO: 381070 - DNA, 25 bp, Artificial
  probe
  misc_feature (1)..(25): SEQ ID NO: 4371; WAN024FL2; Start 918; Stop 942
tgaacttggtggtggatcaattaca

SEQ ID NO: 381071 - DNA, 25 bp, Artificial
  probe
  misc_feature (1)..(25): SEQ ID NO: 4371; WAN024FL2; Start 736; Stop 760
gcggaagaatttatgtatcaaggta

SEQ ID NO: 381072 - DNA, 25 bp, Artificial
  probe
  misc_feature (1)..(25): SEQ ID NO: 4371; WAN024FL2; Start 1344; Stop 1368
tccagtagatgatattgttcgtttc

SEQ ID NO: 381073 - DNA, 25 bp, Artificial
  probe
  misc_feature (1)..(25): SEQ ID NO: 4371; WAN024FL2; Start 1300; Stop 1324
gtaaccattctttatgctttgacac

SEQ ID NO: 381074 - DNA, 25 bp, Artificial
  probe
  misc_feature (1)..(25): SEQ ID NO: 4371; WAN024FL2; Start 1179; Stop 1203
agcctttactaagtttggttctgac

SEQ ID NO: 381075 - DNA, 25 bp, Artificial
  probe
  misc_feature (1)..(25): SEQ ID NO: 4371; WAN024FL2; Start 1176; Stop 1200
ggaagcctttactaagtttggttct

SEQ ID NO: 381076 - DNA, 25 bp, Artificial
  probe
  misc_feature (1)..(25): SEQ ID NO: 4371; WAN024FL2; Start 1484; Stop 1508
tcaatcaatctagcttccaataact

SEQ ID NO: 381077 - DNA, 25 bp, Artificial
  probe
  misc_feature (1)..(25): SEQ ID NO: 4371; WAN024FL2; Start 1299; Stop 1323
agtaaccattctttatgctttgaca

SEQ ID NO: 381078 - DNA, 25 bp, Artificial
  probe
  misc_feature (1)..(25): SEQ ID NO: 4372; WAN024FBQ; Start 137; Stop 161
atactagaggcagtcaggagaatac

SEQ ID NO: 381079 - DNA, 25 bp, Artificial
  probe
  misc_feature (1)..(25): SEQ ID NO: 4372; WAN024FBQ; Start 136; Stop 160
catactagaggcagtcaggagaata

SEQ ID NO: 381080 - DNA, 25 bp, Artificial
  probe
  misc_feature (1)..(25): SEQ ID NO: 4372; WAN024FBQ; Start 138; Stop 162
tactagaggcagtcaggagaatact

SEQ ID NO: 381081 - DNA, 25 bp, Artificial
  probe
  misc_feature (1)..(25): SEQ ID NO: 4372; WAN024FBQ; Start 131; Stop 155
atactcatactagaggcagtcagga

SEQ ID NO: 381082 - DNA, 25 bp, Artificial
  probe
  misc_feature (1)..(25): SEQ ID NO: 4372; WAN024FBQ; Start 130; Stop 154
catactcatactagaggcagtcagg

SEQ ID NO: 381083 - DNA, 25 bp, Artificial
  probe
  misc_feature (1)..(25): SEQ ID NO: 4372; WAN024FBQ; Start 129; Stop 153
ccatactcatactagaggcagtcag

SEQ ID NO: 381084 - DNA, 25 bp, Artificial
  probe
  misc_feature (1)..(25): SEQ ID NO: 4372; WAN024FBQ; Start 135; Stop 159
tcatactagaggcagtcaggagaat

SEQ ID NO: 381085 - DNA, 25 bp, Artificial
  probe
  misc_feature (1)..(25): SEQ ID NO: 4372; WAN024FBQ; Start 132; Stop 156
tactcatactagaggcagtcaggag

SEQ ID NO: 381086 - DNA, 25 bp, Artificial
  probe
  misc_feature (1)..(25): SEQ ID NO: 4372; WAN024FBQ; Start 156; Stop 180
gaatactgatagttcttgggagacg

SEQ ID NO: 381087 - DNA, 25 bp, Artificial
  probe
  misc_feature (1)..(25): SEQ ID NO: 4372; WAN024FBQ; Start 134; Stop 158
ctcatactagaggcagtcaggagaa

SEQ ID NO: 381088 - DNA, 25 bp, Artificial
  probe
  misc_feature (1)..(25): SEQ ID NO: 4372; WAN024FBQ; Start 157; Stop 181
aatactgatagttcttgggagacgg

SEQ ID NO: 381089 - DNA, 25 bp, Artificial
  probe
  misc_feature (1)..(25): SEQ ID NO: 4372; WAN024FBQ; Start 133; Stop 157
actcatactagaggcagtcaggaga

SEQ ID NO: 381090 - DNA, 25 bp, Artificial
  probe
  misc_feature (1)..(25): SEQ ID NO: 4372; WAN024FBQ; Start 99; Stop 123
tttgggtaatagtctgcatgagaag

SEQ ID NO: 381091 - DNA, 25 bp, Artificial
  probe
  misc_feature (1)..(25): SEQ ID NO: 4372; WAN024FBQ; Start 153; Stop 177
ggagaatactgatagttcttgggag

SEQ ID NO: 381092 - DNA, 25 bp, Artificial
  probe
  misc_feature (1)..(25): SEQ ID NO: 4372; WAN024FBQ; Start 152; Stop 176
aggagaatactgatagttcttggga

SEQ ID NO: 381093 - DNA, 25 bp, Artificial
  probe
  misc_feature (1)..(25): SEQ ID NO: 4372; WAN024FBQ; Start 151; Stop 175
caggagaatactgatagttcttggg

SEQ ID NO: 381094 - DNA, 25 bp, Artificial
  probe
  misc_feature (1)..(25): SEQ ID NO: 4372; WAN024FBQ; Start 155; Stop 179
agaatactgatagttcttgggagac

SEQ ID NO: 381095 - DNA, 25 bp, Artificial
  probe
  misc_feature (1)..(25): SEQ ID NO: 4372; WAN024FBQ; Start 154; Stop 178
gagaatactgatagttcttgggaga

SEQ ID NO: 381096 - DNA, 25 bp, Artificial
  probe
  misc_feature (1)..(25): SEQ ID NO: 4372; WAN024FBQ; Start 150; Stop 174
tcaggagaatactgatagttcttgg

SEQ ID NO: 381097 - DNA, 25 bp, Artificial
  probe
  misc_feature (1)..(25): SEQ ID NO: 4372; WAN024FBQ; Start 158; Stop 182
atactgatagttcttgggagacggg

SEQ ID NO: 381098 - DNA, 25 bp, Artificial
  probe
  misc_feature (1)..(25): SEQ ID NO: 4372; WAN024FBQ; Start 100; Stop 124
ttgggtaatagtctgcatgagaagg

SEQ ID NO: 381099 - DNA, 25 bp, Artificial
  probe
  misc_feature (1)..(25): SEQ ID NO: 4372; WAN024FBQ; Start 149; Stop 173
gtcaggagaatactgatagttcttg

SEQ ID NO: 381100 - DNA, 25 bp, Artificial
  probe
  misc_feature (1)..(25): SEQ ID NO: 4372; WAN024FBQ; Start 148; Stop 172
agtcaggagaatactgatagttctt

SEQ ID NO: 381101 - DNA, 25 bp, Artificial
  probe
  misc_feature (1)..(25): SEQ ID NO: 4372; WAN024FBQ; Start 91; Stop 115
aaactgattttgggtaatagtctgc

SEQ ID NO: 381102 - DNA, 25 bp, Artificial
  probe
  misc_feature (1)..(25): SEQ ID NO: 4372; WAN024FBQ; Start 201; Stop 225
aggtctgctggtcgaaatcaaatag

SEQ ID NO: 381103 - DNA, 25 bp, Artificial
  probe
  misc_feature (1)..(25): SEQ ID NO: 4372; WAN024FBQ; Start 146; Stop 170
gcagtcaggagaatactgatagttc

SEQ ID NO: 381104 - DNA, 25 bp, Artificial
  probe
  misc_feature (1)..(25): SEQ ID NO: 4372; WAN024FBQ; Start 147; Stop 171
cagtcaggagaatactgatagttct

SEQ ID NO: 381105 - DNA, 25 bp, Artificial
  probe
  misc_feature (1)..(25): SEQ ID NO: 4372; WAN024FBQ; Start 6; Stop 30
tcagactagccgatggaaagacaaa

SEQ ID NO: 381106 - DNA, 25 bp, Artificial
  probe
  misc_feature (1)..(25): SEQ ID NO: 4372; WAN024FBQ; Start 145; Stop 169
ggcagtcaggagaatactgatagtt

SEQ ID NO: 381107 - DNA, 25 bp, Artificial
  probe
  misc_feature (1)..(25): SEQ ID NO: 4372; WAN024FBQ; Start 143; Stop 167
gaggcagtcaggagaatactgatag

SEQ ID NO: 381108 - DNA, 25 bp, Artificial
  probe
  misc_feature (1)..(25): SEQ ID NO: 4372; WAN024FBQ; Start 159; Stop 183
tactgatagttcttgggagacggga

SEQ ID NO: 381109 - DNA, 25 bp, Artificial
  probe
  misc_feature (1)..(25): SEQ ID NO: 4372; WAN024FBQ; Start 142; Stop 166
agaggcagtcaggagaatactgata

SEQ ID NO: 381110 - DNA, 25 bp, Artificial
  probe
  misc_feature (1)..(25): SEQ ID NO: 4372; WAN024FBQ; Start 141; Stop 165
tagaggcagtcaggagaatactgat

SEQ ID NO: 381111 - DNA, 25 bp, Artificial
  probe
  misc_feature (1)..(25): SEQ ID NO: 4373; WAN024DMF; Start 138; Stop 162
cgtgattgagatgataattaccgaa

SEQ ID NO: 381112 - DNA, 25 bp, Artificial
  probe
  misc_feature (1)..(25): SEQ ID NO: 4373; WAN024DMF; Start 64; Stop 88
aagatgattgaaggagatcgtgact

SEQ ID NO: 381113 - DNA, 25 bp, Artificial
  probe
  misc_feature (1)..(25): SEQ ID NO: 4373; WAN024DMF; Start 137; Stop 161
gcgtgattgagatgataattaccga

SEQ ID NO: 381114 - DNA, 25 bp, Artificial
  probe
  misc_feature (1)..(25): SEQ ID NO: 4373; WAN024DMF; Start 65; Stop 89
agatgattgaaggagatcgtgactg

SEQ ID NO: 381115 - DNA, 25 bp, Artificial
  probe
  misc_feature (1)..(25): SEQ ID NO: 4373; WAN024DMF; Start 66; Stop 90
gatgattgaaggagatcgtgactgt

SEQ ID NO: 381116 - DNA, 25 bp, Artificial
  probe
  misc_feature (1)..(25): SEQ ID NO: 4373; WAN024DMF; Start 227; Stop 251
aggctatccgatacttgattaaacg

SEQ ID NO: 381117 - DNA, 25 bp, Artificial
  probe
  misc_feature (1)..(25): SEQ ID NO: 4373; WAN024DMF; Start 67; Stop 91
atgattgaaggagatcgtgactgtg

SEQ ID NO: 381118 - DNA, 25 bp, Artificial
  probe
  misc_feature (1)..(25): SEQ ID NO: 4373; WAN024DMF; Start 80; Stop 104
atcgtgactgtgctgatattgtgac

SEQ ID NO: 381119 - DNA, 25 bp, Artificial
  probe
  misc_feature (1)..(25): SEQ ID NO: 4373; WAN024DMF; Start 77; Stop 101
gagatcgtgactgtgctgatattgt

SEQ ID NO: 381120 - DNA, 25 bp, Artificial
  probe
  misc_feature (1)..(25): SEQ ID NO: 4373; WAN024DMF; Start 226; Stop 250
aaggctatccgatacttgattaaac

SEQ ID NO: 381121 - DNA, 25 bp, Artificial
  probe
  misc_feature (1)..(25): SEQ ID NO: 4373; WAN024DMF; Start 79; Stop 103
gatcgtgactgtgctgatattgtga

SEQ ID NO: 381122 - DNA, 25 bp, Artificial
  probe
  misc_feature (1)..(25): SEQ ID NO: 4373; WAN024DMF; Start 78; Stop 102
agatcgtgactgtgctgatattgtg

SEQ ID NO: 381123 - DNA, 25 bp, Artificial
  probe
  misc_feature (1)..(25): SEQ ID NO: 4373; WAN024DMF; Start 63; Stop 87
aaagatgattgaaggagatcgtgac

SEQ ID NO: 381124 - DNA, 25 bp, Artificial
  probe
  misc_feature (1)..(25): SEQ ID NO: 4373; WAN024DMF; Start 225; Stop 249
aaaggctatccgatacttgattaaa

SEQ ID NO: 381125 - DNA, 25 bp, Artificial
  probe
  misc_feature (1)..(25): SEQ ID NO: 4373; WAN024DMF; Start 76; Stop 100
ggagatcgtgactgtgctgatattg

SEQ ID NO: 381126 - DNA, 25 bp, Artificial
  probe
  misc_feature (1)..(25): SEQ ID NO: 4373; WAN024DMF; Start 75; Stop 99
aggagatcgtgactgtgctgatatt

SEQ ID NO: 381127 - DNA, 25 bp, Artificial
  probe
  misc_feature (1)..(25): SEQ ID NO: 4373; WAN024DMF; Start 74; Stop 98
aaggagatcgtgactgtgctgatat

SEQ ID NO: 381128 - DNA, 25 bp, Artificial
  probe
  misc_feature (1)..(25): SEQ ID NO: 4373; WAN024DMF; Start 73; Stop 97
gaaggagatcgtgactgtgctgata

SEQ ID NO: 381129 - DNA, 25 bp, Artificial
  probe
  misc_feature (1)..(25): SEQ ID NO: 4373; WAN024DMF; Start 139; Stop 163
gtgattgagatgataattaccgaaa

SEQ ID NO: 381130 - DNA, 25 bp, Artificial
  probe
  misc_feature (1)..(25): SEQ ID NO: 4373; WAN024DMF; Start 164; Stop 188
atcttactgaatgtatcaatcagcc

SEQ ID NO: 381131 - DNA, 25 bp, Artificial
  probe
  misc_feature (1)..(25): SEQ ID NO: 4373; WAN024DMF; Start 133; Stop 157
gagcgcgtgattgagatgataatta

SEQ ID NO: 381132 - DNA, 25 bp, Artificial
  probe
  misc_feature (1)..(25): SEQ ID NO: 4373; WAN024DMF; Start 222; Stop 246
agaaaaggctatccgatacttgatt

SEQ ID NO: 381133 - DNA, 25 bp, Artificial
  probe
  misc_feature (1)..(25): SEQ ID NO: 4373; WAN024DMF; Start 134; Stop 158
agcgcgtgattgagatgataattac

SEQ ID NO: 381134 - DNA, 25 bp, Artificial
  probe
  misc_feature (1)..(25): SEQ ID NO: 4373; WAN024DMF; Start 221; Stop 245
tagaaaaggctatccgatacttgat

SEQ ID NO: 381135 - DNA, 25 bp, Artificial
  probe
  misc_feature (1)..(25): SEQ ID NO: 4373; WAN024DMF; Start 220; Stop 244
ctagaaaaggctatccgatacttga

SEQ ID NO: 381136 - DNA, 25 bp, Artificial
  probe
  misc_feature (1)..(25): SEQ ID NO: 4373; WAN024DMF; Start 62; Stop 86
aaaagatgattgaaggagatcgtga

SEQ ID NO: 381137 - DNA, 25 bp, Artificial
  probe
  misc_feature (1)..(25): SEQ ID NO: 4373; WAN024DMF; Start 131; Stop 155
tagagcgcgtgattgagatgataat

SEQ ID NO: 381138 - DNA, 25 bp, Artificial
  probe
  misc_feature (1)..(25): SEQ ID NO: 4373; WAN024DMF; Start 223; Stop 247
gaaaaggctatccgatacttgatta

SEQ ID NO: 381139 - DNA, 25 bp, Artificial
  probe
  misc_feature (1)..(25): SEQ ID NO: 4373; WAN024DMF; Start 61; Stop 85
caaaagatgattgaaggagatcgtg

SEQ ID NO: 381140 - DNA, 25 bp, Artificial
  probe
  misc_feature (1)..(25): SEQ ID NO: 4373; WAN024DMF; Start 136; Stop 160
cgcgtgattgagatgataattaccg

SEQ ID NO: 381141 - DNA, 25 bp, Artificial
  probe
  misc_feature (1)..(25): SEQ ID NO: 4373; WAN024DMF; Start 69; Stop 93
gattgaaggagatcgtgactgtgct

SEQ ID NO: 381142 - DNA, 25 bp, Artificial
  probe
  misc_feature (1)..(25): SEQ ID NO: 4373; WAN024DMF; Start 94; Stop 118
gatattgtgacgcaactgacagcag

SEQ ID NO: 381143 - DNA, 25 bp, Artificial
  probe
  misc_feature (1)..(25): SEQ ID NO: 4373; WAN024DMF; Start 92; Stop 116
ctgatattgtgacgcaactgacagc

SEQ ID NO: 381144 - DNA, 25 bp, Artificial
  probe
  misc_feature (1)..(25): SEQ ID NO: 4374; WAN024D5O; Start 656; Stop 680
tagcagtctcttatctcaatatcgc

SEQ ID NO: 381145 - DNA, 25 bp, Artificial
  probe
  misc_feature (1)..(25): SEQ ID NO: 4374; WAN024D5O; Start 661; Stop 685
gtctcttatctcaatatcgctgctg

SEQ ID NO: 381146 - DNA, 25 bp, Artificial
  probe
  misc_feature (1)..(25): SEQ ID NO: 4374; WAN024D5O; Start 660; Stop 684
agtctcttatctcaatatcgctgct

SEQ ID NO: 381147 - DNA, 25 bp, Artificial
  probe
  misc_feature (1)..(25): SEQ ID NO: 4374; WAN024D5O; Start 662; Stop 686
tctcttatctcaatatcgctgctga

SEQ ID NO: 381148 - DNA, 25 bp, Artificial
  probe
  misc_feature (1)..(25): SEQ ID NO: 4374; WAN024D5O; Start 655; Stop 679
ttagcagtctcttatctcaatatcg

SEQ ID NO: 381149 - DNA, 25 bp, Artificial
  probe
  misc_feature (1)..(25): SEQ ID NO: 4374; WAN024D5O; Start 659; Stop 683
cagtctcttatctcaatatcgctgc

SEQ ID NO: 381150 - DNA, 25 bp, Artificial
  probe
  misc_feature (1)..(25): SEQ ID NO: 4374; WAN024D5O; Start 658; Stop 682
gcagtctcttatctcaatatcgctg

SEQ ID NO: 381151 - DNA, 25 bp, Artificial
  probe
  misc_feature (1)..(25): SEQ ID NO: 4374; WAN024D5O; Start 653; Stop 677
gcttagcagtctcttatctcaatat

SEQ ID NO: 381152 - DNA, 25 bp, Artificial
  probe
  misc_feature (1)..(25): SEQ ID NO: 4374; WAN024D5O; Start 290; Stop 314
cttcatccattcgtaagagcttagt

SEQ ID NO: 381153 - DNA, 25 bp, Artificial
  probe
  misc_feature (1)..(25): SEQ ID NO: 4374; WAN024D5O; Start 705; Stop 729
aatgggattggaagaatttcgttac

SEQ ID NO: 381154 - DNA, 25 bp, Artificial
  probe
  misc_feature (1)..(25): SEQ ID NO: 4374; WAN024D5O; Start 704; Stop 728
gaatgggattggaagaatttcgtta

SEQ ID NO: 381155 - DNA, 25 bp, Artificial
  probe
  misc_feature (1)..(25): SEQ ID NO: 4374; WAN024D5O; Start 690; Stop 714
aatagttgttcaaggaatgggattg

SEQ ID NO: 381156 - DNA, 25 bp, Artificial
  probe
  misc_feature (1)..(25): SEQ ID NO: 4374; WAN024D5O; Start 63; Stop 87
caatgagatttcttgtgagatgctg

SEQ ID NO: 381157 - DNA, 25 bp, Artificial
  probe
  misc_feature (1)..(25): SEQ ID NO: 4374; WAN024D5O; Start 700; Stop 724
caaggaatgggattggaagaatttc

SEQ ID NO: 381158 - DNA, 25 bp, Artificial
  probe
  misc_feature (1)..(25): SEQ ID NO: 4374; WAN024D5O; Start 699; Stop 723
tcaaggaatgggattggaagaattt

SEQ ID NO: 381159 - DNA, 25 bp, Artificial
  probe
  misc_feature (1)..(25): SEQ ID NO: 4374; WAN024D5O; Start 698; Stop 722
ttcaaggaatgggattggaagaatt

SEQ ID NO: 381160 - DNA, 25 bp, Artificial
  probe
  misc_feature (1)..(25): SEQ ID NO: 4374; WAN024D5O; Start 689; Stop 713
aaatagttgttcaaggaatgggatt

SEQ ID NO: 381161 - DNA, 25 bp, Artificial
  probe
  misc_feature (1)..(25): SEQ ID NO: 4374; WAN024D5O; Start 691; Stop 715
atagttgttcaaggaatgggattgg

SEQ ID NO: 381162 - DNA, 25 bp, Artificial
  probe
  misc_feature (1)..(25): SEQ ID NO: 4374; WAN024D5O; Start 64; Stop 88
aatgagatttcttgtgagatgctgg

SEQ ID NO: 381163 - DNA, 25 bp, Artificial
  probe
  misc_feature (1)..(25): SEQ ID NO: 4374; WAN024D5O; Start 706; Stop 730
atgggattggaagaatttcgttacc

SEQ ID NO: 381164 - DNA, 25 bp, Artificial
  probe
  misc_feature (1)..(25): SEQ ID NO: 4374; WAN024D5O; Start 697; Stop 721
gttcaaggaatgggattggaagaat

SEQ ID NO: 381165 - DNA, 25 bp, Artificial
  probe
  misc_feature (1)..(25): SEQ ID NO: 4374; WAN024D5O; Start 62; Stop 86
ccaatgagatttcttgtgagatgct

SEQ ID NO: 381166 - DNA, 25 bp, Artificial
  probe
  misc_feature (1)..(25): SEQ ID NO: 4374; WAN024D5O; Start 419; Stop 443
ctaaagatcaagaaacggaggattt

SEQ ID NO: 381167 - DNA, 25 bp, Artificial
  probe
  misc_feature (1)..(25): SEQ ID NO: 4374; WAN024D5O; Start 701; Stop 725
aaggaatgggattggaagaatttcg

SEQ ID NO: 381168 - DNA, 25 bp, Artificial
  probe
  misc_feature (1)..(25): SEQ ID NO: 4374; WAN024D5O; Start 657; Stop 681
agcagtctcttatctcaatatcgct

SEQ ID NO: 381169 - DNA, 25 bp, Artificial
  probe
  misc_feature (1)..(25): SEQ ID NO: 4374; WAN024D5O; Start 418; Stop 442
gctaaagatcaagaaacggaggatt

SEQ ID NO: 381170 - DNA, 25 bp, Artificial
  probe
  misc_feature (1)..(25): SEQ ID NO: 4374; WAN024D5O; Start 61; Stop 85
accaatgagatttcttgtgagatgc

SEQ ID NO: 381171 - DNA, 25 bp, Artificial
  probe
  misc_feature (1)..(25): SEQ ID NO: 4374; WAN024D5O; Start 562; Stop 586
gaattagactggataacagggacag

SEQ ID NO: 381172 - DNA, 25 bp, Artificial
  probe
  misc_feature (1)..(25): SEQ ID NO: 4374; WAN024D5O; Start 420; Stop 444
taaagatcaagaaacggaggatttg

SEQ ID NO: 381173 - DNA, 25 bp, Artificial
  probe
  misc_feature (1)..(25): SEQ ID NO: 4374; WAN024D5O; Start 703; Stop 727
ggaatgggattggaagaatttcgtt

SEQ ID NO: 381174 - DNA, 25 bp, Artificial
  probe
  misc_feature (1)..(25): SEQ ID NO: 4374; WAN024D5O; Start 692; Stop 716
tagttgttcaaggaatgggattgga

SEQ ID NO: 381175 - DNA, 25 bp, Artificial
  probe
  misc_feature (1)..(25): SEQ ID NO: 4374; WAN024D5O; Start 782; Stop 806
ccatcaaaggagaggtttatgaata

SEQ ID NO: 381176 - DNA, 25 bp, Artificial
  probe
  misc_feature (1)..(25): SEQ ID NO: 4374; WAN024D5O; Start 654; Stop 678
cttagcagtctcttatctcaatatc

SEQ ID NO: 381177 - DNA, 25 bp, Artificial
  probe
  misc_feature (1)..(25): SEQ ID NO: 4375; WAN024GC5; Start 441; Stop 465
tcgtagaaccaagaataatcctgtc

SEQ ID NO: 381178 - DNA, 25 bp, Artificial
  probe
  misc_feature (1)..(25): SEQ ID NO: 4375; WAN024GC5; Start 443; Stop 467
gtagaaccaagaataatcctgtcct

SEQ ID NO: 381179 - DNA, 25 bp, Artificial
  probe
  misc_feature (1)..(25): SEQ ID NO: 4375; WAN024GC5; Start 440; Stop 464
atcgtagaaccaagaataatcctgt

SEQ ID NO: 381180 - DNA, 25 bp, Artificial
  probe
  misc_feature (1)..(25): SEQ ID NO: 4375; WAN024GC5; Start 1514; Stop 1538
ttggttctgctgatagtatgattcg

SEQ ID NO: 381181 - DNA, 25 bp, Artificial
  probe
  misc_feature (1)..(25): SEQ ID NO: 4375; WAN024GC5; Start 1517; Stop 1541
gttctgctgatagtatgattcgctt

SEQ ID NO: 381182 - DNA, 25 bp, Artificial
  probe
  misc_feature (1)..(25): SEQ ID NO: 4375; WAN024GC5; Start 442; Stop 466
cgtagaaccaagaataatcctgtcc

SEQ ID NO: 381183 - DNA, 25 bp, Artificial
  probe
  misc_feature (1)..(25): SEQ ID NO: 4375; WAN024GC5; Start 1307; Stop 1331
aagaacaatctcaactcatccatct

SEQ ID NO: 381184 - DNA, 25 bp, Artificial
  probe
  misc_feature (1)..(25): SEQ ID NO: 4375; WAN024GC5; Start 453; Stop 477
gaataatcctgtccttatcggtgaa

SEQ ID NO: 381185 - DNA, 25 bp, Artificial
  probe
  misc_feature (1)..(25): SEQ ID NO: 4375; WAN024GC5; Start 451; Stop 475
aagaataatcctgtccttatcggtg

SEQ ID NO: 381186 - DNA, 25 bp, Artificial
  probe
  misc_feature (1)..(25): SEQ ID NO: 4375; WAN024GC5; Start 450; Stop 474
caagaataatcctgtccttatcggt

SEQ ID NO: 381187 - DNA, 25 bp, Artificial
  probe
  misc_feature (1)..(25): SEQ ID NO: 4375; WAN024GC5; Start 448; Stop 472
accaagaataatcctgtccttatcg

SEQ ID NO: 381188 - DNA, 25 bp, Artificial
  probe
  misc_feature (1)..(25): SEQ ID NO: 4375; WAN024GC5; Start 454; Stop 478
aataatcctgtccttatcggtgaac

SEQ ID NO: 381189 - DNA, 25 bp, Artificial
  probe
  misc_feature (1)..(25): SEQ ID NO: 4375; WAN024GC5; Start 445; Stop 469
agaaccaagaataatcctgtcctta

SEQ ID NO: 381190 - DNA, 25 bp, Artificial
  probe
  misc_feature (1)..(25): SEQ ID NO: 4375; WAN024GC5; Start 444; Stop 468
tagaaccaagaataatcctgtcctt

SEQ ID NO: 381191 - DNA, 25 bp, Artificial
  probe
  misc_feature (1)..(25): SEQ ID NO: 4375; WAN024GC5; Start 439; Stop 463
aatcgtagaaccaagaataatcctg

SEQ ID NO: 381192 - DNA, 25 bp, Artificial
  probe
  misc_feature (1)..(25): SEQ ID NO: 4375; WAN024GC5; Start 438; Stop 462
caatcgtagaaccaagaataatcct

SEQ ID NO: 381193 - DNA, 25 bp, Artificial
  probe
  misc_feature (1)..(25): SEQ ID NO: 4375; WAN024GC5; Start 437; Stop 461
tcaatcgtagaaccaagaataatcc

SEQ ID NO: 381194 - DNA, 25 bp, Artificial
  probe
  misc_feature (1)..(25): SEQ ID NO: 4375; WAN024GC5; Start 1308; Stop 1332
agaacaatctcaactcatccatcta

SEQ ID NO: 381195 - DNA, 25 bp, Artificial
  probe
  misc_feature (1)..(25): SEQ ID NO: 4375; WAN024GC5; Start 452; Stop 476
agaataatcctgtccttatcggtga

SEQ ID NO: 381196 - DNA, 25 bp, Artificial
  probe
  misc_feature (1)..(25): SEQ ID NO: 4375; WAN024GC5; Start 449; Stop 473
ccaagaataatcctgtccttatcgg

SEQ ID NO: 381197 - DNA, 25 bp, Artificial
  probe
  misc_feature (1)..(25): SEQ ID NO: 4375; WAN024GC5; Start 1310; Stop 1334
aacaatctcaactcatccatctagc

SEQ ID NO: 381198 - DNA, 25 bp, Artificial
  probe
  misc_feature (1)..(25): SEQ ID NO: 4375; WAN024GC5; Start 209; Stop 233
gaccttctagcaatactcctcctat

SEQ ID NO: 381199 - DNA, 25 bp, Artificial
  probe
  misc_feature (1)..(25): SEQ ID NO: 4375; WAN024GC5; Start 2130; Stop 2154
cacaatcactgactactaccttgaa

SEQ ID NO: 381200 - DNA, 25 bp, Artificial
  probe
  misc_feature (1)..(25): SEQ ID NO: 4375; WAN024GC5; Start 2128; Stop 2152
gacacaatcactgactactaccttg

SEQ ID NO: 381201 - DNA, 25 bp, Artificial
  probe
  misc_feature (1)..(25): SEQ ID NO: 4375; WAN024GC5; Start 1309; Stop 1333
gaacaatctcaactcatccatctag

SEQ ID NO: 381202 - DNA, 25 bp, Artificial
  probe
  misc_feature (1)..(25): SEQ ID NO: 4375; WAN024GC5; Start 212; Stop 236
cttctagcaatactcctcctattcc

SEQ ID NO: 381203 - DNA, 25 bp, Artificial
  probe
  misc_feature (1)..(25): SEQ ID NO: 4375; WAN024GC5; Start 211; Stop 235
ccttctagcaatactcctcctattc

SEQ ID NO: 381204 - DNA, 25 bp, Artificial
  probe
  misc_feature (1)..(25): SEQ ID NO: 4375; WAN024GC5; Start 210; Stop 234
accttctagcaatactcctcctatt

SEQ ID NO: 381205 - DNA, 25 bp, Artificial
  probe
  misc_feature (1)..(25): SEQ ID NO: 4375; WAN024GC5; Start 1611; Stop 1635
ctatgatgaggctggtcaattaact

SEQ ID NO: 381206 - DNA, 25 bp, Artificial
  probe
  misc_feature (1)..(25): SEQ ID NO: 4375; WAN024GC5; Start 1612; Stop 1636
tatgatgaggctggtcaattaactg

SEQ ID NO: 381207 - DNA, 25 bp, Artificial
  probe
  misc_feature (1)..(25): SEQ ID NO: 4375; WAN024GC5; Start 2123; Stop 2147
ttgaggacacaatcactgactacta

SEQ ID NO: 381208 - DNA, 25 bp, Artificial
  probe
  misc_feature (1)..(25): SEQ ID NO: 4375; WAN024GC5; Start 2127; Stop 2151
ggacacaatcactgactactacctt

SEQ ID NO: 381209 - DNA, 25 bp, Artificial
  probe
  misc_feature (1)..(25): SEQ ID NO: 4375; WAN024GC5; Start 2129; Stop 2153
acacaatcactgactactaccttga

SEQ ID NO: 381210 - DNA, 25 bp, Artificial
  probe
  misc_feature (1)..(25): SEQ ID NO: 4377; WAN024A85; Start 81; Stop 105
taatatcttagattagagcacgggc

SEQ ID NO: 381211 - DNA, 25 bp, Artificial
  probe
  misc_feature (1)..(25): SEQ ID NO: 4377; WAN024A85; Start 68; Stop 92
agctcttcgtcattaatatcttaga

SEQ ID NO: 381212 - DNA, 25 bp, Artificial
  probe
  misc_feature (1)..(25): SEQ ID NO: 4377; WAN024A85; Start 34; Stop 58
agctgacgagaaactttgtatcttt

SEQ ID NO: 381213 - DNA, 25 bp, Artificial
  probe
  misc_feature (1)..(25): SEQ ID NO: 4377; WAN024A85; Start 33; Stop 57
aagctgacgagaaactttgtatctt

SEQ ID NO: 381214 - DNA, 25 bp, Artificial
  probe
  misc_feature (1)..(25): SEQ ID NO: 4377; WAN024A85; Start 80; Stop 104
ttaatatcttagattagagcacggg

SEQ ID NO: 381215 - DNA, 25 bp, Artificial
  probe
  misc_feature (1)..(25): SEQ ID NO: 4377; WAN024A85; Start 83; Stop 107
atatcttagattagagcacgggcta

SEQ ID NO: 381216 - DNA, 25 bp, Artificial
  probe
  misc_feature (1)..(25): SEQ ID NO: 4377; WAN024A85; Start 84; Stop 108
tatcttagattagagcacgggctaa

SEQ ID NO: 381217 - DNA, 25 bp, Artificial
  probe
  misc_feature (1)..(25): SEQ ID NO: 4377; WAN024A85; Start 69; Stop 93
gctcttcgtcattaatatcttagat

SEQ ID NO: 381218 - DNA, 25 bp, Artificial
  probe
  misc_feature (1)..(25): SEQ ID NO: 4377; WAN024A85; Start 82; Stop 106
aatatcttagattagagcacgggct

SEQ ID NO: 381219 - DNA, 25 bp, Artificial
  probe
  misc_feature (1)..(25): SEQ ID NO: 4377; WAN024A85; Start 85; Stop 109
atcttagattagagcacgggctaaa

SEQ ID NO: 381220 - DNA, 25 bp, Artificial
  probe
  misc_feature (1)..(25): SEQ ID NO: 4377; WAN024A85; Start 35; Stop 59
gctgacgagaaactttgtatctttt

SEQ ID NO: 381221 - DNA, 25 bp, Artificial
  probe
  misc_feature (1)..(25): SEQ ID NO: 4377; WAN024A85; Start 28; Stop 52
aaataaagctgacgagaaactttgt

SEQ ID NO: 381222 - DNA, 25 bp, Artificial
  probe
  misc_feature (1)..(25): SEQ ID NO: 4377; WAN024A85; Start 79; Stop 103
attaatatcttagattagagcacgg

SEQ ID NO: 381223 - DNA, 25 bp, Artificial
  probe
  misc_feature (1)..(25): SEQ ID NO: 4377; WAN024A85; Start 31; Stop 55
taaagctgacgagaaactttgtatc

SEQ ID NO: 381224 - DNA, 25 bp, Artificial
  probe
  misc_feature (1)..(25): SEQ ID NO: 4377; WAN024A85; Start 32; Stop 56
aaagctgacgagaaactttgtatct

SEQ ID NO: 381225 - DNA, 25 bp, Artificial
  probe
  misc_feature (1)..(25): SEQ ID NO: 4377; WAN024A85; Start 29; Stop 53
aataaagctgacgagaaactttgta

SEQ ID NO: 381226 - DNA, 25 bp, Artificial
  probe
  misc_feature (1)..(25): SEQ ID NO: 4377; WAN024A85; Start 30; Stop 54
ataaagctgacgagaaactttgtat

SEQ ID NO: 381227 - DNA, 25 bp, Artificial
  probe
  misc_feature (1)..(25): SEQ ID NO: 4377; WAN024A85; Start 41; Stop 65
gagaaactttgtatcttttaggtgc

SEQ ID NO: 381228 - DNA, 25 bp, Artificial
  probe
  misc_feature (1)..(25): SEQ ID NO: 4377; WAN024A85; Start 39; Stop 63
acgagaaactttgtatcttttaggt

SEQ ID NO: 381229 - DNA, 25 bp, Artificial
  probe
  misc_feature (1)..(25): SEQ ID NO: 4377; WAN024A85; Start 40; Stop 64
cgagaaactttgtatcttttaggtg

SEQ ID NO: 381230 - DNA, 25 bp, Artificial
  probe
  misc_feature (1)..(25): SEQ ID NO: 4377; WAN024A85; Start 38; Stop 62
gacgagaaactttgtatcttttagg

SEQ ID NO: 381231 - DNA, 25 bp, Artificial
  probe
  misc_feature (1)..(25): SEQ ID NO: 4377; WAN024A85; Start 37; Stop 61
tgacgagaaactttgtatcttttag

SEQ ID NO: 381232 - DNA, 25 bp, Artificial
  probe
  misc_feature (1)..(25): SEQ ID NO: 4377; WAN024A85; Start 36; Stop 60
ctgacgagaaactttgtatctttta

SEQ ID NO: 381233 - DNA, 25 bp, Artificial
  probe
  misc_feature (1)..(25): SEQ ID NO: 4377; WAN024A85; Start 78; Stop 102
cattaatatcttagattagagcacg

SEQ ID NO: 381234 - DNA, 25 bp, Artificial
  probe
  misc_feature (1)..(25): SEQ ID NO: 4377; WAN024A85; Start 45; Stop 69
aactttgtatcttttaggtgcagag

SEQ ID NO: 381235 - DNA, 25 bp, Artificial
  probe
  misc_feature (1)..(25): SEQ ID NO: 4377; WAN024A85; Start 43; Stop 67
gaaactttgtatcttttaggtgcag

SEQ ID NO: 381236 - DNA, 25 bp, Artificial
  probe
  misc_feature (1)..(25): SEQ ID NO: 4377; WAN024A85; Start 47; Stop 71
ctttgtatcttttaggtgcagagct

SEQ ID NO: 381237 - DNA, 25 bp, Artificial
  probe
  misc_feature (1)..(25): SEQ ID NO: 4377; WAN024A85; Start 44; Stop 68
aaactttgtatcttttaggtgcaga

SEQ ID NO: 381238 - DNA, 25 bp, Artificial
  probe
  misc_feature (1)..(25): SEQ ID NO: 4377; WAN024A85; Start 42; Stop 66
agaaactttgtatcttttaggtgca

SEQ ID NO: 381239 - DNA, 25 bp, Artificial
  probe
  misc_feature (1)..(25): SEQ ID NO: 4377; WAN024A85; Start 46; Stop 70
actttgtatcttttaggtgcagagc

SEQ ID NO: 381240 - DNA, 25 bp, Artificial
  probe
  misc_feature (1)..(25): SEQ ID NO: 4377; WAN024A85; Start 75; Stop 99
cgtcattaatatcttagattagagc

SEQ ID NO: 381241 - DNA, 25 bp, Artificial
  probe
  misc_feature (1)..(25): SEQ ID NO: 4377; WAN024A85; Start 89; Stop 113
tagattagagcacgggctaaaagat

SEQ ID NO: 381242 - DNA, 25 bp, Artificial
  probe
  misc_feature (1)..(25): SEQ ID NO: 4377; WAN024A85; Start 87; Stop 111
cttagattagagcacgggctaaaag

SEQ ID NO: 381243 - DNA, 25 bp, Artificial
  probe
  misc_feature (1)..(25): SEQ ID NO: 4378; WAN0249N3; Start 7; Stop 31
tcactccctttcataaaatcattct

SEQ ID NO: 381244 - DNA, 25 bp, Artificial
  probe
  misc_feature (1)..(25): SEQ ID NO: 4378; WAN0249N3; Start 6; Stop 30
ttcactccctttcataaaatcattc

SEQ ID NO: 381245 - DNA, 25 bp, Artificial
  probe
  misc_feature (1)..(25): SEQ ID NO: 4378; WAN0249N3; Start 8; Stop 32
cactccctttcataaaatcattctt

SEQ ID NO: 381246 - DNA, 25 bp, Artificial
  probe
  misc_feature (1)..(25): SEQ ID NO: 4378; WAN0249N3; Start 5; Stop 29
tttcactccctttcataaaatcatt

SEQ ID NO: 381247 - DNA, 25 bp, Artificial
  probe
  misc_feature (1)..(25): SEQ ID NO: 4378; WAN0249N3; Start 4; Stop 28
ttttcactccctttcataaaatcat

SEQ ID NO: 381248 - DNA, 25 bp, Artificial
  probe
  misc_feature (1)..(25): SEQ ID NO: 4378; WAN0249N3; Start 65; Stop 89
catacgttggggaaatagatctttt

SEQ ID NO: 381249 - DNA, 25 bp, Artificial
  probe
  misc_feature (1)..(25): SEQ ID NO: 4378; WAN0249N3; Start 61; Stop 85
aaaccatacgttggggaaatagatc

SEQ ID NO: 381250 - DNA, 25 bp, Artificial
  probe
  misc_feature (1)..(25): SEQ ID NO: 4378; WAN0249N3; Start 60; Stop 84
caaaccatacgttggggaaatagat

SEQ ID NO: 381251 - DNA, 25 bp, Artificial
  probe
  misc_feature (1)..(25): SEQ ID NO: 4378; WAN0249N3; Start 58; Stop 82
ttcaaaccatacgttggggaaatag

SEQ ID NO: 381252 - DNA, 25 bp, Artificial
  probe
  misc_feature (1)..(25): SEQ ID NO: 4378; WAN0249N3; Start 9; Stop 33
actccctttcataaaatcattctta

SEQ ID NO: 381253 - DNA, 25 bp, Artificial
  probe
  misc_feature (1)..(25): SEQ ID NO: 4378; WAN0249N3; Start 57; Stop 81
tttcaaaccatacgttggggaaata

SEQ ID NO: 381254 - DNA, 25 bp, Artificial
  probe
  misc_feature (1)..(25): SEQ ID NO: 4378; WAN0249N3; Start 59; Stop 83
tcaaaccatacgttggggaaataga

SEQ ID NO: 381255 - DNA, 25 bp, Artificial
  probe
  misc_feature (1)..(25): SEQ ID NO: 4378; WAN0249N3; Start 56; Stop 80
ttttcaaaccatacgttggggaaat

SEQ ID NO: 381256 - DNA, 25 bp, Artificial
  probe
  misc_feature (1)..(25): SEQ ID NO: 4378; WAN0249N3; Start 64; Stop 88
ccatacgttggggaaatagatcttt

SEQ ID NO: 381257 - DNA, 25 bp, Artificial
  probe
  misc_feature (1)..(25): SEQ ID NO: 4378; WAN0249N3; Start 63; Stop 87
accatacgttggggaaatagatctt

SEQ ID NO: 381258 - DNA, 25 bp, Artificial
  probe
  misc_feature (1)..(25): SEQ ID NO: 4378; WAN0249N3; Start 62; Stop 86
aaccatacgttggggaaatagatct

SEQ ID NO: 381259 - DNA, 25 bp, Artificial
  probe
  misc_feature (1)..(25): SEQ ID NO: 4378; WAN0249N3; Start 10; Stop 34
ctccctttcataaaatcattcttaa

SEQ ID NO: 381260 - DNA, 25 bp, Artificial
  probe
  misc_feature (1)..(25): SEQ ID NO: 4378; WAN0249N3; Start 3; Stop 27
attttcactccctttcataaaatca

SEQ ID NO: 381261 - DNA, 25 bp, Artificial
  probe
  misc_feature (1)..(25): SEQ ID NO: 4378; WAN0249N3; Start 2; Stop 26
tattttcactccctttcataaaatc

SEQ ID NO: 381262 - DNA, 25 bp, Artificial
  probe
  misc_feature (1)..(25): SEQ ID NO: 4379; WAN024G5I; Start 777; Stop 801
atattggcaattgtctagcggtaat

SEQ ID NO: 381263 - DNA, 25 bp, Artificial
  probe
  misc_feature (1)..(25): SEQ ID NO: 4379; WAN024G5I; Start 776; Stop 800
gatattggcaattgtctagcggtaa

SEQ ID NO: 381264 - DNA, 25 bp, Artificial
  probe
  misc_feature (1)..(25): SEQ ID NO: 4379; WAN024G5I; Start 762; Stop 786
tcattggttaattagatattggcaa

SEQ ID NO: 381265 - DNA, 25 bp, Artificial
  probe
  misc_feature (1)..(25): SEQ ID NO: 4379; WAN024G5I; Start 761; Stop 785
atcattggttaattagatattggca

SEQ ID NO: 381266 - DNA, 25 bp, Artificial
  probe
  misc_feature (1)..(25): SEQ ID NO: 4379; WAN024G5I; Start 599; Stop 623
tgaagaatatttgtttactgccatg

SEQ ID NO: 381267 - DNA, 25 bp, Artificial
  probe
  misc_feature (1)..(25): SEQ ID NO: 4379; WAN024G5I; Start 778; Stop 802
tattggcaattgtctagcggtaatt

SEQ ID NO: 381268 - DNA, 25 bp, Artificial
  probe
  misc_feature (1)..(25): SEQ ID NO: 4379; WAN024G5I; Start 69; Stop 93
aagaaagtctgaatttgagaaagaa

SEQ ID NO: 381269 - DNA, 25 bp, Artificial
  probe
  misc_feature (1)..(25): SEQ ID NO: 4379; WAN024G5I; Start 68; Stop 92
aaagaaagtctgaatttgagaaaga

SEQ ID NO: 381270 - DNA, 25 bp, Artificial
  probe
  misc_feature (1)..(25): SEQ ID NO: 4379; WAN024G5I; Start 775; Stop 799
agatattggcaattgtctagcggta

SEQ ID NO: 381271 - DNA, 25 bp, Artificial
  probe
  misc_feature (1)..(25): SEQ ID NO: 4379; WAN024G5I; Start 772; Stop 796
attagatattggcaattgtctagcg

SEQ ID NO: 381272 - DNA, 25 bp, Artificial
  probe
  misc_feature (1)..(25): SEQ ID NO: 4379; WAN024G5I; Start 243; Stop 267
aaatcatcctaaattggttcatgtt

SEQ ID NO: 381273 - DNA, 25 bp, Artificial
  probe
  misc_feature (1)..(25): SEQ ID NO: 4379; WAN024G5I; Start 598; Stop 622
ttgaagaatatttgtttactgccat

SEQ ID NO: 381274 - DNA, 25 bp, Artificial
  probe
  misc_feature (1)..(25): SEQ ID NO: 4379; WAN024G5I; Start 597; Stop 621
attgaagaatatttgtttactgcca

SEQ ID NO: 381275 - DNA, 25 bp, Artificial
  probe
  misc_feature (1)..(25): SEQ ID NO: 4379; WAN024G5I; Start 773; Stop 797
ttagatattggcaattgtctagcgg

SEQ ID NO: 381276 - DNA, 25 bp, Artificial
  probe
  misc_feature (1)..(25): SEQ ID NO: 4379; WAN024G5I; Start 70; Stop 94
agaaagtctgaatttgagaaagaat

SEQ ID NO: 381277 - DNA, 25 bp, Artificial
  probe
  misc_feature (1)..(25): SEQ ID NO: 4379; WAN024G5I; Start 240; Stop 264
tgtaaatcatcctaaattggttcat

SEQ ID NO: 381278 - DNA, 25 bp, Artificial
  probe
  misc_feature (1)..(25): SEQ ID NO: 4379; WAN024G5I; Start 239; Stop 263
atgtaaatcatcctaaattggttca

SEQ ID NO: 381279 - DNA, 25 bp, Artificial
  probe
  misc_feature (1)..(25): SEQ ID NO: 4379; WAN024G5I; Start 621; Stop 645
atggtcagatttgttaggcttttat

SEQ ID NO: 381280 - DNA, 25 bp, Artificial
  probe
  misc_feature (1)..(25): SEQ ID NO: 4379; WAN024G5I; Start 247; Stop 271
catcctaaattggttcatgttaaac

SEQ ID NO: 381281 - DNA, 25 bp, Artificial
  probe
  misc_feature (1)..(25): SEQ ID NO: 4379; WAN024G5I; Start 246; Stop 270
tcatcctaaattggttcatgttaaa

SEQ ID NO: 381282 - DNA, 25 bp, Artificial
  probe
  misc_feature (1)..(25): SEQ ID NO: 4379; WAN024G5I; Start 774; Stop 798
tagatattggcaattgtctagcggt

SEQ ID NO: 381283 - DNA, 25 bp, Artificial
  probe
  misc_feature (1)..(25): SEQ ID NO: 4379; WAN024G5I; Start 57; Stop 81
agattggtgtaaaagaaagtctgaa

SEQ ID NO: 381284 - DNA, 25 bp, Artificial
  probe
  misc_feature (1)..(25): SEQ ID NO: 4379; WAN024G5I; Start 620; Stop 644
catggtcagatttgttaggctttta

SEQ ID NO: 381285 - DNA, 25 bp, Artificial
  probe
  misc_feature (1)..(25): SEQ ID NO: 4379; WAN024G5I; Start 248; Stop 272
atcctaaattggttcatgttaaaca

SEQ ID NO: 381286 - DNA, 25 bp, Artificial
  probe
  misc_feature (1)..(25): SEQ ID NO: 4379; WAN024G5I; Start 760; Stop 784
aatcattggttaattagatattggc

SEQ ID NO: 381287 - DNA, 25 bp, Artificial
  probe
  misc_feature (1)..(25): SEQ ID NO: 4379; WAN024G5I; Start 245; Stop 269
atcatcctaaattggttcatgttaa

SEQ ID NO: 381288 - DNA, 25 bp, Artificial
  probe
  misc_feature (1)..(25): SEQ ID NO: 4379; WAN024G5I; Start 244; Stop 268
aatcatcctaaattggttcatgtta

SEQ ID NO: 381289 - DNA, 25 bp, Artificial
  probe
  misc_feature (1)..(25): SEQ ID NO: 4379; WAN024G5I; Start 242; Stop 266
taaatcatcctaaattggttcatgt

SEQ ID NO: 381290 - DNA, 25 bp, Artificial
  probe
  misc_feature (1)..(25): SEQ ID NO: 4379; WAN024G5I; Start 649; Stop 673
agtcatattccagtaagttattgta

SEQ ID NO: 381291 - DNA, 25 bp, Artificial
  probe
  misc_feature (1)..(25): SEQ ID NO: 4379; WAN024G5I; Start 648; Stop 672
tagtcatattccagtaagttattgt

SEQ ID NO: 381292 - DNA, 25 bp, Artificial
  probe
  misc_feature (1)..(25): SEQ ID NO: 4379; WAN024G5I; Start 54; Stop 78
tgtagattggtgtaaaagaaagtct

SEQ ID NO: 381293 - DNA, 25 bp, Artificial
  probe
  misc_feature (1)..(25): SEQ ID NO: 4379; WAN024G5I; Start 785; Stop 809
aattgtctagcggtaatttcatacc

SEQ ID NO: 381294 - DNA, 25 bp, Artificial
  probe
  misc_feature (1)..(25): SEQ ID NO: 4379; WAN024G5I; Start 61; Stop 85
tggtgtaaaagaaagtctgaatttg

SEQ ID NO: 381295 - DNA, 25 bp, Artificial
  probe
  misc_feature (1)..(25): SEQ ID NO: 4380; WAN024DJJ; Start 1157; Stop 1181
ccattgttgctaatcgctatgataa

SEQ ID NO: 381296 - DNA, 25 bp, Artificial
  probe
  misc_feature (1)..(25): SEQ ID NO: 4380; WAN024DJJ; Start 1160; Stop 1184
ttgttgctaatcgctatgataactc

SEQ ID NO: 381297 - DNA, 25 bp, Artificial
  probe
  misc_feature (1)..(25): SEQ ID NO: 4380; WAN024DJJ; Start 1147; Stop 1171
ctgagtaatgccattgttgctaatc

SEQ ID NO: 381298 - DNA, 25 bp, Artificial
  probe
  misc_feature (1)..(25): SEQ ID NO: 4380; WAN024DJJ; Start 355; Stop 379
gttccagttggttatacagagtcag

SEQ ID NO: 381299 - DNA, 25 bp, Artificial
  probe
  misc_feature (1)..(25): SEQ ID NO: 4380; WAN024DJJ; Start 1161; Stop 1185
tgttgctaatcgctatgataactca

SEQ ID NO: 381300 - DNA, 25 bp, Artificial
  probe
  misc_feature (1)..(25): SEQ ID NO: 4380; WAN024DJJ; Start 1158; Stop 1182
cattgttgctaatcgctatgataac

SEQ ID NO: 381301 - DNA, 25 bp, Artificial
  probe
  misc_feature (1)..(25): SEQ ID NO: 4380; WAN024DJJ; Start 1146; Stop 1170
actgagtaatgccattgttgctaat

SEQ ID NO: 381302 - DNA, 25 bp, Artificial
  probe
  misc_feature (1)..(25): SEQ ID NO: 4380; WAN024DJJ; Start 1159; Stop 1183
attgttgctaatcgctatgataact

SEQ ID NO: 381303 - DNA, 25 bp, Artificial
  probe
  misc_feature (1)..(25): SEQ ID NO: 4380; WAN024DJJ; Start 1152; Stop 1176
taatgccattgttgctaatcgctat

SEQ ID NO: 381304 - DNA, 25 bp, Artificial
  probe
  misc_feature (1)..(25): SEQ ID NO: 4380; WAN024DJJ; Start 978; Stop 1002
attgaccatgaagagtaatagcgat

SEQ ID NO: 381305 - DNA, 25 bp, Artificial
  probe
  misc_feature (1)..(25): SEQ ID NO: 4380; WAN024DJJ; Start 1156; Stop 1180
gccattgttgctaatcgctatgata

SEQ ID NO: 381306 - DNA, 25 bp, Artificial
  probe
  misc_feature (1)..(25): SEQ ID NO: 4380; WAN024DJJ; Start 977; Stop 1001
gattgaccatgaagagtaatagcga

SEQ ID NO: 381307 - DNA, 25 bp, Artificial
  probe
  misc_feature (1)..(25): SEQ ID NO: 4380; WAN024DJJ; Start 976; Stop 1000
agattgaccatgaagagtaatagcg

SEQ ID NO: 381308 - DNA, 25 bp, Artificial
  probe
  misc_feature (1)..(25): SEQ ID NO: 4380; WAN024DJJ; Start 980; Stop 1004
tgaccatgaagagtaatagcgataa

SEQ ID NO: 381309 - DNA, 25 bp, Artificial
  probe
  misc_feature (1)..(25): SEQ ID NO: 4380; WAN024DJJ; Start 979; Stop 1003
ttgaccatgaagagtaatagcgata

SEQ ID NO: 381310 - DNA, 25 bp, Artificial
  probe
  misc_feature (1)..(25): SEQ ID NO: 4380; WAN024DJJ; Start 1145; Stop 1169
gactgagtaatgccattgttgctaa

SEQ ID NO: 381311 - DNA, 25 bp, Artificial
  probe
  misc_feature (1)..(25): SEQ ID NO: 4380; WAN024DJJ; Start 282; Stop 306
ttctgctgtagagtctgtcattgaa

SEQ ID NO: 381312 - DNA, 25 bp, Artificial
  probe
  misc_feature (1)..(25): SEQ ID NO: 4380; WAN024DJJ; Start 1148; Stop 1172
tgagtaatgccattgttgctaatcg

SEQ ID NO: 381313 - DNA, 25 bp, Artificial
  probe
  misc_feature (1)..(25): SEQ ID NO: 4380; WAN024DJJ; Start 281; Stop 305
cttctgctgtagagtctgtcattga

SEQ ID NO: 381314 - DNA, 25 bp, Artificial
  probe
  misc_feature (1)..(25): SEQ ID NO: 4380; WAN024DJJ; Start 1151; Stop 1175
gtaatgccattgttgctaatcgcta

SEQ ID NO: 381315 - DNA, 25 bp, Artificial
  probe
  misc_feature (1)..(25): SEQ ID NO: 4380; WAN024DJJ; Start 981; Stop 1005
gaccatgaagagtaatagcgataat

SEQ ID NO: 381316 - DNA, 25 bp, Artificial
  probe
  misc_feature (1)..(25): SEQ ID NO: 4380; WAN024DJJ; Start 654; Stop 678
tgagctggatacttattctgagatg

SEQ ID NO: 381317 - DNA, 25 bp, Artificial
  probe
  misc_feature (1)..(25): SEQ ID NO: 4380; WAN024DJJ; Start 655; Stop 679
gagctggatacttattctgagatga

SEQ ID NO: 381318 - DNA, 25 bp, Artificial
  probe
  misc_feature (1)..(25): SEQ ID NO: 4380; WAN024DJJ; Start 356; Stop 380
ttccagttggttatacagagtcagc

SEQ ID NO: 381319 - DNA, 25 bp, Artificial
  probe
  misc_feature (1)..(25): SEQ ID NO: 4380; WAN024DJJ; Start 652; Stop 676
aatgagctggatacttattctgaga

SEQ ID NO: 381320 - DNA, 25 bp, Artificial
  probe
  misc_feature (1)..(25): SEQ ID NO: 4380; WAN024DJJ; Start 653; Stop 677
atgagctggatacttattctgagat

SEQ ID NO: 381321 - DNA, 25 bp, Artificial
  probe
  misc_feature (1)..(25): SEQ ID NO: 4380; WAN024DJJ; Start 975; Stop 999
tagattgaccatgaagagtaatagc

SEQ ID NO: 381322 - DNA, 25 bp, Artificial
  probe
  misc_feature (1)..(25): SEQ ID NO: 4380; WAN024DJJ; Start 280; Stop 304
acttctgctgtagagtctgtcattg

SEQ ID NO: 381323 - DNA, 25 bp, Artificial
  probe
  misc_feature (1)..(25): SEQ ID NO: 4380; WAN024DJJ; Start 279; Stop 303
cacttctgctgtagagtctgtcatt

SEQ ID NO: 381324 - DNA, 25 bp, Artificial
  probe
  misc_feature (1)..(25): SEQ ID NO: 4380; WAN024DJJ; Start 1179; Stop 1203
taactcattagaagatgtcaaggaa

SEQ ID NO: 381325 - DNA, 25 bp, Artificial
  probe
  misc_feature (1)..(25): SEQ ID NO: 4380; WAN024DJJ; Start 694; Stop 718
caagctattattgatggagttggtt

SEQ ID NO: 381326 - DNA, 25 bp, Artificial
  probe
  misc_feature (1)..(25): SEQ ID NO: 4380; WAN024DJJ; Start 982; Stop 1006
accatgaagagtaatagcgataatt

SEQ ID NO: 381327 - DNA, 25 bp, Artificial
  probe
  misc_feature (1)..(25): SEQ ID NO: 4380; WAN024DJJ; Start 697; Stop 721
gctattattgatggagttggtttgg

SEQ ID NO: 381328 - DNA, 25 bp, Artificial
  probe
  misc_feature (1)..(25): SEQ ID NO: 4381; WAN024FWR; Start 400; Stop 424
ttgcgagactattggctagaatatc

SEQ ID NO: 381329 - DNA, 25 bp, Artificial
  probe
  misc_feature (1)..(25): SEQ ID NO: 4381; WAN024FWR; Start 399; Stop 423
cttgcgagactattggctagaatat

SEQ ID NO: 381330 - DNA, 25 bp, Artificial
  probe
  misc_feature (1)..(25): SEQ ID NO: 4381; WAN024FWR; Start 976; Stop 1000
atcacttcagatagaggtggattac

SEQ ID NO: 381331 - DNA, 25 bp, Artificial
  probe
  misc_feature (1)..(25): SEQ ID NO: 4381; WAN024FWR; Start 975; Stop 999
catcacttcagatagaggtggatta

SEQ ID NO: 381332 - DNA, 25 bp, Artificial
  probe
  misc_feature (1)..(25): SEQ ID NO: 4381; WAN024FWR; Start 974; Stop 998
tcatcacttcagatagaggtggatt

SEQ ID NO: 381333 - DNA, 25 bp, Artificial
  probe
  misc_feature (1)..(25): SEQ ID NO: 4381; WAN024FWR; Start 401; Stop 425
tgcgagactattggctagaatatcc

SEQ ID NO: 381334 - DNA, 25 bp, Artificial
  probe
  misc_feature (1)..(25): SEQ ID NO: 4381; WAN024FWR; Start 398; Stop 422
ccttgcgagactattggctagaata

SEQ ID NO: 381335 - DNA, 25 bp, Artificial
  probe
  misc_feature (1)..(25): SEQ ID NO: 4381; WAN024FWR; Start 973; Stop 997
gtcatcacttcagatagaggtggat

SEQ ID NO: 381336 - DNA, 25 bp, Artificial
  probe
  misc_feature (1)..(25): SEQ ID NO: 4381; WAN024FWR; Start 403; Stop 427
cgagactattggctagaatatccat

SEQ ID NO: 381337 - DNA, 25 bp, Artificial
  probe
  misc_feature (1)..(25): SEQ ID NO: 4381; WAN024FWR; Start 977; Stop 1001
tcacttcagatagaggtggattacc

SEQ ID NO: 381338 - DNA, 25 bp, Artificial
  probe
  misc_feature (1)..(25): SEQ ID NO: 4381; WAN024FWR; Start 929; Stop 953
cgtttggtagagttgtaattgaagg

SEQ ID NO: 381339 - DNA, 25 bp, Artificial
  probe
  misc_feature (1)..(25): SEQ ID NO: 4381; WAN024FWR; Start 928; Stop 952
ccgtttggtagagttgtaattgaag

SEQ ID NO: 381340 - DNA, 25 bp, Artificial
  probe
  misc_feature (1)..(25): SEQ ID NO: 4381; WAN024FWR; Start 930; Stop 954
gtttggtagagttgtaattgaagga

SEQ ID NO: 381341 - DNA, 25 bp, Artificial
  probe
  misc_feature (1)..(25): SEQ ID NO: 4381; WAN024FWR; Start 402; Stop 426
gcgagactattggctagaatatcca

SEQ ID NO: 381342 - DNA, 25 bp, Artificial
  probe
  misc_feature (1)..(25): SEQ ID NO: 4381; WAN024FWR; Start 935; Stop 959
gtagagttgtaattgaaggaaatgc

SEQ ID NO: 381343 - DNA, 25 bp, Artificial
  probe
  misc_feature (1)..(25): SEQ ID NO: 4381; WAN024FWR; Start 700; Stop 724
tctatacttgaaataaagggcgttt

SEQ ID NO: 381344 - DNA, 25 bp, Artificial
  probe
  misc_feature (1)..(25): SEQ ID NO: 4381; WAN024FWR; Start 404; Stop 428
gagactattggctagaatatccatg

SEQ ID NO: 381345 - DNA, 25 bp, Artificial
  probe
  misc_feature (1)..(25): SEQ ID NO: 4381; WAN024FWR; Start 932; Stop 956
ttggtagagttgtaattgaaggaaa

SEQ ID NO: 381346 - DNA, 25 bp, Artificial
  probe
  misc_feature (1)..(25): SEQ ID NO: 4381; WAN024FWR; Start 931; Stop 955
tttggtagagttgtaattgaaggaa

SEQ ID NO: 381347 - DNA, 25 bp, Artificial
  probe
  misc_feature (1)..(25): SEQ ID NO: 4381; WAN024FWR; Start 933; Stop 957
tggtagagttgtaattgaaggaaat

SEQ ID NO: 381348 - DNA, 25 bp, Artificial
  probe
  misc_feature (1)..(25): SEQ ID NO: 4381; WAN024FWR; Start 934; Stop 958
ggtagagttgtaattgaaggaaatg

SEQ ID NO: 381349 - DNA, 25 bp, Artificial
  probe
  misc_feature (1)..(25): SEQ ID NO: 4381; WAN024FWR; Start 397; Stop 421
accttgcgagactattggctagaat

SEQ ID NO: 381350 - DNA, 25 bp, Artificial
  probe
  misc_feature (1)..(25): SEQ ID NO: 4381; WAN024FWR; Start 558; Stop 582
aggatttattaacccatcttctcaa

SEQ ID NO: 381351 - DNA, 25 bp, Artificial
  probe
  misc_feature (1)..(25): SEQ ID NO: 4381; WAN024FWR; Start 557; Stop 581
aaggatttattaacccatcttctca

SEQ ID NO: 381352 - DNA, 25 bp, Artificial
  probe
  misc_feature (1)..(25): SEQ ID NO: 4381; WAN024FWR; Start 925; Stop 949
gaaccgtttggtagagttgtaattg

SEQ ID NO: 381353 - DNA, 25 bp, Artificial
  probe
  misc_feature (1)..(25): SEQ ID NO: 4381; WAN024FWR; Start 923; Stop 947
atgaaccgtttggtagagttgtaat

SEQ ID NO: 381354 - DNA, 25 bp, Artificial
  probe
  misc_feature (1)..(25): SEQ ID NO: 4381; WAN024FWR; Start 927; Stop 951
accgtttggtagagttgtaattgaa

SEQ ID NO: 381355 - DNA, 25 bp, Artificial
  probe
  misc_feature (1)..(25): SEQ ID NO: 4381; WAN024FWR; Start 926; Stop 950
aaccgtttggtagagttgtaattga

SEQ ID NO: 381356 - DNA, 25 bp, Artificial
  probe
  misc_feature (1)..(25): SEQ ID NO: 4381; WAN024FWR; Start 924; Stop 948
tgaaccgtttggtagagttgtaatt

SEQ ID NO: 381357 - DNA, 25 bp, Artificial
  probe
  misc_feature (1)..(25): SEQ ID NO: 4381; WAN024FWR; Start 252; Stop 276
tgaaacctataatgtatttgcgaaa

SEQ ID NO: 381358 - DNA, 25 bp, Artificial
  probe
  misc_feature (1)..(25): SEQ ID NO: 4381; WAN024FWR; Start 251; Stop 275
ttgaaacctataatgtatttgcgaa

SEQ ID NO: 381359 - DNA, 25 bp, Artificial
  probe
  misc_feature (1)..(25): SEQ ID NO: 4381; WAN024FWR; Start 250; Stop 274
tttgaaacctataatgtatttgcga

SEQ ID NO: 381360 - DNA, 25 bp, Artificial
  probe
  misc_feature (1)..(25): SEQ ID NO: 4381; WAN024FWR; Start 922; Stop 946
gatgaaccgtttggtagagttgtaa

SEQ ID NO: 381361 - DNA, 25 bp, Artificial
  probe
  misc_feature (1)..(25): SEQ ID NO: 4382; WAN024G5N; Start 192; Stop 216
atttgtaaatatgcccttcttgagc

SEQ ID NO: 381362 - DNA, 25 bp, Artificial
  probe
  misc_feature (1)..(25): SEQ ID NO: 4382; WAN024G5N; Start 63; Stop 87
aaagtccatccttccatttcttctc

SEQ ID NO: 381363 - DNA, 25 bp, Artificial
  probe
  misc_feature (1)..(25): SEQ ID NO: 4382; WAN024G5N; Start 62; Stop 86
caaagtccatccttccatttcttct

SEQ ID NO: 381364 - DNA, 25 bp, Artificial
  probe
  misc_feature (1)..(25): SEQ ID NO: 4382; WAN024G5N; Start 193; Stop 217
tttgtaaatatgcccttcttgagcc

SEQ ID NO: 381365 - DNA, 25 bp, Artificial
  probe
  misc_feature (1)..(25): SEQ ID NO: 4382; WAN024G5N; Start 64; Stop 88
aagtccatccttccatttcttctca

SEQ ID NO: 381366 - DNA, 25 bp, Artificial
  probe
  misc_feature (1)..(25): SEQ ID NO: 4382; WAN024G5N; Start 65; Stop 89
agtccatccttccatttcttctcag

SEQ ID NO: 381367 - DNA, 25 bp, Artificial
  probe
  misc_feature (1)..(25): SEQ ID NO: 4382; WAN024G5N; Start 61; Stop 85
ccaaagtccatccttccatttcttc

SEQ ID NO: 381368 - DNA, 25 bp, Artificial
  probe
  misc_feature (1)..(25): SEQ ID NO: 4382; WAN024G5N; Start 196; Stop 220
gtaaatatgcccttcttgagccata

SEQ ID NO: 381369 - DNA, 25 bp, Artificial
  probe
  misc_feature (1)..(25): SEQ ID NO: 4382; WAN024G5N; Start 195; Stop 219
tgtaaatatgcccttcttgagccat

SEQ ID NO: 381370 - DNA, 25 bp, Artificial
  probe
  misc_feature (1)..(25): SEQ ID NO: 4382; WAN024G5N; Start 194; Stop 218
ttgtaaatatgcccttcttgagcca

SEQ ID NO: 381371 - DNA, 25 bp, Artificial
  probe
  misc_feature (1)..(25): SEQ ID NO: 4382; WAN024G5N; Start 248; Stop 272
tcatttcttaccattggaatctgat

SEQ ID NO: 381372 - DNA, 25 bp, Artificial
  probe
  misc_feature (1)..(25): SEQ ID NO: 4382; WAN024G5N; Start 247; Stop 271
atcatttcttaccattggaatctga

SEQ ID NO: 381373 - DNA, 25 bp, Artificial
  probe
  misc_feature (1)..(25): SEQ ID NO: 4382; WAN024G5N; Start 210; Stop 234
cttgagccatattggtaaagacttc

SEQ ID NO: 381374 - DNA, 25 bp, Artificial
  probe
  misc_feature (1)..(25): SEQ ID NO: 4382; WAN024G5N; Start 211; Stop 235
ttgagccatattggtaaagacttcc

SEQ ID NO: 381375 - DNA, 25 bp, Artificial
  probe
  misc_feature (1)..(25): SEQ ID NO: 4382; WAN024G5N; Start 217; Stop 241
catattggtaaagacttcccagacc

SEQ ID NO: 381376 - DNA, 25 bp, Artificial
  probe
  misc_feature (1)..(25): SEQ ID NO: 4382; WAN024G5N; Start 216; Stop 240
ccatattggtaaagacttcccagac

SEQ ID NO: 381377 - DNA, 25 bp, Artificial
  probe
  misc_feature (1)..(25): SEQ ID NO: 4382; WAN024G5N; Start 249; Stop 273
catttcttaccattggaatctgatt

SEQ ID NO: 381378 - DNA, 25 bp, Artificial
  probe
  misc_feature (1)..(25): SEQ ID NO: 4382; WAN024G5N; Start 246; Stop 270
aatcatttcttaccattggaatctg

SEQ ID NO: 381379 - DNA, 25 bp, Artificial
  probe
  misc_feature (1)..(25): SEQ ID NO: 4382; WAN024G5N; Start 83; Stop 107
ttctcaggaagctctgttacgattg

SEQ ID NO: 381380 - DNA, 25 bp, Artificial
  probe
  misc_feature (1)..(25): SEQ ID NO: 4382; WAN024G5N; Start 205; Stop 229
cccttcttgagccatattggtaaag

SEQ ID NO: 381381 - DNA, 25 bp, Artificial
  probe
  misc_feature (1)..(25): SEQ ID NO: 4382; WAN024G5N; Start 218; Stop 242
atattggtaaagacttcccagaccc

SEQ ID NO: 381382 - DNA, 25 bp, Artificial
  probe
  misc_feature (1)..(25): SEQ ID NO: 4382; WAN024G5N; Start 209; Stop 233
tcttgagccatattggtaaagactt

SEQ ID NO: 381383 - DNA, 25 bp, Artificial
  probe
  misc_feature (1)..(25): SEQ ID NO: 4382; WAN024G5N; Start 208; Stop 232
ttcttgagccatattggtaaagact

SEQ ID NO: 381384 - DNA, 25 bp, Artificial
  probe
  misc_feature (1)..(25): SEQ ID NO: 4382; WAN024G5N; Start 207; Stop 231
cttcttgagccatattggtaaagac

SEQ ID NO: 381385 - DNA, 25 bp, Artificial
  probe
  misc_feature (1)..(25): SEQ ID NO: 4382; WAN024G5N; Start 206; Stop 230
ccttcttgagccatattggtaaaga

SEQ ID NO: 381386 - DNA, 25 bp, Artificial
  probe
  misc_feature (1)..(25): SEQ ID NO: 4382; WAN024G5N; Start 176; Stop 200
tgacgtgtgacatgatatttgtaaa

SEQ ID NO: 381387 - DNA, 25 bp, Artificial
  probe
  misc_feature (1)..(25): SEQ ID NO: 4382; WAN024G5N; Start 175; Stop 199
ttgacgtgtgacatgatatttgtaa

SEQ ID NO: 381388 - DNA, 25 bp, Artificial
  probe
  misc_feature (1)..(25): SEQ ID NO: 4382; WAN024G5N; Start 174; Stop 198
tttgacgtgtgacatgatatttgta

SEQ ID NO: 381389 - DNA, 25 bp, Artificial
  probe
  misc_feature (1)..(25): SEQ ID NO: 4382; WAN024G5N; Start 191; Stop 215
tatttgtaaatatgcccttcttgag

SEQ ID NO: 381390 - DNA, 25 bp, Artificial
  probe
  misc_feature (1)..(25): SEQ ID NO: 4382; WAN024G5N; Start 250; Stop 274
atttcttaccattggaatctgattt

SEQ ID NO: 381391 - DNA, 25 bp, Artificial
  probe
  misc_feature (1)..(25): SEQ ID NO: 4382; WAN024G5N; Start 245; Stop 269
aaatcatttcttaccattggaatct

SEQ ID NO: 381392 - DNA, 25 bp, Artificial
  probe
  misc_feature (1)..(25): SEQ ID NO: 4382; WAN024G5N; Start 238; Stop 262
gaccccaaaatcatttcttaccatt

SEQ ID NO: 381393 - DNA, 25 bp, Artificial
  probe
  misc_feature (1)..(25): SEQ ID NO: 4382; WAN024G5N; Start 215; Stop 239
gccatattggtaaagacttcccaga

SEQ ID NO: 381394 - DNA, 25 bp, Artificial
  probe
  misc_feature (1)..(25): SEQ ID NO: 4383; WAN024GF6; Start 227; Stop 251
cagttcaagttgtaggcaccgataa

SEQ ID NO: 381395 - DNA, 25 bp, Artificial
  probe
  misc_feature (1)..(25): SEQ ID NO: 4383; WAN024GF6; Start 228; Stop 252
agttcaagttgtaggcaccgataac

SEQ ID NO: 381396 - DNA, 25 bp, Artificial
  probe
  misc_feature (1)..(25): SEQ ID NO: 4383; WAN024GF6; Start 230; Stop 254
ttcaagttgtaggcaccgataacag

SEQ ID NO: 381397 - DNA, 25 bp, Artificial
  probe
  misc_feature (1)..(25): SEQ ID NO: 4383; WAN024GF6; Start 229; Stop 253
gttcaagttgtaggcaccgataaca

SEQ ID NO: 381398 - DNA, 25 bp, Artificial
  probe
  misc_feature (1)..(25): SEQ ID NO: 4383; WAN024GF6; Start 232; Stop 256
caagttgtaggcaccgataacagtc

SEQ ID NO: 381399 - DNA, 25 bp, Artificial
  probe
  misc_feature (1)..(25): SEQ ID NO: 4383; WAN024GF6; Start 231; Stop 255
tcaagttgtaggcaccgataacagt

SEQ ID NO: 381400 - DNA, 25 bp, Artificial
  probe
  misc_feature (1)..(25): SEQ ID NO: 4383; WAN024GF6; Start 201; Stop 225
tttgtttgattggttgaagggtttt

SEQ ID NO: 381401 - DNA, 25 bp, Artificial
  probe
  misc_feature (1)..(25): SEQ ID NO: 4383; WAN024GF6; Start 200; Stop 224
ttttgtttgattggttgaagggttt

SEQ ID NO: 381402 - DNA, 25 bp, Artificial
  probe
  misc_feature (1)..(25): SEQ ID NO: 4383; WAN024GF6; Start 197; Stop 221
atcttttgtttgattggttgaaggg

SEQ ID NO: 381403 - DNA, 25 bp, Artificial
  probe
  misc_feature (1)..(25): SEQ ID NO: 4383; WAN024GF6; Start 202; Stop 226
ttgtttgattggttgaagggttttc

SEQ ID NO: 381404 - DNA, 25 bp, Artificial
  probe
  misc_feature (1)..(25): SEQ ID NO: 4383; WAN024GF6; Start 199; Stop 223
cttttgtttgattggttgaagggtt

SEQ ID NO: 381405 - DNA, 25 bp, Artificial
  probe
  misc_feature (1)..(25): SEQ ID NO: 4383; WAN024GF6; Start 226; Stop 250
ccagttcaagttgtaggcaccgata

SEQ ID NO: 381406 - DNA, 25 bp, Artificial
  probe
  misc_feature (1)..(25): SEQ ID NO: 4383; WAN024GF6; Start 217; Stop 241
aagggttttccagttcaagttgtag

SEQ ID NO: 381407 - DNA, 25 bp, Artificial
  probe
  misc_feature (1)..(25): SEQ ID NO: 4383; WAN024GF6; Start 216; Stop 240
gaagggttttccagttcaagttgta

SEQ ID NO: 381408 - DNA, 25 bp, Artificial
  probe
  misc_feature (1)..(25): SEQ ID NO: 4383; WAN024GF6; Start 198; Stop 222
tcttttgtttgattggttgaagggt

SEQ ID NO: 381409 - DNA, 25 bp, Artificial
  probe
  misc_feature (1)..(25): SEQ ID NO: 4383; WAN024GF6; Start 233; Stop 257
aagttgtaggcaccgataacagtcc

SEQ ID NO: 381410 - DNA, 25 bp, Artificial
  probe
  misc_feature (1)..(25): SEQ ID NO: 4383; WAN024GF6; Start 203; Stop 227
tgtttgattggttgaagggttttcc

SEQ ID NO: 381411 - DNA, 25 bp, Artificial
  probe
  misc_feature (1)..(25): SEQ ID NO: 4383; WAN024GF6; Start 221; Stop 245
gttttccagttcaagttgtaggcac

SEQ ID NO: 381412 - DNA, 25 bp, Artificial
  probe
  misc_feature (1)..(25): SEQ ID NO: 4383; WAN024GF6; Start 196; Stop 220
aatcttttgtttgattggttgaagg

SEQ ID NO: 381413 - DNA, 25 bp, Artificial
  probe
  misc_feature (1)..(25): SEQ ID NO: 4383; WAN024GF6; Start 218; Stop 242
agggttttccagttcaagttgtagg

SEQ ID NO: 381414 - DNA, 25 bp, Artificial
  probe
  misc_feature (1)..(25): SEQ ID NO: 4383; WAN024GF6; Start 248; Stop 272
ataacagtccctttgtcacggtcaa

SEQ ID NO: 381415 - DNA, 25 bp, Artificial
  probe
  misc_feature (1)..(25): SEQ ID NO: 4383; WAN024GF6; Start 147; Stop 171
ctacgttggcatcattatcgatgaa

SEQ ID NO: 381416 - DNA, 25 bp, Artificial
  probe
  misc_feature (1)..(25): SEQ ID NO: 4383; WAN024GF6; Start 92; Stop 116
aagacaacgtctggttggttatctc

SEQ ID NO: 381417 - DNA, 25 bp, Artificial
  probe
  misc_feature (1)..(25): SEQ ID NO: 4383; WAN024GF6; Start 205; Stop 229
tttgattggttgaagggttttccag

SEQ ID NO: 381418 - DNA, 25 bp, Artificial
  probe
  misc_feature (1)..(25): SEQ ID NO: 4383; WAN024GF6; Start 89; Stop 113
ataaagacaacgtctggttggttat

SEQ ID NO: 381419 - DNA, 25 bp, Artificial
  probe
  misc_feature (1)..(25): SEQ ID NO: 4383; WAN024GF6; Start 247; Stop 271
gataacagtccctttgtcacggtca

SEQ ID NO: 381420 - DNA, 25 bp, Artificial
  probe
  misc_feature (1)..(25): SEQ ID NO: 4383; WAN024GF6; Start 204; Stop 228
gtttgattggttgaagggttttcca

SEQ ID NO: 381421 - DNA, 25 bp, Artificial
  probe
  misc_feature (1)..(25): SEQ ID NO: 4383; WAN024GF6; Start 90; Stop 114
taaagacaacgtctggttggttatc

SEQ ID NO: 381422 - DNA, 25 bp, Artificial
  probe
  misc_feature (1)..(25): SEQ ID NO: 4383; WAN024GF6; Start 208; Stop 232
gattggttgaagggttttccagttc

SEQ ID NO: 381423 - DNA, 25 bp, Artificial
  probe
  misc_feature (1)..(25): SEQ ID NO: 4383; WAN024GF6; Start 222; Stop 246
ttttccagttcaagttgtaggcacc

SEQ ID NO: 381424 - DNA, 25 bp, Artificial
  probe
  misc_feature (1)..(25): SEQ ID NO: 4383; WAN024GF6; Start 220; Stop 244
ggttttccagttcaagttgtaggca

SEQ ID NO: 381425 - DNA, 25 bp, Artificial
  probe
  misc_feature (1)..(25): SEQ ID NO: 4383; WAN024GF6; Start 141; Stop 165
gagctgctacgttggcatcattatc

SEQ ID NO: 381426 - DNA, 25 bp, Artificial
  probe
  misc_feature (1)..(25): SEQ ID NO: 4383; WAN024GF6; Start 207; Stop 231
tgattggttgaagggttttccagtt

SEQ ID NO: 381427 - DNA, 25 bp, Artificial
  probe
  misc_feature (1)..(25): SEQ ID NO: 4384; WAN024EZ6; Start 244; Stop 268
ggcttctatacagattatcgtgatt

SEQ ID NO: 381428 - DNA, 25 bp, Artificial
  probe
  misc_feature (1)..(25): SEQ ID NO: 4384; WAN024EZ6; Start 624; Stop 648
tgtgcctaagaaggataagattgaa

SEQ ID NO: 381429 - DNA, 25 bp, Artificial
  probe
  misc_feature (1)..(25): SEQ ID NO: 4384; WAN024EZ6; Start 623; Stop 647
ttgtgcctaagaaggataagattga

SEQ ID NO: 381430 - DNA, 25 bp, Artificial
  probe
  misc_feature (1)..(25): SEQ ID NO: 4384; WAN024EZ6; Start 625; Stop 649
gtgcctaagaaggataagattgaac

SEQ ID NO: 381431 - DNA, 25 bp, Artificial
  probe
  misc_feature (1)..(25): SEQ ID NO: 4384; WAN024EZ6; Start 626; Stop 650
tgcctaagaaggataagattgaact

SEQ ID NO: 381432 - DNA, 25 bp, Artificial
  probe
  misc_feature (1)..(25): SEQ ID NO: 4384; WAN024EZ6; Start 706; Stop 730
ttccgtaatattgagcgtattgagt

SEQ ID NO: 381433 - DNA, 25 bp, Artificial
  probe
  misc_feature (1)..(25): SEQ ID NO: 4384; WAN024EZ6; Start 615; Stop 639
ttccattattgtgcctaagaaggat

SEQ ID NO: 381434 - DNA, 25 bp, Artificial
  probe
  misc_feature (1)..(25): SEQ ID NO: 4384; WAN024EZ6; Start 707; Stop 731
tccgtaatattgagcgtattgagta

SEQ ID NO: 381435 - DNA, 25 bp, Artificial
  probe
  misc_feature (1)..(25): SEQ ID NO: 4384; WAN024EZ6; Start 622; Stop 646
attgtgcctaagaaggataagattg

SEQ ID NO: 381436 - DNA, 25 bp, Artificial
  probe
  misc_feature (1)..(25): SEQ ID NO: 4384; WAN024EZ6; Start 616; Stop 640
tccattattgtgcctaagaaggata

SEQ ID NO: 381437 - DNA, 25 bp, Artificial
  probe
  misc_feature (1)..(25): SEQ ID NO: 4384; WAN024EZ6; Start 627; Stop 651
gcctaagaaggataagattgaactt

SEQ ID NO: 381438 - DNA, 25 bp, Artificial
  probe
  misc_feature (1)..(25): SEQ ID NO: 4384; WAN024EZ6; Start 617; Stop 641
ccattattgtgcctaagaaggataa

SEQ ID NO: 381439 - DNA, 25 bp, Artificial
  probe
  misc_feature (1)..(25): SEQ ID NO: 4384; WAN024EZ6; Start 708; Stop 732
ccgtaatattgagcgtattgagtat

SEQ ID NO: 381440 - DNA, 25 bp, Artificial
  probe
  misc_feature (1)..(25): SEQ ID NO: 4384; WAN024EZ6; Start 271; Stop 295
gagttggacaagctagtgactaatt

SEQ ID NO: 381441 - DNA, 25 bp, Artificial
  probe
  misc_feature (1)..(25): SEQ ID NO: 4384; WAN024EZ6; Start 422; Stop 446
tggtggcagatattgtaataaatgg

SEQ ID NO: 381442 - DNA, 25 bp, Artificial
  probe
  misc_feature (1)..(25): SEQ ID NO: 4384; WAN024EZ6; Start 333; Stop 357
tctgaatgtgaaggtctttcttgaa

SEQ ID NO: 381443 - DNA, 25 bp, Artificial
  probe
  misc_feature (1)..(25): SEQ ID NO: 4384; WAN024EZ6; Start 332; Stop 356
ttctgaatgtgaaggtctttcttga

SEQ ID NO: 381444 - DNA, 25 bp, Artificial
  probe
  misc_feature (1)..(25): SEQ ID NO: 4384; WAN024EZ6; Start 331; Stop 355
gttctgaatgtgaaggtctttcttg

SEQ ID NO: 381445 - DNA, 25 bp, Artificial
  probe
  misc_feature (1)..(25): SEQ ID NO: 4384; WAN024EZ6; Start 320; Stop 344
tttcttaccctgttctgaatgtgaa

SEQ ID NO: 381446 - DNA, 25 bp, Artificial
  probe
  misc_feature (1)..(25): SEQ ID NO: 4384; WAN024EZ6; Start 423; Stop 447
ggtggcagatattgtaataaatggt

SEQ ID NO: 381447 - DNA, 25 bp, Artificial
  probe
  misc_feature (1)..(25): SEQ ID NO: 4384; WAN024EZ6; Start 330; Stop 354
tgttctgaatgtgaaggtctttctt

SEQ ID NO: 381448 - DNA, 25 bp, Artificial
  probe
  misc_feature (1)..(25): SEQ ID NO: 4384; WAN024EZ6; Start 243; Stop 267
gggcttctatacagattatcgtgat

SEQ ID NO: 381449 - DNA, 25 bp, Artificial
  probe
  misc_feature (1)..(25): SEQ ID NO: 4384; WAN024EZ6; Start 241; Stop 265
ttgggcttctatacagattatcgtg

SEQ ID NO: 381450 - DNA, 25 bp, Artificial
  probe
  misc_feature (1)..(25): SEQ ID NO: 4384; WAN024EZ6; Start 10; Stop 34
cagatgaagaatacaggtaaacgaa

SEQ ID NO: 381451 - DNA, 25 bp, Artificial
  probe
  misc_feature (1)..(25): SEQ ID NO: 4384; WAN024EZ6; Start 679; Stop 703
atttcggttgacaatagcgtttatt

SEQ ID NO: 381452 - DNA, 25 bp, Artificial
  probe
  misc_feature (1)..(25): SEQ ID NO: 4384; WAN024EZ6; Start 321; Stop 345
ttcttaccctgttctgaatgtgaag

SEQ ID NO: 381453 - DNA, 25 bp, Artificial
  probe
  misc_feature (1)..(25): SEQ ID NO: 4384; WAN024EZ6; Start 686; Stop 710
ttgacaatagcgtttattctttccg

SEQ ID NO: 381454 - DNA, 25 bp, Artificial
  probe
  misc_feature (1)..(25): SEQ ID NO: 4384; WAN024EZ6; Start 240; Stop 264
tttgggcttctatacagattatcgt

SEQ ID NO: 381455 - DNA, 25 bp, Artificial
  probe
  misc_feature (1)..(25): SEQ ID NO: 4384; WAN024EZ6; Start 688; Stop 712
gacaatagcgtttattctttccgta

SEQ ID NO: 381456 - DNA, 25 bp, Artificial
  probe
  misc_feature (1)..(25): SEQ ID NO: 4384; WAN024EZ6; Start 683; Stop 707
cggttgacaatagcgtttattcttt

SEQ ID NO: 381457 - DNA, 25 bp, Artificial
  probe
  misc_feature (1)..(25): SEQ ID NO: 4384; WAN024EZ6; Start 645; Stop 669
tgaacttattccaacaagaaacgat

SEQ ID NO: 381458 - DNA, 25 bp, Artificial
  probe
  misc_feature (1)..(25): SEQ ID NO: 4384; WAN024EZ6; Start 434; Stop 458
ttgtaataaatggtgttccctttga

SEQ ID NO: 381459 - DNA, 25 bp, Artificial
  probe
  misc_feature (1)..(25): SEQ ID NO: 4384; WAN024EZ6; Start 680; Stop 704
tttcggttgacaatagcgtttattc

SEQ ID NO: 381460 - DNA, 25 bp, Artificial
  probe
  misc_feature (1)..(25): SEQ ID NO: 4385; WAN024EW2; Start 204; Stop 228
agagaaccaagtccttatcttcaag

SEQ ID NO: 381461 - DNA, 25 bp, Artificial
  probe
  misc_feature (1)..(25): SEQ ID NO: 4385; WAN024EW2; Start 237; Stop 261
ctgttgtcaattcttcttggatacc

SEQ ID NO: 381462 - DNA, 25 bp, Artificial
  probe
  misc_feature (1)..(25): SEQ ID NO: 4385; WAN024EW2; Start 236; Stop 260
gctgttgtcaattcttcttggatac

SEQ ID NO: 381463 - DNA, 25 bp, Artificial
  probe
  misc_feature (1)..(25): SEQ ID NO: 4385; WAN024EW2; Start 112; Stop 136
cttatcattatcaatcaagccaagc

SEQ ID NO: 381464 - DNA, 25 bp, Artificial
  probe
  misc_feature (1)..(25): SEQ ID NO: 4385; WAN024EW2; Start 205; Stop 229
gagaaccaagtccttatcttcaaga

SEQ ID NO: 381465 - DNA, 25 bp, Artificial
  probe
  misc_feature (1)..(25): SEQ ID NO: 4385; WAN024EW2; Start 235; Stop 259
cgctgttgtcaattcttcttggata

SEQ ID NO: 381466 - DNA, 25 bp, Artificial
  probe
  misc_feature (1)..(25): SEQ ID NO: 4385; WAN024EW2; Start 243; Stop 267
tcaattcttcttggataccagtcaa

SEQ ID NO: 381467 - DNA, 25 bp, Artificial
  probe
  misc_feature (1)..(25): SEQ ID NO: 4385; WAN024EW2; Start 240; Stop 264
ttgtcaattcttcttggataccagt

SEQ ID NO: 381468 - DNA, 25 bp, Artificial
  probe
  misc_feature (1)..(25): SEQ ID NO: 4385; WAN024EW2; Start 239; Stop 263
gttgtcaattcttcttggataccag

SEQ ID NO: 381469 - DNA, 25 bp, Artificial
  probe
  misc_feature (1)..(25): SEQ ID NO: 4385; WAN024EW2; Start 238; Stop 262
tgttgtcaattcttcttggatacca

SEQ ID NO: 381470 - DNA, 25 bp, Artificial
  probe
  misc_feature (1)..(25): SEQ ID NO: 4385; WAN024EW2; Start 242; Stop 266
gtcaattcttcttggataccagtca

SEQ ID NO: 381471 - DNA, 25 bp, Artificial
  probe
  misc_feature (1)..(25): SEQ ID NO: 4385; WAN024EW2; Start 241; Stop 265
tgtcaattcttcttggataccagtc

SEQ ID NO: 381472 - DNA, 25 bp, Artificial
  probe
  misc_feature (1)..(25): SEQ ID NO: 4385; WAN024EW2; Start 109; Stop 133
gaacttatcattatcaatcaagcca

SEQ ID NO: 381473 - DNA, 25 bp, Artificial
  probe
  misc_feature (1)..(25): SEQ ID NO: 4385; WAN024EW2; Start 111; Stop 135
acttatcattatcaatcaagccaag

SEQ ID NO: 381474 - DNA, 25 bp, Artificial
  probe
  misc_feature (1)..(25): SEQ ID NO: 4385; WAN024EW2; Start 108; Stop 132
tgaacttatcattatcaatcaagcc

SEQ ID NO: 381475 - DNA, 25 bp, Artificial
  probe
  misc_feature (1)..(25): SEQ ID NO: 4385; WAN024EW2; Start 199; Stop 223
cacaaagagaaccaagtccttatct

SEQ ID NO: 381476 - DNA, 25 bp, Artificial
  probe
  misc_feature (1)..(25): SEQ ID NO: 4385; WAN024EW2; Start 58; Stop 82
ttcttcttcagaccattcaaacatc

SEQ ID NO: 381477 - DNA, 25 bp, Artificial
  probe
  misc_feature (1)..(25): SEQ ID NO: 4385; WAN024EW2; Start 57; Stop 81
cttcttcttcagaccattcaaacat

SEQ ID NO: 381478 - DNA, 25 bp, Artificial
  probe
  misc_feature (1)..(25): SEQ ID NO: 4385; WAN024EW2; Start 110; Stop 134
aacttatcattatcaatcaagccaa

SEQ ID NO: 381479 - DNA, 25 bp, Artificial
  probe
  misc_feature (1)..(25): SEQ ID NO: 4385; WAN024EW2; Start 286; Stop 310
gtttaattctccatcaaccaccttg

SEQ ID NO: 381480 - DNA, 25 bp, Artificial
  probe
  misc_feature (1)..(25): SEQ ID NO: 4385; WAN024EW2; Start 203; Stop 227
aagagaaccaagtccttatcttcaa

SEQ ID NO: 381481 - DNA, 25 bp, Artificial
  probe
  misc_feature (1)..(25): SEQ ID NO: 4385; WAN024EW2; Start 56; Stop 80
ccttcttcttcagaccattcaaaca

SEQ ID NO: 381482 - DNA, 25 bp, Artificial
  probe
  misc_feature (1)..(25): SEQ ID NO: 4385; WAN024EW2; Start 198; Stop 222
ccacaaagagaaccaagtccttatc

SEQ ID NO: 381483 - DNA, 25 bp, Artificial
  probe
  misc_feature (1)..(25): SEQ ID NO: 4385; WAN024EW2; Start 59; Stop 83
tcttcttcagaccattcaaacatcg

SEQ ID NO: 381484 - DNA, 25 bp, Artificial
  probe
  misc_feature (1)..(25): SEQ ID NO: 4385; WAN024EW2; Start 285; Stop 309
cgtttaattctccatcaaccacctt

SEQ ID NO: 381485 - DNA, 25 bp, Artificial
  probe
  misc_feature (1)..(25): SEQ ID NO: 4385; WAN024EW2; Start 60; Stop 84
cttcttcagaccattcaaacatcgg

SEQ ID NO: 381486 - DNA, 25 bp, Artificial
  probe
  misc_feature (1)..(25): SEQ ID NO: 4385; WAN024EW2; Start 288; Stop 312
ttaattctccatcaaccaccttgac

SEQ ID NO: 381487 - DNA, 25 bp, Artificial
  probe
  misc_feature (1)..(25): SEQ ID NO: 4385; WAN024EW2; Start 282; Stop 306
gtccgtttaattctccatcaaccac

SEQ ID NO: 381488 - DNA, 25 bp, Artificial
  probe
  misc_feature (1)..(25): SEQ ID NO: 4385; WAN024EW2; Start 115; Stop 139
atcattatcaatcaagccaagctct

SEQ ID NO: 381489 - DNA, 25 bp, Artificial
  probe
  misc_feature (1)..(25): SEQ ID NO: 4385; WAN024EW2; Start 55; Stop 79
gccttcttcttcagaccattcaaac

SEQ ID NO: 381490 - DNA, 25 bp, Artificial
  probe
  misc_feature (1)..(25): SEQ ID NO: 4385; WAN024EW2; Start 114; Stop 138
tatcattatcaatcaagccaagctc

SEQ ID NO: 381491 - DNA, 25 bp, Artificial
  probe
  misc_feature (1)..(25): SEQ ID NO: 4385; WAN024EW2; Start 116; Stop 140
tcattatcaatcaagccaagctctt

SEQ ID NO: 381492 - DNA, 25 bp, Artificial
  probe
  misc_feature (1)..(25): SEQ ID NO: 4385; WAN024EW2; Start 334; Stop 358
atactgtttggctacttccgtcatc

SEQ ID NO: 381493 - DNA, 25 bp, Artificial
  probe
  misc_feature (1)..(25): SEQ ID NO: 4386; WAN024CAE; Start 218; Stop 242
tatatcttcagctacacacatacgt

SEQ ID NO: 381494 - DNA, 25 bp, Artificial
  probe
  misc_feature (1)..(25): SEQ ID NO: 4386; WAN024CAE; Start 217; Stop 241
ttatatcttcagctacacacatacg

SEQ ID NO: 381495 - DNA, 25 bp, Artificial
  probe
  misc_feature (1)..(25): SEQ ID NO: 4386; WAN024CAE; Start 205; Stop 229
aatcagagggtgttatatcttcagc

SEQ ID NO: 381496 - DNA, 25 bp, Artificial
  probe
  misc_feature (1)..(25): SEQ ID NO: 4386; WAN024CAE; Start 129; Stop 153
gcttctgtgtgtccatttctttcta

SEQ ID NO: 381497 - DNA, 25 bp, Artificial
  probe
  misc_feature (1)..(25): SEQ ID NO: 4386; WAN024CAE; Start 130; Stop 154
cttctgtgtgtccatttctttctag

SEQ ID NO: 381498 - DNA, 25 bp, Artificial
  probe
  misc_feature (1)..(25): SEQ ID NO: 4386; WAN024CAE; Start 131; Stop 155
ttctgtgtgtccatttctttctagg

SEQ ID NO: 381499 - DNA, 25 bp, Artificial
  probe
  misc_feature (1)..(25): SEQ ID NO: 4386; WAN024CAE; Start 219; Stop 243
atatcttcagctacacacatacgtg

SEQ ID NO: 381500 - DNA, 25 bp, Artificial
  probe
  misc_feature (1)..(25): SEQ ID NO: 4386; WAN024CAE; Start 273; Stop 297
cctgtggtcgtttctttataatcaa

SEQ ID NO: 381501 - DNA, 25 bp, Artificial
  probe
  misc_feature (1)..(25): SEQ ID NO: 4386; WAN024CAE; Start 127; Stop 151
ttgcttctgtgtgtccatttctttc

SEQ ID NO: 381502 - DNA, 25 bp, Artificial
  probe
  misc_feature (1)..(25): SEQ ID NO: 4386; WAN024CAE; Start 204; Stop 228
aaatcagagggtgttatatcttcag

SEQ ID NO: 381503 - DNA, 25 bp, Artificial
  probe
  misc_feature (1)..(25): SEQ ID NO: 4386; WAN024CAE; Start 126; Stop 150
gttgcttctgtgtgtccatttcttt

SEQ ID NO: 381504 - DNA, 25 bp, Artificial
  probe
  misc_feature (1)..(25): SEQ ID NO: 4386; WAN024CAE; Start 216; Stop 240
gttatatcttcagctacacacatac

SEQ ID NO: 381505 - DNA, 25 bp, Artificial
  probe
  misc_feature (1)..(25): SEQ ID NO: 4386; WAN024CAE; Start 142; Stop 166
catttctttctaggacaccaccttt

SEQ ID NO: 381506 - DNA, 25 bp, Artificial
  probe
  misc_feature (1)..(25): SEQ ID NO: 4386; WAN024CAE; Start 63; Stop 87
tgattcattatttcacaacataggc

SEQ ID NO: 381507 - DNA, 25 bp, Artificial
  probe
  misc_feature (1)..(25): SEQ ID NO: 4386; WAN024CAE; Start 208; Stop 232
cagagggtgttatatcttcagctac

SEQ ID NO: 381508 - DNA, 25 bp, Artificial
  probe
  misc_feature (1)..(25): SEQ ID NO: 4386; WAN024CAE; Start 207; Stop 231
tcagagggtgttatatcttcagcta

SEQ ID NO: 381509 - DNA, 25 bp, Artificial
  probe
  misc_feature (1)..(25): SEQ ID NO: 4386; WAN024CAE; Start 206; Stop 230
atcagagggtgttatatcttcagct

SEQ ID NO: 381510 - DNA, 25 bp, Artificial
  probe
  misc_feature (1)..(25): SEQ ID NO: 4386; WAN024CAE; Start 20; Stop 44
cgagaactgaattaaatcatctgtt

SEQ ID NO: 381511 - DNA, 25 bp, Artificial
  probe
  misc_feature (1)..(25): SEQ ID NO: 4386; WAN024CAE; Start 128; Stop 152
tgcttctgtgtgtccatttctttct

SEQ ID NO: 381512 - DNA, 25 bp, Artificial
  probe
  misc_feature (1)..(25): SEQ ID NO: 4386; WAN024CAE; Start 132; Stop 156
tctgtgtgtccatttctttctagga

SEQ ID NO: 381513 - DNA, 25 bp, Artificial
  probe
  misc_feature (1)..(25): SEQ ID NO: 4386; WAN024CAE; Start 215; Stop 239
tgttatatcttcagctacacacata

SEQ ID NO: 381514 - DNA, 25 bp, Artificial
  probe
  misc_feature (1)..(25): SEQ ID NO: 4386; WAN024CAE; Start 209; Stop 233
agagggtgttatatcttcagctaca

SEQ ID NO: 381515 - DNA, 25 bp, Artificial
  probe
  misc_feature (1)..(25): SEQ ID NO: 4386; WAN024CAE; Start 125; Stop 149
agttgcttctgtgtgtccatttctt

SEQ ID NO: 381516 - DNA, 25 bp, Artificial
  probe
  misc_feature (1)..(25): SEQ ID NO: 4386; WAN024CAE; Start 274; Stop 298
ctgtggtcgtttctttataatcaat

SEQ ID NO: 381517 - DNA, 25 bp, Artificial
  probe
  misc_feature (1)..(25): SEQ ID NO: 4386; WAN024CAE; Start 267; Stop 291
gaaatacctgtggtcgtttctttat

SEQ ID NO: 381518 - DNA, 25 bp, Artificial
  probe
  misc_feature (1)..(25): SEQ ID NO: 4386; WAN024CAE; Start 272; Stop 296
acctgtggtcgtttctttataatca

SEQ ID NO: 381519 - DNA, 25 bp, Artificial
  probe
  misc_feature (1)..(25): SEQ ID NO: 4386; WAN024CAE; Start 268; Stop 292
aaatacctgtggtcgtttctttata

SEQ ID NO: 381520 - DNA, 25 bp, Artificial
  probe
  misc_feature (1)..(25): SEQ ID NO: 4386; WAN024CAE; Start 19; Stop 43
tcgagaactgaattaaatcatctgt

SEQ ID NO: 381521 - DNA, 25 bp, Artificial
  probe
  misc_feature (1)..(25): SEQ ID NO: 4386; WAN024CAE; Start 34; Stop 58
aatcatctgttctcatcattttgcc

SEQ ID NO: 381522 - DNA, 25 bp, Artificial
  probe
  misc_feature (1)..(25): SEQ ID NO: 4386; WAN024CAE; Start 220; Stop 244
tatcttcagctacacacatacgtgc

SEQ ID NO: 381523 - DNA, 25 bp, Artificial
  probe
  misc_feature (1)..(25): SEQ ID NO: 4386; WAN024CAE; Start 275; Stop 299
tgtggtcgtttctttataatcaatt

SEQ ID NO: 381524 - DNA, 25 bp, Artificial
  probe
  misc_feature (1)..(25): SEQ ID NO: 4386; WAN024CAE; Start 141; Stop 165
ccatttctttctaggacaccacctt

SEQ ID NO: 381525 - DNA, 25 bp, Artificial
  probe
  misc_feature (1)..(25): SEQ ID NO: 4386; WAN024CAE; Start 271; Stop 295
tacctgtggtcgtttctttataatc

SEQ ID NO: 381526 - DNA, 25 bp, Artificial
  probe
  misc_feature (1)..(25): SEQ ID NO: 4387; WAN024DWG; Start 117; Stop 141
gccagatatagcgatagaaggtatg

SEQ ID NO: 381527 - DNA, 25 bp, Artificial
  probe
  misc_feature (1)..(25): SEQ ID NO: 4387; WAN024DWG; Start 118; Stop 142
ccagatatagcgatagaaggtatga

SEQ ID NO: 381528 - DNA, 25 bp, Artificial
  probe
  misc_feature (1)..(25): SEQ ID NO: 4387; WAN024DWG; Start 68; Stop 92
ttctctgccttatctcttgttgtca

SEQ ID NO: 381529 - DNA, 25 bp, Artificial
  probe
  misc_feature (1)..(25): SEQ ID NO: 4387; WAN024DWG; Start 123; Stop 147
tatagcgatagaaggtatgagaact

SEQ ID NO: 381530 - DNA, 25 bp, Artificial
  probe
  misc_feature (1)..(25): SEQ ID NO: 4387; WAN024DWG; Start 69; Stop 93
tctctgccttatctcttgttgtcaa

SEQ ID NO: 381531 - DNA, 25 bp, Artificial
  probe
  misc_feature (1)..(25): SEQ ID NO: 4387; WAN024DWG; Start 120; Stop 144
agatatagcgatagaaggtatgaga

SEQ ID NO: 381532 - DNA, 25 bp, Artificial
  probe
  misc_feature (1)..(25): SEQ ID NO: 4387; WAN024DWG; Start 119; Stop 143
cagatatagcgatagaaggtatgag

SEQ ID NO: 381533 - DNA, 25 bp, Artificial
  probe
  misc_feature (1)..(25): SEQ ID NO: 4387; WAN024DWG; Start 122; Stop 146
atatagcgatagaaggtatgagaac

SEQ ID NO: 381534 - DNA, 25 bp, Artificial
  probe
  misc_feature (1)..(25): SEQ ID NO: 4387; WAN024DWG; Start 121; Stop 145
gatatagcgatagaaggtatgagaa

SEQ ID NO: 381535 - DNA, 25 bp, Artificial
  probe
  misc_feature (1)..(25): SEQ ID NO: 4387; WAN024DWG; Start 67; Stop 91
tttctctgccttatctcttgttgtc

SEQ ID NO: 381536 - DNA, 25 bp, Artificial
  probe
  misc_feature (1)..(25): SEQ ID NO: 4387; WAN024DWG; Start 162; Stop 186
cgtattctccttggtagaagtatgg

SEQ ID NO: 381537 - DNA, 25 bp, Artificial
  probe
  misc_feature (1)..(25): SEQ ID NO: 4387; WAN024DWG; Start 161; Stop 185
gcgtattctccttggtagaagtatg

SEQ ID NO: 381538 - DNA, 25 bp, Artificial
  probe
  misc_feature (1)..(25): SEQ ID NO: 4387; WAN024DWG; Start 163; Stop 187
gtattctccttggtagaagtatgga

SEQ ID NO: 381539 - DNA, 25 bp, Artificial
  probe
  misc_feature (1)..(25): SEQ ID NO: 4387; WAN024DWG; Start 165; Stop 189
attctccttggtagaagtatggatt

SEQ ID NO: 381540 - DNA, 25 bp, Artificial
  probe
  misc_feature (1)..(25): SEQ ID NO: 4387; WAN024DWG; Start 164; Stop 188
tattctccttggtagaagtatggat

SEQ ID NO: 381541 - DNA, 25 bp, Artificial
  probe
  misc_feature (1)..(25): SEQ ID NO: 4387; WAN024DWG; Start 116; Stop 140
ggccagatatagcgatagaaggtat

SEQ ID NO: 381542 - DNA, 25 bp, Artificial
  probe
  misc_feature (1)..(25): SEQ ID NO: 4387; WAN024DWG; Start 166; Stop 190
ttctccttggtagaagtatggattt

SEQ ID NO: 381543 - DNA, 25 bp, Artificial
  probe
  misc_feature (1)..(25): SEQ ID NO: 4387; WAN024DWG; Start 66; Stop 90
ttttctctgccttatctcttgttgt

SEQ ID NO: 381544 - DNA, 25 bp, Artificial
  probe
  misc_feature (1)..(25): SEQ ID NO: 4387; WAN024DWG; Start 173; Stop 197
tggtagaagtatggattttcagagc

SEQ ID NO: 381545 - DNA, 25 bp, Artificial
  probe
  misc_feature (1)..(25): SEQ ID NO: 4387; WAN024DWG; Start 170; Stop 194
ccttggtagaagtatggattttcag

SEQ ID NO: 381546 - DNA, 25 bp, Artificial
  probe
  misc_feature (1)..(25): SEQ ID NO: 4387; WAN024DWG; Start 172; Stop 196
ttggtagaagtatggattttcagag

SEQ ID NO: 381547 - DNA, 25 bp, Artificial
  probe
  misc_feature (1)..(25): SEQ ID NO: 4387; WAN024DWG; Start 171; Stop 195
cttggtagaagtatggattttcaga

SEQ ID NO: 381548 - DNA, 25 bp, Artificial
  probe
  misc_feature (1)..(25): SEQ ID NO: 4387; WAN024DWG; Start 169; Stop 193
tccttggtagaagtatggattttca

SEQ ID NO: 381549 - DNA, 25 bp, Artificial
  probe
  misc_feature (1)..(25): SEQ ID NO: 4387; WAN024DWG; Start 174; Stop 198
ggtagaagtatggattttcagagct

SEQ ID NO: 381550 - DNA, 25 bp, Artificial
  probe
  misc_feature (1)..(25): SEQ ID NO: 4387; WAN024DWG; Start 167; Stop 191
tctccttggtagaagtatggatttt

SEQ ID NO: 381551 - DNA, 25 bp, Artificial
  probe
  misc_feature (1)..(25): SEQ ID NO: 4387; WAN024DWG; Start 168; Stop 192
ctccttggtagaagtatggattttc

SEQ ID NO: 381552 - DNA, 25 bp, Artificial
  probe
  misc_feature (1)..(25): SEQ ID NO: 4387; WAN024DWG; Start 176; Stop 200
tagaagtatggattttcagagctca

SEQ ID NO: 381553 - DNA, 25 bp, Artificial
  probe
  misc_feature (1)..(25): SEQ ID NO: 4387; WAN024DWG; Start 175; Stop 199
gtagaagtatggattttcagagctc

SEQ ID NO: 381554 - DNA, 25 bp, Artificial
  probe
  misc_feature (1)..(25): SEQ ID NO: 4388; WAN024F3C; Start 38; Stop 62
taggaatcaaggaggtgactcttat

SEQ ID NO: 381555 - DNA, 25 bp, Artificial
  probe
  misc_feature (1)..(25): SEQ ID NO: 4388; WAN024F3C; Start 37; Stop 61
ataggaatcaaggaggtgactctta

SEQ ID NO: 381556 - DNA, 25 bp, Artificial
  probe
  misc_feature (1)..(25): SEQ ID NO: 4388; WAN024F3C; Start 36; Stop 60
tataggaatcaaggaggtgactctt

SEQ ID NO: 381557 - DNA, 25 bp, Artificial
  probe
  misc_feature (1)..(25): SEQ ID NO: 4388; WAN024F3C; Start 39; Stop 63
aggaatcaaggaggtgactcttatg

SEQ ID NO: 381558 - DNA, 25 bp, Artificial
  probe
  misc_feature (1)..(25): SEQ ID NO: 4388; WAN024F3C; Start 40; Stop 64
ggaatcaaggaggtgactcttatgg

SEQ ID NO: 381559 - DNA, 25 bp, Artificial
  probe
  misc_feature (1)..(25): SEQ ID NO: 4388; WAN024F3C; Start 35; Stop 59
ctataggaatcaaggaggtgactct

SEQ ID NO: 381560 - DNA, 25 bp, Artificial
  probe
  misc_feature (1)..(25): SEQ ID NO: 4388; WAN024F3C; Start 77; Stop 101
ctttggatggaattgtggtagaagt

SEQ ID NO: 381561 - DNA, 25 bp, Artificial
  probe
  misc_feature (1)..(25): SEQ ID NO: 4388; WAN024F3C; Start 76; Stop 100
tctttggatggaattgtggtagaag

SEQ ID NO: 381562 - DNA, 25 bp, Artificial
  probe
  misc_feature (1)..(25): SEQ ID NO: 4388; WAN024F3C; Start 75; Stop 99
gtctttggatggaattgtggtagaa

SEQ ID NO: 381563 - DNA, 25 bp, Artificial
  probe
  misc_feature (1)..(25): SEQ ID NO: 4388; WAN024F3C; Start 41; Stop 65
gaatcaaggaggtgactcttatggc

SEQ ID NO: 381564 - DNA, 25 bp, Artificial
  probe
  misc_feature (1)..(25): SEQ ID NO: 4388; WAN024F3C; Start 73; Stop 97
gtgtctttggatggaattgtggtag

SEQ ID NO: 381565 - DNA, 25 bp, Artificial
  probe
  misc_feature (1)..(25): SEQ ID NO: 4388; WAN024F3C; Start 74; Stop 98
tgtctttggatggaattgtggtaga

SEQ ID NO: 381566 - DNA, 25 bp, Artificial
  probe
  misc_feature (1)..(25): SEQ ID NO: 4388; WAN024F3C; Start 70; Stop 94
tttgtgtctttggatggaattgtgg

SEQ ID NO: 381567 - DNA, 25 bp, Artificial
  probe
  misc_feature (1)..(25): SEQ ID NO: 4388; WAN024F3C; Start 42; Stop 66
aatcaaggaggtgactcttatggct

SEQ ID NO: 381568 - DNA, 25 bp, Artificial
  probe
  misc_feature (1)..(25): SEQ ID NO: 4388; WAN024F3C; Start 72; Stop 96
tgtgtctttggatggaattgtggta

SEQ ID NO: 381569 - DNA, 25 bp, Artificial
  probe
  misc_feature (1)..(25): SEQ ID NO: 4388; WAN024F3C; Start 43; Stop 67
atcaaggaggtgactcttatggctg

SEQ ID NO: 381570 - DNA, 25 bp, Artificial
  probe
  misc_feature (1)..(25): SEQ ID NO: 4388; WAN024F3C; Start 71; Stop 95
ttgtgtctttggatggaattgtggt

SEQ ID NO: 381571 - DNA, 25 bp, Artificial
  probe
  misc_feature (1)..(25): SEQ ID NO: 4388; WAN024F3C; Start 115; Stop 139
tcttcttttaatggggatagtgagt

SEQ ID NO: 381572 - DNA, 25 bp, Artificial
  probe
  misc_feature (1)..(25): SEQ ID NO: 4388; WAN024F3C; Start 69; Stop 93
ttttgtgtctttggatggaattgtg

SEQ ID NO: 381573 - DNA, 25 bp, Artificial
  probe
  misc_feature (1)..(25): SEQ ID NO: 4388; WAN024F3C; Start 45; Stop 69
caaggaggtgactcttatggctgtt

SEQ ID NO: 381574 - DNA, 25 bp, Artificial
  probe
  misc_feature (1)..(25): SEQ ID NO: 4388; WAN024F3C; Start 116; Stop 140
cttcttttaatggggatagtgagtt

SEQ ID NO: 381575 - DNA, 25 bp, Artificial
  probe
  misc_feature (1)..(25): SEQ ID NO: 4388; WAN024F3C; Start 108; Stop 132
tgtcttttcttcttttaatggggat

SEQ ID NO: 381576 - DNA, 25 bp, Artificial
  probe
  misc_feature (1)..(25): SEQ ID NO: 4388; WAN024F3C; Start 107; Stop 131
atgtcttttcttcttttaatgggga

SEQ ID NO: 381577 - DNA, 25 bp, Artificial
  probe
  misc_feature (1)..(25): SEQ ID NO: 4388; WAN024F3C; Start 106; Stop 130
gatgtcttttcttcttttaatgggg

SEQ ID NO: 381578 - DNA, 25 bp, Artificial
  probe
  misc_feature (1)..(25): SEQ ID NO: 4388; WAN024F3C; Start 114; Stop 138
ttcttcttttaatggggatagtgag

SEQ ID NO: 381579 - DNA, 25 bp, Artificial
  probe
  misc_feature (1)..(25): SEQ ID NO: 4388; WAN024F3C; Start 118; Stop 142
tcttttaatggggatagtgagtttt

SEQ ID NO: 381580 - DNA, 25 bp, Artificial
  probe
  misc_feature (1)..(25): SEQ ID NO: 4388; WAN024F3C; Start 117; Stop 141
ttcttttaatggggatagtgagttt

SEQ ID NO: 381581 - DNA, 25 bp, Artificial
  probe
  misc_feature (1)..(25): SEQ ID NO: 4388; WAN024F3C; Start 46; Stop 70
aaggaggtgactcttatggctgttt

SEQ ID NO: 381582 - DNA, 25 bp, Artificial
  probe
  misc_feature (1)..(25): SEQ ID NO: 4388; WAN024F3C; Start 113; Stop 137
tttcttcttttaatggggatagtga

SEQ ID NO: 381583 - DNA, 25 bp, Artificial
  probe
  misc_feature (1)..(25): SEQ ID NO: 4388; WAN024F3C; Start 105; Stop 129
tgatgtcttttcttcttttaatggg

SEQ ID NO: 381584 - DNA, 25 bp, Artificial
  probe
  misc_feature (1)..(25): SEQ ID NO: 4388; WAN024F3C; Start 112; Stop 136
ttttcttcttttaatggggatagtg

SEQ ID NO: 381585 - DNA, 25 bp, Artificial
  probe
  misc_feature (1)..(25): SEQ ID NO: 4388; WAN024F3C; Start 44; Stop 68
tcaaggaggtgactcttatggctgt

SEQ ID NO: 381586 - DNA, 25 bp, Artificial
  probe
  misc_feature (1)..(25): SEQ ID NO: 4388; WAN024F3C; Start 111; Stop 135
cttttcttcttttaatggggatagt

SEQ ID NO: 381587 - DNA, 25 bp, Artificial
  probe
  misc_feature (1)..(25): SEQ ID NO: 4389; WAN024F85; Start 922; Stop 946
ggtgatgagccttattatccagtta

SEQ ID NO: 381588 - DNA, 25 bp, Artificial
  probe
  misc_feature (1)..(25): SEQ ID NO: 4389; WAN024F85; Start 1023; Stop 1047
ccgcttaggacactatcgttattac

SEQ ID NO: 381589 - DNA, 25 bp, Artificial
  probe
  misc_feature (1)..(25): SEQ ID NO: 4389; WAN024F85; Start 923; Stop 947
gtgatgagccttattatccagttaa

SEQ ID NO: 381590 - DNA, 25 bp, Artificial
  probe
  misc_feature (1)..(25): SEQ ID NO: 4389; WAN024F85; Start 1022; Stop 1046
gccgcttaggacactatcgttatta

SEQ ID NO: 381591 - DNA, 25 bp, Artificial
  probe
  misc_feature (1)..(25): SEQ ID NO: 4389; WAN024F85; Start 921; Stop 945
aggtgatgagccttattatccagtt

SEQ ID NO: 381592 - DNA, 25 bp, Artificial
  probe
  misc_feature (1)..(25): SEQ ID NO: 4389; WAN024F85; Start 924; Stop 948
tgatgagccttattatccagttaat

SEQ ID NO: 381593 - DNA, 25 bp, Artificial
  probe
  misc_feature (1)..(25): SEQ ID NO: 4389; WAN024F85; Start 993; Stop 1017
tgatgagcaagggaatgttatcttt

SEQ ID NO: 381594 - DNA, 25 bp, Artificial
  probe
  misc_feature (1)..(25): SEQ ID NO: 4389; WAN024F85; Start 992; Stop 1016
ctgatgagcaagggaatgttatctt

SEQ ID NO: 381595 - DNA, 25 bp, Artificial
  probe
  misc_feature (1)..(25): SEQ ID NO: 4389; WAN024F85; Start 994; Stop 1018
gatgagcaagggaatgttatctttg

SEQ ID NO: 381596 - DNA, 25 bp, Artificial
  probe
  misc_feature (1)..(25): SEQ ID NO: 4389; WAN024F85; Start 733; Stop 757
gaactagagtaccgtagtcttcgtt

SEQ ID NO: 381597 - DNA, 25 bp, Artificial
  probe
  misc_feature (1)..(25): SEQ ID NO: 4389; WAN024F85; Start 411; Stop 435
tcttgtaggtacagacatctacgaa

SEQ ID NO: 381598 - DNA, 25 bp, Artificial
  probe
  misc_feature (1)..(25): SEQ ID NO: 4389; WAN024F85; Start 995; Stop 1019
atgagcaagggaatgttatctttgg

SEQ ID NO: 381599 - DNA, 25 bp, Artificial
  probe
  misc_feature (1)..(25): SEQ ID NO: 4389; WAN024F85; Start 410; Stop 434
ctcttgtaggtacagacatctacga

SEQ ID NO: 381600 - DNA, 25 bp, Artificial
  probe
  misc_feature (1)..(25): SEQ ID NO: 4389; WAN024F85; Start 409; Stop 433
tctcttgtaggtacagacatctacg

SEQ ID NO: 381601 - DNA, 25 bp, Artificial
  probe
  misc_feature (1)..(25): SEQ ID NO: 4389; WAN024F85; Start 408; Stop 432
ttctcttgtaggtacagacatctac

SEQ ID NO: 381602 - DNA, 25 bp, Artificial
  probe
  misc_feature (1)..(25): SEQ ID NO: 4389; WAN024F85; Start 404; Stop 428
cgatttctcttgtaggtacagacat

SEQ ID NO: 381603 - DNA, 25 bp, Artificial
  probe
  misc_feature (1)..(25): SEQ ID NO: 4389; WAN024F85; Start 1024; Stop 1048
cgcttaggacactatcgttattacg

SEQ ID NO: 381604 - DNA, 25 bp, Artificial
  probe
  misc_feature (1)..(25): SEQ ID NO: 4389; WAN024F85; Start 997; Stop 1021
gagcaagggaatgttatctttggtg

SEQ ID NO: 381605 - DNA, 25 bp, Artificial
  probe
  misc_feature (1)..(25): SEQ ID NO: 4389; WAN024F85; Start 406; Stop 430
atttctcttgtaggtacagacatct

SEQ ID NO: 381606 - DNA, 25 bp, Artificial
  probe
  misc_feature (1)..(25): SEQ ID NO: 4389; WAN024F85; Start 405; Stop 429
gatttctcttgtaggtacagacatc

SEQ ID NO: 381607 - DNA, 25 bp, Artificial
  probe
  misc_feature (1)..(25): SEQ ID NO: 4389; WAN024F85; Start 996; Stop 1020
tgagcaagggaatgttatctttggt

SEQ ID NO: 381608 - DNA, 25 bp, Artificial
  probe
  misc_feature (1)..(25): SEQ ID NO: 4389; WAN024F85; Start 407; Stop 431
tttctcttgtaggtacagacatcta

SEQ ID NO: 381609 - DNA, 25 bp, Artificial
  probe
  misc_feature (1)..(25): SEQ ID NO: 4389; WAN024F85; Start 734; Stop 758
aactagagtaccgtagtcttcgttt

SEQ ID NO: 381610 - DNA, 25 bp, Artificial
  probe
  misc_feature (1)..(25): SEQ ID NO: 4389; WAN024F85; Start 783; Stop 807
aaattaccaaggaaatgcagttgtg

SEQ ID NO: 381611 - DNA, 25 bp, Artificial
  probe
  misc_feature (1)..(25): SEQ ID NO: 4389; WAN024F85; Start 802; Stop 826
gttgtgaactatacggatgcagaaa

SEQ ID NO: 381612 - DNA, 25 bp, Artificial
  probe
  misc_feature (1)..(25): SEQ ID NO: 4389; WAN024F85; Start 785; Stop 809
attaccaaggaaatgcagttgtgaa

SEQ ID NO: 381613 - DNA, 25 bp, Artificial
  probe
  misc_feature (1)..(25): SEQ ID NO: 4389; WAN024F85; Start 784; Stop 808
aattaccaaggaaatgcagttgtga

SEQ ID NO: 381614 - DNA, 25 bp, Artificial
  probe
  misc_feature (1)..(25): SEQ ID NO: 4389; WAN024F85; Start 412; Stop 436
cttgtaggtacagacatctacgaaa

SEQ ID NO: 381615 - DNA, 25 bp, Artificial
  probe
  misc_feature (1)..(25): SEQ ID NO: 4389; WAN024F85; Start 403; Stop 427
gcgatttctcttgtaggtacagaca

SEQ ID NO: 381616 - DNA, 25 bp, Artificial
  probe
  misc_feature (1)..(25): SEQ ID NO: 4389; WAN024F85; Start 1349; Stop 1373
ccccaaaagttagacagaaagaatc

SEQ ID NO: 381617 - DNA, 25 bp, Artificial
  probe
  misc_feature (1)..(25): SEQ ID NO: 4389; WAN024F85; Start 1307; Stop 1331
cccacaataaaacgcatactatcaa

SEQ ID NO: 381618 - DNA, 25 bp, Artificial
  probe
  misc_feature (1)..(25): SEQ ID NO: 4389; WAN024F85; Start 796; Stop 820
aatgcagttgtgaactatacggatg

SEQ ID NO: 381619 - DNA, 25 bp, Artificial
  probe
  misc_feature (1)..(25): SEQ ID NO: 4389; WAN024F85; Start 1305; Stop 1329
tccccacaataaaacgcatactatc

SEQ ID NO: 381620 - DNA, 25 bp, Artificial
  probe
  misc_feature (1)..(25): SEQ ID NO: 4390; WAN024C7L; Start 90; Stop 114
gaacctctacttccacagccttatc

SEQ ID NO: 381621 - DNA, 25 bp, Artificial
  probe
  misc_feature (1)..(25): SEQ ID NO: 4390; WAN024C7L; Start 92; Stop 116
acctctacttccacagccttatctt

SEQ ID NO: 381622 - DNA, 25 bp, Artificial
  probe
  misc_feature (1)..(25): SEQ ID NO: 4390; WAN024C7L; Start 91; Stop 115
aacctctacttccacagccttatct

SEQ ID NO: 381623 - DNA, 25 bp, Artificial
  probe
  misc_feature (1)..(25): SEQ ID NO: 4390; WAN024C7L; Start 96; Stop 120
ctacttccacagccttatctttctt

SEQ ID NO: 381624 - DNA, 25 bp, Artificial
  probe
  misc_feature (1)..(25): SEQ ID NO: 4390; WAN024C7L; Start 98; Stop 122
acttccacagccttatctttcttaa

SEQ ID NO: 381625 - DNA, 25 bp, Artificial
  probe
  misc_feature (1)..(25): SEQ ID NO: 4390; WAN024C7L; Start 94; Stop 118
ctctacttccacagccttatctttc

SEQ ID NO: 381626 - DNA, 25 bp, Artificial
  probe
  misc_feature (1)..(25): SEQ ID NO: 4390; WAN024C7L; Start 97; Stop 121
tacttccacagccttatctttctta

SEQ ID NO: 381627 - DNA, 25 bp, Artificial
  probe
  misc_feature (1)..(25): SEQ ID NO: 4390; WAN024C7L; Start 95; Stop 119
tctacttccacagccttatctttct

SEQ ID NO: 381628 - DNA, 25 bp, Artificial
  probe
  misc_feature (1)..(25): SEQ ID NO: 4390; WAN024C7L; Start 99; Stop 123
cttccacagccttatctttcttaaa

SEQ ID NO: 381629 - DNA, 25 bp, Artificial
  probe
  misc_feature (1)..(25): SEQ ID NO: 4390; WAN024C7L; Start 93; Stop 117
cctctacttccacagccttatcttt

SEQ ID NO: 381630 - DNA, 25 bp, Artificial
  probe
  misc_feature (1)..(25): SEQ ID NO: 4390; WAN024C7L; Start 201; Stop 225
taagctatttattctcaggcaccaa

SEQ ID NO: 381631 - DNA, 25 bp, Artificial
  probe
  misc_feature (1)..(25): SEQ ID NO: 4390; WAN024C7L; Start 200; Stop 224
ctaagctatttattctcaggcacca

SEQ ID NO: 381632 - DNA, 25 bp, Artificial
  probe
  misc_feature (1)..(25): SEQ ID NO: 4390; WAN024C7L; Start 199; Stop 223
actaagctatttattctcaggcacc

SEQ ID NO: 381633 - DNA, 25 bp, Artificial
  probe
  misc_feature (1)..(25): SEQ ID NO: 4390; WAN024C7L; Start 198; Stop 222
cactaagctatttattctcaggcac

SEQ ID NO: 381634 - DNA, 25 bp, Artificial
  probe
  misc_feature (1)..(25): SEQ ID NO: 4390; WAN024C7L; Start 197; Stop 221
tcactaagctatttattctcaggca

SEQ ID NO: 381635 - DNA, 25 bp, Artificial
  probe
  misc_feature (1)..(25): SEQ ID NO: 4390; WAN024C7L; Start 202; Stop 226
aagctatttattctcaggcaccaag

SEQ ID NO: 381636 - DNA, 25 bp, Artificial
  probe
  misc_feature (1)..(25): SEQ ID NO: 4390; WAN024C7L; Start 196; Stop 220
atcactaagctatttattctcaggc

SEQ ID NO: 381637 - DNA, 25 bp, Artificial
  probe
  misc_feature (1)..(25): SEQ ID NO: 4390; WAN024C7L; Start 160; Stop 184
atcgtttcattataccatatttccc

SEQ ID NO: 381638 - DNA, 25 bp, Artificial
  probe
  misc_feature (1)..(25): SEQ ID NO: 4390; WAN024C7L; Start 181; Stop 205
tccccattttcttctatcactaagc

SEQ ID NO: 381639 - DNA, 25 bp, Artificial
  probe
  misc_feature (1)..(25): SEQ ID NO: 4390; WAN024C7L; Start 162; Stop 186
cgtttcattataccatatttcccca

SEQ ID NO: 381640 - DNA, 25 bp, Artificial
  probe
  misc_feature (1)..(25): SEQ ID NO: 4390; WAN024C7L; Start 161; Stop 185
tcgtttcattataccatatttcccc

SEQ ID NO: 381641 - DNA, 25 bp, Artificial
  probe
  misc_feature (1)..(25): SEQ ID NO: 4390; WAN024C7L; Start 100; Stop 124
ttccacagccttatctttcttaaaa

SEQ ID NO: 381642 - DNA, 25 bp, Artificial
  probe
  misc_feature (1)..(25): SEQ ID NO: 4390; WAN024C7L; Start 78; Stop 102
gaacctgtgtcggaacctctacttc

SEQ ID NO: 381643 - DNA, 25 bp, Artificial
  probe
  misc_feature (1)..(25): SEQ ID NO: 4390; WAN024C7L; Start 128; Stop 152
ccaaacatgatcttattcctattca

SEQ ID NO: 381644 - DNA, 25 bp, Artificial
  probe
  misc_feature (1)..(25): SEQ ID NO: 4390; WAN024C7L; Start 127; Stop 151
tccaaacatgatcttattcctattc

SEQ ID NO: 381645 - DNA, 25 bp, Artificial
  probe
  misc_feature (1)..(25): SEQ ID NO: 4390; WAN024C7L; Start 180; Stop 204
ttccccattttcttctatcactaag

SEQ ID NO: 381646 - DNA, 25 bp, Artificial
  probe
  misc_feature (1)..(25): SEQ ID NO: 4390; WAN024C7L; Start 173; Stop 197
accatatttccccattttcttctat

SEQ ID NO: 381647 - DNA, 25 bp, Artificial
  probe
  misc_feature (1)..(25): SEQ ID NO: 4390; WAN024C7L; Start 171; Stop 195
ataccatatttccccattttcttct

SEQ ID NO: 381648 - DNA, 25 bp, Artificial
  probe
  misc_feature (1)..(25): SEQ ID NO: 4390; WAN024C7L; Start 179; Stop 203
tttccccattttcttctatcactaa

SEQ ID NO: 381649 - DNA, 25 bp, Artificial
  probe
  misc_feature (1)..(25): SEQ ID NO: 4390; WAN024C7L; Start 178; Stop 202
atttccccattttcttctatcacta

SEQ ID NO: 381650 - DNA, 25 bp, Artificial
  probe
  misc_feature (1)..(25): SEQ ID NO: 4390; WAN024C7L; Start 177; Stop 201
tatttccccattttcttctatcact

SEQ ID NO: 381651 - DNA, 25 bp, Artificial
  probe
  misc_feature (1)..(25): SEQ ID NO: 4390; WAN024C7L; Start 50; Stop 74
ccatccatgatgatgccgatatgag

SEQ ID NO: 381652 - DNA, 25 bp, Artificial
  probe
  misc_feature (1)..(25): SEQ ID NO: 4390; WAN024C7L; Start 174; Stop 198
ccatatttccccattttcttctatc

SEQ ID NO: 381653 - DNA, 25 bp, Artificial
  probe
  misc_feature (1)..(25): SEQ ID NO: 4391; WAN024G84; Start 518; Stop 542
tggctaatatggcttacttgattga

SEQ ID NO: 381654 - DNA, 25 bp, Artificial
  probe
  misc_feature (1)..(25): SEQ ID NO: 4391; WAN024G84; Start 519; Stop 543
ggctaatatggcttacttgattgag

SEQ ID NO: 381655 - DNA, 25 bp, Artificial
  probe
  misc_feature (1)..(25): SEQ ID NO: 4391; WAN024G84; Start 735; Stop 759
ggttaatgctctcttctcttatcca

SEQ ID NO: 381656 - DNA, 25 bp, Artificial
  probe
  misc_feature (1)..(25): SEQ ID NO: 4391; WAN024G84; Start 517; Stop 541
ttggctaatatggcttacttgattg

SEQ ID NO: 381657 - DNA, 25 bp, Artificial
  probe
  misc_feature (1)..(25): SEQ ID NO: 4391; WAN024G84; Start 734; Stop 758
aggttaatgctctcttctcttatcc

SEQ ID NO: 381658 - DNA, 25 bp, Artificial
  probe
  misc_feature (1)..(25): SEQ ID NO: 4391; WAN024G84; Start 516; Stop 540
cttggctaatatggcttacttgatt

SEQ ID NO: 381659 - DNA, 25 bp, Artificial
  probe
  misc_feature (1)..(25): SEQ ID NO: 4391; WAN024G84; Start 739; Stop 763
aatgctctcttctcttatccaagtc

SEQ ID NO: 381660 - DNA, 25 bp, Artificial
  probe
  misc_feature (1)..(25): SEQ ID NO: 4391; WAN024G84; Start 515; Stop 539
gcttggctaatatggcttacttgat

SEQ ID NO: 381661 - DNA, 25 bp, Artificial
  probe
  misc_feature (1)..(25): SEQ ID NO: 4391; WAN024G84; Start 730; Stop 754
cctaaggttaatgctctcttctctt

SEQ ID NO: 381662 - DNA, 25 bp, Artificial
  probe
  misc_feature (1)..(25): SEQ ID NO: 4391; WAN024G84; Start 728; Stop 752
ttcctaaggttaatgctctcttctc

SEQ ID NO: 381663 - DNA, 25 bp, Artificial
  probe
  misc_feature (1)..(25): SEQ ID NO: 4391; WAN024G84; Start 390; Stop 414
agatgcttctgacctaccaattatt

SEQ ID NO: 381664 - DNA, 25 bp, Artificial
  probe
  misc_feature (1)..(25): SEQ ID NO: 4391; WAN024G84; Start 729; Stop 753
tcctaaggttaatgctctcttctct

SEQ ID NO: 381665 - DNA, 25 bp, Artificial
  probe
  misc_feature (1)..(25): SEQ ID NO: 4391; WAN024G84; Start 738; Stop 762
taatgctctcttctcttatccaagt

SEQ ID NO: 381666 - DNA, 25 bp, Artificial
  probe
  misc_feature (1)..(25): SEQ ID NO: 4391; WAN024G84; Start 727; Stop 751
attcctaaggttaatgctctcttct

SEQ ID NO: 381667 - DNA, 25 bp, Artificial
  probe
  misc_feature (1)..(25): SEQ ID NO: 4391; WAN024G84; Start 736; Stop 760
gttaatgctctcttctcttatccaa

SEQ ID NO: 381668 - DNA, 25 bp, Artificial
  probe
  misc_feature (1)..(25): SEQ ID NO: 4391; WAN024G84; Start 393; Stop 417
tgcttctgacctaccaattattatc

SEQ ID NO: 381669 - DNA, 25 bp, Artificial
  probe
  misc_feature (1)..(25): SEQ ID NO: 4391; WAN024G84; Start 391; Stop 415
gatgcttctgacctaccaattatta

SEQ ID NO: 381670 - DNA, 25 bp, Artificial
  probe
  misc_feature (1)..(25): SEQ ID NO: 4391; WAN024G84; Start 740; Stop 764
atgctctcttctcttatccaagtcc

SEQ ID NO: 381671 - DNA, 25 bp, Artificial
  probe
  misc_feature (1)..(25): SEQ ID NO: 4391; WAN024G84; Start 394; Stop 418
gcttctgacctaccaattattatct

SEQ ID NO: 381672 - DNA, 25 bp, Artificial
  probe
  misc_feature (1)..(25): SEQ ID NO: 4391; WAN024G84; Start 858; Stop 882
cattatcaaggttgtcgtagatggc

SEQ ID NO: 381673 - DNA, 25 bp, Artificial
  probe
  misc_feature (1)..(25): SEQ ID NO: 4391; WAN024G84; Start 857; Stop 881
gcattatcaaggttgtcgtagatgg

SEQ ID NO: 381674 - DNA, 25 bp, Artificial
  probe
  misc_feature (1)..(25): SEQ ID NO: 4391; WAN024G84; Start 737; Stop 761
ttaatgctctcttctcttatccaag

SEQ ID NO: 381675 - DNA, 25 bp, Artificial
  probe
  misc_feature (1)..(25): SEQ ID NO: 4391; WAN024G84; Start 733; Stop 757
aaggttaatgctctcttctcttatc

SEQ ID NO: 381676 - DNA, 25 bp, Artificial
  probe
  misc_feature (1)..(25): SEQ ID NO: 4391; WAN024G84; Start 745; Stop 769
ctcttctcttatccaagtcctgctc

SEQ ID NO: 381677 - DNA, 25 bp, Artificial
  probe
  misc_feature (1)..(25): SEQ ID NO: 4391; WAN024G84; Start 743; Stop 767
ctctcttctcttatccaagtcctgc

SEQ ID NO: 381678 - DNA, 25 bp, Artificial
  probe
  misc_feature (1)..(25): SEQ ID NO: 4391; WAN024G84; Start 742; Stop 766
gctctcttctcttatccaagtcctg

SEQ ID NO: 381679 - DNA, 25 bp, Artificial
  probe
  misc_feature (1)..(25): SEQ ID NO: 4391; WAN024G84; Start 856; Stop 880
cgcattatcaaggttgtcgtagatg

SEQ ID NO: 381680 - DNA, 25 bp, Artificial
  probe
  misc_feature (1)..(25): SEQ ID NO: 4391; WAN024G84; Start 392; Stop 416
atgcttctgacctaccaattattat

SEQ ID NO: 381681 - DNA, 25 bp, Artificial
  probe
  misc_feature (1)..(25): SEQ ID NO: 4391; WAN024G84; Start 744; Stop 768
tctcttctcttatccaagtcctgct

SEQ ID NO: 381682 - DNA, 25 bp, Artificial
  probe
  misc_feature (1)..(25): SEQ ID NO: 4391; WAN024G84; Start 741; Stop 765
tgctctcttctcttatccaagtcct

SEQ ID NO: 381683 - DNA, 25 bp, Artificial
  probe
  misc_feature (1)..(25): SEQ ID NO: 4391; WAN024G84; Start 333; Stop 357
tccttactacaacaaaccttctcaa

SEQ ID NO: 381684 - DNA, 25 bp, Artificial
  probe
  misc_feature (1)..(25): SEQ ID NO: 4391; WAN024G84; Start 332; Stop 356
ttccttactacaacaaaccttctca

SEQ ID NO: 381685 - DNA, 25 bp, Artificial
  probe
  misc_feature (1)..(25): SEQ ID NO: 4391; WAN024G84; Start 87; Stop 111
tattccagccttgattgagcattta

SEQ ID NO: 381686 - DNA, 25 bp, Artificial
  probe
  misc_feature (1)..(25): SEQ ID NO: 4392; WAN024C6P; Start 33; Stop 57
tgtcacgattcattatcttgagcaa

SEQ ID NO: 381687 - DNA, 25 bp, Artificial
  probe
  misc_feature (1)..(25): SEQ ID NO: 4392; WAN024C6P; Start 32; Stop 56
ttgtcacgattcattatcttgagca

SEQ ID NO: 381688 - DNA, 25 bp, Artificial
  probe
  misc_feature (1)..(25): SEQ ID NO: 4392; WAN024C6P; Start 42; Stop 66
tcattatcttgagcaagtagtccaa

SEQ ID NO: 381689 - DNA, 25 bp, Artificial
  probe
  misc_feature (1)..(25): SEQ ID NO: 4392; WAN024C6P; Start 41; Stop 65
ttcattatcttgagcaagtagtcca

SEQ ID NO: 381690 - DNA, 25 bp, Artificial
  probe
  misc_feature (1)..(25): SEQ ID NO: 4392; WAN024C6P; Start 34; Stop 58
gtcacgattcattatcttgagcaag

SEQ ID NO: 381691 - DNA, 25 bp, Artificial
  probe
  misc_feature (1)..(25): SEQ ID NO: 4392; WAN024C6P; Start 35; Stop 59
tcacgattcattatcttgagcaagt

SEQ ID NO: 381692 - DNA, 25 bp, Artificial
  probe
  misc_feature (1)..(25): SEQ ID NO: 4392; WAN024C6P; Start 36; Stop 60
cacgattcattatcttgagcaagta

SEQ ID NO: 381693 - DNA, 25 bp, Artificial
  probe
  misc_feature (1)..(25): SEQ ID NO: 4392; WAN024C6P; Start 38; Stop 62
cgattcattatcttgagcaagtagt

SEQ ID NO: 381694 - DNA, 25 bp, Artificial
  probe
  misc_feature (1)..(25): SEQ ID NO: 4392; WAN024C6P; Start 37; Stop 61
acgattcattatcttgagcaagtag

SEQ ID NO: 381695 - DNA, 25 bp, Artificial
  probe
  misc_feature (1)..(25): SEQ ID NO: 4392; WAN024C6P; Start 40; Stop 64
attcattatcttgagcaagtagtcc

SEQ ID NO: 381696 - DNA, 25 bp, Artificial
  probe
  misc_feature (1)..(25): SEQ ID NO: 4392; WAN024C6P; Start 127; Stop 151
ggtattgatagaaagttgatgctgg

SEQ ID NO: 381697 - DNA, 25 bp, Artificial
  probe
  misc_feature (1)..(25): SEQ ID NO: 4392; WAN024C6P; Start 124; Stop 148
ccaggtattgatagaaagttgatgc

SEQ ID NO: 381698 - DNA, 25 bp, Artificial
  probe
  misc_feature (1)..(25): SEQ ID NO: 4392; WAN024C6P; Start 134; Stop 158
atagaaagttgatgctggtagaagg

SEQ ID NO: 381699 - DNA, 25 bp, Artificial
  probe
  misc_feature (1)..(25): SEQ ID NO: 4392; WAN024C6P; Start 132; Stop 156
tgatagaaagttgatgctggtagaa

SEQ ID NO: 381700 - DNA, 25 bp, Artificial
  probe
  misc_feature (1)..(25): SEQ ID NO: 4392; WAN024C6P; Start 131; Stop 155
ttgatagaaagttgatgctggtaga

SEQ ID NO: 381701 - DNA, 25 bp, Artificial
  probe
  misc_feature (1)..(25): SEQ ID NO: 4392; WAN024C6P; Start 133; Stop 157
gatagaaagttgatgctggtagaag

SEQ ID NO: 381702 - DNA, 25 bp, Artificial
  probe
  misc_feature (1)..(25): SEQ ID NO: 4392; WAN024C6P; Start 123; Stop 147
cccaggtattgatagaaagttgatg

SEQ ID NO: 381703 - DNA, 25 bp, Artificial
  probe
  misc_feature (1)..(25): SEQ ID NO: 4392; WAN024C6P; Start 128; Stop 152
gtattgatagaaagttgatgctggt

SEQ ID NO: 381704 - DNA, 25 bp, Artificial
  probe
  misc_feature (1)..(25): SEQ ID NO: 4392; WAN024C6P; Start 4; Stop 28
ttcatctccaaaggcaatcaaatct

SEQ ID NO: 381705 - DNA, 25 bp, Artificial
  probe
  misc_feature (1)..(25): SEQ ID NO: 4392; WAN024C6P; Start 3; Stop 27
gttcatctccaaaggcaatcaaatc

SEQ ID NO: 381706 - DNA, 25 bp, Artificial
  probe
  misc_feature (1)..(25): SEQ ID NO: 4392; WAN024C6P; Start 130; Stop 154
attgatagaaagttgatgctggtag

SEQ ID NO: 381707 - DNA, 25 bp, Artificial
  probe
  misc_feature (1)..(25): SEQ ID NO: 4392; WAN024C6P; Start 126; Stop 150
aggtattgatagaaagttgatgctg

SEQ ID NO: 381708 - DNA, 25 bp, Artificial
  probe
  misc_feature (1)..(25): SEQ ID NO: 4392; WAN024C6P; Start 125; Stop 149
caggtattgatagaaagttgatgct

SEQ ID NO: 381709 - DNA, 25 bp, Artificial
  probe
  misc_feature (1)..(25): SEQ ID NO: 4392; WAN024C6P; Start 5; Stop 29
tcatctccaaaggcaatcaaatctt

SEQ ID NO: 381710 - DNA, 25 bp, Artificial
  probe
  misc_feature (1)..(25): SEQ ID NO: 4392; WAN024C6P; Start 2; Stop 26
tgttcatctccaaaggcaatcaaat

SEQ ID NO: 381711 - DNA, 25 bp, Artificial
  probe
  misc_feature (1)..(25): SEQ ID NO: 4392; WAN024C6P; Start 31; Stop 55
tttgtcacgattcattatcttgagc

SEQ ID NO: 381712 - DNA, 25 bp, Artificial
  probe
  misc_feature (1)..(25): SEQ ID NO: 4392; WAN024C6P; Start 39; Stop 63
gattcattatcttgagcaagtagtc

SEQ ID NO: 381713 - DNA, 25 bp, Artificial
  probe
  misc_feature (1)..(25): SEQ ID NO: 4392; WAN024C6P; Start 129; Stop 153
tattgatagaaagttgatgctggta

SEQ ID NO: 381714 - DNA, 25 bp, Artificial
  probe
  misc_feature (1)..(25): SEQ ID NO: 4392; WAN024C6P; Start 43; Stop 67
cattatcttgagcaagtagtccaaa

SEQ ID NO: 381715 - DNA, 25 bp, Artificial
  probe
  misc_feature (1)..(25): SEQ ID NO: 4392; WAN024C6P; Start 45; Stop 69
ttatcttgagcaagtagtccaaagc

SEQ ID NO: 381716 - DNA, 25 bp, Artificial
  probe
  misc_feature (1)..(25): SEQ ID NO: 4392; WAN024C6P; Start 44; Stop 68
attatcttgagcaagtagtccaaag

SEQ ID NO: 381717 - DNA, 25 bp, Artificial
  probe
  misc_feature (1)..(25): SEQ ID NO: 4392; WAN024C6P; Start 135; Stop 159
tagaaagttgatgctggtagaaggc

SEQ ID NO: 381718 - DNA, 25 bp, Artificial
  probe
  misc_feature (1)..(25): SEQ ID NO: 4392; WAN024C6P; Start 95; Stop 119
gtacattcaaggatattgagcggac

SEQ ID NO: 381719 - DNA, 25 bp, Artificial
  probe
  misc_feature (1)..(25): SEQ ID NO: 4393; WAN024A5M; Start 48; Stop 72
attacaaagtttggtgtgctgattt

SEQ ID NO: 381720 - DNA, 25 bp, Artificial
  probe
  misc_feature (1)..(25): SEQ ID NO: 4393; WAN024A5M; Start 47; Stop 71
aattacaaagtttggtgtgctgatt

SEQ ID NO: 381721 - DNA, 25 bp, Artificial
  probe
  misc_feature (1)..(25): SEQ ID NO: 4393; WAN024A5M; Start 97; Stop 121
gagagtaaatctttatggaggaagt

SEQ ID NO: 381722 - DNA, 25 bp, Artificial
  probe
  misc_feature (1)..(25): SEQ ID NO: 4393; WAN024A5M; Start 45; Stop 69
ttaattacaaagtttggtgtgctga

SEQ ID NO: 381723 - DNA, 25 bp, Artificial
  probe
  misc_feature (1)..(25): SEQ ID NO: 4393; WAN024A5M; Start 46; Stop 70
taattacaaagtttggtgtgctgat

SEQ ID NO: 381724 - DNA, 25 bp, Artificial
  probe
  misc_feature (1)..(25): SEQ ID NO: 4393; WAN024A5M; Start 96; Stop 120
agagagtaaatctttatggaggaag

SEQ ID NO: 381725 - DNA, 25 bp, Artificial
  probe
  misc_feature (1)..(25): SEQ ID NO: 4393; WAN024A5M; Start 44; Stop 68
tttaattacaaagtttggtgtgctg

SEQ ID NO: 381726 - DNA, 25 bp, Artificial
  probe
  misc_feature (1)..(25): SEQ ID NO: 4393; WAN024A5M; Start 49; Stop 73
ttacaaagtttggtgtgctgatttg

SEQ ID NO: 381727 - DNA, 25 bp, Artificial
  probe
  misc_feature (1)..(25): SEQ ID NO: 4393; WAN024A5M; Start 52; Stop 76
caaagtttggtgtgctgatttgtag

SEQ ID NO: 381728 - DNA, 25 bp, Artificial
  probe
  misc_feature (1)..(25): SEQ ID NO: 4393; WAN024A5M; Start 94; Stop 118
caagagagtaaatctttatggagga

SEQ ID NO: 381729 - DNA, 25 bp, Artificial
  probe
  misc_feature (1)..(25): SEQ ID NO: 4393; WAN024A5M; Start 93; Stop 117
tcaagagagtaaatctttatggagg

SEQ ID NO: 381730 - DNA, 25 bp, Artificial
  probe
  misc_feature (1)..(25): SEQ ID NO: 4393; WAN024A5M; Start 76; Stop 100
gccttttcatggtataatcaagaga

SEQ ID NO: 381731 - DNA, 25 bp, Artificial
  probe
  misc_feature (1)..(25): SEQ ID NO: 4393; WAN024A5M; Start 75; Stop 99
agccttttcatggtataatcaagag

SEQ ID NO: 381732 - DNA, 25 bp, Artificial
  probe
  misc_feature (1)..(25): SEQ ID NO: 4393; WAN024A5M; Start 66; Stop 90
ctgatttgtagccttttcatggtat

SEQ ID NO: 381733 - DNA, 25 bp, Artificial
  probe
  misc_feature (1)..(25): SEQ ID NO: 4393; WAN024A5M; Start 53; Stop 77
aaagtttggtgtgctgatttgtagc

SEQ ID NO: 381734 - DNA, 25 bp, Artificial
  probe
  misc_feature (1)..(25): SEQ ID NO: 4393; WAN024A5M; Start 72; Stop 96
tgtagccttttcatggtataatcaa

SEQ ID NO: 381735 - DNA, 25 bp, Artificial
  probe
  misc_feature (1)..(25): SEQ ID NO: 4393; WAN024A5M; Start 71; Stop 95
ttgtagccttttcatggtataatca

SEQ ID NO: 381736 - DNA, 25 bp, Artificial
  probe
  misc_feature (1)..(25): SEQ ID NO: 4393; WAN024A5M; Start 95; Stop 119
aagagagtaaatctttatggaggaa

SEQ ID NO: 381737 - DNA, 25 bp, Artificial
  probe
  misc_feature (1)..(25): SEQ ID NO: 4393; WAN024A5M; Start 67; Stop 91
tgatttgtagccttttcatggtata

SEQ ID NO: 381738 - DNA, 25 bp, Artificial
  probe
  misc_feature (1)..(25): SEQ ID NO: 4393; WAN024A5M; Start 73; Stop 97
gtagccttttcatggtataatcaag

SEQ ID NO: 381739 - DNA, 25 bp, Artificial
  probe
  misc_feature (1)..(25): SEQ ID NO: 4393; WAN024A5M; Start 74; Stop 98
tagccttttcatggtataatcaaga

SEQ ID NO: 381740 - DNA, 25 bp, Artificial
  probe
  misc_feature (1)..(25): SEQ ID NO: 4393; WAN024A5M; Start 43; Stop 67
ttttaattacaaagtttggtgtgct

SEQ ID NO: 381741 - DNA, 25 bp, Artificial
  probe
  misc_feature (1)..(25): SEQ ID NO: 4393; WAN024A5M; Start 70; Stop 94
tttgtagccttttcatggtataatc

SEQ ID NO: 381742 - DNA, 25 bp, Artificial
  probe
  misc_feature (1)..(25): SEQ ID NO: 4393; WAN024A5M; Start 68; Stop 92
gatttgtagccttttcatggtataa

SEQ ID NO: 381743 - DNA, 25 bp, Artificial
  probe
  misc_feature (1)..(25): SEQ ID NO: 4393; WAN024A5M; Start 77; Stop 101
ccttttcatggtataatcaagagag

SEQ ID NO: 381744 - DNA, 25 bp, Artificial
  probe
  misc_feature (1)..(25): SEQ ID NO: 4393; WAN024A5M; Start 57; Stop 81
tttggtgtgctgatttgtagccttt

SEQ ID NO: 381745 - DNA, 25 bp, Artificial
  probe
  misc_feature (1)..(25): SEQ ID NO: 4393; WAN024A5M; Start 81; Stop 105
ttcatggtataatcaagagagtaaa

SEQ ID NO: 381746 - DNA, 25 bp, Artificial
  probe
  misc_feature (1)..(25): SEQ ID NO: 4393; WAN024A5M; Start 80; Stop 104
tttcatggtataatcaagagagtaa

SEQ ID NO: 381747 - DNA, 25 bp, Artificial
  probe
  misc_feature (1)..(25): SEQ ID NO: 4393; WAN024A5M; Start 42; Stop 66
attttaattacaaagtttggtgtgc

SEQ ID NO: 381748 - DNA, 25 bp, Artificial
  probe
  misc_feature (1)..(25): SEQ ID NO: 4393; WAN024A5M; Start 65; Stop 89
gctgatttgtagccttttcatggta

SEQ ID NO: 381749 - DNA, 25 bp, Artificial
  probe
  misc_feature (1)..(25): SEQ ID NO: 4393; WAN024A5M; Start 92; Stop 116
atcaagagagtaaatctttatggag

SEQ ID NO: 381750 - DNA, 25 bp, Artificial
  probe
  misc_feature (1)..(25): SEQ ID NO: 4393; WAN024A5M; Start 69; Stop 93
atttgtagccttttcatggtataat

SEQ ID NO: 381751 - DNA, 25 bp, Artificial
  probe
  misc_feature (1)..(25): SEQ ID NO: 4393; WAN024A5M; Start 82; Stop 106
tcatggtataatcaagagagtaaat

SEQ ID NO: 381752 - DNA, 25 bp, Artificial
  probe
  misc_feature (1)..(25): SEQ ID NO: 4394; WAN024AS5; Start 12; Stop 36
aatcaagtttattaggacaacaaat

SEQ ID NO: 381753 - DNA, 25 bp, Artificial
  probe
  misc_feature (1)..(25): SEQ ID NO: 4394; WAN024AS5; Start 10; Stop 34
ctaatcaagtttattaggacaacaa

SEQ ID NO: 381754 - DNA, 25 bp, Artificial
  probe
  misc_feature (1)..(25): SEQ ID NO: 4395; WAN024AF6; Start 41; Stop 65
atagtgtaaacgataacaggaggtg

SEQ ID NO: 381755 - DNA, 25 bp, Artificial
  probe
  misc_feature (1)..(25): SEQ ID NO: 4395; WAN024AF6; Start 40; Stop 64
aatagtgtaaacgataacaggaggt

SEQ ID NO: 381756 - DNA, 25 bp, Artificial
  probe
  misc_feature (1)..(25): SEQ ID NO: 4395; WAN024AF6; Start 45; Stop 69
tgtaaacgataacaggaggtgattc

SEQ ID NO: 381757 - DNA, 25 bp, Artificial
  probe
  misc_feature (1)..(25): SEQ ID NO: 4395; WAN024AF6; Start 44; Stop 68
gtgtaaacgataacaggaggtgatt

SEQ ID NO: 381758 - DNA, 25 bp, Artificial
  probe
  misc_feature (1)..(25): SEQ ID NO: 4395; WAN024AF6; Start 42; Stop 66
tagtgtaaacgataacaggaggtga

SEQ ID NO: 381759 - DNA, 25 bp, Artificial
  probe
  misc_feature (1)..(25): SEQ ID NO: 4395; WAN024AF6; Start 39; Stop 63
gaatagtgtaaacgataacaggagg

SEQ ID NO: 381760 - DNA, 25 bp, Artificial
  probe
  misc_feature (1)..(25): SEQ ID NO: 4395; WAN024AF6; Start 43; Stop 67
agtgtaaacgataacaggaggtgat

SEQ ID NO: 381761 - DNA, 25 bp, Artificial
  probe
  misc_feature (1)..(25): SEQ ID NO: 4395; WAN024AF6; Start 38; Stop 62
tgaatagtgtaaacgataacaggag

SEQ ID NO: 381762 - DNA, 25 bp, Artificial
  probe
  misc_feature (1)..(25): SEQ ID NO: 4395; WAN024AF6; Start 37; Stop 61
atgaatagtgtaaacgataacagga

SEQ ID NO: 381763 - DNA, 25 bp, Artificial
  probe
  misc_feature (1)..(25): SEQ ID NO: 4395; WAN024AF6; Start 36; Stop 60
aatgaatagtgtaaacgataacagg

SEQ ID NO: 381764 - DNA, 25 bp, Artificial
  probe
  misc_feature (1)..(25): SEQ ID NO: 4395; WAN024AF6; Start 34; Stop 58
agaatgaatagtgtaaacgataaca

SEQ ID NO: 381765 - DNA, 25 bp, Artificial
  probe
  misc_feature (1)..(25): SEQ ID NO: 4395; WAN024AF6; Start 30; Stop 54
tgatagaatgaatagtgtaaacgat

SEQ ID NO: 381766 - DNA, 25 bp, Artificial
  probe
  misc_feature (1)..(25): SEQ ID NO: 4395; WAN024AF6; Start 29; Stop 53
atgatagaatgaatagtgtaaacga

SEQ ID NO: 381767 - DNA, 25 bp, Artificial
  probe
  misc_feature (1)..(25): SEQ ID NO: 4395; WAN024AF6; Start 35; Stop 59
gaatgaatagtgtaaacgataacag

SEQ ID NO: 381768 - DNA, 25 bp, Artificial
  probe
  misc_feature (1)..(25): SEQ ID NO: 4396; WAN024AAO; Start 7; Stop 31
ctagttgatgaagattatggtacat

SEQ ID NO: 381769 - DNA, 25 bp, Artificial
  probe
  misc_feature (1)..(25): SEQ ID NO: 4396; WAN024AAO; Start 6; Stop 30
actagttgatgaagattatggtaca

SEQ ID NO: 381770 - DNA, 25 bp, Artificial
  probe
  misc_feature (1)..(25): SEQ ID NO: 4396; WAN024AAO; Start 8; Stop 32
tagttgatgaagattatggtacatt

SEQ ID NO: 381771 - DNA, 25 bp, Artificial
  probe
  misc_feature (1)..(25): SEQ ID NO: 4396; WAN024AAO; Start 56; Stop 80
ggctagttactaaacttgtaaagga

SEQ ID NO: 381772 - DNA, 25 bp, Artificial
  probe
  misc_feature (1)..(25): SEQ ID NO: 4396; WAN024AAO; Start 9; Stop 33
agttgatgaagattatggtacattt

SEQ ID NO: 381773 - DNA, 25 bp, Artificial
  probe
  misc_feature (1)..(25): SEQ ID NO: 4396; WAN024AAO; Start 55; Stop 79
aggctagttactaaacttgtaaagg

SEQ ID NO: 381774 - DNA, 25 bp, Artificial
  probe
  misc_feature (1)..(25): SEQ ID NO: 4396; WAN024AAO; Start 10; Stop 34
gttgatgaagattatggtacatttc

SEQ ID NO: 381775 - DNA, 25 bp, Artificial
  probe
  misc_feature (1)..(25): SEQ ID NO: 4396; WAN024AAO; Start 61; Stop 85
gttactaaacttgtaaaggagaact

SEQ ID NO: 381776 - DNA, 25 bp, Artificial
  probe
  misc_feature (1)..(25): SEQ ID NO: 4396; WAN024AAO; Start 64; Stop 88
actaaacttgtaaaggagaacttaa

SEQ ID NO: 381777 - DNA, 25 bp, Artificial
  probe
  misc_feature (1)..(25): SEQ ID NO: 4396; WAN024AAO; Start 57; Stop 81
gctagttactaaacttgtaaaggag

SEQ ID NO: 381778 - DNA, 25 bp, Artificial
  probe
  misc_feature (1)..(25): SEQ ID NO: 4396; WAN024AAO; Start 62; Stop 86
ttactaaacttgtaaaggagaactt

SEQ ID NO: 381779 - DNA, 25 bp, Artificial
  probe
  misc_feature (1)..(25): SEQ ID NO: 4396; WAN024AAO; Start 54; Stop 78
aaggctagttactaaacttgtaaag

SEQ ID NO: 381780 - DNA, 25 bp, Artificial
  probe
  misc_feature (1)..(25): SEQ ID NO: 4396; WAN024AAO; Start 63; Stop 87
tactaaacttgtaaaggagaactta

SEQ ID NO: 381781 - DNA, 25 bp, Artificial
  probe
  misc_feature (1)..(25): SEQ ID NO: 4396; WAN024AAO; Start 60; Stop 84
agttactaaacttgtaaaggagaac

SEQ ID NO: 381782 - DNA, 25 bp, Artificial
  probe
  misc_feature (1)..(25): SEQ ID NO: 4396; WAN024AAO; Start 11; Stop 35
ttgatgaagattatggtacatttca

SEQ ID NO: 381783 - DNA, 25 bp, Artificial
  probe
  misc_feature (1)..(25): SEQ ID NO: 4396; WAN024AAO; Start 15; Stop 39
tgaagattatggtacatttcatacc

SEQ ID NO: 381784 - DNA, 25 bp, Artificial
  probe
  misc_feature (1)..(25): SEQ ID NO: 4396; WAN024AAO; Start 16; Stop 40
gaagattatggtacatttcatacct

SEQ ID NO: 381785 - DNA, 25 bp, Artificial
  probe
  misc_feature (1)..(25): SEQ ID NO: 4396; WAN024AAO; Start 58; Stop 82
ctagttactaaacttgtaaaggaga

SEQ ID NO: 381786 - DNA, 25 bp, Artificial
  probe
  misc_feature (1)..(25): SEQ ID NO: 4396; WAN024AAO; Start 53; Stop 77
taaggctagttactaaacttgtaaa

SEQ ID NO: 381787 - DNA, 25 bp, Artificial
  probe
  misc_feature (1)..(25): SEQ ID NO: 4396; WAN024AAO; Start 17; Stop 41
aagattatggtacatttcatacctt

SEQ ID NO: 381788 - DNA, 25 bp, Artificial
  probe
  misc_feature (1)..(25): SEQ ID NO: 4396; WAN024AAO; Start 52; Stop 76
ataaggctagttactaaacttgtaa

SEQ ID NO: 381789 - DNA, 25 bp, Artificial
  probe
  misc_feature (1)..(25): SEQ ID NO: 4396; WAN024AAO; Start 51; Stop 75
aataaggctagttactaaacttgta

SEQ ID NO: 381790 - DNA, 25 bp, Artificial
  probe
  misc_feature (1)..(25): SEQ ID NO: 4396; WAN024AAO; Start 50; Stop 74
taataaggctagttactaaacttgt

SEQ ID NO: 381791 - DNA, 25 bp, Artificial
  probe
  misc_feature (1)..(25): SEQ ID NO: 4396; WAN024AAO; Start 59; Stop 83
tagttactaaacttgtaaaggagaa

SEQ ID NO: 381792 - DNA, 25 bp, Artificial
  probe
  misc_feature (1)..(25): SEQ ID NO: 4396; WAN024AAO; Start 18; Stop 42
agattatggtacatttcatacctta

SEQ ID NO: 381793 - DNA, 25 bp, Artificial
  probe
  misc_feature (1)..(25): SEQ ID NO: 4396; WAN024AAO; Start 12; Stop 36
tgatgaagattatggtacatttcat

SEQ ID NO: 381794 - DNA, 25 bp, Artificial
  probe
  misc_feature (1)..(25): SEQ ID NO: 4396; WAN024AAO; Start 14; Stop 38
atgaagattatggtacatttcatac

SEQ ID NO: 381795 - DNA, 25 bp, Artificial
  probe
  misc_feature (1)..(25): SEQ ID NO: 4397; WAN0249I2; Start 61; Stop 85
tgttacaaggaatagacagttctgt

SEQ ID NO: 381796 - DNA, 25 bp, Artificial
  probe
  misc_feature (1)..(25): SEQ ID NO: 4397; WAN0249I2; Start 60; Stop 84
ttgttacaaggaatagacagttctg

SEQ ID NO: 381797 - DNA, 25 bp, Artificial
  probe
  misc_feature (1)..(25): SEQ ID NO: 4397; WAN0249I2; Start 62; Stop 86
gttacaaggaatagacagttctgtt

SEQ ID NO: 381798 - DNA, 25 bp, Artificial
  probe
  misc_feature (1)..(25): SEQ ID NO: 4397; WAN0249I2; Start 22; Stop 46
gtgacagagacctaacaaactattt

SEQ ID NO: 381799 - DNA, 25 bp, Artificial
  probe
  misc_feature (1)..(25): SEQ ID NO: 4397; WAN0249I2; Start 24; Stop 48
gacagagacctaacaaactatttca

SEQ ID NO: 381800 - DNA, 25 bp, Artificial
  probe
  misc_feature (1)..(25): SEQ ID NO: 4397; WAN0249I2; Start 23; Stop 47
tgacagagacctaacaaactatttc

SEQ ID NO: 381801 - DNA, 25 bp, Artificial
  probe
  misc_feature (1)..(25): SEQ ID NO: 4397; WAN0249I2; Start 133; Stop 157
agacaggtactcatttgaaaggaat

SEQ ID NO: 381802 - DNA, 25 bp, Artificial
  probe
  misc_feature (1)..(25): SEQ ID NO: 4397; WAN0249I2; Start 132; Stop 156
tagacaggtactcatttgaaaggaa

SEQ ID NO: 381803 - DNA, 25 bp, Artificial
  probe
  misc_feature (1)..(25): SEQ ID NO: 4397; WAN0249I2; Start 134; Stop 158
gacaggtactcatttgaaaggaatt

SEQ ID NO: 381804 - DNA, 25 bp, Artificial
  probe
  misc_feature (1)..(25): SEQ ID NO: 4397; WAN0249I2; Start 131; Stop 155
atagacaggtactcatttgaaagga

SEQ ID NO: 381805 - DNA, 25 bp, Artificial
  probe
  misc_feature (1)..(25): SEQ ID NO: 4397; WAN0249I2; Start 25; Stop 49
acagagacctaacaaactatttcaa

SEQ ID NO: 381806 - DNA, 25 bp, Artificial
  probe
  misc_feature (1)..(25): SEQ ID NO: 4397; WAN0249I2; Start 21; Stop 45
tgtgacagagacctaacaaactatt

SEQ ID NO: 381807 - DNA, 25 bp, Artificial
  probe
  misc_feature (1)..(25): SEQ ID NO: 4397; WAN0249I2; Start 135; Stop 159
acaggtactcatttgaaaggaattt

SEQ ID NO: 381808 - DNA, 25 bp, Artificial
  probe
  misc_feature (1)..(25): SEQ ID NO: 4397; WAN0249I2; Start 136; Stop 160
caggtactcatttgaaaggaatttg

SEQ ID NO: 381809 - DNA, 25 bp, Artificial
  probe
  misc_feature (1)..(25): SEQ ID NO: 4397; WAN0249I2; Start 26; Stop 50
cagagacctaacaaactatttcaag

SEQ ID NO: 381810 - DNA, 25 bp, Artificial
  probe
  misc_feature (1)..(25): SEQ ID NO: 4397; WAN0249I2; Start 64; Stop 88
tacaaggaatagacagttctgttaa

SEQ ID NO: 381811 - DNA, 25 bp, Artificial
  probe
  misc_feature (1)..(25): SEQ ID NO: 4397; WAN0249I2; Start 63; Stop 87
ttacaaggaatagacagttctgtta

SEQ ID NO: 381812 - DNA, 25 bp, Artificial
  probe
  misc_feature (1)..(25): SEQ ID NO: 4397; WAN0249I2; Start 137; Stop 161
aggtactcatttgaaaggaatttga

SEQ ID NO: 381813 - DNA, 25 bp, Artificial
  probe
  misc_feature (1)..(25): SEQ ID NO: 4397; WAN0249I2; Start 27; Stop 51
agagacctaacaaactatttcaagt

SEQ ID NO: 381814 - DNA, 25 bp, Artificial
  probe
  misc_feature (1)..(25): SEQ ID NO: 4397; WAN0249I2; Start 141; Stop 165
actcatttgaaaggaatttgaaaga

SEQ ID NO: 381815 - DNA, 25 bp, Artificial
  probe
  misc_feature (1)..(25): SEQ ID NO: 4397; WAN0249I2; Start 138; Stop 162
ggtactcatttgaaaggaatttgaa

SEQ ID NO: 381816 - DNA, 25 bp, Artificial
  probe
  misc_feature (1)..(25): SEQ ID NO: 4397; WAN0249I2; Start 57; Stop 81
agtttgttacaaggaatagacagtt

SEQ ID NO: 381817 - DNA, 25 bp, Artificial
  probe
  misc_feature (1)..(25): SEQ ID NO: 4397; WAN0249I2; Start 58; Stop 82
gtttgttacaaggaatagacagttc

SEQ ID NO: 381818 - DNA, 25 bp, Artificial
  probe
  misc_feature (1)..(25): SEQ ID NO: 4397; WAN0249I2; Start 59; Stop 83
tttgttacaaggaatagacagttct

SEQ ID NO: 381819 - DNA, 25 bp, Artificial
  probe
  misc_feature (1)..(25): SEQ ID NO: 4397; WAN0249I2; Start 31; Stop 55
acctaacaaactatttcaagtaacc

SEQ ID NO: 381820 - DNA, 25 bp, Artificial
  probe
  misc_feature (1)..(25): SEQ ID NO: 4397; WAN0249I2; Start 54; Stop 78
cctagtttgttacaaggaatagaca

SEQ ID NO: 381821 - DNA, 25 bp, Artificial
  probe
  misc_feature (1)..(25): SEQ ID NO: 4397; WAN0249I2; Start 53; Stop 77
acctagtttgttacaaggaatagac

SEQ ID NO: 381822 - DNA, 25 bp, Artificial
  probe
  misc_feature (1)..(25): SEQ ID NO: 4397; WAN0249I2; Start 65; Stop 89
acaaggaatagacagttctgttaaa

SEQ ID NO: 381823 - DNA, 25 bp, Artificial
  probe
  misc_feature (1)..(25): SEQ ID NO: 4397; WAN0249I2; Start 32; Stop 56
cctaacaaactatttcaagtaacct

SEQ ID NO: 381824 - DNA, 25 bp, Artificial
  probe
  misc_feature (1)..(25): SEQ ID NO: 4397; WAN0249I2; Start 56; Stop 80
tagtttgttacaaggaatagacagt

SEQ ID NO: 381825 - DNA, 25 bp, Artificial
  probe
  misc_feature (1)..(25): SEQ ID NO: 4397; WAN0249I2; Start 52; Stop 76
aacctagtttgttacaaggaataga

SEQ ID NO: 381826 - DNA, 25 bp, Artificial
  probe
  misc_feature (1)..(25): SEQ ID NO: 4397; WAN0249I2; Start 70; Stop 94
gaatagacagttctgttaaataggc

SEQ ID NO: 381827 - DNA, 25 bp, Artificial
  probe
  misc_feature (1)..(25): SEQ ID NO: 4397; WAN0249I2; Start 55; Stop 79
ctagtttgttacaaggaatagacag

SEQ ID NO: 381828 - DNA, 25 bp, Artificial
  probe
  misc_feature (1)..(25): SEQ ID NO: 4398; WAN024A9M; Start 4; Stop 28
aaagtgaaaagactactggaagttt

SEQ ID NO: 381829 - DNA, 25 bp, Artificial
  probe
  misc_feature (1)..(25): SEQ ID NO: 4398; WAN024A9M; Start 3; Stop 27
aaaagtgaaaagactactggaagtt

SEQ ID NO: 381830 - DNA, 25 bp, Artificial
  probe
  misc_feature (1)..(25): SEQ ID NO: 4398; WAN024A9M; Start 5; Stop 29
aagtgaaaagactactggaagttta

SEQ ID NO: 381831 - DNA, 25 bp, Artificial
  probe
  misc_feature (1)..(25): SEQ ID NO: 4398; WAN024A9M; Start 6; Stop 30
agtgaaaagactactggaagtttat

SEQ ID NO: 381832 - DNA, 25 bp, Artificial
  probe
  misc_feature (1)..(25): SEQ ID NO: 4398; WAN024A9M; Start 7; Stop 31
gtgaaaagactactggaagtttatt

SEQ ID NO: 381833 - DNA, 25 bp, Artificial
  probe
  misc_feature (1)..(25): SEQ ID NO: 4398; WAN024A9M; Start 11; Stop 35
aaagactactggaagtttattttga

SEQ ID NO: 381834 - DNA, 25 bp, Artificial
  probe
  misc_feature (1)..(25): SEQ ID NO: 4398; WAN024A9M; Start 8; Stop 32
tgaaaagactactggaagtttattt

SEQ ID NO: 381835 - DNA, 25 bp, Artificial
  probe
  misc_feature (1)..(25): SEQ ID NO: 4398; WAN024A9M; Start 12; Stop 36
aagactactggaagtttattttgat

SEQ ID NO: 381836 - DNA, 25 bp, Artificial
  probe
  misc_feature (1)..(25): SEQ ID NO: 4398; WAN024A9M; Start 10; Stop 34
aaaagactactggaagtttattttg

SEQ ID NO: 381837 - DNA, 25 bp, Artificial
  probe
  misc_feature (1)..(25): SEQ ID NO: 4398; WAN024A9M; Start 13; Stop 37
agactactggaagtttattttgata

SEQ ID NO: 381838 - DNA, 25 bp, Artificial
  probe
  misc_feature (1)..(25): SEQ ID NO: 4398; WAN024A9M; Start 9; Stop 33
gaaaagactactggaagtttatttt

SEQ ID NO: 381839 - DNA, 25 bp, Artificial
  probe
  misc_feature (1)..(25): SEQ ID NO: 4398; WAN024A9M; Start 14; Stop 38
gactactggaagtttattttgataa

SEQ ID NO: 381840 - DNA, 25 bp, Artificial
  probe
  misc_feature (1)..(25): SEQ ID NO: 4398; WAN024A9M; Start 47; Stop 71
gtagatcttttcataataaaacgca

SEQ ID NO: 381841 - DNA, 25 bp, Artificial
  probe
  misc_feature (1)..(25): SEQ ID NO: 4398; WAN024A9M; Start 46; Stop 70
agtagatcttttcataataaaacgc

SEQ ID NO: 381842 - DNA, 25 bp, Artificial
  probe
  misc_feature (1)..(25): SEQ ID NO: 4398; WAN024A9M; Start 48; Stop 72
tagatcttttcataataaaacgcat

SEQ ID NO: 381843 - DNA, 25 bp, Artificial
  probe
  misc_feature (1)..(25): SEQ ID NO: 4399; WAN024AIK; Start 39; Stop 63
tcgtgtattggaagaataaattgct

SEQ ID NO: 381844 - DNA, 25 bp, Artificial
  probe
  misc_feature (1)..(25): SEQ ID NO: 4399; WAN024AIK; Start 38; Stop 62
ttcgtgtattggaagaataaattgc

SEQ ID NO: 381845 - DNA, 25 bp, Artificial
  probe
  misc_feature (1)..(25): SEQ ID NO: 4399; WAN024AIK; Start 40; Stop 64
cgtgtattggaagaataaattgcta

SEQ ID NO: 381846 - DNA, 25 bp, Artificial
  probe
  misc_feature (1)..(25): SEQ ID NO: 4399; WAN024AIK; Start 46; Stop 70
ttggaagaataaattgctatcgaaa

SEQ ID NO: 381847 - DNA, 25 bp, Artificial
  probe
  misc_feature (1)..(25): SEQ ID NO: 4399; WAN024AIK; Start 43; Stop 67
gtattggaagaataaattgctatcg

SEQ ID NO: 381848 - DNA, 25 bp, Artificial
  probe
  misc_feature (1)..(25): SEQ ID NO: 4399; WAN024AIK; Start 45; Stop 69
attggaagaataaattgctatcgaa

SEQ ID NO: 381849 - DNA, 25 bp, Artificial
  probe
  misc_feature (1)..(25): SEQ ID NO: 4399; WAN024AIK; Start 1; Stop 25
taaaacagattgcctccactgaatg

SEQ ID NO: 381850 - DNA, 25 bp, Artificial
  probe
  misc_feature (1)..(25): SEQ ID NO: 4399; WAN024AIK; Start 3; Stop 27
aaacagattgcctccactgaatgtg

SEQ ID NO: 381851 - DNA, 25 bp, Artificial
  probe
  misc_feature (1)..(25): SEQ ID NO: 4399; WAN024AIK; Start 44; Stop 68
tattggaagaataaattgctatcga

SEQ ID NO: 381852 - DNA, 25 bp, Artificial
  probe
  misc_feature (1)..(25): SEQ ID NO: 4399; WAN024AIK; Start 41; Stop 65
gtgtattggaagaataaattgctat

SEQ ID NO: 381853 - DNA, 25 bp, Artificial
  probe
  misc_feature (1)..(25): SEQ ID NO: 4399; WAN024AIK; Start 42; Stop 66
tgtattggaagaataaattgctatc

SEQ ID NO: 381854 - DNA, 25 bp, Artificial
  probe
  misc_feature (1)..(25): SEQ ID NO: 4399; WAN024AIK; Start 37; Stop 61
cttcgtgtattggaagaataaattg

SEQ ID NO: 381855 - DNA, 25 bp, Artificial
  probe
  misc_feature (1)..(25): SEQ ID NO: 4399; WAN024AIK; Start 47; Stop 71
tggaagaataaattgctatcgaaaa

SEQ ID NO: 381856 - DNA, 25 bp, Artificial
  probe
  misc_feature (1)..(25): SEQ ID NO: 4399; WAN024AIK; Start 2; Stop 26
aaaacagattgcctccactgaatgt

SEQ ID NO: 381857 - DNA, 25 bp, Artificial
  probe
  misc_feature (1)..(25): SEQ ID NO: 4399; WAN024AIK; Start 48; Stop 72
ggaagaataaattgctatcgaaaac

SEQ ID NO: 381858 - DNA, 25 bp, Artificial
  probe
  misc_feature (1)..(25): SEQ ID NO: 4399; WAN024AIK; Start 49; Stop 73
gaagaataaattgctatcgaaaact

SEQ ID NO: 381859 - DNA, 25 bp, Artificial
  probe
  misc_feature (1)..(25): SEQ ID NO: 4400; WAN024A4D; Start 58; Stop 82
aaatgactatcagaaaagaggtaaa

SEQ ID NO: 381860 - DNA, 25 bp, Artificial
  probe
  misc_feature (1)..(25): SEQ ID NO: 4400; WAN024A4D; Start 57; Stop 81
aaaatgactatcagaaaagaggtaa

SEQ ID NO: 381861 - DNA, 25 bp, Artificial
  probe
  misc_feature (1)..(25): SEQ ID NO: 4400; WAN024A4D; Start 59; Stop 83
aatgactatcagaaaagaggtaaat

SEQ ID NO: 381862 - DNA, 25 bp, Artificial
  probe
  misc_feature (1)..(25): SEQ ID NO: 4400; WAN024A4D; Start 60; Stop 84
atgactatcagaaaagaggtaaatt

SEQ ID NO: 381863 - DNA, 25 bp, Artificial
  probe
  misc_feature (1)..(25): SEQ ID NO: 4400; WAN024A4D; Start 61; Stop 85
tgactatcagaaaagaggtaaattt

SEQ ID NO: 381864 - DNA, 25 bp, Artificial
  probe
  misc_feature (1)..(25): SEQ ID NO: 4401; WAN024AL7; Start 147; Stop 171
gtaagatttaacgacacgagtgagt

SEQ ID NO: 381865 - DNA, 25 bp, Artificial
  probe
  misc_feature (1)..(25): SEQ ID NO: 4401; WAN024AL7; Start 142; Stop 166
aaactgtaagatttaacgacacgag

SEQ ID NO: 381866 - DNA, 25 bp, Artificial
  probe
  misc_feature (1)..(25): SEQ ID NO: 4401; WAN024AL7; Start 143; Stop 167
aactgtaagatttaacgacacgagt

SEQ ID NO: 381867 - DNA, 25 bp, Artificial
  probe
  misc_feature (1)..(25): SEQ ID NO: 4401; WAN024AL7; Start 146; Stop 170
tgtaagatttaacgacacgagtgag

SEQ ID NO: 381868 - DNA, 25 bp, Artificial
  probe
  misc_feature (1)..(25): SEQ ID NO: 4401; WAN024AL7; Start 145; Stop 169
ctgtaagatttaacgacacgagtga

SEQ ID NO: 381869 - DNA, 25 bp, Artificial
  probe
  misc_feature (1)..(25): SEQ ID NO: 4401; WAN024AL7; Start 148; Stop 172
taagatttaacgacacgagtgagtc

SEQ ID NO: 381870 - DNA, 25 bp, Artificial
  probe
  misc_feature (1)..(25): SEQ ID NO: 4401; WAN024AL7; Start 144; Stop 168
actgtaagatttaacgacacgagtg

SEQ ID NO: 381871 - DNA, 25 bp, Artificial
  probe
  misc_feature (1)..(25): SEQ ID NO: 4401; WAN024AL7; Start 152; Stop 176
atttaacgacacgagtgagtcaaat

SEQ ID NO: 381872 - DNA, 25 bp, Artificial
  probe
  misc_feature (1)..(25): SEQ ID NO: 4401; WAN024AL7; Start 141; Stop 165
taaactgtaagatttaacgacacga

SEQ ID NO: 381873 - DNA, 25 bp, Artificial
  probe
  misc_feature (1)..(25): SEQ ID NO: 4401; WAN024AL7; Start 97; Stop 121
cgtacttgatacaaagatgaaggta

SEQ ID NO: 381874 - DNA, 25 bp, Artificial
  probe
  misc_feature (1)..(25): SEQ ID NO: 4401; WAN024AL7; Start 153; Stop 177
tttaacgacacgagtgagtcaaatc

SEQ ID NO: 381875 - DNA, 25 bp, Artificial
  probe
  misc_feature (1)..(25): SEQ ID NO: 4401; WAN024AL7; Start 151; Stop 175
gatttaacgacacgagtgagtcaaa

SEQ ID NO: 381876 - DNA, 25 bp, Artificial
  probe
  misc_feature (1)..(25): SEQ ID NO: 4401; WAN024AL7; Start 96; Stop 120
acgtacttgatacaaagatgaaggt

SEQ ID NO: 381877 - DNA, 25 bp, Artificial
  probe
  misc_feature (1)..(25): SEQ ID NO: 4401; WAN024AL7; Start 150; Stop 174
agatttaacgacacgagtgagtcaa

SEQ ID NO: 381878 - DNA, 25 bp, Artificial
  probe
  misc_feature (1)..(25): SEQ ID NO: 4401; WAN024AL7; Start 149; Stop 173
aagatttaacgacacgagtgagtca

SEQ ID NO: 381879 - DNA, 25 bp, Artificial
  probe
  misc_feature (1)..(25): SEQ ID NO: 4401; WAN024AL7; Start 3; Stop 27
aaagcaaaccattcttctcaggtga

SEQ ID NO: 381880 - DNA, 25 bp, Artificial
  probe
  misc_feature (1)..(25): SEQ ID NO: 4401; WAN024AL7; Start 140; Stop 164
ttaaactgtaagatttaacgacacg

SEQ ID NO: 381881 - DNA, 25 bp, Artificial
  probe
  misc_feature (1)..(25): SEQ ID NO: 4401; WAN024AL7; Start 1; Stop 25
taaaagcaaaccattcttctcaggt

SEQ ID NO: 381882 - DNA, 25 bp, Artificial
  probe
  misc_feature (1)..(25): SEQ ID NO: 4401; WAN024AL7; Start 95; Stop 119
tacgtacttgatacaaagatgaagg

SEQ ID NO: 381883 - DNA, 25 bp, Artificial
  probe
  misc_feature (1)..(25): SEQ ID NO: 4401; WAN024AL7; Start 98; Stop 122
gtacttgatacaaagatgaaggtat

SEQ ID NO: 381884 - DNA, 25 bp, Artificial
  probe
  misc_feature (1)..(25): SEQ ID NO: 4401; WAN024AL7; Start 4; Stop 28
aagcaaaccattcttctcaggtgag

SEQ ID NO: 381885 - DNA, 25 bp, Artificial
  probe
  misc_feature (1)..(25): SEQ ID NO: 4401; WAN024AL7; Start 154; Stop 178
ttaacgacacgagtgagtcaaatcg

SEQ ID NO: 381886 - DNA, 25 bp, Artificial
  probe
  misc_feature (1)..(25): SEQ ID NO: 4401; WAN024AL7; Start 2; Stop 26
aaaagcaaaccattcttctcaggtg

SEQ ID NO: 381887 - DNA, 25 bp, Artificial
  probe
  misc_feature (1)..(25): SEQ ID NO: 4401; WAN024AL7; Start 100; Stop 124
acttgatacaaagatgaaggtatta

SEQ ID NO: 381888 - DNA, 25 bp, Artificial
  probe
  misc_feature (1)..(25): SEQ ID NO: 4401; WAN024AL7; Start 99; Stop 123
tacttgatacaaagatgaaggtatt

SEQ ID NO: 381889 - DNA, 25 bp, Artificial
  probe
  misc_feature (1)..(25): SEQ ID NO: 4401; WAN024AL7; Start 136; Stop 160
gcatttaaactgtaagatttaacga

SEQ ID NO: 381890 - DNA, 25 bp, Artificial
  probe
  misc_feature (1)..(25): SEQ ID NO: 4401; WAN024AL7; Start 135; Stop 159
tgcatttaaactgtaagatttaacg

SEQ ID NO: 381891 - DNA, 25 bp, Artificial
  probe
  misc_feature (1)..(25): SEQ ID NO: 4401; WAN024AL7; Start 42; Stop 66
ttttaatggtaaagacctcactttt

SEQ ID NO: 381892 - DNA, 25 bp, Artificial
  probe
  misc_feature (1)..(25): SEQ ID NO: 4401; WAN024AL7; Start 139; Stop 163
tttaaactgtaagatttaacgacac

SEQ ID NO: 381893 - DNA, 25 bp, Artificial
  probe
  misc_feature (1)..(25): SEQ ID NO: 4401; WAN024AL7; Start 155; Stop 179
taacgacacgagtgagtcaaatcga

SEQ ID NO: 381894 - DNA, 25 bp, Artificial
  probe
  misc_feature (1)..(25): SEQ ID NO: 4401; WAN024AL7; Start 5; Stop 29
agcaaaccattcttctcaggtgagg

SEQ ID NO: 381895 - DNA, 25 bp, Artificial
  probe
  misc_feature (1)..(25): SEQ ID NO: 4401; WAN024AL7; Start 138; Stop 162
atttaaactgtaagatttaacgaca

SEQ ID NO: 381896 - DNA, 25 bp, Artificial
  probe
  misc_feature (1)..(25): SEQ ID NO: 4401; WAN024AL7; Start 137; Stop 161
catttaaactgtaagatttaacgac

SEQ ID NO: 381897 - DNA, 25 bp, Artificial
  probe
  misc_feature (1)..(25): SEQ ID NO: 4402; WAN024AAY; Start 18; Stop 42
acttgaaatgatagtccaaacttaa

SEQ ID NO: 381898 - DNA, 25 bp, Artificial
  probe
  misc_feature (1)..(25): SEQ ID NO: 4402; WAN024AAY; Start 16; Stop 40
atacttgaaatgatagtccaaactt

SEQ ID NO: 381899 - DNA, 25 bp, Artificial
  probe
  misc_feature (1)..(25): SEQ ID NO: 4402; WAN024AAY; Start 17; Stop 41
tacttgaaatgatagtccaaactta

SEQ ID NO: 381900 - DNA, 25 bp, Artificial
  probe
  misc_feature (1)..(25): SEQ ID NO: 4402; WAN024AAY; Start 19; Stop 43
cttgaaatgatagtccaaacttaaa

SEQ ID NO: 381901 - DNA, 25 bp, Artificial
  probe
  misc_feature (1)..(25): SEQ ID NO: 4402; WAN024AAY; Start 15; Stop 39
tatacttgaaatgatagtccaaact

SEQ ID NO: 381902 - DNA, 25 bp, Artificial
  probe
  misc_feature (1)..(25): SEQ ID NO: 4402; WAN024AAY; Start 20; Stop 44
ttgaaatgatagtccaaacttaaat

SEQ ID NO: 381903 - DNA, 25 bp, Artificial
  probe
  misc_feature (1)..(25): SEQ ID NO: 4402; WAN024AAY; Start 21; Stop 45
tgaaatgatagtccaaacttaaatt

SEQ ID NO: 381904 - DNA, 25 bp, Artificial
  probe
  misc_feature (1)..(25): SEQ ID NO: 4403; WAN024A59; Start 5; Stop 29
atacttgccaaacttttcagaatct

SEQ ID NO: 381905 - DNA, 25 bp, Artificial
  probe
  misc_feature (1)..(25): SEQ ID NO: 4403; WAN024A59; Start 4; Stop 28
aatacttgccaaacttttcagaatc

SEQ ID NO: 381906 - DNA, 25 bp, Artificial
  probe
  misc_feature (1)..(25): SEQ ID NO: 4403; WAN024A59; Start 3; Stop 27
aaatacttgccaaacttttcagaat

SEQ ID NO: 381907 - DNA, 25 bp, Artificial
  probe
  misc_feature (1)..(25): SEQ ID NO: 4403; WAN024A59; Start 6; Stop 30
tacttgccaaacttttcagaatctg

SEQ ID NO: 381908 - DNA, 25 bp, Artificial
  probe
  misc_feature (1)..(25): SEQ ID NO: 4403; WAN024A59; Start 2; Stop 26
aaaatacttgccaaacttttcagaa

SEQ ID NO: 381909 - DNA, 25 bp, Artificial
  probe
  misc_feature (1)..(25): SEQ ID NO: 4403; WAN024A59; Start 1; Stop 25
taaaatacttgccaaacttttcaga

SEQ ID NO: 381910 - DNA, 25 bp, Artificial
  probe
  misc_feature (1)..(25): SEQ ID NO: 4403; WAN024A59; Start 8; Stop 32
cttgccaaacttttcagaatctgat

SEQ ID NO: 381911 - DNA, 25 bp, Artificial
  probe
  misc_feature (1)..(25): SEQ ID NO: 4403; WAN024A59; Start 10; Stop 34
tgccaaacttttcagaatctgatag

SEQ ID NO: 381912 - DNA, 25 bp, Artificial
  probe
  misc_feature (1)..(25): SEQ ID NO: 4403; WAN024A59; Start 11; Stop 35
gccaaacttttcagaatctgataga

SEQ ID NO: 381913 - DNA, 25 bp, Artificial
  probe
  misc_feature (1)..(25): SEQ ID NO: 4403; WAN024A59; Start 9; Stop 33
ttgccaaacttttcagaatctgata

SEQ ID NO: 381914 - DNA, 25 bp, Artificial
  probe
  misc_feature (1)..(25): SEQ ID NO: 4403; WAN024A59; Start 7; Stop 31
acttgccaaacttttcagaatctga

SEQ ID NO: 381915 - DNA, 25 bp, Artificial
  probe
  misc_feature (1)..(25): SEQ ID NO: 4403; WAN024A59; Start 12; Stop 36
ccaaacttttcagaatctgatagac

SEQ ID NO: 381916 - DNA, 25 bp, Artificial
  probe
  misc_feature (1)..(25): SEQ ID NO: 4403; WAN024A59; Start 13; Stop 37
caaacttttcagaatctgatagact

SEQ ID NO: 381917 - DNA, 25 bp, Artificial
  probe
  misc_feature (1)..(25): SEQ ID NO: 4403; WAN024A59; Start 16; Stop 40
acttttcagaatctgatagactagt

SEQ ID NO: 381918 - DNA, 25 bp, Artificial
  probe
  misc_feature (1)..(25): SEQ ID NO: 4403; WAN024A59; Start 15; Stop 39
aacttttcagaatctgatagactag

SEQ ID NO: 381919 - DNA, 25 bp, Artificial
  probe
  misc_feature (1)..(25): SEQ ID NO: 4403; WAN024A59; Start 14; Stop 38
aaacttttcagaatctgatagacta

SEQ ID NO: 381920 - DNA, 25 bp, Artificial
  probe
  misc_feature (1)..(25): SEQ ID NO: 4403; WAN024A59; Start 17; Stop 41
cttttcagaatctgatagactagta

SEQ ID NO: 381921 - DNA, 25 bp, Artificial
  probe
  misc_feature (1)..(25): SEQ ID NO: 4404; WAN024A2T; Start 273; Stop 297
attgaaaggaatctgcgttatatgc

SEQ ID NO: 381922 - DNA, 25 bp, Artificial
  probe
  misc_feature (1)..(25): SEQ ID NO: 4404; WAN024A2T; Start 275; Stop 299
tgaaaggaatctgcgttatatgcta

SEQ ID NO: 381923 - DNA, 25 bp, Artificial
  probe
  misc_feature (1)..(25): SEQ ID NO: 4404; WAN024A2T; Start 276; Stop 300
gaaaggaatctgcgttatatgctat

SEQ ID NO: 381924 - DNA, 25 bp, Artificial
  probe
  misc_feature (1)..(25): SEQ ID NO: 4404; WAN024A2T; Start 274; Stop 298
ttgaaaggaatctgcgttatatgct

SEQ ID NO: 381925 - DNA, 25 bp, Artificial
  probe
  misc_feature (1)..(25): SEQ ID NO: 4404; WAN024A2T; Start 199; Stop 223
agatgagagataaatatcggcagtc

SEQ ID NO: 381926 - DNA, 25 bp, Artificial
  probe
  misc_feature (1)..(25): SEQ ID NO: 4404; WAN024A2T; Start 198; Stop 222
gagatgagagataaatatcggcagt

SEQ ID NO: 381927 - DNA, 25 bp, Artificial
  probe
  misc_feature (1)..(25): SEQ ID NO: 4404; WAN024A2T; Start 197; Stop 221
agagatgagagataaatatcggcag

SEQ ID NO: 381928 - DNA, 25 bp, Artificial
  probe
  misc_feature (1)..(25): SEQ ID NO: 4404; WAN024A2T; Start 278; Stop 302
aaggaatctgcgttatatgctataa

SEQ ID NO: 381929 - DNA, 25 bp, Artificial
  probe
  misc_feature (1)..(25): SEQ ID NO: 4404; WAN024A2T; Start 196; Stop 220
aagagatgagagataaatatcggca

SEQ ID NO: 381930 - DNA, 25 bp, Artificial
  probe
  misc_feature (1)..(25): SEQ ID NO: 4404; WAN024A2T; Start 202; Stop 226
tgagagataaatatcggcagtcttc

SEQ ID NO: 381931 - DNA, 25 bp, Artificial
  probe
  misc_feature (1)..(25): SEQ ID NO: 4404; WAN024A2T; Start 200; Stop 224
gatgagagataaatatcggcagtct

SEQ ID NO: 381932 - DNA, 25 bp, Artificial
  probe
  misc_feature (1)..(25): SEQ ID NO: 4404; WAN024A2T; Start 279; Stop 303
aggaatctgcgttatatgctataat

SEQ ID NO: 381933 - DNA, 25 bp, Artificial
  probe
  misc_feature (1)..(25): SEQ ID NO: 4404; WAN024A2T; Start 201; Stop 225
atgagagataaatatcggcagtctt

SEQ ID NO: 381934 - DNA, 25 bp, Artificial
  probe
  misc_feature (1)..(25): SEQ ID NO: 4404; WAN024A2T; Start 203; Stop 227
gagagataaatatcggcagtcttcg

SEQ ID NO: 381935 - DNA, 25 bp, Artificial
  probe
  misc_feature (1)..(25): SEQ ID NO: 4404; WAN024A2T; Start 195; Stop 219
aaagagatgagagataaatatcggc

SEQ ID NO: 381936 - DNA, 25 bp, Artificial
  probe
  misc_feature (1)..(25): SEQ ID NO: 4404; WAN024A2T; Start 277; Stop 301
aaaggaatctgcgttatatgctata

SEQ ID NO: 381937 - DNA, 25 bp, Artificial
  probe
  misc_feature (1)..(25): SEQ ID NO: 4404; WAN024A2T; Start 280; Stop 304
ggaatctgcgttatatgctataatt

SEQ ID NO: 381938 - DNA, 25 bp, Artificial
  probe
  misc_feature (1)..(25): SEQ ID NO: 4404; WAN024A2T; Start 205; Stop 229
gagataaatatcggcagtcttcgga

SEQ ID NO: 381939 - DNA, 25 bp, Artificial
  probe
  misc_feature (1)..(25): SEQ ID NO: 4404; WAN024A2T; Start 204; Stop 228
agagataaatatcggcagtcttcgg

SEQ ID NO: 381940 - DNA, 25 bp, Artificial
  probe
  misc_feature (1)..(25): SEQ ID NO: 4404; WAN024A2T; Start 284; Stop 308
tctgcgttatatgctataattaggt

SEQ ID NO: 381941 - DNA, 25 bp, Artificial
  probe
  misc_feature (1)..(25): SEQ ID NO: 4404; WAN024A2T; Start 264; Stop 288
aatcatacgattgaaaggaatctgc

SEQ ID NO: 381942 - DNA, 25 bp, Artificial
  probe
  misc_feature (1)..(25): SEQ ID NO: 4404; WAN024A2T; Start 271; Stop 295
cgattgaaaggaatctgcgttatat

SEQ ID NO: 381943 - DNA, 25 bp, Artificial
  probe
  misc_feature (1)..(25): SEQ ID NO: 4404; WAN024A2T; Start 258; Stop 282
gcagtaaatcatacgattgaaagga

SEQ ID NO: 381944 - DNA, 25 bp, Artificial
  probe
  misc_feature (1)..(25): SEQ ID NO: 4404; WAN024A2T; Start 272; Stop 296
gattgaaaggaatctgcgttatatg

SEQ ID NO: 381945 - DNA, 25 bp, Artificial
  probe
  misc_feature (1)..(25): SEQ ID NO: 4404; WAN024A2T; Start 265; Stop 289
atcatacgattgaaaggaatctgcg

SEQ ID NO: 381946 - DNA, 25 bp, Artificial
  probe
  misc_feature (1)..(25): SEQ ID NO: 4404; WAN024A2T; Start 206; Stop 230
agataaatatcggcagtcttcggac

SEQ ID NO: 381947 - DNA, 25 bp, Artificial
  probe
  misc_feature (1)..(25): SEQ ID NO: 4404; WAN024A2T; Start 263; Stop 287
aaatcatacgattgaaaggaatctg

SEQ ID NO: 381948 - DNA, 25 bp, Artificial
  probe
  misc_feature (1)..(25): SEQ ID NO: 4404; WAN024A2T; Start 283; Stop 307
atctgcgttatatgctataattagg

SEQ ID NO: 381949 - DNA, 25 bp, Artificial
  probe
  misc_feature (1)..(25): SEQ ID NO: 4404; WAN024A2T; Start 270; Stop 294
acgattgaaaggaatctgcgttata

SEQ ID NO: 381950 - DNA, 25 bp, Artificial
  probe
  misc_feature (1)..(25): SEQ ID NO: 4404; WAN024A2T; Start 269; Stop 293
tacgattgaaaggaatctgcgttat

SEQ ID NO: 381951 - DNA, 25 bp, Artificial
  probe
  misc_feature (1)..(25): SEQ ID NO: 4404; WAN024A2T; Start 268; Stop 292
atacgattgaaaggaatctgcgtta

SEQ ID NO: 381952 - DNA, 25 bp, Artificial
  probe
  misc_feature (1)..(25): SEQ ID NO: 4404; WAN024A2T; Start 259; Stop 283
cagtaaatcatacgattgaaaggaa

SEQ ID NO: 381953 - DNA, 25 bp, Artificial
  probe
  misc_feature (1)..(25): SEQ ID NO: 4404; WAN024A2T; Start 257; Stop 281
tgcagtaaatcatacgattgaaagg

SEQ ID NO: 381954 - DNA, 25 bp, Artificial
  probe
  misc_feature (1)..(25): SEQ ID NO: 4405; WAN024AIP; Start 156; Stop 180
tccaaagaagattttaagtgctaca

SEQ ID NO: 381955 - DNA, 25 bp, Artificial
  probe
  misc_feature (1)..(25): SEQ ID NO: 4405; WAN024AIP; Start 184; Stop 208
actgtattatttctagatgggaggt

SEQ ID NO: 381956 - DNA, 25 bp, Artificial
  probe
  misc_feature (1)..(25): SEQ ID NO: 4405; WAN024AIP; Start 157; Stop 181
ccaaagaagattttaagtgctacaa

SEQ ID NO: 381957 - DNA, 25 bp, Artificial
  probe
  misc_feature (1)..(25): SEQ ID NO: 4405; WAN024AIP; Start 155; Stop 179
atccaaagaagattttaagtgctac

SEQ ID NO: 381958 - DNA, 25 bp, Artificial
  probe
  misc_feature (1)..(25): SEQ ID NO: 4405; WAN024AIP; Start 186; Stop 210
tgtattatttctagatgggaggttc

SEQ ID NO: 381959 - DNA, 25 bp, Artificial
  probe
  misc_feature (1)..(25): SEQ ID NO: 4405; WAN024AIP; Start 185; Stop 209
ctgtattatttctagatgggaggtt

SEQ ID NO: 381960 - DNA, 25 bp, Artificial
  probe
  misc_feature (1)..(25): SEQ ID NO: 4405; WAN024AIP; Start 183; Stop 207
aactgtattatttctagatgggagg

SEQ ID NO: 381961 - DNA, 25 bp, Artificial
  probe
  misc_feature (1)..(25): SEQ ID NO: 4405; WAN024AIP; Start 187; Stop 211
gtattatttctagatgggaggttct

SEQ ID NO: 381962 - DNA, 25 bp, Artificial
  probe
  misc_feature (1)..(25): SEQ ID NO: 4405; WAN024AIP; Start 153; Stop 177
ttatccaaagaagattttaagtgct

SEQ ID NO: 381963 - DNA, 25 bp, Artificial
  probe
  misc_feature (1)..(25): SEQ ID NO: 4405; WAN024AIP; Start 158; Stop 182
caaagaagattttaagtgctacaat

SEQ ID NO: 381964 - DNA, 25 bp, Artificial
  probe
  misc_feature (1)..(25): SEQ ID NO: 4405; WAN024AIP; Start 164; Stop 188
agattttaagtgctacaataactgt

SEQ ID NO: 381965 - DNA, 25 bp, Artificial
  probe
  misc_feature (1)..(25): SEQ ID NO: 4405; WAN024AIP; Start 154; Stop 178
tatccaaagaagattttaagtgcta

SEQ ID NO: 381966 - DNA, 25 bp, Artificial
  probe
  misc_feature (1)..(25): SEQ ID NO: 4405; WAN024AIP; Start 152; Stop 176
attatccaaagaagattttaagtgc

SEQ ID NO: 381967 - DNA, 25 bp, Artificial
  probe
  misc_feature (1)..(25): SEQ ID NO: 4405; WAN024AIP; Start 191; Stop 215
tatttctagatgggaggttctattt

SEQ ID NO: 381968 - DNA, 25 bp, Artificial
  probe
  misc_feature (1)..(25): SEQ ID NO: 4405; WAN024AIP; Start 190; Stop 214
ttatttctagatgggaggttctatt

SEQ ID NO: 381969 - DNA, 25 bp, Artificial
  probe
  misc_feature (1)..(25): SEQ ID NO: 4405; WAN024AIP; Start 189; Stop 213
attatttctagatgggaggttctat

SEQ ID NO: 381970 - DNA, 25 bp, Artificial
  probe
  misc_feature (1)..(25): SEQ ID NO: 4405; WAN024AIP; Start 161; Stop 185
agaagattttaagtgctacaataac

SEQ ID NO: 381971 - DNA, 25 bp, Artificial
  probe
  misc_feature (1)..(25): SEQ ID NO: 4405; WAN024AIP; Start 163; Stop 187
aagattttaagtgctacaataactg

SEQ ID NO: 381972 - DNA, 25 bp, Artificial
  probe
  misc_feature (1)..(25): SEQ ID NO: 4405; WAN024AIP; Start 162; Stop 186
gaagattttaagtgctacaataact

SEQ ID NO: 381973 - DNA, 25 bp, Artificial
  probe
  misc_feature (1)..(25): SEQ ID NO: 4405; WAN024AIP; Start 182; Stop 206
taactgtattatttctagatgggag

SEQ ID NO: 381974 - DNA, 25 bp, Artificial
  probe
  misc_feature (1)..(25): SEQ ID NO: 4405; WAN024AIP; Start 173; Stop 197
gtgctacaataactgtattatttct

SEQ ID NO: 381975 - DNA, 25 bp, Artificial
  probe
  misc_feature (1)..(25): SEQ ID NO: 4405; WAN024AIP; Start 172; Stop 196
agtgctacaataactgtattatttc

SEQ ID NO: 381976 - DNA, 25 bp, Artificial
  probe
  misc_feature (1)..(25): SEQ ID NO: 4405; WAN024AIP; Start 188; Stop 212
tattatttctagatgggaggttcta

SEQ ID NO: 381977 - DNA, 25 bp, Artificial
  probe
  misc_feature (1)..(25): SEQ ID NO: 4405; WAN024AIP; Start 160; Stop 184
aagaagattttaagtgctacaataa

SEQ ID NO: 381978 - DNA, 25 bp, Artificial
  probe
  misc_feature (1)..(25): SEQ ID NO: 4405; WAN024AIP; Start 159; Stop 183
aaagaagattttaagtgctacaata

SEQ ID NO: 381979 - DNA, 25 bp, Artificial
  probe
  misc_feature (1)..(25): SEQ ID NO: 4405; WAN024AIP; Start 165; Stop 189
gattttaagtgctacaataactgta

SEQ ID NO: 381980 - DNA, 25 bp, Artificial
  probe
  misc_feature (1)..(25): SEQ ID NO: 4405; WAN024AIP; Start 167; Stop 191
ttttaagtgctacaataactgtatt

SEQ ID NO: 381981 - DNA, 25 bp, Artificial
  probe
  misc_feature (1)..(25): SEQ ID NO: 4406; WAN024AND; Start 27; Stop 51
agccaaatcaatttctagcaaagtt

SEQ ID NO: 381982 - DNA, 25 bp, Artificial
  probe
  misc_feature (1)..(25): SEQ ID NO: 4406; WAN024AND; Start 26; Stop 50
aagccaaatcaatttctagcaaagt

SEQ ID NO: 381983 - DNA, 25 bp, Artificial
  probe
  misc_feature (1)..(25): SEQ ID NO: 4406; WAN024AND; Start 28; Stop 52
gccaaatcaatttctagcaaagttt

SEQ ID NO: 381984 - DNA, 25 bp, Artificial
  probe
  misc_feature (1)..(25): SEQ ID NO: 4406; WAN024AND; Start 25; Stop 49
aaagccaaatcaatttctagcaaag

SEQ ID NO: 381985 - DNA, 25 bp, Artificial
  probe
  misc_feature (1)..(25): SEQ ID NO: 4406; WAN024AND; Start 16; Stop 40
ttaattcggaaagccaaatcaattt

SEQ ID NO: 381986 - DNA, 25 bp, Artificial
  probe
  misc_feature (1)..(25): SEQ ID NO: 4406; WAN024AND; Start 20; Stop 44
ttcggaaagccaaatcaatttctag

SEQ ID NO: 381987 - DNA, 25 bp, Artificial
  probe
  misc_feature (1)..(25): SEQ ID NO: 4406; WAN024AND; Start 18; Stop 42
aattcggaaagccaaatcaatttct

SEQ ID NO: 381988 - DNA, 25 bp, Artificial
  probe
  misc_feature (1)..(25): SEQ ID NO: 4406; WAN024AND; Start 23; Stop 47
ggaaagccaaatcaatttctagcaa

SEQ ID NO: 381989 - DNA, 25 bp, Artificial
  probe
  misc_feature (1)..(25): SEQ ID NO: 4406; WAN024AND; Start 19; Stop 43
attcggaaagccaaatcaatttcta

SEQ ID NO: 381990 - DNA, 25 bp, Artificial
  probe
  misc_feature (1)..(25): SEQ ID NO: 4406; WAN024AND; Start 24; Stop 48
gaaagccaaatcaatttctagcaaa

SEQ ID NO: 381991 - DNA, 25 bp, Artificial
  probe
  misc_feature (1)..(25): SEQ ID NO: 4406; WAN024AND; Start 17; Stop 41
taattcggaaagccaaatcaatttc

SEQ ID NO: 381992 - DNA, 25 bp, Artificial
  probe
  misc_feature (1)..(25): SEQ ID NO: 4406; WAN024AND; Start 15; Stop 39
attaattcggaaagccaaatcaatt

SEQ ID NO: 381993 - DNA, 25 bp, Artificial
  probe
  misc_feature (1)..(25): SEQ ID NO: 4406; WAN024AND; Start 21; Stop 45
tcggaaagccaaatcaatttctagc

SEQ ID NO: 381994 - DNA, 25 bp, Artificial
  probe
  misc_feature (1)..(25): SEQ ID NO: 4406; WAN024AND; Start 22; Stop 46
cggaaagccaaatcaatttctagca

SEQ ID NO: 381995 - DNA, 25 bp, Artificial
  probe
  misc_feature (1)..(25): SEQ ID NO: 4406; WAN024AND; Start 8; Stop 32
tgaacaaattaattcggaaagccaa

SEQ ID NO: 381996 - DNA, 25 bp, Artificial
  probe
  misc_feature (1)..(25): SEQ ID NO: 4406; WAN024AND; Start 7; Stop 31
ttgaacaaattaattcggaaagcca

SEQ ID NO: 381997 - DNA, 25 bp, Artificial
  probe
  misc_feature (1)..(25): SEQ ID NO: 4406; WAN024AND; Start 12; Stop 36
caaattaattcggaaagccaaatca

SEQ ID NO: 381998 - DNA, 25 bp, Artificial
  probe
  misc_feature (1)..(25): SEQ ID NO: 4406; WAN024AND; Start 11; Stop 35
acaaattaattcggaaagccaaatc

SEQ ID NO: 381999 - DNA, 25 bp, Artificial
  probe
  misc_feature (1)..(25): SEQ ID NO: 4406; WAN024AND; Start 9; Stop 33
gaacaaattaattcggaaagccaaa

SEQ ID NO: 382000 - DNA, 25 bp, Artificial
  probe
  misc_feature (1)..(25): SEQ ID NO: 4406; WAN024AND; Start 6; Stop 30
tttgaacaaattaattcggaaagcc

SEQ ID NO: 382001 - DNA, 25 bp, Artificial
  probe
  misc_feature (1)..(25): SEQ ID NO: 4406; WAN024AND; Start 10; Stop 34
aacaaattaattcggaaagccaaat

SEQ ID NO: 382002 - DNA, 25 bp, Artificial
  probe
  misc_feature (1)..(25): SEQ ID NO: 4406; WAN024AND; Start 13; Stop 37
aaattaattcggaaagccaaatcaa

SEQ ID NO: 382003 - DNA, 25 bp, Artificial
  probe
  misc_feature (1)..(25): SEQ ID NO: 4406; WAN024AND; Start 14; Stop 38
aattaattcggaaagccaaatcaat

SEQ ID NO: 382004 - DNA, 25 bp, Artificial
  probe
  misc_feature (1)..(25): SEQ ID NO: 4406; WAN024AND; Start 29; Stop 53
ccaaatcaatttctagcaaagtttt

SEQ ID NO: 382005 - DNA, 25 bp, Artificial
  probe
  misc_feature (1)..(25): SEQ ID NO: 4406; WAN024AND; Start 35; Stop 59
caatttctagcaaagttttaggaac

SEQ ID NO: 382006 - DNA, 25 bp, Artificial
  probe
  misc_feature (1)..(25): SEQ ID NO: 4406; WAN024AND; Start 34; Stop 58
tcaatttctagcaaagttttaggaa

SEQ ID NO: 382007 - DNA, 25 bp, Artificial
  probe
  misc_feature (1)..(25): SEQ ID NO: 4406; WAN024AND; Start 33; Stop 57
atcaatttctagcaaagttttagga

SEQ ID NO: 382008 - DNA, 25 bp, Artificial
  probe
  misc_feature (1)..(25): SEQ ID NO: 4406; WAN024AND; Start 40; Stop 64
tctagcaaagttttaggaactggat

SEQ ID NO: 382009 - DNA, 25 bp, Artificial
  probe
  misc_feature (1)..(25): SEQ ID NO: 4406; WAN024AND; Start 39; Stop 63
ttctagcaaagttttaggaactgga

SEQ ID NO: 382010 - DNA, 25 bp, Artificial
  probe
  misc_feature (1)..(25): SEQ ID NO: 4406; WAN024AND; Start 42; Stop 66
tagcaaagttttaggaactggattg

SEQ ID NO: 382011 - DNA, 25 bp, Artificial
  probe
  misc_feature (1)..(25): SEQ ID NO: 4406; WAN024AND; Start 38; Stop 62
tttctagcaaagttttaggaactgg

SEQ ID NO: 382012 - DNA, 25 bp, Artificial
  probe
  misc_feature (1)..(25): SEQ ID NO: 4406; WAN024AND; Start 41; Stop 65
ctagcaaagttttaggaactggatt

SEQ ID NO: 382013 - DNA, 25 bp, Artificial
  probe
  misc_feature (1)..(25): SEQ ID NO: 4406; WAN024AND; Start 5; Stop 29
atttgaacaaattaattcggaaagc

SEQ ID NO: 382014 - DNA, 25 bp, Artificial
  probe
  misc_feature (1)..(25): SEQ ID NO: 4407; WAN0249GP; Start 26; Stop 50
aaccgttttctatttgtgctatact

SEQ ID NO: 382015 - DNA, 25 bp, Artificial
  probe
  misc_feature (1)..(25): SEQ ID NO: 4407; WAN0249GP; Start 68; Stop 92
cgtttgcgtttccttatcaataaaa

SEQ ID NO: 382016 - DNA, 25 bp, Artificial
  probe
  misc_feature (1)..(25): SEQ ID NO: 4407; WAN0249GP; Start 25; Stop 49
caaccgttttctatttgtgctatac

SEQ ID NO: 382017 - DNA, 25 bp, Artificial
  probe
  misc_feature (1)..(25): SEQ ID NO: 4407; WAN0249GP; Start 27; Stop 51
accgttttctatttgtgctatacta

SEQ ID NO: 382018 - DNA, 25 bp, Artificial
  probe
  misc_feature (1)..(25): SEQ ID NO: 4407; WAN0249GP; Start 40; Stop 64
tgtgctatactaagctcataaagga

SEQ ID NO: 382019 - DNA, 25 bp, Artificial
  probe
  misc_feature (1)..(25): SEQ ID NO: 4407; WAN0249GP; Start 39; Stop 63
ttgtgctatactaagctcataaagg

SEQ ID NO: 382020 - DNA, 25 bp, Artificial
  probe
  misc_feature (1)..(25): SEQ ID NO: 4407; WAN0249GP; Start 41; Stop 65
gtgctatactaagctcataaaggaa

SEQ ID NO: 382021 - DNA, 25 bp, Artificial
  probe
  misc_feature (1)..(25): SEQ ID NO: 4407; WAN0249GP; Start 67; Stop 91
acgtttgcgtttccttatcaataaa

SEQ ID NO: 382022 - DNA, 25 bp, Artificial
  probe
  misc_feature (1)..(25): SEQ ID NO: 4407; WAN0249GP; Start 28; Stop 52
ccgttttctatttgtgctatactaa

SEQ ID NO: 382023 - DNA, 25 bp, Artificial
  probe
  misc_feature (1)..(25): SEQ ID NO: 4407; WAN0249GP; Start 33; Stop 57
ttctatttgtgctatactaagctca

SEQ ID NO: 382024 - DNA, 25 bp, Artificial
  probe
  misc_feature (1)..(25): SEQ ID NO: 4407; WAN0249GP; Start 42; Stop 66
tgctatactaagctcataaaggaaa

SEQ ID NO: 382025 - DNA, 25 bp, Artificial
  probe
  misc_feature (1)..(25): SEQ ID NO: 4407; WAN0249GP; Start 34; Stop 58
tctatttgtgctatactaagctcat

SEQ ID NO: 382026 - DNA, 25 bp, Artificial
  probe
  misc_feature (1)..(25): SEQ ID NO: 4407; WAN0249GP; Start 73; Stop 97
gcgtttccttatcaataaaacttgc

SEQ ID NO: 382027 - DNA, 25 bp, Artificial
  probe
  misc_feature (1)..(25): SEQ ID NO: 4407; WAN0249GP; Start 46; Stop 70
atactaagctcataaaggaaaacgt

SEQ ID NO: 382028 - DNA, 25 bp, Artificial
  probe
  misc_feature (1)..(25): SEQ ID NO: 4407; WAN0249GP; Start 72; Stop 96
tgcgtttccttatcaataaaacttg

SEQ ID NO: 382029 - DNA, 25 bp, Artificial
  probe
  misc_feature (1)..(25): SEQ ID NO: 4407; WAN0249GP; Start 38; Stop 62
tttgtgctatactaagctcataaag

SEQ ID NO: 382030 - DNA, 25 bp, Artificial
  probe
  misc_feature (1)..(25): SEQ ID NO: 4407; WAN0249GP; Start 24; Stop 48
gcaaccgttttctatttgtgctata

SEQ ID NO: 382031 - DNA, 25 bp, Artificial
  probe
  misc_feature (1)..(25): SEQ ID NO: 4407; WAN0249GP; Start 74; Stop 98
cgtttccttatcaataaaacttgct

SEQ ID NO: 382032 - DNA, 25 bp, Artificial
  probe
  misc_feature (1)..(25): SEQ ID NO: 4407; WAN0249GP; Start 69; Stop 93
gtttgcgtttccttatcaataaaac

SEQ ID NO: 382033 - DNA, 25 bp, Artificial
  probe
  misc_feature (1)..(25): SEQ ID NO: 4407; WAN0249GP; Start 32; Stop 56
tttctatttgtgctatactaagctc

SEQ ID NO: 382034 - DNA, 25 bp, Artificial
  probe
  misc_feature (1)..(25): SEQ ID NO: 4407; WAN0249GP; Start 71; Stop 95
ttgcgtttccttatcaataaaactt

SEQ ID NO: 382035 - DNA, 25 bp, Artificial
  probe
  misc_feature (1)..(25): SEQ ID NO: 4407; WAN0249GP; Start 70; Stop 94
tttgcgtttccttatcaataaaact

SEQ ID NO: 382036 - DNA, 25 bp, Artificial
  probe
  misc_feature (1)..(25): SEQ ID NO: 4407; WAN0249GP; Start 29; Stop 53
cgttttctatttgtgctatactaag

SEQ ID NO: 382037 - DNA, 25 bp, Artificial
  probe
  misc_feature (1)..(25): SEQ ID NO: 4407; WAN0249GP; Start 37; Stop 61
atttgtgctatactaagctcataaa

SEQ ID NO: 382038 - DNA, 25 bp, Artificial
  probe
  misc_feature (1)..(25): SEQ ID NO: 4407; WAN0249GP; Start 45; Stop 69
tatactaagctcataaaggaaaacg

SEQ ID NO: 382039 - DNA, 25 bp, Artificial
  probe
  misc_feature (1)..(25): SEQ ID NO: 4407; WAN0249GP; Start 35; Stop 59
ctatttgtgctatactaagctcata

SEQ ID NO: 382040 - DNA, 25 bp, Artificial
  probe
  misc_feature (1)..(25): SEQ ID NO: 4407; WAN0249GP; Start 23; Stop 47
tgcaaccgttttctatttgtgctat

SEQ ID NO: 382041 - DNA, 25 bp, Artificial
  probe
  misc_feature (1)..(25): SEQ ID NO: 4407; WAN0249GP; Start 36; Stop 60
tatttgtgctatactaagctcataa

SEQ ID NO: 382042 - DNA, 25 bp, Artificial
  probe
  misc_feature (1)..(25): SEQ ID NO: 4407; WAN0249GP; Start 18; Stop 42
atacttgcaaccgttttctatttgt

SEQ ID NO: 382043 - DNA, 25 bp, Artificial
  probe
  misc_feature (1)..(25): SEQ ID NO: 4407; WAN0249GP; Start 19; Stop 43
tacttgcaaccgttttctatttgtg

SEQ ID NO: 382044 - DNA, 25 bp, Artificial
  probe
  misc_feature (1)..(25): SEQ ID NO: 4407; WAN0249GP; Start 79; Stop 103
ccttatcaataaaacttgctattct

SEQ ID NO: 382045 - DNA, 25 bp, Artificial
  probe
  misc_feature (1)..(25): SEQ ID NO: 4407; WAN0249GP; Start 78; Stop 102
tccttatcaataaaacttgctattc

SEQ ID NO: 382046 - DNA, 25 bp, Artificial
  probe
  misc_feature (1)..(25): SEQ ID NO: 4407; WAN0249GP; Start 30; Stop 54
gttttctatttgtgctatactaagc

SEQ ID NO: 382047 - DNA, 25 bp, Artificial
  probe
  misc_feature (1)..(25): SEQ ID NO: 4408; WAN024A3K; Start 34; Stop 58
tacagaagactaggcttgttcactt

SEQ ID NO: 382048 - DNA, 25 bp, Artificial
  probe
  misc_feature (1)..(25): SEQ ID NO: 4408; WAN024A3K; Start 33; Stop 57
gtacagaagactaggcttgttcact

SEQ ID NO: 382049 - DNA, 25 bp, Artificial
  probe
  misc_feature (1)..(25): SEQ ID NO: 4408; WAN024A3K; Start 35; Stop 59
acagaagactaggcttgttcacttt

SEQ ID NO: 382050 - DNA, 25 bp, Artificial
  probe
  misc_feature (1)..(25): SEQ ID NO: 4408; WAN024A3K; Start 27; Stop 51
tctaatgtacagaagactaggcttg

SEQ ID NO: 382051 - DNA, 25 bp, Artificial
  probe
  misc_feature (1)..(25): SEQ ID NO: 4408; WAN024A3K; Start 28; Stop 52
ctaatgtacagaagactaggcttgt

SEQ ID NO: 382052 - DNA, 25 bp, Artificial
  probe
  misc_feature (1)..(25): SEQ ID NO: 4408; WAN024A3K; Start 30; Stop 54
aatgtacagaagactaggcttgttc

SEQ ID NO: 382053 - DNA, 25 bp, Artificial
  probe
  misc_feature (1)..(25): SEQ ID NO: 4408; WAN024A3K; Start 29; Stop 53
taatgtacagaagactaggcttgtt

SEQ ID NO: 382054 - DNA, 25 bp, Artificial
  probe
  misc_feature (1)..(25): SEQ ID NO: 4408; WAN024A3K; Start 65; Stop 89
agtcgctataagatgaccttatcta

SEQ ID NO: 382055 - DNA, 25 bp, Artificial
  probe
  misc_feature (1)..(25): SEQ ID NO: 4408; WAN024A3K; Start 64; Stop 88
tagtcgctataagatgaccttatct

SEQ ID NO: 382056 - DNA, 25 bp, Artificial
  probe
  misc_feature (1)..(25): SEQ ID NO: 4408; WAN024A3K; Start 124; Stop 148
ctattatcaattttgtcgcagggag

SEQ ID NO: 382057 - DNA, 25 bp, Artificial
  probe
  misc_feature (1)..(25): SEQ ID NO: 4408; WAN024A3K; Start 123; Stop 147
actattatcaattttgtcgcaggga

SEQ ID NO: 382058 - DNA, 25 bp, Artificial
  probe
  misc_feature (1)..(25): SEQ ID NO: 4408; WAN024A3K; Start 122; Stop 146
tactattatcaattttgtcgcaggg

SEQ ID NO: 382059 - DNA, 25 bp, Artificial
  probe
  misc_feature (1)..(25): SEQ ID NO: 4408; WAN024A3K; Start 31; Stop 55
atgtacagaagactaggcttgttca

SEQ ID NO: 382060 - DNA, 25 bp, Artificial
  probe
  misc_feature (1)..(25): SEQ ID NO: 4408; WAN024A3K; Start 125; Stop 149
tattatcaattttgtcgcagggagg

SEQ ID NO: 382061 - DNA, 25 bp, Artificial
  probe
  misc_feature (1)..(25): SEQ ID NO: 4408; WAN024A3K; Start 66; Stop 90
gtcgctataagatgaccttatctat

SEQ ID NO: 382062 - DNA, 25 bp, Artificial
  probe
  misc_feature (1)..(25): SEQ ID NO: 4408; WAN024A3K; Start 63; Stop 87
atagtcgctataagatgaccttatc

SEQ ID NO: 382063 - DNA, 25 bp, Artificial
  probe
  misc_feature (1)..(25): SEQ ID NO: 4408; WAN024A3K; Start 36; Stop 60
cagaagactaggcttgttcactttt

SEQ ID NO: 382064 - DNA, 25 bp, Artificial
  probe
  misc_feature (1)..(25): SEQ ID NO: 4408; WAN024A3K; Start 32; Stop 56
tgtacagaagactaggcttgttcac

SEQ ID NO: 382065 - DNA, 25 bp, Artificial
  probe
  misc_feature (1)..(25): SEQ ID NO: 4408; WAN024A3K; Start 26; Stop 50
ttctaatgtacagaagactaggctt

SEQ ID NO: 382066 - DNA, 25 bp, Artificial
  probe
  misc_feature (1)..(25): SEQ ID NO: 4408; WAN024A3K; Start 25; Stop 49
attctaatgtacagaagactaggct

SEQ ID NO: 382067 - DNA, 25 bp, Artificial
  probe
  misc_feature (1)..(25): SEQ ID NO: 4408; WAN024A3K; Start 121; Stop 145
atactattatcaattttgtcgcagg

SEQ ID NO: 382068 - DNA, 25 bp, Artificial
  probe
  misc_feature (1)..(25): SEQ ID NO: 4408; WAN024A3K; Start 128; Stop 152
tatcaattttgtcgcagggaggaat

SEQ ID NO: 382069 - DNA, 25 bp, Artificial
  probe
  misc_feature (1)..(25): SEQ ID NO: 4408; WAN024A3K; Start 126; Stop 150
attatcaattttgtcgcagggagga

SEQ ID NO: 382070 - DNA, 25 bp, Artificial
  probe
  misc_feature (1)..(25): SEQ ID NO: 4408; WAN024A3K; Start 127; Stop 151
ttatcaattttgtcgcagggaggaa

SEQ ID NO: 382071 - DNA, 25 bp, Artificial
  probe
  misc_feature (1)..(25): SEQ ID NO: 4408; WAN024A3K; Start 24; Stop 48
aattctaatgtacagaagactaggc

SEQ ID NO: 382072 - DNA, 25 bp, Artificial
  probe
  misc_feature (1)..(25): SEQ ID NO: 4408; WAN024A3K; Start 135; Stop 159
tttgtcgcagggaggaatctgttaa

SEQ ID NO: 382073 - DNA, 25 bp, Artificial
  probe
  misc_feature (1)..(25): SEQ ID NO: 4408; WAN024A3K; Start 120; Stop 144
catactattatcaattttgtcgcag

SEQ ID NO: 382074 - DNA, 25 bp, Artificial
  probe
  misc_feature (1)..(25): SEQ ID NO: 4408; WAN024A3K; Start 62; Stop 86
tatagtcgctataagatgaccttat

SEQ ID NO: 382075 - DNA, 25 bp, Artificial
  probe
  misc_feature (1)..(25): SEQ ID NO: 4408; WAN024A3K; Start 119; Stop 143
acatactattatcaattttgtcgca

SEQ ID NO: 382076 - DNA, 25 bp, Artificial
  probe
  misc_feature (1)..(25): SEQ ID NO: 4408; WAN024A3K; Start 67; Stop 91
tcgctataagatgaccttatctata

SEQ ID NO: 382077 - DNA, 25 bp, Artificial
  probe
  misc_feature (1)..(25): SEQ ID NO: 4408; WAN024A3K; Start 129; Stop 153
atcaattttgtcgcagggaggaatc

SEQ ID NO: 382078 - DNA, 25 bp, Artificial
  probe
  misc_feature (1)..(25): SEQ ID NO: 4408; WAN024A3K; Start 23; Stop 47
gaattctaatgtacagaagactagg

SEQ ID NO: 382079 - DNA, 25 bp, Artificial
  probe
  misc_feature (1)..(25): SEQ ID NO: 4408; WAN024A3K; Start 68; Stop 92
cgctataagatgaccttatctatag

SEQ ID NO: 382080 - DNA, 25 bp, Artificial
  probe
  misc_feature (1)..(25): SEQ ID NO: 4409; WAN0249RA; Start 125; Stop 149
ttcctgatagagctgttcatatctt

SEQ ID NO: 382081 - DNA, 25 bp, Artificial
  probe
  misc_feature (1)..(25): SEQ ID NO: 4409; WAN0249RA; Start 126; Stop 150
tcctgatagagctgttcatatctta

SEQ ID NO: 382082 - DNA, 25 bp, Artificial
  probe
  misc_feature (1)..(25): SEQ ID NO: 4409; WAN0249RA; Start 63; Stop 87
gtgtattgaatctataacagtaggc

SEQ ID NO: 382083 - DNA, 25 bp, Artificial
  probe
  misc_feature (1)..(25): SEQ ID NO: 4409; WAN0249RA; Start 127; Stop 151
cctgatagagctgttcatatcttat

SEQ ID NO: 382084 - DNA, 25 bp, Artificial
  probe
  misc_feature (1)..(25): SEQ ID NO: 4409; WAN0249RA; Start 119; Stop 143
ttaactttcctgatagagctgttca

SEQ ID NO: 382085 - DNA, 25 bp, Artificial
  probe
  misc_feature (1)..(25): SEQ ID NO: 4409; WAN0249RA; Start 121; Stop 145
aactttcctgatagagctgttcata

SEQ ID NO: 382086 - DNA, 25 bp, Artificial
  probe
  misc_feature (1)..(25): SEQ ID NO: 4409; WAN0249RA; Start 120; Stop 144
taactttcctgatagagctgttcat

SEQ ID NO: 382087 - DNA, 25 bp, Artificial
  probe
  misc_feature (1)..(25): SEQ ID NO: 4409; WAN0249RA; Start 122; Stop 146
actttcctgatagagctgttcatat

SEQ ID NO: 382088 - DNA, 25 bp, Artificial
  probe
  misc_feature (1)..(25): SEQ ID NO: 4409; WAN0249RA; Start 118; Stop 142
tttaactttcctgatagagctgttc

SEQ ID NO: 382089 - DNA, 25 bp, Artificial
  probe
  misc_feature (1)..(25): SEQ ID NO: 4409; WAN0249RA; Start 116; Stop 140
aatttaactttcctgatagagctgt

SEQ ID NO: 382090 - DNA, 25 bp, Artificial
  probe
  misc_feature (1)..(25): SEQ ID NO: 4409; WAN0249RA; Start 124; Stop 148
tttcctgatagagctgttcatatct

SEQ ID NO: 382091 - DNA, 25 bp, Artificial
  probe
  misc_feature (1)..(25): SEQ ID NO: 4409; WAN0249RA; Start 123; Stop 147
ctttcctgatagagctgttcatatc

SEQ ID NO: 382092 - DNA, 25 bp, Artificial
  probe
  misc_feature (1)..(25): SEQ ID NO: 4409; WAN0249RA; Start 117; Stop 141
atttaactttcctgatagagctgtt

SEQ ID NO: 382093 - DNA, 25 bp, Artificial
  probe
  misc_feature (1)..(25): SEQ ID NO: 4409; WAN0249RA; Start 64; Stop 88
tgtattgaatctataacagtaggcc

SEQ ID NO: 382094 - DNA, 25 bp, Artificial
  probe
  misc_feature (1)..(25): SEQ ID NO: 4409; WAN0249RA; Start 62; Stop 86
agtgtattgaatctataacagtagg

SEQ ID NO: 382095 - DNA, 25 bp, Artificial
  probe
  misc_feature (1)..(25): SEQ ID NO: 4409; WAN0249RA; Start 128; Stop 152
ctgatagagctgttcatatcttatt

SEQ ID NO: 382096 - DNA, 25 bp, Artificial
  probe
  misc_feature (1)..(25): SEQ ID NO: 4409; WAN0249RA; Start 115; Stop 139
taatttaactttcctgatagagctg

SEQ ID NO: 382097 - DNA, 25 bp, Artificial
  probe
  misc_feature (1)..(25): SEQ ID NO: 4409; WAN0249RA; Start 136; Stop 160
gctgttcatatcttatttcaattct

SEQ ID NO: 382098 - DNA, 25 bp, Artificial
  probe
  misc_feature (1)..(25): SEQ ID NO: 4409; WAN0249RA; Start 133; Stop 157
agagctgttcatatcttatttcaat

SEQ ID NO: 382099 - DNA, 25 bp, Artificial
  probe
  misc_feature (1)..(25): SEQ ID NO: 4409; WAN0249RA; Start 168; Stop 192
atacgttgaacaaaacccttctatt

SEQ ID NO: 382100 - DNA, 25 bp, Artificial
  probe
  misc_feature (1)..(25): SEQ ID NO: 4409; WAN0249RA; Start 165; Stop 189
attatacgttgaacaaaacccttct

SEQ ID NO: 382101 - DNA, 25 bp, Artificial
  probe
  misc_feature (1)..(25): SEQ ID NO: 4409; WAN0249RA; Start 166; Stop 190
ttatacgttgaacaaaacccttcta

SEQ ID NO: 382102 - DNA, 25 bp, Artificial
  probe
  misc_feature (1)..(25): SEQ ID NO: 4409; WAN0249RA; Start 114; Stop 138
ttaatttaactttcctgatagagct

SEQ ID NO: 382103 - DNA, 25 bp, Artificial
  probe
  misc_feature (1)..(25): SEQ ID NO: 4409; WAN0249RA; Start 167; Stop 191
tatacgttgaacaaaacccttctat

SEQ ID NO: 382104 - DNA, 25 bp, Artificial
  probe
  misc_feature (1)..(25): SEQ ID NO: 4409; WAN0249RA; Start 135; Stop 159
agctgttcatatcttatttcaattc

SEQ ID NO: 382105 - DNA, 25 bp, Artificial
  probe
  misc_feature (1)..(25): SEQ ID NO: 4409; WAN0249RA; Start 134; Stop 158
gagctgttcatatcttatttcaatt

SEQ ID NO: 382106 - DNA, 25 bp, Artificial
  probe
  misc_feature (1)..(25): SEQ ID NO: 4409; WAN0249RA; Start 132; Stop 156
tagagctgttcatatcttatttcaa

SEQ ID NO: 382107 - DNA, 25 bp, Artificial
  probe
  misc_feature (1)..(25): SEQ ID NO: 4409; WAN0249RA; Start 131; Stop 155
atagagctgttcatatcttatttca

SEQ ID NO: 382108 - DNA, 25 bp, Artificial
  probe
  misc_feature (1)..(25): SEQ ID NO: 4409; WAN0249RA; Start 113; Stop 137
attaatttaactttcctgatagagc

SEQ ID NO: 382109 - DNA, 25 bp, Artificial
  probe
  misc_feature (1)..(25): SEQ ID NO: 4409; WAN0249RA; Start 129; Stop 153
tgatagagctgttcatatcttattt

SEQ ID NO: 382110 - DNA, 25 bp, Artificial
  probe
  misc_feature (1)..(25): SEQ ID NO: 4409; WAN0249RA; Start 130; Stop 154
gatagagctgttcatatcttatttc

SEQ ID NO: 382111 - DNA, 25 bp, Artificial
  probe
  misc_feature (1)..(25): SEQ ID NO: 4409; WAN0249RA; Start 44; Stop 68
tcagacaaacacatatatagtgtat

SEQ ID NO: 382112 - DNA, 25 bp, Artificial
  probe
  misc_feature (1)..(25): SEQ ID NO: 4409; WAN0249RA; Start 43; Stop 67
atcagacaaacacatatatagtgta

SEQ ID NO: 382113 - DNA, 25 bp, Artificial
  probe
  misc_feature (1)..(25): SEQ ID NO: 4409; WAN0249RA; Start 42; Stop 66
tatcagacaaacacatatatagtgt

SEQ ID NO: 382114 - DNA, 25 bp, Artificial
  probe
  misc_feature (1)..(25): SEQ ID NO: 4410; WAN0249MH; Start 110; Stop 134
atcataattgcttccatctgttctt

SEQ ID NO: 382115 - DNA, 25 bp, Artificial
  probe
  misc_feature (1)..(25): SEQ ID NO: 4410; WAN0249MH; Start 109; Stop 133
aatcataattgcttccatctgttct

SEQ ID NO: 382116 - DNA, 25 bp, Artificial
  probe
  misc_feature (1)..(25): SEQ ID NO: 4410; WAN0249MH; Start 29; Stop 53
agccttccattcgtactatcctata

SEQ ID NO: 382117 - DNA, 25 bp, Artificial
  probe
  misc_feature (1)..(25): SEQ ID NO: 4410; WAN0249MH; Start 30; Stop 54
gccttccattcgtactatcctatat

SEQ ID NO: 382118 - DNA, 25 bp, Artificial
  probe
  misc_feature (1)..(25): SEQ ID NO: 4410; WAN0249MH; Start 28; Stop 52
aagccttccattcgtactatcctat

SEQ ID NO: 382119 - DNA, 25 bp, Artificial
  probe
  misc_feature (1)..(25): SEQ ID NO: 4410; WAN0249MH; Start 150; Stop 174
gttagactagagcactgtatcttct

SEQ ID NO: 382120 - DNA, 25 bp, Artificial
  probe
  misc_feature (1)..(25): SEQ ID NO: 4410; WAN0249MH; Start 146; Stop 170
tgaagttagactagagcactgtatc

SEQ ID NO: 382121 - DNA, 25 bp, Artificial
  probe
  misc_feature (1)..(25): SEQ ID NO: 4410; WAN0249MH; Start 149; Stop 173
agttagactagagcactgtatcttc

SEQ ID NO: 382122 - DNA, 25 bp, Artificial
  probe
  misc_feature (1)..(25): SEQ ID NO: 4410; WAN0249MH; Start 147; Stop 171
gaagttagactagagcactgtatct

SEQ ID NO: 382123 - DNA, 25 bp, Artificial
  probe
  misc_feature (1)..(25): SEQ ID NO: 4410; WAN0249MH; Start 145; Stop 169
ttgaagttagactagagcactgtat

SEQ ID NO: 382124 - DNA, 25 bp, Artificial
  probe
  misc_feature (1)..(25): SEQ ID NO: 4410; WAN0249MH; Start 144; Stop 168
attgaagttagactagagcactgta

SEQ ID NO: 382125 - DNA, 25 bp, Artificial
  probe
  misc_feature (1)..(25): SEQ ID NO: 4410; WAN0249MH; Start 143; Stop 167
tattgaagttagactagagcactgt

SEQ ID NO: 382126 - DNA, 25 bp, Artificial
  probe
  misc_feature (1)..(25): SEQ ID NO: 4410; WAN0249MH; Start 148; Stop 172
aagttagactagagcactgtatctt

SEQ ID NO: 382127 - DNA, 25 bp, Artificial
  probe
  misc_feature (1)..(25): SEQ ID NO: 4410; WAN0249MH; Start 142; Stop 166
atattgaagttagactagagcactg

SEQ ID NO: 382128 - DNA, 25 bp, Artificial
  probe
  misc_feature (1)..(25): SEQ ID NO: 4410; WAN0249MH; Start 111; Stop 135
tcataattgcttccatctgttcttt

SEQ ID NO: 382129 - DNA, 25 bp, Artificial
  probe
  misc_feature (1)..(25): SEQ ID NO: 4410; WAN0249MH; Start 31; Stop 55
ccttccattcgtactatcctatatt

SEQ ID NO: 382130 - DNA, 25 bp, Artificial
  probe
  misc_feature (1)..(25): SEQ ID NO: 4410; WAN0249MH; Start 152; Stop 176
tagactagagcactgtatcttctaa

SEQ ID NO: 382131 - DNA, 25 bp, Artificial
  probe
  misc_feature (1)..(25): SEQ ID NO: 4410; WAN0249MH; Start 151; Stop 175
ttagactagagcactgtatcttcta

SEQ ID NO: 382132 - DNA, 25 bp, Artificial
  probe
  misc_feature (1)..(25): SEQ ID NO: 4410; WAN0249MH; Start 27; Stop 51
aaagccttccattcgtactatccta

SEQ ID NO: 382133 - DNA, 25 bp, Artificial
  probe
  misc_feature (1)..(25): SEQ ID NO: 4410; WAN0249MH; Start 108; Stop 132
aaatcataattgcttccatctgttc

SEQ ID NO: 382134 - DNA, 25 bp, Artificial
  probe
  misc_feature (1)..(25): SEQ ID NO: 4410; WAN0249MH; Start 106; Stop 130
gtaaatcataattgcttccatctgt

SEQ ID NO: 382135 - DNA, 25 bp, Artificial
  probe
  misc_feature (1)..(25): SEQ ID NO: 4410; WAN0249MH; Start 140; Stop 164
gtatattgaagttagactagagcac

SEQ ID NO: 382136 - DNA, 25 bp, Artificial
  probe
  misc_feature (1)..(25): SEQ ID NO: 4410; WAN0249MH; Start 105; Stop 129
agtaaatcataattgcttccatctg

SEQ ID NO: 382137 - DNA, 25 bp, Artificial
  probe
  misc_feature (1)..(25): SEQ ID NO: 4410; WAN0249MH; Start 141; Stop 165
tatattgaagttagactagagcact

SEQ ID NO: 382138 - DNA, 25 bp, Artificial
  probe
  misc_feature (1)..(25): SEQ ID NO: 4410; WAN0249MH; Start 139; Stop 163
agtatattgaagttagactagagca

SEQ ID NO: 382139 - DNA, 25 bp, Artificial
  probe
  misc_feature (1)..(25): SEQ ID NO: 4410; WAN0249MH; Start 153; Stop 177
agactagagcactgtatcttctaaa

SEQ ID NO: 382140 - DNA, 25 bp, Artificial
  probe
  misc_feature (1)..(25): SEQ ID NO: 4410; WAN0249MH; Start 107; Stop 131
taaatcataattgcttccatctgtt

SEQ ID NO: 382141 - DNA, 25 bp, Artificial
  probe
  misc_feature (1)..(25): SEQ ID NO: 4410; WAN0249MH; Start 1; Stop 25
taaactccttcgtcctccagtctac

SEQ ID NO: 382142 - DNA, 25 bp, Artificial
  probe
  misc_feature (1)..(25): SEQ ID NO: 4410; WAN0249MH; Start 104; Stop 128
aagtaaatcataattgcttccatct

SEQ ID NO: 382143 - DNA, 25 bp, Artificial
  probe
  misc_feature (1)..(25): SEQ ID NO: 4410; WAN0249MH; Start 117; Stop 141
ttgcttccatctgttcttttatagt

SEQ ID NO: 382144 - DNA, 25 bp, Artificial
  probe
  misc_feature (1)..(25): SEQ ID NO: 4410; WAN0249MH; Start 23; Stop 47
tacaaaagccttccattcgtactat

SEQ ID NO: 382145 - DNA, 25 bp, Artificial
  probe
  misc_feature (1)..(25): SEQ ID NO: 4410; WAN0249MH; Start 22; Stop 46
ctacaaaagccttccattcgtacta

SEQ ID NO: 382146 - DNA, 25 bp, Artificial
  probe
  misc_feature (1)..(25): SEQ ID NO: 4410; WAN0249MH; Start 112; Stop 136
cataattgcttccatctgttctttt

SEQ ID NO: 382147 - DNA, 25 bp, Artificial
  probe
  misc_feature (1)..(25): SEQ ID NO: 4411; WAN024AQH; Start 38; Stop 62
ttcccactattaaggagaaagaaga

SEQ ID NO: 382148 - DNA, 25 bp, Artificial
  probe
  misc_feature (1)..(25): SEQ ID NO: 4411; WAN024AQH; Start 33; Stop 57
acaaattcccactattaaggagaaa

SEQ ID NO: 382149 - DNA, 25 bp, Artificial
  probe
  misc_feature (1)..(25): SEQ ID NO: 4411; WAN024AQH; Start 37; Stop 61
attcccactattaaggagaaagaag

SEQ ID NO: 382150 - DNA, 25 bp, Artificial
  probe
  misc_feature (1)..(25): SEQ ID NO: 4411; WAN024AQH; Start 28; Stop 52
actttacaaattcccactattaagg

SEQ ID NO: 382151 - DNA, 25 bp, Artificial
  probe
  misc_feature (1)..(25): SEQ ID NO: 4411; WAN024AQH; Start 36; Stop 60
aattcccactattaaggagaaagaa

SEQ ID NO: 382152 - DNA, 25 bp, Artificial
  probe
  misc_feature (1)..(25): SEQ ID NO: 4411; WAN024AQH; Start 35; Stop 59
aaattcccactattaaggagaaaga

SEQ ID NO: 382153 - DNA, 25 bp, Artificial
  probe
  misc_feature (1)..(25): SEQ ID NO: 4411; WAN024AQH; Start 34; Stop 58
caaattcccactattaaggagaaag

SEQ ID NO: 382154 - DNA, 25 bp, Artificial
  probe
  misc_feature (1)..(25): SEQ ID NO: 4411; WAN024AQH; Start 21; Stop 45
tcaattaactttacaaattcccact

SEQ ID NO: 382155 - DNA, 25 bp, Artificial
  probe
  misc_feature (1)..(25): SEQ ID NO: 4411; WAN024AQH; Start 32; Stop 56
tacaaattcccactattaaggagaa

SEQ ID NO: 382156 - DNA, 25 bp, Artificial
  probe
  misc_feature (1)..(25): SEQ ID NO: 4411; WAN024AQH; Start 31; Stop 55
ttacaaattcccactattaaggaga

SEQ ID NO: 382157 - DNA, 25 bp, Artificial
  probe
  misc_feature (1)..(25): SEQ ID NO: 4411; WAN024AQH; Start 20; Stop 44
ttcaattaactttacaaattcccac

SEQ ID NO: 382158 - DNA, 25 bp, Artificial
  probe
  misc_feature (1)..(25): SEQ ID NO: 4411; WAN024AQH; Start 30; Stop 54
tttacaaattcccactattaaggag

SEQ ID NO: 382159 - DNA, 25 bp, Artificial
  probe
  misc_feature (1)..(25): SEQ ID NO: 4411; WAN024AQH; Start 29; Stop 53
ctttacaaattcccactattaagga

SEQ ID NO: 382160 - DNA, 25 bp, Artificial
  probe
  misc_feature (1)..(25): SEQ ID NO: 4411; WAN024AQH; Start 22; Stop 46
caattaactttacaaattcccacta

SEQ ID NO: 382161 - DNA, 25 bp, Artificial
  probe
  misc_feature (1)..(25): SEQ ID NO: 4411; WAN024AQH; Start 27; Stop 51
aactttacaaattcccactattaag

SEQ ID NO: 382162 - DNA, 25 bp, Artificial
  probe
  misc_feature (1)..(25): SEQ ID NO: 4411; WAN024AQH; Start 19; Stop 43
attcaattaactttacaaattccca

SEQ ID NO: 382163 - DNA, 25 bp, Artificial
  probe
  misc_feature (1)..(25): SEQ ID NO: 4412; WAN0249NT; Start 10; Stop 34
cgccagtaaagttagcaaactattt

SEQ ID NO: 382164 - DNA, 25 bp, Artificial
  probe
  misc_feature (1)..(25): SEQ ID NO: 4412; WAN0249NT; Start 9; Stop 33
tcgccagtaaagttagcaaactatt

SEQ ID NO: 382165 - DNA, 25 bp, Artificial
  probe
  misc_feature (1)..(25): SEQ ID NO: 4412; WAN0249NT; Start 8; Stop 32
ttcgccagtaaagttagcaaactat

SEQ ID NO: 382166 - DNA, 25 bp, Artificial
  probe
  misc_feature (1)..(25): SEQ ID NO: 4412; WAN0249NT; Start 7; Stop 31
tttcgccagtaaagttagcaaacta

SEQ ID NO: 382167 - DNA, 25 bp, Artificial
  probe
  misc_feature (1)..(25): SEQ ID NO: 4412; WAN0249NT; Start 5; Stop 29
cttttcgccagtaaagttagcaaac

SEQ ID NO: 382168 - DNA, 25 bp, Artificial
  probe
  misc_feature (1)..(25): SEQ ID NO: 4412; WAN0249NT; Start 6; Stop 30
ttttcgccagtaaagttagcaaact

SEQ ID NO: 382169 - DNA, 25 bp, Artificial
  probe
  misc_feature (1)..(25): SEQ ID NO: 4412; WAN0249NT; Start 11; Stop 35
gccagtaaagttagcaaactatttt

SEQ ID NO: 382170 - DNA, 25 bp, Artificial
  probe
  misc_feature (1)..(25): SEQ ID NO: 4412; WAN0249NT; Start 56; Stop 80
tagtttaaatgttaaatcgaaagga

SEQ ID NO: 382171 - DNA, 25 bp, Artificial
  probe
  misc_feature (1)..(25): SEQ ID NO: 4412; WAN0249NT; Start 4; Stop 28
acttttcgccagtaaagttagcaaa

SEQ ID NO: 382172 - DNA, 25 bp, Artificial
  probe
  misc_feature (1)..(25): SEQ ID NO: 4413; WAN024ACH; Start 51; Stop 75
tttatttgtaagctttctgctacgc

SEQ ID NO: 382173 - DNA, 25 bp, Artificial
  probe
  misc_feature (1)..(25): SEQ ID NO: 4413; WAN024ACH; Start 53; Stop 77
tatttgtaagctttctgctacgcaa

SEQ ID NO: 382174 - DNA, 25 bp, Artificial
  probe
  misc_feature (1)..(25): SEQ ID NO: 4413; WAN024ACH; Start 52; Stop 76
ttatttgtaagctttctgctacgca

SEQ ID NO: 382175 - DNA, 25 bp, Artificial
  probe
  misc_feature (1)..(25): SEQ ID NO: 4413; WAN024ACH; Start 54; Stop 78
atttgtaagctttctgctacgcaaa

SEQ ID NO: 382176 - DNA, 25 bp, Artificial
  probe
  misc_feature (1)..(25): SEQ ID NO: 4413; WAN024ACH; Start 46; Stop 70
tcaattttatttgtaagctttctgc

SEQ ID NO: 382177 - DNA, 25 bp, Artificial
  probe
  misc_feature (1)..(25): SEQ ID NO: 4413; WAN024ACH; Start 50; Stop 74
ttttatttgtaagctttctgctacg

SEQ ID NO: 382178 - DNA, 25 bp, Artificial
  probe
  misc_feature (1)..(25): SEQ ID NO: 4413; WAN024ACH; Start 63; Stop 87
ctttctgctacgcaaaatcgtatcg

SEQ ID NO: 382179 - DNA, 25 bp, Artificial
  probe
  misc_feature (1)..(25): SEQ ID NO: 4413; WAN024ACH; Start 62; Stop 86
gctttctgctacgcaaaatcgtatc

SEQ ID NO: 382180 - DNA, 25 bp, Artificial
  probe
  misc_feature (1)..(25): SEQ ID NO: 4413; WAN024ACH; Start 56; Stop 80
ttgtaagctttctgctacgcaaaat

SEQ ID NO: 382181 - DNA, 25 bp, Artificial
  probe
  misc_feature (1)..(25): SEQ ID NO: 4413; WAN024ACH; Start 55; Stop 79
tttgtaagctttctgctacgcaaaa

SEQ ID NO: 382182 - DNA, 25 bp, Artificial
  probe
  misc_feature (1)..(25): SEQ ID NO: 4413; WAN024ACH; Start 57; Stop 81
tgtaagctttctgctacgcaaaatc

SEQ ID NO: 382183 - DNA, 25 bp, Artificial
  probe
  misc_feature (1)..(25): SEQ ID NO: 4413; WAN024ACH; Start 47; Stop 71
caattttatttgtaagctttctgct

SEQ ID NO: 382184 - DNA, 25 bp, Artificial
  probe
  misc_feature (1)..(25): SEQ ID NO: 4413; WAN024ACH; Start 61; Stop 85
agctttctgctacgcaaaatcgtat

SEQ ID NO: 382185 - DNA, 25 bp, Artificial
  probe
  misc_feature (1)..(25): SEQ ID NO: 4413; WAN024ACH; Start 64; Stop 88
tttctgctacgcaaaatcgtatcgg

SEQ ID NO: 382186 - DNA, 25 bp, Artificial
  probe
  misc_feature (1)..(25): SEQ ID NO: 4413; WAN024ACH; Start 58; Stop 82
gtaagctttctgctacgcaaaatcg

SEQ ID NO: 382187 - DNA, 25 bp, Artificial
  probe
  misc_feature (1)..(25): SEQ ID NO: 4413; WAN024ACH; Start 49; Stop 73
attttatttgtaagctttctgctac

SEQ ID NO: 382188 - DNA, 25 bp, Artificial
  probe
  misc_feature (1)..(25): SEQ ID NO: 4413; WAN024ACH; Start 59; Stop 83
taagctttctgctacgcaaaatcgt

SEQ ID NO: 382189 - DNA, 25 bp, Artificial
  probe
  misc_feature (1)..(25): SEQ ID NO: 4413; WAN024ACH; Start 45; Stop 69
ttcaattttatttgtaagctttctg

SEQ ID NO: 382190 - DNA, 25 bp, Artificial
  probe
  misc_feature (1)..(25): SEQ ID NO: 4413; WAN024ACH; Start 48; Stop 72
aattttatttgtaagctttctgcta

SEQ ID NO: 382191 - DNA, 25 bp, Artificial
  probe
  misc_feature (1)..(25): SEQ ID NO: 4413; WAN024ACH; Start 70; Stop 94
ctacgcaaaatcgtatcgggcacta

SEQ ID NO: 382192 - DNA, 25 bp, Artificial
  probe
  misc_feature (1)..(25): SEQ ID NO: 4413; WAN024ACH; Start 60; Stop 84
aagctttctgctacgcaaaatcgta

SEQ ID NO: 382193 - DNA, 25 bp, Artificial
  probe
  misc_feature (1)..(25): SEQ ID NO: 4414; WAN0249KP; Start 11; Stop 35
aaaccttcctatttgcttaatttca

SEQ ID NO: 382194 - DNA, 25 bp, Artificial
  probe
  misc_feature (1)..(25): SEQ ID NO: 4414; WAN0249KP; Start 13; Stop 37
accttcctatttgcttaatttcatt

SEQ ID NO: 382195 - DNA, 25 bp, Artificial
  probe
  misc_feature (1)..(25): SEQ ID NO: 4414; WAN0249KP; Start 12; Stop 36
aaccttcctatttgcttaatttcat

SEQ ID NO: 382196 - DNA, 25 bp, Artificial
  probe
  misc_feature (1)..(25): SEQ ID NO: 4414; WAN0249KP; Start 4; Stop 28
agataataaaccttcctatttgctt

SEQ ID NO: 382197 - DNA, 25 bp, Artificial
  probe
  misc_feature (1)..(25): SEQ ID NO: 4414; WAN0249KP; Start 3; Stop 27
aagataataaaccttcctatttgct

SEQ ID NO: 382198 - DNA, 25 bp, Artificial
  probe
  misc_feature (1)..(25): SEQ ID NO: 4414; WAN0249KP; Start 10; Stop 34
taaaccttcctatttgcttaatttc

SEQ ID NO: 382199 - DNA, 25 bp, Artificial
  probe
  misc_feature (1)..(25): SEQ ID NO: 4414; WAN0249KP; Start 49; Stop 73
agttcaaaatagcaagttaaaggaa

SEQ ID NO: 382200 - DNA, 25 bp, Artificial
  probe
  misc_feature (1)..(25): SEQ ID NO: 4414; WAN0249KP; Start 2; Stop 26
aaagataataaaccttcctatttgc

SEQ ID NO: 382201 - DNA, 25 bp, Artificial
  probe
  misc_feature (1)..(25): SEQ ID NO: 4414; WAN0249KP; Start 14; Stop 38
ccttcctatttgcttaatttcatta

SEQ ID NO: 382202 - DNA, 25 bp, Artificial
  probe
  misc_feature (1)..(25): SEQ ID NO: 4414; WAN0249KP; Start 48; Stop 72
tagttcaaaatagcaagttaaagga

SEQ ID NO: 382203 - DNA, 25 bp, Artificial
  probe
  misc_feature (1)..(25): SEQ ID NO: 4414; WAN0249KP; Start 50; Stop 74
gttcaaaatagcaagttaaaggaat

SEQ ID NO: 382204 - DNA, 25 bp, Artificial
  probe
  misc_feature (1)..(25): SEQ ID NO: 4414; WAN0249KP; Start 9; Stop 33
ataaaccttcctatttgcttaattt

SEQ ID NO: 382205 - DNA, 25 bp, Artificial
  probe
  misc_feature (1)..(25): SEQ ID NO: 4414; WAN0249KP; Start 8; Stop 32
aataaaccttcctatttgcttaatt

SEQ ID NO: 382206 - DNA, 25 bp, Artificial
  probe
  misc_feature (1)..(25): SEQ ID NO: 4414; WAN0249KP; Start 47; Stop 71
ttagttcaaaatagcaagttaaagg

SEQ ID NO: 382207 - DNA, 25 bp, Artificial
  probe
  misc_feature (1)..(25): SEQ ID NO: 4414; WAN0249KP; Start 52; Stop 76
tcaaaatagcaagttaaaggaataa

SEQ ID NO: 382208 - DNA, 25 bp, Artificial
  probe
  misc_feature (1)..(25): SEQ ID NO: 4414; WAN0249KP; Start 51; Stop 75
ttcaaaatagcaagttaaaggaata

SEQ ID NO: 382209 - DNA, 25 bp, Artificial
  probe
  misc_feature (1)..(25): SEQ ID NO: 4415; WAN024ACN; Start 80; Stop 104
tgtcaacaagtatcgtagtccattg

SEQ ID NO: 382210 - DNA, 25 bp, Artificial
  probe
  misc_feature (1)..(25): SEQ ID NO: 4415; WAN024ACN; Start 79; Stop 103
ttgtcaacaagtatcgtagtccatt

SEQ ID NO: 382211 - DNA, 25 bp, Artificial
  probe
  misc_feature (1)..(25): SEQ ID NO: 4415; WAN024ACN; Start 81; Stop 105
gtcaacaagtatcgtagtccattgg

SEQ ID NO: 382212 - DNA, 25 bp, Artificial
  probe
  misc_feature (1)..(25): SEQ ID NO: 4415; WAN024ACN; Start 219; Stop 243
tctaactattactcaagaatcagcc

SEQ ID NO: 382213 - DNA, 25 bp, Artificial
  probe
  misc_feature (1)..(25): SEQ ID NO: 4415; WAN024ACN; Start 37; Stop 61
tcctattatcgagagctattccgta

SEQ ID NO: 382214 - DNA, 25 bp, Artificial
  probe
  misc_feature (1)..(25): SEQ ID NO: 4415; WAN024ACN; Start 38; Stop 62
cctattatcgagagctattccgtag

SEQ ID NO: 382215 - DNA, 25 bp, Artificial
  probe
  misc_feature (1)..(25): SEQ ID NO: 4415; WAN024ACN; Start 166; Stop 190
atagttctcttctgtatcaggtctt

SEQ ID NO: 382216 - DNA, 25 bp, Artificial
  probe
  misc_feature (1)..(25): SEQ ID NO: 4415; WAN024ACN; Start 165; Stop 189
aatagttctcttctgtatcaggtct

SEQ ID NO: 382217 - DNA, 25 bp, Artificial
  probe
  misc_feature (1)..(25): SEQ ID NO: 4415; WAN024ACN; Start 164; Stop 188
gaatagttctcttctgtatcaggtc

SEQ ID NO: 382218 - DNA, 25 bp, Artificial
  probe
  misc_feature (1)..(25): SEQ ID NO: 4415; WAN024ACN; Start 39; Stop 63
ctattatcgagagctattccgtaga

SEQ ID NO: 382219 - DNA, 25 bp, Artificial
  probe
  misc_feature (1)..(25): SEQ ID NO: 4415; WAN024ACN; Start 194; Stop 218
acaaccagagtagtattaatcacac

SEQ ID NO: 382220 - DNA, 25 bp, Artificial
  probe
  misc_feature (1)..(25): SEQ ID NO: 4415; WAN024ACN; Start 230; Stop 254
ctcaagaatcagcccaataaacaat

SEQ ID NO: 382221 - DNA, 25 bp, Artificial
  probe
  misc_feature (1)..(25): SEQ ID NO: 4415; WAN024ACN; Start 228; Stop 252
tactcaagaatcagcccaataaaca

SEQ ID NO: 382222 - DNA, 25 bp, Artificial
  probe
  misc_feature (1)..(25): SEQ ID NO: 4415; WAN024ACN; Start 222; Stop 246
aactattactcaagaatcagcccaa

SEQ ID NO: 382223 - DNA, 25 bp, Artificial
  probe
  misc_feature (1)..(25): SEQ ID NO: 4415; WAN024ACN; Start 139; Stop 163
acaacgaacttactcttaactagaa

SEQ ID NO: 382224 - DNA, 25 bp, Artificial
  probe
  misc_feature (1)..(25): SEQ ID NO: 4415; WAN024ACN; Start 138; Stop 162
aacaacgaacttactcttaactaga

SEQ ID NO: 382225 - DNA, 25 bp, Artificial
  probe
  misc_feature (1)..(25): SEQ ID NO: 4415; WAN024ACN; Start 223; Stop 247
actattactcaagaatcagcccaat

SEQ ID NO: 382226 - DNA, 25 bp, Artificial
  probe
  misc_feature (1)..(25): SEQ ID NO: 4415; WAN024ACN; Start 227; Stop 251
ttactcaagaatcagcccaataaac

SEQ ID NO: 382227 - DNA, 25 bp, Artificial
  probe
  misc_feature (1)..(25): SEQ ID NO: 4415; WAN024ACN; Start 221; Stop 245
taactattactcaagaatcagccca

SEQ ID NO: 382228 - DNA, 25 bp, Artificial
  probe
  misc_feature (1)..(25): SEQ ID NO: 4415; WAN024ACN; Start 229; Stop 253
actcaagaatcagcccaataaacaa

SEQ ID NO: 382229 - DNA, 25 bp, Artificial
  probe
  misc_feature (1)..(25): SEQ ID NO: 4415; WAN024ACN; Start 220; Stop 244
ctaactattactcaagaatcagccc

SEQ ID NO: 382230 - DNA, 25 bp, Artificial
  probe
  misc_feature (1)..(25): SEQ ID NO: 4415; WAN024ACN; Start 107; Stop 131
ctcaccttccttctatttcatttca

SEQ ID NO: 382231 - DNA, 25 bp, Artificial
  probe
  misc_feature (1)..(25): SEQ ID NO: 4415; WAN024ACN; Start 106; Stop 130
actcaccttccttctatttcatttc

SEQ ID NO: 382232 - DNA, 25 bp, Artificial
  probe
  misc_feature (1)..(25): SEQ ID NO: 4415; WAN024ACN; Start 105; Stop 129
gactcaccttccttctatttcattt

SEQ ID NO: 382233 - DNA, 25 bp, Artificial
  probe
  misc_feature (1)..(25): SEQ ID NO: 4415; WAN024ACN; Start 40; Stop 64
tattatcgagagctattccgtagaa

SEQ ID NO: 382234 - DNA, 25 bp, Artificial
  probe
  misc_feature (1)..(25): SEQ ID NO: 4415; WAN024ACN; Start 231; Stop 255
tcaagaatcagcccaataaacaata

SEQ ID NO: 382235 - DNA, 25 bp, Artificial
  probe
  misc_feature (1)..(25): SEQ ID NO: 4415; WAN024ACN; Start 36; Stop 60
ctcctattatcgagagctattccgt

SEQ ID NO: 382236 - DNA, 25 bp, Artificial
  probe
  misc_feature (1)..(25): SEQ ID NO: 4415; WAN024ACN; Start 140; Stop 164
caacgaacttactcttaactagaag

SEQ ID NO: 382237 - DNA, 25 bp, Artificial
  probe
  misc_feature (1)..(25): SEQ ID NO: 4415; WAN024ACN; Start 226; Stop 250
attactcaagaatcagcccaataaa

SEQ ID NO: 382238 - DNA, 25 bp, Artificial
  probe
  misc_feature (1)..(25): SEQ ID NO: 4415; WAN024ACN; Start 193; Stop 217
aacaaccagagtagtattaatcaca

SEQ ID NO: 382239 - DNA, 25 bp, Artificial
  probe
  misc_feature (1)..(25): SEQ ID NO: 4415; WAN024ACN; Start 99; Stop 123
ccattggactcaccttccttctatt

SEQ ID NO: 382240 - DNA, 25 bp, Artificial
  probe
  misc_feature (1)..(25): SEQ ID NO: 4415; WAN024ACN; Start 195; Stop 219
caaccagagtagtattaatcacact

SEQ ID NO: 382241 - DNA, 25 bp, Artificial
  probe
  misc_feature (1)..(25): SEQ ID NO: 4415; WAN024ACN; Start 218; Stop 242
ctctaactattactcaagaatcagc

SEQ ID NO: 382242 - DNA, 25 bp, Artificial
  probe
  misc_feature (1)..(25): SEQ ID NO: 4416; WAN024AE6; Start 333; Stop 357
aaaccaagtcacaaagaaattgagc

SEQ ID NO: 382243 - DNA, 25 bp, Artificial
  probe
  misc_feature (1)..(25): SEQ ID NO: 4416; WAN024AE6; Start 181; Stop 205
tgcttatatttcacccaatcttaca

SEQ ID NO: 382244 - DNA, 25 bp, Artificial
  probe
  misc_feature (1)..(25): SEQ ID NO: 4416; WAN024AE6; Start 228; Stop 252
tttgtaaggttaggttatggcaagc

SEQ ID NO: 382245 - DNA, 25 bp, Artificial
  probe
  misc_feature (1)..(25): SEQ ID NO: 4416; WAN024AE6; Start 38; Stop 62
gcaagtgttaaattgaatggtatgt

SEQ ID NO: 382246 - DNA, 25 bp, Artificial
  probe
  misc_feature (1)..(25): SEQ ID NO: 4416; WAN024AE6; Start 229; Stop 253
ttgtaaggttaggttatggcaagcg

SEQ ID NO: 382247 - DNA, 25 bp, Artificial
  probe
  misc_feature (1)..(25): SEQ ID NO: 4416; WAN024AE6; Start 14; Stop 38
ctttccttataggttgaacgacttg

SEQ ID NO: 382248 - DNA, 25 bp, Artificial
  probe
  misc_feature (1)..(25): SEQ ID NO: 4416; WAN024AE6; Start 13; Stop 37
tctttccttataggttgaacgactt

SEQ ID NO: 382249 - DNA, 25 bp, Artificial
  probe
  misc_feature (1)..(25): SEQ ID NO: 4416; WAN024AE6; Start 12; Stop 36
ttctttccttataggttgaacgact

SEQ ID NO: 382250 - DNA, 25 bp, Artificial
  probe
  misc_feature (1)..(25): SEQ ID NO: 4416; WAN024AE6; Start 10; Stop 34
ccttctttccttataggttgaacga

SEQ ID NO: 382251 - DNA, 25 bp, Artificial
  probe
  misc_feature (1)..(25): SEQ ID NO: 4416; WAN024AE6; Start 11; Stop 35
cttctttccttataggttgaacgac

SEQ ID NO: 382252 - DNA, 25 bp, Artificial
  probe
  misc_feature (1)..(25): SEQ ID NO: 4416; WAN024AE6; Start 15; Stop 39
tttccttataggttgaacgacttgc

SEQ ID NO: 382253 - DNA, 25 bp, Artificial
  probe
  misc_feature (1)..(25): SEQ ID NO: 4416; WAN024AE6; Start 182; Stop 206
gcttatatttcacccaatcttacaa

SEQ ID NO: 382254 - DNA, 25 bp, Artificial
  probe
  misc_feature (1)..(25): SEQ ID NO: 4416; WAN024AE6; Start 279; Stop 303
cataaagaacaaaggagtaacatca

SEQ ID NO: 382255 - DNA, 25 bp, Artificial
  probe
  misc_feature (1)..(25): SEQ ID NO: 4416; WAN024AE6; Start 270; Stop 294
aactagactcataaagaacaaagga

SEQ ID NO: 382256 - DNA, 25 bp, Artificial
  probe
  misc_feature (1)..(25): SEQ ID NO: 4416; WAN024AE6; Start 271; Stop 295
actagactcataaagaacaaaggag

SEQ ID NO: 382257 - DNA, 25 bp, Artificial
  probe
  misc_feature (1)..(25): SEQ ID NO: 4416; WAN024AE6; Start 278; Stop 302
tcataaagaacaaaggagtaacatc

SEQ ID NO: 382258 - DNA, 25 bp, Artificial
  probe
  misc_feature (1)..(25): SEQ ID NO: 4416; WAN024AE6; Start 180; Stop 204
ttgcttatatttcacccaatcttac

SEQ ID NO: 382259 - DNA, 25 bp, Artificial
  probe
  misc_feature (1)..(25): SEQ ID NO: 4416; WAN024AE6; Start 16; Stop 40
ttccttataggttgaacgacttgca

SEQ ID NO: 382260 - DNA, 25 bp, Artificial
  probe
  misc_feature (1)..(25): SEQ ID NO: 4416; WAN024AE6; Start 334; Stop 358
aaccaagtcacaaagaaattgagcg

SEQ ID NO: 382261 - DNA, 25 bp, Artificial
  probe
  misc_feature (1)..(25): SEQ ID NO: 4416; WAN024AE6; Start 269; Stop 293
aaactagactcataaagaacaaagg

SEQ ID NO: 382262 - DNA, 25 bp, Artificial
  probe
  misc_feature (1)..(25): SEQ ID NO: 4416; WAN024AE6; Start 281; Stop 305
taaagaacaaaggagtaacatcatg

SEQ ID NO: 382263 - DNA, 25 bp, Artificial
  probe
  misc_feature (1)..(25): SEQ ID NO: 4416; WAN024AE6; Start 37; Stop 61
tgcaagtgttaaattgaatggtatg

SEQ ID NO: 382264 - DNA, 25 bp, Artificial
  probe
  misc_feature (1)..(25): SEQ ID NO: 4416; WAN024AE6; Start 277; Stop 301
ctcataaagaacaaaggagtaacat

SEQ ID NO: 382265 - DNA, 25 bp, Artificial
  probe
  misc_feature (1)..(25): SEQ ID NO: 4416; WAN024AE6; Start 225; Stop 249
tcttttgtaaggttaggttatggca

SEQ ID NO: 382266 - DNA, 25 bp, Artificial
  probe
  misc_feature (1)..(25): SEQ ID NO: 4416; WAN024AE6; Start 224; Stop 248
ctcttttgtaaggttaggttatggc

SEQ ID NO: 382267 - DNA, 25 bp, Artificial
  probe
  misc_feature (1)..(25): SEQ ID NO: 4416; WAN024AE6; Start 232; Stop 256
taaggttaggttatggcaagcggtc

SEQ ID NO: 382268 - DNA, 25 bp, Artificial
  probe
  misc_feature (1)..(25): SEQ ID NO: 4416; WAN024AE6; Start 179; Stop 203
tttgcttatatttcacccaatctta

SEQ ID NO: 382269 - DNA, 25 bp, Artificial
  probe
  misc_feature (1)..(25): SEQ ID NO: 4416; WAN024AE6; Start 280; Stop 304
ataaagaacaaaggagtaacatcat

SEQ ID NO: 382270 - DNA, 25 bp, Artificial
  probe
  misc_feature (1)..(25): SEQ ID NO: 4416; WAN024AE6; Start 227; Stop 251
ttttgtaaggttaggttatggcaag

SEQ ID NO: 382271 - DNA, 25 bp, Artificial
  probe
  misc_feature (1)..(25): SEQ ID NO: 4416; WAN024AE6; Start 226; Stop 250
cttttgtaaggttaggttatggcaa

SEQ ID NO: 382272 - DNA, 25 bp, Artificial
  probe
  misc_feature (1)..(25): SEQ ID NO: 4416; WAN024AE6; Start 39; Stop 63
caagtgttaaattgaatggtatgtt

SEQ ID NO: 382273 - DNA, 25 bp, Artificial
  probe
  misc_feature (1)..(25): SEQ ID NO: 4416; WAN024AE6; Start 330; Stop 354
agaaaaccaagtcacaaagaaattg

SEQ ID NO: 382274 - DNA, 25 bp, Artificial
  probe
  misc_feature (1)..(25): SEQ ID NO: 4416; WAN024AE6; Start 332; Stop 356
aaaaccaagtcacaaagaaattgag

SEQ ID NO: 382275 - DNA, 25 bp, Artificial
  probe
  misc_feature (1)..(25): SEQ ID NO: 4418; WAN0249TY; Start 117; Stop 141
cttccatcttcaacctcaaagtagt

SEQ ID NO: 382276 - DNA, 25 bp, Artificial
  probe
  misc_feature (1)..(25): SEQ ID NO: 4418; WAN0249TY; Start 118; Stop 142
ttccatcttcaacctcaaagtagtg

SEQ ID NO: 382277 - DNA, 25 bp, Artificial
  probe
  misc_feature (1)..(25): SEQ ID NO: 4418; WAN0249TY; Start 121; Stop 145
catcttcaacctcaaagtagtgctt

SEQ ID NO: 382278 - DNA, 25 bp, Artificial
  probe
  misc_feature (1)..(25): SEQ ID NO: 4418; WAN0249TY; Start 116; Stop 140
gcttccatcttcaacctcaaagtag

SEQ ID NO: 382279 - DNA, 25 bp, Artificial
  probe
  misc_feature (1)..(25): SEQ ID NO: 4418; WAN0249TY; Start 38; Stop 62
tgattaaatcgctattcttaggagt

SEQ ID NO: 382280 - DNA, 25 bp, Artificial
  probe
  misc_feature (1)..(25): SEQ ID NO: 4418; WAN0249TY; Start 6; Stop 30
aatagagcaactacagtagtagctt

SEQ ID NO: 382281 - DNA, 25 bp, Artificial
  probe
  misc_feature (1)..(25): SEQ ID NO: 4418; WAN0249TY; Start 120; Stop 144
ccatcttcaacctcaaagtagtgct

SEQ ID NO: 382282 - DNA, 25 bp, Artificial
  probe
  misc_feature (1)..(25): SEQ ID NO: 4418; WAN0249TY; Start 119; Stop 143
tccatcttcaacctcaaagtagtgc

SEQ ID NO: 382283 - DNA, 25 bp, Artificial
  probe
  misc_feature (1)..(25): SEQ ID NO: 4418; WAN0249TY; Start 151; Stop 175
aacctgcgactagctttctaatttg

SEQ ID NO: 382284 - DNA, 25 bp, Artificial
  probe
  misc_feature (1)..(25): SEQ ID NO: 4418; WAN0249TY; Start 150; Stop 174
caacctgcgactagctttctaattt

SEQ ID NO: 382285 - DNA, 25 bp, Artificial
  probe
  misc_feature (1)..(25): SEQ ID NO: 4418; WAN0249TY; Start 8; Stop 32
tagagcaactacagtagtagcttaa

SEQ ID NO: 382286 - DNA, 25 bp, Artificial
  probe
  misc_feature (1)..(25): SEQ ID NO: 4418; WAN0249TY; Start 122; Stop 146
atcttcaacctcaaagtagtgcttt

SEQ ID NO: 382287 - DNA, 25 bp, Artificial
  probe
  misc_feature (1)..(25): SEQ ID NO: 4418; WAN0249TY; Start 7; Stop 31
atagagcaactacagtagtagctta

SEQ ID NO: 382288 - DNA, 25 bp, Artificial
  probe
  misc_feature (1)..(25): SEQ ID NO: 4418; WAN0249TY; Start 5; Stop 29
taatagagcaactacagtagtagct

SEQ ID NO: 382289 - DNA, 25 bp, Artificial
  probe
  misc_feature (1)..(25): SEQ ID NO: 4418; WAN0249TY; Start 115; Stop 139
agcttccatcttcaacctcaaagta

SEQ ID NO: 382290 - DNA, 25 bp, Artificial
  probe
  misc_feature (1)..(25): SEQ ID NO: 4418; WAN0249TY; Start 199; Stop 223
aaataatcttcttctagtttcgcat

SEQ ID NO: 382291 - DNA, 25 bp, Artificial
  probe
  misc_feature (1)..(25): SEQ ID NO: 4418; WAN0249TY; Start 35; Stop 59
acatgattaaatcgctattcttagg

SEQ ID NO: 382292 - DNA, 25 bp, Artificial
  probe
  misc_feature (1)..(25): SEQ ID NO: 4418; WAN0249TY; Start 37; Stop 61
atgattaaatcgctattcttaggag

SEQ ID NO: 382293 - DNA, 25 bp, Artificial
  probe
  misc_feature (1)..(25): SEQ ID NO: 4418; WAN0249TY; Start 4; Stop 28
ataatagagcaactacagtagtagc

SEQ ID NO: 382294 - DNA, 25 bp, Artificial
  probe
  misc_feature (1)..(25): SEQ ID NO: 4418; WAN0249TY; Start 245; Stop 269
ttctaaccaaaaggagcctgaaatt

SEQ ID NO: 382295 - DNA, 25 bp, Artificial
  probe
  misc_feature (1)..(25): SEQ ID NO: 4418; WAN0249TY; Start 36; Stop 60
catgattaaatcgctattcttagga

SEQ ID NO: 382296 - DNA, 25 bp, Artificial
  probe
  misc_feature (1)..(25): SEQ ID NO: 4418; WAN0249TY; Start 157; Stop 181
cgactagctttctaatttgctcttt

SEQ ID NO: 382297 - DNA, 25 bp, Artificial
  probe
  misc_feature (1)..(25): SEQ ID NO: 4418; WAN0249TY; Start 202; Stop 226
taatcttcttctagtttcgcataaa

SEQ ID NO: 382298 - DNA, 25 bp, Artificial
  probe
  misc_feature (1)..(25): SEQ ID NO: 4418; WAN0249TY; Start 244; Stop 268
gttctaaccaaaaggagcctgaaat

SEQ ID NO: 382299 - DNA, 25 bp, Artificial
  probe
  misc_feature (1)..(25): SEQ ID NO: 4418; WAN0249TY; Start 113; Stop 137
tcagcttccatcttcaacctcaaag

SEQ ID NO: 382300 - DNA, 25 bp, Artificial
  probe
  misc_feature (1)..(25): SEQ ID NO: 4418; WAN0249TY; Start 237; Stop 261
ttgtcaagttctaaccaaaaggagc

SEQ ID NO: 382301 - DNA, 25 bp, Artificial
  probe
  misc_feature (1)..(25): SEQ ID NO: 4418; WAN0249TY; Start 9; Stop 33
agagcaactacagtagtagcttaaa

SEQ ID NO: 382302 - DNA, 25 bp, Artificial
  probe
  misc_feature (1)..(25): SEQ ID NO: 4418; WAN0249TY; Start 40; Stop 64
attaaatcgctattcttaggagtag

SEQ ID NO: 382303 - DNA, 25 bp, Artificial
  probe
  misc_feature (1)..(25): SEQ ID NO: 4418; WAN0249TY; Start 201; Stop 225
ataatcttcttctagtttcgcataa

SEQ ID NO: 382304 - DNA, 25 bp, Artificial
  probe
  misc_feature (1)..(25): SEQ ID NO: 4418; WAN0249TY; Start 200; Stop 224
aataatcttcttctagtttcgcata

SEQ ID NO: 382305 - DNA, 25 bp, Artificial
  probe
  misc_feature (1)..(25): SEQ ID NO: 4418; WAN0249TY; Start 112; Stop 136
gtcagcttccatcttcaacctcaaa

SEQ ID NO: 382306 - DNA, 25 bp, Artificial
  probe
  misc_feature (1)..(25): SEQ ID NO: 4418; WAN0249TY; Start 156; Stop 180
gcgactagctttctaatttgctctt

SEQ ID NO: 382307 - DNA, 25 bp, Artificial
  probe
  misc_feature (1)..(25): SEQ ID NO: 4418; WAN0249TY; Start 114; Stop 138
cagcttccatcttcaacctcaaagt

SEQ ID NO: 382308 - DNA, 25 bp, Artificial
  probe
  misc_feature (1)..(25): SEQ ID NO: 4419; WAN024A9P; Start 8; Stop 32
cgagagtaattgaattcgtactaag

SEQ ID NO: 382309 - DNA, 25 bp, Artificial
  probe
  misc_feature (1)..(25): SEQ ID NO: 4419; WAN024A9P; Start 38; Stop 62
ctattttcactgtaaccttttaacg

SEQ ID NO: 382310 - DNA, 25 bp, Artificial
  probe
  misc_feature (1)..(25): SEQ ID NO: 4419; WAN024A9P; Start 9; Stop 33
gagagtaattgaattcgtactaaga

SEQ ID NO: 382311 - DNA, 25 bp, Artificial
  probe
  misc_feature (1)..(25): SEQ ID NO: 4419; WAN024A9P; Start 31; Stop 55
agattttctattttcactgtaacct

SEQ ID NO: 382312 - DNA, 25 bp, Artificial
  probe
  misc_feature (1)..(25): SEQ ID NO: 4419; WAN024A9P; Start 32; Stop 56
gattttctattttcactgtaacctt

SEQ ID NO: 382313 - DNA, 25 bp, Artificial
  probe
  misc_feature (1)..(25): SEQ ID NO: 4419; WAN024A9P; Start 10; Stop 34
agagtaattgaattcgtactaagat

SEQ ID NO: 382314 - DNA, 25 bp, Artificial
  probe
  misc_feature (1)..(25): SEQ ID NO: 4419; WAN024A9P; Start 30; Stop 54
aagattttctattttcactgtaacc

SEQ ID NO: 382315 - DNA, 25 bp, Artificial
  probe
  misc_feature (1)..(25): SEQ ID NO: 4419; WAN024A9P; Start 34; Stop 58
ttttctattttcactgtaacctttt

SEQ ID NO: 382316 - DNA, 25 bp, Artificial
  probe
  misc_feature (1)..(25): SEQ ID NO: 4419; WAN024A9P; Start 37; Stop 61
tctattttcactgtaaccttttaac

SEQ ID NO: 382317 - DNA, 25 bp, Artificial
  probe
  misc_feature (1)..(25): SEQ ID NO: 4419; WAN024A9P; Start 33; Stop 57
attttctattttcactgtaaccttt

SEQ ID NO: 382318 - DNA, 25 bp, Artificial
  probe
  misc_feature (1)..(25): SEQ ID NO: 4419; WAN024A9P; Start 11; Stop 35
gagtaattgaattcgtactaagatt

SEQ ID NO: 382319 - DNA, 25 bp, Artificial
  probe
  misc_feature (1)..(25): SEQ ID NO: 4419; WAN024A9P; Start 23; Stop 47
tcgtactaagattttctattttcac

SEQ ID NO: 382320 - DNA, 25 bp, Artificial
  probe
  misc_feature (1)..(25): SEQ ID NO: 4419; WAN024A9P; Start 24; Stop 48
cgtactaagattttctattttcact

SEQ ID NO: 382321 - DNA, 25 bp, Artificial
  probe
  misc_feature (1)..(25): SEQ ID NO: 4419; WAN024A9P; Start 15; Stop 39
aattgaattcgtactaagattttct

SEQ ID NO: 382322 - DNA, 25 bp, Artificial
  probe
  misc_feature (1)..(25): SEQ ID NO: 4420; WAN0249SG; Start 36; Stop 60
acctggtagaaagtctttaacatca

SEQ ID NO: 382323 - DNA, 25 bp, Artificial
  probe
  misc_feature (1)..(25): SEQ ID NO: 4420; WAN0249SG; Start 4; Stop 28
atgactacaactaacaattatgctt

SEQ ID NO: 382324 - DNA, 25 bp, Artificial
  probe
  misc_feature (1)..(25): SEQ ID NO: 4420; WAN0249SG; Start 3; Stop 27
aatgactacaactaacaattatgct

SEQ ID NO: 382325 - DNA, 25 bp, Artificial
  probe
  misc_feature (1)..(25): SEQ ID NO: 4420; WAN0249SG; Start 35; Stop 59
aacctggtagaaagtctttaacatc

SEQ ID NO: 382326 - DNA, 25 bp, Artificial
  probe
  misc_feature (1)..(25): SEQ ID NO: 4420; WAN0249SG; Start 34; Stop 58
aaacctggtagaaagtctttaacat

SEQ ID NO: 382327 - DNA, 25 bp, Artificial
  probe
  misc_feature (1)..(25): SEQ ID NO: 4420; WAN0249SG; Start 37; Stop 61
cctggtagaaagtctttaacatcag

SEQ ID NO: 382328 - DNA, 25 bp, Artificial
  probe
  misc_feature (1)..(25): SEQ ID NO: 4420; WAN0249SG; Start 39; Stop 63
tggtagaaagtctttaacatcagaa

SEQ ID NO: 382329 - DNA, 25 bp, Artificial
  probe
  misc_feature (1)..(25): SEQ ID NO: 4420; WAN0249SG; Start 38; Stop 62
ctggtagaaagtctttaacatcaga

SEQ ID NO: 382330 - DNA, 25 bp, Artificial
  probe
  misc_feature (1)..(25): SEQ ID NO: 4420; WAN0249SG; Start 90; Stop 114
ccttgatactatgcgttttgcttta

SEQ ID NO: 382331 - DNA, 25 bp, Artificial
  probe
  misc_feature (1)..(25): SEQ ID NO: 4420; WAN0249SG; Start 58; Stop 82
tcagaaaacgcatagtatcaagtgt

SEQ ID NO: 382332 - DNA, 25 bp, Artificial
  probe
  misc_feature (1)..(25): SEQ ID NO: 4420; WAN0249SG; Start 57; Stop 81
atcagaaaacgcatagtatcaagtg

SEQ ID NO: 382333 - DNA, 25 bp, Artificial
  probe
  misc_feature (1)..(25): SEQ ID NO: 4420; WAN0249SG; Start 56; Stop 80
catcagaaaacgcatagtatcaagt

SEQ ID NO: 382334 - DNA, 25 bp, Artificial
  probe
  misc_feature (1)..(25): SEQ ID NO: 4420; WAN0249SG; Start 55; Stop 79
acatcagaaaacgcatagtatcaag

SEQ ID NO: 382335 - DNA, 25 bp, Artificial
  probe
  misc_feature (1)..(25): SEQ ID NO: 4420; WAN0249SG; Start 54; Stop 78
aacatcagaaaacgcatagtatcaa

SEQ ID NO: 382336 - DNA, 25 bp, Artificial
  probe
  misc_feature (1)..(25): SEQ ID NO: 4420; WAN0249SG; Start 40; Stop 64
ggtagaaagtctttaacatcagaaa

SEQ ID NO: 382337 - DNA, 25 bp, Artificial
  probe
  misc_feature (1)..(25): SEQ ID NO: 4420; WAN0249SG; Start 59; Stop 83
cagaaaacgcatagtatcaagtgtt

SEQ ID NO: 382338 - DNA, 25 bp, Artificial
  probe
  misc_feature (1)..(25): SEQ ID NO: 4420; WAN0249SG; Start 79; Stop 103
gtgttgaaaacccttgatactatgc

SEQ ID NO: 382339 - DNA, 25 bp, Artificial
  probe
  misc_feature (1)..(25): SEQ ID NO: 4420; WAN0249SG; Start 46; Stop 70
aagtctttaacatcagaaaacgcat

SEQ ID NO: 382340 - DNA, 25 bp, Artificial
  probe
  misc_feature (1)..(25): SEQ ID NO: 4420; WAN0249SG; Start 60; Stop 84
agaaaacgcatagtatcaagtgttg

SEQ ID NO: 382341 - DNA, 25 bp, Artificial
  probe
  misc_feature (1)..(25): SEQ ID NO: 4420; WAN0249SG; Start 63; Stop 87
aaacgcatagtatcaagtgttgaaa

SEQ ID NO: 382342 - DNA, 25 bp, Artificial
  probe
  misc_feature (1)..(25): SEQ ID NO: 4420; WAN0249SG; Start 82; Stop 106
ttgaaaacccttgatactatgcgtt

SEQ ID NO: 382343 - DNA, 25 bp, Artificial
  probe
  misc_feature (1)..(25): SEQ ID NO: 4420; WAN0249SG; Start 49; Stop 73
tctttaacatcagaaaacgcatagt

SEQ ID NO: 382344 - DNA, 25 bp, Artificial
  probe
  misc_feature (1)..(25): SEQ ID NO: 4420; WAN0249SG; Start 47; Stop 71
agtctttaacatcagaaaacgcata

SEQ ID NO: 382345 - DNA, 25 bp, Artificial
  probe
  misc_feature (1)..(25): SEQ ID NO: 4420; WAN0249SG; Start 96; Stop 120
tactatgcgttttgctttatcctag

SEQ ID NO: 382346 - DNA, 25 bp, Artificial
  probe
  misc_feature (1)..(25): SEQ ID NO: 4420; WAN0249SG; Start 95; Stop 119
atactatgcgttttgctttatccta

SEQ ID NO: 382347 - DNA, 25 bp, Artificial
  probe
  misc_feature (1)..(25): SEQ ID NO: 4420; WAN0249SG; Start 53; Stop 77
taacatcagaaaacgcatagtatca

SEQ ID NO: 382348 - DNA, 25 bp, Artificial
  probe
  misc_feature (1)..(25): SEQ ID NO: 4420; WAN0249SG; Start 48; Stop 72
gtctttaacatcagaaaacgcatag

SEQ ID NO: 382349 - DNA, 25 bp, Artificial
  probe
  misc_feature (1)..(25): SEQ ID NO: 4420; WAN0249SG; Start 45; Stop 69
aaagtctttaacatcagaaaacgca

SEQ ID NO: 382350 - DNA, 25 bp, Artificial
  probe
  misc_feature (1)..(25): SEQ ID NO: 4420; WAN0249SG; Start 91; Stop 115
cttgatactatgcgttttgctttat

SEQ ID NO: 382351 - DNA, 25 bp, Artificial
  probe
  misc_feature (1)..(25): SEQ ID NO: 4420; WAN0249SG; Start 44; Stop 68
gaaagtctttaacatcagaaaacgc

SEQ ID NO: 382352 - DNA, 25 bp, Artificial
  probe
  misc_feature (1)..(25): SEQ ID NO: 4420; WAN0249SG; Start 78; Stop 102
agtgttgaaaacccttgatactatg

SEQ ID NO: 382353 - DNA, 25 bp, Artificial
  probe
  misc_feature (1)..(25): SEQ ID NO: 4420; WAN0249SG; Start 93; Stop 117
tgatactatgcgttttgctttatcc

SEQ ID NO: 382354 - DNA, 25 bp, Artificial
  probe
  misc_feature (1)..(25): SEQ ID NO: 4420; WAN0249SG; Start 94; Stop 118
gatactatgcgttttgctttatcct

SEQ ID NO: 382355 - DNA, 25 bp, Artificial
  probe
  misc_feature (1)..(25): SEQ ID NO: 4421; WAN0249WP; Start 40; Stop 64
tcatataatggcgtaaatgctcttt

SEQ ID NO: 382356 - DNA, 25 bp, Artificial
  probe
  misc_feature (1)..(25): SEQ ID NO: 4421; WAN0249WP; Start 39; Stop 63
atcatataatggcgtaaatgctctt

SEQ ID NO: 382357 - DNA, 25 bp, Artificial
  probe
  misc_feature (1)..(25): SEQ ID NO: 4421; WAN0249WP; Start 38; Stop 62
tatcatataatggcgtaaatgctct

SEQ ID NO: 382358 - DNA, 25 bp, Artificial
  probe
  misc_feature (1)..(25): SEQ ID NO: 4421; WAN0249WP; Start 37; Stop 61
atatcatataatggcgtaaatgctc

SEQ ID NO: 382359 - DNA, 25 bp, Artificial
  probe
  misc_feature (1)..(25): SEQ ID NO: 4421; WAN0249WP; Start 29; Stop 53
agagatagatatcatataatggcgt

SEQ ID NO: 382360 - DNA, 25 bp, Artificial
  probe
  misc_feature (1)..(25): SEQ ID NO: 4421; WAN0249WP; Start 28; Stop 52
cagagatagatatcatataatggcg

SEQ ID NO: 382361 - DNA, 25 bp, Artificial
  probe
  misc_feature (1)..(25): SEQ ID NO: 4421; WAN0249WP; Start 41; Stop 65
catataatggcgtaaatgctctttt

SEQ ID NO: 382362 - DNA, 25 bp, Artificial
  probe
  misc_feature (1)..(25): SEQ ID NO: 4421; WAN0249WP; Start 36; Stop 60
gatatcatataatggcgtaaatgct

SEQ ID NO: 382363 - DNA, 25 bp, Artificial
  probe
  misc_feature (1)..(25): SEQ ID NO: 4421; WAN0249WP; Start 35; Stop 59
agatatcatataatggcgtaaatgc

SEQ ID NO: 382364 - DNA, 25 bp, Artificial
  probe
  misc_feature (1)..(25): SEQ ID NO: 4421; WAN0249WP; Start 82; Stop 106
ggtattctattttggaggaaatgac

SEQ ID NO: 382365 - DNA, 25 bp, Artificial
  probe
  misc_feature (1)..(25): SEQ ID NO: 4421; WAN0249WP; Start 81; Stop 105
aggtattctattttggaggaaatga

SEQ ID NO: 382366 - DNA, 25 bp, Artificial
  probe
  misc_feature (1)..(25): SEQ ID NO: 4421; WAN0249WP; Start 27; Stop 51
acagagatagatatcatataatggc

SEQ ID NO: 382367 - DNA, 25 bp, Artificial
  probe
  misc_feature (1)..(25): SEQ ID NO: 4421; WAN0249WP; Start 80; Stop 104
aaggtattctattttggaggaaatg

SEQ ID NO: 382368 - DNA, 25 bp, Artificial
  probe
  misc_feature (1)..(25): SEQ ID NO: 4421; WAN0249WP; Start 30; Stop 54
gagatagatatcatataatggcgta

SEQ ID NO: 382369 - DNA, 25 bp, Artificial
  probe
  misc_feature (1)..(25): SEQ ID NO: 4421; WAN0249WP; Start 78; Stop 102
ataaggtattctattttggaggaaa

SEQ ID NO: 382370 - DNA, 25 bp, Artificial
  probe
  misc_feature (1)..(25): SEQ ID NO: 4421; WAN0249WP; Start 79; Stop 103
taaggtattctattttggaggaaat

SEQ ID NO: 382371 - DNA, 25 bp, Artificial
  probe
  misc_feature (1)..(25): SEQ ID NO: 4422; WAN024A3B; Start 29; Stop 53
gctggattgagaaaagagtaacaag

SEQ ID NO: 382372 - DNA, 25 bp, Artificial
  probe
  misc_feature (1)..(25): SEQ ID NO: 4422; WAN024A3B; Start 27; Stop 51
tagctggattgagaaaagagtaaca

SEQ ID NO: 382373 - DNA, 25 bp, Artificial
  probe
  misc_feature (1)..(25): SEQ ID NO: 4422; WAN024A3B; Start 28; Stop 52
agctggattgagaaaagagtaacaa

SEQ ID NO: 382374 - DNA, 25 bp, Artificial
  probe
  misc_feature (1)..(25): SEQ ID NO: 4422; WAN024A3B; Start 26; Stop 50
ttagctggattgagaaaagagtaac

SEQ ID NO: 382375 - DNA, 25 bp, Artificial
  probe
  misc_feature (1)..(25): SEQ ID NO: 4422; WAN024A3B; Start 18; Stop 42
atcacattttagctggattgagaaa

SEQ ID NO: 382376 - DNA, 25 bp, Artificial
  probe
  misc_feature (1)..(25): SEQ ID NO: 4422; WAN024A3B; Start 25; Stop 49
tttagctggattgagaaaagagtaa

SEQ ID NO: 382377 - DNA, 25 bp, Artificial
  probe
  misc_feature (1)..(25): SEQ ID NO: 4422; WAN024A3B; Start 19; Stop 43
tcacattttagctggattgagaaaa

SEQ ID NO: 382378 - DNA, 25 bp, Artificial
  probe
  misc_feature (1)..(25): SEQ ID NO: 4422; WAN024A3B; Start 17; Stop 41
tatcacattttagctggattgagaa

SEQ ID NO: 382379 - DNA, 25 bp, Artificial
  probe
  misc_feature (1)..(25): SEQ ID NO: 4422; WAN024A3B; Start 21; Stop 45
acattttagctggattgagaaaaga

SEQ ID NO: 382380 - DNA, 25 bp, Artificial
  probe
  misc_feature (1)..(25): SEQ ID NO: 4422; WAN024A3B; Start 20; Stop 44
cacattttagctggattgagaaaag

SEQ ID NO: 382381 - DNA, 25 bp, Artificial
  probe
  misc_feature (1)..(25): SEQ ID NO: 4422; WAN024A3B; Start 16; Stop 40
atatcacattttagctggattgaga

SEQ ID NO: 382382 - DNA, 25 bp, Artificial
  probe
  misc_feature (1)..(25): SEQ ID NO: 4422; WAN024A3B; Start 23; Stop 47
attttagctggattgagaaaagagt

SEQ ID NO: 382383 - DNA, 25 bp, Artificial
  probe
  misc_feature (1)..(25): SEQ ID NO: 4422; WAN024A3B; Start 22; Stop 46
cattttagctggattgagaaaagag

SEQ ID NO: 382384 - DNA, 25 bp, Artificial
  probe
  misc_feature (1)..(25): SEQ ID NO: 4422; WAN024A3B; Start 24; Stop 48
ttttagctggattgagaaaagagta

SEQ ID NO: 382385 - DNA, 25 bp, Artificial
  probe
  misc_feature (1)..(25): SEQ ID NO: 4422; WAN024A3B; Start 15; Stop 39
tatatcacattttagctggattgag

SEQ ID NO: 382386 - DNA, 25 bp, Artificial
  probe
  misc_feature (1)..(25): SEQ ID NO: 4422; WAN024A3B; Start 14; Stop 38
ttatatcacattttagctggattga

SEQ ID NO: 382387 - DNA, 25 bp, Artificial
  probe
  misc_feature (1)..(25): SEQ ID NO: 4422; WAN024A3B; Start 10; Stop 34
actattatatcacattttagctgga

SEQ ID NO: 382388 - DNA, 25 bp, Artificial
  probe
  misc_feature (1)..(25): SEQ ID NO: 4422; WAN024A3B; Start 13; Stop 37
attatatcacattttagctggattg

SEQ ID NO: 382389 - DNA, 25 bp, Artificial
  probe
  misc_feature (1)..(25): SEQ ID NO: 4423; WAN024AEM; Start 186; Stop 210
gaatatggttgctttcgtctaggtg

SEQ ID NO: 382390 - DNA, 25 bp, Artificial
  probe
  misc_feature (1)..(25): SEQ ID NO: 4423; WAN024AEM; Start 177; Stop 201
cgatggtacgaatatggttgctttc

SEQ ID NO: 382391 - DNA, 25 bp, Artificial
  probe
  misc_feature (1)..(25): SEQ ID NO: 4423; WAN024AEM; Start 187; Stop 211
aatatggttgctttcgtctaggtgg

SEQ ID NO: 382392 - DNA, 25 bp, Artificial
  probe
  misc_feature (1)..(25): SEQ ID NO: 4423; WAN024AEM; Start 171; Stop 195
ctttcccgatggtacgaatatggtt

SEQ ID NO: 382393 - DNA, 25 bp, Artificial
  probe
  misc_feature (1)..(25): SEQ ID NO: 4423; WAN024AEM; Start 172; Stop 196
tttcccgatggtacgaatatggttg

SEQ ID NO: 382394 - DNA, 25 bp, Artificial
  probe
  misc_feature (1)..(25): SEQ ID NO: 4423; WAN024AEM; Start 188; Stop 212
atatggttgctttcgtctaggtgga

SEQ ID NO: 382395 - DNA, 25 bp, Artificial
  probe
  misc_feature (1)..(25): SEQ ID NO: 4423; WAN024AEM; Start 176; Stop 200
ccgatggtacgaatatggttgcttt

SEQ ID NO: 382396 - DNA, 25 bp, Artificial
  probe
  misc_feature (1)..(25): SEQ ID NO: 4423; WAN024AEM; Start 145; Stop 169
ttaattctccctatatagcctgaca

SEQ ID NO: 382397 - DNA, 25 bp, Artificial
  probe
  misc_feature (1)..(25): SEQ ID NO: 4423; WAN024AEM; Start 144; Stop 168
tttaattctccctatatagcctgac

SEQ ID NO: 382398 - DNA, 25 bp, Artificial
  probe
  misc_feature (1)..(25): SEQ ID NO: 4423; WAN024AEM; Start 175; Stop 199
cccgatggtacgaatatggttgctt

SEQ ID NO: 382399 - DNA, 25 bp, Artificial
  probe
  misc_feature (1)..(25): SEQ ID NO: 4423; WAN024AEM; Start 173; Stop 197
ttcccgatggtacgaatatggttgc

SEQ ID NO: 382400 - DNA, 25 bp, Artificial
  probe
  misc_feature (1)..(25): SEQ ID NO: 4423; WAN024AEM; Start 178; Stop 202
gatggtacgaatatggttgctttcg

SEQ ID NO: 382401 - DNA, 25 bp, Artificial
  probe
  misc_feature (1)..(25): SEQ ID NO: 4423; WAN024AEM; Start 185; Stop 209
cgaatatggttgctttcgtctaggt

SEQ ID NO: 382402 - DNA, 25 bp, Artificial
  probe
  misc_feature (1)..(25): SEQ ID NO: 4423; WAN024AEM; Start 143; Stop 167
ttttaattctccctatatagcctga

SEQ ID NO: 382403 - DNA, 25 bp, Artificial
  probe
  misc_feature (1)..(25): SEQ ID NO: 4423; WAN024AEM; Start 93; Stop 117
tttcgaatcttttaaaatctgtttg

SEQ ID NO: 382404 - DNA, 25 bp, Artificial
  probe
  misc_feature (1)..(25): SEQ ID NO: 4424; WAN024A5K; Start 18; Stop 42
ttacctagtagagcccaaagtctat

SEQ ID NO: 382405 - DNA, 25 bp, Artificial
  probe
  misc_feature (1)..(25): SEQ ID NO: 4424; WAN024A5K; Start 17; Stop 41
tttacctagtagagcccaaagtcta

SEQ ID NO: 382406 - DNA, 25 bp, Artificial
  probe
  misc_feature (1)..(25): SEQ ID NO: 4424; WAN024A5K; Start 23; Stop 47
tagtagagcccaaagtctatgtcaa

SEQ ID NO: 382407 - DNA, 25 bp, Artificial
  probe
  misc_feature (1)..(25): SEQ ID NO: 4424; WAN024A5K; Start 19; Stop 43
tacctagtagagcccaaagtctatg

SEQ ID NO: 382408 - DNA, 25 bp, Artificial
  probe
  misc_feature (1)..(25): SEQ ID NO: 4424; WAN024A5K; Start 22; Stop 46
ctagtagagcccaaagtctatgtca

SEQ ID NO: 382409 - DNA, 25 bp, Artificial
  probe
  misc_feature (1)..(25): SEQ ID NO: 4424; WAN024A5K; Start 24; Stop 48
agtagagcccaaagtctatgtcaaa

SEQ ID NO: 382410 - DNA, 25 bp, Artificial
  probe
  misc_feature (1)..(25): SEQ ID NO: 4424; WAN024A5K; Start 21; Stop 45
cctagtagagcccaaagtctatgtc

SEQ ID NO: 382411 - DNA, 25 bp, Artificial
  probe
  misc_feature (1)..(25): SEQ ID NO: 4424; WAN024A5K; Start 16; Stop 40
ctttacctagtagagcccaaagtct

SEQ ID NO: 382412 - DNA, 25 bp, Artificial
  probe
  misc_feature (1)..(25): SEQ ID NO: 4424; WAN024A5K; Start 20; Stop 44
acctagtagagcccaaagtctatgt

SEQ ID NO: 382413 - DNA, 25 bp, Artificial
  probe
  misc_feature (1)..(25): SEQ ID NO: 4424; WAN024A5K; Start 25; Stop 49
gtagagcccaaagtctatgtcaaaa

SEQ ID NO: 382414 - DNA, 25 bp, Artificial
  probe
  misc_feature (1)..(25): SEQ ID NO: 4424; WAN024A5K; Start 13; Stop 37
ctactttacctagtagagcccaaag

SEQ ID NO: 382415 - DNA, 25 bp, Artificial
  probe
  misc_feature (1)..(25): SEQ ID NO: 4424; WAN024A5K; Start 14; Stop 38
tactttacctagtagagcccaaagt

SEQ ID NO: 382416 - DNA, 25 bp, Artificial
  probe
  misc_feature (1)..(25): SEQ ID NO: 4424; WAN024A5K; Start 15; Stop 39
actttacctagtagagcccaaagtc

SEQ ID NO: 382417 - DNA, 25 bp, Artificial
  probe
  misc_feature (1)..(25): SEQ ID NO: 4425; WAN024AJB; Start 84; Stop 108
actaattctattaatctcttgctgc

SEQ ID NO: 382418 - DNA, 25 bp, Artificial
  probe
  misc_feature (1)..(25): SEQ ID NO: 4425; WAN024AJB; Start 85; Stop 109
ctaattctattaatctcttgctgca

SEQ ID NO: 382419 - DNA, 25 bp, Artificial
  probe
  misc_feature (1)..(25): SEQ ID NO: 4425; WAN024AJB; Start 52; Stop 76
tagtccctcagtccgcaatcaataa

SEQ ID NO: 382420 - DNA, 25 bp, Artificial
  probe
  misc_feature (1)..(25): SEQ ID NO: 4425; WAN024AJB; Start 57; Stop 81
cctcagtccgcaatcaataaaataa

SEQ ID NO: 382421 - DNA, 25 bp, Artificial
  probe
  misc_feature (1)..(25): SEQ ID NO: 4425; WAN024AJB; Start 42; Stop 66
aaacatactctagtccctcagtccg

SEQ ID NO: 382422 - DNA, 25 bp, Artificial
  probe
  misc_feature (1)..(25): SEQ ID NO: 4425; WAN024AJB; Start 56; Stop 80
ccctcagtccgcaatcaataaaata

SEQ ID NO: 382423 - DNA, 25 bp, Artificial
  probe
  misc_feature (1)..(25): SEQ ID NO: 4425; WAN024AJB; Start 86; Stop 110
taattctattaatctcttgctgcaa

SEQ ID NO: 382424 - DNA, 25 bp, Artificial
  probe
  misc_feature (1)..(25): SEQ ID NO: 4425; WAN024AJB; Start 59; Stop 83
tcagtccgcaatcaataaaataatg

SEQ ID NO: 382425 - DNA, 25 bp, Artificial
  probe
  misc_feature (1)..(25): SEQ ID NO: 4425; WAN024AJB; Start 51; Stop 75
ctagtccctcagtccgcaatcaata

SEQ ID NO: 382426 - DNA, 25 bp, Artificial
  probe
  misc_feature (1)..(25): SEQ ID NO: 4425; WAN024AJB; Start 39; Stop 63
gtaaaacatactctagtccctcagt

SEQ ID NO: 382427 - DNA, 25 bp, Artificial
  probe
  misc_feature (1)..(25): SEQ ID NO: 4425; WAN024AJB; Start 58; Stop 82
ctcagtccgcaatcaataaaataat

SEQ ID NO: 382428 - DNA, 25 bp, Artificial
  probe
  misc_feature (1)..(25): SEQ ID NO: 4425; WAN024AJB; Start 40; Stop 64
taaaacatactctagtccctcagtc

SEQ ID NO: 382429 - DNA, 25 bp, Artificial
  probe
  misc_feature (1)..(25): SEQ ID NO: 4425; WAN024AJB; Start 41; Stop 65
aaaacatactctagtccctcagtcc

SEQ ID NO: 382430 - DNA, 25 bp, Artificial
  probe
  misc_feature (1)..(25): SEQ ID NO: 4425; WAN024AJB; Start 60; Stop 84
cagtccgcaatcaataaaataatga

SEQ ID NO: 382431 - DNA, 25 bp, Artificial
  probe
  misc_feature (1)..(25): SEQ ID NO: 4425; WAN024AJB; Start 53; Stop 77
agtccctcagtccgcaatcaataaa

SEQ ID NO: 382432 - DNA, 25 bp, Artificial
  probe
  misc_feature (1)..(25): SEQ ID NO: 4425; WAN024AJB; Start 55; Stop 79
tccctcagtccgcaatcaataaaat

SEQ ID NO: 382433 - DNA, 25 bp, Artificial
  probe
  misc_feature (1)..(25): SEQ ID NO: 4425; WAN024AJB; Start 62; Stop 86
gtccgcaatcaataaaataatgact

SEQ ID NO: 382434 - DNA, 25 bp, Artificial
  probe
  misc_feature (1)..(25): SEQ ID NO: 4425; WAN024AJB; Start 61; Stop 85
agtccgcaatcaataaaataatgac

SEQ ID NO: 382435 - DNA, 25 bp, Artificial
  probe
  misc_feature (1)..(25): SEQ ID NO: 4425; WAN024AJB; Start 82; Stop 106
tgactaattctattaatctcttgct

SEQ ID NO: 382436 - DNA, 25 bp, Artificial
  probe
  misc_feature (1)..(25): SEQ ID NO: 4425; WAN024AJB; Start 38; Stop 62
agtaaaacatactctagtccctcag

SEQ ID NO: 382437 - DNA, 25 bp, Artificial
  probe
  misc_feature (1)..(25): SEQ ID NO: 4425; WAN024AJB; Start 83; Stop 107
gactaattctattaatctcttgctg

SEQ ID NO: 382438 - DNA, 25 bp, Artificial
  probe
  misc_feature (1)..(25): SEQ ID NO: 4425; WAN024AJB; Start 37; Stop 61
aagtaaaacatactctagtccctca

SEQ ID NO: 382439 - DNA, 25 bp, Artificial
  probe
  misc_feature (1)..(25): SEQ ID NO: 4425; WAN024AJB; Start 103; Stop 127
tgctgcaagactaatacggaaaatt

SEQ ID NO: 382440 - DNA, 25 bp, Artificial
  probe
  misc_feature (1)..(25): SEQ ID NO: 4425; WAN024AJB; Start 158; Stop 182
gcttgatgttagtaaatgaacaaac

SEQ ID NO: 382441 - DNA, 25 bp, Artificial
  probe
  misc_feature (1)..(25): SEQ ID NO: 4425; WAN024AJB; Start 102; Stop 126
ttgctgcaagactaatacggaaaat

SEQ ID NO: 382442 - DNA, 25 bp, Artificial
  probe
  misc_feature (1)..(25): SEQ ID NO: 4425; WAN024AJB; Start 54; Stop 78
gtccctcagtccgcaatcaataaaa

SEQ ID NO: 382443 - DNA, 25 bp, Artificial
  probe
  misc_feature (1)..(25): SEQ ID NO: 4425; WAN024AJB; Start 46; Stop 70
atactctagtccctcagtccgcaat

SEQ ID NO: 382444 - DNA, 25 bp, Artificial
  probe
  misc_feature (1)..(25): SEQ ID NO: 4425; WAN024AJB; Start 63; Stop 87
tccgcaatcaataaaataatgacta

SEQ ID NO: 382445 - DNA, 25 bp, Artificial
  probe
  misc_feature (1)..(25): SEQ ID NO: 4425; WAN024AJB; Start 157; Stop 181
agcttgatgttagtaaatgaacaaa

SEQ ID NO: 382446 - DNA, 25 bp, Artificial
  probe
  misc_feature (1)..(25): SEQ ID NO: 4425; WAN024AJB; Start 87; Stop 111
aattctattaatctcttgctgcaag

SEQ ID NO: 382447 - DNA, 25 bp, Artificial
  probe
  misc_feature (1)..(25): SEQ ID NO: 4425; WAN024AJB; Start 47; Stop 71
tactctagtccctcagtccgcaatc

SEQ ID NO: 382448 - DNA, 25 bp, Artificial
  probe
  misc_feature (1)..(25): SEQ ID NO: 4425; WAN024AJB; Start 50; Stop 74
tctagtccctcagtccgcaatcaat

SEQ ID NO: 382449 - DNA, 25 bp, Artificial
  probe
  misc_feature (1)..(25): SEQ ID NO: 4425; WAN024AJB; Start 64; Stop 88
ccgcaatcaataaaataatgactaa

SEQ ID NO: 382450 - DNA, 25 bp, Artificial
  probe
  misc_feature (1)..(25): SEQ ID NO: 4426; WAN024AOD; Start 30; Stop 54
gcaagagctgaaataaaggaataag

SEQ ID NO: 382451 - DNA, 25 bp, Artificial
  probe
  misc_feature (1)..(25): SEQ ID NO: 4426; WAN024AOD; Start 29; Stop 53
tgcaagagctgaaataaaggaataa

SEQ ID NO: 382452 - DNA, 25 bp, Artificial
  probe
  misc_feature (1)..(25): SEQ ID NO: 4426; WAN024AOD; Start 4; Stop 28
caacctcaaggctgtttgggaatat

SEQ ID NO: 382453 - DNA, 25 bp, Artificial
  probe
  misc_feature (1)..(25): SEQ ID NO: 4426; WAN024AOD; Start 5; Stop 29
aacctcaaggctgtttgggaatatt

SEQ ID NO: 382454 - DNA, 25 bp, Artificial
  probe
  misc_feature (1)..(25): SEQ ID NO: 4426; WAN024AOD; Start 31; Stop 55
caagagctgaaataaaggaataaga

SEQ ID NO: 382455 - DNA, 25 bp, Artificial
  probe
  misc_feature (1)..(25): SEQ ID NO: 4426; WAN024AOD; Start 6; Stop 30
acctcaaggctgtttgggaatattg

SEQ ID NO: 382456 - DNA, 25 bp, Artificial
  probe
  misc_feature (1)..(25): SEQ ID NO: 4426; WAN024AOD; Start 32; Stop 56
aagagctgaaataaaggaataagaa

SEQ ID NO: 382457 - DNA, 25 bp, Artificial
  probe
  misc_feature (1)..(25): SEQ ID NO: 4426; WAN024AOD; Start 33; Stop 57
agagctgaaataaaggaataagaat

SEQ ID NO: 382458 - DNA, 25 bp, Artificial
  probe
  misc_feature (1)..(25): SEQ ID NO: 4426; WAN024AOD; Start 27; Stop 51
attgcaagagctgaaataaaggaat

SEQ ID NO: 382459 - DNA, 25 bp, Artificial
  probe
  misc_feature (1)..(25): SEQ ID NO: 4426; WAN024AOD; Start 28; Stop 52
ttgcaagagctgaaataaaggaata

SEQ ID NO: 382460 - DNA, 25 bp, Artificial
  probe
  misc_feature (1)..(25): SEQ ID NO: 4426; WAN024AOD; Start 21; Stop 45
gggaatattgcaagagctgaaataa

SEQ ID NO: 382461 - DNA, 25 bp, Artificial
  probe
  misc_feature (1)..(25): SEQ ID NO: 4426; WAN024AOD; Start 20; Stop 44
tgggaatattgcaagagctgaaata

SEQ ID NO: 382462 - DNA, 25 bp, Artificial
  probe
  misc_feature (1)..(25): SEQ ID NO: 4426; WAN024AOD; Start 3; Stop 27
acaacctcaaggctgtttgggaata

SEQ ID NO: 382463 - DNA, 25 bp, Artificial
  probe
  misc_feature (1)..(25): SEQ ID NO: 4426; WAN024AOD; Start 35; Stop 59
agctgaaataaaggaataagaattg

SEQ ID NO: 382464 - DNA, 25 bp, Artificial
  probe
  misc_feature (1)..(25): SEQ ID NO: 4426; WAN024AOD; Start 8; Stop 32
ctcaaggctgtttgggaatattgca

SEQ ID NO: 382465 - DNA, 25 bp, Artificial
  probe
  misc_feature (1)..(25): SEQ ID NO: 4426; WAN024AOD; Start 26; Stop 50
tattgcaagagctgaaataaaggaa

SEQ ID NO: 382466 - DNA, 25 bp, Artificial
  probe
  misc_feature (1)..(25): SEQ ID NO: 4426; WAN024AOD; Start 25; Stop 49
atattgcaagagctgaaataaagga

SEQ ID NO: 382467 - DNA, 25 bp, Artificial
  probe
  misc_feature (1)..(25): SEQ ID NO: 4426; WAN024AOD; Start 19; Stop 43
ttgggaatattgcaagagctgaaat

SEQ ID NO: 382468 - DNA, 25 bp, Artificial
  probe
  misc_feature (1)..(25): SEQ ID NO: 4426; WAN024AOD; Start 18; Stop 42
tttgggaatattgcaagagctgaaa

SEQ ID NO: 382469 - DNA, 25 bp, Artificial
  probe
  misc_feature (1)..(25): SEQ ID NO: 4426; WAN024AOD; Start 7; Stop 31
cctcaaggctgtttgggaatattgc

SEQ ID NO: 382470 - DNA, 25 bp, Artificial
  probe
  misc_feature (1)..(25): SEQ ID NO: 4426; WAN024AOD; Start 34; Stop 58
gagctgaaataaaggaataagaatt

SEQ ID NO: 382471 - DNA, 25 bp, Artificial
  probe
  misc_feature (1)..(25): SEQ ID NO: 4426; WAN024AOD; Start 24; Stop 48
aatattgcaagagctgaaataaagg

SEQ ID NO: 382472 - DNA, 25 bp, Artificial
  probe
  misc_feature (1)..(25): SEQ ID NO: 4426; WAN024AOD; Start 22; Stop 46
ggaatattgcaagagctgaaataaa

SEQ ID NO: 382473 - DNA, 25 bp, Artificial
  probe
  misc_feature (1)..(25): SEQ ID NO: 4426; WAN024AOD; Start 17; Stop 41
gtttgggaatattgcaagagctgaa

SEQ ID NO: 382474 - DNA, 25 bp, Artificial
  probe
  misc_feature (1)..(25): SEQ ID NO: 4426; WAN024AOD; Start 15; Stop 39
ctgtttgggaatattgcaagagctg

SEQ ID NO: 382475 - DNA, 25 bp, Artificial
  probe
  misc_feature (1)..(25): SEQ ID NO: 4426; WAN024AOD; Start 23; Stop 47
gaatattgcaagagctgaaataaag

SEQ ID NO: 382476 - DNA, 25 bp, Artificial
  probe
  misc_feature (1)..(25): SEQ ID NO: 4426; WAN024AOD; Start 16; Stop 40
tgtttgggaatattgcaagagctga

SEQ ID NO: 382477 - DNA, 25 bp, Artificial
  probe
  misc_feature (1)..(25): SEQ ID NO: 4426; WAN024AOD; Start 11; Stop 35
aaggctgtttgggaatattgcaaga

SEQ ID NO: 382478 - DNA, 25 bp, Artificial
  probe
  misc_feature (1)..(25): SEQ ID NO: 4426; WAN024AOD; Start 10; Stop 34
caaggctgtttgggaatattgcaag

SEQ ID NO: 382479 - DNA, 25 bp, Artificial
  probe
  misc_feature (1)..(25): SEQ ID NO: 4426; WAN024AOD; Start 9; Stop 33
tcaaggctgtttgggaatattgcaa

SEQ ID NO: 382480 - DNA, 25 bp, Artificial
  probe
  misc_feature (1)..(25): SEQ ID NO: 4426; WAN024AOD; Start 12; Stop 36
aggctgtttgggaatattgcaagag

SEQ ID NO: 382481 - DNA, 25 bp, Artificial
  probe
  misc_feature (1)..(25): SEQ ID NO: 4426; WAN024AOD; Start 1; Stop 25
taacaacctcaaggctgtttgggaa

SEQ ID NO: 382482 - DNA, 25 bp, Artificial
  probe
  misc_feature (1)..(25): SEQ ID NO: 4426; WAN024AOD; Start 2; Stop 26
aacaacctcaaggctgtttgggaat

SEQ ID NO: 382483 - DNA, 25 bp, Artificial
  probe
  misc_feature (1)..(25): SEQ ID NO: 4427; WAN0249MB; Start 22; Stop 46
agaaccttcagtctcttagtcaata

SEQ ID NO: 382484 - DNA, 25 bp, Artificial
  probe
  misc_feature (1)..(25): SEQ ID NO: 4427; WAN0249MB; Start 23; Stop 47
gaaccttcagtctcttagtcaataa

SEQ ID NO: 382485 - DNA, 25 bp, Artificial
  probe
  misc_feature (1)..(25): SEQ ID NO: 4427; WAN0249MB; Start 11; Stop 35
gctcaagttagagaaccttcagtct

SEQ ID NO: 382486 - DNA, 25 bp, Artificial
  probe
  misc_feature (1)..(25): SEQ ID NO: 4427; WAN0249MB; Start 55; Stop 79
agactccctaaatcgttatcacatt

SEQ ID NO: 382487 - DNA, 25 bp, Artificial
  probe
  misc_feature (1)..(25): SEQ ID NO: 4427; WAN0249MB; Start 24; Stop 48
aaccttcagtctcttagtcaataag

SEQ ID NO: 382488 - DNA, 25 bp, Artificial
  probe
  misc_feature (1)..(25): SEQ ID NO: 4427; WAN0249MB; Start 54; Stop 78
gagactccctaaatcgttatcacat

SEQ ID NO: 382489 - DNA, 25 bp, Artificial
  probe
  misc_feature (1)..(25): SEQ ID NO: 4427; WAN0249MB; Start 52; Stop 76
aagagactccctaaatcgttatcac

SEQ ID NO: 382490 - DNA, 25 bp, Artificial
  probe
  misc_feature (1)..(25): SEQ ID NO: 4427; WAN0249MB; Start 53; Stop 77
agagactccctaaatcgttatcaca

SEQ ID NO: 382491 - DNA, 25 bp, Artificial
  probe
  misc_feature (1)..(25): SEQ ID NO: 4427; WAN0249MB; Start 51; Stop 75
taagagactccctaaatcgttatca

SEQ ID NO: 382492 - DNA, 25 bp, Artificial
  probe
  misc_feature (1)..(25): SEQ ID NO: 4427; WAN0249MB; Start 9; Stop 33
aagctcaagttagagaaccttcagt

SEQ ID NO: 382493 - DNA, 25 bp, Artificial
  probe
  misc_feature (1)..(25): SEQ ID NO: 4427; WAN0249MB; Start 10; Stop 34
agctcaagttagagaaccttcagtc

SEQ ID NO: 382494 - DNA, 25 bp, Artificial
  probe
  misc_feature (1)..(25): SEQ ID NO: 4427; WAN0249MB; Start 56; Stop 80
gactccctaaatcgttatcacattt

SEQ ID NO: 382495 - DNA, 25 bp, Artificial
  probe
  misc_feature (1)..(25): SEQ ID NO: 4427; WAN0249MB; Start 50; Stop 74
ttaagagactccctaaatcgttatc

SEQ ID NO: 382496 - DNA, 25 bp, Artificial
  probe
  misc_feature (1)..(25): SEQ ID NO: 4427; WAN0249MB; Start 47; Stop 71
agattaagagactccctaaatcgtt

SEQ ID NO: 382497 - DNA, 25 bp, Artificial
  probe
  misc_feature (1)..(25): SEQ ID NO: 4427; WAN0249MB; Start 46; Stop 70
aagattaagagactccctaaatcgt

SEQ ID NO: 382498 - DNA, 25 bp, Artificial
  probe
  misc_feature (1)..(25): SEQ ID NO: 4427; WAN0249MB; Start 8; Stop 32
aaagctcaagttagagaaccttcag

SEQ ID NO: 382499 - DNA, 25 bp, Artificial
  probe
  misc_feature (1)..(25): SEQ ID NO: 4427; WAN0249MB; Start 21; Stop 45
gagaaccttcagtctcttagtcaat

SEQ ID NO: 382500 - DNA, 25 bp, Artificial
  probe
  misc_feature (1)..(25): SEQ ID NO: 4427; WAN0249MB; Start 12; Stop 36
ctcaagttagagaaccttcagtctc

SEQ ID NO: 382501 - DNA, 25 bp, Artificial
  probe
  misc_feature (1)..(25): SEQ ID NO: 4427; WAN0249MB; Start 49; Stop 73
attaagagactccctaaatcgttat

SEQ ID NO: 382502 - DNA, 25 bp, Artificial
  probe
  misc_feature (1)..(25): SEQ ID NO: 4427; WAN0249MB; Start 48; Stop 72
gattaagagactccctaaatcgtta

SEQ ID NO: 382503 - DNA, 25 bp, Artificial
  probe
  misc_feature (1)..(25): SEQ ID NO: 4427; WAN0249MB; Start 40; Stop 64
gtcaataagattaagagactcccta

SEQ ID NO: 382504 - DNA, 25 bp, Artificial
  probe
  misc_feature (1)..(25): SEQ ID NO: 4427; WAN0249MB; Start 45; Stop 69
taagattaagagactccctaaatcg

SEQ ID NO: 382505 - DNA, 25 bp, Artificial
  probe
  misc_feature (1)..(25): SEQ ID NO: 4427; WAN0249MB; Start 41; Stop 65
tcaataagattaagagactccctaa

SEQ ID NO: 382506 - DNA, 25 bp, Artificial
  probe
  misc_feature (1)..(25): SEQ ID NO: 4427; WAN0249MB; Start 25; Stop 49
accttcagtctcttagtcaataaga

SEQ ID NO: 382507 - DNA, 25 bp, Artificial
  probe
  misc_feature (1)..(25): SEQ ID NO: 4427; WAN0249MB; Start 57; Stop 81
actccctaaatcgttatcacatttt

SEQ ID NO: 382508 - DNA, 25 bp, Artificial
  probe
  misc_feature (1)..(25): SEQ ID NO: 4427; WAN0249MB; Start 26; Stop 50
ccttcagtctcttagtcaataagat

SEQ ID NO: 382509 - DNA, 25 bp, Artificial
  probe
  misc_feature (1)..(25): SEQ ID NO: 4427; WAN0249MB; Start 42; Stop 66
caataagattaagagactccctaaa

SEQ ID NO: 382510 - DNA, 25 bp, Artificial
  probe
  misc_feature (1)..(25): SEQ ID NO: 4427; WAN0249MB; Start 7; Stop 31
aaaagctcaagttagagaaccttca

SEQ ID NO: 382511 - DNA, 25 bp, Artificial
  probe
  misc_feature (1)..(25): SEQ ID NO: 4427; WAN0249MB; Start 3; Stop 27
acataaaagctcaagttagagaacc

SEQ ID NO: 382512 - DNA, 25 bp, Artificial
  probe
  misc_feature (1)..(25): SEQ ID NO: 4427; WAN0249MB; Start 4; Stop 28
cataaaagctcaagttagagaacct

SEQ ID NO: 382513 - DNA, 25 bp, Artificial
  probe
  misc_feature (1)..(25): SEQ ID NO: 4427; WAN0249MB; Start 6; Stop 30
taaaagctcaagttagagaaccttc

SEQ ID NO: 382514 - DNA, 25 bp, Artificial
  probe
  misc_feature (1)..(25): SEQ ID NO: 4427; WAN0249MB; Start 39; Stop 63
agtcaataagattaagagactccct

SEQ ID NO: 382515 - DNA, 25 bp, Artificial
  probe
  misc_feature (1)..(25): SEQ ID NO: 4427; WAN0249MB; Start 5; Stop 29
ataaaagctcaagttagagaacctt

SEQ ID NO: 382516 - DNA, 25 bp, Artificial
  probe
  misc_feature (1)..(25): SEQ ID NO: 4428; WAN024AG7; Start 76; Stop 100
gttggatgcttataacagagtgacg

SEQ ID NO: 382517 - DNA, 25 bp, Artificial
  probe
  misc_feature (1)..(25): SEQ ID NO: 4428; WAN024AG7; Start 140; Stop 164
taggacatttgtttgatagtggtga

SEQ ID NO: 382518 - DNA, 25 bp, Artificial
  probe
  misc_feature (1)..(25): SEQ ID NO: 4428; WAN024AG7; Start 141; Stop 165
aggacatttgtttgatagtggtgat

SEQ ID NO: 382519 - DNA, 25 bp, Artificial
  probe
  misc_feature (1)..(25): SEQ ID NO: 4428; WAN024AG7; Start 139; Stop 163
ttaggacatttgtttgatagtggtg

SEQ ID NO: 382520 - DNA, 25 bp, Artificial
  probe
  misc_feature (1)..(25): SEQ ID NO: 4428; WAN024AG7; Start 142; Stop 166
ggacatttgtttgatagtggtgata

SEQ ID NO: 382521 - DNA, 25 bp, Artificial
  probe
  misc_feature (1)..(25): SEQ ID NO: 4428; WAN024AG7; Start 138; Stop 162
tttaggacatttgtttgatagtggt

SEQ ID NO: 382522 - DNA, 25 bp, Artificial
  probe
  misc_feature (1)..(25): SEQ ID NO: 4428; WAN024AG7; Start 176; Stop 200
atctgctacataatttgtggagttt

SEQ ID NO: 382523 - DNA, 25 bp, Artificial
  probe
  misc_feature (1)..(25): SEQ ID NO: 4428; WAN024AG7; Start 175; Stop 199
aatctgctacataatttgtggagtt

SEQ ID NO: 382524 - DNA, 25 bp, Artificial
  probe
  misc_feature (1)..(25): SEQ ID NO: 4428; WAN024AG7; Start 174; Stop 198
aaatctgctacataatttgtggagt

SEQ ID NO: 382525 - DNA, 25 bp, Artificial
  probe
  misc_feature (1)..(25): SEQ ID NO: 4428; WAN024AG7; Start 77; Stop 101
ttggatgcttataacagagtgacgc

SEQ ID NO: 382526 - DNA, 25 bp, Artificial
  probe
  misc_feature (1)..(25): SEQ ID NO: 4428; WAN024AG7; Start 81; Stop 105
atgcttataacagagtgacgccatc

SEQ ID NO: 382527 - DNA, 25 bp, Artificial
  probe
  misc_feature (1)..(25): SEQ ID NO: 4428; WAN024AG7; Start 80; Stop 104
gatgcttataacagagtgacgccat

SEQ ID NO: 382528 - DNA, 25 bp, Artificial
  probe
  misc_feature (1)..(25): SEQ ID NO: 4428; WAN024AG7; Start 143; Stop 167
gacatttgtttgatagtggtgataa

SEQ ID NO: 382529 - DNA, 25 bp, Artificial
  probe
  misc_feature (1)..(25): SEQ ID NO: 4428; WAN024AG7; Start 137; Stop 161
atttaggacatttgtttgatagtgg

SEQ ID NO: 382530 - DNA, 25 bp, Artificial
  probe
  misc_feature (1)..(25): SEQ ID NO: 4428; WAN024AG7; Start 101; Stop 125
ccatcactgggctaatagagataaa

SEQ ID NO: 382531 - DNA, 25 bp, Artificial
  probe
  misc_feature (1)..(25): SEQ ID NO: 4428; WAN024AG7; Start 148; Stop 172
ttgtttgatagtggtgataaagttt

SEQ ID NO: 382532 - DNA, 25 bp, Artificial
  probe
  misc_feature (1)..(25): SEQ ID NO: 4428; WAN024AG7; Start 147; Stop 171
tttgtttgatagtggtgataaagtt

SEQ ID NO: 382533 - DNA, 25 bp, Artificial
  probe
  misc_feature (1)..(25): SEQ ID NO: 4428; WAN024AG7; Start 74; Stop 98
ttgttggatgcttataacagagtga

SEQ ID NO: 382534 - DNA, 25 bp, Artificial
  probe
  misc_feature (1)..(25): SEQ ID NO: 4428; WAN024AG7; Start 73; Stop 97
gttgttggatgcttataacagagtg

SEQ ID NO: 382535 - DNA, 25 bp, Artificial
  probe
  misc_feature (1)..(25): SEQ ID NO: 4428; WAN024AG7; Start 144; Stop 168
acatttgtttgatagtggtgataaa

SEQ ID NO: 382536 - DNA, 25 bp, Artificial
  probe
  misc_feature (1)..(25): SEQ ID NO: 4428; WAN024AG7; Start 213; Stop 237
ggagtttaacctaacctgcaaatag

SEQ ID NO: 382537 - DNA, 25 bp, Artificial
  probe
  misc_feature (1)..(25): SEQ ID NO: 4428; WAN024AG7; Start 75; Stop 99
tgttggatgcttataacagagtgac

SEQ ID NO: 382538 - DNA, 25 bp, Artificial
  probe
  misc_feature (1)..(25): SEQ ID NO: 4428; WAN024AG7; Start 146; Stop 170
atttgtttgatagtggtgataaagt

SEQ ID NO: 382539 - DNA, 25 bp, Artificial
  probe
  misc_feature (1)..(25): SEQ ID NO: 4428; WAN024AG7; Start 145; Stop 169
catttgtttgatagtggtgataaag

SEQ ID NO: 382540 - DNA, 25 bp, Artificial
  probe
  misc_feature (1)..(25): SEQ ID NO: 4428; WAN024AG7; Start 72; Stop 96
cgttgttggatgcttataacagagt

SEQ ID NO: 382541 - DNA, 25 bp, Artificial
  probe
  misc_feature (1)..(25): SEQ ID NO: 4428; WAN024AG7; Start 173; Stop 197
taaatctgctacataatttgtggag

SEQ ID NO: 382542 - DNA, 25 bp, Artificial
  probe
  misc_feature (1)..(25): SEQ ID NO: 4428; WAN024AG7; Start 212; Stop 236
aggagtttaacctaacctgcaaata

SEQ ID NO: 382543 - DNA, 25 bp, Artificial
  probe
  misc_feature (1)..(25): SEQ ID NO: 4428; WAN024AG7; Start 135; Stop 159
tgatttaggacatttgtttgatagt

SEQ ID NO: 382544 - DNA, 25 bp, Artificial
  probe
  misc_feature (1)..(25): SEQ ID NO: 4428; WAN024AG7; Start 71; Stop 95
ccgttgttggatgcttataacagag

SEQ ID NO: 382545 - DNA, 25 bp, Artificial
  probe
  misc_feature (1)..(25): SEQ ID NO: 4428; WAN024AG7; Start 65; Stop 89
tataccccgttgttggatgcttata

SEQ ID NO: 382546 - DNA, 25 bp, Artificial
  probe
  misc_feature (1)..(25): SEQ ID NO: 4428; WAN024AG7; Start 136; Stop 160
gatttaggacatttgtttgatagtg

SEQ ID NO: 382547 - DNA, 25 bp, Artificial
  probe
  misc_feature (1)..(25): SEQ ID NO: 4428; WAN024AG7; Start 82; Stop 106
tgcttataacagagtgacgccatca

SEQ ID NO: 382548 - DNA, 25 bp, Artificial
  probe
  misc_feature (1)..(25): SEQ ID NO: 4428; WAN024AG7; Start 172; Stop 196
ttaaatctgctacataatttgtgga

SEQ ID NO: 382549 - DNA, 25 bp, Artificial
  probe
  misc_feature (1)..(25): SEQ ID NO: 4429; WAN024AFP; Start 11; Stop 35
aggatagtcaattatgcttgtttac

SEQ ID NO: 382550 - DNA, 25 bp, Artificial
  probe
  misc_feature (1)..(25): SEQ ID NO: 4429; WAN024AFP; Start 9; Stop 33
aaaggatagtcaattatgcttgttt

SEQ ID NO: 382551 - DNA, 25 bp, Artificial
  probe
  misc_feature (1)..(25): SEQ ID NO: 4429; WAN024AFP; Start 12; Stop 36
ggatagtcaattatgcttgtttact

SEQ ID NO: 382552 - DNA, 25 bp, Artificial
  probe
  misc_feature (1)..(25): SEQ ID NO: 4429; WAN024AFP; Start 16; Stop 40
agtcaattatgcttgtttactaact

SEQ ID NO: 382553 - DNA, 25 bp, Artificial
  probe
  misc_feature (1)..(25): SEQ ID NO: 4429; WAN024AFP; Start 10; Stop 34
aaggatagtcaattatgcttgttta

SEQ ID NO: 382554 - DNA, 25 bp, Artificial
  probe
  misc_feature (1)..(25): SEQ ID NO: 4429; WAN024AFP; Start 8; Stop 32
aaaaggatagtcaattatgcttgtt

SEQ ID NO: 382555 - DNA, 25 bp, Artificial
  probe
  misc_feature (1)..(25): SEQ ID NO: 4429; WAN024AFP; Start 17; Stop 41
gtcaattatgcttgtttactaacta

SEQ ID NO: 382556 - DNA, 25 bp, Artificial
  probe
  misc_feature (1)..(25): SEQ ID NO: 4429; WAN024AFP; Start 15; Stop 39
tagtcaattatgcttgtttactaac

SEQ ID NO: 382557 - DNA, 25 bp, Artificial
  probe
  misc_feature (1)..(25): SEQ ID NO: 4429; WAN024AFP; Start 87; Stop 111
tcagagaagcctgatatagagtttt

SEQ ID NO: 382558 - DNA, 25 bp, Artificial
  probe
  misc_feature (1)..(25): SEQ ID NO: 4429; WAN024AFP; Start 76; Stop 100
aaaactctatatcagagaagcctga

SEQ ID NO: 382559 - DNA, 25 bp, Artificial
  probe
  misc_feature (1)..(25): SEQ ID NO: 4429; WAN024AFP; Start 59; Stop 83
attgaggttgtttacataaaactct

SEQ ID NO: 382560 - DNA, 25 bp, Artificial
  probe
  misc_feature (1)..(25): SEQ ID NO: 4429; WAN024AFP; Start 75; Stop 99
taaaactctatatcagagaagcctg

SEQ ID NO: 382561 - DNA, 25 bp, Artificial
  probe
  misc_feature (1)..(25): SEQ ID NO: 4429; WAN024AFP; Start 13; Stop 37
gatagtcaattatgcttgtttacta

SEQ ID NO: 382562 - DNA, 25 bp, Artificial
  probe
  misc_feature (1)..(25): SEQ ID NO: 4429; WAN024AFP; Start 60; Stop 84
ttgaggttgtttacataaaactcta

SEQ ID NO: 382563 - DNA, 25 bp, Artificial
  probe
  misc_feature (1)..(25): SEQ ID NO: 4429; WAN024AFP; Start 73; Stop 97
cataaaactctatatcagagaagcc

SEQ ID NO: 382564 - DNA, 25 bp, Artificial
  probe
  misc_feature (1)..(25): SEQ ID NO: 4429; WAN024AFP; Start 61; Stop 85
tgaggttgtttacataaaactctat

SEQ ID NO: 382565 - DNA, 25 bp, Artificial
  probe
  misc_feature (1)..(25): SEQ ID NO: 4429; WAN024AFP; Start 74; Stop 98
ataaaactctatatcagagaagcct

SEQ ID NO: 382566 - DNA, 25 bp, Artificial
  probe
  misc_feature (1)..(25): SEQ ID NO: 4429; WAN024AFP; Start 72; Stop 96
acataaaactctatatcagagaagc

SEQ ID NO: 382567 - DNA, 25 bp, Artificial
  probe
  misc_feature (1)..(25): SEQ ID NO: 4430; WAN0249QT; Start 178; Stop 202
ttagacacagaagctattatcctcg

SEQ ID NO: 382568 - DNA, 25 bp, Artificial
  probe
  misc_feature (1)..(25): SEQ ID NO: 4430; WAN0249QT; Start 71; Stop 95
gcggtaacaatatgcttaatgcgaa

SEQ ID NO: 382569 - DNA, 25 bp, Artificial
  probe
  misc_feature (1)..(25): SEQ ID NO: 4430; WAN0249QT; Start 72; Stop 96
cggtaacaatatgcttaatgcgaaa

SEQ ID NO: 382570 - DNA, 25 bp, Artificial
  probe
  misc_feature (1)..(25): SEQ ID NO: 4430; WAN0249QT; Start 179; Stop 203
tagacacagaagctattatcctcgc

SEQ ID NO: 382571 - DNA, 25 bp, Artificial
  probe
  misc_feature (1)..(25): SEQ ID NO: 4430; WAN0249QT; Start 167; Stop 191
aaatgggttatttagacacagaagc

SEQ ID NO: 382572 - DNA, 25 bp, Artificial
  probe
  misc_feature (1)..(25): SEQ ID NO: 4430; WAN0249QT; Start 165; Stop 189
cgaaatgggttatttagacacagaa

SEQ ID NO: 382573 - DNA, 25 bp, Artificial
  probe
  misc_feature (1)..(25): SEQ ID NO: 4430; WAN0249QT; Start 183; Stop 207
cacagaagctattatcctcgcagtt

SEQ ID NO: 382574 - DNA, 25 bp, Artificial
  probe
  misc_feature (1)..(25): SEQ ID NO: 4430; WAN0249QT; Start 168; Stop 192
aatgggttatttagacacagaagct

SEQ ID NO: 382575 - DNA, 25 bp, Artificial
  probe
  misc_feature (1)..(25): SEQ ID NO: 4430; WAN0249QT; Start 170; Stop 194
tgggttatttagacacagaagctat

SEQ ID NO: 382576 - DNA, 25 bp, Artificial
  probe
  misc_feature (1)..(25): SEQ ID NO: 4430; WAN0249QT; Start 169; Stop 193
atgggttatttagacacagaagcta

SEQ ID NO: 382577 - DNA, 25 bp, Artificial
  probe
  misc_feature (1)..(25): SEQ ID NO: 4430; WAN0249QT; Start 132; Stop 156
aactacaggcttgttgttgttgaaa

SEQ ID NO: 382578 - DNA, 25 bp, Artificial
  probe
  misc_feature (1)..(25): SEQ ID NO: 4430; WAN0249QT; Start 131; Stop 155
aaactacaggcttgttgttgttgaa

SEQ ID NO: 382579 - DNA, 25 bp, Artificial
  probe
  misc_feature (1)..(25): SEQ ID NO: 4430; WAN0249QT; Start 181; Stop 205
gacacagaagctattatcctcgcag

SEQ ID NO: 382580 - DNA, 25 bp, Artificial
  probe
  misc_feature (1)..(25): SEQ ID NO: 4430; WAN0249QT; Start 171; Stop 195
gggttatttagacacagaagctatt

SEQ ID NO: 382581 - DNA, 25 bp, Artificial
  probe
  misc_feature (1)..(25): SEQ ID NO: 4430; WAN0249QT; Start 166; Stop 190
gaaatgggttatttagacacagaag

SEQ ID NO: 382582 - DNA, 25 bp, Artificial
  probe
  misc_feature (1)..(25): SEQ ID NO: 4430; WAN0249QT; Start 130; Stop 154
gaaactacaggcttgttgttgttga

SEQ ID NO: 382583 - DNA, 25 bp, Artificial
  probe
  misc_feature (1)..(25): SEQ ID NO: 4430; WAN0249QT; Start 180; Stop 204
agacacagaagctattatcctcgca

SEQ ID NO: 382584 - DNA, 25 bp, Artificial
  probe
  misc_feature (1)..(25): SEQ ID NO: 4430; WAN0249QT; Start 164; Stop 188
tcgaaatgggttatttagacacaga

SEQ ID NO: 382585 - DNA, 25 bp, Artificial
  probe
  misc_feature (1)..(25): SEQ ID NO: 4430; WAN0249QT; Start 162; Stop 186
tctcgaaatgggttatttagacaca

SEQ ID NO: 382586 - DNA, 25 bp, Artificial
  probe
  misc_feature (1)..(25): SEQ ID NO: 4430; WAN0249QT; Start 158; Stop 182
gaggtctcgaaatgggttatttaga

SEQ ID NO: 382587 - DNA, 25 bp, Artificial
  probe
  misc_feature (1)..(25): SEQ ID NO: 4430; WAN0249QT; Start 157; Stop 181
agaggtctcgaaatgggttatttag

SEQ ID NO: 382588 - DNA, 25 bp, Artificial
  probe
  misc_feature (1)..(25): SEQ ID NO: 4430; WAN0249QT; Start 163; Stop 187
ctcgaaatgggttatttagacacag

SEQ ID NO: 382589 - DNA, 25 bp, Artificial
  probe
  misc_feature (1)..(25): SEQ ID NO: 4430; WAN0249QT; Start 156; Stop 180
aagaggtctcgaaatgggttattta

SEQ ID NO: 382590 - DNA, 25 bp, Artificial
  probe
  misc_feature (1)..(25): SEQ ID NO: 4430; WAN0249QT; Start 155; Stop 179
aaagaggtctcgaaatgggttattt

SEQ ID NO: 382591 - DNA, 25 bp, Artificial
  probe
  misc_feature (1)..(25): SEQ ID NO: 4430; WAN0249QT; Start 125; Stop 149
ttatcgaaactacaggcttgttgtt

SEQ ID NO: 382592 - DNA, 25 bp, Artificial
  probe
  misc_feature (1)..(25): SEQ ID NO: 4430; WAN0249QT; Start 184; Stop 208
acagaagctattatcctcgcagttt

SEQ ID NO: 382593 - DNA, 25 bp, Artificial
  probe
  misc_feature (1)..(25): SEQ ID NO: 4430; WAN0249QT; Start 177; Stop 201
tttagacacagaagctattatcctc

SEQ ID NO: 382594 - DNA, 25 bp, Artificial
  probe
  misc_feature (1)..(25): SEQ ID NO: 4430; WAN0249QT; Start 182; Stop 206
acacagaagctattatcctcgcagt

SEQ ID NO: 382595 - DNA, 25 bp, Artificial
  probe
  misc_feature (1)..(25): SEQ ID NO: 4430; WAN0249QT; Start 126; Stop 150
tatcgaaactacaggcttgttgttg

SEQ ID NO: 382596 - DNA, 25 bp, Artificial
  probe
  misc_feature (1)..(25): SEQ ID NO: 4430; WAN0249QT; Start 124; Stop 148
gttatcgaaactacaggcttgttgt

SEQ ID NO: 382597 - DNA, 25 bp, Artificial
  probe
  misc_feature (1)..(25): SEQ ID NO: 4430; WAN0249QT; Start 70; Stop 94
agcggtaacaatatgcttaatgcga

SEQ ID NO: 382598 - DNA, 25 bp, Artificial
  probe
  misc_feature (1)..(25): SEQ ID NO: 4430; WAN0249QT; Start 141; Stop 165
cttgttgttgttgaaaagaggtctc

SEQ ID NO: 382599 - DNA, 25 bp, Artificial
  probe
  misc_feature (1)..(25): SEQ ID NO: 4430; WAN0249QT; Start 73; Stop 97
ggtaacaatatgcttaatgcgaaaa

SEQ ID NO: 382600 - DNA, 25 bp, Artificial
  probe
  misc_feature (1)..(25): SEQ ID NO: 4431; WAN024AB8; Start 53; Stop 77
tgtaactgtatctattgacaatgat

SEQ ID NO: 382601 - DNA, 25 bp, Artificial
  probe
  misc_feature (1)..(25): SEQ ID NO: 4431; WAN024AB8; Start 96; Stop 120
agacttgaaatatgtttaaggagtt

SEQ ID NO: 382602 - DNA, 25 bp, Artificial
  probe
  misc_feature (1)..(25): SEQ ID NO: 4431; WAN024AB8; Start 97; Stop 121
gacttgaaatatgtttaaggagttt

SEQ ID NO: 382603 - DNA, 25 bp, Artificial
  probe
  misc_feature (1)..(25): SEQ ID NO: 4431; WAN024AB8; Start 95; Stop 119
tagacttgaaatatgtttaaggagt

SEQ ID NO: 382604 - DNA, 25 bp, Artificial
  probe
  misc_feature (1)..(25): SEQ ID NO: 4431; WAN024AB8; Start 52; Stop 76
ttgtaactgtatctattgacaatga

SEQ ID NO: 382605 - DNA, 25 bp, Artificial
  probe
  misc_feature (1)..(25): SEQ ID NO: 4431; WAN024AB8; Start 87; Stop 111
cgatacaatagacttgaaatatgtt

SEQ ID NO: 382606 - DNA, 25 bp, Artificial
  probe
  misc_feature (1)..(25): SEQ ID NO: 4431; WAN024AB8; Start 86; Stop 110
tcgatacaatagacttgaaatatgt

SEQ ID NO: 382607 - DNA, 25 bp, Artificial
  probe
  misc_feature (1)..(25): SEQ ID NO: 4431; WAN024AB8; Start 98; Stop 122
acttgaaatatgtttaaggagtttt

SEQ ID NO: 382608 - DNA, 25 bp, Artificial
  probe
  misc_feature (1)..(25): SEQ ID NO: 4431; WAN024AB8; Start 51; Stop 75
tttgtaactgtatctattgacaatg

SEQ ID NO: 382609 - DNA, 25 bp, Artificial
  probe
  misc_feature (1)..(25): SEQ ID NO: 4432; WAN0249Z9; Start 58; Stop 82
ttcctagcctcaacatcatataacc

SEQ ID NO: 382610 - DNA, 25 bp, Artificial
  probe
  misc_feature (1)..(25): SEQ ID NO: 4432; WAN0249Z9; Start 59; Stop 83
tcctagcctcaacatcatataaccc

SEQ ID NO: 382611 - DNA, 25 bp, Artificial
  probe
  misc_feature (1)..(25): SEQ ID NO: 4432; WAN0249Z9; Start 57; Stop 81
tttcctagcctcaacatcatataac

SEQ ID NO: 382612 - DNA, 25 bp, Artificial
  probe
  misc_feature (1)..(25): SEQ ID NO: 4432; WAN0249Z9; Start 65; Stop 89
cctcaacatcatataaccccaaaat

SEQ ID NO: 382613 - DNA, 25 bp, Artificial
  probe
  misc_feature (1)..(25): SEQ ID NO: 4432; WAN0249Z9; Start 62; Stop 86
tagcctcaacatcatataaccccaa

SEQ ID NO: 382614 - DNA, 25 bp, Artificial
  probe
  misc_feature (1)..(25): SEQ ID NO: 4432; WAN0249Z9; Start 64; Stop 88
gcctcaacatcatataaccccaaaa

SEQ ID NO: 382615 - DNA, 25 bp, Artificial
  probe
  misc_feature (1)..(25): SEQ ID NO: 4432; WAN0249Z9; Start 63; Stop 87
agcctcaacatcatataaccccaaa

SEQ ID NO: 382616 - DNA, 25 bp, Artificial
  probe
  misc_feature (1)..(25): SEQ ID NO: 4432; WAN0249Z9; Start 61; Stop 85
ctagcctcaacatcatataacccca

SEQ ID NO: 382617 - DNA, 25 bp, Artificial
  probe
  misc_feature (1)..(25): SEQ ID NO: 4432; WAN0249Z9; Start 66; Stop 90
ctcaacatcatataaccccaaaatt

SEQ ID NO: 382618 - DNA, 25 bp, Artificial
  probe
  misc_feature (1)..(25): SEQ ID NO: 4432; WAN0249Z9; Start 60; Stop 84
cctagcctcaacatcatataacccc

SEQ ID NO: 382619 - DNA, 25 bp, Artificial
  probe
  misc_feature (1)..(25): SEQ ID NO: 4432; WAN0249Z9; Start 56; Stop 80
ttttcctagcctcaacatcatataa

SEQ ID NO: 382620 - DNA, 25 bp, Artificial
  probe
  misc_feature (1)..(25): SEQ ID NO: 4432; WAN0249Z9; Start 9; Stop 33
tcaatgttttgttatgagaagactt

SEQ ID NO: 382621 - DNA, 25 bp, Artificial
  probe
  misc_feature (1)..(25): SEQ ID NO: 4432; WAN0249Z9; Start 8; Stop 32
atcaatgttttgttatgagaagact

SEQ ID NO: 382622 - DNA, 25 bp, Artificial
  probe
  misc_feature (1)..(25): SEQ ID NO: 4432; WAN0249Z9; Start 13; Stop 37
tgttttgttatgagaagacttactt

SEQ ID NO: 382623 - DNA, 25 bp, Artificial
  probe
  misc_feature (1)..(25): SEQ ID NO: 4432; WAN0249Z9; Start 12; Stop 36
atgttttgttatgagaagacttact

SEQ ID NO: 382624 - DNA, 25 bp, Artificial
  probe
  misc_feature (1)..(25): SEQ ID NO: 4432; WAN0249Z9; Start 11; Stop 35
aatgttttgttatgagaagacttac

SEQ ID NO: 382625 - DNA, 25 bp, Artificial
  probe
  misc_feature (1)..(25): SEQ ID NO: 4432; WAN0249Z9; Start 14; Stop 38
gttttgttatgagaagacttacttt

SEQ ID NO: 382626 - DNA, 25 bp, Artificial
  probe
  misc_feature (1)..(25): SEQ ID NO: 4432; WAN0249Z9; Start 10; Stop 34
caatgttttgttatgagaagactta

SEQ ID NO: 382627 - DNA, 25 bp, Artificial
  probe
  misc_feature (1)..(25): SEQ ID NO: 4432; WAN0249Z9; Start 7; Stop 31
tatcaatgttttgttatgagaagac

SEQ ID NO: 382628 - DNA, 25 bp, Artificial
  probe
  misc_feature (1)..(25): SEQ ID NO: 4432; WAN0249Z9; Start 15; Stop 39
ttttgttatgagaagacttactttt

SEQ ID NO: 382629 - DNA, 25 bp, Artificial
  probe
  misc_feature (1)..(25): SEQ ID NO: 4433; WAN024AGY; Start 28; Stop 52
agaagtgatatactataggtgaagt

SEQ ID NO: 382630 - DNA, 25 bp, Artificial
  probe
  misc_feature (1)..(25): SEQ ID NO: 4433; WAN024AGY; Start 67; Stop 91
acaaaatagattagaagggagaagt

SEQ ID NO: 382631 - DNA, 25 bp, Artificial
  probe
  misc_feature (1)..(25): SEQ ID NO: 4433; WAN024AGY; Start 68; Stop 92
caaaatagattagaagggagaagtg

SEQ ID NO: 382632 - DNA, 25 bp, Artificial
  probe
  misc_feature (1)..(25): SEQ ID NO: 4433; WAN024AGY; Start 24; Stop 48
gtgtagaagtgatatactataggtg

SEQ ID NO: 382633 - DNA, 25 bp, Artificial
  probe
  misc_feature (1)..(25): SEQ ID NO: 4433; WAN024AGY; Start 10; Stop 34
tgctttacaaactagtgtagaagtg

SEQ ID NO: 382634 - DNA, 25 bp, Artificial
  probe
  misc_feature (1)..(25): SEQ ID NO: 4433; WAN024AGY; Start 25; Stop 49
tgtagaagtgatatactataggtga

SEQ ID NO: 382635 - DNA, 25 bp, Artificial
  probe
  misc_feature (1)..(25): SEQ ID NO: 4433; WAN024AGY; Start 23; Stop 47
agtgtagaagtgatatactataggt

SEQ ID NO: 382636 - DNA, 25 bp, Artificial
  probe
  misc_feature (1)..(25): SEQ ID NO: 4433; WAN024AGY; Start 11; Stop 35
gctttacaaactagtgtagaagtga

SEQ ID NO: 382637 - DNA, 25 bp, Artificial
  probe
  misc_feature (1)..(25): SEQ ID NO: 4433; WAN024AGY; Start 9; Stop 33
atgctttacaaactagtgtagaagt

SEQ ID NO: 382638 - DNA, 25 bp, Artificial
  probe
  misc_feature (1)..(25): SEQ ID NO: 4433; WAN024AGY; Start 66; Stop 90
tacaaaatagattagaagggagaag

SEQ ID NO: 382639 - DNA, 25 bp, Artificial
  probe
  misc_feature (1)..(25): SEQ ID NO: 4433; WAN024AGY; Start 12; Stop 36
ctttacaaactagtgtagaagtgat

SEQ ID NO: 382640 - DNA, 25 bp, Artificial
  probe
  misc_feature (1)..(25): SEQ ID NO: 4433; WAN024AGY; Start 8; Stop 32
tatgctttacaaactagtgtagaag

SEQ ID NO: 382641 - DNA, 25 bp, Artificial
  probe
  misc_feature (1)..(25): SEQ ID NO: 4433; WAN024AGY; Start 65; Stop 89
ttacaaaatagattagaagggagaa

SEQ ID NO: 382642 - DNA, 25 bp, Artificial
  probe
  misc_feature (1)..(25): SEQ ID NO: 4433; WAN024AGY; Start 16; Stop 40
acaaactagtgtagaagtgatatac

SEQ ID NO: 382643 - DNA, 25 bp, Artificial
  probe
  misc_feature (1)..(25): SEQ ID NO: 4433; WAN024AGY; Start 3; Stop 27
actattatgctttacaaactagtgt

SEQ ID NO: 382644 - DNA, 25 bp, Artificial
  probe
  misc_feature (1)..(25): SEQ ID NO: 4433; WAN024AGY; Start 17; Stop 41
caaactagtgtagaagtgatatact

SEQ ID NO: 382645 - DNA, 25 bp, Artificial
  probe
  misc_feature (1)..(25): SEQ ID NO: 4433; WAN024AGY; Start 7; Stop 31
ttatgctttacaaactagtgtagaa

SEQ ID NO: 382646 - DNA, 25 bp, Artificial
  probe
  misc_feature (1)..(25): SEQ ID NO: 4433; WAN024AGY; Start 64; Stop 88
attacaaaatagattagaagggaga

SEQ ID NO: 382647 - DNA, 25 bp, Artificial
  probe
  misc_feature (1)..(25): SEQ ID NO: 4433; WAN024AGY; Start 6; Stop 30
attatgctttacaaactagtgtaga

SEQ ID NO: 382648 - DNA, 25 bp, Artificial
  probe
  misc_feature (1)..(25): SEQ ID NO: 4433; WAN024AGY; Start 61; Stop 85
ggtattacaaaatagattagaaggg

SEQ ID NO: 382649 - DNA, 25 bp, Artificial
  probe
  misc_feature (1)..(25): SEQ ID NO: 4433; WAN024AGY; Start 2; Stop 26
aactattatgctttacaaactagtg

SEQ ID NO: 382650 - DNA, 25 bp, Artificial
  probe
  misc_feature (1)..(25): SEQ ID NO: 4433; WAN024AGY; Start 13; Stop 37
tttacaaactagtgtagaagtgata

SEQ ID NO: 382651 - DNA, 25 bp, Artificial
  probe
  misc_feature (1)..(25): SEQ ID NO: 4433; WAN024AGY; Start 14; Stop 38
ttacaaactagtgtagaagtgatat

SEQ ID NO: 382652 - DNA, 25 bp, Artificial
  probe
  misc_feature (1)..(25): SEQ ID NO: 4434; WAN0249TG; Start 336; Stop 360
agaactatcacatactcaaggtcag

SEQ ID NO: 382653 - DNA, 25 bp, Artificial
  probe
  misc_feature (1)..(25): SEQ ID NO: 4434; WAN0249TG; Start 337; Stop 361
gaactatcacatactcaaggtcagc

SEQ ID NO: 382654 - DNA, 25 bp, Artificial
  probe
  misc_feature (1)..(25): SEQ ID NO: 4434; WAN0249TG; Start 335; Stop 359
tagaactatcacatactcaaggtca

SEQ ID NO: 382655 - DNA, 25 bp, Artificial
  probe
  misc_feature (1)..(25): SEQ ID NO: 4434; WAN0249TG; Start 333; Stop 357
actagaactatcacatactcaaggt

SEQ ID NO: 382656 - DNA, 25 bp, Artificial
  probe
  misc_feature (1)..(25): SEQ ID NO: 4434; WAN0249TG; Start 334; Stop 358
ctagaactatcacatactcaaggtc

SEQ ID NO: 382657 - DNA, 25 bp, Artificial
  probe
  misc_feature (1)..(25): SEQ ID NO: 4434; WAN0249TG; Start 338; Stop 362
aactatcacatactcaaggtcagct

SEQ ID NO: 382658 - DNA, 25 bp, Artificial
  probe
  misc_feature (1)..(25): SEQ ID NO: 4434; WAN0249TG; Start 78; Stop 102
ttatgaagtatgctacgggaaagtt

SEQ ID NO: 382659 - DNA, 25 bp, Artificial
  probe
  misc_feature (1)..(25): SEQ ID NO: 4434; WAN0249TG; Start 80; Stop 104
atgaagtatgctacgggaaagttat

SEQ ID NO: 382660 - DNA, 25 bp, Artificial
  probe
  misc_feature (1)..(25): SEQ ID NO: 4434; WAN0249TG; Start 340; Stop 364
ctatcacatactcaaggtcagctca

SEQ ID NO: 382661 - DNA, 25 bp, Artificial
  probe
  misc_feature (1)..(25): SEQ ID NO: 4434; WAN0249TG; Start 339; Stop 363
actatcacatactcaaggtcagctc

SEQ ID NO: 382662 - DNA, 25 bp, Artificial
  probe
  misc_feature (1)..(25): SEQ ID NO: 4434; WAN0249TG; Start 81; Stop 105
tgaagtatgctacgggaaagttatg

SEQ ID NO: 382663 - DNA, 25 bp, Artificial
  probe
  misc_feature (1)..(25): SEQ ID NO: 4434; WAN0249TG; Start 79; Stop 103
tatgaagtatgctacgggaaagtta

SEQ ID NO: 382664 - DNA, 25 bp, Artificial
  probe
  misc_feature (1)..(25): SEQ ID NO: 4434; WAN0249TG; Start 77; Stop 101
cttatgaagtatgctacgggaaagt

SEQ ID NO: 382665 - DNA, 25 bp, Artificial
  probe
  misc_feature (1)..(25): SEQ ID NO: 4434; WAN0249TG; Start 282; Stop 306
tgttgttgtgttatagattgattga

SEQ ID NO: 382666 - DNA, 25 bp, Artificial
  probe
  misc_feature (1)..(25): SEQ ID NO: 4434; WAN0249TG; Start 341; Stop 365
tatcacatactcaaggtcagctcac

SEQ ID NO: 382667 - DNA, 25 bp, Artificial
  probe
  misc_feature (1)..(25): SEQ ID NO: 4434; WAN0249TG; Start 76; Stop 100
ccttatgaagtatgctacgggaaag

SEQ ID NO: 382668 - DNA, 25 bp, Artificial
  probe
  misc_feature (1)..(25): SEQ ID NO: 4434; WAN0249TG; Start 332; Stop 356
tactagaactatcacatactcaagg

SEQ ID NO: 382669 - DNA, 25 bp, Artificial
  probe
  misc_feature (1)..(25): SEQ ID NO: 4434; WAN0249TG; Start 82; Stop 106
gaagtatgctacgggaaagttatgc

SEQ ID NO: 382670 - DNA, 25 bp, Artificial
  probe
  misc_feature (1)..(25): SEQ ID NO: 4434; WAN0249TG; Start 283; Stop 307
gttgttgtgttatagattgattgaa

SEQ ID NO: 382671 - DNA, 25 bp, Artificial
  probe
  misc_feature (1)..(25): SEQ ID NO: 4434; WAN0249TG; Start 281; Stop 305
atgttgttgtgttatagattgattg

SEQ ID NO: 382672 - DNA, 25 bp, Artificial
  probe
  misc_feature (1)..(25): SEQ ID NO: 4434; WAN0249TG; Start 346; Stop 370
catactcaaggtcagctcacagatg

SEQ ID NO: 382673 - DNA, 25 bp, Artificial
  probe
  misc_feature (1)..(25): SEQ ID NO: 4434; WAN0249TG; Start 75; Stop 99
gccttatgaagtatgctacgggaaa

SEQ ID NO: 382674 - DNA, 25 bp, Artificial
  probe
  misc_feature (1)..(25): SEQ ID NO: 4434; WAN0249TG; Start 345; Stop 369
acatactcaaggtcagctcacagat

SEQ ID NO: 382675 - DNA, 25 bp, Artificial
  probe
  misc_feature (1)..(25): SEQ ID NO: 4434; WAN0249TG; Start 347; Stop 371
atactcaaggtcagctcacagatga

SEQ ID NO: 382676 - DNA, 25 bp, Artificial
  probe
  misc_feature (1)..(25): SEQ ID NO: 4434; WAN0249TG; Start 342; Stop 366
atcacatactcaaggtcagctcaca

SEQ ID NO: 382677 - DNA, 25 bp, Artificial
  probe
  misc_feature (1)..(25): SEQ ID NO: 4434; WAN0249TG; Start 71; Stop 95
aaacgccttatgaagtatgctacgg

SEQ ID NO: 382678 - DNA, 25 bp, Artificial
  probe
  misc_feature (1)..(25): SEQ ID NO: 4434; WAN0249TG; Start 69; Stop 93
gaaaacgccttatgaagtatgctac

SEQ ID NO: 382679 - DNA, 25 bp, Artificial
  probe
  misc_feature (1)..(25): SEQ ID NO: 4434; WAN0249TG; Start 29; Stop 53
tacaggttctaaataatcgaccacg

SEQ ID NO: 382680 - DNA, 25 bp, Artificial
  probe
  misc_feature (1)..(25): SEQ ID NO: 4434; WAN0249TG; Start 64; Stop 88
aagtggaaaacgccttatgaagtat

SEQ ID NO: 382681 - DNA, 25 bp, Artificial
  probe
  misc_feature (1)..(25): SEQ ID NO: 4434; WAN0249TG; Start 23; Stop 47
tgtgaatacaggttctaaataatcg

SEQ ID NO: 382682 - DNA, 25 bp, Artificial
  probe
  misc_feature (1)..(25): SEQ ID NO: 4434; WAN0249TG; Start 365; Stop 389
cagatgagcaactattttggttaca

SEQ ID NO: 382683 - DNA, 25 bp, Artificial
  probe
  misc_feature (1)..(25): SEQ ID NO: 4434; WAN0249TG; Start 364; Stop 388
acagatgagcaactattttggttac

SEQ ID NO: 382684 - DNA, 25 bp, Artificial
  probe
  misc_feature (1)..(25): SEQ ID NO: 4434; WAN0249TG; Start 363; Stop 387
cacagatgagcaactattttggtta

SEQ ID NO: 382685 - DNA, 25 bp, Artificial
  probe
  misc_feature (1)..(25): SEQ ID NO: 4435; WAN024AHQ; Start 74; Stop 98
aagtgagactactgtaatggaataa

SEQ ID NO: 382686 - DNA, 25 bp, Artificial
  probe
  misc_feature (1)..(25): SEQ ID NO: 4435; WAN024AHQ; Start 71; Stop 95
aataagtgagactactgtaatggaa

SEQ ID NO: 382687 - DNA, 25 bp, Artificial
  probe
  misc_feature (1)..(25): SEQ ID NO: 4435; WAN024AHQ; Start 58; Stop 82
tggaaatagcctaaataagtgagac

SEQ ID NO: 382688 - DNA, 25 bp, Artificial
  probe
  misc_feature (1)..(25): SEQ ID NO: 4435; WAN024AHQ; Start 72; Stop 96
ataagtgagactactgtaatggaat

SEQ ID NO: 382689 - DNA, 25 bp, Artificial
  probe
  misc_feature (1)..(25): SEQ ID NO: 4435; WAN024AHQ; Start 57; Stop 81
ctggaaatagcctaaataagtgaga

SEQ ID NO: 382690 - DNA, 25 bp, Artificial
  probe
  misc_feature (1)..(25): SEQ ID NO: 4435; WAN024AHQ; Start 65; Stop 89
agcctaaataagtgagactactgta

SEQ ID NO: 382691 - DNA, 25 bp, Artificial
  probe
  misc_feature (1)..(25): SEQ ID NO: 4435; WAN024AHQ; Start 64; Stop 88
tagcctaaataagtgagactactgt

SEQ ID NO: 382692 - DNA, 25 bp, Artificial
  probe
  misc_feature (1)..(25): SEQ ID NO: 4435; WAN024AHQ; Start 56; Stop 80
actggaaatagcctaaataagtgag

SEQ ID NO: 382693 - DNA, 25 bp, Artificial
  probe
  misc_feature (1)..(25): SEQ ID NO: 4435; WAN024AHQ; Start 59; Stop 83
ggaaatagcctaaataagtgagact

SEQ ID NO: 382694 - DNA, 25 bp, Artificial
  probe
  misc_feature (1)..(25): SEQ ID NO: 4435; WAN024AHQ; Start 66; Stop 90
gcctaaataagtgagactactgtaa

SEQ ID NO: 382695 - DNA, 25 bp, Artificial
  probe
  misc_feature (1)..(25): SEQ ID NO: 4435; WAN024AHQ; Start 73; Stop 97
taagtgagactactgtaatggaata

SEQ ID NO: 382696 - DNA, 25 bp, Artificial
  probe
  misc_feature (1)..(25): SEQ ID NO: 4435; WAN024AHQ; Start 63; Stop 87
atagcctaaataagtgagactactg

SEQ ID NO: 382697 - DNA, 25 bp, Artificial
  probe
  misc_feature (1)..(25): SEQ ID NO: 4435; WAN024AHQ; Start 40; Stop 64
tcttactagagaagctactggaaat

SEQ ID NO: 382698 - DNA, 25 bp, Artificial
  probe
  misc_feature (1)..(25): SEQ ID NO: 4435; WAN024AHQ; Start 75; Stop 99
agtgagactactgtaatggaataaa

SEQ ID NO: 382699 - DNA, 25 bp, Artificial
  probe
  misc_feature (1)..(25): SEQ ID NO: 4435; WAN024AHQ; Start 70; Stop 94
aaataagtgagactactgtaatgga

SEQ ID NO: 382700 - DNA, 25 bp, Artificial
  probe
  misc_feature (1)..(25): SEQ ID NO: 4435; WAN024AHQ; Start 55; Stop 79
tactggaaatagcctaaataagtga

SEQ ID NO: 382701 - DNA, 25 bp, Artificial
  probe
  misc_feature (1)..(25): SEQ ID NO: 4435; WAN024AHQ; Start 54; Stop 78
ctactggaaatagcctaaataagtg

SEQ ID NO: 382702 - DNA, 25 bp, Artificial
  probe
  misc_feature (1)..(25): SEQ ID NO: 4435; WAN024AHQ; Start 62; Stop 86
aatagcctaaataagtgagactact

SEQ ID NO: 382703 - DNA, 25 bp, Artificial
  probe
  misc_feature (1)..(25): SEQ ID NO: 4435; WAN024AHQ; Start 27; Stop 51
aattccagccttttcttactagaga

SEQ ID NO: 382704 - DNA, 25 bp, Artificial
  probe
  misc_feature (1)..(25): SEQ ID NO: 4435; WAN024AHQ; Start 42; Stop 66
ttactagagaagctactggaaatag

SEQ ID NO: 382705 - DNA, 25 bp, Artificial
  probe
  misc_feature (1)..(25): SEQ ID NO: 4435; WAN024AHQ; Start 41; Stop 65
cttactagagaagctactggaaata

SEQ ID NO: 382706 - DNA, 25 bp, Artificial
  probe
  misc_feature (1)..(25): SEQ ID NO: 4435; WAN024AHQ; Start 26; Stop 50
aaattccagccttttcttactagag

SEQ ID NO: 382707 - DNA, 25 bp, Artificial
  probe
  misc_feature (1)..(25): SEQ ID NO: 4435; WAN024AHQ; Start 3; Stop 27
actgaaaagaggttggaactataaa

SEQ ID NO: 382708 - DNA, 25 bp, Artificial
  probe
  misc_feature (1)..(25): SEQ ID NO: 4435; WAN024AHQ; Start 39; Stop 63
ttcttactagagaagctactggaaa

SEQ ID NO: 382709 - DNA, 25 bp, Artificial
  probe
  misc_feature (1)..(25): SEQ ID NO: 4435; WAN024AHQ; Start 38; Stop 62
tttcttactagagaagctactggaa

SEQ ID NO: 382710 - DNA, 25 bp, Artificial
  probe
  misc_feature (1)..(25): SEQ ID NO: 4435; WAN024AHQ; Start 2; Stop 26
aactgaaaagaggttggaactataa

SEQ ID NO: 382711 - DNA, 25 bp, Artificial
  probe
  misc_feature (1)..(25): SEQ ID NO: 4435; WAN024AHQ; Start 61; Stop 85
aaatagcctaaataagtgagactac

SEQ ID NO: 382712 - DNA, 25 bp, Artificial
  probe
  misc_feature (1)..(25): SEQ ID NO: 4435; WAN024AHQ; Start 69; Stop 93
taaataagtgagactactgtaatgg

SEQ ID NO: 382713 - DNA, 25 bp, Artificial
  probe
  misc_feature (1)..(25): SEQ ID NO: 4435; WAN024AHQ; Start 60; Stop 84
gaaatagcctaaataagtgagacta

SEQ ID NO: 382714 - DNA, 25 bp, Artificial
  probe
  misc_feature (1)..(25): SEQ ID NO: 4435; WAN024AHQ; Start 4; Stop 28
ctgaaaagaggttggaactataaaa

SEQ ID NO: 382715 - DNA, 25 bp, Artificial
  probe
  misc_feature (1)..(25): SEQ ID NO: 4435; WAN024AHQ; Start 25; Stop 49
aaaattccagccttttcttactaga

SEQ ID NO: 382716 - DNA, 25 bp, Artificial
  probe
  misc_feature (1)..(25): SEQ ID NO: 4435; WAN024AHQ; Start 1; Stop 25
taactgaaaagaggttggaactata

SEQ ID NO: 382717 - DNA, 25 bp, Artificial
  probe
  misc_feature (1)..(25): SEQ ID NO: 4435; WAN024AHQ; Start 29; Stop 53
ttccagccttttcttactagagaag

SEQ ID NO: 382718 - DNA, 25 bp, Artificial
  probe
  misc_feature (1)..(25): SEQ ID NO: 4436; WAN024AK5; Start 116; Stop 140
cacacaaacaaatactccaagcatt

SEQ ID NO: 382719 - DNA, 25 bp, Artificial
  probe
  misc_feature (1)..(25): SEQ ID NO: 4436; WAN024AK5; Start 113; Stop 137
aaacacacaaacaaatactccaagc

SEQ ID NO: 382720 - DNA, 25 bp, Artificial
  probe
  misc_feature (1)..(25): SEQ ID NO: 4436; WAN024AK5; Start 115; Stop 139
acacacaaacaaatactccaagcat

SEQ ID NO: 382721 - DNA, 25 bp, Artificial
  probe
  misc_feature (1)..(25): SEQ ID NO: 4436; WAN024AK5; Start 114; Stop 138
aacacacaaacaaatactccaagca

SEQ ID NO: 382722 - DNA, 25 bp, Artificial
  probe
  misc_feature (1)..(25): SEQ ID NO: 4436; WAN024AK5; Start 112; Stop 136
taaacacacaaacaaatactccaag

SEQ ID NO: 382723 - DNA, 25 bp, Artificial
  probe
  misc_feature (1)..(25): SEQ ID NO: 4436; WAN024AK5; Start 117; Stop 141
acacaaacaaatactccaagcattt

SEQ ID NO: 382724 - DNA, 25 bp, Artificial
  probe
  misc_feature (1)..(25): SEQ ID NO: 4436; WAN024AK5; Start 111; Stop 135
ataaacacacaaacaaatactccaa

SEQ ID NO: 382725 - DNA, 25 bp, Artificial
  probe
  misc_feature (1)..(25): SEQ ID NO: 4436; WAN024AK5; Start 110; Stop 134
aataaacacacaaacaaatactcca

SEQ ID NO: 382726 - DNA, 25 bp, Artificial
  probe
  misc_feature (1)..(25): SEQ ID NO: 4436; WAN024AK5; Start 109; Stop 133
aaataaacacacaaacaaatactcc

SEQ ID NO: 382727 - DNA, 25 bp, Artificial
  probe
  misc_feature (1)..(25): SEQ ID NO: 4436; WAN024AK5; Start 118; Stop 142
cacaaacaaatactccaagcatttt

SEQ ID NO: 382728 - DNA, 25 bp, Artificial
  probe
  misc_feature (1)..(25): SEQ ID NO: 4436; WAN024AK5; Start 108; Stop 132
aaaataaacacacaaacaaatactc

SEQ ID NO: 382729 - DNA, 25 bp, Artificial
  probe
  misc_feature (1)..(25): SEQ ID NO: 4437; WAN024AD5; Start 132; Stop 156
ttatctgacaccttgtgagtctctc

SEQ ID NO: 382730 - DNA, 25 bp, Artificial
  probe
  misc_feature (1)..(25): SEQ ID NO: 4437; WAN024AD5; Start 133; Stop 157
tatctgacaccttgtgagtctctct

SEQ ID NO: 382731 - DNA, 25 bp, Artificial
  probe
  misc_feature (1)..(25): SEQ ID NO: 4437; WAN024AD5; Start 131; Stop 155
tttatctgacaccttgtgagtctct

SEQ ID NO: 382732 - DNA, 25 bp, Artificial
  probe
  misc_feature (1)..(25): SEQ ID NO: 4437; WAN024AD5; Start 76; Stop 100
gtacaacacaagagagcacactcaa

SEQ ID NO: 382733 - DNA, 25 bp, Artificial
  probe
  misc_feature (1)..(25): SEQ ID NO: 4437; WAN024AD5; Start 72; Stop 96
aatcgtacaacacaagagagcacac

SEQ ID NO: 382734 - DNA, 25 bp, Artificial
  probe
  misc_feature (1)..(25): SEQ ID NO: 4437; WAN024AD5; Start 134; Stop 158
atctgacaccttgtgagtctctctg

SEQ ID NO: 382735 - DNA, 25 bp, Artificial
  probe
  misc_feature (1)..(25): SEQ ID NO: 4437; WAN024AD5; Start 77; Stop 101
tacaacacaagagagcacactcaaa

SEQ ID NO: 382736 - DNA, 25 bp, Artificial
  probe
  misc_feature (1)..(25): SEQ ID NO: 4437; WAN024AD5; Start 71; Stop 95
aaatcgtacaacacaagagagcaca

SEQ ID NO: 382737 - DNA, 25 bp, Artificial
  probe
  misc_feature (1)..(25): SEQ ID NO: 4437; WAN024AD5; Start 22; Stop 46
taaggggaccagataaagaaaagac

SEQ ID NO: 382738 - DNA, 25 bp, Artificial
  probe
  misc_feature (1)..(25): SEQ ID NO: 4437; WAN024AD5; Start 73; Stop 97
atcgtacaacacaagagagcacact

SEQ ID NO: 382739 - DNA, 25 bp, Artificial
  probe
  misc_feature (1)..(25): SEQ ID NO: 4437; WAN024AD5; Start 29; Stop 53
accagataaagaaaagaccttgcta

SEQ ID NO: 382740 - DNA, 25 bp, Artificial
  probe
  misc_feature (1)..(25): SEQ ID NO: 4437; WAN024AD5; Start 21; Stop 45
ttaaggggaccagataaagaaaaga

SEQ ID NO: 382741 - DNA, 25 bp, Artificial
  probe
  misc_feature (1)..(25): SEQ ID NO: 4437; WAN024AD5; Start 28; Stop 52
gaccagataaagaaaagaccttgct

SEQ ID NO: 382742 - DNA, 25 bp, Artificial
  probe
  misc_feature (1)..(25): SEQ ID NO: 4437; WAN024AD5; Start 33; Stop 57
gataaagaaaagaccttgctagtgc

SEQ ID NO: 382743 - DNA, 25 bp, Artificial
  probe
  misc_feature (1)..(25): SEQ ID NO: 4437; WAN024AD5; Start 68; Stop 92
ttaaaatcgtacaacacaagagagc

SEQ ID NO: 382744 - DNA, 25 bp, Artificial
  probe
  misc_feature (1)..(25): SEQ ID NO: 4437; WAN024AD5; Start 26; Stop 50
gggaccagataaagaaaagaccttg

SEQ ID NO: 382745 - DNA, 25 bp, Artificial
  probe
  misc_feature (1)..(25): SEQ ID NO: 4437; WAN024AD5; Start 30; Stop 54
ccagataaagaaaagaccttgctag

SEQ ID NO: 382746 - DNA, 25 bp, Artificial
  probe
  misc_feature (1)..(25): SEQ ID NO: 4437; WAN024AD5; Start 69; Stop 93
taaaatcgtacaacacaagagagca

SEQ ID NO: 382747 - DNA, 25 bp, Artificial
  probe
  misc_feature (1)..(25): SEQ ID NO: 4437; WAN024AD5; Start 62; Stop 86
cctcagttaaaatcgtacaacacaa

SEQ ID NO: 382748 - DNA, 25 bp, Artificial
  probe
  misc_feature (1)..(25): SEQ ID NO: 4437; WAN024AD5; Start 32; Stop 56
agataaagaaaagaccttgctagtg

SEQ ID NO: 382749 - DNA, 25 bp, Artificial
  probe
  misc_feature (1)..(25): SEQ ID NO: 4437; WAN024AD5; Start 31; Stop 55
cagataaagaaaagaccttgctagt

SEQ ID NO: 382750 - DNA, 25 bp, Artificial
  probe
  misc_feature (1)..(25): SEQ ID NO: 4437; WAN024AD5; Start 20; Stop 44
tttaaggggaccagataaagaaaag

SEQ ID NO: 382751 - DNA, 25 bp, Artificial
  probe
  misc_feature (1)..(25): SEQ ID NO: 4437; WAN024AD5; Start 223; Stop 247
acgaatattctacttaacttgcacg

SEQ ID NO: 382752 - DNA, 25 bp, Artificial
  probe
  misc_feature (1)..(25): SEQ ID NO: 4437; WAN024AD5; Start 27; Stop 51
ggaccagataaagaaaagaccttgc

SEQ ID NO: 382753 - DNA, 25 bp, Artificial
  probe
  misc_feature (1)..(25): SEQ ID NO: 4437; WAN024AD5; Start 224; Stop 248
cgaatattctacttaacttgcacga

SEQ ID NO: 382754 - DNA, 25 bp, Artificial
  probe
  misc_feature (1)..(25): SEQ ID NO: 4437; WAN024AD5; Start 23; Stop 47
aaggggaccagataaagaaaagacc

SEQ ID NO: 382755 - DNA, 25 bp, Artificial
  probe
  misc_feature (1)..(25): SEQ ID NO: 4437; WAN024AD5; Start 64; Stop 88
tcagttaaaatcgtacaacacaaga

SEQ ID NO: 382756 - DNA, 25 bp, Artificial
  probe
  misc_feature (1)..(25): SEQ ID NO: 4437; WAN024AD5; Start 127; Stop 151
ttcttttatctgacaccttgtgagt

SEQ ID NO: 382757 - DNA, 25 bp, Artificial
  probe
  misc_feature (1)..(25): SEQ ID NO: 4437; WAN024AD5; Start 130; Stop 154
ttttatctgacaccttgtgagtctc

SEQ ID NO: 382758 - DNA, 25 bp, Artificial
  probe
  misc_feature (1)..(25): SEQ ID NO: 4437; WAN024AD5; Start 129; Stop 153
cttttatctgacaccttgtgagtct

SEQ ID NO: 382759 - DNA, 25 bp, Artificial
  probe
  misc_feature (1)..(25): SEQ ID NO: 4437; WAN024AD5; Start 128; Stop 152
tcttttatctgacaccttgtgagtc

SEQ ID NO: 382760 - DNA, 25 bp, Artificial
  probe
  misc_feature (1)..(25): SEQ ID NO: 4437; WAN024AD5; Start 66; Stop 90
agttaaaatcgtacaacacaagaga

SEQ ID NO: 382761 - DNA, 25 bp, Artificial
  probe
  misc_feature (1)..(25): SEQ ID NO: 4437; WAN024AD5; Start 65; Stop 89
cagttaaaatcgtacaacacaagag

SEQ ID NO: 382762 - DNA, 25 bp, Artificial
  probe
  misc_feature (1)..(25): SEQ ID NO: 4438; WAN0249VJ; Start 74; Stop 98
ttcgttcatagaaaggtagagagaa

SEQ ID NO: 382763 - DNA, 25 bp, Artificial
  probe
  misc_feature (1)..(25): SEQ ID NO: 4438; WAN0249VJ; Start 75; Stop 99
tcgttcatagaaaggtagagagaat

SEQ ID NO: 382764 - DNA, 25 bp, Artificial
  probe
  misc_feature (1)..(25): SEQ ID NO: 4438; WAN0249VJ; Start 73; Stop 97
attcgttcatagaaaggtagagaga

SEQ ID NO: 382765 - DNA, 25 bp, Artificial
  probe
  misc_feature (1)..(25): SEQ ID NO: 4438; WAN0249VJ; Start 66; Stop 90
gaagactattcgttcatagaaaggt

SEQ ID NO: 382766 - DNA, 25 bp, Artificial
  probe
  misc_feature (1)..(25): SEQ ID NO: 4438; WAN0249VJ; Start 65; Stop 89
agaagactattcgttcatagaaagg

SEQ ID NO: 382767 - DNA, 25 bp, Artificial
  probe
  misc_feature (1)..(25): SEQ ID NO: 4438; WAN0249VJ; Start 72; Stop 96
tattcgttcatagaaaggtagagag

SEQ ID NO: 382768 - DNA, 25 bp, Artificial
  probe
  misc_feature (1)..(25): SEQ ID NO: 4438; WAN0249VJ; Start 70; Stop 94
actattcgttcatagaaaggtagag

SEQ ID NO: 382769 - DNA, 25 bp, Artificial
  probe
  misc_feature (1)..(25): SEQ ID NO: 4438; WAN0249VJ; Start 69; Stop 93
gactattcgttcatagaaaggtaga

SEQ ID NO: 382770 - DNA, 25 bp, Artificial
  probe
  misc_feature (1)..(25): SEQ ID NO: 4438; WAN0249VJ; Start 68; Stop 92
agactattcgttcatagaaaggtag

SEQ ID NO: 382771 - DNA, 25 bp, Artificial
  probe
  misc_feature (1)..(25): SEQ ID NO: 4438; WAN0249VJ; Start 57; Stop 81
gattgtaaagaagactattcgttca

SEQ ID NO: 382772 - DNA, 25 bp, Artificial
  probe
  misc_feature (1)..(25): SEQ ID NO: 4438; WAN0249VJ; Start 71; Stop 95
ctattcgttcatagaaaggtagaga

SEQ ID NO: 382773 - DNA, 25 bp, Artificial
  probe
  misc_feature (1)..(25): SEQ ID NO: 4438; WAN0249VJ; Start 56; Stop 80
agattgtaaagaagactattcgttc

SEQ ID NO: 382774 - DNA, 25 bp, Artificial
  probe
  misc_feature (1)..(25): SEQ ID NO: 4438; WAN0249VJ; Start 67; Stop 91
aagactattcgttcatagaaaggta

SEQ ID NO: 382775 - DNA, 25 bp, Artificial
  probe
  misc_feature (1)..(25): SEQ ID NO: 4438; WAN0249VJ; Start 26; Stop 50
aattccacctcttgcttttgtatag

SEQ ID NO: 382776 - DNA, 25 bp, Artificial
  probe
  misc_feature (1)..(25): SEQ ID NO: 4438; WAN0249VJ; Start 27; Stop 51
attccacctcttgcttttgtataga

SEQ ID NO: 382777 - DNA, 25 bp, Artificial
  probe
  misc_feature (1)..(25): SEQ ID NO: 4438; WAN0249VJ; Start 58; Stop 82
attgtaaagaagactattcgttcat

SEQ ID NO: 382778 - DNA, 25 bp, Artificial
  probe
  misc_feature (1)..(25): SEQ ID NO: 4438; WAN0249VJ; Start 25; Stop 49
aaattccacctcttgcttttgtata

SEQ ID NO: 382779 - DNA, 25 bp, Artificial
  probe
  misc_feature (1)..(25): SEQ ID NO: 4438; WAN0249VJ; Start 64; Stop 88
aagaagactattcgttcatagaaag

SEQ ID NO: 382780 - DNA, 25 bp, Artificial
  probe
  misc_feature (1)..(25): SEQ ID NO: 4438; WAN0249VJ; Start 60; Stop 84
tgtaaagaagactattcgttcatag

SEQ ID NO: 382781 - DNA, 25 bp, Artificial
  probe
  misc_feature (1)..(25): SEQ ID NO: 4438; WAN0249VJ; Start 59; Stop 83
ttgtaaagaagactattcgttcata

SEQ ID NO: 382782 - DNA, 25 bp, Artificial
  probe
  misc_feature (1)..(25): SEQ ID NO: 4438; WAN0249VJ; Start 23; Stop 47
gaaaattccacctcttgcttttgta

SEQ ID NO: 382783 - DNA, 25 bp, Artificial
  probe
  misc_feature (1)..(25): SEQ ID NO: 4438; WAN0249VJ; Start 24; Stop 48
aaaattccacctcttgcttttgtat

SEQ ID NO: 382784 - DNA, 25 bp, Artificial
  probe
  misc_feature (1)..(25): SEQ ID NO: 4438; WAN0249VJ; Start 21; Stop 45
gagaaaattccacctcttgcttttg

SEQ ID NO: 382785 - DNA, 25 bp, Artificial
  probe
  misc_feature (1)..(25): SEQ ID NO: 4438; WAN0249VJ; Start 63; Stop 87
aaagaagactattcgttcatagaaa

SEQ ID NO: 382786 - DNA, 25 bp, Artificial
  probe
  misc_feature (1)..(25): SEQ ID NO: 4438; WAN0249VJ; Start 61; Stop 85
gtaaagaagactattcgttcataga

SEQ ID NO: 382787 - DNA, 25 bp, Artificial
  probe
  misc_feature (1)..(25): SEQ ID NO: 4438; WAN0249VJ; Start 22; Stop 46
agaaaattccacctcttgcttttgt

SEQ ID NO: 382788 - DNA, 25 bp, Artificial
  probe
  misc_feature (1)..(25): SEQ ID NO: 4438; WAN0249VJ; Start 55; Stop 79
tagattgtaaagaagactattcgtt

SEQ ID NO: 382789 - DNA, 25 bp, Artificial
  probe
  misc_feature (1)..(25): SEQ ID NO: 4438; WAN0249VJ; Start 1; Stop 25
taagaaacagggaggtgggagagaa

SEQ ID NO: 382790 - DNA, 25 bp, Artificial
  probe
  misc_feature (1)..(25): SEQ ID NO: 4438; WAN0249VJ; Start 62; Stop 86
taaagaagactattcgttcatagaa

SEQ ID NO: 382791 - DNA, 25 bp, Artificial
  probe
  misc_feature (1)..(25): SEQ ID NO: 4438; WAN0249VJ; Start 54; Stop 78
atagattgtaaagaagactattcgt

SEQ ID NO: 382792 - DNA, 25 bp, Artificial
  probe
  misc_feature (1)..(25): SEQ ID NO: 4438; WAN0249VJ; Start 2; Stop 26
aagaaacagggaggtgggagagaaa

SEQ ID NO: 382793 - DNA, 25 bp, Artificial
  probe
  misc_feature (1)..(25): SEQ ID NO: 4438; WAN0249VJ; Start 5; Stop 29
aaacagggaggtgggagagaaaatt

SEQ ID NO: 382794 - DNA, 25 bp, Artificial
  probe
  misc_feature (1)..(25): SEQ ID NO: 4438; WAN0249VJ; Start 30; Stop 54
ccacctcttgcttttgtatagagta

SEQ ID NO: 382795 - DNA, 25 bp, Artificial
  probe
  misc_feature (1)..(25): SEQ ID NO: 4439; WAN024AF2; Start 142; Stop 166
tccatgacgacacctatacgatata

SEQ ID NO: 382796 - DNA, 25 bp, Artificial
  probe
  misc_feature (1)..(25): SEQ ID NO: 4439; WAN024AF2; Start 141; Stop 165
atccatgacgacacctatacgatat

SEQ ID NO: 382797 - DNA, 25 bp, Artificial
  probe
  misc_feature (1)..(25): SEQ ID NO: 4439; WAN024AF2; Start 140; Stop 164
gatccatgacgacacctatacgata

SEQ ID NO: 382798 - DNA, 25 bp, Artificial
  probe
  misc_feature (1)..(25): SEQ ID NO: 4439; WAN024AF2; Start 100; Stop 124
tcatagtattgtgtttgcgtatcct

SEQ ID NO: 382799 - DNA, 25 bp, Artificial
  probe
  misc_feature (1)..(25): SEQ ID NO: 4439; WAN024AF2; Start 99; Stop 123
gtcatagtattgtgtttgcgtatcc

SEQ ID NO: 382800 - DNA, 25 bp, Artificial
  probe
  misc_feature (1)..(25): SEQ ID NO: 4439; WAN024AF2; Start 101; Stop 125
catagtattgtgtttgcgtatcctt

SEQ ID NO: 382801 - DNA, 25 bp, Artificial
  probe
  misc_feature (1)..(25): SEQ ID NO: 4439; WAN024AF2; Start 108; Stop 132
ttgtgtttgcgtatccttaaatcag

SEQ ID NO: 382802 - DNA, 25 bp, Artificial
  probe
  misc_feature (1)..(25): SEQ ID NO: 4439; WAN024AF2; Start 94; Stop 118
attgagtcatagtattgtgtttgcg

SEQ ID NO: 382803 - DNA, 25 bp, Artificial
  probe
  misc_feature (1)..(25): SEQ ID NO: 4439; WAN024AF2; Start 98; Stop 122
agtcatagtattgtgtttgcgtatc

SEQ ID NO: 382804 - DNA, 25 bp, Artificial
  probe
  misc_feature (1)..(25): SEQ ID NO: 4439; WAN024AF2; Start 97; Stop 121
gagtcatagtattgtgtttgcgtat

SEQ ID NO: 382805 - DNA, 25 bp, Artificial
  probe
  misc_feature (1)..(25): SEQ ID NO: 4439; WAN024AF2; Start 96; Stop 120
tgagtcatagtattgtgtttgcgta

SEQ ID NO: 382806 - DNA, 25 bp, Artificial
  probe
  misc_feature (1)..(25): SEQ ID NO: 4439; WAN024AF2; Start 107; Stop 131
attgtgtttgcgtatccttaaatca

SEQ ID NO: 382807 - DNA, 25 bp, Artificial
  probe
  misc_feature (1)..(25): SEQ ID NO: 4439; WAN024AF2; Start 44; Stop 68
aactatttgaagcaggattaggtgg

SEQ ID NO: 382808 - DNA, 25 bp, Artificial
  probe
  misc_feature (1)..(25): SEQ ID NO: 4439; WAN024AF2; Start 104; Stop 128
agtattgtgtttgcgtatccttaaa

SEQ ID NO: 382809 - DNA, 25 bp, Artificial
  probe
  misc_feature (1)..(25): SEQ ID NO: 4439; WAN024AF2; Start 55; Stop 79
gcaggattaggtggtcagaaattaa

SEQ ID NO: 382810 - DNA, 25 bp, Artificial
  probe
  misc_feature (1)..(25): SEQ ID NO: 4439; WAN024AF2; Start 95; Stop 119
ttgagtcatagtattgtgtttgcgt

SEQ ID NO: 382811 - DNA, 25 bp, Artificial
  probe
  misc_feature (1)..(25): SEQ ID NO: 4439; WAN024AF2; Start 46; Stop 70
ctatttgaagcaggattaggtggtc

SEQ ID NO: 382812 - DNA, 25 bp, Artificial
  probe
  misc_feature (1)..(25): SEQ ID NO: 4439; WAN024AF2; Start 43; Stop 67
taactatttgaagcaggattaggtg

SEQ ID NO: 382813 - DNA, 25 bp, Artificial
  probe
  misc_feature (1)..(25): SEQ ID NO: 4439; WAN024AF2; Start 56; Stop 80
caggattaggtggtcagaaattaaa

SEQ ID NO: 382814 - DNA, 25 bp, Artificial
  probe
  misc_feature (1)..(25): SEQ ID NO: 4439; WAN024AF2; Start 145; Stop 169
atgacgacacctatacgatatagtt

SEQ ID NO: 382815 - DNA, 25 bp, Artificial
  probe
  misc_feature (1)..(25): SEQ ID NO: 4439; WAN024AF2; Start 54; Stop 78
agcaggattaggtggtcagaaatta

SEQ ID NO: 382816 - DNA, 25 bp, Artificial
  probe
  misc_feature (1)..(25): SEQ ID NO: 4439; WAN024AF2; Start 143; Stop 167
ccatgacgacacctatacgatatag

SEQ ID NO: 382817 - DNA, 25 bp, Artificial
  probe
  misc_feature (1)..(25): SEQ ID NO: 4439; WAN024AF2; Start 45; Stop 69
actatttgaagcaggattaggtggt

SEQ ID NO: 382818 - DNA, 25 bp, Artificial
  probe
  misc_feature (1)..(25): SEQ ID NO: 4439; WAN024AF2; Start 144; Stop 168
catgacgacacctatacgatatagt

SEQ ID NO: 382819 - DNA, 25 bp, Artificial
  probe
  misc_feature (1)..(25): SEQ ID NO: 4439; WAN024AF2; Start 103; Stop 127
tagtattgtgtttgcgtatccttaa

SEQ ID NO: 382820 - DNA, 25 bp, Artificial
  probe
  misc_feature (1)..(25): SEQ ID NO: 4439; WAN024AF2; Start 105; Stop 129
gtattgtgtttgcgtatccttaaat

SEQ ID NO: 382821 - DNA, 25 bp, Artificial
  probe
  misc_feature (1)..(25): SEQ ID NO: 4439; WAN024AF2; Start 102; Stop 126
atagtattgtgtttgcgtatcctta

SEQ ID NO: 382822 - DNA, 25 bp, Artificial
  probe
  misc_feature (1)..(25): SEQ ID NO: 4439; WAN024AF2; Start 93; Stop 117
aattgagtcatagtattgtgtttgc

SEQ ID NO: 382823 - DNA, 25 bp, Artificial
  probe
  misc_feature (1)..(25): SEQ ID NO: 4439; WAN024AF2; Start 106; Stop 130
tattgtgtttgcgtatccttaaatc

SEQ ID NO: 382824 - DNA, 25 bp, Artificial
  probe
  misc_feature (1)..(25): SEQ ID NO: 4439; WAN024AF2; Start 109; Stop 133
tgtgtttgcgtatccttaaatcagc

SEQ ID NO: 382825 - DNA, 25 bp, Artificial
  probe
  misc_feature (1)..(25): SEQ ID NO: 4439; WAN024AF2; Start 57; Stop 81
aggattaggtggtcagaaattaaat

SEQ ID NO: 382826 - DNA, 25 bp, Artificial
  probe
  misc_feature (1)..(25): SEQ ID NO: 4439; WAN024AF2; Start 53; Stop 77
aagcaggattaggtggtcagaaatt

SEQ ID NO: 382827 - DNA, 25 bp, Artificial
  probe
  misc_feature (1)..(25): SEQ ID NO: 4439; WAN024AF2; Start 47; Stop 71
tatttgaagcaggattaggtggtca

SEQ ID NO: 382828 - DNA, 25 bp, Artificial
  probe
  misc_feature (1)..(25): SEQ ID NO: 4440; WAN0249HK; Start 15; Stop 39
tggacttttctactattttatcaca

SEQ ID NO: 382829 - DNA, 25 bp, Artificial
  probe
  misc_feature (1)..(25): SEQ ID NO: 4440; WAN0249HK; Start 16; Stop 40
ggacttttctactattttatcacaa

SEQ ID NO: 382830 - DNA, 25 bp, Artificial
  probe
  misc_feature (1)..(25): SEQ ID NO: 4440; WAN0249HK; Start 14; Stop 38
ttggacttttctactattttatcac

SEQ ID NO: 382831 - DNA, 25 bp, Artificial
  probe
  misc_feature (1)..(25): SEQ ID NO: 4441; WAN0249Q9; Start 776; Stop 800
cgataagcctaataagcacaacata

SEQ ID NO: 382832 - DNA, 25 bp, Artificial
  probe
  misc_feature (1)..(25): SEQ ID NO: 4441; WAN0249Q9; Start 172; Stop 196
agaggtgattgtgttatgatagtct

SEQ ID NO: 382833 - DNA, 25 bp, Artificial
  probe
  misc_feature (1)..(25): SEQ ID NO: 4441; WAN0249Q9; Start 167; Stop 191
attgaagaggtgattgtgttatgat

SEQ ID NO: 382834 - DNA, 25 bp, Artificial
  probe
  misc_feature (1)..(25): SEQ ID NO: 4441; WAN0249Q9; Start 171; Stop 195
aagaggtgattgtgttatgatagtc

SEQ ID NO: 382835 - DNA, 25 bp, Artificial
  probe
  misc_feature (1)..(25): SEQ ID NO: 4441; WAN0249Q9; Start 170; Stop 194
gaagaggtgattgtgttatgatagt

SEQ ID NO: 382836 - DNA, 25 bp, Artificial
  probe
  misc_feature (1)..(25): SEQ ID NO: 4441; WAN0249Q9; Start 169; Stop 193
tgaagaggtgattgtgttatgatag

SEQ ID NO: 382837 - DNA, 25 bp, Artificial
  probe
  misc_feature (1)..(25): SEQ ID NO: 4441; WAN0249Q9; Start 775; Stop 799
gcgataagcctaataagcacaacat

SEQ ID NO: 382838 - DNA, 25 bp, Artificial
  probe
  misc_feature (1)..(25): SEQ ID NO: 4441; WAN0249Q9; Start 717; Stop 741
atggacacatagtagtaagcacact

SEQ ID NO: 382839 - DNA, 25 bp, Artificial
  probe
  misc_feature (1)..(25): SEQ ID NO: 4441; WAN0249Q9; Start 168; Stop 192
ttgaagaggtgattgtgttatgata

SEQ ID NO: 382840 - DNA, 25 bp, Artificial
  probe
  misc_feature (1)..(25): SEQ ID NO: 4441; WAN0249Q9; Start 166; Stop 190
tattgaagaggtgattgtgttatga

SEQ ID NO: 382841 - DNA, 25 bp, Artificial
  probe
  misc_feature (1)..(25): SEQ ID NO: 4441; WAN0249Q9; Start 714; Stop 738
gacatggacacatagtagtaagcac

SEQ ID NO: 382842 - DNA, 25 bp, Artificial
  probe
  misc_feature (1)..(25): SEQ ID NO: 4441; WAN0249Q9; Start 777; Stop 801
gataagcctaataagcacaacatag

SEQ ID NO: 382843 - DNA, 25 bp, Artificial
  probe
  misc_feature (1)..(25): SEQ ID NO: 4441; WAN0249Q9; Start 173; Stop 197
gaggtgattgtgttatgatagtcta

SEQ ID NO: 382844 - DNA, 25 bp, Artificial
  probe
  misc_feature (1)..(25): SEQ ID NO: 4441; WAN0249Q9; Start 326; Stop 350
tatatgtcataggttcggaactgag

SEQ ID NO: 382845 - DNA, 25 bp, Artificial
  probe
  misc_feature (1)..(25): SEQ ID NO: 4441; WAN0249Q9; Start 716; Stop 740
catggacacatagtagtaagcacac

SEQ ID NO: 382846 - DNA, 25 bp, Artificial
  probe
  misc_feature (1)..(25): SEQ ID NO: 4441; WAN0249Q9; Start 713; Stop 737
tgacatggacacatagtagtaagca

SEQ ID NO: 382847 - DNA, 25 bp, Artificial
  probe
  misc_feature (1)..(25): SEQ ID NO: 4441; WAN0249Q9; Start 585; Stop 609
tgaatctggaatagtccgttatgac

SEQ ID NO: 382848 - DNA, 25 bp, Artificial
  probe
  misc_feature (1)..(25): SEQ ID NO: 4441; WAN0249Q9; Start 584; Stop 608
ttgaatctggaatagtccgttatga

SEQ ID NO: 382849 - DNA, 25 bp, Artificial
  probe
  misc_feature (1)..(25): SEQ ID NO: 4441; WAN0249Q9; Start 327; Stop 351
atatgtcataggttcggaactgagt

SEQ ID NO: 382850 - DNA, 25 bp, Artificial
  probe
  misc_feature (1)..(25): SEQ ID NO: 4441; WAN0249Q9; Start 715; Stop 739
acatggacacatagtagtaagcaca

SEQ ID NO: 382851 - DNA, 25 bp, Artificial
  probe
  misc_feature (1)..(25): SEQ ID NO: 4441; WAN0249Q9; Start 325; Stop 349
atatatgtcataggttcggaactga

SEQ ID NO: 382852 - DNA, 25 bp, Artificial
  probe
  misc_feature (1)..(25): SEQ ID NO: 4441; WAN0249Q9; Start 328; Stop 352
tatgtcataggttcggaactgagtt

SEQ ID NO: 382853 - DNA, 25 bp, Artificial
  probe
  misc_feature (1)..(25): SEQ ID NO: 4441; WAN0249Q9; Start 165; Stop 189
ttattgaagaggtgattgtgttatg

SEQ ID NO: 382854 - DNA, 25 bp, Artificial
  probe
  misc_feature (1)..(25): SEQ ID NO: 4441; WAN0249Q9; Start 718; Stop 742
tggacacatagtagtaagcacacta

SEQ ID NO: 382855 - DNA, 25 bp, Artificial
  probe
  misc_feature (1)..(25): SEQ ID NO: 4441; WAN0249Q9; Start 711; Stop 735
ggtgacatggacacatagtagtaag

SEQ ID NO: 382856 - DNA, 25 bp, Artificial
  probe
  misc_feature (1)..(25): SEQ ID NO: 4441; WAN0249Q9; Start 583; Stop 607
attgaatctggaatagtccgttatg

SEQ ID NO: 382857 - DNA, 25 bp, Artificial
  probe
  misc_feature (1)..(25): SEQ ID NO: 4441; WAN0249Q9; Start 709; Stop 733
atggtgacatggacacatagtagta

SEQ ID NO: 382858 - DNA, 25 bp, Artificial
  probe
  misc_feature (1)..(25): SEQ ID NO: 4441; WAN0249Q9; Start 174; Stop 198
aggtgattgtgttatgatagtctaa

SEQ ID NO: 382859 - DNA, 25 bp, Artificial
  probe
  misc_feature (1)..(25): SEQ ID NO: 4441; WAN0249Q9; Start 710; Stop 734
tggtgacatggacacatagtagtaa

SEQ ID NO: 382860 - DNA, 25 bp, Artificial
  probe
  misc_feature (1)..(25): SEQ ID NO: 4441; WAN0249Q9; Start 677; Stop 701
ctatactttctcgttaaaccgttcg

SEQ ID NO: 382861 - DNA, 25 bp, Artificial
  probe
  misc_feature (1)..(25): SEQ ID NO: 4441; WAN0249Q9; Start 582; Stop 606
gattgaatctggaatagtccgttat

SEQ ID NO: 382862 - DNA, 25 bp, Artificial
  probe
  misc_feature (1)..(25): SEQ ID NO: 4441; WAN0249Q9; Start 712; Stop 736
gtgacatggacacatagtagtaagc

SEQ ID NO: 382863 - DNA, 25 bp, Artificial
  probe
  misc_feature (1)..(25): SEQ ID NO: 4441; WAN0249Q9; Start 131; Stop 155
tcaatgcttcagaatagtatttcgc

SEQ ID NO: 382864 - DNA, 25 bp, Artificial
  probe
  misc_feature (1)..(25): SEQ ID NO: 4443; WAN0249J2; Start 80; Stop 104
agttgtataataggtttgttgaaag

SEQ ID NO: 382865 - DNA, 25 bp, Artificial
  probe
  misc_feature (1)..(25): SEQ ID NO: 4443; WAN0249J2; Start 55; Stop 79
gccatacttgcaattcaactcaaat

SEQ ID NO: 382866 - DNA, 25 bp, Artificial
  probe
  misc_feature (1)..(25): SEQ ID NO: 4443; WAN0249J2; Start 56; Stop 80
ccatacttgcaattcaactcaaata

SEQ ID NO: 382867 - DNA, 25 bp, Artificial
  probe
  misc_feature (1)..(25): SEQ ID NO: 4443; WAN0249J2; Start 54; Stop 78
ggccatacttgcaattcaactcaaa

SEQ ID NO: 382868 - DNA, 25 bp, Artificial
  probe
  misc_feature (1)..(25): SEQ ID NO: 4443; WAN0249J2; Start 58; Stop 82
atacttgcaattcaactcaaatagt

SEQ ID NO: 382869 - DNA, 25 bp, Artificial
  probe
  misc_feature (1)..(25): SEQ ID NO: 4443; WAN0249J2; Start 57; Stop 81
catacttgcaattcaactcaaatag

SEQ ID NO: 382870 - DNA, 25 bp, Artificial
  probe
  misc_feature (1)..(25): SEQ ID NO: 4443; WAN0249J2; Start 59; Stop 83
tacttgcaattcaactcaaatagtt

SEQ ID NO: 382871 - DNA, 25 bp, Artificial
  probe
  misc_feature (1)..(25): SEQ ID NO: 4444; WAN0249JN; Start 30; Stop 54
aaatcaggaaatcttctcgattccc

SEQ ID NO: 382872 - DNA, 25 bp, Artificial
  probe
  misc_feature (1)..(25): SEQ ID NO: 4444; WAN0249JN; Start 35; Stop 59
aggaaatcttctcgattccctgatt

SEQ ID NO: 382873 - DNA, 25 bp, Artificial
  probe
  misc_feature (1)..(25): SEQ ID NO: 4444; WAN0249JN; Start 31; Stop 55
aatcaggaaatcttctcgattccct

SEQ ID NO: 382874 - DNA, 25 bp, Artificial
  probe
  misc_feature (1)..(25): SEQ ID NO: 4444; WAN0249JN; Start 36; Stop 60
ggaaatcttctcgattccctgattt

SEQ ID NO: 382875 - DNA, 25 bp, Artificial
  probe
  misc_feature (1)..(25): SEQ ID NO: 4444; WAN0249JN; Start 34; Stop 58
caggaaatcttctcgattccctgat

SEQ ID NO: 382876 - DNA, 25 bp, Artificial
  probe
  misc_feature (1)..(25): SEQ ID NO: 4444; WAN0249JN; Start 32; Stop 56
atcaggaaatcttctcgattccctg

SEQ ID NO: 382877 - DNA, 25 bp, Artificial
  probe
  misc_feature (1)..(25): SEQ ID NO: 4444; WAN0249JN; Start 37; Stop 61
gaaatcttctcgattccctgatttt

SEQ ID NO: 382878 - DNA, 25 bp, Artificial
  probe
  misc_feature (1)..(25): SEQ ID NO: 4445; WAN024CNB-M; Start 1681; Stop 1705
aatcaatcaatactacaggagacgg

SEQ ID NO: 382879 - DNA, 25 bp, Artificial
  probe
  misc_feature (1)..(25): SEQ ID NO: 4445; WAN024CNB-M; Start 1494; Stop 1518
gactatacagcgataacgaataacg

SEQ ID NO: 382880 - DNA, 25 bp, Artificial
  probe
  misc_feature (1)..(25): SEQ ID NO: 4445; WAN024CNB-M; Start 929; Stop 953
cgtagatgttggagatggttatgtt

SEQ ID NO: 382881 - DNA, 25 bp, Artificial
  probe
  misc_feature (1)..(25): SEQ ID NO: 4445; WAN024CNB-M; Start 816; Stop 840
atatctaattcggttgctactggag

SEQ ID NO: 382882 - DNA, 25 bp, Artificial
  probe
  misc_feature (1)..(25): SEQ ID NO: 4445; WAN024CNB-M; Start 1491; Stop 1515
tcagactatacagcgataacgaata

SEQ ID NO: 382883 - DNA, 25 bp, Artificial
  probe
  misc_feature (1)..(25): SEQ ID NO: 4445; WAN024CNB-M; Start 1490; Stop 1514
ttcagactatacagcgataacgaat

SEQ ID NO: 382884 - DNA, 25 bp, Artificial
  probe
  misc_feature (1)..(25): SEQ ID NO: 4445; WAN024CNB-M; Start 1682; Stop 1706
atcaatcaatactacaggagacggt

SEQ ID NO: 382885 - DNA, 25 bp, Artificial
  probe
  misc_feature (1)..(25): SEQ ID NO: 4445; WAN024CNB-M; Start 325; Stop 349
ataagcagacaagttatctcacagg

SEQ ID NO: 382886 - DNA, 25 bp, Artificial
  probe
  misc_feature (1)..(25): SEQ ID NO: 4445; WAN024CNB-M; Start 934; Stop 958
atgttggagatggttatgttatcac

SEQ ID NO: 382887 - DNA, 25 bp, Artificial
  probe
  misc_feature (1)..(25): SEQ ID NO: 4445; WAN024CNB-M; Start 933; Stop 957
gatgttggagatggttatgttatca

SEQ ID NO: 382888 - DNA, 25 bp, Artificial
  probe
  misc_feature (1)..(25): SEQ ID NO: 4445; WAN024CNB-M; Start 279; Stop 303
tatacattggcttcagatatgaccg

SEQ ID NO: 382889 - DNA, 25 bp, Artificial
  probe
  misc_feature (1)..(25): SEQ ID NO: 4445; WAN024CNB-M; Start 817; Stop 841
tatctaattcggttgctactggaga

SEQ ID NO: 382890 - DNA, 25 bp, Artificial
  probe
  misc_feature (1)..(25): SEQ ID NO: 4445; WAN024CNB-M; Start 1493; Stop 1517
agactatacagcgataacgaataac

SEQ ID NO: 382891 - DNA, 25 bp, Artificial
  probe
  misc_feature (1)..(25): SEQ ID NO: 4445; WAN024CNB-M; Start 1492; Stop 1516
cagactatacagcgataacgaataa

SEQ ID NO: 382892 - DNA, 25 bp, Artificial
  probe
  misc_feature (1)..(25): SEQ ID NO: 4445; WAN024CNB-M; Start 932; Stop 956
agatgttggagatggttatgttatc

SEQ ID NO: 382893 - DNA, 25 bp, Artificial
  probe
  misc_feature (1)..(25): SEQ ID NO: 4445; WAN024CNB-M; Start 865; Stop 889
ctagagtcggaggaatagtaggatc

SEQ ID NO: 382894 - DNA, 25 bp, Artificial
  probe
  misc_feature (1)..(25): SEQ ID NO: 4445; WAN024CNB-M; Start 1282; Stop 1306
aattgttagatgttgtgccgatgaa

SEQ ID NO: 382895 - DNA, 25 bp, Artificial
  probe
  misc_feature (1)..(25): SEQ ID NO: 4445; WAN024CNB-M; Start 326; Stop 350
taagcagacaagttatctcacaggt

SEQ ID NO: 382896 - DNA, 25 bp, Artificial
  probe
  misc_feature (1)..(25): SEQ ID NO: 4445; WAN024CNB-M; Start 278; Stop 302
ctatacattggcttcagatatgacc

SEQ ID NO: 382897 - DNA, 25 bp, Artificial
  probe
  misc_feature (1)..(25): SEQ ID NO: 4445; WAN024CNB-M; Start 1276; Stop 1300
ctacagaattgttagatgttgtgcc

SEQ ID NO: 382898 - DNA, 25 bp, Artificial
  probe
  misc_feature (1)..(25): SEQ ID NO: 4445; WAN024CNB-M; Start 273; Stop 297
ggtgtctatacattggcttcagata

SEQ ID NO: 382899 - DNA, 25 bp, Artificial
  probe
  misc_feature (1)..(25): SEQ ID NO: 4445; WAN024CNB-M; Start 264; Stop 288
aatctgtctggtgtctatacattgg

SEQ ID NO: 382900 - DNA, 25 bp, Artificial
  probe
  misc_feature (1)..(25): SEQ ID NO: 4445; WAN024CNB-M; Start 1683; Stop 1707
tcaatcaatactacaggagacggtg

SEQ ID NO: 382901 - DNA, 25 bp, Artificial
  probe
  misc_feature (1)..(25): SEQ ID NO: 4445; WAN024CNB-M; Start 1590; Stop 1614
gcagccttagataacctatacttag

SEQ ID NO: 382902 - DNA, 25 bp, Artificial
  probe
  misc_feature (1)..(25): SEQ ID NO: 4445; WAN024CNB-M; Start 1275; Stop 1299
actacagaattgttagatgttgtgc

SEQ ID NO: 382903 - DNA, 25 bp, Artificial
  probe
  misc_feature (1)..(25): SEQ ID NO: 4445; WAN024CNB-M; Start 930; Stop 954
gtagatgttggagatggttatgtta

SEQ ID NO: 382904 - DNA, 25 bp, Artificial
  probe
  misc_feature (1)..(25): SEQ ID NO: 4445; WAN024CNB-M; Start 262; Stop 286
gcaatctgtctggtgtctatacatt

SEQ ID NO: 382905 - DNA, 25 bp, Artificial
  probe
  misc_feature (1)..(25): SEQ ID NO: 4445; WAN024CNB-M; Start 818; Stop 842
atctaattcggttgctactggagaa

SEQ ID NO: 382906 - DNA, 25 bp, Artificial
  probe
  misc_feature (1)..(25): SEQ ID NO: 4445; WAN024CNB-M; Start 867; Stop 891
agagtcggaggaatagtaggatcta

SEQ ID NO: 382907 - DNA, 25 bp, Artificial
  probe
  misc_feature (1)..(25): SEQ ID NO: 4445; WAN024CNB-M; Start 866; Stop 890
tagagtcggaggaatagtaggatct

SEQ ID NO: 382908 - DNA, 25 bp, Artificial
  probe
  misc_feature (1)..(25): SEQ ID NO: 4445; WAN024CNB-M; Start 1281; Stop 1305
gaattgttagatgttgtgccgatga

SEQ ID NO: 382909 - DNA, 25 bp, Artificial
  probe
  misc_feature (1)..(25): SEQ ID NO: 4445; WAN024CNB-M; Start 1280; Stop 1304
agaattgttagatgttgtgccgatg

SEQ ID NO: 382910 - DNA, 25 bp, Artificial
  probe
  misc_feature (1)..(25): SEQ ID NO: 4445; WAN024CNB-M; Start 1279; Stop 1303
cagaattgttagatgttgtgccgat

SEQ ID NO: 382911 - DNA, 25 bp, Artificial
  probe
  misc_feature (1)..(25): SEQ ID NO: 4446; WAN024AOZ; Start 74; Stop 98
aatatccgctgatacatcattctgc

SEQ ID NO: 382912 - DNA, 25 bp, Artificial
  probe
  misc_feature (1)..(25): SEQ ID NO: 4446; WAN024AOZ; Start 75; Stop 99
atatccgctgatacatcattctgct

SEQ ID NO: 382913 - DNA, 25 bp, Artificial
  probe
  misc_feature (1)..(25): SEQ ID NO: 4446; WAN024AOZ; Start 76; Stop 100
tatccgctgatacatcattctgctt

SEQ ID NO: 382914 - DNA, 25 bp, Artificial
  probe
  misc_feature (1)..(25): SEQ ID NO: 4446; WAN024AOZ; Start 102; Stop 126
tacacttgggctgaaatatgataaa

SEQ ID NO: 382915 - DNA, 25 bp, Artificial
  probe
  misc_feature (1)..(25): SEQ ID NO: 4446; WAN024AOZ; Start 101; Stop 125
ttacacttgggctgaaatatgataa

SEQ ID NO: 382916 - DNA, 25 bp, Artificial
  probe
  misc_feature (1)..(25): SEQ ID NO: 4446; WAN024AOZ; Start 100; Stop 124
tttacacttgggctgaaatatgata

SEQ ID NO: 382917 - DNA, 25 bp, Artificial
  probe
  misc_feature (1)..(25): SEQ ID NO: 4446; WAN024AOZ; Start 40; Stop 64
attgtgggtataacatcgtttgaaa

SEQ ID NO: 382918 - DNA, 25 bp, Artificial
  probe
  misc_feature (1)..(25): SEQ ID NO: 4446; WAN024AOZ; Start 68; Stop 92
agagtaaatatccgctgatacatca

SEQ ID NO: 382919 - DNA, 25 bp, Artificial
  probe
  misc_feature (1)..(25): SEQ ID NO: 4446; WAN024AOZ; Start 39; Stop 63
tattgtgggtataacatcgtttgaa

SEQ ID NO: 382920 - DNA, 25 bp, Artificial
  probe
  misc_feature (1)..(25): SEQ ID NO: 4446; WAN024AOZ; Start 38; Stop 62
ttattgtgggtataacatcgtttga

SEQ ID NO: 382921 - DNA, 25 bp, Artificial
  probe
  misc_feature (1)..(25): SEQ ID NO: 4446; WAN024AOZ; Start 73; Stop 97
aaatatccgctgatacatcattctg

SEQ ID NO: 382922 - DNA, 25 bp, Artificial
  probe
  misc_feature (1)..(25): SEQ ID NO: 4446; WAN024AOZ; Start 69; Stop 93
gagtaaatatccgctgatacatcat

SEQ ID NO: 382923 - DNA, 25 bp, Artificial
  probe
  misc_feature (1)..(25): SEQ ID NO: 4446; WAN024AOZ; Start 37; Stop 61
tttattgtgggtataacatcgtttg

SEQ ID NO: 382924 - DNA, 25 bp, Artificial
  probe
  misc_feature (1)..(25): SEQ ID NO: 4446; WAN024AOZ; Start 67; Stop 91
tagagtaaatatccgctgatacatc

SEQ ID NO: 382925 - DNA, 25 bp, Artificial
  probe
  misc_feature (1)..(25): SEQ ID NO: 4446; WAN024AOZ; Start 70; Stop 94
agtaaatatccgctgatacatcatt

SEQ ID NO: 382926 - DNA, 25 bp, Artificial
  probe
  misc_feature (1)..(25): SEQ ID NO: 4446; WAN024AOZ; Start 71; Stop 95
gtaaatatccgctgatacatcattc

SEQ ID NO: 382927 - DNA, 25 bp, Artificial
  probe
  misc_feature (1)..(25): SEQ ID NO: 4446; WAN024AOZ; Start 72; Stop 96
taaatatccgctgatacatcattct

SEQ ID NO: 382928 - DNA, 25 bp, Artificial
  probe
  misc_feature (1)..(25): SEQ ID NO: 4446; WAN024AOZ; Start 77; Stop 101
atccgctgatacatcattctgcttt

SEQ ID NO: 382929 - DNA, 25 bp, Artificial
  probe
  misc_feature (1)..(25): SEQ ID NO: 4446; WAN024AOZ; Start 86; Stop 110
tacatcattctgcttttacacttgg

SEQ ID NO: 382930 - DNA, 25 bp, Artificial
  probe
  misc_feature (1)..(25): SEQ ID NO: 4446; WAN024AOZ; Start 98; Stop 122
cttttacacttgggctgaaatatga

SEQ ID NO: 382931 - DNA, 25 bp, Artificial
  probe
  misc_feature (1)..(25): SEQ ID NO: 4446; WAN024AOZ; Start 65; Stop 89
aatagagtaaatatccgctgataca

SEQ ID NO: 382932 - DNA, 25 bp, Artificial
  probe
  misc_feature (1)..(25): SEQ ID NO: 4446; WAN024AOZ; Start 97; Stop 121
gcttttacacttgggctgaaatatg

SEQ ID NO: 382933 - DNA, 25 bp, Artificial
  probe
  misc_feature (1)..(25): SEQ ID NO: 4446; WAN024AOZ; Start 103; Stop 127
acacttgggctgaaatatgataaaa

SEQ ID NO: 382934 - DNA, 25 bp, Artificial
  probe
  misc_feature (1)..(25): SEQ ID NO: 4446; WAN024AOZ; Start 99; Stop 123
ttttacacttgggctgaaatatgat

SEQ ID NO: 382935 - DNA, 25 bp, Artificial
  probe
  misc_feature (1)..(25): SEQ ID NO: 4446; WAN024AOZ; Start 96; Stop 120
tgcttttacacttgggctgaaatat

SEQ ID NO: 382936 - DNA, 25 bp, Artificial
  probe
  misc_feature (1)..(25): SEQ ID NO: 4446; WAN024AOZ; Start 66; Stop 90
atagagtaaatatccgctgatacat

SEQ ID NO: 382937 - DNA, 25 bp, Artificial
  probe
  misc_feature (1)..(25): SEQ ID NO: 4446; WAN024AOZ; Start 95; Stop 119
ctgcttttacacttgggctgaaata

SEQ ID NO: 382938 - DNA, 25 bp, Artificial
  probe
  misc_feature (1)..(25): SEQ ID NO: 4446; WAN024AOZ; Start 87; Stop 111
acatcattctgcttttacacttggg

SEQ ID NO: 382939 - DNA, 25 bp, Artificial
  probe
  misc_feature (1)..(25): SEQ ID NO: 4446; WAN024AOZ; Start 41; Stop 65
ttgtgggtataacatcgtttgaaaa

SEQ ID NO: 382940 - DNA, 25 bp, Artificial
  probe
  misc_feature (1)..(25): SEQ ID NO: 4446; WAN024AOZ; Start 81; Stop 105
gctgatacatcattctgcttttaca

SEQ ID NO: 382941 - DNA, 25 bp, Artificial
  probe
  misc_feature (1)..(25): SEQ ID NO: 4446; WAN024AOZ; Start 85; Stop 109
atacatcattctgcttttacacttg

SEQ ID NO: 382942 - DNA, 25 bp, Artificial
  probe
  misc_feature (1)..(25): SEQ ID NO: 4446; WAN024AOZ; Start 80; Stop 104
cgctgatacatcattctgcttttac

SEQ ID NO: 382943 - DNA, 25 bp, Artificial
  probe
  misc_feature (1)..(25): SEQ ID NO: 4446; WAN024AOZ; Start 104; Stop 128
cacttgggctgaaatatgataaaat

SEQ ID NO: 382944 - DNA, 25 bp, Artificial
  probe
  misc_feature (1)..(25): SEQ ID NO: 4447; WAN0249ZZ; Start 130; Stop 154
caataacggagtatagtcggctgaa

SEQ ID NO: 382945 - DNA, 25 bp, Artificial
  probe
  misc_feature (1)..(25): SEQ ID NO: 4447; WAN0249ZZ; Start 141; Stop 165
tatagtcggctgaaacaagaatagg

SEQ ID NO: 382946 - DNA, 25 bp, Artificial
  probe
  misc_feature (1)..(25): SEQ ID NO: 4447; WAN0249ZZ; Start 139; Stop 163
agtatagtcggctgaaacaagaata

SEQ ID NO: 382947 - DNA, 25 bp, Artificial
  probe
  misc_feature (1)..(25): SEQ ID NO: 4447; WAN0249ZZ; Start 140; Stop 164
gtatagtcggctgaaacaagaatag

SEQ ID NO: 382948 - DNA, 25 bp, Artificial
  probe
  misc_feature (1)..(25): SEQ ID NO: 4447; WAN0249ZZ; Start 138; Stop 162
gagtatagtcggctgaaacaagaat

SEQ ID NO: 382949 - DNA, 25 bp, Artificial
  probe
  misc_feature (1)..(25): SEQ ID NO: 4447; WAN0249ZZ; Start 142; Stop 166
atagtcggctgaaacaagaatagga

SEQ ID NO: 382950 - DNA, 25 bp, Artificial
  probe
  misc_feature (1)..(25): SEQ ID NO: 4447; WAN0249ZZ; Start 25; Stop 49
ggtatctaccgagattgtcaattct

SEQ ID NO: 382951 - DNA, 25 bp, Artificial
  probe
  misc_feature (1)..(25): SEQ ID NO: 4447; WAN0249ZZ; Start 24; Stop 48
aggtatctaccgagattgtcaattc

SEQ ID NO: 382952 - DNA, 25 bp, Artificial
  probe
  misc_feature (1)..(25): SEQ ID NO: 4447; WAN0249ZZ; Start 23; Stop 47
gaggtatctaccgagattgtcaatt

SEQ ID NO: 382953 - DNA, 25 bp, Artificial
  probe
  misc_feature (1)..(25): SEQ ID NO: 4447; WAN0249ZZ; Start 131; Stop 155
aataacggagtatagtcggctgaaa

SEQ ID NO: 382954 - DNA, 25 bp, Artificial
  probe
  misc_feature (1)..(25): SEQ ID NO: 4447; WAN0249ZZ; Start 18; Stop 42
ataacgaggtatctaccgagattgt

SEQ ID NO: 382955 - DNA, 25 bp, Artificial
  probe
  misc_feature (1)..(25): SEQ ID NO: 4447; WAN0249ZZ; Start 17; Stop 41
tataacgaggtatctaccgagattg

SEQ ID NO: 382956 - DNA, 25 bp, Artificial
  probe
  misc_feature (1)..(25): SEQ ID NO: 4447; WAN0249ZZ; Start 15; Stop 39
gctataacgaggtatctaccgagat

SEQ ID NO: 382957 - DNA, 25 bp, Artificial
  probe
  misc_feature (1)..(25): SEQ ID NO: 4447; WAN0249ZZ; Start 16; Stop 40
ctataacgaggtatctaccgagatt

SEQ ID NO: 382958 - DNA, 25 bp, Artificial
  probe
  misc_feature (1)..(25): SEQ ID NO: 4447; WAN0249ZZ; Start 19; Stop 43
taacgaggtatctaccgagattgtc

SEQ ID NO: 382959 - DNA, 25 bp, Artificial
  probe
  misc_feature (1)..(25): SEQ ID NO: 4447; WAN0249ZZ; Start 132; Stop 156
ataacggagtatagtcggctgaaac

SEQ ID NO: 382960 - DNA, 25 bp, Artificial
  probe
  misc_feature (1)..(25): SEQ ID NO: 4447; WAN0249ZZ; Start 137; Stop 161
ggagtatagtcggctgaaacaagaa

SEQ ID NO: 382961 - DNA, 25 bp, Artificial
  probe
  misc_feature (1)..(25): SEQ ID NO: 4447; WAN0249ZZ; Start 22; Stop 46
cgaggtatctaccgagattgtcaat

SEQ ID NO: 382962 - DNA, 25 bp, Artificial
  probe
  misc_feature (1)..(25): SEQ ID NO: 4447; WAN0249ZZ; Start 129; Stop 153
ccaataacggagtatagtcggctga

SEQ ID NO: 382963 - DNA, 25 bp, Artificial
  probe
  misc_feature (1)..(25): SEQ ID NO: 4447; WAN0249ZZ; Start 146; Stop 170
tcggctgaaacaagaataggacaaa

SEQ ID NO: 382964 - DNA, 25 bp, Artificial
  probe
  misc_feature (1)..(25): SEQ ID NO: 4447; WAN0249ZZ; Start 33; Stop 57
ccgagattgtcaattctccagtata

SEQ ID NO: 382965 - DNA, 25 bp, Artificial
  probe
  misc_feature (1)..(25): SEQ ID NO: 4447; WAN0249ZZ; Start 27; Stop 51
tatctaccgagattgtcaattctcc

SEQ ID NO: 382966 - DNA, 25 bp, Artificial
  probe
  misc_feature (1)..(25): SEQ ID NO: 4447; WAN0249ZZ; Start 14; Stop 38
cgctataacgaggtatctaccgaga

SEQ ID NO: 382967 - DNA, 25 bp, Artificial
  probe
  misc_feature (1)..(25): SEQ ID NO: 4447; WAN0249ZZ; Start 143; Stop 167
tagtcggctgaaacaagaataggac

SEQ ID NO: 382968 - DNA, 25 bp, Artificial
  probe
  misc_feature (1)..(25): SEQ ID NO: 4447; WAN0249ZZ; Start 31; Stop 55
taccgagattgtcaattctccagta

SEQ ID NO: 382969 - DNA, 25 bp, Artificial
  probe
  misc_feature (1)..(25): SEQ ID NO: 4447; WAN0249ZZ; Start 26; Stop 50
gtatctaccgagattgtcaattctc

SEQ ID NO: 382970 - DNA, 25 bp, Artificial
  probe
  misc_feature (1)..(25): SEQ ID NO: 4447; WAN0249ZZ; Start 21; Stop 45
acgaggtatctaccgagattgtcaa

SEQ ID NO: 382971 - DNA, 25 bp, Artificial
  probe
  misc_feature (1)..(25): SEQ ID NO: 4447; WAN0249ZZ; Start 20; Stop 44
aacgaggtatctaccgagattgtca

SEQ ID NO: 382972 - DNA, 25 bp, Artificial
  probe
  misc_feature (1)..(25): SEQ ID NO: 4447; WAN0249ZZ; Start 28; Stop 52
atctaccgagattgtcaattctcca

SEQ ID NO: 382973 - DNA, 25 bp, Artificial
  probe
  misc_feature (1)..(25): SEQ ID NO: 4447; WAN0249ZZ; Start 1; Stop 25
taataagtaaccgcgctataacgag

SEQ ID NO: 382974 - DNA, 25 bp, Artificial
  probe
  misc_feature (1)..(25): SEQ ID NO: 4447; WAN0249ZZ; Start 133; Stop 157
taacggagtatagtcggctgaaaca

SEQ ID NO: 382975 - DNA, 25 bp, Artificial
  probe
  misc_feature (1)..(25): SEQ ID NO: 4447; WAN0249ZZ; Start 151; Stop 175
tgaaacaagaataggacaaaagtgc

SEQ ID NO: 382976 - DNA, 25 bp, Artificial
  probe
  misc_feature (1)..(25): SEQ ID NO: 4447; WAN0249ZZ; Start 149; Stop 173
gctgaaacaagaataggacaaaagt

SEQ ID NO: 382977 - DNA, 25 bp, Artificial
  probe
  misc_feature (1)..(25): SEQ ID NO: 4448; WAN024A6Z; Start 66; Stop 90
ttcaatcaagagaggattctgttcc

SEQ ID NO: 382978 - DNA, 25 bp, Artificial
  probe
  misc_feature (1)..(25): SEQ ID NO: 4448; WAN024A6Z; Start 65; Stop 89
cttcaatcaagagaggattctgttc

SEQ ID NO: 382979 - DNA, 25 bp, Artificial
  probe
  misc_feature (1)..(25): SEQ ID NO: 4448; WAN024A6Z; Start 48; Stop 72
cctaatgactagcttgtcttcaatc

SEQ ID NO: 382980 - DNA, 25 bp, Artificial
  probe
  misc_feature (1)..(25): SEQ ID NO: 4448; WAN024A6Z; Start 35; Stop 59
aaagacaaaccagcctaatgactag

SEQ ID NO: 382981 - DNA, 25 bp, Artificial
  probe
  misc_feature (1)..(25): SEQ ID NO: 4448; WAN024A6Z; Start 47; Stop 71
gcctaatgactagcttgtcttcaat

SEQ ID NO: 382982 - DNA, 25 bp, Artificial
  probe
  misc_feature (1)..(25): SEQ ID NO: 4448; WAN024A6Z; Start 63; Stop 87
gtcttcaatcaagagaggattctgt

SEQ ID NO: 382983 - DNA, 25 bp, Artificial
  probe
  misc_feature (1)..(25): SEQ ID NO: 4448; WAN024A6Z; Start 62; Stop 86
tgtcttcaatcaagagaggattctg

SEQ ID NO: 382984 - DNA, 25 bp, Artificial
  probe
  misc_feature (1)..(25): SEQ ID NO: 4448; WAN024A6Z; Start 64; Stop 88
tcttcaatcaagagaggattctgtt

SEQ ID NO: 382985 - DNA, 25 bp, Artificial
  probe
  misc_feature (1)..(25): SEQ ID NO: 4448; WAN024A6Z; Start 61; Stop 85
ttgtcttcaatcaagagaggattct

SEQ ID NO: 382986 - DNA, 25 bp, Artificial
  probe
  misc_feature (1)..(25): SEQ ID NO: 4448; WAN024A6Z; Start 49; Stop 73
ctaatgactagcttgtcttcaatca

SEQ ID NO: 382987 - DNA, 25 bp, Artificial
  probe
  misc_feature (1)..(25): SEQ ID NO: 4448; WAN024A6Z; Start 50; Stop 74
taatgactagcttgtcttcaatcaa

SEQ ID NO: 382988 - DNA, 25 bp, Artificial
  probe
  misc_feature (1)..(25): SEQ ID NO: 4448; WAN024A6Z; Start 46; Stop 70
agcctaatgactagcttgtcttcaa

SEQ ID NO: 382989 - DNA, 25 bp, Artificial
  probe
  misc_feature (1)..(25): SEQ ID NO: 4448; WAN024A6Z; Start 60; Stop 84
cttgtcttcaatcaagagaggattc

SEQ ID NO: 382990 - DNA, 25 bp, Artificial
  probe
  misc_feature (1)..(25): SEQ ID NO: 4448; WAN024A6Z; Start 36; Stop 60
aagacaaaccagcctaatgactagc

SEQ ID NO: 382991 - DNA, 25 bp, Artificial
  probe
  misc_feature (1)..(25): SEQ ID NO: 4448; WAN024A6Z; Start 59; Stop 83
gcttgtcttcaatcaagagaggatt

SEQ ID NO: 382992 - DNA, 25 bp, Artificial
  probe
  misc_feature (1)..(25): SEQ ID NO: 4448; WAN024A6Z; Start 67; Stop 91
tcaatcaagagaggattctgttccc

SEQ ID NO: 382993 - DNA, 25 bp, Artificial
  probe
  misc_feature (1)..(25): SEQ ID NO: 4448; WAN024A6Z; Start 34; Stop 58
aaaagacaaaccagcctaatgacta

SEQ ID NO: 382994 - DNA, 25 bp, Artificial
  probe
  misc_feature (1)..(25): SEQ ID NO: 4448; WAN024A6Z; Start 45; Stop 69
cagcctaatgactagcttgtcttca

SEQ ID NO: 382995 - DNA, 25 bp, Artificial
  probe
  misc_feature (1)..(25): SEQ ID NO: 4448; WAN024A6Z; Start 52; Stop 76
atgactagcttgtcttcaatcaaga

SEQ ID NO: 382996 - DNA, 25 bp, Artificial
  probe
  misc_feature (1)..(25): SEQ ID NO: 4448; WAN024A6Z; Start 55; Stop 79
actagcttgtcttcaatcaagagag

SEQ ID NO: 382997 - DNA, 25 bp, Artificial
  probe
  misc_feature (1)..(25): SEQ ID NO: 4448; WAN024A6Z; Start 54; Stop 78
gactagcttgtcttcaatcaagaga

SEQ ID NO: 382998 - DNA, 25 bp, Artificial
  probe
  misc_feature (1)..(25): SEQ ID NO: 4448; WAN024A6Z; Start 53; Stop 77
tgactagcttgtcttcaatcaagag

SEQ ID NO: 382999 - DNA, 25 bp, Artificial
  probe
  misc_feature (1)..(25): SEQ ID NO: 4448; WAN024A6Z; Start 5; Stop 29
actattatatcaacccactacagtt

SEQ ID NO: 383000 - DNA, 25 bp, Artificial
  probe
  misc_feature (1)..(25): SEQ ID NO: 4448; WAN024A6Z; Start 51; Stop 75
aatgactagcttgtcttcaatcaag

SEQ ID NO: 383001 - DNA, 25 bp, Artificial
  probe
  misc_feature (1)..(25): SEQ ID NO: 4448; WAN024A6Z; Start 56; Stop 80
ctagcttgtcttcaatcaagagagg

SEQ ID NO: 383002 - DNA, 25 bp, Artificial
  probe
  misc_feature (1)..(25): SEQ ID NO: 4448; WAN024A6Z; Start 57; Stop 81
tagcttgtcttcaatcaagagagga

SEQ ID NO: 383003 - DNA, 25 bp, Artificial
  probe
  misc_feature (1)..(25): SEQ ID NO: 4448; WAN024A6Z; Start 58; Stop 82
agcttgtcttcaatcaagagaggat

SEQ ID NO: 383004 - DNA, 25 bp, Artificial
  probe
  misc_feature (1)..(25): SEQ ID NO: 4448; WAN024A6Z; Start 44; Stop 68
ccagcctaatgactagcttgtcttc

SEQ ID NO: 383005 - DNA, 25 bp, Artificial
  probe
  misc_feature (1)..(25): SEQ ID NO: 4448; WAN024A6Z; Start 4; Stop 28
tactattatatcaacccactacagt

SEQ ID NO: 383006 - DNA, 25 bp, Artificial
  probe
  misc_feature (1)..(25): SEQ ID NO: 4448; WAN024A6Z; Start 43; Stop 67
accagcctaatgactagcttgtctt

SEQ ID NO: 383007 - DNA, 25 bp, Artificial
  probe
  misc_feature (1)..(25): SEQ ID NO: 4448; WAN024A6Z; Start 42; Stop 66
aaccagcctaatgactagcttgtct

SEQ ID NO: 383008 - DNA, 25 bp, Artificial
  probe
  misc_feature (1)..(25): SEQ ID NO: 4448; WAN024A6Z; Start 41; Stop 65
aaaccagcctaatgactagcttgtc

SEQ ID NO: 383009 - DNA, 25 bp, Artificial
  probe
  misc_feature (1)..(25): SEQ ID NO: 4448; WAN024A6Z; Start 38; Stop 62
gacaaaccagcctaatgactagctt

SEQ ID NO: 383010 - DNA, 25 bp, Artificial
  probe
  misc_feature (1)..(25): SEQ ID NO: 4449; WAN0249E8; Start 70; Stop 94
ccagtctcactcgattagaataatt

SEQ ID NO: 383011 - DNA, 25 bp, Artificial
  probe
  misc_feature (1)..(25): SEQ ID NO: 4449; WAN0249E8; Start 69; Stop 93
cccagtctcactcgattagaataat

SEQ ID NO: 383012 - DNA, 25 bp, Artificial
  probe
  misc_feature (1)..(25): SEQ ID NO: 4449; WAN0249E8; Start 124; Stop 148
gtgcatttaggagactatacttcaa

SEQ ID NO: 383013 - DNA, 25 bp, Artificial
  probe
  misc_feature (1)..(25): SEQ ID NO: 4449; WAN0249E8; Start 123; Stop 147
agtgcatttaggagactatacttca

SEQ ID NO: 383014 - DNA, 25 bp, Artificial
  probe
  misc_feature (1)..(25): SEQ ID NO: 4449; WAN0249E8; Start 118; Stop 142
ggctaagtgcatttaggagactata

SEQ ID NO: 383015 - DNA, 25 bp, Artificial
  probe
  misc_feature (1)..(25): SEQ ID NO: 4449; WAN0249E8; Start 111; Stop 135
taataagggctaagtgcatttagga

SEQ ID NO: 383016 - DNA, 25 bp, Artificial
  probe
  misc_feature (1)..(25): SEQ ID NO: 4449; WAN0249E8; Start 112; Stop 136
aataagggctaagtgcatttaggag

SEQ ID NO: 383017 - DNA, 25 bp, Artificial
  probe
  misc_feature (1)..(25): SEQ ID NO: 4449; WAN0249E8; Start 119; Stop 143
gctaagtgcatttaggagactatac

SEQ ID NO: 383018 - DNA, 25 bp, Artificial
  probe
  misc_feature (1)..(25): SEQ ID NO: 4449; WAN0249E8; Start 113; Stop 137
ataagggctaagtgcatttaggaga

SEQ ID NO: 383019 - DNA, 25 bp, Artificial
  probe
  misc_feature (1)..(25): SEQ ID NO: 4449; WAN0249E8; Start 110; Stop 134
ataataagggctaagtgcatttagg

SEQ ID NO: 383020 - DNA, 25 bp, Artificial
  probe
  misc_feature (1)..(25): SEQ ID NO: 4449; WAN0249E8; Start 125; Stop 149
tgcatttaggagactatacttcaaa

SEQ ID NO: 383021 - DNA, 25 bp, Artificial
  probe
  misc_feature (1)..(25): SEQ ID NO: 4449; WAN0249E8; Start 107; Stop 131
cctataataagggctaagtgcattt

SEQ ID NO: 383022 - DNA, 25 bp, Artificial
  probe
  misc_feature (1)..(25): SEQ ID NO: 4449; WAN0249E8; Start 126; Stop 150
gcatttaggagactatacttcaaat

SEQ ID NO: 383023 - DNA, 25 bp, Artificial
  probe
  misc_feature (1)..(25): SEQ ID NO: 4449; WAN0249E8; Start 117; Stop 141
gggctaagtgcatttaggagactat

SEQ ID NO: 383024 - DNA, 25 bp, Artificial
  probe
  misc_feature (1)..(25): SEQ ID NO: 4449; WAN0249E8; Start 114; Stop 138
taagggctaagtgcatttaggagac

SEQ ID NO: 383025 - DNA, 25 bp, Artificial
  probe
  misc_feature (1)..(25): SEQ ID NO: 4449; WAN0249E8; Start 71; Stop 95
cagtctcactcgattagaataatta

SEQ ID NO: 383026 - DNA, 25 bp, Artificial
  probe
  misc_feature (1)..(25): SEQ ID NO: 4449; WAN0249E8; Start 120; Stop 144
ctaagtgcatttaggagactatact

SEQ ID NO: 383027 - DNA, 25 bp, Artificial
  probe
  misc_feature (1)..(25): SEQ ID NO: 4449; WAN0249E8; Start 116; Stop 140
agggctaagtgcatttaggagacta

SEQ ID NO: 383028 - DNA, 25 bp, Artificial
  probe
  misc_feature (1)..(25): SEQ ID NO: 4449; WAN0249E8; Start 108; Stop 132
ctataataagggctaagtgcattta

SEQ ID NO: 383029 - DNA, 25 bp, Artificial
  probe
  misc_feature (1)..(25): SEQ ID NO: 4449; WAN0249E8; Start 68; Stop 92
ccccagtctcactcgattagaataa

SEQ ID NO: 383030 - DNA, 25 bp, Artificial
  probe
  misc_feature (1)..(25): SEQ ID NO: 4449; WAN0249E8; Start 122; Stop 146
aagtgcatttaggagactatacttc

SEQ ID NO: 383031 - DNA, 25 bp, Artificial
  probe
  misc_feature (1)..(25): SEQ ID NO: 4449; WAN0249E8; Start 72; Stop 96
agtctcactcgattagaataattaa

SEQ ID NO: 383032 - DNA, 25 bp, Artificial
  probe
  misc_feature (1)..(25): SEQ ID NO: 4449; WAN0249E8; Start 129; Stop 153
tttaggagactatacttcaaattca

SEQ ID NO: 383033 - DNA, 25 bp, Artificial
  probe
  misc_feature (1)..(25): SEQ ID NO: 4449; WAN0249E8; Start 115; Stop 139
aagggctaagtgcatttaggagact

SEQ ID NO: 383034 - DNA, 25 bp, Artificial
  probe
  misc_feature (1)..(25): SEQ ID NO: 4449; WAN0249E8; Start 109; Stop 133
tataataagggctaagtgcatttag

SEQ ID NO: 383035 - DNA, 25 bp, Artificial
  probe
  misc_feature (1)..(25): SEQ ID NO: 4449; WAN0249E8; Start 130; Stop 154
ttaggagactatacttcaaattcat

SEQ ID NO: 383036 - DNA, 25 bp, Artificial
  probe
  misc_feature (1)..(25): SEQ ID NO: 4449; WAN0249E8; Start 121; Stop 145
taagtgcatttaggagactatactt

SEQ ID NO: 383037 - DNA, 25 bp, Artificial
  probe
  misc_feature (1)..(25): SEQ ID NO: 4450; WAN024ARX; Start 18; Stop 42
tacttttggtctctcaagagtgtac

SEQ ID NO: 383038 - DNA, 25 bp, Artificial
  probe
  misc_feature (1)..(25): SEQ ID NO: 4450; WAN024ARX; Start 16; Stop 40
tttacttttggtctctcaagagtgt

SEQ ID NO: 383039 - DNA, 25 bp, Artificial
  probe
  misc_feature (1)..(25): SEQ ID NO: 4450; WAN024ARX; Start 17; Stop 41
ttacttttggtctctcaagagtgta

SEQ ID NO: 383040 - DNA, 25 bp, Artificial
  probe
  misc_feature (1)..(25): SEQ ID NO: 4450; WAN024ARX; Start 15; Stop 39
ttttacttttggtctctcaagagtg

SEQ ID NO: 383041 - DNA, 25 bp, Artificial
  probe
  misc_feature (1)..(25): SEQ ID NO: 4450; WAN024ARX; Start 20; Stop 44
cttttggtctctcaagagtgtacag

SEQ ID NO: 383042 - DNA, 25 bp, Artificial
  probe
  misc_feature (1)..(25): SEQ ID NO: 4450; WAN024ARX; Start 22; Stop 46
tttggtctctcaagagtgtacaggg

SEQ ID NO: 383043 - DNA, 25 bp, Artificial
  probe
  misc_feature (1)..(25): SEQ ID NO: 4450; WAN024ARX; Start 19; Stop 43
acttttggtctctcaagagtgtaca

SEQ ID NO: 383044 - DNA, 25 bp, Artificial
  probe
  misc_feature (1)..(25): SEQ ID NO: 4450; WAN024ARX; Start 21; Stop 45
ttttggtctctcaagagtgtacagg

SEQ ID NO: 383045 - DNA, 25 bp, Artificial
  probe
  misc_feature (1)..(25): SEQ ID NO: 4450; WAN024ARX; Start 23; Stop 47
ttggtctctcaagagtgtacaggga

SEQ ID NO: 383046 - DNA, 25 bp, Artificial
  probe
  misc_feature (1)..(25): SEQ ID NO: 4450; WAN024ARX; Start 24; Stop 48
tggtctctcaagagtgtacagggac

SEQ ID NO: 383047 - DNA, 25 bp, Artificial
  probe
  misc_feature (1)..(25): SEQ ID NO: 4451; WAN0249F7; Start 27; Stop 51
aatatctgaaaagttcccaggatcg

SEQ ID NO: 383048 - DNA, 25 bp, Artificial
  probe
  misc_feature (1)..(25): SEQ ID NO: 4451; WAN0249F7; Start 26; Stop 50
aaatatctgaaaagttcccaggatc

SEQ ID NO: 383049 - DNA, 25 bp, Artificial
  probe
  misc_feature (1)..(25): SEQ ID NO: 4451; WAN0249F7; Start 25; Stop 49
aaaatatctgaaaagttcccaggat

SEQ ID NO: 383050 - DNA, 25 bp, Artificial
  probe
  misc_feature (1)..(25): SEQ ID NO: 4451; WAN0249F7; Start 28; Stop 52
atatctgaaaagttcccaggatcgt

SEQ ID NO: 383051 - DNA, 25 bp, Artificial
  probe
  misc_feature (1)..(25): SEQ ID NO: 4451; WAN0249F7; Start 29; Stop 53
tatctgaaaagttcccaggatcgtc

SEQ ID NO: 383052 - DNA, 25 bp, Artificial
  probe
  misc_feature (1)..(25): SEQ ID NO: 4451; WAN0249F7; Start 30; Stop 54
atctgaaaagttcccaggatcgtcg

SEQ ID NO: 383053 - DNA, 25 bp, Artificial
  probe
  misc_feature (1)..(25): SEQ ID NO: 4451; WAN0249F7; Start 86; Stop 110
aattaaaataaatttcaggggagtt

SEQ ID NO: 383054 - DNA, 25 bp, Artificial
  probe
  misc_feature (1)..(25): SEQ ID NO: 4451; WAN0249F7; Start 82; Stop 106
gcataattaaaataaatttcagggg

SEQ ID NO: 383055 - DNA, 25 bp, Artificial
  probe
  misc_feature (1)..(25): SEQ ID NO: 4452; WAN0249KT; Start 23; Stop 47
aatctaactatcagccttacaggtt

SEQ ID NO: 383056 - DNA, 25 bp, Artificial
  probe
  misc_feature (1)..(25): SEQ ID NO: 4452; WAN0249KT; Start 22; Stop 46
taatctaactatcagccttacaggt

SEQ ID NO: 383057 - DNA, 25 bp, Artificial
  probe
  misc_feature (1)..(25): SEQ ID NO: 4452; WAN0249KT; Start 25; Stop 49
tctaactatcagccttacaggttat

SEQ ID NO: 383058 - DNA, 25 bp, Artificial
  probe
  misc_feature (1)..(25): SEQ ID NO: 4452; WAN0249KT; Start 24; Stop 48
atctaactatcagccttacaggtta

SEQ ID NO: 383059 - DNA, 25 bp, Artificial
  probe
  misc_feature (1)..(25): SEQ ID NO: 4452; WAN0249KT; Start 26; Stop 50
ctaactatcagccttacaggttatt

SEQ ID NO: 383060 - DNA, 25 bp, Artificial
  probe
  misc_feature (1)..(25): SEQ ID NO: 4452; WAN0249KT; Start 21; Stop 45
ttaatctaactatcagccttacagg

SEQ ID NO: 383061 - DNA, 25 bp, Artificial
  probe
  misc_feature (1)..(25): SEQ ID NO: 4452; WAN0249KT; Start 31; Stop 55
tatcagccttacaggttatttaacg

SEQ ID NO: 383062 - DNA, 25 bp, Artificial
  probe
  misc_feature (1)..(25): SEQ ID NO: 4452; WAN0249KT; Start 32; Stop 56
atcagccttacaggttatttaacgt

SEQ ID NO: 383063 - DNA, 25 bp, Artificial
  probe
  misc_feature (1)..(25): SEQ ID NO: 4452; WAN0249KT; Start 29; Stop 53
actatcagccttacaggttatttaa

SEQ ID NO: 383064 - DNA, 25 bp, Artificial
  probe
  misc_feature (1)..(25): SEQ ID NO: 4452; WAN0249KT; Start 28; Stop 52
aactatcagccttacaggttattta

SEQ ID NO: 383065 - DNA, 25 bp, Artificial
  probe
  misc_feature (1)..(25): SEQ ID NO: 4452; WAN0249KT; Start 30; Stop 54
ctatcagccttacaggttatttaac

SEQ ID NO: 383066 - DNA, 25 bp, Artificial
  probe
  misc_feature (1)..(25): SEQ ID NO: 4452; WAN0249KT; Start 27; Stop 51
taactatcagccttacaggttattt

SEQ ID NO: 383067 - DNA, 25 bp, Artificial
  probe
  misc_feature (1)..(25): SEQ ID NO: 4452; WAN0249KT; Start 20; Stop 44
attaatctaactatcagccttacag

SEQ ID NO: 383068 - DNA, 25 bp, Artificial
  probe
  misc_feature (1)..(25): SEQ ID NO: 4452; WAN0249KT; Start 36; Stop 60
gccttacaggttatttaacgtttca

SEQ ID NO: 383069 - DNA, 25 bp, Artificial
  probe
  misc_feature (1)..(25): SEQ ID NO: 4452; WAN0249KT; Start 34; Stop 58
cagccttacaggttatttaacgttt

SEQ ID NO: 383070 - DNA, 25 bp, Artificial
  probe
  misc_feature (1)..(25): SEQ ID NO: 4452; WAN0249KT; Start 35; Stop 59
agccttacaggttatttaacgtttc

SEQ ID NO: 383071 - DNA, 25 bp, Artificial
  probe
  misc_feature (1)..(25): SEQ ID NO: 4452; WAN0249KT; Start 33; Stop 57
tcagccttacaggttatttaacgtt

SEQ ID NO: 383072 - DNA, 25 bp, Artificial
  probe
  misc_feature (1)..(25): SEQ ID NO: 4452; WAN0249KT; Start 37; Stop 61
ccttacaggttatttaacgtttcag

SEQ ID NO: 383073 - DNA, 25 bp, Artificial
  probe
  misc_feature (1)..(25): SEQ ID NO: 4452; WAN0249KT; Start 38; Stop 62
cttacaggttatttaacgtttcaga

SEQ ID NO: 383074 - DNA, 25 bp, Artificial
  probe
  misc_feature (1)..(25): SEQ ID NO: 4452; WAN0249KT; Start 40; Stop 64
tacaggttatttaacgtttcagaaa

SEQ ID NO: 383075 - DNA, 25 bp, Artificial
  probe
  misc_feature (1)..(25): SEQ ID NO: 4452; WAN0249KT; Start 39; Stop 63
ttacaggttatttaacgtttcagaa

SEQ ID NO: 383076 - DNA, 25 bp, Artificial
  probe
  misc_feature (1)..(25): SEQ ID NO: 4452; WAN0249KT; Start 41; Stop 65
acaggttatttaacgtttcagaaaa

SEQ ID NO: 383077 - DNA, 25 bp, Artificial
  probe
  misc_feature (1)..(25): SEQ ID NO: 4453; WAN024AMR; Start 8; Stop 32
ttactcctttcctaacaaatccagc

SEQ ID NO: 383078 - DNA, 25 bp, Artificial
  probe
  misc_feature (1)..(25): SEQ ID NO: 4453; WAN024AMR; Start 7; Stop 31
tttactcctttcctaacaaatccag

SEQ ID NO: 383079 - DNA, 25 bp, Artificial
  probe
  misc_feature (1)..(25): SEQ ID NO: 4453; WAN024AMR; Start 121; Stop 145
tcatccaaatcttgaattgtcatcg

SEQ ID NO: 383080 - DNA, 25 bp, Artificial
  probe
  misc_feature (1)..(25): SEQ ID NO: 4453; WAN024AMR; Start 239; Stop 263
ttcatcctgctatcacatatcattt

SEQ ID NO: 383081 - DNA, 25 bp, Artificial
  probe
  misc_feature (1)..(25): SEQ ID NO: 4453; WAN024AMR; Start 238; Stop 262
tttcatcctgctatcacatatcatt

SEQ ID NO: 383082 - DNA, 25 bp, Artificial
  probe
  misc_feature (1)..(25): SEQ ID NO: 4453; WAN024AMR; Start 215; Stop 239
tgataccaacttgtttgtagacttt

SEQ ID NO: 383083 - DNA, 25 bp, Artificial
  probe
  misc_feature (1)..(25): SEQ ID NO: 4453; WAN024AMR; Start 214; Stop 238
ttgataccaacttgtttgtagactt

SEQ ID NO: 383084 - DNA, 25 bp, Artificial
  probe
  misc_feature (1)..(25): SEQ ID NO: 4453; WAN024AMR; Start 213; Stop 237
attgataccaacttgtttgtagact

SEQ ID NO: 383085 - DNA, 25 bp, Artificial
  probe
  misc_feature (1)..(25): SEQ ID NO: 4453; WAN024AMR; Start 264; Stop 288
tgacaggcgaaacaatattaaagaa

SEQ ID NO: 383086 - DNA, 25 bp, Artificial
  probe
  misc_feature (1)..(25): SEQ ID NO: 4453; WAN024AMR; Start 270; Stop 294
gcgaaacaatattaaagaaactccc

SEQ ID NO: 383087 - DNA, 25 bp, Artificial
  probe
  misc_feature (1)..(25): SEQ ID NO: 4453; WAN024AMR; Start 269; Stop 293
ggcgaaacaatattaaagaaactcc

SEQ ID NO: 383088 - DNA, 25 bp, Artificial
  probe
  misc_feature (1)..(25): SEQ ID NO: 4453; WAN024AMR; Start 12; Stop 36
tcctttcctaacaaatccagcttat

SEQ ID NO: 383089 - DNA, 25 bp, Artificial
  probe
  misc_feature (1)..(25): SEQ ID NO: 4453; WAN024AMR; Start 13; Stop 37
cctttcctaacaaatccagcttatc

SEQ ID NO: 383090 - DNA, 25 bp, Artificial
  probe
  misc_feature (1)..(25): SEQ ID NO: 4453; WAN024AMR; Start 11; Stop 35
ctcctttcctaacaaatccagctta

SEQ ID NO: 383091 - DNA, 25 bp, Artificial
  probe
  misc_feature (1)..(25): SEQ ID NO: 4453; WAN024AMR; Start 263; Stop 287
ttgacaggcgaaacaatattaaaga

SEQ ID NO: 383092 - DNA, 25 bp, Artificial
  probe
  misc_feature (1)..(25): SEQ ID NO: 4453; WAN024AMR; Start 266; Stop 290
acaggcgaaacaatattaaagaaac

SEQ ID NO: 383093 - DNA, 25 bp, Artificial
  probe
  misc_feature (1)..(25): SEQ ID NO: 4453; WAN024AMR; Start 18; Stop 42
cctaacaaatccagcttatcaatca

SEQ ID NO: 383094 - DNA, 25 bp, Artificial
  probe
  misc_feature (1)..(25): SEQ ID NO: 4453; WAN024AMR; Start 14; Stop 38
ctttcctaacaaatccagcttatca

SEQ ID NO: 383095 - DNA, 25 bp, Artificial
  probe
  misc_feature (1)..(25): SEQ ID NO: 4453; WAN024AMR; Start 22; Stop 46
acaaatccagcttatcaatcaagag

SEQ ID NO: 383096 - DNA, 25 bp, Artificial
  probe
  misc_feature (1)..(25): SEQ ID NO: 4453; WAN024AMR; Start 17; Stop 41
tcctaacaaatccagcttatcaatc

SEQ ID NO: 383097 - DNA, 25 bp, Artificial
  probe
  misc_feature (1)..(25): SEQ ID NO: 4453; WAN024AMR; Start 6; Stop 30
atttactcctttcctaacaaatcca

SEQ ID NO: 383098 - DNA, 25 bp, Artificial
  probe
  misc_feature (1)..(25): SEQ ID NO: 4453; WAN024AMR; Start 267; Stop 291
caggcgaaacaatattaaagaaact

SEQ ID NO: 383099 - DNA, 25 bp, Artificial
  probe
  misc_feature (1)..(25): SEQ ID NO: 4453; WAN024AMR; Start 265; Stop 289
gacaggcgaaacaatattaaagaaa

SEQ ID NO: 383100 - DNA, 25 bp, Artificial
  probe
  misc_feature (1)..(25): SEQ ID NO: 4453; WAN024AMR; Start 21; Stop 45
aacaaatccagcttatcaatcaaga

SEQ ID NO: 383101 - DNA, 25 bp, Artificial
  probe
  misc_feature (1)..(25): SEQ ID NO: 4453; WAN024AMR; Start 262; Stop 286
tttgacaggcgaaacaatattaaag

SEQ ID NO: 383102 - DNA, 25 bp, Artificial
  probe
  misc_feature (1)..(25): SEQ ID NO: 4453; WAN024AMR; Start 15; Stop 39
tttcctaacaaatccagcttatcaa

SEQ ID NO: 383103 - DNA, 25 bp, Artificial
  probe
  misc_feature (1)..(25): SEQ ID NO: 4453; WAN024AMR; Start 9; Stop 33
tactcctttcctaacaaatccagct

SEQ ID NO: 383104 - DNA, 25 bp, Artificial
  probe
  misc_feature (1)..(25): SEQ ID NO: 4453; WAN024AMR; Start 268; Stop 292
aggcgaaacaatattaaagaaactc

SEQ ID NO: 383105 - DNA, 25 bp, Artificial
  probe
  misc_feature (1)..(25): SEQ ID NO: 4453; WAN024AMR; Start 122; Stop 146
catccaaatcttgaattgtcatcga

SEQ ID NO: 383106 - DNA, 25 bp, Artificial
  probe
  misc_feature (1)..(25): SEQ ID NO: 4453; WAN024AMR; Start 16; Stop 40
ttcctaacaaatccagcttatcaat

SEQ ID NO: 383107 - DNA, 25 bp, Artificial
  probe
  misc_feature (1)..(25): SEQ ID NO: 4453; WAN024AMR; Start 125; Stop 149
ccaaatcttgaattgtcatcgaaac

SEQ ID NO: 383108 - DNA, 25 bp, Artificial
  probe
  misc_feature (1)..(25): SEQ ID NO: 4453; WAN024AMR; Start 124; Stop 148
tccaaatcttgaattgtcatcgaaa

SEQ ID NO: 383109 - DNA, 25 bp, Artificial
  probe
  misc_feature (1)..(25): SEQ ID NO: 4453; WAN024AMR; Start 123; Stop 147
atccaaatcttgaattgtcatcgaa

SEQ ID NO: 383110 - DNA, 25 bp, Artificial
  probe
  misc_feature (1)..(25): SEQ ID NO: 4454; WAN0249UX; Start 316; Stop 340
cgaagggctatttactttctattcc

SEQ ID NO: 383111 - DNA, 25 bp, Artificial
  probe
  misc_feature (1)..(25): SEQ ID NO: 4454; WAN0249UX; Start 279; Stop 303
gcatataacctttagttgacagacc

SEQ ID NO: 383112 - DNA, 25 bp, Artificial
  probe
  misc_feature (1)..(25): SEQ ID NO: 4454; WAN0249UX; Start 285; Stop 309
aacctttagttgacagacctattct

SEQ ID NO: 383113 - DNA, 25 bp, Artificial
  probe
  misc_feature (1)..(25): SEQ ID NO: 4454; WAN0249UX; Start 290; Stop 314
ttagttgacagacctattctaagtc

SEQ ID NO: 383114 - DNA, 25 bp, Artificial
  probe
  misc_feature (1)..(25): SEQ ID NO: 4454; WAN0249UX; Start 64; Stop 88
caattcaaaggattcatactagcca

SEQ ID NO: 383115 - DNA, 25 bp, Artificial
  probe
  misc_feature (1)..(25): SEQ ID NO: 4454; WAN0249UX; Start 63; Stop 87
acaattcaaaggattcatactagcc

SEQ ID NO: 383116 - DNA, 25 bp, Artificial
  probe
  misc_feature (1)..(25): SEQ ID NO: 4454; WAN0249UX; Start 286; Stop 310
acctttagttgacagacctattcta

SEQ ID NO: 383117 - DNA, 25 bp, Artificial
  probe
  misc_feature (1)..(25): SEQ ID NO: 4454; WAN0249UX; Start 65; Stop 89
aattcaaaggattcatactagccat

SEQ ID NO: 383118 - DNA, 25 bp, Artificial
  probe
  misc_feature (1)..(25): SEQ ID NO: 4454; WAN0249UX; Start 91; Stop 115
aattacgtccatcagagagagactc

SEQ ID NO: 383119 - DNA, 25 bp, Artificial
  probe
  misc_feature (1)..(25): SEQ ID NO: 4454; WAN0249UX; Start 284; Stop 308
taacctttagttgacagacctattc

SEQ ID NO: 383120 - DNA, 25 bp, Artificial
  probe
  misc_feature (1)..(25): SEQ ID NO: 4454; WAN0249UX; Start 280; Stop 304
catataacctttagttgacagacct

SEQ ID NO: 383121 - DNA, 25 bp, Artificial
  probe
  misc_feature (1)..(25): SEQ ID NO: 4454; WAN0249UX; Start 68; Stop 92
tcaaaggattcatactagccataaa

SEQ ID NO: 383122 - DNA, 25 bp, Artificial
  probe
  misc_feature (1)..(25): SEQ ID NO: 4454; WAN0249UX; Start 67; Stop 91
ttcaaaggattcatactagccataa

SEQ ID NO: 383123 - DNA, 25 bp, Artificial
  probe
  misc_feature (1)..(25): SEQ ID NO: 4454; WAN0249UX; Start 312; Stop 336
gtctcgaagggctatttactttcta

SEQ ID NO: 383124 - DNA, 25 bp, Artificial
  probe
  misc_feature (1)..(25): SEQ ID NO: 4454; WAN0249UX; Start 306; Stop 330
ttctaagtctcgaagggctatttac

SEQ ID NO: 383125 - DNA, 25 bp, Artificial
  probe
  misc_feature (1)..(25): SEQ ID NO: 4454; WAN0249UX; Start 303; Stop 327
ctattctaagtctcgaagggctatt

SEQ ID NO: 383126 - DNA, 25 bp, Artificial
  probe
  misc_feature (1)..(25): SEQ ID NO: 4454; WAN0249UX; Start 62; Stop 86
aacaattcaaaggattcatactagc

SEQ ID NO: 383127 - DNA, 25 bp, Artificial
  probe
  misc_feature (1)..(25): SEQ ID NO: 4454; WAN0249UX; Start 99; Stop 123
ccatcagagagagactcttactact

SEQ ID NO: 383128 - DNA, 25 bp, Artificial
  probe
  misc_feature (1)..(25): SEQ ID NO: 4454; WAN0249UX; Start 98; Stop 122
tccatcagagagagactcttactac

SEQ ID NO: 383129 - DNA, 25 bp, Artificial
  probe
  misc_feature (1)..(25): SEQ ID NO: 4454; WAN0249UX; Start 97; Stop 121
gtccatcagagagagactcttacta

SEQ ID NO: 383130 - DNA, 25 bp, Artificial
  probe
  misc_feature (1)..(25): SEQ ID NO: 4454; WAN0249UX; Start 86; Stop 110
ccataaattacgtccatcagagaga

SEQ ID NO: 383131 - DNA, 25 bp, Artificial
  probe
  misc_feature (1)..(25): SEQ ID NO: 4454; WAN0249UX; Start 83; Stop 107
tagccataaattacgtccatcagag

SEQ ID NO: 383132 - DNA, 25 bp, Artificial
  probe
  misc_feature (1)..(25): SEQ ID NO: 4454; WAN0249UX; Start 82; Stop 106
ctagccataaattacgtccatcaga

SEQ ID NO: 383133 - DNA, 25 bp, Artificial
  probe
  misc_feature (1)..(25): SEQ ID NO: 4454; WAN0249UX; Start 313; Stop 337
tctcgaagggctatttactttctat

SEQ ID NO: 383134 - DNA, 25 bp, Artificial
  probe
  misc_feature (1)..(25): SEQ ID NO: 4454; WAN0249UX; Start 305; Stop 329
attctaagtctcgaagggctattta

SEQ ID NO: 383135 - DNA, 25 bp, Artificial
  probe
  misc_feature (1)..(25): SEQ ID NO: 4454; WAN0249UX; Start 304; Stop 328
tattctaagtctcgaagggctattt

SEQ ID NO: 383136 - DNA, 25 bp, Artificial
  probe
  misc_feature (1)..(25): SEQ ID NO: 4454; WAN0249UX; Start 81; Stop 105
actagccataaattacgtccatcag

SEQ ID NO: 383137 - DNA, 25 bp, Artificial
  probe
  misc_feature (1)..(25): SEQ ID NO: 4454; WAN0249UX; Start 73; Stop 97
ggattcatactagccataaattacg

SEQ ID NO: 383138 - DNA, 25 bp, Artificial
  probe
  misc_feature (1)..(25): SEQ ID NO: 4454; WAN0249UX; Start 66; Stop 90
attcaaaggattcatactagccata

SEQ ID NO: 383139 - DNA, 25 bp, Artificial
  probe
  misc_feature (1)..(25): SEQ ID NO: 4454; WAN0249UX; Start 80; Stop 104
tactagccataaattacgtccatca

SEQ ID NO: 383140 - DNA, 25 bp, Artificial
  probe
  misc_feature (1)..(25): SEQ ID NO: 4454; WAN0249UX; Start 77; Stop 101
tcatactagccataaattacgtcca

SEQ ID NO: 383141 - DNA, 25 bp, Artificial
  probe
  misc_feature (1)..(25): SEQ ID NO: 4454; WAN0249UX; Start 283; Stop 307
ataacctttagttgacagacctatt

SEQ ID NO: 383142 - DNA, 25 bp, Artificial
  probe
  misc_feature (1)..(25): SEQ ID NO: 4454; WAN0249UX; Start 307; Stop 331
tctaagtctcgaagggctatttact

SEQ ID NO: 383143 - DNA, 25 bp, Artificial
  probe
  misc_feature (1)..(25): SEQ ID NO: 4455; WAN024AB6; Start 91; Stop 115
tttaatggcaaatacagcacagaat

SEQ ID NO: 383144 - DNA, 25 bp, Artificial
  probe
  misc_feature (1)..(25): SEQ ID NO: 4455; WAN024AB6; Start 92; Stop 116
ttaatggcaaatacagcacagaatt

SEQ ID NO: 383145 - DNA, 25 bp, Artificial
  probe
  misc_feature (1)..(25): SEQ ID NO: 4455; WAN024AB6; Start 95; Stop 119
atggcaaatacagcacagaatttaa

SEQ ID NO: 383146 - DNA, 25 bp, Artificial
  probe
  misc_feature (1)..(25): SEQ ID NO: 4455; WAN024AB6; Start 94; Stop 118
aatggcaaatacagcacagaattta

SEQ ID NO: 383147 - DNA, 25 bp, Artificial
  probe
  misc_feature (1)..(25): SEQ ID NO: 4455; WAN024AB6; Start 93; Stop 117
taatggcaaatacagcacagaattt

SEQ ID NO: 383148 - DNA, 25 bp, Artificial
  probe
  misc_feature (1)..(25): SEQ ID NO: 4455; WAN024AB6; Start 90; Stop 114
ttttaatggcaaatacagcacagaa

SEQ ID NO: 383149 - DNA, 25 bp, Artificial
  probe
  misc_feature (1)..(25): SEQ ID NO: 4455; WAN024AB6; Start 10; Stop 34
attggaattcatttaaaagtcgcaa

SEQ ID NO: 383150 - DNA, 25 bp, Artificial
  probe
  misc_feature (1)..(25): SEQ ID NO: 4455; WAN024AB6; Start 9; Stop 33
tattggaattcatttaaaagtcgca

SEQ ID NO: 383151 - DNA, 25 bp, Artificial
  probe
  misc_feature (1)..(25): SEQ ID NO: 4455; WAN024AB6; Start 8; Stop 32
atattggaattcatttaaaagtcgc

SEQ ID NO: 383152 - DNA, 25 bp, Artificial
  probe
  misc_feature (1)..(25): SEQ ID NO: 4455; WAN024AB6; Start 38; Stop 62
ttgaactgaccctcaaaagttaggc

SEQ ID NO: 383153 - DNA, 25 bp, Artificial
  probe
  misc_feature (1)..(25): SEQ ID NO: 4455; WAN024AB6; Start 43; Stop 67
ctgaccctcaaaagttaggccaaaa

SEQ ID NO: 383154 - DNA, 25 bp, Artificial
  probe
  misc_feature (1)..(25): SEQ ID NO: 4455; WAN024AB6; Start 37; Stop 61
tttgaactgaccctcaaaagttagg

SEQ ID NO: 383155 - DNA, 25 bp, Artificial
  probe
  misc_feature (1)..(25): SEQ ID NO: 4455; WAN024AB6; Start 42; Stop 66
actgaccctcaaaagttaggccaaa

SEQ ID NO: 383156 - DNA, 25 bp, Artificial
  probe
  misc_feature (1)..(25): SEQ ID NO: 4455; WAN024AB6; Start 67; Stop 91
aaactaactaaaggaggtcagtttt

SEQ ID NO: 383157 - DNA, 25 bp, Artificial
  probe
  misc_feature (1)..(25): SEQ ID NO: 4455; WAN024AB6; Start 66; Stop 90
aaaactaactaaaggaggtcagttt

SEQ ID NO: 383158 - DNA, 25 bp, Artificial
  probe
  misc_feature (1)..(25): SEQ ID NO: 4455; WAN024AB6; Start 41; Stop 65
aactgaccctcaaaagttaggccaa

SEQ ID NO: 383159 - DNA, 25 bp, Artificial
  probe
  misc_feature (1)..(25): SEQ ID NO: 4455; WAN024AB6; Start 40; Stop 64
gaactgaccctcaaaagttaggcca

SEQ ID NO: 383160 - DNA, 25 bp, Artificial
  probe
  misc_feature (1)..(25): SEQ ID NO: 4455; WAN024AB6; Start 39; Stop 63
tgaactgaccctcaaaagttaggcc

SEQ ID NO: 383161 - DNA, 25 bp, Artificial
  probe
  misc_feature (1)..(25): SEQ ID NO: 4456; WAN0249SR; Start 1; Stop 25
taattgagttaagaggtttagacct

SEQ ID NO: 383162 - DNA, 25 bp, Artificial
  probe
  misc_feature (1)..(25): SEQ ID NO: 4457; WAN024AOS; Start 28; Stop 52
catctatcgtctcatttattctgcg

SEQ ID NO: 383163 - DNA, 25 bp, Artificial
  probe
  misc_feature (1)..(25): SEQ ID NO: 4457; WAN024AOS; Start 4; Stop 28
tttgctctatttgatataaaccgcc

SEQ ID NO: 383164 - DNA, 25 bp, Artificial
  probe
  misc_feature (1)..(25): SEQ ID NO: 4457; WAN024AOS; Start 27; Stop 51
ccatctatcgtctcatttattctgc

SEQ ID NO: 383165 - DNA, 25 bp, Artificial
  probe
  misc_feature (1)..(25): SEQ ID NO: 4457; WAN024AOS; Start 26; Stop 50
gccatctatcgtctcatttattctg

SEQ ID NO: 383166 - DNA, 25 bp, Artificial
  probe
  misc_feature (1)..(25): SEQ ID NO: 4457; WAN024AOS; Start 25; Stop 49
cgccatctatcgtctcatttattct

SEQ ID NO: 383167 - DNA, 25 bp, Artificial
  probe
  misc_feature (1)..(25): SEQ ID NO: 4457; WAN024AOS; Start 7; Stop 31
gctctatttgatataaaccgccatc

SEQ ID NO: 383168 - DNA, 25 bp, Artificial
  probe
  misc_feature (1)..(25): SEQ ID NO: 4457; WAN024AOS; Start 6; Stop 30
tgctctatttgatataaaccgccat

SEQ ID NO: 383169 - DNA, 25 bp, Artificial
  probe
  misc_feature (1)..(25): SEQ ID NO: 4457; WAN024AOS; Start 5; Stop 29
ttgctctatttgatataaaccgcca

SEQ ID NO: 383170 - DNA, 25 bp, Artificial
  probe
  misc_feature (1)..(25): SEQ ID NO: 4457; WAN024AOS; Start 18; Stop 42
tataaaccgccatctatcgtctcat

SEQ ID NO: 383171 - DNA, 25 bp, Artificial
  probe
  misc_feature (1)..(25): SEQ ID NO: 4457; WAN024AOS; Start 17; Stop 41
atataaaccgccatctatcgtctca

SEQ ID NO: 383172 - DNA, 25 bp, Artificial
  probe
  misc_feature (1)..(25): SEQ ID NO: 4457; WAN024AOS; Start 24; Stop 48
ccgccatctatcgtctcatttattc

SEQ ID NO: 383173 - DNA, 25 bp, Artificial
  probe
  misc_feature (1)..(25): SEQ ID NO: 4457; WAN024AOS; Start 8; Stop 32
ctctatttgatataaaccgccatct

SEQ ID NO: 383174 - DNA, 25 bp, Artificial
  probe
  misc_feature (1)..(25): SEQ ID NO: 4457; WAN024AOS; Start 13; Stop 37
tttgatataaaccgccatctatcgt

SEQ ID NO: 383175 - DNA, 25 bp, Artificial
  probe
  misc_feature (1)..(25): SEQ ID NO: 4457; WAN024AOS; Start 23; Stop 47
accgccatctatcgtctcatttatt

SEQ ID NO: 383176 - DNA, 25 bp, Artificial
  probe
  misc_feature (1)..(25): SEQ ID NO: 4457; WAN024AOS; Start 22; Stop 46
aaccgccatctatcgtctcatttat

SEQ ID NO: 383177 - DNA, 25 bp, Artificial
  probe
  misc_feature (1)..(25): SEQ ID NO: 4457; WAN024AOS; Start 19; Stop 43
ataaaccgccatctatcgtctcatt

SEQ ID NO: 383178 - DNA, 25 bp, Artificial
  probe
  misc_feature (1)..(25): SEQ ID NO: 4457; WAN024AOS; Start 3; Stop 27
atttgctctatttgatataaaccgc

SEQ ID NO: 383179 - DNA, 25 bp, Artificial
  probe
  misc_feature (1)..(25): SEQ ID NO: 4457; WAN024AOS; Start 14; Stop 38
ttgatataaaccgccatctatcgtc

SEQ ID NO: 383180 - DNA, 25 bp, Artificial
  probe
  misc_feature (1)..(25): SEQ ID NO: 4457; WAN024AOS; Start 16; Stop 40
gatataaaccgccatctatcgtctc

SEQ ID NO: 383181 - DNA, 25 bp, Artificial
  probe
  misc_feature (1)..(25): SEQ ID NO: 4457; WAN024AOS; Start 12; Stop 36
atttgatataaaccgccatctatcg

SEQ ID NO: 383182 - DNA, 25 bp, Artificial
  probe
  misc_feature (1)..(25): SEQ ID NO: 4457; WAN024AOS; Start 21; Stop 45
aaaccgccatctatcgtctcattta

SEQ ID NO: 383183 - DNA, 25 bp, Artificial
  probe
  misc_feature (1)..(25): SEQ ID NO: 4457; WAN024AOS; Start 20; Stop 44
taaaccgccatctatcgtctcattt

SEQ ID NO: 383184 - DNA, 25 bp, Artificial
  probe
  misc_feature (1)..(25): SEQ ID NO: 4457; WAN024AOS; Start 15; Stop 39
tgatataaaccgccatctatcgtct

SEQ ID NO: 383185 - DNA, 25 bp, Artificial
  probe
  misc_feature (1)..(25): SEQ ID NO: 4457; WAN024AOS; Start 39; Stop 63
tcatttattctgcgaagaggacctt

SEQ ID NO: 383186 - DNA, 25 bp, Artificial
  probe
  misc_feature (1)..(25): SEQ ID NO: 4457; WAN024AOS; Start 36; Stop 60
gtctcatttattctgcgaagaggac

SEQ ID NO: 383187 - DNA, 25 bp, Artificial
  probe
  misc_feature (1)..(25): SEQ ID NO: 4457; WAN024AOS; Start 51; Stop 75
cgaagaggaccttcaatataggata

SEQ ID NO: 383188 - DNA, 25 bp, Artificial
  probe
  misc_feature (1)..(25): SEQ ID NO: 4457; WAN024AOS; Start 9; Stop 33
tctatttgatataaaccgccatcta

SEQ ID NO: 383189 - DNA, 25 bp, Artificial
  probe
  misc_feature (1)..(25): SEQ ID NO: 4457; WAN024AOS; Start 55; Stop 79
gaggaccttcaatataggataaagc

SEQ ID NO: 383190 - DNA, 25 bp, Artificial
  probe
  misc_feature (1)..(25): SEQ ID NO: 4457; WAN024AOS; Start 46; Stop 70
ttctgcgaagaggaccttcaatata

SEQ ID NO: 383191 - DNA, 25 bp, Artificial
  probe
  misc_feature (1)..(25): SEQ ID NO: 4457; WAN024AOS; Start 44; Stop 68
tattctgcgaagaggaccttcaata

SEQ ID NO: 383192 - DNA, 25 bp, Artificial
  probe
  misc_feature (1)..(25): SEQ ID NO: 4457; WAN024AOS; Start 37; Stop 61
tctcatttattctgcgaagaggacc

SEQ ID NO: 383193 - DNA, 25 bp, Artificial
  probe
  misc_feature (1)..(25): SEQ ID NO: 4457; WAN024AOS; Start 50; Stop 74
gcgaagaggaccttcaatataggat

SEQ ID NO: 383194 - DNA, 25 bp, Artificial
  probe
  misc_feature (1)..(25): SEQ ID NO: 4457; WAN024AOS; Start 47; Stop 71
tctgcgaagaggaccttcaatatag

SEQ ID NO: 383195 - DNA, 25 bp, Artificial
  probe
  misc_feature (1)..(25): SEQ ID NO: 4458; WAN0249IU; Start 45; Stop 69
tatcttgtgtttgcctcatttcttg

SEQ ID NO: 383196 - DNA, 25 bp, Artificial
  probe
  misc_feature (1)..(25): SEQ ID NO: 4458; WAN0249IU; Start 43; Stop 67
catatcttgtgtttgcctcatttct

SEQ ID NO: 383197 - DNA, 25 bp, Artificial
  probe
  misc_feature (1)..(25): SEQ ID NO: 4458; WAN0249IU; Start 44; Stop 68
atatcttgtgtttgcctcatttctt

SEQ ID NO: 383198 - DNA, 25 bp, Artificial
  probe
  misc_feature (1)..(25): SEQ ID NO: 4458; WAN0249IU; Start 54; Stop 78
tttgcctcatttcttgaactttgtt

SEQ ID NO: 383199 - DNA, 25 bp, Artificial
  probe
  misc_feature (1)..(25): SEQ ID NO: 4458; WAN0249IU; Start 55; Stop 79
ttgcctcatttcttgaactttgtta

SEQ ID NO: 383200 - DNA, 25 bp, Artificial
  probe
  misc_feature (1)..(25): SEQ ID NO: 4458; WAN0249IU; Start 56; Stop 80
tgcctcatttcttgaactttgttat

SEQ ID NO: 383201 - DNA, 25 bp, Artificial
  probe
  misc_feature (1)..(25): SEQ ID NO: 4458; WAN0249IU; Start 53; Stop 77
gtttgcctcatttcttgaactttgt

SEQ ID NO: 383202 - DNA, 25 bp, Artificial
  probe
  misc_feature (1)..(25): SEQ ID NO: 4458; WAN0249IU; Start 52; Stop 76
tgtttgcctcatttcttgaactttg

SEQ ID NO: 383203 - DNA, 25 bp, Artificial
  probe
  misc_feature (1)..(25): SEQ ID NO: 4458; WAN0249IU; Start 51; Stop 75
gtgtttgcctcatttcttgaacttt

SEQ ID NO: 383204 - DNA, 25 bp, Artificial
  probe
  misc_feature (1)..(25): SEQ ID NO: 4458; WAN0249IU; Start 42; Stop 66
acatatcttgtgtttgcctcatttc

SEQ ID NO: 383205 - DNA, 25 bp, Artificial
  probe
  misc_feature (1)..(25): SEQ ID NO: 4458; WAN0249IU; Start 35; Stop 59
tgttgatacatatcttgtgtttgcc

SEQ ID NO: 383206 - DNA, 25 bp, Artificial
  probe
  misc_feature (1)..(25): SEQ ID NO: 4458; WAN0249IU; Start 38; Stop 62
tgatacatatcttgtgtttgcctca

SEQ ID NO: 383207 - DNA, 25 bp, Artificial
  probe
  misc_feature (1)..(25): SEQ ID NO: 4458; WAN0249IU; Start 36; Stop 60
gttgatacatatcttgtgtttgcct

SEQ ID NO: 383208 - DNA, 25 bp, Artificial
  probe
  misc_feature (1)..(25): SEQ ID NO: 4458; WAN0249IU; Start 37; Stop 61
ttgatacatatcttgtgtttgcctc

SEQ ID NO: 383209 - DNA, 25 bp, Artificial
  probe
  misc_feature (1)..(25): SEQ ID NO: 4458; WAN0249IU; Start 39; Stop 63
gatacatatcttgtgtttgcctcat

SEQ ID NO: 383210 - DNA, 25 bp, Artificial
  probe
  misc_feature (1)..(25): SEQ ID NO: 4458; WAN0249IU; Start 46; Stop 70
atcttgtgtttgcctcatttcttga

SEQ ID NO: 383211 - DNA, 25 bp, Artificial
  probe
  misc_feature (1)..(25): SEQ ID NO: 4458; WAN0249IU; Start 48; Stop 72
cttgtgtttgcctcatttcttgaac

SEQ ID NO: 383212 - DNA, 25 bp, Artificial
  probe
  misc_feature (1)..(25): SEQ ID NO: 4458; WAN0249IU; Start 47; Stop 71
tcttgtgtttgcctcatttcttgaa

SEQ ID NO: 383213 - DNA, 25 bp, Artificial
  probe
  misc_feature (1)..(25): SEQ ID NO: 4458; WAN0249IU; Start 41; Stop 65
tacatatcttgtgtttgcctcattt

SEQ ID NO: 383214 - DNA, 25 bp, Artificial
  probe
  misc_feature (1)..(25): SEQ ID NO: 4458; WAN0249IU; Start 40; Stop 64
atacatatcttgtgtttgcctcatt

SEQ ID NO: 383215 - DNA, 25 bp, Artificial
  probe
  misc_feature (1)..(25): SEQ ID NO: 4458; WAN0249IU; Start 50; Stop 74
tgtgtttgcctcatttcttgaactt

SEQ ID NO: 383216 - DNA, 25 bp, Artificial
  probe
  misc_feature (1)..(25): SEQ ID NO: 4458; WAN0249IU; Start 49; Stop 73
ttgtgtttgcctcatttcttgaact

SEQ ID NO: 383217 - DNA, 25 bp, Artificial
  probe
  misc_feature (1)..(25): SEQ ID NO: 4458; WAN0249IU; Start 34; Stop 58
ttgttgatacatatcttgtgtttgc

SEQ ID NO: 383218 - DNA, 25 bp, Artificial
  probe
  misc_feature (1)..(25): SEQ ID NO: 4458; WAN0249IU; Start 57; Stop 81
gcctcatttcttgaactttgttata

SEQ ID NO: 383219 - DNA, 25 bp, Artificial
  probe
  misc_feature (1)..(25): SEQ ID NO: 4458; WAN0249IU; Start 58; Stop 82
cctcatttcttgaactttgttatac

SEQ ID NO: 383220 - DNA, 25 bp, Artificial
  probe
  misc_feature (1)..(25): SEQ ID NO: 4458; WAN0249IU; Start 33; Stop 57
attgttgatacatatcttgtgtttg

SEQ ID NO: 383221 - DNA, 25 bp, Artificial
  probe
  misc_feature (1)..(25): SEQ ID NO: 4458; WAN0249IU; Start 59; Stop 83
ctcatttcttgaactttgttatact

SEQ ID NO: 383222 - DNA, 25 bp, Artificial
  probe
  misc_feature (1)..(25): SEQ ID NO: 4458; WAN0249IU; Start 32; Stop 56
aattgttgatacatatcttgtgttt

SEQ ID NO: 383223 - DNA, 25 bp, Artificial
  probe
  misc_feature (1)..(25): SEQ ID NO: 4458; WAN0249IU; Start 31; Stop 55
aaattgttgatacatatcttgtgtt

SEQ ID NO: 383224 - DNA, 25 bp, Artificial
  probe
  misc_feature (1)..(25): SEQ ID NO: 4458; WAN0249IU; Start 30; Stop 54
aaaattgttgatacatatcttgtgt

SEQ ID NO: 383225 - DNA, 25 bp, Artificial
  probe
  misc_feature (1)..(25): SEQ ID NO: 4459; WAN024AA2; Start 326; Stop 350
tgatggaggttagtatggaaagaaa

SEQ ID NO: 383226 - DNA, 25 bp, Artificial
  probe
  misc_feature (1)..(25): SEQ ID NO: 4459; WAN024AA2; Start 325; Stop 349
ttgatggaggttagtatggaaagaa

SEQ ID NO: 383227 - DNA, 25 bp, Artificial
  probe
  misc_feature (1)..(25): SEQ ID NO: 4459; WAN024AA2; Start 138; Stop 162
aaacagataagtggcaatgatgaaa

SEQ ID NO: 383228 - DNA, 25 bp, Artificial
  probe
  misc_feature (1)..(25): SEQ ID NO: 4459; WAN024AA2; Start 324; Stop 348
tttgatggaggttagtatggaaaga

SEQ ID NO: 383229 - DNA, 25 bp, Artificial
  probe
  misc_feature (1)..(25): SEQ ID NO: 4459; WAN024AA2; Start 165; Stop 189
tgggctgaatgctatttagaatttg

SEQ ID NO: 383230 - DNA, 25 bp, Artificial
  probe
  misc_feature (1)..(25): SEQ ID NO: 4459; WAN024AA2; Start 358; Stop 382
cgtcgcttgtttagataagtgaaat

SEQ ID NO: 383231 - DNA, 25 bp, Artificial
  probe
  misc_feature (1)..(25): SEQ ID NO: 4459; WAN024AA2; Start 166; Stop 190
gggctgaatgctatttagaatttga

SEQ ID NO: 383232 - DNA, 25 bp, Artificial
  probe
  misc_feature (1)..(25): SEQ ID NO: 4459; WAN024AA2; Start 164; Stop 188
ttgggctgaatgctatttagaattt

SEQ ID NO: 383233 - DNA, 25 bp, Artificial
  probe
  misc_feature (1)..(25): SEQ ID NO: 4459; WAN024AA2; Start 163; Stop 187
attgggctgaatgctatttagaatt

SEQ ID NO: 383234 - DNA, 25 bp, Artificial
  probe
  misc_feature (1)..(25): SEQ ID NO: 4459; WAN024AA2; Start 162; Stop 186
aattgggctgaatgctatttagaat

SEQ ID NO: 383235 - DNA, 25 bp, Artificial
  probe
  misc_feature (1)..(25): SEQ ID NO: 4459; WAN024AA2; Start 167; Stop 191
ggctgaatgctatttagaatttgaa

SEQ ID NO: 383236 - DNA, 25 bp, Artificial
  probe
  misc_feature (1)..(25): SEQ ID NO: 4459; WAN024AA2; Start 161; Stop 185
aaattgggctgaatgctatttagaa

SEQ ID NO: 383237 - DNA, 25 bp, Artificial
  probe
  misc_feature (1)..(25): SEQ ID NO: 4459; WAN024AA2; Start 213; Stop 237
caccttacagtgcatctcgttattg

SEQ ID NO: 383238 - DNA, 25 bp, Artificial
  probe
  misc_feature (1)..(25): SEQ ID NO: 4459; WAN024AA2; Start 115; Stop 139
tttagagagtctgtggtagctgaaa

SEQ ID NO: 383239 - DNA, 25 bp, Artificial
  probe
  misc_feature (1)..(25): SEQ ID NO: 4459; WAN024AA2; Start 212; Stop 236
acaccttacagtgcatctcgttatt

SEQ ID NO: 383240 - DNA, 25 bp, Artificial
  probe
  misc_feature (1)..(25): SEQ ID NO: 4459; WAN024AA2; Start 254; Stop 278
ggaaattccctataattgaggtggt

SEQ ID NO: 383241 - DNA, 25 bp, Artificial
  probe
  misc_feature (1)..(25): SEQ ID NO: 4459; WAN024AA2; Start 255; Stop 279
gaaattccctataattgaggtggta

SEQ ID NO: 383242 - DNA, 25 bp, Artificial
  probe
  misc_feature (1)..(25): SEQ ID NO: 4459; WAN024AA2; Start 256; Stop 280
aaattccctataattgaggtggtac

SEQ ID NO: 383243 - DNA, 25 bp, Artificial
  probe
  misc_feature (1)..(25): SEQ ID NO: 4459; WAN024AA2; Start 357; Stop 381
gcgtcgcttgtttagataagtgaaa

SEQ ID NO: 383244 - DNA, 25 bp, Artificial
  probe
  misc_feature (1)..(25): SEQ ID NO: 4459; WAN024AA2; Start 136; Stop 160
gaaaacagataagtggcaatgatga

SEQ ID NO: 383245 - DNA, 25 bp, Artificial
  probe
  misc_feature (1)..(25): SEQ ID NO: 4459; WAN024AA2; Start 135; Stop 159
tgaaaacagataagtggcaatgatg

SEQ ID NO: 383246 - DNA, 25 bp, Artificial
  probe
  misc_feature (1)..(25): SEQ ID NO: 4459; WAN024AA2; Start 139; Stop 163
aacagataagtggcaatgatgaaaa

SEQ ID NO: 383247 - DNA, 25 bp, Artificial
  probe
  misc_feature (1)..(25): SEQ ID NO: 4459; WAN024AA2; Start 137; Stop 161
aaaacagataagtggcaatgatgaa

SEQ ID NO: 383248 - DNA, 25 bp, Artificial
  probe
  misc_feature (1)..(25): SEQ ID NO: 4459; WAN024AA2; Start 140; Stop 164
acagataagtggcaatgatgaaaat

SEQ ID NO: 383249 - DNA, 25 bp, Artificial
  probe
  misc_feature (1)..(25): SEQ ID NO: 4459; WAN024AA2; Start 211; Stop 235
cacaccttacagtgcatctcgttat

SEQ ID NO: 383250 - DNA, 25 bp, Artificial
  probe
  misc_feature (1)..(25): SEQ ID NO: 4459; WAN024AA2; Start 168; Stop 192
gctgaatgctatttagaatttgaaa

SEQ ID NO: 383251 - DNA, 25 bp, Artificial
  probe
  misc_feature (1)..(25): SEQ ID NO: 4459; WAN024AA2; Start 156; Stop 180
gatgaaaattgggctgaatgctatt

SEQ ID NO: 383252 - DNA, 25 bp, Artificial
  probe
  misc_feature (1)..(25): SEQ ID NO: 4459; WAN024AA2; Start 333; Stop 357
ggttagtatggaaagaaaacgatgg

SEQ ID NO: 383253 - DNA, 25 bp, Artificial
  probe
  misc_feature (1)..(25): SEQ ID NO: 4459; WAN024AA2; Start 334; Stop 358
gttagtatggaaagaaaacgatggc

SEQ ID NO: 383254 - DNA, 25 bp, Artificial
  probe
  misc_feature (1)..(25): SEQ ID NO: 4459; WAN024AA2; Start 330; Stop 354
ggaggttagtatggaaagaaaacga

SEQ ID NO: 383255 - DNA, 25 bp, Artificial
  probe
  misc_feature (1)..(25): SEQ ID NO: 4459; WAN024AA2; Start 323; Stop 347
ttttgatggaggttagtatggaaag

SEQ ID NO: 383256 - DNA, 25 bp, Artificial
  probe
  misc_feature (1)..(25): SEQ ID NO: 4459; WAN024AA2; Start 329; Stop 353
tggaggttagtatggaaagaaaacg

SEQ ID NO: 383257 - DNA, 25 bp, Artificial
  probe
  misc_feature (1)..(25): SEQ ID NO: 4459; WAN024AA2; Start 332; Stop 356
aggttagtatggaaagaaaacgatg

SEQ ID NO: 383258 - DNA, 25 bp, Artificial
  probe
  misc_feature (1)..(25): SEQ ID NO: 4460; WAN024AG9; Start 44; Stop 68
atacagtttacccatcctttcgttt

SEQ ID NO: 383259 - DNA, 25 bp, Artificial
  probe
  misc_feature (1)..(25): SEQ ID NO: 4460; WAN024AG9; Start 43; Stop 67
aatacagtttacccatcctttcgtt

SEQ ID NO: 383260 - DNA, 25 bp, Artificial
  probe
  misc_feature (1)..(25): SEQ ID NO: 4460; WAN024AG9; Start 42; Stop 66
gaatacagtttacccatcctttcgt

SEQ ID NO: 383261 - DNA, 25 bp, Artificial
  probe
  misc_feature (1)..(25): SEQ ID NO: 4460; WAN024AG9; Start 31; Stop 55
ttcagttcagcgaatacagtttacc

SEQ ID NO: 383262 - DNA, 25 bp, Artificial
  probe
  misc_feature (1)..(25): SEQ ID NO: 4460; WAN024AG9; Start 40; Stop 64
gcgaatacagtttacccatcctttc

SEQ ID NO: 383263 - DNA, 25 bp, Artificial
  probe
  misc_feature (1)..(25): SEQ ID NO: 4460; WAN024AG9; Start 39; Stop 63
agcgaatacagtttacccatccttt

SEQ ID NO: 383264 - DNA, 25 bp, Artificial
  probe
  misc_feature (1)..(25): SEQ ID NO: 4460; WAN024AG9; Start 35; Stop 59
gttcagcgaatacagtttacccatc

SEQ ID NO: 383265 - DNA, 25 bp, Artificial
  probe
  misc_feature (1)..(25): SEQ ID NO: 4460; WAN024AG9; Start 34; Stop 58
agttcagcgaatacagtttacccat

SEQ ID NO: 383266 - DNA, 25 bp, Artificial
  probe
  misc_feature (1)..(25): SEQ ID NO: 4460; WAN024AG9; Start 30; Stop 54
attcagttcagcgaatacagtttac

SEQ ID NO: 383267 - DNA, 25 bp, Artificial
  probe
  misc_feature (1)..(25): SEQ ID NO: 4460; WAN024AG9; Start 38; Stop 62
cagcgaatacagtttacccatcctt

SEQ ID NO: 383268 - DNA, 25 bp, Artificial
  probe
  misc_feature (1)..(25): SEQ ID NO: 4460; WAN024AG9; Start 36; Stop 60
ttcagcgaatacagtttacccatcc

SEQ ID NO: 383269 - DNA, 25 bp, Artificial
  probe
  misc_feature (1)..(25): SEQ ID NO: 4460; WAN024AG9; Start 32; Stop 56
tcagttcagcgaatacagtttaccc

SEQ ID NO: 383270 - DNA, 25 bp, Artificial
  probe
  misc_feature (1)..(25): SEQ ID NO: 4460; WAN024AG9; Start 33; Stop 57
cagttcagcgaatacagtttaccca

SEQ ID NO: 383271 - DNA, 25 bp, Artificial
  probe
  misc_feature (1)..(25): SEQ ID NO: 4460; WAN024AG9; Start 45; Stop 69
tacagtttacccatcctttcgtttt

SEQ ID NO: 383272 - DNA, 25 bp, Artificial
  probe
  misc_feature (1)..(25): SEQ ID NO: 4460; WAN024AG9; Start 37; Stop 61
tcagcgaatacagtttacccatcct

SEQ ID NO: 383273 - DNA, 25 bp, Artificial
  probe
  misc_feature (1)..(25): SEQ ID NO: 4460; WAN024AG9; Start 1; Stop 25
taattttgatttagaggagagtcgc

SEQ ID NO: 383274 - DNA, 25 bp, Artificial
  probe
  misc_feature (1)..(25): SEQ ID NO: 4460; WAN024AG9; Start 2; Stop 26
aattttgatttagaggagagtcgcc

SEQ ID NO: 383275 - DNA, 25 bp, Artificial
  probe
  misc_feature (1)..(25): SEQ ID NO: 4460; WAN024AG9; Start 9; Stop 33
atttagaggagagtcgcccgtattc

SEQ ID NO: 383276 - DNA, 25 bp, Artificial
  probe
  misc_feature (1)..(25): SEQ ID NO: 4460; WAN024AG9; Start 8; Stop 32
gatttagaggagagtcgcccgtatt

SEQ ID NO: 383277 - DNA, 25 bp, Artificial
  probe
  misc_feature (1)..(25): SEQ ID NO: 4460; WAN024AG9; Start 3; Stop 27
attttgatttagaggagagtcgccc

SEQ ID NO: 383278 - DNA, 25 bp, Artificial
  probe
  misc_feature (1)..(25): SEQ ID NO: 4460; WAN024AG9; Start 29; Stop 53
tattcagttcagcgaatacagttta

SEQ ID NO: 383279 - DNA, 25 bp, Artificial
  probe
  misc_feature (1)..(25): SEQ ID NO: 4460; WAN024AG9; Start 7; Stop 31
tgatttagaggagagtcgcccgtat

SEQ ID NO: 383280 - DNA, 25 bp, Artificial
  probe
  misc_feature (1)..(25): SEQ ID NO: 4460; WAN024AG9; Start 10; Stop 34
tttagaggagagtcgcccgtattca

SEQ ID NO: 383281 - DNA, 25 bp, Artificial
  probe
  misc_feature (1)..(25): SEQ ID NO: 4460; WAN024AG9; Start 6; Stop 30
ttgatttagaggagagtcgcccgta

SEQ ID NO: 383282 - DNA, 25 bp, Artificial
  probe
  misc_feature (1)..(25): SEQ ID NO: 4460; WAN024AG9; Start 41; Stop 65
cgaatacagtttacccatcctttcg

SEQ ID NO: 383283 - DNA, 25 bp, Artificial
  probe
  misc_feature (1)..(25): SEQ ID NO: 4460; WAN024AG9; Start 4; Stop 28
ttttgatttagaggagagtcgcccg

SEQ ID NO: 383284 - DNA, 25 bp, Artificial
  probe
  misc_feature (1)..(25): SEQ ID NO: 4461; WAN024AFN; Start 2; Stop 26
acaatcaacatggactattatatca

SEQ ID NO: 383285 - DNA, 25 bp, Artificial
  probe
  misc_feature (1)..(25): SEQ ID NO: 4461; WAN024AFN; Start 6; Stop 30
tcaacatggactattatatcatgaa

SEQ ID NO: 383286 - DNA, 25 bp, Artificial
  probe
  misc_feature (1)..(25): SEQ ID NO: 4461; WAN024AFN; Start 5; Stop 29
atcaacatggactattatatcatga

SEQ ID NO: 383287 - DNA, 25 bp, Artificial
  probe
  misc_feature (1)..(25): SEQ ID NO: 4461; WAN024AFN; Start 7; Stop 31
caacatggactattatatcatgaaa

SEQ ID NO: 383288 - DNA, 25 bp, Artificial
  probe
  misc_feature (1)..(25): SEQ ID NO: 4462; WAN024ASK; Start 4; Stop 28
aggcgacttttgaaggagattatta

SEQ ID NO: 383289 - DNA, 25 bp, Artificial
  probe
  misc_feature (1)..(25): SEQ ID NO: 4462; WAN024ASK; Start 5; Stop 29
ggcgacttttgaaggagattattat

SEQ ID NO: 383290 - DNA, 25 bp, Artificial
  probe
  misc_feature (1)..(25): SEQ ID NO: 4462; WAN024ASK; Start 3; Stop 27
caggcgacttttgaaggagattatt

SEQ ID NO: 383291 - DNA, 25 bp, Artificial
  probe
  misc_feature (1)..(25): SEQ ID NO: 4462; WAN024ASK; Start 6; Stop 30
gcgacttttgaaggagattattatg

SEQ ID NO: 383292 - DNA, 25 bp, Artificial
  probe
  misc_feature (1)..(25): SEQ ID NO: 4462; WAN024ASK; Start 1; Stop 25
tacaggcgacttttgaaggagatta

SEQ ID NO: 383293 - DNA, 25 bp, Artificial
  probe
  misc_feature (1)..(25): SEQ ID NO: 4462; WAN024ASK; Start 83; Stop 107
actaattcagtgttatctgtttcaa

SEQ ID NO: 383294 - DNA, 25 bp, Artificial
  probe
  misc_feature (1)..(25): SEQ ID NO: 4462; WAN024ASK; Start 82; Stop 106
aactaattcagtgttatctgtttca

SEQ ID NO: 383295 - DNA, 25 bp, Artificial
  probe
  misc_feature (1)..(25): SEQ ID NO: 4462; WAN024ASK; Start 79; Stop 103
tcaaactaattcagtgttatctgtt

SEQ ID NO: 383296 - DNA, 25 bp, Artificial
  probe
  misc_feature (1)..(25): SEQ ID NO: 4462; WAN024ASK; Start 78; Stop 102
ttcaaactaattcagtgttatctgt

SEQ ID NO: 383297 - DNA, 25 bp, Artificial
  probe
  misc_feature (1)..(25): SEQ ID NO: 4462; WAN024ASK; Start 2; Stop 26
acaggcgacttttgaaggagattat

SEQ ID NO: 383298 - DNA, 25 bp, Artificial
  probe
  misc_feature (1)..(25): SEQ ID NO: 4462; WAN024ASK; Start 72; Stop 96
atcaaattcaaactaattcagtgtt

SEQ ID NO: 383299 - DNA, 25 bp, Artificial
  probe
  misc_feature (1)..(25): SEQ ID NO: 4462; WAN024ASK; Start 71; Stop 95
aatcaaattcaaactaattcagtgt

SEQ ID NO: 383300 - DNA, 25 bp, Artificial
  probe
  misc_feature (1)..(25): SEQ ID NO: 4462; WAN024ASK; Start 7; Stop 31
cgacttttgaaggagattattatga

SEQ ID NO: 383301 - DNA, 25 bp, Artificial
  probe
  misc_feature (1)..(25): SEQ ID NO: 4462; WAN024ASK; Start 84; Stop 108
ctaattcagtgttatctgtttcaaa

SEQ ID NO: 383302 - DNA, 25 bp, Artificial
  probe
  misc_feature (1)..(25): SEQ ID NO: 4462; WAN024ASK; Start 77; Stop 101
attcaaactaattcagtgttatctg

SEQ ID NO: 383303 - DNA, 25 bp, Artificial
  probe
  misc_feature (1)..(25): SEQ ID NO: 4462; WAN024ASK; Start 73; Stop 97
tcaaattcaaactaattcagtgtta

SEQ ID NO: 383304 - DNA, 25 bp, Artificial
  probe
  misc_feature (1)..(25): SEQ ID NO: 4462; WAN024ASK; Start 80; Stop 104
caaactaattcagtgttatctgttt

SEQ ID NO: 383305 - DNA, 25 bp, Artificial
  probe
  misc_feature (1)..(25): SEQ ID NO: 4462; WAN024ASK; Start 88; Stop 112
ttcagtgttatctgtttcaaataat

SEQ ID NO: 383306 - DNA, 25 bp, Artificial
  probe
  misc_feature (1)..(25): SEQ ID NO: 4462; WAN024ASK; Start 87; Stop 111
attcagtgttatctgtttcaaataa

SEQ ID NO: 383307 - DNA, 25 bp, Artificial
  probe
  misc_feature (1)..(25): SEQ ID NO: 4462; WAN024ASK; Start 86; Stop 110
aattcagtgttatctgtttcaaata

SEQ ID NO: 383308 - DNA, 25 bp, Artificial
  probe
  misc_feature (1)..(25): SEQ ID NO: 4462; WAN024ASK; Start 85; Stop 109
taattcagtgttatctgtttcaaat

SEQ ID NO: 383309 - DNA, 25 bp, Artificial
  probe
  misc_feature (1)..(25): SEQ ID NO: 4462; WAN024ASK; Start 70; Stop 94
aaatcaaattcaaactaattcagtg

SEQ ID NO: 383310 - DNA, 25 bp, Artificial
  probe
  misc_feature (1)..(25): SEQ ID NO: 4462; WAN024ASK; Start 81; Stop 105
aaactaattcagtgttatctgtttc

SEQ ID NO: 383311 - DNA, 25 bp, Artificial
  probe
  misc_feature (1)..(25): SEQ ID NO: 4462; WAN024ASK; Start 100; Stop 124
tgtttcaaataatattaggaggtct

SEQ ID NO: 383312 - DNA, 25 bp, Artificial
  probe
  misc_feature (1)..(25): SEQ ID NO: 4462; WAN024ASK; Start 98; Stop 122
tctgtttcaaataatattaggaggt

SEQ ID NO: 383313 - DNA, 25 bp, Artificial
  probe
  misc_feature (1)..(25): SEQ ID NO: 4462; WAN024ASK; Start 99; Stop 123
ctgtttcaaataatattaggaggtc

SEQ ID NO: 383314 - DNA, 25 bp, Artificial
  probe
  misc_feature (1)..(25): SEQ ID NO: 4462; WAN024ASK; Start 8; Stop 32
gacttttgaaggagattattatgaa

SEQ ID NO: 383315 - DNA, 25 bp, Artificial
  probe
  misc_feature (1)..(25): SEQ ID NO: 4463; WAN024A3J; Start 2; Stop 26
acatcctacttctagtatagcatct

SEQ ID NO: 383316 - DNA, 25 bp, Artificial
  probe
  misc_feature (1)..(25): SEQ ID NO: 4463; WAN024A3J; Start 3; Stop 27
catcctacttctagtatagcatctt

SEQ ID NO: 383317 - DNA, 25 bp, Artificial
  probe
  misc_feature (1)..(25): SEQ ID NO: 4463; WAN024A3J; Start 1; Stop 25
tacatcctacttctagtatagcatc

SEQ ID NO: 383318 - DNA, 25 bp, Artificial
  probe
  misc_feature (1)..(25): SEQ ID NO: 4463; WAN024A3J; Start 92; Stop 116
tgaactaacactttaactatatcgt

SEQ ID NO: 383319 - DNA, 25 bp, Artificial
  probe
  misc_feature (1)..(25): SEQ ID NO: 4463; WAN024A3J; Start 4; Stop 28
atcctacttctagtatagcatcttt

SEQ ID NO: 383320 - DNA, 25 bp, Artificial
  probe
  misc_feature (1)..(25): SEQ ID NO: 4463; WAN024A3J; Start 15; Stop 39
agtatagcatcttttctatcaaacg

SEQ ID NO: 383321 - DNA, 25 bp, Artificial
  probe
  misc_feature (1)..(25): SEQ ID NO: 4463; WAN024A3J; Start 91; Stop 115
ttgaactaacactttaactatatcg

SEQ ID NO: 383322 - DNA, 25 bp, Artificial
  probe
  misc_feature (1)..(25): SEQ ID NO: 4463; WAN024A3J; Start 16; Stop 40
gtatagcatcttttctatcaaacgt

SEQ ID NO: 383323 - DNA, 25 bp, Artificial
  probe
  misc_feature (1)..(25): SEQ ID NO: 4463; WAN024A3J; Start 5; Stop 29
tcctacttctagtatagcatctttt

SEQ ID NO: 383324 - DNA, 25 bp, Artificial
  probe
  misc_feature (1)..(25): SEQ ID NO: 4463; WAN024A3J; Start 6; Stop 30
cctacttctagtatagcatcttttc

SEQ ID NO: 383325 - DNA, 25 bp, Artificial
  probe
  misc_feature (1)..(25): SEQ ID NO: 4463; WAN024A3J; Start 21; Stop 45
gcatcttttctatcaaacgttaaac

SEQ ID NO: 383326 - DNA, 25 bp, Artificial
  probe
  misc_feature (1)..(25): SEQ ID NO: 4463; WAN024A3J; Start 20; Stop 44
agcatcttttctatcaaacgttaaa

SEQ ID NO: 383327 - DNA, 25 bp, Artificial
  probe
  misc_feature (1)..(25): SEQ ID NO: 4463; WAN024A3J; Start 7; Stop 31
ctacttctagtatagcatcttttct

SEQ ID NO: 383328 - DNA, 25 bp, Artificial
  probe
  misc_feature (1)..(25): SEQ ID NO: 4463; WAN024A3J; Start 19; Stop 43
tagcatcttttctatcaaacgttaa

SEQ ID NO: 383329 - DNA, 25 bp, Artificial
  probe
  misc_feature (1)..(25): SEQ ID NO: 4463; WAN024A3J; Start 22; Stop 46
catcttttctatcaaacgttaaaca

SEQ ID NO: 383330 - DNA, 25 bp, Artificial
  probe
  misc_feature (1)..(25): SEQ ID NO: 4463; WAN024A3J; Start 18; Stop 42
atagcatcttttctatcaaacgtta

SEQ ID NO: 383331 - DNA, 25 bp, Artificial
  probe
  misc_feature (1)..(25): SEQ ID NO: 4463; WAN024A3J; Start 17; Stop 41
tatagcatcttttctatcaaacgtt

SEQ ID NO: 383332 - DNA, 25 bp, Artificial
  probe
  misc_feature (1)..(25): SEQ ID NO: 4465; WAN0249OF; Start 3; Stop 27
cctctacatttctagcaactgttca

SEQ ID NO: 383333 - DNA, 25 bp, Artificial
  probe
  misc_feature (1)..(25): SEQ ID NO: 4465; WAN0249OF; Start 2; Stop 26
acctctacatttctagcaactgttc

SEQ ID NO: 383334 - DNA, 25 bp, Artificial
  probe
  misc_feature (1)..(25): SEQ ID NO: 4465; WAN0249OF; Start 1; Stop 25
tacctctacatttctagcaactgtt

SEQ ID NO: 383335 - DNA, 25 bp, Artificial
  probe
  misc_feature (1)..(25): SEQ ID NO: 4465; WAN0249OF; Start 4; Stop 28
ctctacatttctagcaactgttcaa

SEQ ID NO: 383336 - DNA, 25 bp, Artificial
  probe
  misc_feature (1)..(25): SEQ ID NO: 4465; WAN0249OF; Start 5; Stop 29
tctacatttctagcaactgttcaaa

SEQ ID NO: 383337 - DNA, 25 bp, Artificial
  probe
  misc_feature (1)..(25): SEQ ID NO: 4465; WAN0249OF; Start 6; Stop 30
ctacatttctagcaactgttcaaaa

SEQ ID NO: 383338 - DNA, 25 bp, Artificial
  probe
  misc_feature (1)..(25): SEQ ID NO: 4465; WAN0249OF; Start 29; Stop 53
aaaggcagtcttaaatgactcaata

SEQ ID NO: 383339 - DNA, 25 bp, Artificial
  probe
  misc_feature (1)..(25): SEQ ID NO: 4465; WAN0249OF; Start 30; Stop 54
aaggcagtcttaaatgactcaatat

SEQ ID NO: 383340 - DNA, 25 bp, Artificial
  probe
  misc_feature (1)..(25): SEQ ID NO: 4465; WAN0249OF; Start 31; Stop 55
aggcagtcttaaatgactcaatatt

SEQ ID NO: 383341 - DNA, 25 bp, Artificial
  probe
  misc_feature (1)..(25): SEQ ID NO: 4465; WAN0249OF; Start 28; Stop 52
aaaaggcagtcttaaatgactcaat

SEQ ID NO: 383342 - DNA, 25 bp, Artificial
  probe
  misc_feature (1)..(25): SEQ ID NO: 4465; WAN0249OF; Start 32; Stop 56
ggcagtcttaaatgactcaatattg

SEQ ID NO: 383343 - DNA, 25 bp, Artificial
  probe
  misc_feature (1)..(25): SEQ ID NO: 4466; WAN0249ER; Start 1; Stop 25
tacgctctaagacaaatacgacgga

SEQ ID NO: 383344 - DNA, 25 bp, Artificial
  probe
  misc_feature (1)..(25): SEQ ID NO: 4466; WAN0249ER; Start 2; Stop 26
acgctctaagacaaatacgacggag

SEQ ID NO: 383345 - DNA, 25 bp, Artificial
  probe
  misc_feature (1)..(25): SEQ ID NO: 4467; WAN024AMX; Start 45; Stop 69
gcagtctaagccatcaaatacctat

SEQ ID NO: 383346 - DNA, 25 bp, Artificial
  probe
  misc_feature (1)..(25): SEQ ID NO: 4467; WAN024AMX; Start 6; Stop 30
atatagaagaaagattgcctgtggg

SEQ ID NO: 383347 - DNA, 25 bp, Artificial
  probe
  misc_feature (1)..(25): SEQ ID NO: 4467; WAN024AMX; Start 52; Stop 76
aagccatcaaatacctataaccctt

SEQ ID NO: 383348 - DNA, 25 bp, Artificial
  probe
  misc_feature (1)..(25): SEQ ID NO: 4467; WAN024AMX; Start 53; Stop 77
agccatcaaatacctataaccctta

SEQ ID NO: 383349 - DNA, 25 bp, Artificial
  probe
  misc_feature (1)..(25): SEQ ID NO: 4467; WAN024AMX; Start 51; Stop 75
taagccatcaaatacctataaccct

SEQ ID NO: 383350 - DNA, 25 bp, Artificial
  probe
  misc_feature (1)..(25): SEQ ID NO: 4467; WAN024AMX; Start 5; Stop 29
aatatagaagaaagattgcctgtgg

SEQ ID NO: 383351 - DNA, 25 bp, Artificial
  probe
  misc_feature (1)..(25): SEQ ID NO: 4467; WAN024AMX; Start 50; Stop 74
ctaagccatcaaatacctataaccc

SEQ ID NO: 383352 - DNA, 25 bp, Artificial
  probe
  misc_feature (1)..(25): SEQ ID NO: 4467; WAN024AMX; Start 44; Stop 68
agcagtctaagccatcaaataccta

SEQ ID NO: 383353 - DNA, 25 bp, Artificial
  probe
  misc_feature (1)..(25): SEQ ID NO: 4467; WAN024AMX; Start 8; Stop 32
atagaagaaagattgcctgtgggta

SEQ ID NO: 383354 - DNA, 25 bp, Artificial
  probe
  misc_feature (1)..(25): SEQ ID NO: 4467; WAN024AMX; Start 7; Stop 31
tatagaagaaagattgcctgtgggt

SEQ ID NO: 383355 - DNA, 25 bp, Artificial
  probe
  misc_feature (1)..(25): SEQ ID NO: 4467; WAN024AMX; Start 30; Stop 54
gtaaacagtcacacagcagtctaag

SEQ ID NO: 383356 - DNA, 25 bp, Artificial
  probe
  misc_feature (1)..(25): SEQ ID NO: 4467; WAN024AMX; Start 9; Stop 33
tagaagaaagattgcctgtgggtaa

SEQ ID NO: 383357 - DNA, 25 bp, Artificial
  probe
  misc_feature (1)..(25): SEQ ID NO: 4467; WAN024AMX; Start 54; Stop 78
gccatcaaatacctataacccttaa

SEQ ID NO: 383358 - DNA, 25 bp, Artificial
  probe
  misc_feature (1)..(25): SEQ ID NO: 4467; WAN024AMX; Start 41; Stop 65
cacagcagtctaagccatcaaatac

SEQ ID NO: 383359 - DNA, 25 bp, Artificial
  probe
  misc_feature (1)..(25): SEQ ID NO: 4467; WAN024AMX; Start 49; Stop 73
tctaagccatcaaatacctataacc

SEQ ID NO: 383360 - DNA, 25 bp, Artificial
  probe
  misc_feature (1)..(25): SEQ ID NO: 4467; WAN024AMX; Start 40; Stop 64
acacagcagtctaagccatcaaata

SEQ ID NO: 383361 - DNA, 25 bp, Artificial
  probe
  misc_feature (1)..(25): SEQ ID NO: 4467; WAN024AMX; Start 11; Stop 35
gaagaaagattgcctgtgggtaaac

SEQ ID NO: 383362 - DNA, 25 bp, Artificial
  probe
  misc_feature (1)..(25): SEQ ID NO: 4467; WAN024AMX; Start 10; Stop 34
agaagaaagattgcctgtgggtaaa

SEQ ID NO: 383363 - DNA, 25 bp, Artificial
  probe
  misc_feature (1)..(25): SEQ ID NO: 4467; WAN024AMX; Start 46; Stop 70
cagtctaagccatcaaatacctata

SEQ ID NO: 383364 - DNA, 25 bp, Artificial
  probe
  misc_feature (1)..(25): SEQ ID NO: 4467; WAN024AMX; Start 43; Stop 67
cagcagtctaagccatcaaatacct

SEQ ID NO: 383365 - DNA, 25 bp, Artificial
  probe
  misc_feature (1)..(25): SEQ ID NO: 4467; WAN024AMX; Start 29; Stop 53
ggtaaacagtcacacagcagtctaa

SEQ ID NO: 383366 - DNA, 25 bp, Artificial
  probe
  misc_feature (1)..(25): SEQ ID NO: 4467; WAN024AMX; Start 42; Stop 66
acagcagtctaagccatcaaatacc

SEQ ID NO: 383367 - DNA, 25 bp, Artificial
  probe
  misc_feature (1)..(25): SEQ ID NO: 4467; WAN024AMX; Start 48; Stop 72
gtctaagccatcaaatacctataac

SEQ ID NO: 383368 - DNA, 25 bp, Artificial
  probe
  misc_feature (1)..(25): SEQ ID NO: 4467; WAN024AMX; Start 47; Stop 71
agtctaagccatcaaatacctataa

SEQ ID NO: 383369 - DNA, 25 bp, Artificial
  probe
  misc_feature (1)..(25): SEQ ID NO: 4467; WAN024AMX; Start 31; Stop 55
taaacagtcacacagcagtctaagc

SEQ ID NO: 383370 - DNA, 25 bp, Artificial
  probe
  misc_feature (1)..(25): SEQ ID NO: 4467; WAN024AMX; Start 4; Stop 28
taatatagaagaaagattgcctgtg

SEQ ID NO: 383371 - DNA, 25 bp, Artificial
  probe
  misc_feature (1)..(25): SEQ ID NO: 4467; WAN024AMX; Start 12; Stop 36
aagaaagattgcctgtgggtaaaca

SEQ ID NO: 383372 - DNA, 25 bp, Artificial
  probe
  misc_feature (1)..(25): SEQ ID NO: 4467; WAN024AMX; Start 39; Stop 63
cacacagcagtctaagccatcaaat

SEQ ID NO: 383373 - DNA, 25 bp, Artificial
  probe
  misc_feature (1)..(25): SEQ ID NO: 4467; WAN024AMX; Start 3; Stop 27
ctaatatagaagaaagattgcctgt

SEQ ID NO: 383374 - DNA, 25 bp, Artificial
  probe
  misc_feature (1)..(25): SEQ ID NO: 4467; WAN024AMX; Start 2; Stop 26
actaatatagaagaaagattgcctg

SEQ ID NO: 383375 - DNA, 25 bp, Artificial
  probe
  misc_feature (1)..(25): SEQ ID NO: 4467; WAN024AMX; Start 55; Stop 79
ccatcaaatacctataacccttaaa

SEQ ID NO: 383376 - DNA, 25 bp, Artificial
  probe
  misc_feature (1)..(25): SEQ ID NO: 4467; WAN024AMX; Start 68; Stop 92
ataacccttaaaatagcgatttcgg

SEQ ID NO: 383377 - DNA, 25 bp, Artificial
  probe
  misc_feature (1)..(25): SEQ ID NO: 4467; WAN024AMX; Start 37; Stop 61
gtcacacagcagtctaagccatcaa

SEQ ID NO: 383378 - DNA, 25 bp, Artificial
  probe
  misc_feature (1)..(25): SEQ ID NO: 4468; WAN024AD4; Start 8; Stop 32
agtgaatatgatttgagtgaatagt

SEQ ID NO: 383379 - DNA, 25 bp, Artificial
  probe
  misc_feature (1)..(25): SEQ ID NO: 4468; WAN024AD4; Start 7; Stop 31
aagtgaatatgatttgagtgaatag

SEQ ID NO: 383380 - DNA, 25 bp, Artificial
  probe
  misc_feature (1)..(25): SEQ ID NO: 4469; WAN0249YY; Start 56; Stop 80
agatatccaattagatgtaagcact

SEQ ID NO: 383381 - DNA, 25 bp, Artificial
  probe
  misc_feature (1)..(25): SEQ ID NO: 4469; WAN0249YY; Start 7; Stop 31
acctctgtgtaaagataagactatt

SEQ ID NO: 383382 - DNA, 25 bp, Artificial
  probe
  misc_feature (1)..(25): SEQ ID NO: 4469; WAN0249YY; Start 57; Stop 81
gatatccaattagatgtaagcactt

SEQ ID NO: 383383 - DNA, 25 bp, Artificial
  probe
  misc_feature (1)..(25): SEQ ID NO: 4469; WAN0249YY; Start 55; Stop 79
aagatatccaattagatgtaagcac

SEQ ID NO: 383384 - DNA, 25 bp, Artificial
  probe
  misc_feature (1)..(25): SEQ ID NO: 4469; WAN0249YY; Start 60; Stop 84
atccaattagatgtaagcactttaa

SEQ ID NO: 383385 - DNA, 25 bp, Artificial
  probe
  misc_feature (1)..(25): SEQ ID NO: 4469; WAN0249YY; Start 58; Stop 82
atatccaattagatgtaagcacttt

SEQ ID NO: 383386 - DNA, 25 bp, Artificial
  probe
  misc_feature (1)..(25): SEQ ID NO: 4469; WAN0249YY; Start 6; Stop 30
tacctctgtgtaaagataagactat

SEQ ID NO: 383387 - DNA, 25 bp, Artificial
  probe
  misc_feature (1)..(25): SEQ ID NO: 4469; WAN0249YY; Start 5; Stop 29
atacctctgtgtaaagataagacta

SEQ ID NO: 383388 - DNA, 25 bp, Artificial
  probe
  misc_feature (1)..(25): SEQ ID NO: 4469; WAN0249YY; Start 4; Stop 28
tatacctctgtgtaaagataagact

SEQ ID NO: 383389 - DNA, 25 bp, Artificial
  probe
  misc_feature (1)..(25): SEQ ID NO: 4469; WAN0249YY; Start 2; Stop 26
actatacctctgtgtaaagataaga

SEQ ID NO: 383390 - DNA, 25 bp, Artificial
  probe
  misc_feature (1)..(25): SEQ ID NO: 4469; WAN0249YY; Start 3; Stop 27
ctatacctctgtgtaaagataagac

SEQ ID NO: 383391 - DNA, 25 bp, Artificial
  probe
  misc_feature (1)..(25): SEQ ID NO: 4469; WAN0249YY; Start 61; Stop 85
tccaattagatgtaagcactttaaa

SEQ ID NO: 383392 - DNA, 25 bp, Artificial
  probe
  misc_feature (1)..(25): SEQ ID NO: 4469; WAN0249YY; Start 59; Stop 83
tatccaattagatgtaagcacttta

SEQ ID NO: 383393 - DNA, 25 bp, Artificial
  probe
  misc_feature (1)..(25): SEQ ID NO: 4469; WAN0249YY; Start 8; Stop 32
cctctgtgtaaagataagactatta

SEQ ID NO: 383394 - DNA, 25 bp, Artificial
  probe
  misc_feature (1)..(25): SEQ ID NO: 4469; WAN0249YY; Start 54; Stop 78
aaagatatccaattagatgtaagca

SEQ ID NO: 383395 - DNA, 25 bp, Artificial
  probe
  misc_feature (1)..(25): SEQ ID NO: 4469; WAN0249YY; Start 62; Stop 86
ccaattagatgtaagcactttaaaa

SEQ ID NO: 383396 - DNA, 25 bp, Artificial
  probe
  misc_feature (1)..(25): SEQ ID NO: 4470; WAN0249MY; Start 13; Stop 37
tttagacacctgacaatatgccttt

SEQ ID NO: 383397 - DNA, 25 bp, Artificial
  probe
  misc_feature (1)..(25): SEQ ID NO: 4470; WAN0249MY; Start 14; Stop 38
ttagacacctgacaatatgcctttt

SEQ ID NO: 383398 - DNA, 25 bp, Artificial
  probe
  misc_feature (1)..(25): SEQ ID NO: 4470; WAN0249MY; Start 12; Stop 36
ttttagacacctgacaatatgcctt

SEQ ID NO: 383399 - DNA, 25 bp, Artificial
  probe
  misc_feature (1)..(25): SEQ ID NO: 4470; WAN0249MY; Start 38; Stop 62
ttctaactttaaagacttttcccaa

SEQ ID NO: 383400 - DNA, 25 bp, Artificial
  probe
  misc_feature (1)..(25): SEQ ID NO: 4470; WAN0249MY; Start 37; Stop 61
tttctaactttaaagacttttccca

SEQ ID NO: 383401 - DNA, 25 bp, Artificial
  probe
  misc_feature (1)..(25): SEQ ID NO: 4470; WAN0249MY; Start 39; Stop 63
tctaactttaaagacttttcccaat

SEQ ID NO: 383402 - DNA, 25 bp, Artificial
  probe
  misc_feature (1)..(25): SEQ ID NO: 4470; WAN0249MY; Start 42; Stop 66
aactttaaagacttttcccaatttt

SEQ ID NO: 383403 - DNA, 25 bp, Artificial
  probe
  misc_feature (1)..(25): SEQ ID NO: 4470; WAN0249MY; Start 40; Stop 64
ctaactttaaagacttttcccaatt

SEQ ID NO: 383404 - DNA, 25 bp, Artificial
  probe
  misc_feature (1)..(25): SEQ ID NO: 4470; WAN0249MY; Start 36; Stop 60
ttttctaactttaaagacttttccc

SEQ ID NO: 383405 - DNA, 25 bp, Artificial
  probe
  misc_feature (1)..(25): SEQ ID NO: 4470; WAN0249MY; Start 41; Stop 65
taactttaaagacttttcccaattt

SEQ ID NO: 383406 - DNA, 25 bp, Artificial
  probe
  misc_feature (1)..(25): SEQ ID NO: 4471; WAN0249HX; Start 10; Stop 34
tcctttatctatagtctcgtccatt

SEQ ID NO: 383407 - DNA, 25 bp, Artificial
  probe
  misc_feature (1)..(25): SEQ ID NO: 4471; WAN0249HX; Start 9; Stop 33
atcctttatctatagtctcgtccat

SEQ ID NO: 383408 - DNA, 25 bp, Artificial
  probe
  misc_feature (1)..(25): SEQ ID NO: 4471; WAN0249HX; Start 8; Stop 32
tatcctttatctatagtctcgtcca

SEQ ID NO: 383409 - DNA, 25 bp, Artificial
  probe
  misc_feature (1)..(25): SEQ ID NO: 4471; WAN0249HX; Start 18; Stop 42
ctatagtctcgtccattatatcatg

SEQ ID NO: 383410 - DNA, 25 bp, Artificial
  probe
  misc_feature (1)..(25): SEQ ID NO: 4471; WAN0249HX; Start 17; Stop 41
tctatagtctcgtccattatatcat

SEQ ID NO: 383411 - DNA, 25 bp, Artificial
  probe
  misc_feature (1)..(25): SEQ ID NO: 4471; WAN0249HX; Start 16; Stop 40
atctatagtctcgtccattatatca

SEQ ID NO: 383412 - DNA, 25 bp, Artificial
  probe
  misc_feature (1)..(25): SEQ ID NO: 4471; WAN0249HX; Start 11; Stop 35
cctttatctatagtctcgtccatta

SEQ ID NO: 383413 - DNA, 25 bp, Artificial
  probe
  misc_feature (1)..(25): SEQ ID NO: 4471; WAN0249HX; Start 7; Stop 31
ctatcctttatctatagtctcgtcc

SEQ ID NO: 383414 - DNA, 25 bp, Artificial
  probe
  misc_feature (1)..(25): SEQ ID NO: 4471; WAN0249HX; Start 19; Stop 43
tatagtctcgtccattatatcatga

SEQ ID NO: 383415 - DNA, 25 bp, Artificial
  probe
  misc_feature (1)..(25): SEQ ID NO: 4471; WAN0249HX; Start 6; Stop 30
tctatcctttatctatagtctcgtc

SEQ ID NO: 383416 - DNA, 25 bp, Artificial
  probe
  misc_feature (1)..(25): SEQ ID NO: 4471; WAN0249HX; Start 5; Stop 29
ctctatcctttatctatagtctcgt

SEQ ID NO: 383417 - DNA, 25 bp, Artificial
  probe
  misc_feature (1)..(25): SEQ ID NO: 4471; WAN0249HX; Start 4; Stop 28
tctctatcctttatctatagtctcg

SEQ ID NO: 383418 - DNA, 25 bp, Artificial
  probe
  misc_feature (1)..(25): SEQ ID NO: 4471; WAN0249HX; Start 12; Stop 36
ctttatctatagtctcgtccattat

SEQ ID NO: 383419 - DNA, 25 bp, Artificial
  probe
  misc_feature (1)..(25): SEQ ID NO: 4471; WAN0249HX; Start 48; Stop 72
tcagaaaattctccctttataagag

SEQ ID NO: 383420 - DNA, 25 bp, Artificial
  probe
  misc_feature (1)..(25): SEQ ID NO: 4471; WAN0249HX; Start 47; Stop 71
ttcagaaaattctccctttataaga

SEQ ID NO: 383421 - DNA, 25 bp, Artificial
  probe
  misc_feature (1)..(25): SEQ ID NO: 4471; WAN0249HX; Start 2; Stop 26
actctctatcctttatctatagtct

SEQ ID NO: 383422 - DNA, 25 bp, Artificial
  probe
  misc_feature (1)..(25): SEQ ID NO: 4471; WAN0249HX; Start 46; Stop 70
tttcagaaaattctccctttataag

SEQ ID NO: 383423 - DNA, 25 bp, Artificial
  probe
  misc_feature (1)..(25): SEQ ID NO: 4471; WAN0249HX; Start 49; Stop 73
cagaaaattctccctttataagaga

SEQ ID NO: 383424 - DNA, 25 bp, Artificial
  probe
  misc_feature (1)..(25): SEQ ID NO: 4473; WAN0249WX; Start 35; Stop 59
acctagaatacatactttcatgtgc

SEQ ID NO: 383425 - DNA, 25 bp, Artificial
  probe
  misc_feature (1)..(25): SEQ ID NO: 4473; WAN0249WX; Start 48; Stop 72
actttcatgtgcattctaagtcttt

SEQ ID NO: 383426 - DNA, 25 bp, Artificial
  probe
  misc_feature (1)..(25): SEQ ID NO: 4473; WAN0249WX; Start 44; Stop 68
acatactttcatgtgcattctaagt

SEQ ID NO: 383427 - DNA, 25 bp, Artificial
  probe
  misc_feature (1)..(25): SEQ ID NO: 4473; WAN0249WX; Start 36; Stop 60
cctagaatacatactttcatgtgca

SEQ ID NO: 383428 - DNA, 25 bp, Artificial
  probe
  misc_feature (1)..(25): SEQ ID NO: 4473; WAN0249WX; Start 32; Stop 56
aagacctagaatacatactttcatg

SEQ ID NO: 383429 - DNA, 25 bp, Artificial
  probe
  misc_feature (1)..(25): SEQ ID NO: 4473; WAN0249WX; Start 47; Stop 71
tactttcatgtgcattctaagtctt

SEQ ID NO: 383430 - DNA, 25 bp, Artificial
  probe
  misc_feature (1)..(25): SEQ ID NO: 4473; WAN0249WX; Start 46; Stop 70
atactttcatgtgcattctaagtct

SEQ ID NO: 383431 - DNA, 25 bp, Artificial
  probe
  misc_feature (1)..(25): SEQ ID NO: 4473; WAN0249WX; Start 45; Stop 69
catactttcatgtgcattctaagtc

SEQ ID NO: 383432 - DNA, 25 bp, Artificial
  probe
  misc_feature (1)..(25): SEQ ID NO: 4473; WAN0249WX; Start 34; Stop 58
gacctagaatacatactttcatgtg

SEQ ID NO: 383433 - DNA, 25 bp, Artificial
  probe
  misc_feature (1)..(25): SEQ ID NO: 4473; WAN0249WX; Start 49; Stop 73
ctttcatgtgcattctaagtctttt

SEQ ID NO: 383434 - DNA, 25 bp, Artificial
  probe
  misc_feature (1)..(25): SEQ ID NO: 4473; WAN0249WX; Start 23; Stop 47
acaaaacaaaagacctagaatacat

SEQ ID NO: 383435 - DNA, 25 bp, Artificial
  probe
  misc_feature (1)..(25): SEQ ID NO: 4473; WAN0249WX; Start 33; Stop 57
agacctagaatacatactttcatgt

SEQ ID NO: 383436 - DNA, 25 bp, Artificial
  probe
  misc_feature (1)..(25): SEQ ID NO: 4473; WAN0249WX; Start 40; Stop 64
gaatacatactttcatgtgcattct

SEQ ID NO: 383437 - DNA, 25 bp, Artificial
  probe
  misc_feature (1)..(25): SEQ ID NO: 4473; WAN0249WX; Start 39; Stop 63
agaatacatactttcatgtgcattc

SEQ ID NO: 383438 - DNA, 25 bp, Artificial
  probe
  misc_feature (1)..(25): SEQ ID NO: 4473; WAN0249WX; Start 43; Stop 67
tacatactttcatgtgcattctaag

SEQ ID NO: 383439 - DNA, 25 bp, Artificial
  probe
  misc_feature (1)..(25): SEQ ID NO: 4473; WAN0249WX; Start 22; Stop 46
tacaaaacaaaagacctagaataca

SEQ ID NO: 383440 - DNA, 25 bp, Artificial
  probe
  misc_feature (1)..(25): SEQ ID NO: 4473; WAN0249WX; Start 37; Stop 61
ctagaatacatactttcatgtgcat

SEQ ID NO: 383441 - DNA, 25 bp, Artificial
  probe
  misc_feature (1)..(25): SEQ ID NO: 4473; WAN0249WX; Start 42; Stop 66
atacatactttcatgtgcattctaa

SEQ ID NO: 383442 - DNA, 25 bp, Artificial
  probe
  misc_feature (1)..(25): SEQ ID NO: 4473; WAN0249WX; Start 41; Stop 65
aatacatactttcatgtgcattcta

SEQ ID NO: 383443 - DNA, 25 bp, Artificial
  probe
  misc_feature (1)..(25): SEQ ID NO: 4473; WAN0249WX; Start 38; Stop 62
tagaatacatactttcatgtgcatt

SEQ ID NO: 383444 - DNA, 25 bp, Artificial
  probe
  misc_feature (1)..(25): SEQ ID NO: 4473; WAN0249WX; Start 26; Stop 50
aaacaaaagacctagaatacatact

SEQ ID NO: 383445 - DNA, 25 bp, Artificial
  probe
  misc_feature (1)..(25): SEQ ID NO: 4473; WAN0249WX; Start 31; Stop 55
aaagacctagaatacatactttcat

SEQ ID NO: 383446 - DNA, 25 bp, Artificial
  probe
  misc_feature (1)..(25): SEQ ID NO: 4473; WAN0249WX; Start 27; Stop 51
aacaaaagacctagaatacatactt

SEQ ID NO: 383447 - DNA, 25 bp, Artificial
  probe
  misc_feature (1)..(25): SEQ ID NO: 4473; WAN0249WX; Start 25; Stop 49
aaaacaaaagacctagaatacatac

SEQ ID NO: 383448 - DNA, 25 bp, Artificial
  probe
  misc_feature (1)..(25): SEQ ID NO: 4473; WAN0249WX; Start 24; Stop 48
caaaacaaaagacctagaatacata

SEQ ID NO: 383449 - DNA, 25 bp, Artificial
  probe
  misc_feature (1)..(25): SEQ ID NO: 4473; WAN0249WX; Start 21; Stop 45
atacaaaacaaaagacctagaatac

SEQ ID NO: 383450 - DNA, 25 bp, Artificial
  probe
  misc_feature (1)..(25): SEQ ID NO: 4473; WAN0249WX; Start 28; Stop 52
acaaaagacctagaatacatacttt

SEQ ID NO: 383451 - DNA, 25 bp, Artificial
  probe
  misc_feature (1)..(25): SEQ ID NO: 4473; WAN0249WX; Start 30; Stop 54
aaaagacctagaatacatactttca

SEQ ID NO: 383452 - DNA, 25 bp, Artificial
  probe
  misc_feature (1)..(25): SEQ ID NO: 4473; WAN0249WX; Start 29; Stop 53
caaaagacctagaatacatactttc

SEQ ID NO: 383453 - DNA, 25 bp, Artificial
  probe
  misc_feature (1)..(25): SEQ ID NO: 4473; WAN0249WX; Start 19; Stop 43
gtatacaaaacaaaagacctagaat

SEQ ID NO: 383454 - DNA, 25 bp, Artificial
  probe
  misc_feature (1)..(25): SEQ ID NO: 4474; WAN024FEE-M; Start 31; Stop 55
gttgaagagtgatgaagacctagaa

SEQ ID NO: 383455 - DNA, 25 bp, Artificial
  probe
  misc_feature (1)..(25): SEQ ID NO: 4474; WAN024FEE-M; Start 29; Stop 53
gagttgaagagtgatgaagacctag

SEQ ID NO: 383456 - DNA, 25 bp, Artificial
  probe
  misc_feature (1)..(25): SEQ ID NO: 4474; WAN024FEE-M; Start 30; Stop 54
agttgaagagtgatgaagacctaga

SEQ ID NO: 383457 - DNA, 25 bp, Artificial
  probe
  misc_feature (1)..(25): SEQ ID NO: 4474; WAN024FEE-M; Start 28; Stop 52
ggagttgaagagtgatgaagaccta

SEQ ID NO: 383458 - DNA, 25 bp, Artificial
  probe
  misc_feature (1)..(25): SEQ ID NO: 4474; WAN024FEE-M; Start 659; Stop 683
gctaatggcaatccgattatgtatg

SEQ ID NO: 383459 - DNA, 25 bp, Artificial
  probe
  misc_feature (1)..(25): SEQ ID NO: 4474; WAN024FEE-M; Start 499; Stop 523
tgtaggtggtcgtaattatcaagaa

SEQ ID NO: 383460 - DNA, 25 bp, Artificial
  probe
  misc_feature (1)..(25): SEQ ID NO: 4474; WAN024FEE-M; Start 119; Stop 143
gacgagtattctcagtacaaggatt

SEQ ID NO: 383461 - DNA, 25 bp, Artificial
  probe
  misc_feature (1)..(25): SEQ ID NO: 4474; WAN024FEE-M; Start 118; Stop 142
agacgagtattctcagtacaaggat

SEQ ID NO: 383462 - DNA, 25 bp, Artificial
  probe
  misc_feature (1)..(25): SEQ ID NO: 4474; WAN024FEE-M; Start 117; Stop 141
aagacgagtattctcagtacaagga

SEQ ID NO: 383463 - DNA, 25 bp, Artificial
  probe
  misc_feature (1)..(25): SEQ ID NO: 4474; WAN024FEE-M; Start 498; Stop 522
ttgtaggtggtcgtaattatcaaga

SEQ ID NO: 383464 - DNA, 25 bp, Artificial
  probe
  misc_feature (1)..(25): SEQ ID NO: 4474; WAN024FEE-M; Start 120; Stop 144
acgagtattctcagtacaaggatta

SEQ ID NO: 383465 - DNA, 25 bp, Artificial
  probe
  misc_feature (1)..(25): SEQ ID NO: 4474; WAN024FEE-M; Start 126; Stop 150
attctcagtacaaggattatgacct

SEQ ID NO: 383466 - DNA, 25 bp, Artificial
  probe
  misc_feature (1)..(25): SEQ ID NO: 4474; WAN024FEE-M; Start 614; Stop 638
ttgatgggaagtgaaacgattctat

SEQ ID NO: 383467 - DNA, 25 bp, Artificial
  probe
  misc_feature (1)..(25): SEQ ID NO: 4474; WAN024FEE-M; Start 616; Stop 640
gatgggaagtgaaacgattctatct

SEQ ID NO: 383468 - DNA, 25 bp, Artificial
  probe
  misc_feature (1)..(25): SEQ ID NO: 4474; WAN024FEE-M; Start 618; Stop 642
tgggaagtgaaacgattctatctaa

SEQ ID NO: 383469 - DNA, 25 bp, Artificial
  probe
  misc_feature (1)..(25): SEQ ID NO: 4474; WAN024FEE-M; Start 204; Stop 228
tatactttacaactttggcagaagc

SEQ ID NO: 383470 - DNA, 25 bp, Artificial
  probe
  misc_feature (1)..(25): SEQ ID NO: 4474; WAN024FEE-M; Start 615; Stop 639
tgatgggaagtgaaacgattctatc

SEQ ID NO: 383471 - DNA, 25 bp, Artificial
  probe
  misc_feature (1)..(25): SEQ ID NO: 4474; WAN024FEE-M; Start 445; Stop 469
tgtagaagtagggaatgtcttgatg

SEQ ID NO: 383472 - DNA, 25 bp, Artificial
  probe
  misc_feature (1)..(25): SEQ ID NO: 4474; WAN024FEE-M; Start 444; Stop 468
gtgtagaagtagggaatgtcttgat

SEQ ID NO: 383473 - DNA, 25 bp, Artificial
  probe
  misc_feature (1)..(25): SEQ ID NO: 4474; WAN024FEE-M; Start 617; Stop 641
atgggaagtgaaacgattctatcta

SEQ ID NO: 383474 - DNA, 25 bp, Artificial
  probe
  misc_feature (1)..(25): SEQ ID NO: 4474; WAN024FEE-M; Start 447; Stop 471
tagaagtagggaatgtcttgatgga

SEQ ID NO: 383475 - DNA, 25 bp, Artificial
  probe
  misc_feature (1)..(25): SEQ ID NO: 4474; WAN024FEE-M; Start 446; Stop 470
gtagaagtagggaatgtcttgatgg

SEQ ID NO: 383476 - DNA, 25 bp, Artificial
  probe
  misc_feature (1)..(25): SEQ ID NO: 4474; WAN024FEE-M; Start 431; Stop 455
gatggaacaggtcgtgtagaagtag

SEQ ID NO: 383477 - DNA, 25 bp, Artificial
  probe
  misc_feature (1)..(25): SEQ ID NO: 4474; WAN024FEE-M; Start 613; Stop 637
cttgatgggaagtgaaacgattcta

SEQ ID NO: 383478 - DNA, 25 bp, Artificial
  probe
  misc_feature (1)..(25): SEQ ID NO: 4474; WAN024FEE-M; Start 36; Stop 60
agagtgatgaagacctagaaattgg

SEQ ID NO: 383479 - DNA, 25 bp, Artificial
  probe
  misc_feature (1)..(25): SEQ ID NO: 4474; WAN024FEE-M; Start 121; Stop 145
cgagtattctcagtacaaggattat

SEQ ID NO: 383480 - DNA, 25 bp, Artificial
  probe
  misc_feature (1)..(25): SEQ ID NO: 4474; WAN024FEE-M; Start 32; Stop 56
ttgaagagtgatgaagacctagaaa

SEQ ID NO: 383481 - DNA, 25 bp, Artificial
  probe
  misc_feature (1)..(25): SEQ ID NO: 4474; WAN024FEE-M; Start 222; Stop 246
cagaagctcaagaacgtatgtatga

SEQ ID NO: 383482 - DNA, 25 bp, Artificial
  probe
  misc_feature (1)..(25): SEQ ID NO: 4474; WAN024FEE-M; Start 125; Stop 149
tattctcagtacaaggattatgacc

SEQ ID NO: 383483 - DNA, 25 bp, Artificial
  probe
  misc_feature (1)..(25): SEQ ID NO: 4474; WAN024FEE-M; Start 33; Stop 57
tgaagagtgatgaagacctagaaat

SEQ ID NO: 383484 - DNA, 25 bp, Artificial
  probe
  misc_feature (1)..(25): SEQ ID NO: 4474; WAN024FEE-M; Start 40; Stop 64
tgatgaagacctagaaattggctta

SEQ ID NO: 383485 - DNA, 25 bp, Artificial
  probe
  misc_feature (1)..(25): SEQ ID NO: 4474; WAN024FEE-M; Start 110; Stop 134
ttaagcaaagacgagtattctcagt

SEQ ID NO: 383486 - DNA, 25 bp, Artificial
  probe
  misc_feature (1)..(25): SEQ ID NO: 4474; WAN024FEE-M; Start 70; Stop 94
ggctaaggcagttctttacagtatg

SEQ ID NO: 383487 - DNA, 25 bp, Artificial
  probe
  misc_feature (1)..(25): SEQ ID NO: 4475; WAN024D3W-3; Start 769; Stop 793
ggtgactggtattatgttataggca

SEQ ID NO: 383488 - DNA, 25 bp, Artificial
  probe
  misc_feature (1)..(25): SEQ ID NO: 4475; WAN024D3W-3; Start 767; Stop 791
acggtgactggtattatgttatagg

SEQ ID NO: 383489 - DNA, 25 bp, Artificial
  probe
  misc_feature (1)..(25): SEQ ID NO: 4475; WAN024D3W-3; Start 768; Stop 792
cggtgactggtattatgttataggc

SEQ ID NO: 383490 - DNA, 25 bp, Artificial
  probe
  misc_feature (1)..(25): SEQ ID NO: 4475; WAN024D3W-3; Start 770; Stop 794
gtgactggtattatgttataggcaa

SEQ ID NO: 383491 - DNA, 25 bp, Artificial
  probe
  misc_feature (1)..(25): SEQ ID NO: 4475; WAN024D3W-3; Start 765; Stop 789
caacggtgactggtattatgttata

SEQ ID NO: 383492 - DNA, 25 bp, Artificial
  probe
  misc_feature (1)..(25): SEQ ID NO: 4475; WAN024D3W-3; Start 766; Stop 790
aacggtgactggtattatgttatag

SEQ ID NO: 383493 - DNA, 25 bp, Artificial
  probe
  misc_feature (1)..(25): SEQ ID NO: 4475; WAN024D3W-3; Start 773; Stop 797
actggtattatgttataggcaatca

SEQ ID NO: 383494 - DNA, 25 bp, Artificial
  probe
  misc_feature (1)..(25): SEQ ID NO: 4475; WAN024D3W-3; Start 771; Stop 795
tgactggtattatgttataggcaat

SEQ ID NO: 383495 - DNA, 25 bp, Artificial
  probe
  misc_feature (1)..(25): SEQ ID NO: 4475; WAN024D3W-3; Start 226; Stop 250
gaagtgacagagctaattgaatacg

SEQ ID NO: 383496 - DNA, 25 bp, Artificial
  probe
  misc_feature (1)..(25): SEQ ID NO: 4475; WAN024D3W-3; Start 852; Stop 876
tccattcaatcaactagcttctacc

SEQ ID NO: 383497 - DNA, 25 bp, Artificial
  probe
  misc_feature (1)..(25): SEQ ID NO: 4475; WAN024D3W-3; Start 774; Stop 798
ctggtattatgttataggcaatcac

SEQ ID NO: 383498 - DNA, 25 bp, Artificial
  probe
  misc_feature (1)..(25): SEQ ID NO: 4475; WAN024D3W-3; Start 851; Stop 875
ttccattcaatcaactagcttctac

SEQ ID NO: 383499 - DNA, 25 bp, Artificial
  probe
  misc_feature (1)..(25): SEQ ID NO: 4475; WAN024D3W-3; Start 764; Stop 788
ccaacggtgactggtattatgttat

SEQ ID NO: 383500 - DNA, 25 bp, Artificial
  probe
  misc_feature (1)..(25): SEQ ID NO: 4475; WAN024D3W-3; Start 227; Stop 251
aagtgacagagctaattgaatacgc

SEQ ID NO: 383501 - DNA, 25 bp, Artificial
  probe
  misc_feature (1)..(25): SEQ ID NO: 4475; WAN024D3W-3; Start 225; Stop 249
agaagtgacagagctaattgaatac

SEQ ID NO: 383502 - DNA, 25 bp, Artificial
  probe
  misc_feature (1)..(25): SEQ ID NO: 4475; WAN024D3W-3; Start 224; Stop 248
cagaagtgacagagctaattgaata

SEQ ID NO: 383503 - DNA, 25 bp, Artificial
  probe
  misc_feature (1)..(25): SEQ ID NO: 4475; WAN024D3W-3; Start 223; Stop 247
gcagaagtgacagagctaattgaat

SEQ ID NO: 383504 - DNA, 25 bp, Artificial
  probe
  misc_feature (1)..(25): SEQ ID NO: 4475; WAN024D3W-3; Start 772; Stop 796
gactggtattatgttataggcaatc

SEQ ID NO: 383505 - DNA, 25 bp, Artificial
  probe
  misc_feature (1)..(25): SEQ ID NO: 4475; WAN024D3W-3; Start 246; Stop 270
atacgctaaatctaaggacattggt

SEQ ID NO: 383506 - DNA, 25 bp, Artificial
  probe
  misc_feature (1)..(25): SEQ ID NO: 4475; WAN024D3W-3; Start 850; Stop 874
gttccattcaatcaactagcttcta

SEQ ID NO: 383507 - DNA, 25 bp, Artificial
  probe
  misc_feature (1)..(25): SEQ ID NO: 4475; WAN024D3W-3; Start 775; Stop 799
tggtattatgttataggcaatcaca

SEQ ID NO: 383508 - DNA, 25 bp, Artificial
  probe
  misc_feature (1)..(25): SEQ ID NO: 4475; WAN024D3W-3; Start 1123; Stop 1147
tacaacctcaaccgtaataaacaag

SEQ ID NO: 383509 - DNA, 25 bp, Artificial
  probe
  misc_feature (1)..(25): SEQ ID NO: 4475; WAN024D3W-3; Start 88; Stop 112
ggacttcgctttctactcaatgata

SEQ ID NO: 383510 - DNA, 25 bp, Artificial
  probe
  misc_feature (1)..(25): SEQ ID NO: 4475; WAN024D3W-3; Start 245; Stop 269
aatacgctaaatctaaggacattgg

SEQ ID NO: 383511 - DNA, 25 bp, Artificial
  probe
  misc_feature (1)..(25): SEQ ID NO: 4475; WAN024D3W-3; Start 105; Stop 129
caatgatatgaccattactgccaac

SEQ ID NO: 383512 - DNA, 25 bp, Artificial
  probe
  misc_feature (1)..(25): SEQ ID NO: 4475; WAN024D3W-3; Start 104; Stop 128
tcaatgatatgaccattactgccaa

SEQ ID NO: 383513 - DNA, 25 bp, Artificial
  probe
  misc_feature (1)..(25): SEQ ID NO: 4475; WAN024D3W-3; Start 1114; Stop 1138
gctctaaattacaacctcaaccgta

SEQ ID NO: 383514 - DNA, 25 bp, Artificial
  probe
  misc_feature (1)..(25): SEQ ID NO: 4475; WAN024D3W-3; Start 90; Stop 114
acttcgctttctactcaatgatatg

SEQ ID NO: 383515 - DNA, 25 bp, Artificial
  probe
  misc_feature (1)..(25): SEQ ID NO: 4475; WAN024D3W-3; Start 103; Stop 127
ctcaatgatatgaccattactgcca

SEQ ID NO: 383516 - DNA, 25 bp, Artificial
  probe
  misc_feature (1)..(25): SEQ ID NO: 4475; WAN024D3W-3; Start 102; Stop 126
actcaatgatatgaccattactgcc

SEQ ID NO: 383517 - DNA, 25 bp, Artificial
  probe
  misc_feature (1)..(25): SEQ ID NO: 4475; WAN024D3W-3; Start 997; Stop 1021
aacaaagactacttccgtgctaatt

SEQ ID NO: 383518 - DNA, 25 bp, Artificial
  probe
  misc_feature (1)..(25): SEQ ID NO: 4475; WAN024D3W-3; Start 89; Stop 113
gacttcgctttctactcaatgatat

SEQ ID NO: 383519 - DNA, 25 bp, Artificial
  probe
  misc_feature (1)..(25): SEQ ID NO: 4475; WAN024D3W-3; Start 787; Stop 811
ataggcaatcacaaacaagatgaag

SEQ ID NO: 383520 - DNA, 25 bp, Artificial
  probe
  misc_feature (1)..(25): SEQ ID NO: 4476; WAN0249TC; Start 8; Stop 32
atgttgaaatagggaatgagccttt

SEQ ID NO: 383521 - DNA, 25 bp, Artificial
  probe
  misc_feature (1)..(25): SEQ ID NO: 4476; WAN0249TC; Start 7; Stop 31
aatgttgaaatagggaatgagcctt

SEQ ID NO: 383522 - DNA, 25 bp, Artificial
  probe
  misc_feature (1)..(25): SEQ ID NO: 4476; WAN0249TC; Start 6; Stop 30
aaatgttgaaatagggaatgagcct

SEQ ID NO: 383523 - DNA, 25 bp, Artificial
  probe
  misc_feature (1)..(25): SEQ ID NO: 4476; WAN0249TC; Start 33; Stop 57
gactcactccctgtttcgatattta

SEQ ID NO: 383524 - DNA, 25 bp, Artificial
  probe
  misc_feature (1)..(25): SEQ ID NO: 4476; WAN0249TC; Start 34; Stop 58
actcactccctgtttcgatatttaa

SEQ ID NO: 383525 - DNA, 25 bp, Artificial
  probe
  misc_feature (1)..(25): SEQ ID NO: 4476; WAN0249TC; Start 11; Stop 35
ttgaaatagggaatgagcctttgac

SEQ ID NO: 383526 - DNA, 25 bp, Artificial
  probe
  misc_feature (1)..(25): SEQ ID NO: 4476; WAN0249TC; Start 10; Stop 34
gttgaaatagggaatgagcctttga

SEQ ID NO: 383527 - DNA, 25 bp, Artificial
  probe
  misc_feature (1)..(25): SEQ ID NO: 4476; WAN0249TC; Start 13; Stop 37
gaaatagggaatgagcctttgactc

SEQ ID NO: 383528 - DNA, 25 bp, Artificial
  probe
  misc_feature (1)..(25): SEQ ID NO: 4476; WAN0249TC; Start 9; Stop 33
tgttgaaatagggaatgagcctttg

SEQ ID NO: 383529 - DNA, 25 bp, Artificial
  probe
  misc_feature (1)..(25): SEQ ID NO: 4476; WAN0249TC; Start 35; Stop 59
ctcactccctgtttcgatatttaat

SEQ ID NO: 383530 - DNA, 25 bp, Artificial
  probe
  misc_feature (1)..(25): SEQ ID NO: 4476; WAN0249TC; Start 12; Stop 36
tgaaatagggaatgagcctttgact

SEQ ID NO: 383531 - DNA, 25 bp, Artificial
  probe
  misc_feature (1)..(25): SEQ ID NO: 4476; WAN0249TC; Start 32; Stop 56
tgactcactccctgtttcgatattt

SEQ ID NO: 383532 - DNA, 25 bp, Artificial
  probe
  misc_feature (1)..(25): SEQ ID NO: 4476; WAN0249TC; Start 31; Stop 55
ttgactcactccctgtttcgatatt

SEQ ID NO: 383533 - DNA, 25 bp, Artificial
  probe
  misc_feature (1)..(25): SEQ ID NO: 4476; WAN0249TC; Start 30; Stop 54
tttgactcactccctgtttcgatat

SEQ ID NO: 383534 - DNA, 25 bp, Artificial
  probe
  misc_feature (1)..(25): SEQ ID NO: 4476; WAN0249TC; Start 5; Stop 29
aaaatgttgaaatagggaatgagcc

SEQ ID NO: 383535 - DNA, 25 bp, Artificial
  probe
  misc_feature (1)..(25): SEQ ID NO: 4476; WAN0249TC; Start 234; Stop 258
accctcggaattataaatagaaaga

SEQ ID NO: 383536 - DNA, 25 bp, Artificial
  probe
  misc_feature (1)..(25): SEQ ID NO: 4476; WAN0249TC; Start 29; Stop 53
ctttgactcactccctgtttcgata

SEQ ID NO: 383537 - DNA, 25 bp, Artificial
  probe
  misc_feature (1)..(25): SEQ ID NO: 4476; WAN0249TC; Start 37; Stop 61
cactccctgtttcgatatttaatac

SEQ ID NO: 383538 - DNA, 25 bp, Artificial
  probe
  misc_feature (1)..(25): SEQ ID NO: 4476; WAN0249TC; Start 36; Stop 60
tcactccctgtttcgatatttaata

SEQ ID NO: 383539 - DNA, 25 bp, Artificial
  probe
  misc_feature (1)..(25): SEQ ID NO: 4476; WAN0249TC; Start 38; Stop 62
actccctgtttcgatatttaatact

SEQ ID NO: 383540 - DNA, 25 bp, Artificial
  probe
  misc_feature (1)..(25): SEQ ID NO: 4476; WAN0249TC; Start 40; Stop 64
tccctgtttcgatatttaatactct

SEQ ID NO: 383541 - DNA, 25 bp, Artificial
  probe
  misc_feature (1)..(25): SEQ ID NO: 4476; WAN0249TC; Start 67; Stop 91
gaaaatctcttcaaactgcgtcaac

SEQ ID NO: 383542 - DNA, 25 bp, Artificial
  probe
  misc_feature (1)..(25): SEQ ID NO: 4476; WAN0249TC; Start 39; Stop 63
ctccctgtttcgatatttaatactc

SEQ ID NO: 383543 - DNA, 25 bp, Artificial
  probe
  misc_feature (1)..(25): SEQ ID NO: 4476; WAN0249TC; Start 233; Stop 257
aaccctcggaattataaatagaaag

SEQ ID NO: 383544 - DNA, 25 bp, Artificial
  probe
  misc_feature (1)..(25): SEQ ID NO: 4476; WAN0249TC; Start 235; Stop 259
ccctcggaattataaatagaaagag

SEQ ID NO: 383545 - DNA, 25 bp, Artificial
  probe
  misc_feature (1)..(25): SEQ ID NO: 4476; WAN0249TC; Start 41; Stop 65
ccctgtttcgatatttaatactctt

SEQ ID NO: 383546 - DNA, 25 bp, Artificial
  probe
  misc_feature (1)..(25): SEQ ID NO: 4476; WAN0249TC; Start 66; Stop 90
cgaaaatctcttcaaactgcgtcaa

SEQ ID NO: 383547 - DNA, 25 bp, Artificial
  probe
  misc_feature (1)..(25): SEQ ID NO: 4476; WAN0249TC; Start 232; Stop 256
aaaccctcggaattataaatagaaa

SEQ ID NO: 383548 - DNA, 25 bp, Artificial
  probe
  misc_feature (1)..(25): SEQ ID NO: 4476; WAN0249TC; Start 69; Stop 93
aaatctcttcaaactgcgtcaacgt

SEQ ID NO: 383549 - DNA, 25 bp, Artificial
  probe
  misc_feature (1)..(25): SEQ ID NO: 4476; WAN0249TC; Start 236; Stop 260
cctcggaattataaatagaaagagt

SEQ ID NO: 383550 - DNA, 25 bp, Artificial
  probe
  misc_feature (1)..(25): SEQ ID NO: 4476; WAN0249TC; Start 229; Stop 253
ggaaaaccctcggaattataaatag

SEQ ID NO: 383551 - DNA, 25 bp, Artificial
  probe
  misc_feature (1)..(25): SEQ ID NO: 4476; WAN0249TC; Start 68; Stop 92
aaaatctcttcaaactgcgtcaacg

SEQ ID NO: 383552 - DNA, 25 bp, Artificial
  probe
  misc_feature (1)..(25): SEQ ID NO: 4476; WAN0249TC; Start 14; Stop 38
aaatagggaatgagcctttgactca

SEQ ID NO: 383553 - DNA, 25 bp, Artificial
  probe
  misc_feature (1)..(25): SEQ ID NO: 4477; WAN024AES; Start 33; Stop 57
gcaggagaaaatgaaataatactca

SEQ ID NO: 383554 - DNA, 25 bp, Artificial
  probe
  misc_feature (1)..(25): SEQ ID NO: 4477; WAN024AES; Start 22; Stop 46
agaattcaattgcaggagaaaatga

SEQ ID NO: 383555 - DNA, 25 bp, Artificial
  probe
  misc_feature (1)..(25): SEQ ID NO: 4477; WAN024AES; Start 21; Stop 45
aagaattcaattgcaggagaaaatg

SEQ ID NO: 383556 - DNA, 25 bp, Artificial
  probe
  misc_feature (1)..(25): SEQ ID NO: 4477; WAN024AES; Start 20; Stop 44
caagaattcaattgcaggagaaaat

SEQ ID NO: 383557 - DNA, 25 bp, Artificial
  probe
  misc_feature (1)..(25): SEQ ID NO: 4477; WAN024AES; Start 32; Stop 56
tgcaggagaaaatgaaataatactc

SEQ ID NO: 383558 - DNA, 25 bp, Artificial
  probe
  misc_feature (1)..(25): SEQ ID NO: 4477; WAN024AES; Start 31; Stop 55
ttgcaggagaaaatgaaataatact

SEQ ID NO: 383559 - DNA, 25 bp, Artificial
  probe
  misc_feature (1)..(25): SEQ ID NO: 4477; WAN024AES; Start 27; Stop 51
tcaattgcaggagaaaatgaaataa

SEQ ID NO: 383560 - DNA, 25 bp, Artificial
  probe
  misc_feature (1)..(25): SEQ ID NO: 4477; WAN024AES; Start 30; Stop 54
attgcaggagaaaatgaaataatac

SEQ ID NO: 383561 - DNA, 25 bp, Artificial
  probe
  misc_feature (1)..(25): SEQ ID NO: 4477; WAN024AES; Start 28; Stop 52
caattgcaggagaaaatgaaataat

SEQ ID NO: 383562 - DNA, 25 bp, Artificial
  probe
  misc_feature (1)..(25): SEQ ID NO: 4477; WAN024AES; Start 17; Stop 41
gagcaagaattcaattgcaggagaa

SEQ ID NO: 383563 - DNA, 25 bp, Artificial
  probe
  misc_feature (1)..(25): SEQ ID NO: 4477; WAN024AES; Start 34; Stop 58
caggagaaaatgaaataatactcaa

SEQ ID NO: 383564 - DNA, 25 bp, Artificial
  probe
  misc_feature (1)..(25): SEQ ID NO: 4477; WAN024AES; Start 23; Stop 47
gaattcaattgcaggagaaaatgaa

SEQ ID NO: 383565 - DNA, 25 bp, Artificial
  probe
  misc_feature (1)..(25): SEQ ID NO: 4477; WAN024AES; Start 24; Stop 48
aattcaattgcaggagaaaatgaaa

SEQ ID NO: 383566 - DNA, 25 bp, Artificial
  probe
  misc_feature (1)..(25): SEQ ID NO: 4477; WAN024AES; Start 25; Stop 49
attcaattgcaggagaaaatgaaat

SEQ ID NO: 383567 - DNA, 25 bp, Artificial
  probe
  misc_feature (1)..(25): SEQ ID NO: 4477; WAN024AES; Start 29; Stop 53
aattgcaggagaaaatgaaataata

SEQ ID NO: 383568 - DNA, 25 bp, Artificial
  probe
  misc_feature (1)..(25): SEQ ID NO: 4477; WAN024AES; Start 26; Stop 50
ttcaattgcaggagaaaatgaaata

SEQ ID NO: 383569 - DNA, 25 bp, Artificial
  probe
  misc_feature (1)..(25): SEQ ID NO: 4477; WAN024AES; Start 18; Stop 42
agcaagaattcaattgcaggagaaa

SEQ ID NO: 383570 - DNA, 25 bp, Artificial
  probe
  misc_feature (1)..(25): SEQ ID NO: 4477; WAN024AES; Start 16; Stop 40
cgagcaagaattcaattgcaggaga

SEQ ID NO: 383571 - DNA, 25 bp, Artificial
  probe
  misc_feature (1)..(25): SEQ ID NO: 4477; WAN024AES; Start 19; Stop 43
gcaagaattcaattgcaggagaaaa

SEQ ID NO: 383572 - DNA, 25 bp, Artificial
  probe
  misc_feature (1)..(25): SEQ ID NO: 4477; WAN024AES; Start 15; Stop 39
ccgagcaagaattcaattgcaggag

SEQ ID NO: 383573 - DNA, 25 bp, Artificial
  probe
  misc_feature (1)..(25): SEQ ID NO: 4477; WAN024AES; Start 12; Stop 36
aagccgagcaagaattcaattgcag

SEQ ID NO: 383574 - DNA, 25 bp, Artificial
  probe
  misc_feature (1)..(25): SEQ ID NO: 4477; WAN024AES; Start 11; Stop 35
aaagccgagcaagaattcaattgca

SEQ ID NO: 383575 - DNA, 25 bp, Artificial
  probe
  misc_feature (1)..(25): SEQ ID NO: 4477; WAN024AES; Start 10; Stop 34
aaaagccgagcaagaattcaattgc

SEQ ID NO: 383576 - DNA, 25 bp, Artificial
  probe
  misc_feature (1)..(25): SEQ ID NO: 4478; WAN024AOH; Start 65; Stop 89
tgtcttatgaatgtaacagatgact

SEQ ID NO: 383577 - DNA, 25 bp, Artificial
  probe
  misc_feature (1)..(25): SEQ ID NO: 4478; WAN024AOH; Start 66; Stop 90
gtcttatgaatgtaacagatgactg

SEQ ID NO: 383578 - DNA, 25 bp, Artificial
  probe
  misc_feature (1)..(25): SEQ ID NO: 4478; WAN024AOH; Start 62; Stop 86
acttgtcttatgaatgtaacagatg

SEQ ID NO: 383579 - DNA, 25 bp, Artificial
  probe
  misc_feature (1)..(25): SEQ ID NO: 4478; WAN024AOH; Start 64; Stop 88
ttgtcttatgaatgtaacagatgac

SEQ ID NO: 383580 - DNA, 25 bp, Artificial
  probe
  misc_feature (1)..(25): SEQ ID NO: 4478; WAN024AOH; Start 63; Stop 87
cttgtcttatgaatgtaacagatga

SEQ ID NO: 383581 - DNA, 25 bp, Artificial
  probe
  misc_feature (1)..(25): SEQ ID NO: 4478; WAN024AOH; Start 61; Stop 85
tacttgtcttatgaatgtaacagat

SEQ ID NO: 383582 - DNA, 25 bp, Artificial
  probe
  misc_feature (1)..(25): SEQ ID NO: 4478; WAN024AOH; Start 60; Stop 84
atacttgtcttatgaatgtaacaga

SEQ ID NO: 383583 - DNA, 25 bp, Artificial
  probe
  misc_feature (1)..(25): SEQ ID NO: 4478; WAN024AOH; Start 67; Stop 91
tcttatgaatgtaacagatgactgt

SEQ ID NO: 383584 - DNA, 25 bp, Artificial
  probe
  misc_feature (1)..(25): SEQ ID NO: 4478; WAN024AOH; Start 56; Stop 80
tggtatacttgtcttatgaatgtaa

SEQ ID NO: 383585 - DNA, 25 bp, Artificial
  probe
  misc_feature (1)..(25): SEQ ID NO: 4478; WAN024AOH; Start 57; Stop 81
ggtatacttgtcttatgaatgtaac

SEQ ID NO: 383586 - DNA, 25 bp, Artificial
  probe
  misc_feature (1)..(25): SEQ ID NO: 4478; WAN024AOH; Start 54; Stop 78
tatggtatacttgtcttatgaatgt

SEQ ID NO: 383587 - DNA, 25 bp, Artificial
  probe
  misc_feature (1)..(25): SEQ ID NO: 4478; WAN024AOH; Start 55; Stop 79
atggtatacttgtcttatgaatgta

SEQ ID NO: 383588 - DNA, 25 bp, Artificial
  probe
  misc_feature (1)..(25): SEQ ID NO: 4479; WAN024ADS; Start 76; Stop 100
aaatatgaataatcggagtgagact

SEQ ID NO: 383589 - DNA, 25 bp, Artificial
  probe
  misc_feature (1)..(25): SEQ ID NO: 4479; WAN024ADS; Start 71; Stop 95
tggataaatatgaataatcggagtg

SEQ ID NO: 383590 - DNA, 25 bp, Artificial
  probe
  misc_feature (1)..(25): SEQ ID NO: 4479; WAN024ADS; Start 75; Stop 99
taaatatgaataatcggagtgagac

SEQ ID NO: 383591 - DNA, 25 bp, Artificial
  probe
  misc_feature (1)..(25): SEQ ID NO: 4479; WAN024ADS; Start 72; Stop 96
ggataaatatgaataatcggagtga

SEQ ID NO: 383592 - DNA, 25 bp, Artificial
  probe
  misc_feature (1)..(25): SEQ ID NO: 4479; WAN024ADS; Start 50; Stop 74
ttcctgttattcatgttataatgga

SEQ ID NO: 383593 - DNA, 25 bp, Artificial
  probe
  misc_feature (1)..(25): SEQ ID NO: 4479; WAN024ADS; Start 51; Stop 75
tcctgttattcatgttataatggat

SEQ ID NO: 383594 - DNA, 25 bp, Artificial
  probe
  misc_feature (1)..(25): SEQ ID NO: 4479; WAN024ADS; Start 31; Stop 55
cctatcaactcttttctatttcctg

SEQ ID NO: 383595 - DNA, 25 bp, Artificial
  probe
  misc_feature (1)..(25): SEQ ID NO: 4479; WAN024ADS; Start 70; Stop 94
atggataaatatgaataatcggagt

SEQ ID NO: 383596 - DNA, 25 bp, Artificial
  probe
  misc_feature (1)..(25): SEQ ID NO: 4479; WAN024ADS; Start 30; Stop 54
tcctatcaactcttttctatttcct

SEQ ID NO: 383597 - DNA, 25 bp, Artificial
  probe
  misc_feature (1)..(25): SEQ ID NO: 4479; WAN024ADS; Start 74; Stop 98
ataaatatgaataatcggagtgaga

SEQ ID NO: 383598 - DNA, 25 bp, Artificial
  probe
  misc_feature (1)..(25): SEQ ID NO: 4479; WAN024ADS; Start 73; Stop 97
gataaatatgaataatcggagtgag

SEQ ID NO: 383599 - DNA, 25 bp, Artificial
  probe
  misc_feature (1)..(25): SEQ ID NO: 4479; WAN024ADS; Start 32; Stop 56
ctatcaactcttttctatttcctgt

SEQ ID NO: 383600 - DNA, 25 bp, Artificial
  probe
  misc_feature (1)..(25): SEQ ID NO: 4479; WAN024ADS; Start 29; Stop 53
ttcctatcaactcttttctatttcc

SEQ ID NO: 383601 - DNA, 25 bp, Artificial
  probe
  misc_feature (1)..(25): SEQ ID NO: 4479; WAN024ADS; Start 38; Stop 62
actcttttctatttcctgttattca

SEQ ID NO: 383602 - DNA, 25 bp, Artificial
  probe
  misc_feature (1)..(25): SEQ ID NO: 4479; WAN024ADS; Start 49; Stop 73
tttcctgttattcatgttataatgg

SEQ ID NO: 383603 - DNA, 25 bp, Artificial
  probe
  misc_feature (1)..(25): SEQ ID NO: 4479; WAN024ADS; Start 35; Stop 59
tcaactcttttctatttcctgttat

SEQ ID NO: 383604 - DNA, 25 bp, Artificial
  probe
  misc_feature (1)..(25): SEQ ID NO: 4479; WAN024ADS; Start 34; Stop 58
atcaactcttttctatttcctgtta

SEQ ID NO: 383605 - DNA, 25 bp, Artificial
  probe
  misc_feature (1)..(25): SEQ ID NO: 4479; WAN024ADS; Start 33; Stop 57
tatcaactcttttctatttcctgtt

SEQ ID NO: 383606 - DNA, 25 bp, Artificial
  probe
  misc_feature (1)..(25): SEQ ID NO: 4479; WAN024ADS; Start 36; Stop 60
caactcttttctatttcctgttatt

SEQ ID NO: 383607 - DNA, 25 bp, Artificial
  probe
  misc_feature (1)..(25): SEQ ID NO: 4479; WAN024ADS; Start 41; Stop 65
cttttctatttcctgttattcatgt

SEQ ID NO: 383608 - DNA, 25 bp, Artificial
  probe
  misc_feature (1)..(25): SEQ ID NO: 4479; WAN024ADS; Start 37; Stop 61
aactcttttctatttcctgttattc

SEQ ID NO: 383609 - DNA, 25 bp, Artificial
  probe
  misc_feature (1)..(25): SEQ ID NO: 4479; WAN024ADS; Start 39; Stop 63
ctcttttctatttcctgttattcat

SEQ ID NO: 383610 - DNA, 25 bp, Artificial
  probe
  misc_feature (1)..(25): SEQ ID NO: 4479; WAN024ADS; Start 28; Stop 52
tttcctatcaactcttttctatttc

SEQ ID NO: 383611 - DNA, 25 bp, Artificial
  probe
  misc_feature (1)..(25): SEQ ID NO: 4479; WAN024ADS; Start 40; Stop 64
tcttttctatttcctgttattcatg

SEQ ID NO: 383612 - DNA, 25 bp, Artificial
  probe
  misc_feature (1)..(25): SEQ ID NO: 4479; WAN024ADS; Start 42; Stop 66
ttttctatttcctgttattcatgtt

SEQ ID NO: 383613 - DNA, 25 bp, Artificial
  probe
  misc_feature (1)..(25): SEQ ID NO: 4480; WAN024ABC; Start 142; Stop 166
aggagcgttgaaatgattgataaag

SEQ ID NO: 383614 - DNA, 25 bp, Artificial
  probe
  misc_feature (1)..(25): SEQ ID NO: 4480; WAN024ABC; Start 141; Stop 165
aaggagcgttgaaatgattgataaa

SEQ ID NO: 383615 - DNA, 25 bp, Artificial
  probe
  misc_feature (1)..(25): SEQ ID NO: 4480; WAN024ABC; Start 140; Stop 164
aaaggagcgttgaaatgattgataa

SEQ ID NO: 383616 - DNA, 25 bp, Artificial
  probe
  misc_feature (1)..(25): SEQ ID NO: 4480; WAN024ABC; Start 138; Stop 162
ttaaaggagcgttgaaatgattgat

SEQ ID NO: 383617 - DNA, 25 bp, Artificial
  probe
  misc_feature (1)..(25): SEQ ID NO: 4480; WAN024ABC; Start 143; Stop 167
ggagcgttgaaatgattgataaagg

SEQ ID NO: 383618 - DNA, 25 bp, Artificial
  probe
  misc_feature (1)..(25): SEQ ID NO: 4480; WAN024ABC; Start 139; Stop 163
taaaggagcgttgaaatgattgata

SEQ ID NO: 383619 - DNA, 25 bp, Artificial
  probe
  misc_feature (1)..(25): SEQ ID NO: 4480; WAN024ABC; Start 144; Stop 168
gagcgttgaaatgattgataaaggc

SEQ ID NO: 383620 - DNA, 25 bp, Artificial
  probe
  misc_feature (1)..(25): SEQ ID NO: 4480; WAN024ABC; Start 146; Stop 170
gcgttgaaatgattgataaaggcaa

SEQ ID NO: 383621 - DNA, 25 bp, Artificial
  probe
  misc_feature (1)..(25): SEQ ID NO: 4480; WAN024ABC; Start 145; Stop 169
agcgttgaaatgattgataaaggca

SEQ ID NO: 383622 - DNA, 25 bp, Artificial
  probe
  misc_feature (1)..(25): SEQ ID NO: 4480; WAN024ABC; Start 150; Stop 174
tgaaatgattgataaaggcaacaaa

SEQ ID NO: 383623 - DNA, 25 bp, Artificial
  probe
  misc_feature (1)..(25): SEQ ID NO: 4480; WAN024ABC; Start 149; Stop 173
ttgaaatgattgataaaggcaacaa

SEQ ID NO: 383624 - DNA, 25 bp, Artificial
  probe
  misc_feature (1)..(25): SEQ ID NO: 4480; WAN024ABC; Start 137; Stop 161
tttaaaggagcgttgaaatgattga

SEQ ID NO: 383625 - DNA, 25 bp, Artificial
  probe
  misc_feature (1)..(25): SEQ ID NO: 4480; WAN024ABC; Start 58; Stop 82
gaacagctattattcctttcttgca

SEQ ID NO: 383626 - DNA, 25 bp, Artificial
  probe
  misc_feature (1)..(25): SEQ ID NO: 4480; WAN024ABC; Start 44; Stop 68
cctacttggtataggaacagctatt

SEQ ID NO: 383627 - DNA, 25 bp, Artificial
  probe
  misc_feature (1)..(25): SEQ ID NO: 4480; WAN024ABC; Start 47; Stop 71
acttggtataggaacagctattatt

SEQ ID NO: 383628 - DNA, 25 bp, Artificial
  probe
  misc_feature (1)..(25): SEQ ID NO: 4480; WAN024ABC; Start 45; Stop 69
ctacttggtataggaacagctatta

SEQ ID NO: 383629 - DNA, 25 bp, Artificial
  probe
  misc_feature (1)..(25): SEQ ID NO: 4480; WAN024ABC; Start 30; Stop 54
gcatttattacattcctacttggta

SEQ ID NO: 383630 - DNA, 25 bp, Artificial
  probe
  misc_feature (1)..(25): SEQ ID NO: 4480; WAN024ABC; Start 136; Stop 160
atttaaaggagcgttgaaatgattg

SEQ ID NO: 383631 - DNA, 25 bp, Artificial
  probe
  misc_feature (1)..(25): SEQ ID NO: 4480; WAN024ABC; Start 29; Stop 53
tgcatttattacattcctacttggt

SEQ ID NO: 383632 - DNA, 25 bp, Artificial
  probe
  misc_feature (1)..(25): SEQ ID NO: 4480; WAN024ABC; Start 48; Stop 72
cttggtataggaacagctattattc

SEQ ID NO: 383633 - DNA, 25 bp, Artificial
  probe
  misc_feature (1)..(25): SEQ ID NO: 4480; WAN024ABC; Start 28; Stop 52
ctgcatttattacattcctacttgg

SEQ ID NO: 383634 - DNA, 25 bp, Artificial
  probe
  misc_feature (1)..(25): SEQ ID NO: 4480; WAN024ABC; Start 7; Stop 31
agaatgacagtatatgactttctgc

SEQ ID NO: 383635 - DNA, 25 bp, Artificial
  probe
  misc_feature (1)..(25): SEQ ID NO: 4480; WAN024ABC; Start 21; Stop 45
tgactttctgcatttattacattcc

SEQ ID NO: 383636 - DNA, 25 bp, Artificial
  probe
  misc_feature (1)..(25): SEQ ID NO: 4480; WAN024ABC; Start 8; Stop 32
gaatgacagtatatgactttctgca

SEQ ID NO: 383637 - DNA, 25 bp, Artificial
  probe
  misc_feature (1)..(25): SEQ ID NO: 4480; WAN024ABC; Start 46; Stop 70
tacttggtataggaacagctattat

SEQ ID NO: 383638 - DNA, 25 bp, Artificial
  probe
  misc_feature (1)..(25): SEQ ID NO: 4480; WAN024ABC; Start 11; Stop 35
tgacagtatatgactttctgcattt

SEQ ID NO: 383639 - DNA, 25 bp, Artificial
  probe
  misc_feature (1)..(25): SEQ ID NO: 4480; WAN024ABC; Start 22; Stop 46
gactttctgcatttattacattcct

SEQ ID NO: 383640 - DNA, 25 bp, Artificial
  probe
  misc_feature (1)..(25): SEQ ID NO: 4480; WAN024ABC; Start 10; Stop 34
atgacagtatatgactttctgcatt

SEQ ID NO: 383641 - DNA, 25 bp, Artificial
  probe
  misc_feature (1)..(25): SEQ ID NO: 4480; WAN024ABC; Start 9; Stop 33
aatgacagtatatgactttctgcat

SEQ ID NO: 383642 - DNA, 25 bp, Artificial
  probe
  misc_feature (1)..(25): SEQ ID NO: 4480; WAN024ABC; Start 135; Stop 159
tatttaaaggagcgttgaaatgatt

SEQ ID NO: 383643 - DNA, 25 bp, Artificial
  probe
  misc_feature (1)..(25): SEQ ID NO: 4480; WAN024ABC; Start 80; Stop 104
gcaaggtatcaattagaaaataggc

SEQ ID NO: 383644 - DNA, 25 bp, Artificial
  probe
  misc_feature (1)..(25): SEQ ID NO: 4480; WAN024ABC; Start 134; Stop 158
atatttaaaggagcgttgaaatgat

SEQ ID NO: 383645 - DNA, 25 bp, Artificial
  probe
  misc_feature (1)..(25): SEQ ID NO: 4480; WAN024ABC; Start 27; Stop 51
tctgcatttattacattcctacttg

SEQ ID NO: 383646 - DNA, 25 bp, Artificial
  probe
  misc_feature (1)..(25): SEQ ID NO: 4481; WAN0249FG; Start 1; Stop 25
tagaaagtgtggaggtggtatttgg

SEQ ID NO: 383647 - DNA, 25 bp, Artificial
  probe
  misc_feature (1)..(25): SEQ ID NO: 4481; WAN0249FG; Start 6; Stop 30
agtgtggaggtggtatttgggatat

SEQ ID NO: 383648 - DNA, 25 bp, Artificial
  probe
  misc_feature (1)..(25): SEQ ID NO: 4481; WAN0249FG; Start 5; Stop 29
aagtgtggaggtggtatttgggata

SEQ ID NO: 383649 - DNA, 25 bp, Artificial
  probe
  misc_feature (1)..(25): SEQ ID NO: 4481; WAN0249FG; Start 17; Stop 41
ggtatttgggatatcacctccattt

SEQ ID NO: 383650 - DNA, 25 bp, Artificial
  probe
  misc_feature (1)..(25): SEQ ID NO: 4481; WAN0249FG; Start 4; Stop 28
aaagtgtggaggtggtatttgggat

SEQ ID NO: 383651 - DNA, 25 bp, Artificial
  probe
  misc_feature (1)..(25): SEQ ID NO: 4481; WAN0249FG; Start 7; Stop 31
gtgtggaggtggtatttgggatatc

SEQ ID NO: 383652 - DNA, 25 bp, Artificial
  probe
  misc_feature (1)..(25): SEQ ID NO: 4481; WAN0249FG; Start 16; Stop 40
tggtatttgggatatcacctccatt

SEQ ID NO: 383653 - DNA, 25 bp, Artificial
  probe
  misc_feature (1)..(25): SEQ ID NO: 4481; WAN0249FG; Start 8; Stop 32
tgtggaggtggtatttgggatatca

SEQ ID NO: 383654 - DNA, 25 bp, Artificial
  probe
  misc_feature (1)..(25): SEQ ID NO: 4481; WAN0249FG; Start 15; Stop 39
gtggtatttgggatatcacctccat

SEQ ID NO: 383655 - DNA, 25 bp, Artificial
  probe
  misc_feature (1)..(25): SEQ ID NO: 4481; WAN0249FG; Start 9; Stop 33
gtggaggtggtatttgggatatcac

SEQ ID NO: 383656 - DNA, 25 bp, Artificial
  probe
  misc_feature (1)..(25): SEQ ID NO: 4481; WAN0249FG; Start 3; Stop 27
gaaagtgtggaggtggtatttggga

SEQ ID NO: 383657 - DNA, 25 bp, Artificial
  probe
  misc_feature (1)..(25): SEQ ID NO: 4481; WAN0249FG; Start 2; Stop 26
agaaagtgtggaggtggtatttggg

SEQ ID NO: 383658 - DNA, 25 bp, Artificial
  probe
  misc_feature (1)..(25): SEQ ID NO: 4481; WAN0249FG; Start 20; Stop 44
atttgggatatcacctccattttgg

SEQ ID NO: 383659 - DNA, 25 bp, Artificial
  probe
  misc_feature (1)..(25): SEQ ID NO: 4481; WAN0249FG; Start 19; Stop 43
tatttgggatatcacctccattttg

SEQ ID NO: 383660 - DNA, 25 bp, Artificial
  probe
  misc_feature (1)..(25): SEQ ID NO: 4481; WAN0249FG; Start 18; Stop 42
gtatttgggatatcacctccatttt

SEQ ID NO: 383661 - DNA, 25 bp, Artificial
  probe
  misc_feature (1)..(25): SEQ ID NO: 4481; WAN0249FG; Start 34; Stop 58
ctccattttggaagagaggtaaaga

SEQ ID NO: 383662 - DNA, 25 bp, Artificial
  probe
  misc_feature (1)..(25): SEQ ID NO: 4481; WAN0249FG; Start 27; Stop 51
atatcacctccattttggaagagag

SEQ ID NO: 383663 - DNA, 25 bp, Artificial
  probe
  misc_feature (1)..(25): SEQ ID NO: 4481; WAN0249FG; Start 33; Stop 57
cctccattttggaagagaggtaaag

SEQ ID NO: 383664 - DNA, 25 bp, Artificial
  probe
  misc_feature (1)..(25): SEQ ID NO: 4481; WAN0249FG; Start 26; Stop 50
gatatcacctccattttggaagaga

SEQ ID NO: 383665 - DNA, 25 bp, Artificial
  probe
  misc_feature (1)..(25): SEQ ID NO: 4481; WAN0249FG; Start 25; Stop 49
ggatatcacctccattttggaagag

SEQ ID NO: 383666 - DNA, 25 bp, Artificial
  probe
  misc_feature (1)..(25): SEQ ID NO: 4481; WAN0249FG; Start 28; Stop 52
tatcacctccattttggaagagagg

SEQ ID NO: 383667 - DNA, 25 bp, Artificial
  probe
  misc_feature (1)..(25): SEQ ID NO: 4481; WAN0249FG; Start 22; Stop 46
ttgggatatcacctccattttggaa

SEQ ID NO: 383668 - DNA, 25 bp, Artificial
  probe
  misc_feature (1)..(25): SEQ ID NO: 4481; WAN0249FG; Start 21; Stop 45
tttgggatatcacctccattttgga

SEQ ID NO: 383669 - DNA, 25 bp, Artificial
  probe
  misc_feature (1)..(25): SEQ ID NO: 4481; WAN0249FG; Start 24; Stop 48
gggatatcacctccattttggaaga

SEQ ID NO: 383670 - DNA, 25 bp, Artificial
  probe
  misc_feature (1)..(25): SEQ ID NO: 4481; WAN0249FG; Start 23; Stop 47
tgggatatcacctccattttggaag

SEQ ID NO: 383671 - DNA, 25 bp, Artificial
  probe
  misc_feature (1)..(25): SEQ ID NO: 4482; WAN024AHK; Start 121; Stop 145
tagtcccgataagatggtaggtatt

SEQ ID NO: 383672 - DNA, 25 bp, Artificial
  probe
  misc_feature (1)..(25): SEQ ID NO: 4482; WAN024AHK; Start 46; Stop 70
acgaactatctaaaccgaaacacta

SEQ ID NO: 383673 - DNA, 25 bp, Artificial
  probe
  misc_feature (1)..(25): SEQ ID NO: 4482; WAN024AHK; Start 44; Stop 68
gaacgaactatctaaaccgaaacac

SEQ ID NO: 383674 - DNA, 25 bp, Artificial
  probe
  misc_feature (1)..(25): SEQ ID NO: 4482; WAN024AHK; Start 120; Stop 144
atagtcccgataagatggtaggtat

SEQ ID NO: 383675 - DNA, 25 bp, Artificial
  probe
  misc_feature (1)..(25): SEQ ID NO: 4482; WAN024AHK; Start 47; Stop 71
cgaactatctaaaccgaaacactac

SEQ ID NO: 383676 - DNA, 25 bp, Artificial
  probe
  misc_feature (1)..(25): SEQ ID NO: 4482; WAN024AHK; Start 122; Stop 146
agtcccgataagatggtaggtattt

SEQ ID NO: 383677 - DNA, 25 bp, Artificial
  probe
  misc_feature (1)..(25): SEQ ID NO: 4482; WAN024AHK; Start 118; Stop 142
atatagtcccgataagatggtaggt

SEQ ID NO: 383678 - DNA, 25 bp, Artificial
  probe
  misc_feature (1)..(25): SEQ ID NO: 4482; WAN024AHK; Start 45; Stop 69
aacgaactatctaaaccgaaacact

SEQ ID NO: 383679 - DNA, 25 bp, Artificial
  probe
  misc_feature (1)..(25): SEQ ID NO: 4482; WAN024AHK; Start 58; Stop 82
aaccgaaacactacattaaagactg

SEQ ID NO: 383680 - DNA, 25 bp, Artificial
  probe
  misc_feature (1)..(25): SEQ ID NO: 4482; WAN024AHK; Start 123; Stop 147
gtcccgataagatggtaggtattta

SEQ ID NO: 383681 - DNA, 25 bp, Artificial
  probe
  misc_feature (1)..(25): SEQ ID NO: 4482; WAN024AHK; Start 119; Stop 143
tatagtcccgataagatggtaggta

SEQ ID NO: 383682 - DNA, 25 bp, Artificial
  probe
  misc_feature (1)..(25): SEQ ID NO: 4482; WAN024AHK; Start 42; Stop 66
gagaacgaactatctaaaccgaaac

SEQ ID NO: 383683 - DNA, 25 bp, Artificial
  probe
  misc_feature (1)..(25): SEQ ID NO: 4482; WAN024AHK; Start 41; Stop 65
tgagaacgaactatctaaaccgaaa

SEQ ID NO: 383684 - DNA, 25 bp, Artificial
  probe
  misc_feature (1)..(25): SEQ ID NO: 4482; WAN024AHK; Start 40; Stop 64
atgagaacgaactatctaaaccgaa

SEQ ID NO: 383685 - DNA, 25 bp, Artificial
  probe
  misc_feature (1)..(25): SEQ ID NO: 4482; WAN024AHK; Start 43; Stop 67
agaacgaactatctaaaccgaaaca

SEQ ID NO: 383686 - DNA, 25 bp, Artificial
  probe
  misc_feature (1)..(25): SEQ ID NO: 4482; WAN024AHK; Start 57; Stop 81
aaaccgaaacactacattaaagact

SEQ ID NO: 383687 - DNA, 25 bp, Artificial
  probe
  misc_feature (1)..(25): SEQ ID NO: 4482; WAN024AHK; Start 48; Stop 72
gaactatctaaaccgaaacactaca

SEQ ID NO: 383688 - DNA, 25 bp, Artificial
  probe
  misc_feature (1)..(25): SEQ ID NO: 4482; WAN024AHK; Start 39; Stop 63
tatgagaacgaactatctaaaccga

SEQ ID NO: 383689 - DNA, 25 bp, Artificial
  probe
  misc_feature (1)..(25): SEQ ID NO: 4482; WAN024AHK; Start 59; Stop 83
accgaaacactacattaaagactgc

SEQ ID NO: 383690 - DNA, 25 bp, Artificial
  probe
  misc_feature (1)..(25): SEQ ID NO: 4482; WAN024AHK; Start 38; Stop 62
ttatgagaacgaactatctaaaccg

SEQ ID NO: 383691 - DNA, 25 bp, Artificial
  probe
  misc_feature (1)..(25): SEQ ID NO: 4482; WAN024AHK; Start 50; Stop 74
actatctaaaccgaaacactacatt

SEQ ID NO: 383692 - DNA, 25 bp, Artificial
  probe
  misc_feature (1)..(25): SEQ ID NO: 4482; WAN024AHK; Start 49; Stop 73
aactatctaaaccgaaacactacat

SEQ ID NO: 383693 - DNA, 25 bp, Artificial
  probe
  misc_feature (1)..(25): SEQ ID NO: 4482; WAN024AHK; Start 124; Stop 148
tcccgataagatggtaggtatttat

SEQ ID NO: 383694 - DNA, 25 bp, Artificial
  probe
  misc_feature (1)..(25): SEQ ID NO: 4482; WAN024AHK; Start 56; Stop 80
taaaccgaaacactacattaaagac

SEQ ID NO: 383695 - DNA, 25 bp, Artificial
  probe
  misc_feature (1)..(25): SEQ ID NO: 4482; WAN024AHK; Start 117; Stop 141
tatatagtcccgataagatggtagg

SEQ ID NO: 383696 - DNA, 25 bp, Artificial
  probe
  misc_feature (1)..(25): SEQ ID NO: 4482; WAN024AHK; Start 125; Stop 149
cccgataagatggtaggtatttatt

SEQ ID NO: 383697 - DNA, 25 bp, Artificial
  probe
  misc_feature (1)..(25): SEQ ID NO: 4482; WAN024AHK; Start 114; Stop 138
agttatatagtcccgataagatggt

SEQ ID NO: 383698 - DNA, 25 bp, Artificial
  probe
  misc_feature (1)..(25): SEQ ID NO: 4482; WAN024AHK; Start 55; Stop 79
ctaaaccgaaacactacattaaaga

SEQ ID NO: 383699 - DNA, 25 bp, Artificial
  probe
  misc_feature (1)..(25): SEQ ID NO: 4482; WAN024AHK; Start 54; Stop 78
tctaaaccgaaacactacattaaag

SEQ ID NO: 383700 - DNA, 25 bp, Artificial
  probe
  misc_feature (1)..(25): SEQ ID NO: 4482; WAN024AHK; Start 135; Stop 159
tggtaggtatttattacgaagagtt

SEQ ID NO: 383701 - DNA, 25 bp, Artificial
  probe
  misc_feature (1)..(25): SEQ ID NO: 4482; WAN024AHK; Start 61; Stop 85
cgaaacactacattaaagactgcaa

SEQ ID NO: 383702 - DNA, 25 bp, Artificial
  probe
  misc_feature (1)..(25): SEQ ID NO: 4482; WAN024AHK; Start 134; Stop 158
atggtaggtatttattacgaagagt

SEQ ID NO: 383703 - DNA, 25 bp, Artificial
  probe
  misc_feature (1)..(25): SEQ ID NO: 4482; WAN024AHK; Start 60; Stop 84
ccgaaacactacattaaagactgca

SEQ ID NO: 383704 - DNA, 25 bp, Artificial
  probe
  misc_feature (1)..(25): SEQ ID NO: 4483; WAN0249NU; Start 35; Stop 59
agaccaataagacctccagcaataa

SEQ ID NO: 383705 - DNA, 25 bp, Artificial
  probe
  misc_feature (1)..(25): SEQ ID NO: 4483; WAN0249NU; Start 23; Stop 47
ttacctgccaagagaccaataagac

SEQ ID NO: 383706 - DNA, 25 bp, Artificial
  probe
  misc_feature (1)..(25): SEQ ID NO: 4483; WAN0249NU; Start 34; Stop 58
gagaccaataagacctccagcaata

SEQ ID NO: 383707 - DNA, 25 bp, Artificial
  probe
  misc_feature (1)..(25): SEQ ID NO: 4483; WAN0249NU; Start 22; Stop 46
tttacctgccaagagaccaataaga

SEQ ID NO: 383708 - DNA, 25 bp, Artificial
  probe
  misc_feature (1)..(25): SEQ ID NO: 4483; WAN0249NU; Start 33; Stop 57
agagaccaataagacctccagcaat

SEQ ID NO: 383709 - DNA, 25 bp, Artificial
  probe
  misc_feature (1)..(25): SEQ ID NO: 4483; WAN0249NU; Start 24; Stop 48
tacctgccaagagaccaataagacc

SEQ ID NO: 383710 - DNA, 25 bp, Artificial
  probe
  misc_feature (1)..(25): SEQ ID NO: 4483; WAN0249NU; Start 32; Stop 56
aagagaccaataagacctccagcaa

SEQ ID NO: 383711 - DNA, 25 bp, Artificial
  probe
  misc_feature (1)..(25): SEQ ID NO: 4483; WAN0249NU; Start 31; Stop 55
caagagaccaataagacctccagca

SEQ ID NO: 383712 - DNA, 25 bp, Artificial
  probe
  misc_feature (1)..(25): SEQ ID NO: 4483; WAN0249NU; Start 13; Stop 37
tttagtgattttacctgccaagaga

SEQ ID NO: 383713 - DNA, 25 bp, Artificial
  probe
  misc_feature (1)..(25): SEQ ID NO: 4483; WAN0249NU; Start 20; Stop 44
attttacctgccaagagaccaataa

SEQ ID NO: 383714 - DNA, 25 bp, Artificial
  probe
  misc_feature (1)..(25): SEQ ID NO: 4483; WAN0249NU; Start 12; Stop 36
ttttagtgattttacctgccaagag

SEQ ID NO: 383715 - DNA, 25 bp, Artificial
  probe
  misc_feature (1)..(25): SEQ ID NO: 4483; WAN0249NU; Start 14; Stop 38
ttagtgattttacctgccaagagac

SEQ ID NO: 383716 - DNA, 25 bp, Artificial
  probe
  misc_feature (1)..(25): SEQ ID NO: 4483; WAN0249NU; Start 19; Stop 43
gattttacctgccaagagaccaata

SEQ ID NO: 383717 - DNA, 25 bp, Artificial
  probe
  misc_feature (1)..(25): SEQ ID NO: 4483; WAN0249NU; Start 21; Stop 45
ttttacctgccaagagaccaataag

SEQ ID NO: 383718 - DNA, 25 bp, Artificial
  probe
  misc_feature (1)..(25): SEQ ID NO: 4483; WAN0249NU; Start 30; Stop 54
ccaagagaccaataagacctccagc

SEQ ID NO: 383719 - DNA, 25 bp, Artificial
  probe
  misc_feature (1)..(25): SEQ ID NO: 4483; WAN0249NU; Start 29; Stop 53
gccaagagaccaataagacctccag

SEQ ID NO: 383720 - DNA, 25 bp, Artificial
  probe
  misc_feature (1)..(25): SEQ ID NO: 4483; WAN0249NU; Start 27; Stop 51
ctgccaagagaccaataagacctcc

SEQ ID NO: 383721 - DNA, 25 bp, Artificial
  probe
  misc_feature (1)..(25): SEQ ID NO: 4483; WAN0249NU; Start 26; Stop 50
cctgccaagagaccaataagacctc

SEQ ID NO: 383722 - DNA, 25 bp, Artificial
  probe
  misc_feature (1)..(25): SEQ ID NO: 4483; WAN0249NU; Start 15; Stop 39
tagtgattttacctgccaagagacc

SEQ ID NO: 383723 - DNA, 25 bp, Artificial
  probe
  misc_feature (1)..(25): SEQ ID NO: 4483; WAN0249NU; Start 18; Stop 42
tgattttacctgccaagagaccaat

SEQ ID NO: 383724 - DNA, 25 bp, Artificial
  probe
  misc_feature (1)..(25): SEQ ID NO: 4483; WAN0249NU; Start 17; Stop 41
gtgattttacctgccaagagaccaa

SEQ ID NO: 383725 - DNA, 25 bp, Artificial
  probe
  misc_feature (1)..(25): SEQ ID NO: 4483; WAN0249NU; Start 16; Stop 40
agtgattttacctgccaagagacca

SEQ ID NO: 383726 - DNA, 25 bp, Artificial
  probe
  misc_feature (1)..(25): SEQ ID NO: 4484; WAN0249HS; Start 57; Stop 81
actcagccaagacttgtgatataat

SEQ ID NO: 383727 - DNA, 25 bp, Artificial
  probe
  misc_feature (1)..(25): SEQ ID NO: 4484; WAN0249HS; Start 56; Stop 80
gactcagccaagacttgtgatataa

SEQ ID NO: 383728 - DNA, 25 bp, Artificial
  probe
  misc_feature (1)..(25): SEQ ID NO: 4484; WAN0249HS; Start 58; Stop 82
ctcagccaagacttgtgatataata

SEQ ID NO: 383729 - DNA, 25 bp, Artificial
  probe
  misc_feature (1)..(25): SEQ ID NO: 4484; WAN0249HS; Start 55; Stop 79
ggactcagccaagacttgtgatata

SEQ ID NO: 383730 - DNA, 25 bp, Artificial
  probe
  misc_feature (1)..(25): SEQ ID NO: 4484; WAN0249HS; Start 59; Stop 83
tcagccaagacttgtgatataatat

SEQ ID NO: 383731 - DNA, 25 bp, Artificial
  probe
  misc_feature (1)..(25): SEQ ID NO: 4484; WAN0249HS; Start 60; Stop 84
cagccaagacttgtgatataatata

SEQ ID NO: 383732 - DNA, 25 bp, Artificial
  probe
  misc_feature (1)..(25): SEQ ID NO: 4484; WAN0249HS; Start 54; Stop 78
tggactcagccaagacttgtgatat

SEQ ID NO: 383733 - DNA, 25 bp, Artificial
  probe
  misc_feature (1)..(25): SEQ ID NO: 4484; WAN0249HS; Start 99; Stop 123
agacgcctagataataggagaaact

SEQ ID NO: 383734 - DNA, 25 bp, Artificial
  probe
  misc_feature (1)..(25): SEQ ID NO: 4484; WAN0249HS; Start 98; Stop 122
cagacgcctagataataggagaaac

SEQ ID NO: 383735 - DNA, 25 bp, Artificial
  probe
  misc_feature (1)..(25): SEQ ID NO: 4484; WAN0249HS; Start 62; Stop 86
gccaagacttgtgatataatataga

SEQ ID NO: 383736 - DNA, 25 bp, Artificial
  probe
  misc_feature (1)..(25): SEQ ID NO: 4484; WAN0249HS; Start 61; Stop 85
agccaagacttgtgatataatatag

SEQ ID NO: 383737 - DNA, 25 bp, Artificial
  probe
  misc_feature (1)..(25): SEQ ID NO: 4484; WAN0249HS; Start 97; Stop 121
gcagacgcctagataataggagaaa

SEQ ID NO: 383738 - DNA, 25 bp, Artificial
  probe
  misc_feature (1)..(25): SEQ ID NO: 4484; WAN0249HS; Start 96; Stop 120
ggcagacgcctagataataggagaa

SEQ ID NO: 383739 - DNA, 25 bp, Artificial
  probe
  misc_feature (1)..(25): SEQ ID NO: 4484; WAN0249HS; Start 32; Stop 56
tactctctttatccatagaaattgg

SEQ ID NO: 383740 - DNA, 25 bp, Artificial
  probe
  misc_feature (1)..(25): SEQ ID NO: 4484; WAN0249HS; Start 45; Stop 69
catagaaattggactcagccaagac

SEQ ID NO: 383741 - DNA, 25 bp, Artificial
  probe
  misc_feature (1)..(25): SEQ ID NO: 4484; WAN0249HS; Start 46; Stop 70
atagaaattggactcagccaagact

SEQ ID NO: 383742 - DNA, 25 bp, Artificial
  probe
  misc_feature (1)..(25): SEQ ID NO: 4484; WAN0249HS; Start 47; Stop 71
tagaaattggactcagccaagactt

SEQ ID NO: 383743 - DNA, 25 bp, Artificial
  probe
  misc_feature (1)..(25): SEQ ID NO: 4484; WAN0249HS; Start 40; Stop 64
ttatccatagaaattggactcagcc

SEQ ID NO: 383744 - DNA, 25 bp, Artificial
  probe
  misc_feature (1)..(25): SEQ ID NO: 4484; WAN0249HS; Start 39; Stop 63
tttatccatagaaattggactcagc

SEQ ID NO: 383745 - DNA, 25 bp, Artificial
  probe
  misc_feature (1)..(25): SEQ ID NO: 4484; WAN0249HS; Start 41; Stop 65
tatccatagaaattggactcagcca

SEQ ID NO: 383746 - DNA, 25 bp, Artificial
  probe
  misc_feature (1)..(25): SEQ ID NO: 4484; WAN0249HS; Start 53; Stop 77
ttggactcagccaagacttgtgata

SEQ ID NO: 383747 - DNA, 25 bp, Artificial
  probe
  misc_feature (1)..(25): SEQ ID NO: 4484; WAN0249HS; Start 44; Stop 68
ccatagaaattggactcagccaaga

SEQ ID NO: 383748 - DNA, 25 bp, Artificial
  probe
  misc_feature (1)..(25): SEQ ID NO: 4484; WAN0249HS; Start 42; Stop 66
atccatagaaattggactcagccaa

SEQ ID NO: 383749 - DNA, 25 bp, Artificial
  probe
  misc_feature (1)..(25): SEQ ID NO: 4484; WAN0249HS; Start 52; Stop 76
attggactcagccaagacttgtgat

SEQ ID NO: 383750 - DNA, 25 bp, Artificial
  probe
  misc_feature (1)..(25): SEQ ID NO: 4484; WAN0249HS; Start 43; Stop 67
tccatagaaattggactcagccaag

SEQ ID NO: 383751 - DNA, 25 bp, Artificial
  probe
  misc_feature (1)..(25): SEQ ID NO: 4484; WAN0249HS; Start 48; Stop 72
agaaattggactcagccaagacttg

SEQ ID NO: 383752 - DNA, 25 bp, Artificial
  probe
  misc_feature (1)..(25): SEQ ID NO: 4484; WAN0249HS; Start 37; Stop 61
tctttatccatagaaattggactca

SEQ ID NO: 383753 - DNA, 25 bp, Artificial
  probe
  misc_feature (1)..(25): SEQ ID NO: 4484; WAN0249HS; Start 51; Stop 75
aattggactcagccaagacttgtga

SEQ ID NO: 383754 - DNA, 25 bp, Artificial
  probe
  misc_feature (1)..(25): SEQ ID NO: 4484; WAN0249HS; Start 38; Stop 62
ctttatccatagaaattggactcag

SEQ ID NO: 383755 - DNA, 25 bp, Artificial
  probe
  misc_feature (1)..(25): SEQ ID NO: 4484; WAN0249HS; Start 35; Stop 59
tctctttatccatagaaattggact

SEQ ID NO: 383756 - DNA, 25 bp, Artificial
  probe
  misc_feature (1)..(25): SEQ ID NO: 4484; WAN0249HS; Start 33; Stop 57
actctctttatccatagaaattgga

SEQ ID NO: 383757 - DNA, 25 bp, Artificial
  probe
  misc_feature (1)..(25): SEQ ID NO: 4484; WAN0249HS; Start 49; Stop 73
gaaattggactcagccaagacttgt

SEQ ID NO: 383758 - DNA, 25 bp, Artificial
  probe
  misc_feature (1)..(25): SEQ ID NO: 4484; WAN0249HS; Start 36; Stop 60
ctctttatccatagaaattggactc

SEQ ID NO: 383759 - DNA, 25 bp, Artificial
  probe
  misc_feature (1)..(25): SEQ ID NO: 4485; WAN0249MZ; Start 40; Stop 64
aaaggcatattgtcaggtgtctaaa

SEQ ID NO: 383760 - DNA, 25 bp, Artificial
  probe
  misc_feature (1)..(25): SEQ ID NO: 4485; WAN0249MZ; Start 41; Stop 65
aaggcatattgtcaggtgtctaaaa

SEQ ID NO: 383761 - DNA, 25 bp, Artificial
  probe
  misc_feature (1)..(25): SEQ ID NO: 4485; WAN0249MZ; Start 39; Stop 63
aaaaggcatattgtcaggtgtctaa

SEQ ID NO: 383762 - DNA, 25 bp, Artificial
  probe
  misc_feature (1)..(25): SEQ ID NO: 4485; WAN0249MZ; Start 16; Stop 40
tgggaaaagtctttaaagttagaaa

SEQ ID NO: 383763 - DNA, 25 bp, Artificial
  probe
  misc_feature (1)..(25): SEQ ID NO: 4485; WAN0249MZ; Start 15; Stop 39
ttgggaaaagtctttaaagttagaa

SEQ ID NO: 383764 - DNA, 25 bp, Artificial
  probe
  misc_feature (1)..(25): SEQ ID NO: 4485; WAN0249MZ; Start 14; Stop 38
attgggaaaagtctttaaagttaga

SEQ ID NO: 383765 - DNA, 25 bp, Artificial
  probe
  misc_feature (1)..(25): SEQ ID NO: 4485; WAN0249MZ; Start 11; Stop 35
aaaattgggaaaagtctttaaagtt

SEQ ID NO: 383766 - DNA, 25 bp, Artificial
  probe
  misc_feature (1)..(25): SEQ ID NO: 4485; WAN0249MZ; Start 13; Stop 37
aattgggaaaagtctttaaagttag

SEQ ID NO: 383767 - DNA, 25 bp, Artificial
  probe
  misc_feature (1)..(25): SEQ ID NO: 4485; WAN0249MZ; Start 17; Stop 41
gggaaaagtctttaaagttagaaaa

SEQ ID NO: 383768 - DNA, 25 bp, Artificial
  probe
  misc_feature (1)..(25): SEQ ID NO: 4485; WAN0249MZ; Start 12; Stop 36
aaattgggaaaagtctttaaagtta

SEQ ID NO: 383769 - DNA, 25 bp, Artificial
  probe
  misc_feature (1)..(25): SEQ ID NO: 4486; WAN0249MD; Start 27; Stop 51
cttgttgctctctccttgttgtatt

SEQ ID NO: 383770 - DNA, 25 bp, Artificial
  probe
  misc_feature (1)..(25): SEQ ID NO: 4486; WAN0249MD; Start 26; Stop 50
tcttgttgctctctccttgttgtat

SEQ ID NO: 383771 - DNA, 25 bp, Artificial
  probe
  misc_feature (1)..(25): SEQ ID NO: 4486; WAN0249MD; Start 25; Stop 49
gtcttgttgctctctccttgttgta

SEQ ID NO: 383772 - DNA, 25 bp, Artificial
  probe
  misc_feature (1)..(25): SEQ ID NO: 4486; WAN0249MD; Start 29; Stop 53
tgttgctctctccttgttgtattta

SEQ ID NO: 383773 - DNA, 25 bp, Artificial
  probe
  misc_feature (1)..(25): SEQ ID NO: 4486; WAN0249MD; Start 28; Stop 52
ttgttgctctctccttgttgtattt

SEQ ID NO: 383774 - DNA, 25 bp, Artificial
  probe
  misc_feature (1)..(25): SEQ ID NO: 4486; WAN0249MD; Start 30; Stop 54
gttgctctctccttgttgtatttat

SEQ ID NO: 383775 - DNA, 25 bp, Artificial
  probe
  misc_feature (1)..(25): SEQ ID NO: 4486; WAN0249MD; Start 31; Stop 55
ttgctctctccttgttgtatttatt

SEQ ID NO: 383776 - DNA, 25 bp, Artificial
  probe
  misc_feature (1)..(25): SEQ ID NO: 4486; WAN0249MD; Start 23; Stop 47
aagtcttgttgctctctccttgttg

SEQ ID NO: 383777 - DNA, 25 bp, Artificial
  probe
  misc_feature (1)..(25): SEQ ID NO: 4486; WAN0249MD; Start 6; Stop 30
taggataacaaaggagaaagtcttg

SEQ ID NO: 383778 - DNA, 25 bp, Artificial
  probe
  misc_feature (1)..(25): SEQ ID NO: 4486; WAN0249MD; Start 32; Stop 56
tgctctctccttgttgtatttatta

SEQ ID NO: 383779 - DNA, 25 bp, Artificial
  probe
  misc_feature (1)..(25): SEQ ID NO: 4486; WAN0249MD; Start 2; Stop 26
agaataggataacaaaggagaaagt

SEQ ID NO: 383780 - DNA, 25 bp, Artificial
  probe
  misc_feature (1)..(25): SEQ ID NO: 4486; WAN0249MD; Start 22; Stop 46
aaagtcttgttgctctctccttgtt

SEQ ID NO: 383781 - DNA, 25 bp, Artificial
  probe
  misc_feature (1)..(25): SEQ ID NO: 4486; WAN0249MD; Start 3; Stop 27
gaataggataacaaaggagaaagtc

SEQ ID NO: 383782 - DNA, 25 bp, Artificial
  probe
  misc_feature (1)..(25): SEQ ID NO: 4486; WAN0249MD; Start 20; Stop 44
agaaagtcttgttgctctctccttg

SEQ ID NO: 383783 - DNA, 25 bp, Artificial
  probe
  misc_feature (1)..(25): SEQ ID NO: 4486; WAN0249MD; Start 5; Stop 29
ataggataacaaaggagaaagtctt

SEQ ID NO: 383784 - DNA, 25 bp, Artificial
  probe
  misc_feature (1)..(25): SEQ ID NO: 4486; WAN0249MD; Start 4; Stop 28
aataggataacaaaggagaaagtct

SEQ ID NO: 383785 - DNA, 25 bp, Artificial
  probe
  misc_feature (1)..(25): SEQ ID NO: 4486; WAN0249MD; Start 24; Stop 48
agtcttgttgctctctccttgttgt

SEQ ID NO: 383786 - DNA, 25 bp, Artificial
  probe
  misc_feature (1)..(25): SEQ ID NO: 4486; WAN0249MD; Start 21; Stop 45
gaaagtcttgttgctctctccttgt

SEQ ID NO: 383787 - DNA, 25 bp, Artificial
  probe
  misc_feature (1)..(25): SEQ ID NO: 4486; WAN0249MD; Start 33; Stop 57
gctctctccttgttgtatttattaa

SEQ ID NO: 383788 - DNA, 25 bp, Artificial
  probe
  misc_feature (1)..(25): SEQ ID NO: 4486; WAN0249MD; Start 7; Stop 31
aggataacaaaggagaaagtcttgt

SEQ ID NO: 383789 - DNA, 25 bp, Artificial
  probe
  misc_feature (1)..(25): SEQ ID NO: 4486; WAN0249MD; Start 1; Stop 25
tagaataggataacaaaggagaaag

SEQ ID NO: 383790 - DNA, 25 bp, Artificial
  probe
  misc_feature (1)..(25): SEQ ID NO: 4486; WAN0249MD; Start 15; Stop 39
aaaggagaaagtcttgttgctctct

SEQ ID NO: 383791 - DNA, 25 bp, Artificial
  probe
  misc_feature (1)..(25): SEQ ID NO: 4486; WAN0249MD; Start 14; Stop 38
caaaggagaaagtcttgttgctctc

SEQ ID NO: 383792 - DNA, 25 bp, Artificial
  probe
  misc_feature (1)..(25): SEQ ID NO: 4486; WAN0249MD; Start 13; Stop 37
acaaaggagaaagtcttgttgctct

SEQ ID NO: 383793 - DNA, 25 bp, Artificial
  probe
  misc_feature (1)..(25): SEQ ID NO: 4486; WAN0249MD; Start 19; Stop 43
gagaaagtcttgttgctctctcctt

SEQ ID NO: 383794 - DNA, 25 bp, Artificial
  probe
  misc_feature (1)..(25): SEQ ID NO: 4486; WAN0249MD; Start 16; Stop 40
aaggagaaagtcttgttgctctctc

SEQ ID NO: 383795 - DNA, 25 bp, Artificial
  probe
  misc_feature (1)..(25): SEQ ID NO: 4486; WAN0249MD; Start 89; Stop 113
aataatgttacatttatatccgcag

SEQ ID NO: 383796 - DNA, 25 bp, Artificial
  probe
  misc_feature (1)..(25): SEQ ID NO: 4486; WAN0249MD; Start 88; Stop 112
aaataatgttacatttatatccgca

SEQ ID NO: 383797 - DNA, 25 bp, Artificial
  probe
  misc_feature (1)..(25): SEQ ID NO: 4487; WAN0249OR; Start 61; Stop 85
agtagtttagtagagacttgagaaa

SEQ ID NO: 383798 - DNA, 25 bp, Artificial
  probe
  misc_feature (1)..(25): SEQ ID NO: 4487; WAN0249OR; Start 60; Stop 84
tagtagtttagtagagacttgagaa

SEQ ID NO: 383799 - DNA, 25 bp, Artificial
  probe
  misc_feature (1)..(25): SEQ ID NO: 4487; WAN0249OR; Start 59; Stop 83
atagtagtttagtagagacttgaga

SEQ ID NO: 383800 - DNA, 25 bp, Artificial
  probe
  misc_feature (1)..(25): SEQ ID NO: 4487; WAN0249OR; Start 58; Stop 82
aatagtagtttagtagagacttgag

SEQ ID NO: 383801 - DNA, 25 bp, Artificial
  probe
  misc_feature (1)..(25): SEQ ID NO: 4487; WAN0249OR; Start 62; Stop 86
gtagtttagtagagacttgagaaaa

SEQ ID NO: 383802 - DNA, 25 bp, Artificial
  probe
  misc_feature (1)..(25): SEQ ID NO: 4488; WAN024ARH; Start 18; Stop 42
gaatgatgcaagggtacaaatatgg

SEQ ID NO: 383803 - DNA, 25 bp, Artificial
  probe
  misc_feature (1)..(25): SEQ ID NO: 4488; WAN024ARH; Start 17; Stop 41
agaatgatgcaagggtacaaatatg

SEQ ID NO: 383804 - DNA, 25 bp, Artificial
  probe
  misc_feature (1)..(25): SEQ ID NO: 4488; WAN024ARH; Start 19; Stop 43
aatgatgcaagggtacaaatatggt

SEQ ID NO: 383805 - DNA, 25 bp, Artificial
  probe
  misc_feature (1)..(25): SEQ ID NO: 4488; WAN024ARH; Start 15; Stop 39
aaagaatgatgcaagggtacaaata

SEQ ID NO: 383806 - DNA, 25 bp, Artificial
  probe
  misc_feature (1)..(25): SEQ ID NO: 4488; WAN024ARH; Start 16; Stop 40
aagaatgatgcaagggtacaaatat

SEQ ID NO: 383807 - DNA, 25 bp, Artificial
  probe
  misc_feature (1)..(25): SEQ ID NO: 4488; WAN024ARH; Start 20; Stop 44
atgatgcaagggtacaaatatggtg

SEQ ID NO: 383808 - DNA, 25 bp, Artificial
  probe
  misc_feature (1)..(25): SEQ ID NO: 4488; WAN024ARH; Start 32; Stop 56
tacaaatatggtgcccttcttttat

SEQ ID NO: 383809 - DNA, 25 bp, Artificial
  probe
  misc_feature (1)..(25): SEQ ID NO: 4488; WAN024ARH; Start 31; Stop 55
gtacaaatatggtgcccttctttta

SEQ ID NO: 383810 - DNA, 25 bp, Artificial
  probe
  misc_feature (1)..(25): SEQ ID NO: 4488; WAN024ARH; Start 30; Stop 54
ggtacaaatatggtgcccttctttt

SEQ ID NO: 383811 - DNA, 25 bp, Artificial
  probe
  misc_feature (1)..(25): SEQ ID NO: 4488; WAN024ARH; Start 14; Stop 38
aaaagaatgatgcaagggtacaaat

SEQ ID NO: 383812 - DNA, 25 bp, Artificial
  probe
  misc_feature (1)..(25): SEQ ID NO: 4488; WAN024ARH; Start 13; Stop 37
caaaagaatgatgcaagggtacaaa

SEQ ID NO: 383813 - DNA, 25 bp, Artificial
  probe
  misc_feature (1)..(25): SEQ ID NO: 4488; WAN024ARH; Start 10; Stop 34
tttcaaaagaatgatgcaagggtac

SEQ ID NO: 383814 - DNA, 25 bp, Artificial
  probe
  misc_feature (1)..(25): SEQ ID NO: 4488; WAN024ARH; Start 9; Stop 33
ttttcaaaagaatgatgcaagggta

SEQ ID NO: 383815 - DNA, 25 bp, Artificial
  probe
  misc_feature (1)..(25): SEQ ID NO: 4488; WAN024ARH; Start 29; Stop 53
gggtacaaatatggtgcccttcttt

SEQ ID NO: 383816 - DNA, 25 bp, Artificial
  probe
  misc_feature (1)..(25): SEQ ID NO: 4488; WAN024ARH; Start 12; Stop 36
tcaaaagaatgatgcaagggtacaa

SEQ ID NO: 383817 - DNA, 25 bp, Artificial
  probe
  misc_feature (1)..(25): SEQ ID NO: 4488; WAN024ARH; Start 11; Stop 35
ttcaaaagaatgatgcaagggtaca

SEQ ID NO: 383818 - DNA, 25 bp, Artificial
  probe
  misc_feature (1)..(25): SEQ ID NO: 4488; WAN024ARH; Start 21; Stop 45
tgatgcaagggtacaaatatggtgc

SEQ ID NO: 383819 - DNA, 25 bp, Artificial
  probe
  misc_feature (1)..(25): SEQ ID NO: 4488; WAN024ARH; Start 22; Stop 46
gatgcaagggtacaaatatggtgcc

SEQ ID NO: 383820 - DNA, 25 bp, Artificial
  probe
  misc_feature (1)..(25): SEQ ID NO: 4489; WAN0249O9; Start 32; Stop 56
gtcattctactcaaatccacgttag

SEQ ID NO: 383821 - DNA, 25 bp, Artificial
  probe
  misc_feature (1)..(25): SEQ ID NO: 4489; WAN0249O9; Start 31; Stop 55
agtcattctactcaaatccacgtta

SEQ ID NO: 383822 - DNA, 25 bp, Artificial
  probe
  misc_feature (1)..(25): SEQ ID NO: 4489; WAN0249O9; Start 38; Stop 62
ctactcaaatccacgttagaaagga

SEQ ID NO: 383823 - DNA, 25 bp, Artificial
  probe
  misc_feature (1)..(25): SEQ ID NO: 4489; WAN0249O9; Start 37; Stop 61
tctactcaaatccacgttagaaagg

SEQ ID NO: 383824 - DNA, 25 bp, Artificial
  probe
  misc_feature (1)..(25): SEQ ID NO: 4489; WAN0249O9; Start 39; Stop 63
tactcaaatccacgttagaaaggac

SEQ ID NO: 383825 - DNA, 25 bp, Artificial
  probe
  misc_feature (1)..(25): SEQ ID NO: 4489; WAN0249O9; Start 33; Stop 57
tcattctactcaaatccacgttaga

SEQ ID NO: 383826 - DNA, 25 bp, Artificial
  probe
  misc_feature (1)..(25): SEQ ID NO: 4489; WAN0249O9; Start 41; Stop 65
ctcaaatccacgttagaaaggactg

SEQ ID NO: 383827 - DNA, 25 bp, Artificial
  probe
  misc_feature (1)..(25): SEQ ID NO: 4489; WAN0249O9; Start 40; Stop 64
actcaaatccacgttagaaaggact

SEQ ID NO: 383828 - DNA, 25 bp, Artificial
  probe
  misc_feature (1)..(25): SEQ ID NO: 4489; WAN0249O9; Start 43; Stop 67
caaatccacgttagaaaggactgct

SEQ ID NO: 383829 - DNA, 25 bp, Artificial
  probe
  misc_feature (1)..(25): SEQ ID NO: 4489; WAN0249O9; Start 42; Stop 66
tcaaatccacgttagaaaggactgc

SEQ ID NO: 383830 - DNA, 25 bp, Artificial
  probe
  misc_feature (1)..(25): SEQ ID NO: 4489; WAN0249O9; Start 30; Stop 54
gagtcattctactcaaatccacgtt

SEQ ID NO: 383831 - DNA, 25 bp, Artificial
  probe
  misc_feature (1)..(25): SEQ ID NO: 4489; WAN0249O9; Start 34; Stop 58
cattctactcaaatccacgttagaa

SEQ ID NO: 383832 - DNA, 25 bp, Artificial
  probe
  misc_feature (1)..(25): SEQ ID NO: 4489; WAN0249O9; Start 36; Stop 60
ttctactcaaatccacgttagaaag

SEQ ID NO: 383833 - DNA, 25 bp, Artificial
  probe
  misc_feature (1)..(25): SEQ ID NO: 4489; WAN0249O9; Start 35; Stop 59
attctactcaaatccacgttagaaa

SEQ ID NO: 383834 - DNA, 25 bp, Artificial
  probe
  misc_feature (1)..(25): SEQ ID NO: 4490; WAN024AQQ; Start 32; Stop 56
aagtgttctagtaaggctttcattt

SEQ ID NO: 383835 - DNA, 25 bp, Artificial
  probe
  misc_feature (1)..(25): SEQ ID NO: 4490; WAN024AQQ; Start 33; Stop 57
agtgttctagtaaggctttcattta

SEQ ID NO: 383836 - DNA, 25 bp, Artificial
  probe
  misc_feature (1)..(25): SEQ ID NO: 4490; WAN024AQQ; Start 31; Stop 55
taagtgttctagtaaggctttcatt

SEQ ID NO: 383837 - DNA, 25 bp, Artificial
  probe
  misc_feature (1)..(25): SEQ ID NO: 4490; WAN024AQQ; Start 29; Stop 53
aataagtgttctagtaaggctttca

SEQ ID NO: 383838 - DNA, 25 bp, Artificial
  probe
  misc_feature (1)..(25): SEQ ID NO: 4490; WAN024AQQ; Start 30; Stop 54
ataagtgttctagtaaggctttcat

SEQ ID NO: 383839 - DNA, 25 bp, Artificial
  probe
  misc_feature (1)..(25): SEQ ID NO: 4490; WAN024AQQ; Start 35; Stop 59
tgttctagtaaggctttcatttacc

SEQ ID NO: 383840 - DNA, 25 bp, Artificial
  probe
  misc_feature (1)..(25): SEQ ID NO: 4490; WAN024AQQ; Start 36; Stop 60
gttctagtaaggctttcatttacct

SEQ ID NO: 383841 - DNA, 25 bp, Artificial
  probe
  misc_feature (1)..(25): SEQ ID NO: 4490; WAN024AQQ; Start 34; Stop 58
gtgttctagtaaggctttcatttac

SEQ ID NO: 383842 - DNA, 25 bp, Artificial
  probe
  misc_feature (1)..(25): SEQ ID NO: 4490; WAN024AQQ; Start 28; Stop 52
aaataagtgttctagtaaggctttc

SEQ ID NO: 383843 - DNA, 25 bp, Artificial
  probe
  misc_feature (1)..(25): SEQ ID NO: 4490; WAN024AQQ; Start 3; Stop 27
gacccacctctttctattttacttt

SEQ ID NO: 383844 - DNA, 25 bp, Artificial
  probe
  misc_feature (1)..(25): SEQ ID NO: 4490; WAN024AQQ; Start 2; Stop 26
agacccacctctttctattttactt

SEQ ID NO: 383845 - DNA, 25 bp, Artificial
  probe
  misc_feature (1)..(25): SEQ ID NO: 4490; WAN024AQQ; Start 4; Stop 28
acccacctctttctattttacttta

SEQ ID NO: 383846 - DNA, 25 bp, Artificial
  probe
  misc_feature (1)..(25): SEQ ID NO: 4490; WAN024AQQ; Start 1; Stop 25
tagacccacctctttctattttact

SEQ ID NO: 383847 - DNA, 25 bp, Artificial
  probe
  misc_feature (1)..(25): SEQ ID NO: 4490; WAN024AQQ; Start 27; Stop 51
taaataagtgttctagtaaggcttt

SEQ ID NO: 383848 - DNA, 25 bp, Artificial
  probe
  misc_feature (1)..(25): SEQ ID NO: 4490; WAN024AQQ; Start 26; Stop 50
ttaaataagtgttctagtaaggctt

SEQ ID NO: 383849 - DNA, 25 bp, Artificial
  probe
  misc_feature (1)..(25): SEQ ID NO: 4490; WAN024AQQ; Start 5; Stop 29
cccacctctttctattttactttaa

SEQ ID NO: 383850 - DNA, 25 bp, Artificial
  probe
  misc_feature (1)..(25): SEQ ID NO: 4490; WAN024AQQ; Start 25; Stop 49
tttaaataagtgttctagtaaggct

SEQ ID NO: 383851 - DNA, 25 bp, Artificial
  probe
  misc_feature (1)..(25): SEQ ID NO: 4490; WAN024AQQ; Start 24; Stop 48
ctttaaataagtgttctagtaaggc

SEQ ID NO: 383852 - DNA, 25 bp, Artificial
  probe
  misc_feature (1)..(25): SEQ ID NO: 4490; WAN024AQQ; Start 37; Stop 61
ttctagtaaggctttcatttacctt

SEQ ID NO: 383853 - DNA, 25 bp, Artificial
  probe
  misc_feature (1)..(25): SEQ ID NO: 4490; WAN024AQQ; Start 38; Stop 62
tctagtaaggctttcatttacctta

SEQ ID NO: 383854 - DNA, 25 bp, Artificial
  probe
  misc_feature (1)..(25): SEQ ID NO: 4490; WAN024AQQ; Start 6; Stop 30
ccacctctttctattttactttaaa

SEQ ID NO: 383855 - DNA, 25 bp, Artificial
  probe
  misc_feature (1)..(25): SEQ ID NO: 4491; WAN0249QK; Start 186; Stop 210
aggtctataatgaagttagccatct

SEQ ID NO: 383856 - DNA, 25 bp, Artificial
  probe
  misc_feature (1)..(25): SEQ ID NO: 4491; WAN0249QK; Start 185; Stop 209
aaggtctataatgaagttagccatc

SEQ ID NO: 383857 - DNA, 25 bp, Artificial
  probe
  misc_feature (1)..(25): SEQ ID NO: 4491; WAN0249QK; Start 187; Stop 211
ggtctataatgaagttagccatcta

SEQ ID NO: 383858 - DNA, 25 bp, Artificial
  probe
  misc_feature (1)..(25): SEQ ID NO: 4491; WAN0249QK; Start 194; Stop 218
aatgaagttagccatctagtatcaa

SEQ ID NO: 383859 - DNA, 25 bp, Artificial
  probe
  misc_feature (1)..(25): SEQ ID NO: 4491; WAN0249QK; Start 183; Stop 207
gaaaggtctataatgaagttagcca

SEQ ID NO: 383860 - DNA, 25 bp, Artificial
  probe
  misc_feature (1)..(25): SEQ ID NO: 4491; WAN0249QK; Start 182; Stop 206
tgaaaggtctataatgaagttagcc

SEQ ID NO: 383861 - DNA, 25 bp, Artificial
  probe
  misc_feature (1)..(25): SEQ ID NO: 4491; WAN0249QK; Start 193; Stop 217
taatgaagttagccatctagtatca

SEQ ID NO: 383862 - DNA, 25 bp, Artificial
  probe
  misc_feature (1)..(25): SEQ ID NO: 4491; WAN0249QK; Start 189; Stop 213
tctataatgaagttagccatctagt

SEQ ID NO: 383863 - DNA, 25 bp, Artificial
  probe
  misc_feature (1)..(25): SEQ ID NO: 4491; WAN0249QK; Start 184; Stop 208
aaaggtctataatgaagttagccat

SEQ ID NO: 383864 - DNA, 25 bp, Artificial
  probe
  misc_feature (1)..(25): SEQ ID NO: 4491; WAN0249QK; Start 102; Stop 126
ccttatacactaactacattctagc

SEQ ID NO: 383865 - DNA, 25 bp, Artificial
  probe
  misc_feature (1)..(25): SEQ ID NO: 4491; WAN0249QK; Start 181; Stop 205
ctgaaaggtctataatgaagttagc

SEQ ID NO: 383866 - DNA, 25 bp, Artificial
  probe
  misc_feature (1)..(25): SEQ ID NO: 4491; WAN0249QK; Start 188; Stop 212
gtctataatgaagttagccatctag

SEQ ID NO: 383867 - DNA, 25 bp, Artificial
  probe
  misc_feature (1)..(25): SEQ ID NO: 4491; WAN0249QK; Start 177; Stop 201
agttctgaaaggtctataatgaagt

SEQ ID NO: 383868 - DNA, 25 bp, Artificial
  probe
  misc_feature (1)..(25): SEQ ID NO: 4491; WAN0249QK; Start 98; Stop 122
tgaaccttatacactaactacattc

SEQ ID NO: 383869 - DNA, 25 bp, Artificial
  probe
  misc_feature (1)..(25): SEQ ID NO: 4491; WAN0249QK; Start 195; Stop 219
atgaagttagccatctagtatcaaa

SEQ ID NO: 383870 - DNA, 25 bp, Artificial
  probe
  misc_feature (1)..(25): SEQ ID NO: 4491; WAN0249QK; Start 99; Stop 123
gaaccttatacactaactacattct

SEQ ID NO: 383871 - DNA, 25 bp, Artificial
  probe
  misc_feature (1)..(25): SEQ ID NO: 4491; WAN0249QK; Start 178; Stop 202
gttctgaaaggtctataatgaagtt

SEQ ID NO: 383872 - DNA, 25 bp, Artificial
  probe
  misc_feature (1)..(25): SEQ ID NO: 4491; WAN0249QK; Start 220; Stop 244
aaaccgactagctcttatgaactag

SEQ ID NO: 383873 - DNA, 25 bp, Artificial
  probe
  misc_feature (1)..(25): SEQ ID NO: 4491; WAN0249QK; Start 192; Stop 216
ataatgaagttagccatctagtatc

SEQ ID NO: 383874 - DNA, 25 bp, Artificial
  probe
  misc_feature (1)..(25): SEQ ID NO: 4491; WAN0249QK; Start 103; Stop 127
cttatacactaactacattctagca

SEQ ID NO: 383875 - DNA, 25 bp, Artificial
  probe
  misc_feature (1)..(25): SEQ ID NO: 4491; WAN0249QK; Start 97; Stop 121
atgaaccttatacactaactacatt

SEQ ID NO: 383876 - DNA, 25 bp, Artificial
  probe
  misc_feature (1)..(25): SEQ ID NO: 4491; WAN0249QK; Start 96; Stop 120
aatgaaccttatacactaactacat

SEQ ID NO: 383877 - DNA, 25 bp, Artificial
  probe
  misc_feature (1)..(25): SEQ ID NO: 4491; WAN0249QK; Start 86; Stop 110
ttggtgttctaatgaaccttataca

SEQ ID NO: 383878 - DNA, 25 bp, Artificial
  probe
  misc_feature (1)..(25): SEQ ID NO: 4491; WAN0249QK; Start 229; Stop 253
agctcttatgaactagtcgatttct

SEQ ID NO: 383879 - DNA, 25 bp, Artificial
  probe
  misc_feature (1)..(25): SEQ ID NO: 4491; WAN0249QK; Start 230; Stop 254
gctcttatgaactagtcgatttctc

SEQ ID NO: 383880 - DNA, 25 bp, Artificial
  probe
  misc_feature (1)..(25): SEQ ID NO: 4491; WAN0249QK; Start 92; Stop 116
ttctaatgaaccttatacactaact

SEQ ID NO: 383881 - DNA, 25 bp, Artificial
  probe
  misc_feature (1)..(25): SEQ ID NO: 4491; WAN0249QK; Start 180; Stop 204
tctgaaaggtctataatgaagttag

SEQ ID NO: 383882 - DNA, 25 bp, Artificial
  probe
  misc_feature (1)..(25): SEQ ID NO: 4491; WAN0249QK; Start 219; Stop 243
aaaaccgactagctcttatgaacta

SEQ ID NO: 383883 - DNA, 25 bp, Artificial
  probe
  misc_feature (1)..(25): SEQ ID NO: 4491; WAN0249QK; Start 190; Stop 214
ctataatgaagttagccatctagta

SEQ ID NO: 383884 - DNA, 25 bp, Artificial
  probe
  misc_feature (1)..(25): SEQ ID NO: 4491; WAN0249QK; Start 228; Stop 252
tagctcttatgaactagtcgatttc

SEQ ID NO: 383885 - DNA, 25 bp, Artificial
  probe
  misc_feature (1)..(25): SEQ ID NO: 4491; WAN0249QK; Start 176; Stop 200
tagttctgaaaggtctataatgaag

SEQ ID NO: 383886 - DNA, 25 bp, Artificial
  probe
  misc_feature (1)..(25): SEQ ID NO: 4491; WAN0249QK; Start 174; Stop 198
cttagttctgaaaggtctataatga

SEQ ID NO: 383887 - DNA, 25 bp, Artificial
  probe
  misc_feature (1)..(25): SEQ ID NO: 4491; WAN0249QK; Start 108; Stop 132
acactaactacattctagcatataa

SEQ ID NO: 383888 - DNA, 25 bp, Artificial
  probe
  misc_feature (1)..(25): SEQ ID NO: 4492; WAN024APL; Start 19; Stop 43
ttatctaagcattccagagtacatg

SEQ ID NO: 383889 - DNA, 25 bp, Artificial
  probe
  misc_feature (1)..(25): SEQ ID NO: 4492; WAN024APL; Start 14; Stop 38
agcatttatctaagcattccagagt

SEQ ID NO: 383890 - DNA, 25 bp, Artificial
  probe
  misc_feature (1)..(25): SEQ ID NO: 4492; WAN024APL; Start 15; Stop 39
gcatttatctaagcattccagagta

SEQ ID NO: 383891 - DNA, 25 bp, Artificial
  probe
  misc_feature (1)..(25): SEQ ID NO: 4492; WAN024APL; Start 13; Stop 37
tagcatttatctaagcattccagag

SEQ ID NO: 383892 - DNA, 25 bp, Artificial
  probe
  misc_feature (1)..(25): SEQ ID NO: 4492; WAN024APL; Start 12; Stop 36
ttagcatttatctaagcattccaga

SEQ ID NO: 383893 - DNA, 25 bp, Artificial
  probe
  misc_feature (1)..(25): SEQ ID NO: 4492; WAN024APL; Start 42; Stop 66
tgtatcttgcatgtgctctttcttt

SEQ ID NO: 383894 - DNA, 25 bp, Artificial
  probe
  misc_feature (1)..(25): SEQ ID NO: 4492; WAN024APL; Start 41; Stop 65
atgtatcttgcatgtgctctttctt

SEQ ID NO: 383895 - DNA, 25 bp, Artificial
  probe
  misc_feature (1)..(25): SEQ ID NO: 4492; WAN024APL; Start 18; Stop 42
tttatctaagcattccagagtacat

SEQ ID NO: 383896 - DNA, 25 bp, Artificial
  probe
  misc_feature (1)..(25): SEQ ID NO: 4492; WAN024APL; Start 17; Stop 41
atttatctaagcattccagagtaca

SEQ ID NO: 383897 - DNA, 25 bp, Artificial
  probe
  misc_feature (1)..(25): SEQ ID NO: 4492; WAN024APL; Start 16; Stop 40
catttatctaagcattccagagtac

SEQ ID NO: 383898 - DNA, 25 bp, Artificial
  probe
  misc_feature (1)..(25): SEQ ID NO: 4492; WAN024APL; Start 11; Stop 35
tttagcatttatctaagcattccag

SEQ ID NO: 383899 - DNA, 25 bp, Artificial
  probe
  misc_feature (1)..(25): SEQ ID NO: 4492; WAN024APL; Start 20; Stop 44
tatctaagcattccagagtacatgt

SEQ ID NO: 383900 - DNA, 25 bp, Artificial
  probe
  misc_feature (1)..(25): SEQ ID NO: 4492; WAN024APL; Start 64; Stop 88
ttttggggttgaaacgataggagaa

SEQ ID NO: 383901 - DNA, 25 bp, Artificial
  probe
  misc_feature (1)..(25): SEQ ID NO: 4492; WAN024APL; Start 61; Stop 85
ttcttttggggttgaaacgatagga

SEQ ID NO: 383902 - DNA, 25 bp, Artificial
  probe
  misc_feature (1)..(25): SEQ ID NO: 4492; WAN024APL; Start 65; Stop 89
tttggggttgaaacgataggagaag

SEQ ID NO: 383903 - DNA, 25 bp, Artificial
  probe
  misc_feature (1)..(25): SEQ ID NO: 4492; WAN024APL; Start 63; Stop 87
cttttggggttgaaacgataggaga

SEQ ID NO: 383904 - DNA, 25 bp, Artificial
  probe
  misc_feature (1)..(25): SEQ ID NO: 4492; WAN024APL; Start 62; Stop 86
tcttttggggttgaaacgataggag

SEQ ID NO: 383905 - DNA, 25 bp, Artificial
  probe
  misc_feature (1)..(25): SEQ ID NO: 4492; WAN024APL; Start 44; Stop 68
tatcttgcatgtgctctttcttttg

SEQ ID NO: 383906 - DNA, 25 bp, Artificial
  probe
  misc_feature (1)..(25): SEQ ID NO: 4492; WAN024APL; Start 43; Stop 67
gtatcttgcatgtgctctttctttt

SEQ ID NO: 383907 - DNA, 25 bp, Artificial
  probe
  misc_feature (1)..(25): SEQ ID NO: 4492; WAN024APL; Start 59; Stop 83
ctttcttttggggttgaaacgatag

SEQ ID NO: 383908 - DNA, 25 bp, Artificial
  probe
  misc_feature (1)..(25): SEQ ID NO: 4492; WAN024APL; Start 58; Stop 82
tctttcttttggggttgaaacgata

SEQ ID NO: 383909 - DNA, 25 bp, Artificial
  probe
  misc_feature (1)..(25): SEQ ID NO: 4492; WAN024APL; Start 60; Stop 84
tttcttttggggttgaaacgatagg

SEQ ID NO: 383910 - DNA, 25 bp, Artificial
  probe
  misc_feature (1)..(25): SEQ ID NO: 4492; WAN024APL; Start 52; Stop 76
atgtgctctttcttttggggttgaa

SEQ ID NO: 383911 - DNA, 25 bp, Artificial
  probe
  misc_feature (1)..(25): SEQ ID NO: 4492; WAN024APL; Start 57; Stop 81
ctctttcttttggggttgaaacgat

SEQ ID NO: 383912 - DNA, 25 bp, Artificial
  probe
  misc_feature (1)..(25): SEQ ID NO: 4492; WAN024APL; Start 40; Stop 64
catgtatcttgcatgtgctctttct

SEQ ID NO: 383913 - DNA, 25 bp, Artificial
  probe
  misc_feature (1)..(25): SEQ ID NO: 4492; WAN024APL; Start 10; Stop 34
ttttagcatttatctaagcattcca

SEQ ID NO: 383914 - DNA, 25 bp, Artificial
  probe
  misc_feature (1)..(25): SEQ ID NO: 4492; WAN024APL; Start 45; Stop 69
atcttgcatgtgctctttcttttgg

SEQ ID NO: 383915 - DNA, 25 bp, Artificial
  probe
  misc_feature (1)..(25): SEQ ID NO: 4492; WAN024APL; Start 68; Stop 92
ggggttgaaacgataggagaaggaa

SEQ ID NO: 383916 - DNA, 25 bp, Artificial
  probe
  misc_feature (1)..(25): SEQ ID NO: 4492; WAN024APL; Start 66; Stop 90
ttggggttgaaacgataggagaagg

SEQ ID NO: 383917 - DNA, 25 bp, Artificial
  probe
  misc_feature (1)..(25): SEQ ID NO: 4492; WAN024APL; Start 51; Stop 75
catgtgctctttcttttggggttga

SEQ ID NO: 383918 - DNA, 25 bp, Artificial
  probe
  misc_feature (1)..(25): SEQ ID NO: 4492; WAN024APL; Start 54; Stop 78
gtgctctttcttttggggttgaaac

SEQ ID NO: 383919 - DNA, 25 bp, Artificial
  probe
  misc_feature (1)..(25): SEQ ID NO: 4492; WAN024APL; Start 53; Stop 77
tgtgctctttcttttggggttgaaa

SEQ ID NO: 383920 - DNA, 25 bp, Artificial
  probe
  misc_feature (1)..(25): SEQ ID NO: 4492; WAN024APL; Start 67; Stop 91
tggggttgaaacgataggagaagga

SEQ ID NO: 383921 - DNA, 25 bp, Artificial
  probe
  misc_feature (1)..(25): SEQ ID NO: 4493; WAN0249TM; Start 192; Stop 216
gaactcgattcaattcatgtgacaa

SEQ ID NO: 383922 - DNA, 25 bp, Artificial
  probe
  misc_feature (1)..(25): SEQ ID NO: 4493; WAN0249TM; Start 193; Stop 217
aactcgattcaattcatgtgacaac

SEQ ID NO: 383923 - DNA, 25 bp, Artificial
  probe
  misc_feature (1)..(25): SEQ ID NO: 4493; WAN0249TM; Start 186; Stop 210
tagttggaactcgattcaattcatg

SEQ ID NO: 383924 - DNA, 25 bp, Artificial
  probe
  misc_feature (1)..(25): SEQ ID NO: 4493; WAN0249TM; Start 188; Stop 212
gttggaactcgattcaattcatgtg

SEQ ID NO: 383925 - DNA, 25 bp, Artificial
  probe
  misc_feature (1)..(25): SEQ ID NO: 4493; WAN0249TM; Start 189; Stop 213
ttggaactcgattcaattcatgtga

SEQ ID NO: 383926 - DNA, 25 bp, Artificial
  probe
  misc_feature (1)..(25): SEQ ID NO: 4493; WAN0249TM; Start 187; Stop 211
agttggaactcgattcaattcatgt

SEQ ID NO: 383927 - DNA, 25 bp, Artificial
  probe
  misc_feature (1)..(25): SEQ ID NO: 4493; WAN0249TM; Start 185; Stop 209
ttagttggaactcgattcaattcat

SEQ ID NO: 383928 - DNA, 25 bp, Artificial
  probe
  misc_feature (1)..(25): SEQ ID NO: 4493; WAN0249TM; Start 191; Stop 215
ggaactcgattcaattcatgtgaca

SEQ ID NO: 383929 - DNA, 25 bp, Artificial
  probe
  misc_feature (1)..(25): SEQ ID NO: 4493; WAN0249TM; Start 190; Stop 214
tggaactcgattcaattcatgtgac

SEQ ID NO: 383930 - DNA, 25 bp, Artificial
  probe
  misc_feature (1)..(25): SEQ ID NO: 4493; WAN0249TM; Start 194; Stop 218
actcgattcaattcatgtgacaacg

SEQ ID NO: 383931 - DNA, 25 bp, Artificial
  probe
  misc_feature (1)..(25): SEQ ID NO: 4493; WAN0249TM; Start 195; Stop 219
ctcgattcaattcatgtgacaacgt

SEQ ID NO: 383932 - DNA, 25 bp, Artificial
  probe
  misc_feature (1)..(25): SEQ ID NO: 4493; WAN0249TM; Start 197; Stop 221
cgattcaattcatgtgacaacgtga

SEQ ID NO: 383933 - DNA, 25 bp, Artificial
  probe
  misc_feature (1)..(25): SEQ ID NO: 4493; WAN0249TM; Start 196; Stop 220
tcgattcaattcatgtgacaacgtg

SEQ ID NO: 383934 - DNA, 25 bp, Artificial
  probe
  misc_feature (1)..(25): SEQ ID NO: 4493; WAN0249TM; Start 184; Stop 208
tttagttggaactcgattcaattca

SEQ ID NO: 383935 - DNA, 25 bp, Artificial
  probe
  misc_feature (1)..(25): SEQ ID NO: 4493; WAN0249TM; Start 198; Stop 222
gattcaattcatgtgacaacgtgaa

SEQ ID NO: 383936 - DNA, 25 bp, Artificial
  probe
  misc_feature (1)..(25): SEQ ID NO: 4493; WAN0249TM; Start 165; Stop 189
cggctagtttcctacagattttagt

SEQ ID NO: 383937 - DNA, 25 bp, Artificial
  probe
  misc_feature (1)..(25): SEQ ID NO: 4493; WAN0249TM; Start 166; Stop 190
ggctagtttcctacagattttagtt

SEQ ID NO: 383938 - DNA, 25 bp, Artificial
  probe
  misc_feature (1)..(25): SEQ ID NO: 4493; WAN0249TM; Start 164; Stop 188
gcggctagtttcctacagattttag

SEQ ID NO: 383939 - DNA, 25 bp, Artificial
  probe
  misc_feature (1)..(25): SEQ ID NO: 4493; WAN0249TM; Start 163; Stop 187
tgcggctagtttcctacagatttta

SEQ ID NO: 383940 - DNA, 25 bp, Artificial
  probe
  misc_feature (1)..(25): SEQ ID NO: 4493; WAN0249TM; Start 199; Stop 223
attcaattcatgtgacaacgtgaaa

SEQ ID NO: 383941 - DNA, 25 bp, Artificial
  probe
  misc_feature (1)..(25): SEQ ID NO: 4493; WAN0249TM; Start 167; Stop 191
gctagtttcctacagattttagttg

SEQ ID NO: 383942 - DNA, 25 bp, Artificial
  probe
  misc_feature (1)..(25): SEQ ID NO: 4493; WAN0249TM; Start 174; Stop 198
tcctacagattttagttggaactcg

SEQ ID NO: 383943 - DNA, 25 bp, Artificial
  probe
  misc_feature (1)..(25): SEQ ID NO: 4493; WAN0249TM; Start 175; Stop 199
cctacagattttagttggaactcga

SEQ ID NO: 383944 - DNA, 25 bp, Artificial
  probe
  misc_feature (1)..(25): SEQ ID NO: 4493; WAN0249TM; Start 179; Stop 203
cagattttagttggaactcgattca

SEQ ID NO: 383945 - DNA, 25 bp, Artificial
  probe
  misc_feature (1)..(25): SEQ ID NO: 4493; WAN0249TM; Start 178; Stop 202
acagattttagttggaactcgattc

SEQ ID NO: 383946 - DNA, 25 bp, Artificial
  probe
  misc_feature (1)..(25): SEQ ID NO: 4493; WAN0249TM; Start 168; Stop 192
ctagtttcctacagattttagttgg

SEQ ID NO: 383947 - DNA, 25 bp, Artificial
  probe
  misc_feature (1)..(25): SEQ ID NO: 4493; WAN0249TM; Start 180; Stop 204
agattttagttggaactcgattcaa

SEQ ID NO: 383948 - DNA, 25 bp, Artificial
  probe
  misc_feature (1)..(25): SEQ ID NO: 4493; WAN0249TM; Start 176; Stop 200
ctacagattttagttggaactcgat

SEQ ID NO: 383949 - DNA, 25 bp, Artificial
  probe
  misc_feature (1)..(25): SEQ ID NO: 4493; WAN0249TM; Start 177; Stop 201
tacagattttagttggaactcgatt

SEQ ID NO: 383950 - DNA, 25 bp, Artificial
  probe
  misc_feature (1)..(25): SEQ ID NO: 4493; WAN0249TM; Start 183; Stop 207
ttttagttggaactcgattcaattc

SEQ ID NO: 383951 - DNA, 25 bp, Artificial
  probe
  misc_feature (1)..(25): SEQ ID NO: 4493; WAN0249TM; Start 181; Stop 205
gattttagttggaactcgattcaat

SEQ ID NO: 383952 - DNA, 25 bp, Artificial
  probe
  misc_feature (1)..(25): SEQ ID NO: 4493; WAN0249TM; Start 169; Stop 193
tagtttcctacagattttagttgga

SEQ ID NO: 383953 - DNA, 25 bp, Artificial
  probe
  misc_feature (1)..(25): SEQ ID NO: 4493; WAN0249TM; Start 182; Stop 206
attttagttggaactcgattcaatt

SEQ ID NO: 383954 - DNA, 25 bp, Artificial
  probe
  misc_feature (1)..(25): SEQ ID NO: 4494; WAN024A8Q; Start 19; Stop 43
tctatgacagttatagtaggctgaa

SEQ ID NO: 383955 - DNA, 25 bp, Artificial
  probe
  misc_feature (1)..(25): SEQ ID NO: 4494; WAN024A8Q; Start 18; Stop 42
atctatgacagttatagtaggctga

SEQ ID NO: 383956 - DNA, 25 bp, Artificial
  probe
  misc_feature (1)..(25): SEQ ID NO: 4494; WAN024A8Q; Start 16; Stop 40
caatctatgacagttatagtaggct

SEQ ID NO: 383957 - DNA, 25 bp, Artificial
  probe
  misc_feature (1)..(25): SEQ ID NO: 4494; WAN024A8Q; Start 17; Stop 41
aatctatgacagttatagtaggctg

SEQ ID NO: 383958 - DNA, 25 bp, Artificial
  probe
  misc_feature (1)..(25): SEQ ID NO: 4494; WAN024A8Q; Start 25; Stop 49
acagttatagtaggctgaaattgga

SEQ ID NO: 383959 - DNA, 25 bp, Artificial
  probe
  misc_feature (1)..(25): SEQ ID NO: 4494; WAN024A8Q; Start 24; Stop 48
gacagttatagtaggctgaaattgg

SEQ ID NO: 383960 - DNA, 25 bp, Artificial
  probe
  misc_feature (1)..(25): SEQ ID NO: 4494; WAN024A8Q; Start 27; Stop 51
agttatagtaggctgaaattggaat

SEQ ID NO: 383961 - DNA, 25 bp, Artificial
  probe
  misc_feature (1)..(25): SEQ ID NO: 4494; WAN024A8Q; Start 26; Stop 50
cagttatagtaggctgaaattggaa

SEQ ID NO: 383962 - DNA, 25 bp, Artificial
  probe
  misc_feature (1)..(25): SEQ ID NO: 4494; WAN024A8Q; Start 23; Stop 47
tgacagttatagtaggctgaaattg

SEQ ID NO: 383963 - DNA, 25 bp, Artificial
  probe
  misc_feature (1)..(25): SEQ ID NO: 4494; WAN024A8Q; Start 22; Stop 46
atgacagttatagtaggctgaaatt

SEQ ID NO: 383964 - DNA, 25 bp, Artificial
  probe
  misc_feature (1)..(25): SEQ ID NO: 4494; WAN024A8Q; Start 20; Stop 44
ctatgacagttatagtaggctgaaa

SEQ ID NO: 383965 - DNA, 25 bp, Artificial
  probe
  misc_feature (1)..(25): SEQ ID NO: 4494; WAN024A8Q; Start 31; Stop 55
atagtaggctgaaattggaatagca

SEQ ID NO: 383966 - DNA, 25 bp, Artificial
  probe
  misc_feature (1)..(25): SEQ ID NO: 4494; WAN024A8Q; Start 32; Stop 56
tagtaggctgaaattggaatagcac

SEQ ID NO: 383967 - DNA, 25 bp, Artificial
  probe
  misc_feature (1)..(25): SEQ ID NO: 4494; WAN024A8Q; Start 30; Stop 54
tatagtaggctgaaattggaatagc

SEQ ID NO: 383968 - DNA, 25 bp, Artificial
  probe
  misc_feature (1)..(25): SEQ ID NO: 4494; WAN024A8Q; Start 21; Stop 45
tatgacagttatagtaggctgaaat

SEQ ID NO: 383969 - DNA, 25 bp, Artificial
  probe
  misc_feature (1)..(25): SEQ ID NO: 4494; WAN024A8Q; Start 28; Stop 52
gttatagtaggctgaaattggaata

SEQ ID NO: 383970 - DNA, 25 bp, Artificial
  probe
  misc_feature (1)..(25): SEQ ID NO: 4494; WAN024A8Q; Start 33; Stop 57
agtaggctgaaattggaatagcaca

SEQ ID NO: 383971 - DNA, 25 bp, Artificial
  probe
  misc_feature (1)..(25): SEQ ID NO: 4494; WAN024A8Q; Start 29; Stop 53
ttatagtaggctgaaattggaatag

SEQ ID NO: 383972 - DNA, 25 bp, Artificial
  probe
  misc_feature (1)..(25): SEQ ID NO: 4495; WAN024AH6; Start 16; Stop 40
cttcctccaacttgagaaaatcctt

SEQ ID NO: 383973 - DNA, 25 bp, Artificial
  probe
  misc_feature (1)..(25): SEQ ID NO: 4495; WAN024AH6; Start 17; Stop 41
ttcctccaacttgagaaaatccttg

SEQ ID NO: 383974 - DNA, 25 bp, Artificial
  probe
  misc_feature (1)..(25): SEQ ID NO: 4495; WAN024AH6; Start 29; Stop 53
gagaaaatccttggaacgtgataaa

SEQ ID NO: 383975 - DNA, 25 bp, Artificial
  probe
  misc_feature (1)..(25): SEQ ID NO: 4495; WAN024AH6; Start 28; Stop 52
tgagaaaatccttggaacgtgataa

SEQ ID NO: 383976 - DNA, 25 bp, Artificial
  probe
  misc_feature (1)..(25): SEQ ID NO: 4495; WAN024AH6; Start 27; Stop 51
ttgagaaaatccttggaacgtgata

SEQ ID NO: 383977 - DNA, 25 bp, Artificial
  probe
  misc_feature (1)..(25): SEQ ID NO: 4495; WAN024AH6; Start 30; Stop 54
agaaaatccttggaacgtgataaaa

SEQ ID NO: 383978 - DNA, 25 bp, Artificial
  probe
  misc_feature (1)..(25): SEQ ID NO: 4495; WAN024AH6; Start 15; Stop 39
ccttcctccaacttgagaaaatcct

SEQ ID NO: 383979 - DNA, 25 bp, Artificial
  probe
  misc_feature (1)..(25): SEQ ID NO: 4495; WAN024AH6; Start 26; Stop 50
cttgagaaaatccttggaacgtgat

SEQ ID NO: 383980 - DNA, 25 bp, Artificial
  probe
  misc_feature (1)..(25): SEQ ID NO: 4495; WAN024AH6; Start 31; Stop 55
gaaaatccttggaacgtgataaaat

SEQ ID NO: 383981 - DNA, 25 bp, Artificial
  probe
  misc_feature (1)..(25): SEQ ID NO: 4495; WAN024AH6; Start 24; Stop 48
aacttgagaaaatccttggaacgtg

SEQ ID NO: 383982 - DNA, 25 bp, Artificial
  probe
  misc_feature (1)..(25): SEQ ID NO: 4495; WAN024AH6; Start 23; Stop 47
caacttgagaaaatccttggaacgt

SEQ ID NO: 383983 - DNA, 25 bp, Artificial
  probe
  misc_feature (1)..(25): SEQ ID NO: 4495; WAN024AH6; Start 14; Stop 38
cccttcctccaacttgagaaaatcc

SEQ ID NO: 383984 - DNA, 25 bp, Artificial
  probe
  misc_feature (1)..(25): SEQ ID NO: 4495; WAN024AH6; Start 13; Stop 37
ccccttcctccaacttgagaaaatc

SEQ ID NO: 383985 - DNA, 25 bp, Artificial
  probe
  misc_feature (1)..(25): SEQ ID NO: 4495; WAN024AH6; Start 38; Stop 62
cttggaacgtgataaaataaaggat

SEQ ID NO: 383986 - DNA, 25 bp, Artificial
  probe
  misc_feature (1)..(25): SEQ ID NO: 4495; WAN024AH6; Start 35; Stop 59
atccttggaacgtgataaaataaag

SEQ ID NO: 383987 - DNA, 25 bp, Artificial
  probe
  misc_feature (1)..(25): SEQ ID NO: 4495; WAN024AH6; Start 25; Stop 49
acttgagaaaatccttggaacgtga

SEQ ID NO: 383988 - DNA, 25 bp, Artificial
  probe
  misc_feature (1)..(25): SEQ ID NO: 4495; WAN024AH6; Start 12; Stop 36
tccccttcctccaacttgagaaaat

SEQ ID NO: 383989 - DNA, 25 bp, Artificial
  probe
  misc_feature (1)..(25): SEQ ID NO: 4495; WAN024AH6; Start 34; Stop 58
aatccttggaacgtgataaaataaa

SEQ ID NO: 383990 - DNA, 25 bp, Artificial
  probe
  misc_feature (1)..(25): SEQ ID NO: 4495; WAN024AH6; Start 33; Stop 57
aaatccttggaacgtgataaaataa

SEQ ID NO: 383991 - DNA, 25 bp, Artificial
  probe
  misc_feature (1)..(25): SEQ ID NO: 4495; WAN024AH6; Start 32; Stop 56
aaaatccttggaacgtgataaaata

SEQ ID NO: 383992 - DNA, 25 bp, Artificial
  probe
  misc_feature (1)..(25): SEQ ID NO: 4495; WAN024AH6; Start 40; Stop 64
tggaacgtgataaaataaaggataa

SEQ ID NO: 383993 - DNA, 25 bp, Artificial
  probe
  misc_feature (1)..(25): SEQ ID NO: 4495; WAN024AH6; Start 39; Stop 63
ttggaacgtgataaaataaaggata

SEQ ID NO: 383994 - DNA, 25 bp, Artificial
  probe
  misc_feature (1)..(25): SEQ ID NO: 4495; WAN024AH6; Start 43; Stop 67
aacgtgataaaataaaggataagga

SEQ ID NO: 383995 - DNA, 25 bp, Artificial
  probe
  misc_feature (1)..(25): SEQ ID NO: 4495; WAN024AH6; Start 11; Stop 35
gtccccttcctccaacttgagaaaa

SEQ ID NO: 383996 - DNA, 25 bp, Artificial
  probe
  misc_feature (1)..(25): SEQ ID NO: 4495; WAN024AH6; Start 44; Stop 68
acgtgataaaataaaggataaggat

SEQ ID NO: 383997 - DNA, 25 bp, Artificial
  probe
  misc_feature (1)..(25): SEQ ID NO: 4495; WAN024AH6; Start 42; Stop 66
gaacgtgataaaataaaggataagg

SEQ ID NO: 383998 - DNA, 25 bp, Artificial
  probe
  misc_feature (1)..(25): SEQ ID NO: 4495; WAN024AH6; Start 41; Stop 65
ggaacgtgataaaataaaggataag

SEQ ID NO: 383999 - DNA, 25 bp, Artificial
  probe
  misc_feature (1)..(25): SEQ ID NO: 4495; WAN024AH6; Start 45; Stop 69
cgtgataaaataaaggataaggatt

SEQ ID NO: 384000 - DNA, 25 bp, Artificial
  probe
  misc_feature (1)..(25): SEQ ID NO: 4495; WAN024AH6; Start 37; Stop 61
ccttggaacgtgataaaataaagga

SEQ ID NO: 384001 - DNA, 25 bp, Artificial
  probe
  misc_feature (1)..(25): SEQ ID NO: 4495; WAN024AH6; Start 36; Stop 60
tccttggaacgtgataaaataaagg

SEQ ID NO: 384002 - DNA, 25 bp, Artificial
  probe
  misc_feature (1)..(25): SEQ ID NO: 4495; WAN024AH6; Start 22; Stop 46
ccaacttgagaaaatccttggaacg

SEQ ID NO: 384003 - DNA, 25 bp, Artificial
  probe
  misc_feature (1)..(25): SEQ ID NO: 4495; WAN024AH6; Start 18; Stop 42
tcctccaacttgagaaaatccttgg

SEQ ID NO: 384004 - DNA, 25 bp, Artificial
  probe
  misc_feature (1)..(25): SEQ ID NO: 4496; WAN0249FB; Start 31; Stop 55
aataagtatctgaaccccgtgaaaa

SEQ ID NO: 384005 - DNA, 25 bp, Artificial
  probe
  misc_feature (1)..(25): SEQ ID NO: 4496; WAN0249FB; Start 30; Stop 54
aaataagtatctgaaccccgtgaaa

SEQ ID NO: 384006 - DNA, 25 bp, Artificial
  probe
  misc_feature (1)..(25): SEQ ID NO: 4496; WAN0249FB; Start 28; Stop 52
ctaaataagtatctgaaccccgtga

SEQ ID NO: 384007 - DNA, 25 bp, Artificial
  probe
  misc_feature (1)..(25): SEQ ID NO: 4496; WAN0249FB; Start 29; Stop 53
taaataagtatctgaaccccgtgaa

SEQ ID NO: 384008 - DNA, 25 bp, Artificial
  probe
  misc_feature (1)..(25): SEQ ID NO: 4496; WAN0249FB; Start 32; Stop 56
ataagtatctgaaccccgtgaaaac

SEQ ID NO: 384009 - DNA, 25 bp, Artificial
  probe
  misc_feature (1)..(25): SEQ ID NO: 4496; WAN0249FB; Start 27; Stop 51
actaaataagtatctgaaccccgtg

SEQ ID NO: 384010 - DNA, 25 bp, Artificial
  probe
  misc_feature (1)..(25): SEQ ID NO: 4496; WAN0249FB; Start 26; Stop 50
aactaaataagtatctgaaccccgt

SEQ ID NO: 384011 - DNA, 25 bp, Artificial
  probe
  misc_feature (1)..(25): SEQ ID NO: 4496; WAN0249FB; Start 23; Stop 47
ttgaactaaataagtatctgaaccc

SEQ ID NO: 384012 - DNA, 25 bp, Artificial
  probe
  misc_feature (1)..(25): SEQ ID NO: 4496; WAN0249FB; Start 25; Stop 49
gaactaaataagtatctgaaccccg

SEQ ID NO: 384013 - DNA, 25 bp, Artificial
  probe
  misc_feature (1)..(25): SEQ ID NO: 4496; WAN0249FB; Start 19; Stop 43
gctcttgaactaaataagtatctga

SEQ ID NO: 384014 - DNA, 25 bp, Artificial
  probe
  misc_feature (1)..(25): SEQ ID NO: 4496; WAN0249FB; Start 33; Stop 57
taagtatctgaaccccgtgaaaact

SEQ ID NO: 384015 - DNA, 25 bp, Artificial
  probe
  misc_feature (1)..(25): SEQ ID NO: 4496; WAN0249FB; Start 24; Stop 48
tgaactaaataagtatctgaacccc

SEQ ID NO: 384016 - DNA, 25 bp, Artificial
  probe
  misc_feature (1)..(25): SEQ ID NO: 4496; WAN0249FB; Start 18; Stop 42
agctcttgaactaaataagtatctg

SEQ ID NO: 384017 - DNA, 25 bp, Artificial
  probe
  misc_feature (1)..(25): SEQ ID NO: 4496; WAN0249FB; Start 17; Stop 41
cagctcttgaactaaataagtatct

SEQ ID NO: 384018 - DNA, 25 bp, Artificial
  probe
  misc_feature (1)..(25): SEQ ID NO: 4496; WAN0249FB; Start 16; Stop 40
tcagctcttgaactaaataagtatc

SEQ ID NO: 384019 - DNA, 25 bp, Artificial
  probe
  misc_feature (1)..(25): SEQ ID NO: 4496; WAN0249FB; Start 34; Stop 58
aagtatctgaaccccgtgaaaactg

SEQ ID NO: 384020 - DNA, 25 bp, Artificial
  probe
  misc_feature (1)..(25): SEQ ID NO: 4496; WAN0249FB; Start 22; Stop 46
cttgaactaaataagtatctgaacc

SEQ ID NO: 384021 - DNA, 25 bp, Artificial
  probe
  misc_feature (1)..(25): SEQ ID NO: 4496; WAN0249FB; Start 15; Stop 39
ttcagctcttgaactaaataagtat

SEQ ID NO: 384022 - DNA, 25 bp, Artificial
  probe
  misc_feature (1)..(25): SEQ ID NO: 4496; WAN0249FB; Start 35; Stop 59
agtatctgaaccccgtgaaaactgg

SEQ ID NO: 384023 - DNA, 25 bp, Artificial
  probe
  misc_feature (1)..(25): SEQ ID NO: 4496; WAN0249FB; Start 70; Stop 94
ctgacaatttaacaggagaaaataa

SEQ ID NO: 384024 - DNA, 25 bp, Artificial
  probe
  misc_feature (1)..(25): SEQ ID NO: 4496; WAN0249FB; Start 60; Stop 84
ccgttctggcctgacaatttaacag

SEQ ID NO: 384025 - DNA, 25 bp, Artificial
  probe
  misc_feature (1)..(25): SEQ ID NO: 4496; WAN0249FB; Start 71; Stop 95
tgacaatttaacaggagaaaataaa

SEQ ID NO: 384026 - DNA, 25 bp, Artificial
  probe
  misc_feature (1)..(25): SEQ ID NO: 4496; WAN0249FB; Start 72; Stop 96
gacaatttaacaggagaaaataaac

SEQ ID NO: 384027 - DNA, 25 bp, Artificial
  probe
  misc_feature (1)..(25): SEQ ID NO: 4496; WAN0249FB; Start 68; Stop 92
gcctgacaatttaacaggagaaaat

SEQ ID NO: 384028 - DNA, 25 bp, Artificial
  probe
  misc_feature (1)..(25): SEQ ID NO: 4496; WAN0249FB; Start 66; Stop 90
tggcctgacaatttaacaggagaaa

SEQ ID NO: 384029 - DNA, 25 bp, Artificial
  probe
  misc_feature (1)..(25): SEQ ID NO: 4496; WAN0249FB; Start 65; Stop 89
ctggcctgacaatttaacaggagaa

SEQ ID NO: 384030 - DNA, 25 bp, Artificial
  probe
  misc_feature (1)..(25): SEQ ID NO: 4496; WAN0249FB; Start 63; Stop 87
ttctggcctgacaatttaacaggag

SEQ ID NO: 384031 - DNA, 25 bp, Artificial
  probe
  misc_feature (1)..(25): SEQ ID NO: 4496; WAN0249FB; Start 62; Stop 86
gttctggcctgacaatttaacagga

SEQ ID NO: 384032 - DNA, 25 bp, Artificial
  probe
  misc_feature (1)..(25): SEQ ID NO: 4496; WAN0249FB; Start 69; Stop 93
cctgacaatttaacaggagaaaata

SEQ ID NO: 384033 - DNA, 25 bp, Artificial
  probe
  misc_feature (1)..(25): SEQ ID NO: 4496; WAN0249FB; Start 64; Stop 88
tctggcctgacaatttaacaggaga

SEQ ID NO: 384034 - DNA, 25 bp, Artificial
  probe
  misc_feature (1)..(25): SEQ ID NO: 4496; WAN0249FB; Start 67; Stop 91
ggcctgacaatttaacaggagaaaa

SEQ ID NO: 384035 - DNA, 25 bp, Artificial
  probe
  misc_feature (1)..(25): SEQ ID NO: 4496; WAN0249FB; Start 61; Stop 85
cgttctggcctgacaatttaacagg

SEQ ID NO: 384036 - DNA, 25 bp, Artificial
  probe
  misc_feature (1)..(25): SEQ ID NO: 4497; WAN024A8J; Start 33; Stop 57
tttaggctgtttagagaggagaact

SEQ ID NO: 384037 - DNA, 25 bp, Artificial
  probe
  misc_feature (1)..(25): SEQ ID NO: 4497; WAN024A8J; Start 34; Stop 58
ttaggctgtttagagaggagaactg

SEQ ID NO: 384038 - DNA, 25 bp, Artificial
  probe
  misc_feature (1)..(25): SEQ ID NO: 4497; WAN024A8J; Start 35; Stop 59
taggctgtttagagaggagaactga

SEQ ID NO: 384039 - DNA, 25 bp, Artificial
  probe
  misc_feature (1)..(25): SEQ ID NO: 4497; WAN024A8J; Start 32; Stop 56
ttttaggctgtttagagaggagaac

SEQ ID NO: 384040 - DNA, 25 bp, Artificial
  probe
  misc_feature (1)..(25): SEQ ID NO: 4497; WAN024A8J; Start 1; Stop 25
tagataaaatcgtatgatgacttca

SEQ ID NO: 384041 - DNA, 25 bp, Artificial
  probe
  misc_feature (1)..(25): SEQ ID NO: 4497; WAN024A8J; Start 2; Stop 26
agataaaatcgtatgatgacttcat

SEQ ID NO: 384042 - DNA, 25 bp, Artificial
  probe
  misc_feature (1)..(25): SEQ ID NO: 4499; WAN024APY; Start 2; Stop 26
agatcatcctccttttcttaaaact

SEQ ID NO: 384043 - DNA, 25 bp, Artificial
  probe
  misc_feature (1)..(25): SEQ ID NO: 4499; WAN024APY; Start 4; Stop 28
atcatcctccttttcttaaaactag

SEQ ID NO: 384044 - DNA, 25 bp, Artificial
  probe
  misc_feature (1)..(25): SEQ ID NO: 4499; WAN024APY; Start 3; Stop 27
gatcatcctccttttcttaaaacta

SEQ ID NO: 384045 - DNA, 25 bp, Artificial
  probe
  misc_feature (1)..(25): SEQ ID NO: 4499; WAN024APY; Start 1; Stop 25
tagatcatcctccttttcttaaaac

SEQ ID NO: 384046 - DNA, 25 bp, Artificial
  probe
  misc_feature (1)..(25): SEQ ID NO: 4499; WAN024APY; Start 5; Stop 29
tcatcctccttttcttaaaactagt

SEQ ID NO: 384047 - DNA, 25 bp, Artificial
  probe
  misc_feature (1)..(25): SEQ ID NO: 4499; WAN024APY; Start 6; Stop 30
catcctccttttcttaaaactagta

SEQ ID NO: 384048 - DNA, 25 bp, Artificial
  probe
  misc_feature (1)..(25): SEQ ID NO: 4499; WAN024APY; Start 7; Stop 31
atcctccttttcttaaaactagtat

SEQ ID NO: 384049 - DNA, 25 bp, Artificial
  probe
  misc_feature (1)..(25): SEQ ID NO: 4500; WAN024FEG; Start 200; Stop 224
tgatagtgataatgcggatgttagc

SEQ ID NO: 384050 - DNA, 25 bp, Artificial
  probe
  misc_feature (1)..(25): SEQ ID NO: 4500; WAN024FEG; Start 205; Stop 229
gtgataatgcggatgttagcgatat

SEQ ID NO: 384051 - DNA, 25 bp, Artificial
  probe
  misc_feature (1)..(25): SEQ ID NO: 4500; WAN024FEG; Start 199; Stop 223
atgatagtgataatgcggatgttag

SEQ ID NO: 384052 - DNA, 25 bp, Artificial
  probe
  misc_feature (1)..(25): SEQ ID NO: 4500; WAN024FEG; Start 197; Stop 221
ctatgatagtgataatgcggatgtt

SEQ ID NO: 384053 - DNA, 25 bp, Artificial
  probe
  misc_feature (1)..(25): SEQ ID NO: 4500; WAN024FEG; Start 201; Stop 225
gatagtgataatgcggatgttagcg

SEQ ID NO: 384054 - DNA, 25 bp, Artificial
  probe
  misc_feature (1)..(25): SEQ ID NO: 4500; WAN024FEG; Start 204; Stop 228
agtgataatgcggatgttagcgata

SEQ ID NO: 384055 - DNA, 25 bp, Artificial
  probe
  misc_feature (1)..(25): SEQ ID NO: 4500; WAN024FEG; Start 203; Stop 227
tagtgataatgcggatgttagcgat

SEQ ID NO: 384056 - DNA, 25 bp, Artificial
  probe
  misc_feature (1)..(25): SEQ ID NO: 4500; WAN024FEG; Start 202; Stop 226
atagtgataatgcggatgttagcga

SEQ ID NO: 384057 - DNA, 25 bp, Artificial
  probe
  misc_feature (1)..(25): SEQ ID NO: 4500; WAN024FEG; Start 198; Stop 222
tatgatagtgataatgcggatgtta

SEQ ID NO: 384058 - DNA, 25 bp, Artificial
  probe
  misc_feature (1)..(25): SEQ ID NO: 4500; WAN024FEG; Start 114; Stop 138
ggcagagattatatcgagtcaggaa

SEQ ID NO: 384059 - DNA, 25 bp, Artificial
  probe
  misc_feature (1)..(25): SEQ ID NO: 4500; WAN024FEG; Start 196; Stop 220
actatgatagtgataatgcggatgt

SEQ ID NO: 384060 - DNA, 25 bp, Artificial
  probe
  misc_feature (1)..(25): SEQ ID NO: 4500; WAN024FEG; Start 195; Stop 219
aactatgatagtgataatgcggatg

SEQ ID NO: 384061 - DNA, 25 bp, Artificial
  probe
  misc_feature (1)..(25): SEQ ID NO: 4500; WAN024FEG; Start 206; Stop 230
tgataatgcggatgttagcgatatc

SEQ ID NO: 384062 - DNA, 25 bp, Artificial
  probe
  misc_feature (1)..(25): SEQ ID NO: 4500; WAN024FEG; Start 2; Stop 26
agatgatggatatagtggttctaat

SEQ ID NO: 384063 - DNA, 25 bp, Artificial
  probe
  misc_feature (1)..(25): SEQ ID NO: 4500; WAN024FEG; Start 96; Stop 120
aaagatttatctcgtttcggcagag

SEQ ID NO: 384064 - DNA, 25 bp, Artificial
  probe
  misc_feature (1)..(25): SEQ ID NO: 4500; WAN024FEG; Start 115; Stop 139
gcagagattatatcgagtcaggaaa

SEQ ID NO: 384065 - DNA, 25 bp, Artificial
  probe
  misc_feature (1)..(25): SEQ ID NO: 4500; WAN024FEG; Start 56; Stop 80
tgatgacctgaataaaggaaagttt

SEQ ID NO: 384066 - DNA, 25 bp, Artificial
  probe
  misc_feature (1)..(25): SEQ ID NO: 4500; WAN024FEG; Start 55; Stop 79
ttgatgacctgaataaaggaaagtt

SEQ ID NO: 384067 - DNA, 25 bp, Artificial
  probe
  misc_feature (1)..(25): SEQ ID NO: 4500; WAN024FEG; Start 54; Stop 78
attgatgacctgaataaaggaaagt

SEQ ID NO: 384068 - DNA, 25 bp, Artificial
  probe
  misc_feature (1)..(25): SEQ ID NO: 4500; WAN024FEG; Start 52; Stop 76
tgattgatgacctgaataaaggaaa

SEQ ID NO: 384069 - DNA, 25 bp, Artificial
  probe
  misc_feature (1)..(25): SEQ ID NO: 4500; WAN024FEG; Start 51; Stop 75
atgattgatgacctgaataaaggaa

SEQ ID NO: 384070 - DNA, 25 bp, Artificial
  probe
  misc_feature (1)..(25): SEQ ID NO: 4500; WAN024FEG; Start 117; Stop 141
agagattatatcgagtcaggaaagt

SEQ ID NO: 384071 - DNA, 25 bp, Artificial
  probe
  misc_feature (1)..(25): SEQ ID NO: 4500; WAN024FEG; Start 43; Stop 67
ttaagaatatgattgatgacctgaa

SEQ ID NO: 384072 - DNA, 25 bp, Artificial
  probe
  misc_feature (1)..(25): SEQ ID NO: 4500; WAN024FEG; Start 194; Stop 218
taactatgatagtgataatgcggat

SEQ ID NO: 384073 - DNA, 25 bp, Artificial
  probe
  misc_feature (1)..(25): SEQ ID NO: 4500; WAN024FEG; Start 193; Stop 217
ataactatgatagtgataatgcgga

SEQ ID NO: 384074 - DNA, 25 bp, Artificial
  probe
  misc_feature (1)..(25): SEQ ID NO: 4500; WAN024FEG; Start 3; Stop 27
gatgatggatatagtggttctaatt

SEQ ID NO: 384075 - DNA, 25 bp, Artificial
  probe
  misc_feature (1)..(25): SEQ ID NO: 4500; WAN024FEG; Start 222; Stop 246
agcgatatccatttaaggtttgttt

SEQ ID NO: 384076 - DNA, 25 bp, Artificial
  probe
  misc_feature (1)..(25): SEQ ID NO: 4500; WAN024FEG; Start 116; Stop 140
cagagattatatcgagtcaggaaag

SEQ ID NO: 384077 - DNA, 25 bp, Artificial
  probe
  misc_feature (1)..(25): SEQ ID NO: 4500; WAN024FEG; Start 53; Stop 77
gattgatgacctgaataaaggaaag

SEQ ID NO: 384078 - DNA, 25 bp, Artificial
  probe
  misc_feature (1)..(25): SEQ ID NO: 4500; WAN024FEG; Start 113; Stop 137
cggcagagattatatcgagtcagga

SEQ ID NO: 384079 - DNA, 25 bp, Artificial
  probe
  misc_feature (1)..(25): SEQ ID NO: 4500; WAN024FEG; Start 111; Stop 135
ttcggcagagattatatcgagtcag

SEQ ID NO: 384080 - DNA, 25 bp, Artificial
  probe
  misc_feature (1)..(25): SEQ ID NO: 4500; WAN024FEG; Start 46; Stop 70
agaatatgattgatgacctgaataa

SEQ ID NO: 384081 - DNA, 25 bp, Artificial
  probe
  misc_feature (1)..(25): SEQ ID NO: 4500; WAN024FEG; Start 45; Stop 69
aagaatatgattgatgacctgaata

SEQ ID NO: 384082 - DNA, 25 bp, Artificial
  probe
  misc_feature (1)..(25): SEQ ID NO: 4501; WAN024ALN; Start 96; Stop 120
ctaatacaagtgagcaggaacctat

SEQ ID NO: 384083 - DNA, 25 bp, Artificial
  probe
  misc_feature (1)..(25): SEQ ID NO: 4501; WAN024ALN; Start 97; Stop 121
taatacaagtgagcaggaacctatt

SEQ ID NO: 384084 - DNA, 25 bp, Artificial
  probe
  misc_feature (1)..(25): SEQ ID NO: 4501; WAN024ALN; Start 95; Stop 119
actaatacaagtgagcaggaaccta

SEQ ID NO: 384085 - DNA, 25 bp, Artificial
  probe
  misc_feature (1)..(25): SEQ ID NO: 4501; WAN024ALN; Start 109; Stop 133
gcaggaacctatttaatcacatcag

SEQ ID NO: 384086 - DNA, 25 bp, Artificial
  probe
  misc_feature (1)..(25): SEQ ID NO: 4501; WAN024ALN; Start 108; Stop 132
agcaggaacctatttaatcacatca

SEQ ID NO: 384087 - DNA, 25 bp, Artificial
  probe
  misc_feature (1)..(25): SEQ ID NO: 4501; WAN024ALN; Start 101; Stop 125
acaagtgagcaggaacctatttaat

SEQ ID NO: 384088 - DNA, 25 bp, Artificial
  probe
  misc_feature (1)..(25): SEQ ID NO: 4501; WAN024ALN; Start 102; Stop 126
caagtgagcaggaacctatttaatc

SEQ ID NO: 384089 - DNA, 25 bp, Artificial
  probe
  misc_feature (1)..(25): SEQ ID NO: 4501; WAN024ALN; Start 100; Stop 124
tacaagtgagcaggaacctatttaa

SEQ ID NO: 384090 - DNA, 25 bp, Artificial
  probe
  misc_feature (1)..(25): SEQ ID NO: 4501; WAN024ALN; Start 107; Stop 131
gagcaggaacctatttaatcacatc

SEQ ID NO: 384091 - DNA, 25 bp, Artificial
  probe
  misc_feature (1)..(25): SEQ ID NO: 4501; WAN024ALN; Start 99; Stop 123
atacaagtgagcaggaacctattta

SEQ ID NO: 384092 - DNA, 25 bp, Artificial
  probe
  misc_feature (1)..(25): SEQ ID NO: 4501; WAN024ALN; Start 98; Stop 122
aatacaagtgagcaggaacctattt

SEQ ID NO: 384093 - DNA, 25 bp, Artificial
  probe
  misc_feature (1)..(25): SEQ ID NO: 4501; WAN024ALN; Start 106; Stop 130
tgagcaggaacctatttaatcacat

SEQ ID NO: 384094 - DNA, 25 bp, Artificial
  probe
  misc_feature (1)..(25): SEQ ID NO: 4501; WAN024ALN; Start 103; Stop 127
aagtgagcaggaacctatttaatca

SEQ ID NO: 384095 - DNA, 25 bp, Artificial
  probe
  misc_feature (1)..(25): SEQ ID NO: 4501; WAN024ALN; Start 110; Stop 134
caggaacctatttaatcacatcaga

SEQ ID NO: 384096 - DNA, 25 bp, Artificial
  probe
  misc_feature (1)..(25): SEQ ID NO: 4501; WAN024ALN; Start 111; Stop 135
aggaacctatttaatcacatcagaa

SEQ ID NO: 384097 - DNA, 25 bp, Artificial
  probe
  misc_feature (1)..(25): SEQ ID NO: 4501; WAN024ALN; Start 112; Stop 136
ggaacctatttaatcacatcagaag

SEQ ID NO: 384098 - DNA, 25 bp, Artificial
  probe
  misc_feature (1)..(25): SEQ ID NO: 4501; WAN024ALN; Start 116; Stop 140
cctatttaatcacatcagaagaagt

SEQ ID NO: 384099 - DNA, 25 bp, Artificial
  probe
  misc_feature (1)..(25): SEQ ID NO: 4501; WAN024ALN; Start 115; Stop 139
acctatttaatcacatcagaagaag

SEQ ID NO: 384100 - DNA, 25 bp, Artificial
  probe
  misc_feature (1)..(25): SEQ ID NO: 4501; WAN024ALN; Start 113; Stop 137
gaacctatttaatcacatcagaaga

SEQ ID NO: 384101 - DNA, 25 bp, Artificial
  probe
  misc_feature (1)..(25): SEQ ID NO: 4501; WAN024ALN; Start 114; Stop 138
aacctatttaatcacatcagaagaa

SEQ ID NO: 384102 - DNA, 25 bp, Artificial
  probe
  misc_feature (1)..(25): SEQ ID NO: 4501; WAN024ALN; Start 123; Stop 147
aatcacatcagaagaagtttcttga

SEQ ID NO: 384103 - DNA, 25 bp, Artificial
  probe
  misc_feature (1)..(25): SEQ ID NO: 4501; WAN024ALN; Start 124; Stop 148
atcacatcagaagaagtttcttgat

SEQ ID NO: 384104 - DNA, 25 bp, Artificial
  probe
  misc_feature (1)..(25): SEQ ID NO: 4501; WAN024ALN; Start 119; Stop 143
atttaatcacatcagaagaagtttc

SEQ ID NO: 384105 - DNA, 25 bp, Artificial
  probe
  misc_feature (1)..(25): SEQ ID NO: 4501; WAN024ALN; Start 94; Stop 118
cactaatacaagtgagcaggaacct

SEQ ID NO: 384106 - DNA, 25 bp, Artificial
  probe
  misc_feature (1)..(25): SEQ ID NO: 4501; WAN024ALN; Start 82; Stop 106
aaaggatgttatcactaatacaagt

SEQ ID NO: 384107 - DNA, 25 bp, Artificial
  probe
  misc_feature (1)..(25): SEQ ID NO: 4501; WAN024ALN; Start 122; Stop 146
taatcacatcagaagaagtttcttg

SEQ ID NO: 384108 - DNA, 25 bp, Artificial
  probe
  misc_feature (1)..(25): SEQ ID NO: 4501; WAN024ALN; Start 120; Stop 144
tttaatcacatcagaagaagtttct

SEQ ID NO: 384109 - DNA, 25 bp, Artificial
  probe
  misc_feature (1)..(25): SEQ ID NO: 4501; WAN024ALN; Start 104; Stop 128
agtgagcaggaacctatttaatcac

SEQ ID NO: 384110 - DNA, 25 bp, Artificial
  probe
  misc_feature (1)..(25): SEQ ID NO: 4501; WAN024ALN; Start 105; Stop 129
gtgagcaggaacctatttaatcaca

SEQ ID NO: 384111 - DNA, 25 bp, Artificial
  probe
  misc_feature (1)..(25): SEQ ID NO: 4501; WAN024ALN; Start 117; Stop 141
ctatttaatcacatcagaagaagtt

SEQ ID NO: 384112 - DNA, 25 bp, Artificial
  probe
  misc_feature (1)..(25): SEQ ID NO: 4501; WAN024ALN; Start 121; Stop 145
ttaatcacatcagaagaagtttctt

SEQ ID NO: 384113 - DNA, 25 bp, Artificial
  probe
  misc_feature (1)..(25): SEQ ID NO: 4501; WAN024ALN; Start 83; Stop 107
aaggatgttatcactaatacaagtg

SEQ ID NO: 384114 - DNA, 25 bp, Artificial
  probe
  misc_feature (1)..(25): SEQ ID NO: 4501; WAN024ALN; Start 44; Stop 68
attatttaagcttcatgtcaccatt

SEQ ID NO: 384115 - DNA, 25 bp, Artificial
  probe
  misc_feature (1)..(25): SEQ ID NO: 4502; WAN024A2Z; Start 124; Stop 148
tgtattatgttgataacggaagtga

SEQ ID NO: 384116 - DNA, 25 bp, Artificial
  probe
  misc_feature (1)..(25): SEQ ID NO: 4502; WAN024A2Z; Start 123; Stop 147
atgtattatgttgataacggaagtg

SEQ ID NO: 384117 - DNA, 25 bp, Artificial
  probe
  misc_feature (1)..(25): SEQ ID NO: 4502; WAN024A2Z; Start 125; Stop 149
gtattatgttgataacggaagtgaa

SEQ ID NO: 384118 - DNA, 25 bp, Artificial
  probe
  misc_feature (1)..(25): SEQ ID NO: 4502; WAN024A2Z; Start 5; Stop 29
ttgaccttgattcgttacaattatt

SEQ ID NO: 384119 - DNA, 25 bp, Artificial
  probe
  misc_feature (1)..(25): SEQ ID NO: 4502; WAN024A2Z; Start 2; Stop 26
agattgaccttgattcgttacaatt

SEQ ID NO: 384120 - DNA, 25 bp, Artificial
  probe
  misc_feature (1)..(25): SEQ ID NO: 4502; WAN024A2Z; Start 1; Stop 25
tagattgaccttgattcgttacaat

SEQ ID NO: 384121 - DNA, 25 bp, Artificial
  probe
  misc_feature (1)..(25): SEQ ID NO: 4502; WAN024A2Z; Start 122; Stop 146
aatgtattatgttgataacggaagt

SEQ ID NO: 384122 - DNA, 25 bp, Artificial
  probe
  misc_feature (1)..(25): SEQ ID NO: 4502; WAN024A2Z; Start 3; Stop 27
gattgaccttgattcgttacaatta

SEQ ID NO: 384123 - DNA, 25 bp, Artificial
  probe
  misc_feature (1)..(25): SEQ ID NO: 4502; WAN024A2Z; Start 138; Stop 162
aacggaagtgaaatttattgcttgt

SEQ ID NO: 384124 - DNA, 25 bp, Artificial
  probe
  misc_feature (1)..(25): SEQ ID NO: 4502; WAN024A2Z; Start 156; Stop 180
tgcttgtcataattccatatagatt

SEQ ID NO: 384125 - DNA, 25 bp, Artificial
  probe
  misc_feature (1)..(25): SEQ ID NO: 4502; WAN024A2Z; Start 155; Stop 179
ttgcttgtcataattccatatagat

SEQ ID NO: 384126 - DNA, 25 bp, Artificial
  probe
  misc_feature (1)..(25): SEQ ID NO: 4502; WAN024A2Z; Start 154; Stop 178
attgcttgtcataattccatataga

SEQ ID NO: 384127 - DNA, 25 bp, Artificial
  probe
  misc_feature (1)..(25): SEQ ID NO: 4502; WAN024A2Z; Start 139; Stop 163
acggaagtgaaatttattgcttgtc

SEQ ID NO: 384128 - DNA, 25 bp, Artificial
  probe
  misc_feature (1)..(25): SEQ ID NO: 4502; WAN024A2Z; Start 128; Stop 152
ttatgttgataacggaagtgaaatt

SEQ ID NO: 384129 - DNA, 25 bp, Artificial
  probe
  misc_feature (1)..(25): SEQ ID NO: 4502; WAN024A2Z; Start 140; Stop 164
cggaagtgaaatttattgcttgtca

SEQ ID NO: 384130 - DNA, 25 bp, Artificial
  probe
  misc_feature (1)..(25): SEQ ID NO: 4502; WAN024A2Z; Start 6; Stop 30
tgaccttgattcgttacaattattt

SEQ ID NO: 384131 - DNA, 25 bp, Artificial
  probe
  misc_feature (1)..(25): SEQ ID NO: 4502; WAN024A2Z; Start 137; Stop 161
taacggaagtgaaatttattgcttg

SEQ ID NO: 384132 - DNA, 25 bp, Artificial
  probe
  misc_feature (1)..(25): SEQ ID NO: 4502; WAN024A2Z; Start 4; Stop 28
attgaccttgattcgttacaattat

SEQ ID NO: 384133 - DNA, 25 bp, Artificial
  probe
  misc_feature (1)..(25): SEQ ID NO: 4502; WAN024A2Z; Start 127; Stop 151
attatgttgataacggaagtgaaat

SEQ ID NO: 384134 - DNA, 25 bp, Artificial
  probe
  misc_feature (1)..(25): SEQ ID NO: 4502; WAN024A2Z; Start 8; Stop 32
accttgattcgttacaattatttca

SEQ ID NO: 384135 - DNA, 25 bp, Artificial
  probe
  misc_feature (1)..(25): SEQ ID NO: 4502; WAN024A2Z; Start 60; Stop 84
aaagacggaaacgagaaagttaggg

SEQ ID NO: 384136 - DNA, 25 bp, Artificial
  probe
  misc_feature (1)..(25): SEQ ID NO: 4502; WAN024A2Z; Start 134; Stop 158
tgataacggaagtgaaatttattgc

SEQ ID NO: 384137 - DNA, 25 bp, Artificial
  probe
  misc_feature (1)..(25): SEQ ID NO: 4502; WAN024A2Z; Start 141; Stop 165
ggaagtgaaatttattgcttgtcat

SEQ ID NO: 384138 - DNA, 25 bp, Artificial
  probe
  misc_feature (1)..(25): SEQ ID NO: 4502; WAN024A2Z; Start 55; Stop 79
tagtaaaagacggaaacgagaaagt

SEQ ID NO: 384139 - DNA, 25 bp, Artificial
  probe
  misc_feature (1)..(25): SEQ ID NO: 4502; WAN024A2Z; Start 54; Stop 78
ttagtaaaagacggaaacgagaaag

SEQ ID NO: 384140 - DNA, 25 bp, Artificial
  probe
  misc_feature (1)..(25): SEQ ID NO: 4502; WAN024A2Z; Start 135; Stop 159
gataacggaagtgaaatttattgct

SEQ ID NO: 384141 - DNA, 25 bp, Artificial
  probe
  misc_feature (1)..(25): SEQ ID NO: 4502; WAN024A2Z; Start 7; Stop 31
gaccttgattcgttacaattatttc

SEQ ID NO: 384142 - DNA, 25 bp, Artificial
  probe
  misc_feature (1)..(25): SEQ ID NO: 4502; WAN024A2Z; Start 57; Stop 81
gtaaaagacggaaacgagaaagtta

SEQ ID NO: 384143 - DNA, 25 bp, Artificial
  probe
  misc_feature (1)..(25): SEQ ID NO: 4502; WAN024A2Z; Start 53; Stop 77
attagtaaaagacggaaacgagaaa

SEQ ID NO: 384144 - DNA, 25 bp, Artificial
  probe
  misc_feature (1)..(25): SEQ ID NO: 4502; WAN024A2Z; Start 58; Stop 82
taaaagacggaaacgagaaagttag

SEQ ID NO: 384145 - DNA, 25 bp, Artificial
  probe
  misc_feature (1)..(25): SEQ ID NO: 4502; WAN024A2Z; Start 126; Stop 150
tattatgttgataacggaagtgaaa

SEQ ID NO: 384146 - DNA, 25 bp, Artificial
  probe
  misc_feature (1)..(25): SEQ ID NO: 4502; WAN024A2Z; Start 136; Stop 160
ataacggaagtgaaatttattgctt

SEQ ID NO: 384147 - DNA, 25 bp, Artificial
  probe
  misc_feature (1)..(25): SEQ ID NO: 4502; WAN024A2Z; Start 56; Stop 80
agtaaaagacggaaacgagaaagtt

SEQ ID NO: 384148 - DNA, 25 bp, Artificial
  probe
  misc_feature (1)..(25): SEQ ID NO: 4503; WAN024A9O; Start 75; Stop 99
ttagttgaacagccgtattccgata

SEQ ID NO: 384149 - DNA, 25 bp, Artificial
  probe
  misc_feature (1)..(25): SEQ ID NO: 4503; WAN024A9O; Start 2; Stop 26
agattgtctgataggacggtatgta

SEQ ID NO: 384150 - DNA, 25 bp, Artificial
  probe
  misc_feature (1)..(25): SEQ ID NO: 4503; WAN024A9O; Start 1; Stop 25
tagattgtctgataggacggtatgt

SEQ ID NO: 384151 - DNA, 25 bp, Artificial
  probe
  misc_feature (1)..(25): SEQ ID NO: 4503; WAN024A9O; Start 3; Stop 27
gattgtctgataggacggtatgtat

SEQ ID NO: 384152 - DNA, 25 bp, Artificial
  probe
  misc_feature (1)..(25): SEQ ID NO: 4503; WAN024A9O; Start 84; Stop 108
cagccgtattccgatacttagataa

SEQ ID NO: 384153 - DNA, 25 bp, Artificial
  probe
  misc_feature (1)..(25): SEQ ID NO: 4503; WAN024A9O; Start 86; Stop 110
gccgtattccgatacttagataaga

SEQ ID NO: 384154 - DNA, 25 bp, Artificial
  probe
  misc_feature (1)..(25): SEQ ID NO: 4503; WAN024A9O; Start 85; Stop 109
agccgtattccgatacttagataag

SEQ ID NO: 384155 - DNA, 25 bp, Artificial
  probe
  misc_feature (1)..(25): SEQ ID NO: 4503; WAN024A9O; Start 83; Stop 107
acagccgtattccgatacttagata

SEQ ID NO: 384156 - DNA, 25 bp, Artificial
  probe
  misc_feature (1)..(25): SEQ ID NO: 4503; WAN024A9O; Start 5; Stop 29
ttgtctgataggacggtatgtataa

SEQ ID NO: 384157 - DNA, 25 bp, Artificial
  probe
  misc_feature (1)..(25): SEQ ID NO: 4503; WAN024A9O; Start 4; Stop 28
attgtctgataggacggtatgtata

SEQ ID NO: 384158 - DNA, 25 bp, Artificial
  probe
  misc_feature (1)..(25): SEQ ID NO: 4503; WAN024A9O; Start 82; Stop 106
aacagccgtattccgatacttagat

SEQ ID NO: 384159 - DNA, 25 bp, Artificial
  probe
  misc_feature (1)..(25): SEQ ID NO: 4503; WAN024A9O; Start 79; Stop 103
ttgaacagccgtattccgatactta

SEQ ID NO: 384160 - DNA, 25 bp, Artificial
  probe
  misc_feature (1)..(25): SEQ ID NO: 4503; WAN024A9O; Start 87; Stop 111
ccgtattccgatacttagataagag

SEQ ID NO: 384161 - DNA, 25 bp, Artificial
  probe
  misc_feature (1)..(25): SEQ ID NO: 4503; WAN024A9O; Start 81; Stop 105
gaacagccgtattccgatacttaga

SEQ ID NO: 384162 - DNA, 25 bp, Artificial
  probe
  misc_feature (1)..(25): SEQ ID NO: 4503; WAN024A9O; Start 80; Stop 104
tgaacagccgtattccgatacttag

SEQ ID NO: 384163 - DNA, 25 bp, Artificial
  probe
  misc_feature (1)..(25): SEQ ID NO: 4503; WAN024A9O; Start 76; Stop 100
tagttgaacagccgtattccgatac

SEQ ID NO: 384164 - DNA, 25 bp, Artificial
  probe
  misc_feature (1)..(25): SEQ ID NO: 4503; WAN024A9O; Start 88; Stop 112
cgtattccgatacttagataagaga

SEQ ID NO: 384165 - DNA, 25 bp, Artificial
  probe
  misc_feature (1)..(25): SEQ ID NO: 4503; WAN024A9O; Start 72; Stop 96
aatttagttgaacagccgtattccg

SEQ ID NO: 384166 - DNA, 25 bp, Artificial
  probe
  misc_feature (1)..(25): SEQ ID NO: 4503; WAN024A9O; Start 6; Stop 30
tgtctgataggacggtatgtataaa

SEQ ID NO: 384167 - DNA, 25 bp, Artificial
  probe
  misc_feature (1)..(25): SEQ ID NO: 4503; WAN024A9O; Start 78; Stop 102
gttgaacagccgtattccgatactt

SEQ ID NO: 384168 - DNA, 25 bp, Artificial
  probe
  misc_feature (1)..(25): SEQ ID NO: 4503; WAN024A9O; Start 74; Stop 98
tttagttgaacagccgtattccgat

SEQ ID NO: 384169 - DNA, 25 bp, Artificial
  probe
  misc_feature (1)..(25): SEQ ID NO: 4503; WAN024A9O; Start 73; Stop 97
atttagttgaacagccgtattccga

SEQ ID NO: 384170 - DNA, 25 bp, Artificial
  probe
  misc_feature (1)..(25): SEQ ID NO: 4503; WAN024A9O; Start 71; Stop 95
aaatttagttgaacagccgtattcc

SEQ ID NO: 384171 - DNA, 25 bp, Artificial
  probe
  misc_feature (1)..(25): SEQ ID NO: 4503; WAN024A9O; Start 12; Stop 36
ataggacggtatgtataaaacgctt

SEQ ID NO: 384172 - DNA, 25 bp, Artificial
  probe
  misc_feature (1)..(25): SEQ ID NO: 4503; WAN024A9O; Start 11; Stop 35
gataggacggtatgtataaaacgct

SEQ ID NO: 384173 - DNA, 25 bp, Artificial
  probe
  misc_feature (1)..(25): SEQ ID NO: 4503; WAN024A9O; Start 13; Stop 37
taggacggtatgtataaaacgcttc

SEQ ID NO: 384174 - DNA, 25 bp, Artificial
  probe
  misc_feature (1)..(25): SEQ ID NO: 4503; WAN024A9O; Start 10; Stop 34
tgataggacggtatgtataaaacgc

SEQ ID NO: 384175 - DNA, 25 bp, Artificial
  probe
  misc_feature (1)..(25): SEQ ID NO: 4503; WAN024A9O; Start 77; Stop 101
agttgaacagccgtattccgatact

SEQ ID NO: 384176 - DNA, 25 bp, Artificial
  probe
  misc_feature (1)..(25): SEQ ID NO: 4503; WAN024A9O; Start 22; Stop 46
atgtataaaacgcttctgtgaactg

SEQ ID NO: 384177 - DNA, 25 bp, Artificial
  probe
  misc_feature (1)..(25): SEQ ID NO: 4503; WAN024A9O; Start 24; Stop 48
gtataaaacgcttctgtgaactgag

SEQ ID NO: 384178 - DNA, 25 bp, Artificial
  probe
  misc_feature (1)..(25): SEQ ID NO: 4503; WAN024A9O; Start 9; Stop 33
ctgataggacggtatgtataaaacg

SEQ ID NO: 384179 - DNA, 25 bp, Artificial
  probe
  misc_feature (1)..(25): SEQ ID NO: 4503; WAN024A9O; Start 19; Stop 43
ggtatgtataaaacgcttctgtgaa

SEQ ID NO: 384180 - DNA, 25 bp, Artificial
  probe
  misc_feature (1)..(25): SEQ ID NO: 4503; WAN024A9O; Start 25; Stop 49
tataaaacgcttctgtgaactgaga

SEQ ID NO: 384181 - DNA, 25 bp, Artificial
  probe
  misc_feature (1)..(25): SEQ ID NO: 4504; WAN024A58; Start 26; Stop 50
agattctgaaaagtttggcaagtat

SEQ ID NO: 384182 - DNA, 25 bp, Artificial
  probe
  misc_feature (1)..(25): SEQ ID NO: 4504; WAN024A58; Start 27; Stop 51
gattctgaaaagtttggcaagtatt

SEQ ID NO: 384183 - DNA, 25 bp, Artificial
  probe
  misc_feature (1)..(25): SEQ ID NO: 4504; WAN024A58; Start 28; Stop 52
attctgaaaagtttggcaagtattt

SEQ ID NO: 384184 - DNA, 25 bp, Artificial
  probe
  misc_feature (1)..(25): SEQ ID NO: 4504; WAN024A58; Start 25; Stop 49
cagattctgaaaagtttggcaagta

SEQ ID NO: 384185 - DNA, 25 bp, Artificial
  probe
  misc_feature (1)..(25): SEQ ID NO: 4504; WAN024A58; Start 29; Stop 53
ttctgaaaagtttggcaagtatttt

SEQ ID NO: 384186 - DNA, 25 bp, Artificial
  probe
  misc_feature (1)..(25): SEQ ID NO: 4504; WAN024A58; Start 30; Stop 54
tctgaaaagtttggcaagtatttta

SEQ ID NO: 384187 - DNA, 25 bp, Artificial
  probe
  misc_feature (1)..(25): SEQ ID NO: 4504; WAN024A58; Start 23; Stop 47
atcagattctgaaaagtttggcaag

SEQ ID NO: 384188 - DNA, 25 bp, Artificial
  probe
  misc_feature (1)..(25): SEQ ID NO: 4504; WAN024A58; Start 21; Stop 45
ctatcagattctgaaaagtttggca

SEQ ID NO: 384189 - DNA, 25 bp, Artificial
  probe
  misc_feature (1)..(25): SEQ ID NO: 4504; WAN024A58; Start 20; Stop 44
tctatcagattctgaaaagtttggc

SEQ ID NO: 384190 - DNA, 25 bp, Artificial
  probe
  misc_feature (1)..(25): SEQ ID NO: 4504; WAN024A58; Start 22; Stop 46
tatcagattctgaaaagtttggcaa

SEQ ID NO: 384191 - DNA, 25 bp, Artificial
  probe
  misc_feature (1)..(25): SEQ ID NO: 4504; WAN024A58; Start 24; Stop 48
tcagattctgaaaagtttggcaagt

SEQ ID NO: 384192 - DNA, 25 bp, Artificial
  probe
  misc_feature (1)..(25): SEQ ID NO: 4504; WAN024A58; Start 19; Stop 43
gtctatcagattctgaaaagtttgg

SEQ ID NO: 384193 - DNA, 25 bp, Artificial
  probe
  misc_feature (1)..(25): SEQ ID NO: 4504; WAN024A58; Start 18; Stop 42
agtctatcagattctgaaaagtttg

SEQ ID NO: 384194 - DNA, 25 bp, Artificial
  probe
  misc_feature (1)..(25): SEQ ID NO: 4504; WAN024A58; Start 15; Stop 39
actagtctatcagattctgaaaagt

SEQ ID NO: 384195 - DNA, 25 bp, Artificial
  probe
  misc_feature (1)..(25): SEQ ID NO: 4504; WAN024A58; Start 16; Stop 40
ctagtctatcagattctgaaaagtt

SEQ ID NO: 384196 - DNA, 25 bp, Artificial
  probe
  misc_feature (1)..(25): SEQ ID NO: 4504; WAN024A58; Start 17; Stop 41
tagtctatcagattctgaaaagttt

SEQ ID NO: 384197 - DNA, 25 bp, Artificial
  probe
  misc_feature (1)..(25): SEQ ID NO: 4504; WAN024A58; Start 14; Stop 38
tactagtctatcagattctgaaaag

SEQ ID NO: 384198 - DNA, 25 bp, Artificial
  probe
  misc_feature (1)..(25): SEQ ID NO: 4505; WAN0249ZE; Start 146; Stop 170
tccagaaatcagttgctaaataggg

SEQ ID NO: 384199 - DNA, 25 bp, Artificial
  probe
  misc_feature (1)..(25): SEQ ID NO: 4505; WAN0249ZE; Start 147; Stop 171
ccagaaatcagttgctaaatagggt

SEQ ID NO: 384200 - DNA, 25 bp, Artificial
  probe
  misc_feature (1)..(25): SEQ ID NO: 4505; WAN0249ZE; Start 145; Stop 169
ttccagaaatcagttgctaaatagg

SEQ ID NO: 384201 - DNA, 25 bp, Artificial
  probe
  misc_feature (1)..(25): SEQ ID NO: 4505; WAN0249ZE; Start 102; Stop 126
ctgttgaactgggaaactatgaatc

SEQ ID NO: 384202 - DNA, 25 bp, Artificial
  probe
  misc_feature (1)..(25): SEQ ID NO: 4505; WAN0249ZE; Start 101; Stop 125
tctgttgaactgggaaactatgaat

SEQ ID NO: 384203 - DNA, 25 bp, Artificial
  probe
  misc_feature (1)..(25): SEQ ID NO: 4505; WAN0249ZE; Start 148; Stop 172
cagaaatcagttgctaaatagggta

SEQ ID NO: 384204 - DNA, 25 bp, Artificial
  probe
  misc_feature (1)..(25): SEQ ID NO: 4505; WAN0249ZE; Start 100; Stop 124
gtctgttgaactgggaaactatgaa

SEQ ID NO: 384205 - DNA, 25 bp, Artificial
  probe
  misc_feature (1)..(25): SEQ ID NO: 4505; WAN0249ZE; Start 98; Stop 122
aagtctgttgaactgggaaactatg

SEQ ID NO: 384206 - DNA, 25 bp, Artificial
  probe
  misc_feature (1)..(25): SEQ ID NO: 4505; WAN0249ZE; Start 97; Stop 121
caagtctgttgaactgggaaactat

SEQ ID NO: 384207 - DNA, 25 bp, Artificial
  probe
  misc_feature (1)..(25): SEQ ID NO: 4505; WAN0249ZE; Start 149; Stop 173
agaaatcagttgctaaatagggtaa

SEQ ID NO: 384208 - DNA, 25 bp, Artificial
  probe
  misc_feature (1)..(25): SEQ ID NO: 4505; WAN0249ZE; Start 93; Stop 117
cttacaagtctgttgaactgggaaa

SEQ ID NO: 384209 - DNA, 25 bp, Artificial
  probe
  misc_feature (1)..(25): SEQ ID NO: 4505; WAN0249ZE; Start 99; Stop 123
agtctgttgaactgggaaactatga

SEQ ID NO: 384210 - DNA, 25 bp, Artificial
  probe
  misc_feature (1)..(25): SEQ ID NO: 4505; WAN0249ZE; Start 94; Stop 118
ttacaagtctgttgaactgggaaac

SEQ ID NO: 384211 - DNA, 25 bp, Artificial
  probe
  misc_feature (1)..(25): SEQ ID NO: 4505; WAN0249ZE; Start 105; Stop 129
ttgaactgggaaactatgaatccta

SEQ ID NO: 384212 - DNA, 25 bp, Artificial
  probe
  misc_feature (1)..(25): SEQ ID NO: 4505; WAN0249ZE; Start 104; Stop 128
gttgaactgggaaactatgaatcct

SEQ ID NO: 384213 - DNA, 25 bp, Artificial
  probe
  misc_feature (1)..(25): SEQ ID NO: 4505; WAN0249ZE; Start 106; Stop 130
tgaactgggaaactatgaatcctat

SEQ ID NO: 384214 - DNA, 25 bp, Artificial
  probe
  misc_feature (1)..(25): SEQ ID NO: 4505; WAN0249ZE; Start 103; Stop 127
tgttgaactgggaaactatgaatcc

SEQ ID NO: 384215 - DNA, 25 bp, Artificial
  probe
  misc_feature (1)..(25): SEQ ID NO: 4505; WAN0249ZE; Start 150; Stop 174
gaaatcagttgctaaatagggtaaa

SEQ ID NO: 384216 - DNA, 25 bp, Artificial
  probe
  misc_feature (1)..(25): SEQ ID NO: 4505; WAN0249ZE; Start 96; Stop 120
acaagtctgttgaactgggaaacta

SEQ ID NO: 384217 - DNA, 25 bp, Artificial
  probe
  misc_feature (1)..(25): SEQ ID NO: 4505; WAN0249ZE; Start 95; Stop 119
tacaagtctgttgaactgggaaact

SEQ ID NO: 384218 - DNA, 25 bp, Artificial
  probe
  misc_feature (1)..(25): SEQ ID NO: 4505; WAN0249ZE; Start 144; Stop 168
tttccagaaatcagttgctaaatag

SEQ ID NO: 384219 - DNA, 25 bp, Artificial
  probe
  misc_feature (1)..(25): SEQ ID NO: 4505; WAN0249ZE; Start 88; Stop 112
aaacgcttacaagtctgttgaactg

SEQ ID NO: 384220 - DNA, 25 bp, Artificial
  probe
  misc_feature (1)..(25): SEQ ID NO: 4505; WAN0249ZE; Start 89; Stop 113
aacgcttacaagtctgttgaactgg

SEQ ID NO: 384221 - DNA, 25 bp, Artificial
  probe
  misc_feature (1)..(25): SEQ ID NO: 4505; WAN0249ZE; Start 107; Stop 131
gaactgggaaactatgaatcctatt

SEQ ID NO: 384222 - DNA, 25 bp, Artificial
  probe
  misc_feature (1)..(25): SEQ ID NO: 4505; WAN0249ZE; Start 108; Stop 132
aactgggaaactatgaatcctattt

SEQ ID NO: 384223 - DNA, 25 bp, Artificial
  probe
  misc_feature (1)..(25): SEQ ID NO: 4505; WAN0249ZE; Start 7; Stop 31
ttagaatctaggaaccaggaaaagc

SEQ ID NO: 384224 - DNA, 25 bp, Artificial
  probe
  misc_feature (1)..(25): SEQ ID NO: 4505; WAN0249ZE; Start 92; Stop 116
gcttacaagtctgttgaactgggaa

SEQ ID NO: 384225 - DNA, 25 bp, Artificial
  probe
  misc_feature (1)..(25): SEQ ID NO: 4505; WAN0249ZE; Start 6; Stop 30
tttagaatctaggaaccaggaaaag

SEQ ID NO: 384226 - DNA, 25 bp, Artificial
  probe
  misc_feature (1)..(25): SEQ ID NO: 4505; WAN0249ZE; Start 143; Stop 167
atttccagaaatcagttgctaaata

SEQ ID NO: 384227 - DNA, 25 bp, Artificial
  probe
  misc_feature (1)..(25): SEQ ID NO: 4505; WAN0249ZE; Start 142; Stop 166
tatttccagaaatcagttgctaaat

SEQ ID NO: 384228 - DNA, 25 bp, Artificial
  probe
  misc_feature (1)..(25): SEQ ID NO: 4505; WAN0249ZE; Start 141; Stop 165
atatttccagaaatcagttgctaaa

SEQ ID NO: 384229 - DNA, 25 bp, Artificial
  probe
  misc_feature (1)..(25): SEQ ID NO: 4505; WAN0249ZE; Start 140; Stop 164
aatatttccagaaatcagttgctaa

SEQ ID NO: 384230 - DNA, 25 bp, Artificial
  probe
  misc_feature (1)..(25): SEQ ID NO: 4505; WAN0249ZE; Start 87; Stop 111
aaaacgcttacaagtctgttgaact

SEQ ID NO: 384231 - DNA, 25 bp, Artificial
  probe
  misc_feature (1)..(25): SEQ ID NO: 4506; WAN0249UK; Start 323; Stop 347
aagatgtgaacaactctatcaggaa

SEQ ID NO: 384232 - DNA, 25 bp, Artificial
  probe
  misc_feature (1)..(25): SEQ ID NO: 4506; WAN0249UK; Start 322; Stop 346
taagatgtgaacaactctatcagga

SEQ ID NO: 384233 - DNA, 25 bp, Artificial
  probe
  misc_feature (1)..(25): SEQ ID NO: 4506; WAN0249UK; Start 321; Stop 345
ataagatgtgaacaactctatcagg

SEQ ID NO: 384234 - DNA, 25 bp, Artificial
  probe
  misc_feature (1)..(25): SEQ ID NO: 4506; WAN0249UK; Start 264; Stop 288
tttcgtctgatgggcaaatcttata

SEQ ID NO: 384235 - DNA, 25 bp, Artificial
  probe
  misc_feature (1)..(25): SEQ ID NO: 4506; WAN0249UK; Start 257; Stop 281
cattatatttcgtctgatgggcaaa

SEQ ID NO: 384236 - DNA, 25 bp, Artificial
  probe
  misc_feature (1)..(25): SEQ ID NO: 4506; WAN0249UK; Start 167; Stop 191
tgaaacaagaacaggacaaattgat

SEQ ID NO: 384237 - DNA, 25 bp, Artificial
  probe
  misc_feature (1)..(25): SEQ ID NO: 4506; WAN0249UK; Start 166; Stop 190
atgaaacaagaacaggacaaattga

SEQ ID NO: 384238 - DNA, 25 bp, Artificial
  probe
  misc_feature (1)..(25): SEQ ID NO: 4506; WAN0249UK; Start 329; Stop 353
tgaacaactctatcaggaaagtcaa

SEQ ID NO: 384239 - DNA, 25 bp, Artificial
  probe
  misc_feature (1)..(25): SEQ ID NO: 4506; WAN0249UK; Start 328; Stop 352
gtgaacaactctatcaggaaagtca

SEQ ID NO: 384240 - DNA, 25 bp, Artificial
  probe
  misc_feature (1)..(25): SEQ ID NO: 4506; WAN0249UK; Start 326; Stop 350
atgtgaacaactctatcaggaaagt

SEQ ID NO: 384241 - DNA, 25 bp, Artificial
  probe
  misc_feature (1)..(25): SEQ ID NO: 4506; WAN0249UK; Start 324; Stop 348
agatgtgaacaactctatcaggaaa

SEQ ID NO: 384242 - DNA, 25 bp, Artificial
  probe
  misc_feature (1)..(25): SEQ ID NO: 4506; WAN0249UK; Start 327; Stop 351
tgtgaacaactctatcaggaaagtc

SEQ ID NO: 384243 - DNA, 25 bp, Artificial
  probe
  misc_feature (1)..(25): SEQ ID NO: 4506; WAN0249UK; Start 325; Stop 349
gatgtgaacaactctatcaggaaag

SEQ ID NO: 384244 - DNA, 25 bp, Artificial
  probe
  misc_feature (1)..(25): SEQ ID NO: 4506; WAN0249UK; Start 330; Stop 354
gaacaactctatcaggaaagtcaaa

SEQ ID NO: 384245 - DNA, 25 bp, Artificial
  probe
  misc_feature (1)..(25): SEQ ID NO: 4506; WAN0249UK; Start 165; Stop 189
aatgaaacaagaacaggacaaattg

SEQ ID NO: 384246 - DNA, 25 bp, Artificial
  probe
  misc_feature (1)..(25): SEQ ID NO: 4506; WAN0249UK; Start 260; Stop 284
tatatttcgtctgatgggcaaatct

SEQ ID NO: 384247 - DNA, 25 bp, Artificial
  probe
  misc_feature (1)..(25): SEQ ID NO: 4506; WAN0249UK; Start 262; Stop 286
tatttcgtctgatgggcaaatctta

SEQ ID NO: 384248 - DNA, 25 bp, Artificial
  probe
  misc_feature (1)..(25): SEQ ID NO: 4506; WAN0249UK; Start 164; Stop 188
aaatgaaacaagaacaggacaaatt

SEQ ID NO: 384249 - DNA, 25 bp, Artificial
  probe
  misc_feature (1)..(25): SEQ ID NO: 4506; WAN0249UK; Start 259; Stop 283
ttatatttcgtctgatgggcaaatc

SEQ ID NO: 384250 - DNA, 25 bp, Artificial
  probe
  misc_feature (1)..(25): SEQ ID NO: 4506; WAN0249UK; Start 263; Stop 287
atttcgtctgatgggcaaatcttat

SEQ ID NO: 384251 - DNA, 25 bp, Artificial
  probe
  misc_feature (1)..(25): SEQ ID NO: 4506; WAN0249UK; Start 261; Stop 285
atatttcgtctgatgggcaaatctt

SEQ ID NO: 384252 - DNA, 25 bp, Artificial
  probe
  misc_feature (1)..(25): SEQ ID NO: 4506; WAN0249UK; Start 266; Stop 290
tcgtctgatgggcaaatcttataaa

SEQ ID NO: 384253 - DNA, 25 bp, Artificial
  probe
  misc_feature (1)..(25): SEQ ID NO: 4506; WAN0249UK; Start 265; Stop 289
ttcgtctgatgggcaaatcttataa

SEQ ID NO: 384254 - DNA, 25 bp, Artificial
  probe
  misc_feature (1)..(25): SEQ ID NO: 4506; WAN0249UK; Start 168; Stop 192
gaaacaagaacaggacaaattgatc

SEQ ID NO: 384255 - DNA, 25 bp, Artificial
  probe
  misc_feature (1)..(25): SEQ ID NO: 4506; WAN0249UK; Start 267; Stop 291
cgtctgatgggcaaatcttataaag

SEQ ID NO: 384256 - DNA, 25 bp, Artificial
  probe
  misc_feature (1)..(25): SEQ ID NO: 4506; WAN0249UK; Start 258; Stop 282
attatatttcgtctgatgggcaaat

SEQ ID NO: 384257 - DNA, 25 bp, Artificial
  probe
  misc_feature (1)..(25): SEQ ID NO: 4506; WAN0249UK; Start 314; Stop 338
gtttgaaataagatgtgaacaactc

SEQ ID NO: 384258 - DNA, 25 bp, Artificial
  probe
  misc_feature (1)..(25): SEQ ID NO: 4506; WAN0249UK; Start 315; Stop 339
tttgaaataagatgtgaacaactct

SEQ ID NO: 384259 - DNA, 25 bp, Artificial
  probe
  misc_feature (1)..(25): SEQ ID NO: 4506; WAN0249UK; Start 251; Stop 275
tcaatccattatatttcgtctgatg

SEQ ID NO: 384260 - DNA, 25 bp, Artificial
  probe
  misc_feature (1)..(25): SEQ ID NO: 4506; WAN0249UK; Start 248; Stop 272
gtttcaatccattatatttcgtctg

SEQ ID NO: 384261 - DNA, 25 bp, Artificial
  probe
  misc_feature (1)..(25): SEQ ID NO: 4506; WAN0249UK; Start 5; Stop 29
accgagtccattttctacgataata

SEQ ID NO: 384262 - DNA, 25 bp, Artificial
  probe
  misc_feature (1)..(25): SEQ ID NO: 4506; WAN0249UK; Start 4; Stop 28
caccgagtccattttctacgataat

SEQ ID NO: 384263 - DNA, 25 bp, Artificial
  probe
  misc_feature (1)..(25): SEQ ID NO: 4506; WAN0249UK; Start 234; Stop 258
ggtgtactattctagtttcaatcca

SEQ ID NO: 384264 - DNA, 25 bp, Artificial
  probe
  misc_feature (1)..(25): SEQ ID NO: 4507; WAN024AJ7; Start 8; Stop 32
cctcctctaattttgtactattgta

SEQ ID NO: 384265 - DNA, 25 bp, Artificial
  probe
  misc_feature (1)..(25): SEQ ID NO: 4508; WAN024AAI; Start 74; Stop 98
cagaatcgtgacttgaagccatata

SEQ ID NO: 384266 - DNA, 25 bp, Artificial
  probe
  misc_feature (1)..(25): SEQ ID NO: 4508; WAN024AAI; Start 269; Stop 293
atggagcgaagaagtgaacaattaa

SEQ ID NO: 384267 - DNA, 25 bp, Artificial
  probe
  misc_feature (1)..(25): SEQ ID NO: 4508; WAN024AAI; Start 268; Stop 292
aatggagcgaagaagtgaacaatta

SEQ ID NO: 384268 - DNA, 25 bp, Artificial
  probe
  misc_feature (1)..(25): SEQ ID NO: 4508; WAN024AAI; Start 75; Stop 99
agaatcgtgacttgaagccatatat

SEQ ID NO: 384269 - DNA, 25 bp, Artificial
  probe
  misc_feature (1)..(25): SEQ ID NO: 4508; WAN024AAI; Start 78; Stop 102
atcgtgacttgaagccatatatagc

SEQ ID NO: 384270 - DNA, 25 bp, Artificial
  probe
  misc_feature (1)..(25): SEQ ID NO: 4508; WAN024AAI; Start 85; Stop 109
cttgaagccatatatagcggatgag

SEQ ID NO: 384271 - DNA, 25 bp, Artificial
  probe
  misc_feature (1)..(25): SEQ ID NO: 4508; WAN024AAI; Start 77; Stop 101
aatcgtgacttgaagccatatatag

SEQ ID NO: 384272 - DNA, 25 bp, Artificial
  probe
  misc_feature (1)..(25): SEQ ID NO: 4508; WAN024AAI; Start 76; Stop 100
gaatcgtgacttgaagccatatata

SEQ ID NO: 384273 - DNA, 25 bp, Artificial
  probe
  misc_feature (1)..(25): SEQ ID NO: 4508; WAN024AAI; Start 83; Stop 107
gacttgaagccatatatagcggatg

SEQ ID NO: 384274 - DNA, 25 bp, Artificial
  probe
  misc_feature (1)..(25): SEQ ID NO: 4508; WAN024AAI; Start 82; Stop 106
tgacttgaagccatatatagcggat

SEQ ID NO: 384275 - DNA, 25 bp, Artificial
  probe
  misc_feature (1)..(25): SEQ ID NO: 4508; WAN024AAI; Start 73; Stop 97
acagaatcgtgacttgaagccatat

SEQ ID NO: 384276 - DNA, 25 bp, Artificial
  probe
  misc_feature (1)..(25): SEQ ID NO: 4508; WAN024AAI; Start 84; Stop 108
acttgaagccatatatagcggatga

SEQ ID NO: 384277 - DNA, 25 bp, Artificial
  probe
  misc_feature (1)..(25): SEQ ID NO: 4508; WAN024AAI; Start 93; Stop 117
catatatagcggatgaggaactcta

SEQ ID NO: 384278 - DNA, 25 bp, Artificial
  probe
  misc_feature (1)..(25): SEQ ID NO: 4508; WAN024AAI; Start 92; Stop 116
ccatatatagcggatgaggaactct

SEQ ID NO: 384279 - DNA, 25 bp, Artificial
  probe
  misc_feature (1)..(25): SEQ ID NO: 4508; WAN024AAI; Start 72; Stop 96
aacagaatcgtgacttgaagccata

SEQ ID NO: 384280 - DNA, 25 bp, Artificial
  probe
  misc_feature (1)..(25): SEQ ID NO: 4508; WAN024AAI; Start 88; Stop 112
gaagccatatatagcggatgaggaa

SEQ ID NO: 384281 - DNA, 25 bp, Artificial
  probe
  misc_feature (1)..(25): SEQ ID NO: 4508; WAN024AAI; Start 317; Stop 341
tgtcaattctaattcctggtatgaa

SEQ ID NO: 384282 - DNA, 25 bp, Artificial
  probe
  misc_feature (1)..(25): SEQ ID NO: 4508; WAN024AAI; Start 316; Stop 340
ttgtcaattctaattcctggtatga

SEQ ID NO: 384283 - DNA, 25 bp, Artificial
  probe
  misc_feature (1)..(25): SEQ ID NO: 4508; WAN024AAI; Start 89; Stop 113
aagccatatatagcggatgaggaac

SEQ ID NO: 384284 - DNA, 25 bp, Artificial
  probe
  misc_feature (1)..(25): SEQ ID NO: 4508; WAN024AAI; Start 86; Stop 110
ttgaagccatatatagcggatgagg

SEQ ID NO: 384285 - DNA, 25 bp, Artificial
  probe
  misc_feature (1)..(25): SEQ ID NO: 4508; WAN024AAI; Start 81; Stop 105
gtgacttgaagccatatatagcgga

SEQ ID NO: 384286 - DNA, 25 bp, Artificial
  probe
  misc_feature (1)..(25): SEQ ID NO: 4508; WAN024AAI; Start 5; Stop 29
gactcctaagcctgaatatcgtgag

SEQ ID NO: 384287 - DNA, 25 bp, Artificial
  probe
  misc_feature (1)..(25): SEQ ID NO: 4508; WAN024AAI; Start 94; Stop 118
atatatagcggatgaggaactctaa

SEQ ID NO: 384288 - DNA, 25 bp, Artificial
  probe
  misc_feature (1)..(25): SEQ ID NO: 4508; WAN024AAI; Start 271; Stop 295
ggagcgaagaagtgaacaattaaat

SEQ ID NO: 384289 - DNA, 25 bp, Artificial
  probe
  misc_feature (1)..(25): SEQ ID NO: 4508; WAN024AAI; Start 273; Stop 297
agcgaagaagtgaacaattaaatga

SEQ ID NO: 384290 - DNA, 25 bp, Artificial
  probe
  misc_feature (1)..(25): SEQ ID NO: 4508; WAN024AAI; Start 40; Stop 64
taggaaggaattagcgaaatcaagg

SEQ ID NO: 384291 - DNA, 25 bp, Artificial
  probe
  misc_feature (1)..(25): SEQ ID NO: 4508; WAN024AAI; Start 37; Stop 61
ggataggaaggaattagcgaaatca

SEQ ID NO: 384292 - DNA, 25 bp, Artificial
  probe
  misc_feature (1)..(25): SEQ ID NO: 4508; WAN024AAI; Start 272; Stop 296
gagcgaagaagtgaacaattaaatg

SEQ ID NO: 384293 - DNA, 25 bp, Artificial
  probe
  misc_feature (1)..(25): SEQ ID NO: 4508; WAN024AAI; Start 10; Stop 34
ctaagcctgaatatcgtgaggtagg

SEQ ID NO: 384294 - DNA, 25 bp, Artificial
  probe
  misc_feature (1)..(25): SEQ ID NO: 4508; WAN024AAI; Start 9; Stop 33
cctaagcctgaatatcgtgaggtag

SEQ ID NO: 384295 - DNA, 25 bp, Artificial
  probe
  misc_feature (1)..(25): SEQ ID NO: 4508; WAN024AAI; Start 50; Stop 74
ttagcgaaatcaaggttctacaaac

SEQ ID NO: 384296 - DNA, 25 bp, Artificial
  probe
  misc_feature (1)..(25): SEQ ID NO: 4508; WAN024AAI; Start 46; Stop 70
ggaattagcgaaatcaaggttctac

SEQ ID NO: 384297 - DNA, 25 bp, Artificial
  probe
  misc_feature (1)..(25): SEQ ID NO: 4508; WAN024AAI; Start 45; Stop 69
aggaattagcgaaatcaaggttcta

SEQ ID NO: 384298 - DNA, 25 bp, Artificial
  probe
  misc_feature (1)..(25): SEQ ID NO: 4509; WAN0249EX; Start 112; Stop 136
gttcttacaggaagtcagtattaac

SEQ ID NO: 384299 - DNA, 25 bp, Artificial
  probe
  misc_feature (1)..(25): SEQ ID NO: 4509; WAN0249EX; Start 75; Stop 99
tgaaaggatatggtatttgtaggga

SEQ ID NO: 384300 - DNA, 25 bp, Artificial
  probe
  misc_feature (1)..(25): SEQ ID NO: 4509; WAN0249EX; Start 111; Stop 135
agttcttacaggaagtcagtattaa

SEQ ID NO: 384301 - DNA, 25 bp, Artificial
  probe
  misc_feature (1)..(25): SEQ ID NO: 4509; WAN0249EX; Start 74; Stop 98
ctgaaaggatatggtatttgtaggg

SEQ ID NO: 384302 - DNA, 25 bp, Artificial
  probe
  misc_feature (1)..(25): SEQ ID NO: 4509; WAN0249EX; Start 113; Stop 137
ttcttacaggaagtcagtattaact

SEQ ID NO: 384303 - DNA, 25 bp, Artificial
  probe
  misc_feature (1)..(25): SEQ ID NO: 4509; WAN0249EX; Start 73; Stop 97
actgaaaggatatggtatttgtagg

SEQ ID NO: 384304 - DNA, 25 bp, Artificial
  probe
  misc_feature (1)..(25): SEQ ID NO: 4509; WAN0249EX; Start 76; Stop 100
gaaaggatatggtatttgtagggaa

SEQ ID NO: 384305 - DNA, 25 bp, Artificial
  probe
  misc_feature (1)..(25): SEQ ID NO: 4509; WAN0249EX; Start 13; Stop 37
tccggctagagattacagagttatt

SEQ ID NO: 384306 - DNA, 25 bp, Artificial
  probe
  misc_feature (1)..(25): SEQ ID NO: 4509; WAN0249EX; Start 12; Stop 36
atccggctagagattacagagttat

SEQ ID NO: 384307 - DNA, 25 bp, Artificial
  probe
  misc_feature (1)..(25): SEQ ID NO: 4509; WAN0249EX; Start 77; Stop 101
aaaggatatggtatttgtagggaat

SEQ ID NO: 384308 - DNA, 25 bp, Artificial
  probe
  misc_feature (1)..(25): SEQ ID NO: 4509; WAN0249EX; Start 114; Stop 138
tcttacaggaagtcagtattaacta

SEQ ID NO: 384309 - DNA, 25 bp, Artificial
  probe
  misc_feature (1)..(25): SEQ ID NO: 4509; WAN0249EX; Start 70; Stop 94
tctactgaaaggatatggtatttgt

SEQ ID NO: 384310 - DNA, 25 bp, Artificial
  probe
  misc_feature (1)..(25): SEQ ID NO: 4509; WAN0249EX; Start 115; Stop 139
cttacaggaagtcagtattaactag

SEQ ID NO: 384311 - DNA, 25 bp, Artificial
  probe
  misc_feature (1)..(25): SEQ ID NO: 4509; WAN0249EX; Start 11; Stop 35
aatccggctagagattacagagtta

SEQ ID NO: 384312 - DNA, 25 bp, Artificial
  probe
  misc_feature (1)..(25): SEQ ID NO: 4509; WAN0249EX; Start 39; Stop 63
tttaatctaaacttcctacaagggt

SEQ ID NO: 384313 - DNA, 25 bp, Artificial
  probe
  misc_feature (1)..(25): SEQ ID NO: 4509; WAN0249EX; Start 78; Stop 102
aaggatatggtatttgtagggaata

SEQ ID NO: 384314 - DNA, 25 bp, Artificial
  probe
  misc_feature (1)..(25): SEQ ID NO: 4509; WAN0249EX; Start 14; Stop 38
ccggctagagattacagagttattt

SEQ ID NO: 384315 - DNA, 25 bp, Artificial
  probe
  misc_feature (1)..(25): SEQ ID NO: 4509; WAN0249EX; Start 57; Stop 81
caagggtatattatctactgaaagg

SEQ ID NO: 384316 - DNA, 25 bp, Artificial
  probe
  misc_feature (1)..(25): SEQ ID NO: 4509; WAN0249EX; Start 58; Stop 82
aagggtatattatctactgaaagga

SEQ ID NO: 384317 - DNA, 25 bp, Artificial
  probe
  misc_feature (1)..(25): SEQ ID NO: 4509; WAN0249EX; Start 15; Stop 39
cggctagagattacagagttatttt

SEQ ID NO: 384318 - DNA, 25 bp, Artificial
  probe
  misc_feature (1)..(25): SEQ ID NO: 4509; WAN0249EX; Start 69; Stop 93
atctactgaaaggatatggtatttg

SEQ ID NO: 384319 - DNA, 25 bp, Artificial
  probe
  misc_feature (1)..(25): SEQ ID NO: 4509; WAN0249EX; Start 40; Stop 64
ttaatctaaacttcctacaagggta

SEQ ID NO: 384320 - DNA, 25 bp, Artificial
  probe
  misc_feature (1)..(25): SEQ ID NO: 4509; WAN0249EX; Start 59; Stop 83
agggtatattatctactgaaaggat

SEQ ID NO: 384321 - DNA, 25 bp, Artificial
  probe
  misc_feature (1)..(25): SEQ ID NO: 4509; WAN0249EX; Start 44; Stop 68
tctaaacttcctacaagggtatatt

SEQ ID NO: 384322 - DNA, 25 bp, Artificial
  probe
  misc_feature (1)..(25): SEQ ID NO: 4509; WAN0249EX; Start 42; Stop 66
aatctaaacttcctacaagggtata

SEQ ID NO: 384323 - DNA, 25 bp, Artificial
  probe
  misc_feature (1)..(25): SEQ ID NO: 4509; WAN0249EX; Start 41; Stop 65
taatctaaacttcctacaagggtat

SEQ ID NO: 384324 - DNA, 25 bp, Artificial
  probe
  misc_feature (1)..(25): SEQ ID NO: 4509; WAN0249EX; Start 72; Stop 96
tactgaaaggatatggtatttgtag

SEQ ID NO: 384325 - DNA, 25 bp, Artificial
  probe
  misc_feature (1)..(25): SEQ ID NO: 4509; WAN0249EX; Start 71; Stop 95
ctactgaaaggatatggtatttgta

SEQ ID NO: 384326 - DNA, 25 bp, Artificial
  probe
  misc_feature (1)..(25): SEQ ID NO: 4509; WAN0249EX; Start 5; Stop 29
gctataaatccggctagagattaca

SEQ ID NO: 384327 - DNA, 25 bp, Artificial
  probe
  misc_feature (1)..(25): SEQ ID NO: 4509; WAN0249EX; Start 53; Stop 77
cctacaagggtatattatctactga

SEQ ID NO: 384328 - DNA, 25 bp, Artificial
  probe
  misc_feature (1)..(25): SEQ ID NO: 4509; WAN0249EX; Start 52; Stop 76
tcctacaagggtatattatctactg

SEQ ID NO: 384329 - DNA, 25 bp, Artificial
  probe
  misc_feature (1)..(25): SEQ ID NO: 4509; WAN0249EX; Start 48; Stop 72
aacttcctacaagggtatattatct

SEQ ID NO: 384330 - DNA, 25 bp, Artificial
  probe
  misc_feature (1)..(25): SEQ ID NO: 4509; WAN0249EX; Start 43; Stop 67
atctaaacttcctacaagggtatat

SEQ ID NO: 384331 - DNA, 25 bp, Artificial
  probe
  misc_feature (1)..(25): SEQ ID NO: 4510; WAN0249KB; Start 27; Stop 51
ctaacggagcgagacaaactaatag

SEQ ID NO: 384332 - DNA, 25 bp, Artificial
  probe
  misc_feature (1)..(25): SEQ ID NO: 4510; WAN0249KB; Start 26; Stop 50
cctaacggagcgagacaaactaata

SEQ ID NO: 384333 - DNA, 25 bp, Artificial
  probe
  misc_feature (1)..(25): SEQ ID NO: 4510; WAN0249KB; Start 34; Stop 58
agcgagacaaactaatagtcactta

SEQ ID NO: 384334 - DNA, 25 bp, Artificial
  probe
  misc_feature (1)..(25): SEQ ID NO: 4510; WAN0249KB; Start 33; Stop 57
gagcgagacaaactaatagtcactt

SEQ ID NO: 384335 - DNA, 25 bp, Artificial
  probe
  misc_feature (1)..(25): SEQ ID NO: 4510; WAN0249KB; Start 28; Stop 52
taacggagcgagacaaactaatagt

SEQ ID NO: 384336 - DNA, 25 bp, Artificial
  probe
  misc_feature (1)..(25): SEQ ID NO: 4510; WAN0249KB; Start 101; Stop 125
atgcgtcatgtcttaaactaattga

SEQ ID NO: 384337 - DNA, 25 bp, Artificial
  probe
  misc_feature (1)..(25): SEQ ID NO: 4510; WAN0249KB; Start 35; Stop 59
gcgagacaaactaatagtcacttaa

SEQ ID NO: 384338 - DNA, 25 bp, Artificial
  probe
  misc_feature (1)..(25): SEQ ID NO: 4510; WAN0249KB; Start 32; Stop 56
ggagcgagacaaactaatagtcact

SEQ ID NO: 384339 - DNA, 25 bp, Artificial
  probe
  misc_feature (1)..(25): SEQ ID NO: 4510; WAN0249KB; Start 29; Stop 53
aacggagcgagacaaactaatagtc

SEQ ID NO: 384340 - DNA, 25 bp, Artificial
  probe
  misc_feature (1)..(25): SEQ ID NO: 4510; WAN0249KB; Start 25; Stop 49
acctaacggagcgagacaaactaat

SEQ ID NO: 384341 - DNA, 25 bp, Artificial
  probe
  misc_feature (1)..(25): SEQ ID NO: 4510; WAN0249KB; Start 31; Stop 55
cggagcgagacaaactaatagtcac

SEQ ID NO: 384342 - DNA, 25 bp, Artificial
  probe
  misc_feature (1)..(25): SEQ ID NO: 4510; WAN0249KB; Start 36; Stop 60
cgagacaaactaatagtcacttaat

SEQ ID NO: 384343 - DNA, 25 bp, Artificial
  probe
  misc_feature (1)..(25): SEQ ID NO: 4510; WAN0249KB; Start 30; Stop 54
acggagcgagacaaactaatagtca

SEQ ID NO: 384344 - DNA, 25 bp, Artificial
  probe
  misc_feature (1)..(25): SEQ ID NO: 4510; WAN0249KB; Start 100; Stop 124
catgcgtcatgtcttaaactaattg

SEQ ID NO: 384345 - DNA, 25 bp, Artificial
  probe
  misc_feature (1)..(25): SEQ ID NO: 4510; WAN0249KB; Start 99; Stop 123
tcatgcgtcatgtcttaaactaatt

SEQ ID NO: 384346 - DNA, 25 bp, Artificial
  probe
  misc_feature (1)..(25): SEQ ID NO: 4510; WAN0249KB; Start 98; Stop 122
atcatgcgtcatgtcttaaactaat

SEQ ID NO: 384347 - DNA, 25 bp, Artificial
  probe
  misc_feature (1)..(25): SEQ ID NO: 4510; WAN0249KB; Start 124; Stop 148
gactatactttctattcaaatgagc

SEQ ID NO: 384348 - DNA, 25 bp, Artificial
  probe
  misc_feature (1)..(25): SEQ ID NO: 4510; WAN0249KB; Start 97; Stop 121
tatcatgcgtcatgtcttaaactaa

SEQ ID NO: 384349 - DNA, 25 bp, Artificial
  probe
  misc_feature (1)..(25): SEQ ID NO: 4510; WAN0249KB; Start 96; Stop 120
atatcatgcgtcatgtcttaaacta

SEQ ID NO: 384350 - DNA, 25 bp, Artificial
  probe
  misc_feature (1)..(25): SEQ ID NO: 4510; WAN0249KB; Start 24; Stop 48
cacctaacggagcgagacaaactaa

SEQ ID NO: 384351 - DNA, 25 bp, Artificial
  probe
  misc_feature (1)..(25): SEQ ID NO: 4510; WAN0249KB; Start 103; Stop 127
gcgtcatgtcttaaactaattgact

SEQ ID NO: 384352 - DNA, 25 bp, Artificial
  probe
  misc_feature (1)..(25): SEQ ID NO: 4510; WAN0249KB; Start 102; Stop 126
tgcgtcatgtcttaaactaattgac

SEQ ID NO: 384353 - DNA, 25 bp, Artificial
  probe
  misc_feature (1)..(25): SEQ ID NO: 4510; WAN0249KB; Start 95; Stop 119
gatatcatgcgtcatgtcttaaact

SEQ ID NO: 384354 - DNA, 25 bp, Artificial
  probe
  misc_feature (1)..(25): SEQ ID NO: 4510; WAN0249KB; Start 38; Stop 62
agacaaactaatagtcacttaatca

SEQ ID NO: 384355 - DNA, 25 bp, Artificial
  probe
  misc_feature (1)..(25): SEQ ID NO: 4510; WAN0249KB; Start 125; Stop 149
actatactttctattcaaatgagct

SEQ ID NO: 384356 - DNA, 25 bp, Artificial
  probe
  misc_feature (1)..(25): SEQ ID NO: 4510; WAN0249KB; Start 134; Stop 158
tctattcaaatgagcttttaaccaa

SEQ ID NO: 384357 - DNA, 25 bp, Artificial
  probe
  misc_feature (1)..(25): SEQ ID NO: 4510; WAN0249KB; Start 133; Stop 157
ttctattcaaatgagcttttaacca

SEQ ID NO: 384358 - DNA, 25 bp, Artificial
  probe
  misc_feature (1)..(25): SEQ ID NO: 4510; WAN0249KB; Start 37; Stop 61
gagacaaactaatagtcacttaatc

SEQ ID NO: 384359 - DNA, 25 bp, Artificial
  probe
  misc_feature (1)..(25): SEQ ID NO: 4510; WAN0249KB; Start 143; Stop 167
atgagcttttaaccaattgattgag

SEQ ID NO: 384360 - DNA, 25 bp, Artificial
  probe
  misc_feature (1)..(25): SEQ ID NO: 4510; WAN0249KB; Start 39; Stop 63
gacaaactaatagtcacttaatcaa

SEQ ID NO: 384361 - DNA, 25 bp, Artificial
  probe
  misc_feature (1)..(25): SEQ ID NO: 4510; WAN0249KB; Start 135; Stop 159
ctattcaaatgagcttttaaccaat

SEQ ID NO: 384362 - DNA, 25 bp, Artificial
  probe
  misc_feature (1)..(25): SEQ ID NO: 4510; WAN0249KB; Start 142; Stop 166
aatgagcttttaaccaattgattga

SEQ ID NO: 384363 - DNA, 25 bp, Artificial
  probe
  misc_feature (1)..(25): SEQ ID NO: 4510; WAN0249KB; Start 132; Stop 156
tttctattcaaatgagcttttaacc

SEQ ID NO: 384364 - DNA, 25 bp, Artificial
  probe
  misc_feature (1)..(25): SEQ ID NO: 4511; WAN0249VD; Start 102; Stop 126
aaacgctttcaatatagtgtaatat

SEQ ID NO: 384365 - DNA, 25 bp, Artificial
  probe
  misc_feature (1)..(25): SEQ ID NO: 4511; WAN0249VD; Start 163; Stop 187
aatgtccttgaaagtagtttcagct

SEQ ID NO: 384366 - DNA, 25 bp, Artificial
  probe
  misc_feature (1)..(25): SEQ ID NO: 4511; WAN0249VD; Start 162; Stop 186
taatgtccttgaaagtagtttcagc

SEQ ID NO: 384367 - DNA, 25 bp, Artificial
  probe
  misc_feature (1)..(25): SEQ ID NO: 4511; WAN0249VD; Start 99; Stop 123
ttaaaacgctttcaatatagtgtaa

SEQ ID NO: 384368 - DNA, 25 bp, Artificial
  probe
  misc_feature (1)..(25): SEQ ID NO: 4511; WAN0249VD; Start 159; Stop 183
taataatgtccttgaaagtagtttc

SEQ ID NO: 384369 - DNA, 25 bp, Artificial
  probe
  misc_feature (1)..(25): SEQ ID NO: 4511; WAN0249VD; Start 101; Stop 125
aaaacgctttcaatatagtgtaata

SEQ ID NO: 384370 - DNA, 25 bp, Artificial
  probe
  misc_feature (1)..(25): SEQ ID NO: 4511; WAN0249VD; Start 100; Stop 124
taaaacgctttcaatatagtgtaat

SEQ ID NO: 384371 - DNA, 25 bp, Artificial
  probe
  misc_feature (1)..(25): SEQ ID NO: 4511; WAN0249VD; Start 184; Stop 208
agctgaacatttatagtccataaaa

SEQ ID NO: 384372 - DNA, 25 bp, Artificial
  probe
  misc_feature (1)..(25): SEQ ID NO: 4511; WAN0249VD; Start 98; Stop 122
tttaaaacgctttcaatatagtgta

SEQ ID NO: 384373 - DNA, 25 bp, Artificial
  probe
  misc_feature (1)..(25): SEQ ID NO: 4511; WAN0249VD; Start 161; Stop 185
ataatgtccttgaaagtagtttcag

SEQ ID NO: 384374 - DNA, 25 bp, Artificial
  probe
  misc_feature (1)..(25): SEQ ID NO: 4511; WAN0249VD; Start 160; Stop 184
aataatgtccttgaaagtagtttca

SEQ ID NO: 384375 - DNA, 25 bp, Artificial
  probe
  misc_feature (1)..(25): SEQ ID NO: 4511; WAN0249VD; Start 97; Stop 121
ttttaaaacgctttcaatatagtgt

SEQ ID NO: 384376 - DNA, 25 bp, Artificial
  probe
  misc_feature (1)..(25): SEQ ID NO: 4512; WAN024A4J; Start 56; Stop 80
aaagacctacccaaatggatagatc

SEQ ID NO: 384377 - DNA, 25 bp, Artificial
  probe
  misc_feature (1)..(25): SEQ ID NO: 4512; WAN024A4J; Start 5; Stop 29
tcataataaccaagctaggtccaag

SEQ ID NO: 384378 - DNA, 25 bp, Artificial
  probe
  misc_feature (1)..(25): SEQ ID NO: 4512; WAN024A4J; Start 4; Stop 28
ctcataataaccaagctaggtccaa

SEQ ID NO: 384379 - DNA, 25 bp, Artificial
  probe
  misc_feature (1)..(25): SEQ ID NO: 4512; WAN024A4J; Start 6; Stop 30
cataataaccaagctaggtccaagc

SEQ ID NO: 384380 - DNA, 25 bp, Artificial
  probe
  misc_feature (1)..(25): SEQ ID NO: 4512; WAN024A4J; Start 3; Stop 27
gctcataataaccaagctaggtcca

SEQ ID NO: 384381 - DNA, 25 bp, Artificial
  probe
  misc_feature (1)..(25): SEQ ID NO: 4512; WAN024A4J; Start 55; Stop 79
aaaagacctacccaaatggatagat

SEQ ID NO: 384382 - DNA, 25 bp, Artificial
  probe
  misc_feature (1)..(25): SEQ ID NO: 4512; WAN024A4J; Start 7; Stop 31
ataataaccaagctaggtccaagcg

SEQ ID NO: 384383 - DNA, 25 bp, Artificial
  probe
  misc_feature (1)..(25): SEQ ID NO: 4512; WAN024A4J; Start 59; Stop 83
gacctacccaaatggatagatcttt

SEQ ID NO: 384384 - DNA, 25 bp, Artificial
  probe
  misc_feature (1)..(25): SEQ ID NO: 4512; WAN024A4J; Start 58; Stop 82
agacctacccaaatggatagatctt

SEQ ID NO: 384385 - DNA, 25 bp, Artificial
  probe
  misc_feature (1)..(25): SEQ ID NO: 4512; WAN024A4J; Start 57; Stop 81
aagacctacccaaatggatagatct

SEQ ID NO: 384386 - DNA, 25 bp, Artificial
  probe
  misc_feature (1)..(25): SEQ ID NO: 4512; WAN024A4J; Start 60; Stop 84
acctacccaaatggatagatcttta

SEQ ID NO: 384387 - DNA, 25 bp, Artificial
  probe
  misc_feature (1)..(25): SEQ ID NO: 4512; WAN024A4J; Start 61; Stop 85
cctacccaaatggatagatctttac

SEQ ID NO: 384388 - DNA, 25 bp, Artificial
  probe
  misc_feature (1)..(25): SEQ ID NO: 4512; WAN024A4J; Start 64; Stop 88
acccaaatggatagatctttacttg

SEQ ID NO: 384389 - DNA, 25 bp, Artificial
  probe
  misc_feature (1)..(25): SEQ ID NO: 4512; WAN024A4J; Start 65; Stop 89
cccaaatggatagatctttacttga

SEQ ID NO: 384390 - DNA, 25 bp, Artificial
  probe
  misc_feature (1)..(25): SEQ ID NO: 4512; WAN024A4J; Start 62; Stop 86
ctacccaaatggatagatctttact

SEQ ID NO: 384391 - DNA, 25 bp, Artificial
  probe
  misc_feature (1)..(25): SEQ ID NO: 4512; WAN024A4J; Start 63; Stop 87
tacccaaatggatagatctttactt

SEQ ID NO: 384392 - DNA, 25 bp, Artificial
  probe
  misc_feature (1)..(25): SEQ ID NO: 4512; WAN024A4J; Start 8; Stop 32
taataaccaagctaggtccaagcgg

SEQ ID NO: 384393 - DNA, 25 bp, Artificial
  probe
  misc_feature (1)..(25): SEQ ID NO: 4512; WAN024A4J; Start 2; Stop 26
agctcataataaccaagctaggtcc

SEQ ID NO: 384394 - DNA, 25 bp, Artificial
  probe
  misc_feature (1)..(25): SEQ ID NO: 4513; WAN024ADA; Start 3; Stop 27
gcttgactgtaagtaaacaattcta

SEQ ID NO: 384395 - DNA, 25 bp, Artificial
  probe
  misc_feature (1)..(25): SEQ ID NO: 4513; WAN024ADA; Start 2; Stop 26
agcttgactgtaagtaaacaattct

SEQ ID NO: 384396 - DNA, 25 bp, Artificial
  probe
  misc_feature (1)..(25): SEQ ID NO: 4513; WAN024ADA; Start 6; Stop 30
tgactgtaagtaaacaattctagga

SEQ ID NO: 384397 - DNA, 25 bp, Artificial
  probe
  misc_feature (1)..(25): SEQ ID NO: 4513; WAN024ADA; Start 5; Stop 29
ttgactgtaagtaaacaattctagg

SEQ ID NO: 384398 - DNA, 25 bp, Artificial
  probe
  misc_feature (1)..(25): SEQ ID NO: 4513; WAN024ADA; Start 1; Stop 25
tagcttgactgtaagtaaacaattc

SEQ ID NO: 384399 - DNA, 25 bp, Artificial
  probe
  misc_feature (1)..(25): SEQ ID NO: 4513; WAN024ADA; Start 7; Stop 31
gactgtaagtaaacaattctaggaa

SEQ ID NO: 384400 - DNA, 25 bp, Artificial
  probe
  misc_feature (1)..(25): SEQ ID NO: 4513; WAN024ADA; Start 8; Stop 32
actgtaagtaaacaattctaggaaa

SEQ ID NO: 384401 - DNA, 25 bp, Artificial
  probe
  misc_feature (1)..(25): SEQ ID NO: 4513; WAN024ADA; Start 4; Stop 28
cttgactgtaagtaaacaattctag

SEQ ID NO: 384402 - DNA, 25 bp, Artificial
  probe
  misc_feature (1)..(25): SEQ ID NO: 4513; WAN024ADA; Start 19; Stop 43
acaattctaggaaatatttggagga

SEQ ID NO: 384403 - DNA, 25 bp, Artificial
  probe
  misc_feature (1)..(25): SEQ ID NO: 4513; WAN024ADA; Start 18; Stop 42
aacaattctaggaaatatttggagg

SEQ ID NO: 384404 - DNA, 25 bp, Artificial
  probe
  misc_feature (1)..(25): SEQ ID NO: 4513; WAN024ADA; Start 20; Stop 44
caattctaggaaatatttggaggaa

SEQ ID NO: 384405 - DNA, 25 bp, Artificial
  probe
  misc_feature (1)..(25): SEQ ID NO: 4513; WAN024ADA; Start 9; Stop 33
ctgtaagtaaacaattctaggaaat

SEQ ID NO: 384406 - DNA, 25 bp, Artificial
  probe
  misc_feature (1)..(25): SEQ ID NO: 4513; WAN024ADA; Start 21; Stop 45
aattctaggaaatatttggaggaaa

SEQ ID NO: 384407 - DNA, 25 bp, Artificial
  probe
  misc_feature (1)..(25): SEQ ID NO: 4513; WAN024ADA; Start 22; Stop 46
attctaggaaatatttggaggaaat

SEQ ID NO: 384408 - DNA, 25 bp, Artificial
  probe
  misc_feature (1)..(25): SEQ ID NO: 4513; WAN024ADA; Start 17; Stop 41
aaacaattctaggaaatatttggag

SEQ ID NO: 384409 - DNA, 25 bp, Artificial
  probe
  misc_feature (1)..(25): SEQ ID NO: 4513; WAN024ADA; Start 24; Stop 48
tctaggaaatatttggaggaaataa

SEQ ID NO: 384410 - DNA, 25 bp, Artificial
  probe
  misc_feature (1)..(25): SEQ ID NO: 4513; WAN024ADA; Start 23; Stop 47
ttctaggaaatatttggaggaaata

SEQ ID NO: 384411 - DNA, 25 bp, Artificial
  probe
  misc_feature (1)..(25): SEQ ID NO: 4513; WAN024ADA; Start 27; Stop 51
aggaaatatttggaggaaataaaac

SEQ ID NO: 384412 - DNA, 25 bp, Artificial
  probe
  misc_feature (1)..(25): SEQ ID NO: 4515; WAN0249XS; Start 61; Stop 85
caaatgtagtggagaatcagcgaaa

SEQ ID NO: 384413 - DNA, 25 bp, Artificial
  probe
  misc_feature (1)..(25): SEQ ID NO: 4515; WAN0249XS; Start 57; Stop 81
cagtcaaatgtagtggagaatcagc

SEQ ID NO: 384414 - DNA, 25 bp, Artificial
  probe
  misc_feature (1)..(25): SEQ ID NO: 4515; WAN0249XS; Start 60; Stop 84
tcaaatgtagtggagaatcagcgaa

SEQ ID NO: 384415 - DNA, 25 bp, Artificial
  probe
  misc_feature (1)..(25): SEQ ID NO: 4515; WAN0249XS; Start 59; Stop 83
gtcaaatgtagtggagaatcagcga

SEQ ID NO: 384416 - DNA, 25 bp, Artificial
  probe
  misc_feature (1)..(25): SEQ ID NO: 4515; WAN0249XS; Start 58; Stop 82
agtcaaatgtagtggagaatcagcg

SEQ ID NO: 384417 - DNA, 25 bp, Artificial
  probe
  misc_feature (1)..(25): SEQ ID NO: 4515; WAN0249XS; Start 56; Stop 80
ccagtcaaatgtagtggagaatcag

SEQ ID NO: 384418 - DNA, 25 bp, Artificial
  probe
  misc_feature (1)..(25): SEQ ID NO: 4515; WAN0249XS; Start 48; Stop 72
attagaatccagtcaaatgtagtgg

SEQ ID NO: 384419 - DNA, 25 bp, Artificial
  probe
  misc_feature (1)..(25): SEQ ID NO: 4515; WAN0249XS; Start 47; Stop 71
aattagaatccagtcaaatgtagtg

SEQ ID NO: 384420 - DNA, 25 bp, Artificial
  probe
  misc_feature (1)..(25): SEQ ID NO: 4515; WAN0249XS; Start 64; Stop 88
atgtagtggagaatcagcgaaaata

SEQ ID NO: 384421 - DNA, 25 bp, Artificial
  probe
  misc_feature (1)..(25): SEQ ID NO: 4515; WAN0249XS; Start 63; Stop 87
aatgtagtggagaatcagcgaaaat

SEQ ID NO: 384422 - DNA, 25 bp, Artificial
  probe
  misc_feature (1)..(25): SEQ ID NO: 4515; WAN0249XS; Start 62; Stop 86
aaatgtagtggagaatcagcgaaaa

SEQ ID NO: 384423 - DNA, 25 bp, Artificial
  probe
  misc_feature (1)..(25): SEQ ID NO: 4515; WAN0249XS; Start 46; Stop 70
aaattagaatccagtcaaatgtagt

SEQ ID NO: 384424 - DNA, 25 bp, Artificial
  probe
  misc_feature (1)..(25): SEQ ID NO: 4515; WAN0249XS; Start 53; Stop 77
aatccagtcaaatgtagtggagaat

SEQ ID NO: 384425 - DNA, 25 bp, Artificial
  probe
  misc_feature (1)..(25): SEQ ID NO: 4515; WAN0249XS; Start 50; Stop 74
tagaatccagtcaaatgtagtggag

SEQ ID NO: 384426 - DNA, 25 bp, Artificial
  probe
  misc_feature (1)..(25): SEQ ID NO: 4515; WAN0249XS; Start 54; Stop 78
atccagtcaaatgtagtggagaatc

SEQ ID NO: 384427 - DNA, 25 bp, Artificial
  probe
  misc_feature (1)..(25): SEQ ID NO: 4515; WAN0249XS; Start 52; Stop 76
gaatccagtcaaatgtagtggagaa

SEQ ID NO: 384428 - DNA, 25 bp, Artificial
  probe
  misc_feature (1)..(25): SEQ ID NO: 4515; WAN0249XS; Start 49; Stop 73
ttagaatccagtcaaatgtagtgga

SEQ ID NO: 384429 - DNA, 25 bp, Artificial
  probe
  misc_feature (1)..(25): SEQ ID NO: 4515; WAN0249XS; Start 51; Stop 75
agaatccagtcaaatgtagtggaga

SEQ ID NO: 384430 - DNA, 25 bp, Artificial
  probe
  misc_feature (1)..(25): SEQ ID NO: 4515; WAN0249XS; Start 55; Stop 79
tccagtcaaatgtagtggagaatca

SEQ ID NO: 384431 - DNA, 25 bp, Artificial
  probe
  misc_feature (1)..(25): SEQ ID NO: 4515; WAN0249XS; Start 45; Stop 69
aaaattagaatccagtcaaatgtag

SEQ ID NO: 384432 - DNA, 25 bp, Artificial
  probe
  misc_feature (1)..(25): SEQ ID NO: 4515; WAN0249XS; Start 22; Stop 46
ctagctcttttgtatttctctaaaa

SEQ ID NO: 384433 - DNA, 25 bp, Artificial
  probe
  misc_feature (1)..(25): SEQ ID NO: 4516; WAN0249TP; Start 300; Stop 324
actccagacatatcatagttcaagt

SEQ ID NO: 384434 - DNA, 25 bp, Artificial
  probe
  misc_feature (1)..(25): SEQ ID NO: 4516; WAN0249TP; Start 527; Stop 551
tgttcctaagatggagaagttagac

SEQ ID NO: 384435 - DNA, 25 bp, Artificial
  probe
  misc_feature (1)..(25): SEQ ID NO: 4516; WAN0249TP; Start 526; Stop 550
gtgttcctaagatggagaagttaga

SEQ ID NO: 384436 - DNA, 25 bp, Artificial
  probe
  misc_feature (1)..(25): SEQ ID NO: 4516; WAN0249TP; Start 297; Stop 321
tctactccagacatatcatagttca

SEQ ID NO: 384437 - DNA, 25 bp, Artificial
  probe
  misc_feature (1)..(25): SEQ ID NO: 4516; WAN0249TP; Start 528; Stop 552
gttcctaagatggagaagttagact

SEQ ID NO: 384438 - DNA, 25 bp, Artificial
  probe
  misc_feature (1)..(25): SEQ ID NO: 4516; WAN0249TP; Start 525; Stop 549
cgtgttcctaagatggagaagttag

SEQ ID NO: 384439 - DNA, 25 bp, Artificial
  probe
  misc_feature (1)..(25): SEQ ID NO: 4516; WAN0249TP; Start 301; Stop 325
ctccagacatatcatagttcaagta

SEQ ID NO: 384440 - DNA, 25 bp, Artificial
  probe
  misc_feature (1)..(25): SEQ ID NO: 4516; WAN0249TP; Start 122; Stop 146
tggtcttgcctttctatctttatca

SEQ ID NO: 384441 - DNA, 25 bp, Artificial
  probe
  misc_feature (1)..(25): SEQ ID NO: 4516; WAN0249TP; Start 299; Stop 323
tactccagacatatcatagttcaag

SEQ ID NO: 384442 - DNA, 25 bp, Artificial
  probe
  misc_feature (1)..(25): SEQ ID NO: 4516; WAN0249TP; Start 298; Stop 322
ctactccagacatatcatagttcaa

SEQ ID NO: 384443 - DNA, 25 bp, Artificial
  probe
  misc_feature (1)..(25): SEQ ID NO: 4516; WAN0249TP; Start 530; Stop 554
tcctaagatggagaagttagactag

SEQ ID NO: 384444 - DNA, 25 bp, Artificial
  probe
  misc_feature (1)..(25): SEQ ID NO: 4516; WAN0249TP; Start 302; Stop 326
tccagacatatcatagttcaagtaa

SEQ ID NO: 384445 - DNA, 25 bp, Artificial
  probe
  misc_feature (1)..(25): SEQ ID NO: 4516; WAN0249TP; Start 121; Stop 145
atggtcttgcctttctatctttatc

SEQ ID NO: 384446 - DNA, 25 bp, Artificial
  probe
  misc_feature (1)..(25): SEQ ID NO: 4516; WAN0249TP; Start 120; Stop 144
gatggtcttgcctttctatctttat

SEQ ID NO: 384447 - DNA, 25 bp, Artificial
  probe
  misc_feature (1)..(25): SEQ ID NO: 4516; WAN0249TP; Start 529; Stop 553
ttcctaagatggagaagttagacta

SEQ ID NO: 384448 - DNA, 25 bp, Artificial
  probe
  misc_feature (1)..(25): SEQ ID NO: 4516; WAN0249TP; Start 191; Stop 215
gcaaatagaaagtttcagccaagtt

SEQ ID NO: 384449 - DNA, 25 bp, Artificial
  probe
  misc_feature (1)..(25): SEQ ID NO: 4516; WAN0249TP; Start 123; Stop 147
ggtcttgcctttctatctttatcaa

SEQ ID NO: 384450 - DNA, 25 bp, Artificial
  probe
  misc_feature (1)..(25): SEQ ID NO: 4516; WAN0249TP; Start 195; Stop 219
atagaaagtttcagccaagtttgac

SEQ ID NO: 384451 - DNA, 25 bp, Artificial
  probe
  misc_feature (1)..(25): SEQ ID NO: 4516; WAN0249TP; Start 194; Stop 218
aatagaaagtttcagccaagtttga

SEQ ID NO: 384452 - DNA, 25 bp, Artificial
  probe
  misc_feature (1)..(25): SEQ ID NO: 4516; WAN0249TP; Start 193; Stop 217
aaatagaaagtttcagccaagtttg

SEQ ID NO: 384453 - DNA, 25 bp, Artificial
  probe
  misc_feature (1)..(25): SEQ ID NO: 4516; WAN0249TP; Start 192; Stop 216
caaatagaaagtttcagccaagttt

SEQ ID NO: 384454 - DNA, 25 bp, Artificial
  probe
  misc_feature (1)..(25): SEQ ID NO: 4516; WAN0249TP; Start 333; Stop 357
tgaaattcaacagttcttataggcg

SEQ ID NO: 384455 - DNA, 25 bp, Artificial
  probe
  misc_feature (1)..(25): SEQ ID NO: 4516; WAN0249TP; Start 196; Stop 220
tagaaagtttcagccaagtttgaca

SEQ ID NO: 384456 - DNA, 25 bp, Artificial
  probe
  misc_feature (1)..(25): SEQ ID NO: 4516; WAN0249TP; Start 125; Stop 149
tcttgcctttctatctttatcaaca

SEQ ID NO: 384457 - DNA, 25 bp, Artificial
  probe
  misc_feature (1)..(25): SEQ ID NO: 4516; WAN0249TP; Start 389; Stop 413
ttctaagcaaacctctaatactcaa

SEQ ID NO: 384458 - DNA, 25 bp, Artificial
  probe
  misc_feature (1)..(25): SEQ ID NO: 4516; WAN0249TP; Start 199; Stop 223
aaagtttcagccaagtttgacaaag

SEQ ID NO: 384459 - DNA, 25 bp, Artificial
  probe
  misc_feature (1)..(25): SEQ ID NO: 4516; WAN0249TP; Start 198; Stop 222
gaaagtttcagccaagtttgacaaa

SEQ ID NO: 384460 - DNA, 25 bp, Artificial
  probe
  misc_feature (1)..(25): SEQ ID NO: 4516; WAN0249TP; Start 388; Stop 412
tttctaagcaaacctctaatactca

SEQ ID NO: 384461 - DNA, 25 bp, Artificial
  probe
  misc_feature (1)..(25): SEQ ID NO: 4516; WAN0249TP; Start 238; Stop 262
tgtttgaagtttgtagatataagcg

SEQ ID NO: 384462 - DNA, 25 bp, Artificial
  probe
  misc_feature (1)..(25): SEQ ID NO: 4516; WAN0249TP; Start 126; Stop 150
cttgcctttctatctttatcaacag

SEQ ID NO: 384463 - DNA, 25 bp, Artificial
  probe
  misc_feature (1)..(25): SEQ ID NO: 4516; WAN0249TP; Start 124; Stop 148
gtcttgcctttctatctttatcaac

SEQ ID NO: 384464 - DNA, 25 bp, Artificial
  probe
  misc_feature (1)..(25): SEQ ID NO: 4516; WAN0249TP; Start 524; Stop 548
acgtgttcctaagatggagaagtta

SEQ ID NO: 384465 - DNA, 25 bp, Artificial
  probe
  misc_feature (1)..(25): SEQ ID NO: 4516; WAN0249TP; Start 523; Stop 547
tacgtgttcctaagatggagaagtt

SEQ ID NO: 384466 - DNA, 25 bp, Artificial
  probe
  misc_feature (1)..(25): SEQ ID NO: 4517; WAN024ANW; Start 80; Stop 104
ctaagaagcgaatgaagagagtaag

SEQ ID NO: 384467 - DNA, 25 bp, Artificial
  probe
  misc_feature (1)..(25): SEQ ID NO: 4517; WAN024ANW; Start 78; Stop 102
gtctaagaagcgaatgaagagagta

SEQ ID NO: 384468 - DNA, 25 bp, Artificial
  probe
  misc_feature (1)..(25): SEQ ID NO: 4517; WAN024ANW; Start 76; Stop 100
aagtctaagaagcgaatgaagagag

SEQ ID NO: 384469 - DNA, 25 bp, Artificial
  probe
  misc_feature (1)..(25): SEQ ID NO: 4517; WAN024ANW; Start 75; Stop 99
gaagtctaagaagcgaatgaagaga

SEQ ID NO: 384470 - DNA, 25 bp, Artificial
  probe
  misc_feature (1)..(25): SEQ ID NO: 4517; WAN024ANW; Start 74; Stop 98
agaagtctaagaagcgaatgaagag

SEQ ID NO: 384471 - DNA, 25 bp, Artificial
  probe
  misc_feature (1)..(25): SEQ ID NO: 4517; WAN024ANW; Start 79; Stop 103
tctaagaagcgaatgaagagagtaa

SEQ ID NO: 384472 - DNA, 25 bp, Artificial
  probe
  misc_feature (1)..(25): SEQ ID NO: 4517; WAN024ANW; Start 73; Stop 97
tagaagtctaagaagcgaatgaaga

SEQ ID NO: 384473 - DNA, 25 bp, Artificial
  probe
  misc_feature (1)..(25): SEQ ID NO: 4517; WAN024ANW; Start 77; Stop 101
agtctaagaagcgaatgaagagagt

SEQ ID NO: 384474 - DNA, 25 bp, Artificial
  probe
  misc_feature (1)..(25): SEQ ID NO: 4517; WAN024ANW; Start 72; Stop 96
atagaagtctaagaagcgaatgaag

SEQ ID NO: 384475 - DNA, 25 bp, Artificial
  probe
  misc_feature (1)..(25): SEQ ID NO: 4517; WAN024ANW; Start 71; Stop 95
aatagaagtctaagaagcgaatgaa

SEQ ID NO: 384476 - DNA, 25 bp, Artificial
  probe
  misc_feature (1)..(25): SEQ ID NO: 4517; WAN024ANW; Start 70; Stop 94
aaatagaagtctaagaagcgaatga

SEQ ID NO: 384477 - DNA, 25 bp, Artificial
  probe
  misc_feature (1)..(25): SEQ ID NO: 4517; WAN024ANW; Start 46; Stop 70
gcaagaagggcttgatttatgataa

SEQ ID NO: 384478 - DNA, 25 bp, Artificial
  probe
  misc_feature (1)..(25): SEQ ID NO: 4517; WAN024ANW; Start 69; Stop 93
aaaatagaagtctaagaagcgaatg

SEQ ID NO: 384479 - DNA, 25 bp, Artificial
  probe
  misc_feature (1)..(25): SEQ ID NO: 4517; WAN024ANW; Start 45; Stop 69
tgcaagaagggcttgatttatgata

SEQ ID NO: 384480 - DNA, 25 bp, Artificial
  probe
  misc_feature (1)..(25): SEQ ID NO: 4517; WAN024ANW; Start 65; Stop 89
tgataaaatagaagtctaagaagcg

SEQ ID NO: 384481 - DNA, 25 bp, Artificial
  probe
  misc_feature (1)..(25): SEQ ID NO: 4517; WAN024ANW; Start 47; Stop 71
caagaagggcttgatttatgataaa

SEQ ID NO: 384482 - DNA, 25 bp, Artificial
  probe
  misc_feature (1)..(25): SEQ ID NO: 4517; WAN024ANW; Start 44; Stop 68
ctgcaagaagggcttgatttatgat

SEQ ID NO: 384483 - DNA, 25 bp, Artificial
  probe
  misc_feature (1)..(25): SEQ ID NO: 4517; WAN024ANW; Start 66; Stop 90
gataaaatagaagtctaagaagcga

SEQ ID NO: 384484 - DNA, 25 bp, Artificial
  probe
  misc_feature (1)..(25): SEQ ID NO: 4517; WAN024ANW; Start 48; Stop 72
aagaagggcttgatttatgataaaa

SEQ ID NO: 384485 - DNA, 25 bp, Artificial
  probe
  misc_feature (1)..(25): SEQ ID NO: 4517; WAN024ANW; Start 49; Stop 73
agaagggcttgatttatgataaaat

SEQ ID NO: 384486 - DNA, 25 bp, Artificial
  probe
  misc_feature (1)..(25): SEQ ID NO: 4517; WAN024ANW; Start 42; Stop 66
gactgcaagaagggcttgatttatg

SEQ ID NO: 384487 - DNA, 25 bp, Artificial
  probe
  misc_feature (1)..(25): SEQ ID NO: 4517; WAN024ANW; Start 41; Stop 65
agactgcaagaagggcttgatttat

SEQ ID NO: 384488 - DNA, 25 bp, Artificial
  probe
  misc_feature (1)..(25): SEQ ID NO: 4517; WAN024ANW; Start 68; Stop 92
taaaatagaagtctaagaagcgaat

SEQ ID NO: 384489 - DNA, 25 bp, Artificial
  probe
  misc_feature (1)..(25): SEQ ID NO: 4517; WAN024ANW; Start 67; Stop 91
ataaaatagaagtctaagaagcgaa

SEQ ID NO: 384490 - DNA, 25 bp, Artificial
  probe
  misc_feature (1)..(25): SEQ ID NO: 4517; WAN024ANW; Start 43; Stop 67
actgcaagaagggcttgatttatga

SEQ ID NO: 384491 - DNA, 25 bp, Artificial
  probe
  misc_feature (1)..(25): SEQ ID NO: 4517; WAN024ANW; Start 40; Stop 64
gagactgcaagaagggcttgattta

SEQ ID NO: 384492 - DNA, 25 bp, Artificial
  probe
  misc_feature (1)..(25): SEQ ID NO: 4517; WAN024ANW; Start 52; Stop 76
agggcttgatttatgataaaataga

SEQ ID NO: 384493 - DNA, 25 bp, Artificial
  probe
  misc_feature (1)..(25): SEQ ID NO: 4517; WAN024ANW; Start 53; Stop 77
gggcttgatttatgataaaatagaa

SEQ ID NO: 384494 - DNA, 25 bp, Artificial
  probe
  misc_feature (1)..(25): SEQ ID NO: 4517; WAN024ANW; Start 51; Stop 75
aagggcttgatttatgataaaatag

SEQ ID NO: 384495 - DNA, 25 bp, Artificial
  probe
  misc_feature (1)..(25): SEQ ID NO: 4517; WAN024ANW; Start 50; Stop 74
gaagggcttgatttatgataaaata

SEQ ID NO: 384496 - DNA, 25 bp, Artificial
  probe
  misc_feature (1)..(25): SEQ ID NO: 4517; WAN024ANW; Start 39; Stop 63
agagactgcaagaagggcttgattt

SEQ ID NO: 384497 - DNA, 25 bp, Artificial
  probe
  misc_feature (1)..(25): SEQ ID NO: 4518; WAN024A2Y; Start 55; Stop 79
tcacttccgttatcaacataataca

SEQ ID NO: 384498 - DNA, 25 bp, Artificial
  probe
  misc_feature (1)..(25): SEQ ID NO: 4518; WAN024A2Y; Start 56; Stop 80
cacttccgttatcaacataatacat

SEQ ID NO: 384499 - DNA, 25 bp, Artificial
  probe
  misc_feature (1)..(25): SEQ ID NO: 4518; WAN024A2Y; Start 54; Stop 78
ttcacttccgttatcaacataatac

SEQ ID NO: 384500 - DNA, 25 bp, Artificial
  probe
  misc_feature (1)..(25): SEQ ID NO: 4518; WAN024A2Y; Start 174; Stop 198
aataattgtaacgaatcaaggtcaa

SEQ ID NO: 384501 - DNA, 25 bp, Artificial
  probe
  misc_feature (1)..(25): SEQ ID NO: 4518; WAN024A2Y; Start 177; Stop 201
aattgtaacgaatcaaggtcaatct

SEQ ID NO: 384502 - DNA, 25 bp, Artificial
  probe
  misc_feature (1)..(25): SEQ ID NO: 4518; WAN024A2Y; Start 178; Stop 202
attgtaacgaatcaaggtcaatcta

SEQ ID NO: 384503 - DNA, 25 bp, Artificial
  probe
  misc_feature (1)..(25): SEQ ID NO: 4518; WAN024A2Y; Start 57; Stop 81
acttccgttatcaacataatacatt

SEQ ID NO: 384504 - DNA, 25 bp, Artificial
  probe
  misc_feature (1)..(25): SEQ ID NO: 4518; WAN024A2Y; Start 176; Stop 200
taattgtaacgaatcaaggtcaatc

SEQ ID NO: 384505 - DNA, 25 bp, Artificial
  probe
  misc_feature (1)..(25): SEQ ID NO: 4518; WAN024A2Y; Start 41; Stop 65
acaagcaataaatttcacttccgtt

SEQ ID NO: 384506 - DNA, 25 bp, Artificial
  probe
  misc_feature (1)..(25): SEQ ID NO: 4518; WAN024A2Y; Start 25; Stop 49
tctatatggaattatgacaagcaat

SEQ ID NO: 384507 - DNA, 25 bp, Artificial
  probe
  misc_feature (1)..(25): SEQ ID NO: 4518; WAN024A2Y; Start 24; Stop 48
atctatatggaattatgacaagcaa

SEQ ID NO: 384508 - DNA, 25 bp, Artificial
  probe
  misc_feature (1)..(25): SEQ ID NO: 4518; WAN024A2Y; Start 23; Stop 47
aatctatatggaattatgacaagca

SEQ ID NO: 384509 - DNA, 25 bp, Artificial
  probe
  misc_feature (1)..(25): SEQ ID NO: 4518; WAN024A2Y; Start 40; Stop 64
gacaagcaataaatttcacttccgt

SEQ ID NO: 384510 - DNA, 25 bp, Artificial
  probe
  misc_feature (1)..(25): SEQ ID NO: 4518; WAN024A2Y; Start 51; Stop 75
aatttcacttccgttatcaacataa

SEQ ID NO: 384511 - DNA, 25 bp, Artificial
  probe
  misc_feature (1)..(25): SEQ ID NO: 4518; WAN024A2Y; Start 39; Stop 63
tgacaagcaataaatttcacttccg

SEQ ID NO: 384512 - DNA, 25 bp, Artificial
  probe
  misc_feature (1)..(25): SEQ ID NO: 4518; WAN024A2Y; Start 173; Stop 197
aaataattgtaacgaatcaaggtca

SEQ ID NO: 384513 - DNA, 25 bp, Artificial
  probe
  misc_feature (1)..(25): SEQ ID NO: 4518; WAN024A2Y; Start 175; Stop 199
ataattgtaacgaatcaaggtcaat

SEQ ID NO: 384514 - DNA, 25 bp, Artificial
  probe
  misc_feature (1)..(25): SEQ ID NO: 4518; WAN024A2Y; Start 42; Stop 66
caagcaataaatttcacttccgtta

SEQ ID NO: 384515 - DNA, 25 bp, Artificial
  probe
  misc_feature (1)..(25): SEQ ID NO: 4518; WAN024A2Y; Start 52; Stop 76
atttcacttccgttatcaacataat

SEQ ID NO: 384516 - DNA, 25 bp, Artificial
  probe
  misc_feature (1)..(25): SEQ ID NO: 4518; WAN024A2Y; Start 171; Stop 195
tgaaataattgtaacgaatcaaggt

SEQ ID NO: 384517 - DNA, 25 bp, Artificial
  probe
  misc_feature (1)..(25): SEQ ID NO: 4518; WAN024A2Y; Start 119; Stop 143
ccctaactttctcgtttccgtcttt

SEQ ID NO: 384518 - DNA, 25 bp, Artificial
  probe
  misc_feature (1)..(25): SEQ ID NO: 4518; WAN024A2Y; Start 45; Stop 69
gcaataaatttcacttccgttatca

SEQ ID NO: 384519 - DNA, 25 bp, Artificial
  probe
  misc_feature (1)..(25): SEQ ID NO: 4518; WAN024A2Y; Start 38; Stop 62
atgacaagcaataaatttcacttcc

SEQ ID NO: 384520 - DNA, 25 bp, Artificial
  probe
  misc_feature (1)..(25): SEQ ID NO: 4518; WAN024A2Y; Start 124; Stop 148
actttctcgtttccgtcttttacta

SEQ ID NO: 384521 - DNA, 25 bp, Artificial
  probe
  misc_feature (1)..(25): SEQ ID NO: 4518; WAN024A2Y; Start 125; Stop 149
ctttctcgtttccgtcttttactaa

SEQ ID NO: 384522 - DNA, 25 bp, Artificial
  probe
  misc_feature (1)..(25): SEQ ID NO: 4518; WAN024A2Y; Start 44; Stop 68
agcaataaatttcacttccgttatc

SEQ ID NO: 384523 - DNA, 25 bp, Artificial
  probe
  misc_feature (1)..(25): SEQ ID NO: 4518; WAN024A2Y; Start 172; Stop 196
gaaataattgtaacgaatcaaggtc

SEQ ID NO: 384524 - DNA, 25 bp, Artificial
  probe
  misc_feature (1)..(25): SEQ ID NO: 4518; WAN024A2Y; Start 122; Stop 146
taactttctcgtttccgtcttttac

SEQ ID NO: 384525 - DNA, 25 bp, Artificial
  probe
  misc_feature (1)..(25): SEQ ID NO: 4518; WAN024A2Y; Start 126; Stop 150
tttctcgtttccgtcttttactaat

SEQ ID NO: 384526 - DNA, 25 bp, Artificial
  probe
  misc_feature (1)..(25): SEQ ID NO: 4518; WAN024A2Y; Start 121; Stop 145
ctaactttctcgtttccgtctttta

SEQ ID NO: 384527 - DNA, 25 bp, Artificial
  probe
  misc_feature (1)..(25): SEQ ID NO: 4518; WAN024A2Y; Start 53; Stop 77
tttcacttccgttatcaacataata

SEQ ID NO: 384528 - DNA, 25 bp, Artificial
  probe
  misc_feature (1)..(25): SEQ ID NO: 4518; WAN024A2Y; Start 43; Stop 67
aagcaataaatttcacttccgttat

SEQ ID NO: 384529 - DNA, 25 bp, Artificial
  probe
  misc_feature (1)..(25): SEQ ID NO: 4518; WAN024A2Y; Start 128; Stop 152
tctcgtttccgtcttttactaattt

SEQ ID NO: 384530 - DNA, 25 bp, Artificial
  probe
  misc_feature (1)..(25): SEQ ID NO: 4519; WAN024AEK; Start 152; Stop 176
agtaagtagtctgtctgtagtcgtc

SEQ ID NO: 384531 - DNA, 25 bp, Artificial
  probe
  misc_feature (1)..(25): SEQ ID NO: 4519; WAN024AEK; Start 151; Stop 175
gagtaagtagtctgtctgtagtcgt

SEQ ID NO: 384532 - DNA, 25 bp, Artificial
  probe
  misc_feature (1)..(25): SEQ ID NO: 4519; WAN024AEK; Start 139; Stop 163
tacctaacacgagagtaagtagtct

SEQ ID NO: 384533 - DNA, 25 bp, Artificial
  probe
  misc_feature (1)..(25): SEQ ID NO: 4519; WAN024AEK; Start 150; Stop 174
agagtaagtagtctgtctgtagtcg

SEQ ID NO: 384534 - DNA, 25 bp, Artificial
  probe
  misc_feature (1)..(25): SEQ ID NO: 4519; WAN024AEK; Start 148; Stop 172
cgagagtaagtagtctgtctgtagt

SEQ ID NO: 384535 - DNA, 25 bp, Artificial
  probe
  misc_feature (1)..(25): SEQ ID NO: 4519; WAN024AEK; Start 147; Stop 171
acgagagtaagtagtctgtctgtag

SEQ ID NO: 384536 - DNA, 25 bp, Artificial
  probe
  misc_feature (1)..(25): SEQ ID NO: 4519; WAN024AEK; Start 149; Stop 173
gagagtaagtagtctgtctgtagtc

SEQ ID NO: 384537 - DNA, 25 bp, Artificial
  probe
  misc_feature (1)..(25): SEQ ID NO: 4519; WAN024AEK; Start 146; Stop 170
cacgagagtaagtagtctgtctgta

SEQ ID NO: 384538 - DNA, 25 bp, Artificial
  probe
  misc_feature (1)..(25): SEQ ID NO: 4519; WAN024AEK; Start 140; Stop 164
acctaacacgagagtaagtagtctg

SEQ ID NO: 384539 - DNA, 25 bp, Artificial
  probe
  misc_feature (1)..(25): SEQ ID NO: 4519; WAN024AEK; Start 153; Stop 177
gtaagtagtctgtctgtagtcgtcc

SEQ ID NO: 384540 - DNA, 25 bp, Artificial
  probe
  misc_feature (1)..(25): SEQ ID NO: 4519; WAN024AEK; Start 142; Stop 166
ctaacacgagagtaagtagtctgtc

SEQ ID NO: 384541 - DNA, 25 bp, Artificial
  probe
  misc_feature (1)..(25): SEQ ID NO: 4519; WAN024AEK; Start 143; Stop 167
taacacgagagtaagtagtctgtct

SEQ ID NO: 384542 - DNA, 25 bp, Artificial
  probe
  misc_feature (1)..(25): SEQ ID NO: 4519; WAN024AEK; Start 154; Stop 178
taagtagtctgtctgtagtcgtcca

SEQ ID NO: 384543 - DNA, 25 bp, Artificial
  probe
  misc_feature (1)..(25): SEQ ID NO: 4519; WAN024AEK; Start 141; Stop 165
cctaacacgagagtaagtagtctgt

SEQ ID NO: 384544 - DNA, 25 bp, Artificial
  probe
  misc_feature (1)..(25): SEQ ID NO: 4519; WAN024AEK; Start 144; Stop 168
aacacgagagtaagtagtctgtctg

SEQ ID NO: 384545 - DNA, 25 bp, Artificial
  probe
  misc_feature (1)..(25): SEQ ID NO: 4519; WAN024AEK; Start 1; Stop 25
taggtagtcgctgtttcttatcttt

SEQ ID NO: 384546 - DNA, 25 bp, Artificial
  probe
  misc_feature (1)..(25): SEQ ID NO: 4519; WAN024AEK; Start 128; Stop 152
cagagataaactacctaacacgaga

SEQ ID NO: 384547 - DNA, 25 bp, Artificial
  probe
  misc_feature (1)..(25): SEQ ID NO: 4519; WAN024AEK; Start 127; Stop 151
gcagagataaactacctaacacgag

SEQ ID NO: 384548 - DNA, 25 bp, Artificial
  probe
  misc_feature (1)..(25): SEQ ID NO: 4519; WAN024AEK; Start 2; Stop 26
aggtagtcgctgtttcttatctttg

SEQ ID NO: 384549 - DNA, 25 bp, Artificial
  probe
  misc_feature (1)..(25): SEQ ID NO: 4519; WAN024AEK; Start 129; Stop 153
agagataaactacctaacacgagag

SEQ ID NO: 384550 - DNA, 25 bp, Artificial
  probe
  misc_feature (1)..(25): SEQ ID NO: 4519; WAN024AEK; Start 145; Stop 169
acacgagagtaagtagtctgtctgt

SEQ ID NO: 384551 - DNA, 25 bp, Artificial
  probe
  misc_feature (1)..(25): SEQ ID NO: 4519; WAN024AEK; Start 138; Stop 162
ctacctaacacgagagtaagtagtc

SEQ ID NO: 384552 - DNA, 25 bp, Artificial
  probe
  misc_feature (1)..(25): SEQ ID NO: 4519; WAN024AEK; Start 130; Stop 154
gagataaactacctaacacgagagt

SEQ ID NO: 384553 - DNA, 25 bp, Artificial
  probe
  misc_feature (1)..(25): SEQ ID NO: 4519; WAN024AEK; Start 3; Stop 27
ggtagtcgctgtttcttatctttgg

SEQ ID NO: 384554 - DNA, 25 bp, Artificial
  probe
  misc_feature (1)..(25): SEQ ID NO: 4519; WAN024AEK; Start 136; Stop 160
aactacctaacacgagagtaagtag

SEQ ID NO: 384555 - DNA, 25 bp, Artificial
  probe
  misc_feature (1)..(25): SEQ ID NO: 4519; WAN024AEK; Start 165; Stop 189
tctgtagtcgtccagtctgatgatt

SEQ ID NO: 384556 - DNA, 25 bp, Artificial
  probe
  misc_feature (1)..(25): SEQ ID NO: 4519; WAN024AEK; Start 135; Stop 159
aaactacctaacacgagagtaagta

SEQ ID NO: 384557 - DNA, 25 bp, Artificial
  probe
  misc_feature (1)..(25): SEQ ID NO: 4519; WAN024AEK; Start 134; Stop 158
taaactacctaacacgagagtaagt

SEQ ID NO: 384558 - DNA, 25 bp, Artificial
  probe
  misc_feature (1)..(25): SEQ ID NO: 4519; WAN024AEK; Start 65; Stop 89
tagtcgtctgggataatggaaactc

SEQ ID NO: 384559 - DNA, 25 bp, Artificial
  probe
  misc_feature (1)..(25): SEQ ID NO: 4519; WAN024AEK; Start 5; Stop 29
tagtcgctgtttcttatctttggct

SEQ ID NO: 384560 - DNA, 25 bp, Artificial
  probe
  misc_feature (1)..(25): SEQ ID NO: 4519; WAN024AEK; Start 4; Stop 28
gtagtcgctgtttcttatctttggc

SEQ ID NO: 384561 - DNA, 25 bp, Artificial
  probe
  misc_feature (1)..(25): SEQ ID NO: 4519; WAN024AEK; Start 131; Stop 155
agataaactacctaacacgagagta

SEQ ID NO: 384562 - DNA, 25 bp, Artificial
  probe
  misc_feature (1)..(25): SEQ ID NO: 4519; WAN024AEK; Start 155; Stop 179
aagtagtctgtctgtagtcgtccag

SEQ ID NO: 384563 - DNA, 25 bp, Artificial
  probe
  misc_feature (1)..(25): SEQ ID NO: 4520; WAN0249GE; Start 52; Stop 76
ctaggggactagtttgttcctaaaa

SEQ ID NO: 384564 - DNA, 25 bp, Artificial
  probe
  misc_feature (1)..(25): SEQ ID NO: 4520; WAN0249GE; Start 46; Stop 70
ttgaagctaggggactagtttgttc

SEQ ID NO: 384565 - DNA, 25 bp, Artificial
  probe
  misc_feature (1)..(25): SEQ ID NO: 4520; WAN0249GE; Start 45; Stop 69
cttgaagctaggggactagtttgtt

SEQ ID NO: 384566 - DNA, 25 bp, Artificial
  probe
  misc_feature (1)..(25): SEQ ID NO: 4520; WAN0249GE; Start 51; Stop 75
gctaggggactagtttgttcctaaa

SEQ ID NO: 384567 - DNA, 25 bp, Artificial
  probe
  misc_feature (1)..(25): SEQ ID NO: 4520; WAN0249GE; Start 50; Stop 74
agctaggggactagtttgttcctaa

SEQ ID NO: 384568 - DNA, 25 bp, Artificial
  probe
  misc_feature (1)..(25): SEQ ID NO: 4520; WAN0249GE; Start 49; Stop 73
aagctaggggactagtttgttccta

SEQ ID NO: 384569 - DNA, 25 bp, Artificial
  probe
  misc_feature (1)..(25): SEQ ID NO: 4520; WAN0249GE; Start 48; Stop 72
gaagctaggggactagtttgttcct

SEQ ID NO: 384570 - DNA, 25 bp, Artificial
  probe
  misc_feature (1)..(25): SEQ ID NO: 4520; WAN0249GE; Start 47; Stop 71
tgaagctaggggactagtttgttcc

SEQ ID NO: 384571 - DNA, 25 bp, Artificial
  probe
  misc_feature (1)..(25): SEQ ID NO: 4520; WAN0249GE; Start 44; Stop 68
gcttgaagctaggggactagtttgt

SEQ ID NO: 384572 - DNA, 25 bp, Artificial
  probe
  misc_feature (1)..(25): SEQ ID NO: 4520; WAN0249GE; Start 43; Stop 67
agcttgaagctaggggactagtttg

SEQ ID NO: 384573 - DNA, 25 bp, Artificial
  probe
  misc_feature (1)..(25): SEQ ID NO: 4521; WAN0249KD; Start 54; Stop 78
cgtattgcctccaaagatttagtta

SEQ ID NO: 384574 - DNA, 25 bp, Artificial
  probe
  misc_feature (1)..(25): SEQ ID NO: 4521; WAN0249KD; Start 51; Stop 75
aaacgtattgcctccaaagatttag

SEQ ID NO: 384575 - DNA, 25 bp, Artificial
  probe
  misc_feature (1)..(25): SEQ ID NO: 4521; WAN0249KD; Start 55; Stop 79
gtattgcctccaaagatttagttaa

SEQ ID NO: 384576 - DNA, 25 bp, Artificial
  probe
  misc_feature (1)..(25): SEQ ID NO: 4521; WAN0249KD; Start 53; Stop 77
acgtattgcctccaaagatttagtt

SEQ ID NO: 384577 - DNA, 25 bp, Artificial
  probe
  misc_feature (1)..(25): SEQ ID NO: 4521; WAN0249KD; Start 52; Stop 76
aacgtattgcctccaaagatttagt

SEQ ID NO: 384578 - DNA, 25 bp, Artificial
  probe
  misc_feature (1)..(25): SEQ ID NO: 4521; WAN0249KD; Start 1; Stop 25
tagtaatctgtgttgaaggctcaaa

SEQ ID NO: 384579 - DNA, 25 bp, Artificial
  probe
  misc_feature (1)..(25): SEQ ID NO: 4521; WAN0249KD; Start 57; Stop 81
attgcctccaaagatttagttaaat

SEQ ID NO: 384580 - DNA, 25 bp, Artificial
  probe
  misc_feature (1)..(25): SEQ ID NO: 4521; WAN0249KD; Start 56; Stop 80
tattgcctccaaagatttagttaaa

SEQ ID NO: 384581 - DNA, 25 bp, Artificial
  probe
  misc_feature (1)..(25): SEQ ID NO: 4521; WAN0249KD; Start 59; Stop 83
tgcctccaaagatttagttaaataa

SEQ ID NO: 384582 - DNA, 25 bp, Artificial
  probe
  misc_feature (1)..(25): SEQ ID NO: 4521; WAN0249KD; Start 58; Stop 82
ttgcctccaaagatttagttaaata

SEQ ID NO: 384583 - DNA, 25 bp, Artificial
  probe
  misc_feature (1)..(25): SEQ ID NO: 4521; WAN0249KD; Start 14; Stop 38
tgaaggctcaaaacctatggtaaaa

SEQ ID NO: 384584 - DNA, 25 bp, Artificial
  probe
  misc_feature (1)..(25): SEQ ID NO: 4521; WAN0249KD; Start 50; Stop 74
aaaacgtattgcctccaaagattta

SEQ ID NO: 384585 - DNA, 25 bp, Artificial
  probe
  misc_feature (1)..(25): SEQ ID NO: 4521; WAN0249KD; Start 49; Stop 73
gaaaacgtattgcctccaaagattt

SEQ ID NO: 384586 - DNA, 25 bp, Artificial
  probe
  misc_feature (1)..(25): SEQ ID NO: 4521; WAN0249KD; Start 39; Stop 63
aagtagctttgaaaacgtattgcct

SEQ ID NO: 384587 - DNA, 25 bp, Artificial
  probe
  misc_feature (1)..(25): SEQ ID NO: 4521; WAN0249KD; Start 48; Stop 72
tgaaaacgtattgcctccaaagatt

SEQ ID NO: 384588 - DNA, 25 bp, Artificial
  probe
  misc_feature (1)..(25): SEQ ID NO: 4521; WAN0249KD; Start 47; Stop 71
ttgaaaacgtattgcctccaaagat

SEQ ID NO: 384589 - DNA, 25 bp, Artificial
  probe
  misc_feature (1)..(25): SEQ ID NO: 4521; WAN0249KD; Start 40; Stop 64
agtagctttgaaaacgtattgcctc

SEQ ID NO: 384590 - DNA, 25 bp, Artificial
  probe
  misc_feature (1)..(25): SEQ ID NO: 4521; WAN0249KD; Start 13; Stop 37
ttgaaggctcaaaacctatggtaaa

SEQ ID NO: 384591 - DNA, 25 bp, Artificial
  probe
  misc_feature (1)..(25): SEQ ID NO: 4521; WAN0249KD; Start 3; Stop 27
gtaatctgtgttgaaggctcaaaac

SEQ ID NO: 384592 - DNA, 25 bp, Artificial
  probe
  misc_feature (1)..(25): SEQ ID NO: 4521; WAN0249KD; Start 2; Stop 26
agtaatctgtgttgaaggctcaaaa

SEQ ID NO: 384593 - DNA, 25 bp, Artificial
  probe
  misc_feature (1)..(25): SEQ ID NO: 4521; WAN0249KD; Start 60; Stop 84
gcctccaaagatttagttaaataat

SEQ ID NO: 384594 - DNA, 25 bp, Artificial
  probe
  misc_feature (1)..(25): SEQ ID NO: 4521; WAN0249KD; Start 12; Stop 36
gttgaaggctcaaaacctatggtaa

SEQ ID NO: 384595 - DNA, 25 bp, Artificial
  probe
  misc_feature (1)..(25): SEQ ID NO: 4521; WAN0249KD; Start 41; Stop 65
gtagctttgaaaacgtattgcctcc

SEQ ID NO: 384596 - DNA, 25 bp, Artificial
  probe
  misc_feature (1)..(25): SEQ ID NO: 4521; WAN0249KD; Start 37; Stop 61
aaaagtagctttgaaaacgtattgc

SEQ ID NO: 384597 - DNA, 25 bp, Artificial
  probe
  misc_feature (1)..(25): SEQ ID NO: 4521; WAN0249KD; Start 38; Stop 62
aaagtagctttgaaaacgtattgcc

SEQ ID NO: 384598 - DNA, 25 bp, Artificial
  probe
  misc_feature (1)..(25): SEQ ID NO: 4521; WAN0249KD; Start 4; Stop 28
taatctgtgttgaaggctcaaaacc

SEQ ID NO: 384599 - DNA, 25 bp, Artificial
  probe
  misc_feature (1)..(25): SEQ ID NO: 4521; WAN0249KD; Start 42; Stop 66
tagctttgaaaacgtattgcctcca

SEQ ID NO: 384600 - DNA, 25 bp, Artificial
  probe
  misc_feature (1)..(25): SEQ ID NO: 4521; WAN0249KD; Start 11; Stop 35
tgttgaaggctcaaaacctatggta

SEQ ID NO: 384601 - DNA, 25 bp, Artificial
  probe
  misc_feature (1)..(25): SEQ ID NO: 4521; WAN0249KD; Start 8; Stop 32
ctgtgttgaaggctcaaaacctatg

SEQ ID NO: 384602 - DNA, 25 bp, Artificial
  probe
  misc_feature (1)..(25): SEQ ID NO: 4521; WAN0249KD; Start 7; Stop 31
tctgtgttgaaggctcaaaacctat

SEQ ID NO: 384603 - DNA, 25 bp, Artificial
  probe
  misc_feature (1)..(25): SEQ ID NO: 4521; WAN0249KD; Start 6; Stop 30
atctgtgttgaaggctcaaaaccta

SEQ ID NO: 384604 - DNA, 25 bp, Artificial
  probe
  misc_feature (1)..(25): SEQ ID NO: 4521; WAN0249KD; Start 46; Stop 70
tttgaaaacgtattgcctccaaaga

SEQ ID NO: 384605 - DNA, 25 bp, Artificial
  probe
  misc_feature (1)..(25): SEQ ID NO: 4521; WAN0249KD; Start 5; Stop 29
aatctgtgttgaaggctcaaaacct

SEQ ID NO: 384606 - DNA, 25 bp, Artificial
  probe
  misc_feature (1)..(25): SEQ ID NO: 4522; WAN0249PP; Start 165; Stop 189
atggcttggatttcttctttagttg

SEQ ID NO: 384607 - DNA, 25 bp, Artificial
  probe
  misc_feature (1)..(25): SEQ ID NO: 4522; WAN0249PP; Start 163; Stop 187
tgatggcttggatttcttctttagt

SEQ ID NO: 384608 - DNA, 25 bp, Artificial
  probe
  misc_feature (1)..(25): SEQ ID NO: 4522; WAN0249PP; Start 167; Stop 191
ggcttggatttcttctttagttgat

SEQ ID NO: 384609 - DNA, 25 bp, Artificial
  probe
  misc_feature (1)..(25): SEQ ID NO: 4522; WAN0249PP; Start 164; Stop 188
gatggcttggatttcttctttagtt

SEQ ID NO: 384610 - DNA, 25 bp, Artificial
  probe
  misc_feature (1)..(25): SEQ ID NO: 4522; WAN0249PP; Start 162; Stop 186
ttgatggcttggatttcttctttag

SEQ ID NO: 384611 - DNA, 25 bp, Artificial
  probe
  misc_feature (1)..(25): SEQ ID NO: 4522; WAN0249PP; Start 166; Stop 190
tggcttggatttcttctttagttga

SEQ ID NO: 384612 - DNA, 25 bp, Artificial
  probe
  misc_feature (1)..(25): SEQ ID NO: 4522; WAN0249PP; Start 161; Stop 185
tttgatggcttggatttcttcttta

SEQ ID NO: 384613 - DNA, 25 bp, Artificial
  probe
  misc_feature (1)..(25): SEQ ID NO: 4522; WAN0249PP; Start 168; Stop 192
gcttggatttcttctttagttgatt

SEQ ID NO: 384614 - DNA, 25 bp, Artificial
  probe
  misc_feature (1)..(25): SEQ ID NO: 4522; WAN0249PP; Start 228; Stop 252
tctggtataaatattgctttcctcc

SEQ ID NO: 384615 - DNA, 25 bp, Artificial
  probe
  misc_feature (1)..(25): SEQ ID NO: 4522; WAN0249PP; Start 74; Stop 98
gatttgccctgttcttgtttcgttt

SEQ ID NO: 384616 - DNA, 25 bp, Artificial
  probe
  misc_feature (1)..(25): SEQ ID NO: 4522; WAN0249PP; Start 274; Stop 298
gcaaatctaacatatcacggataaa

SEQ ID NO: 384617 - DNA, 25 bp, Artificial
  probe
  misc_feature (1)..(25): SEQ ID NO: 4522; WAN0249PP; Start 226; Stop 250
agtctggtataaatattgctttcct

SEQ ID NO: 384618 - DNA, 25 bp, Artificial
  probe
  misc_feature (1)..(25): SEQ ID NO: 4522; WAN0249PP; Start 227; Stop 251
gtctggtataaatattgctttcctc

SEQ ID NO: 384619 - DNA, 25 bp, Artificial
  probe
  misc_feature (1)..(25): SEQ ID NO: 4522; WAN0249PP; Start 160; Stop 184
ttttgatggcttggatttcttcttt

SEQ ID NO: 384620 - DNA, 25 bp, Artificial
  probe
  misc_feature (1)..(25): SEQ ID NO: 4522; WAN0249PP; Start 159; Stop 183
gttttgatggcttggatttcttctt

SEQ ID NO: 384621 - DNA, 25 bp, Artificial
  probe
  misc_feature (1)..(25): SEQ ID NO: 4522; WAN0249PP; Start 80; Stop 104
ccctgttcttgtttcgttttactat

SEQ ID NO: 384622 - DNA, 25 bp, Artificial
  probe
  misc_feature (1)..(25): SEQ ID NO: 4522; WAN0249PP; Start 229; Stop 253
ctggtataaatattgctttcctcca

SEQ ID NO: 384623 - DNA, 25 bp, Artificial
  probe
  misc_feature (1)..(25): SEQ ID NO: 4522; WAN0249PP; Start 290; Stop 314
acggataaattaacaagtgatttct

SEQ ID NO: 384624 - DNA, 25 bp, Artificial
  probe
  misc_feature (1)..(25): SEQ ID NO: 4522; WAN0249PP; Start 158; Stop 182
tgttttgatggcttggatttcttct

SEQ ID NO: 384625 - DNA, 25 bp, Artificial
  probe
  misc_feature (1)..(25): SEQ ID NO: 4522; WAN0249PP; Start 157; Stop 181
gtgttttgatggcttggatttcttc

SEQ ID NO: 384626 - DNA, 25 bp, Artificial
  probe
  misc_feature (1)..(25): SEQ ID NO: 4522; WAN0249PP; Start 154; Stop 178
aaagtgttttgatggcttggatttc

SEQ ID NO: 384627 - DNA, 25 bp, Artificial
  probe
  misc_feature (1)..(25): SEQ ID NO: 4522; WAN0249PP; Start 291; Stop 315
cggataaattaacaagtgatttctg

SEQ ID NO: 384628 - DNA, 25 bp, Artificial
  probe
  misc_feature (1)..(25): SEQ ID NO: 4522; WAN0249PP; Start 231; Stop 255
ggtataaatattgctttcctccaaa

SEQ ID NO: 384629 - DNA, 25 bp, Artificial
  probe
  misc_feature (1)..(25): SEQ ID NO: 4522; WAN0249PP; Start 230; Stop 254
tggtataaatattgctttcctccaa

SEQ ID NO: 384630 - DNA, 25 bp, Artificial
  probe
  misc_feature (1)..(25): SEQ ID NO: 4522; WAN0249PP; Start 289; Stop 313
cacggataaattaacaagtgatttc

SEQ ID NO: 384631 - DNA, 25 bp, Artificial
  probe
  misc_feature (1)..(25): SEQ ID NO: 4522; WAN0249PP; Start 156; Stop 180
agtgttttgatggcttggatttctt

SEQ ID NO: 384632 - DNA, 25 bp, Artificial
  probe
  misc_feature (1)..(25): SEQ ID NO: 4522; WAN0249PP; Start 79; Stop 103
gccctgttcttgtttcgttttacta

SEQ ID NO: 384633 - DNA, 25 bp, Artificial
  probe
  misc_feature (1)..(25): SEQ ID NO: 4522; WAN0249PP; Start 155; Stop 179
aagtgttttgatggcttggatttct

SEQ ID NO: 384634 - DNA, 25 bp, Artificial
  probe
  misc_feature (1)..(25): SEQ ID NO: 4522; WAN0249PP; Start 76; Stop 100
tttgccctgttcttgtttcgtttta

SEQ ID NO: 384635 - DNA, 25 bp, Artificial
  probe
  misc_feature (1)..(25): SEQ ID NO: 4522; WAN0249PP; Start 283; Stop 307
acatatcacggataaattaacaagt

SEQ ID NO: 384636 - DNA, 25 bp, Artificial
  probe
  misc_feature (1)..(25): SEQ ID NO: 4522; WAN0249PP; Start 169; Stop 193
cttggatttcttctttagttgattt

SEQ ID NO: 384637 - DNA, 25 bp, Artificial
  probe
  misc_feature (1)..(25): SEQ ID NO: 4522; WAN0249PP; Start 152; Stop 176
taaaagtgttttgatggcttggatt

SEQ ID NO: 384638 - DNA, 25 bp, Artificial
  probe
  misc_feature (1)..(25): SEQ ID NO: 4522; WAN0249PP; Start 151; Stop 175
ttaaaagtgttttgatggcttggat

SEQ ID NO: 384639 - DNA, 25 bp, Artificial
  probe
  misc_feature (1)..(25): SEQ ID NO: 4523; WAN0249MW; Start 205; Stop 229
acacctaacaataagtaagtcagca

SEQ ID NO: 384640 - DNA, 25 bp, Artificial
  probe
  misc_feature (1)..(25): SEQ ID NO: 4523; WAN0249MW; Start 207; Stop 231
acctaacaataagtaagtcagcagt

SEQ ID NO: 384641 - DNA, 25 bp, Artificial
  probe
  misc_feature (1)..(25): SEQ ID NO: 4523; WAN0249MW; Start 201; Stop 225
cggaacacctaacaataagtaagtc

SEQ ID NO: 384642 - DNA, 25 bp, Artificial
  probe
  misc_feature (1)..(25): SEQ ID NO: 4523; WAN0249MW; Start 208; Stop 232
cctaacaataagtaagtcagcagtg

SEQ ID NO: 384643 - DNA, 25 bp, Artificial
  probe
  misc_feature (1)..(25): SEQ ID NO: 4523; WAN0249MW; Start 206; Stop 230
cacctaacaataagtaagtcagcag

SEQ ID NO: 384644 - DNA, 25 bp, Artificial
  probe
  misc_feature (1)..(25): SEQ ID NO: 4523; WAN0249MW; Start 204; Stop 228
aacacctaacaataagtaagtcagc

SEQ ID NO: 384645 - DNA, 25 bp, Artificial
  probe
  misc_feature (1)..(25): SEQ ID NO: 4523; WAN0249MW; Start 211; Stop 235
aacaataagtaagtcagcagtgaga

SEQ ID NO: 384646 - DNA, 25 bp, Artificial
  probe
  misc_feature (1)..(25): SEQ ID NO: 4523; WAN0249MW; Start 202; Stop 226
ggaacacctaacaataagtaagtca

SEQ ID NO: 384647 - DNA, 25 bp, Artificial
  probe
  misc_feature (1)..(25): SEQ ID NO: 4523; WAN0249MW; Start 212; Stop 236
acaataagtaagtcagcagtgagat

SEQ ID NO: 384648 - DNA, 25 bp, Artificial
  probe
  misc_feature (1)..(25): SEQ ID NO: 4523; WAN0249MW; Start 216; Stop 240
taagtaagtcagcagtgagatatgg

SEQ ID NO: 384649 - DNA, 25 bp, Artificial
  probe
  misc_feature (1)..(25): SEQ ID NO: 4523; WAN0249MW; Start 210; Stop 234
taacaataagtaagtcagcagtgag

SEQ ID NO: 384650 - DNA, 25 bp, Artificial
  probe
  misc_feature (1)..(25): SEQ ID NO: 4523; WAN0249MW; Start 209; Stop 233
ctaacaataagtaagtcagcagtga

SEQ ID NO: 384651 - DNA, 25 bp, Artificial
  probe
  misc_feature (1)..(25): SEQ ID NO: 4523; WAN0249MW; Start 213; Stop 237
caataagtaagtcagcagtgagata

SEQ ID NO: 384652 - DNA, 25 bp, Artificial
  probe
  misc_feature (1)..(25): SEQ ID NO: 4523; WAN0249MW; Start 215; Stop 239
ataagtaagtcagcagtgagatatg

SEQ ID NO: 384653 - DNA, 25 bp, Artificial
  probe
  misc_feature (1)..(25): SEQ ID NO: 4523; WAN0249MW; Start 521; Stop 545
ataagactcgcttcgctcgtaatag

SEQ ID NO: 384654 - DNA, 25 bp, Artificial
  probe
  misc_feature (1)..(25): SEQ ID NO: 4523; WAN0249MW; Start 520; Stop 544
gataagactcgcttcgctcgtaata

SEQ ID NO: 384655 - DNA, 25 bp, Artificial
  probe
  misc_feature (1)..(25): SEQ ID NO: 4523; WAN0249MW; Start 203; Stop 227
gaacacctaacaataagtaagtcag

SEQ ID NO: 384656 - DNA, 25 bp, Artificial
  probe
  misc_feature (1)..(25): SEQ ID NO: 4523; WAN0249MW; Start 491; Stop 515
ctatgataccactacaacgggaaat

SEQ ID NO: 384657 - DNA, 25 bp, Artificial
  probe
  misc_feature (1)..(25): SEQ ID NO: 4523; WAN0249MW; Start 217; Stop 241
aagtaagtcagcagtgagatatggc

SEQ ID NO: 384658 - DNA, 25 bp, Artificial
  probe
  misc_feature (1)..(25): SEQ ID NO: 4523; WAN0249MW; Start 493; Stop 517
atgataccactacaacgggaaatat

SEQ ID NO: 384659 - DNA, 25 bp, Artificial
  probe
  misc_feature (1)..(25): SEQ ID NO: 4523; WAN0249MW; Start 492; Stop 516
tatgataccactacaacgggaaata

SEQ ID NO: 384660 - DNA, 25 bp, Artificial
  probe
  misc_feature (1)..(25): SEQ ID NO: 4523; WAN0249MW; Start 156; Stop 180
ttacttgtttatgtcgtgaattggc

SEQ ID NO: 384661 - DNA, 25 bp, Artificial
  probe
  misc_feature (1)..(25): SEQ ID NO: 4523; WAN0249MW; Start 490; Stop 514
tctatgataccactacaacgggaaa

SEQ ID NO: 384662 - DNA, 25 bp, Artificial
  probe
  misc_feature (1)..(25): SEQ ID NO: 4523; WAN0249MW; Start 403; Stop 427
ctctttcatttctaggcttaggcta

SEQ ID NO: 384663 - DNA, 25 bp, Artificial
  probe
  misc_feature (1)..(25): SEQ ID NO: 4523; WAN0249MW; Start 214; Stop 238
aataagtaagtcagcagtgagatat

SEQ ID NO: 384664 - DNA, 25 bp, Artificial
  probe
  misc_feature (1)..(25): SEQ ID NO: 4523; WAN0249MW; Start 404; Stop 428
tctttcatttctaggcttaggctaa

SEQ ID NO: 384665 - DNA, 25 bp, Artificial
  probe
  misc_feature (1)..(25): SEQ ID NO: 4523; WAN0249MW; Start 514; Stop 538
atatttgataagactcgcttcgctc

SEQ ID NO: 384666 - DNA, 25 bp, Artificial
  probe
  misc_feature (1)..(25): SEQ ID NO: 4523; WAN0249MW; Start 357; Stop 381
atttcaggaatccagggaatttcat

SEQ ID NO: 384667 - DNA, 25 bp, Artificial
  probe
  misc_feature (1)..(25): SEQ ID NO: 4523; WAN0249MW; Start 157; Stop 181
tacttgtttatgtcgtgaattggca

SEQ ID NO: 384668 - DNA, 25 bp, Artificial
  probe
  misc_feature (1)..(25): SEQ ID NO: 4523; WAN0249MW; Start 489; Stop 513
gtctatgataccactacaacgggaa

SEQ ID NO: 384669 - DNA, 25 bp, Artificial
  probe
  misc_feature (1)..(25): SEQ ID NO: 4523; WAN0249MW; Start 358; Stop 382
tttcaggaatccagggaatttcatc

SEQ ID NO: 384670 - DNA, 25 bp, Artificial
  probe
  misc_feature (1)..(25): SEQ ID NO: 4523; WAN0249MW; Start 405; Stop 429
ctttcatttctaggcttaggctaaa

SEQ ID NO: 384671 - DNA, 25 bp, Artificial
  probe
  misc_feature (1)..(25): SEQ ID NO: 4523; WAN0249MW; Start 352; Stop 376
gaataatttcaggaatccagggaat

SEQ ID NO: 384672 - DNA, 25 bp, Artificial
  probe
  misc_feature (1)..(25): SEQ ID NO: 4524; WAN0249HU; Start 82; Stop 106
ttagattaagaaagtgtaggggagt

SEQ ID NO: 384673 - DNA, 25 bp, Artificial
  probe
  misc_feature (1)..(25): SEQ ID NO: 4524; WAN0249HU; Start 8; Stop 32
gtgttaggaacgttgttattcttcg

SEQ ID NO: 384674 - DNA, 25 bp, Artificial
  probe
  misc_feature (1)..(25): SEQ ID NO: 4524; WAN0249HU; Start 7; Stop 31
agtgttaggaacgttgttattcttc

SEQ ID NO: 384675 - DNA, 25 bp, Artificial
  probe
  misc_feature (1)..(25): SEQ ID NO: 4524; WAN0249HU; Start 81; Stop 105
tttagattaagaaagtgtaggggag

SEQ ID NO: 384676 - DNA, 25 bp, Artificial
  probe
  misc_feature (1)..(25): SEQ ID NO: 4524; WAN0249HU; Start 6; Stop 30
tagtgttaggaacgttgttattctt

SEQ ID NO: 384677 - DNA, 25 bp, Artificial
  probe
  misc_feature (1)..(25): SEQ ID NO: 4524; WAN0249HU; Start 5; Stop 29
atagtgttaggaacgttgttattct

SEQ ID NO: 384678 - DNA, 25 bp, Artificial
  probe
  misc_feature (1)..(25): SEQ ID NO: 4524; WAN0249HU; Start 80; Stop 104
atttagattaagaaagtgtagggga

SEQ ID NO: 384679 - DNA, 25 bp, Artificial
  probe
  misc_feature (1)..(25): SEQ ID NO: 4524; WAN0249HU; Start 2; Stop 26
agtatagtgttaggaacgttgttat

SEQ ID NO: 384680 - DNA, 25 bp, Artificial
  probe
  misc_feature (1)..(25): SEQ ID NO: 4524; WAN0249HU; Start 3; Stop 27
gtatagtgttaggaacgttgttatt

SEQ ID NO: 384681 - DNA, 25 bp, Artificial
  probe
  misc_feature (1)..(25): SEQ ID NO: 4524; WAN0249HU; Start 1; Stop 25
tagtatagtgttaggaacgttgtta

SEQ ID NO: 384682 - DNA, 25 bp, Artificial
  probe
  misc_feature (1)..(25): SEQ ID NO: 4524; WAN0249HU; Start 9; Stop 33
tgttaggaacgttgttattcttcgt

SEQ ID NO: 384683 - DNA, 25 bp, Artificial
  probe
  misc_feature (1)..(25): SEQ ID NO: 4524; WAN0249HU; Start 4; Stop 28
tatagtgttaggaacgttgttattc

SEQ ID NO: 384684 - DNA, 25 bp, Artificial
  probe
  misc_feature (1)..(25): SEQ ID NO: 4524; WAN0249HU; Start 79; Stop 103
tatttagattaagaaagtgtagggg

SEQ ID NO: 384685 - DNA, 25 bp, Artificial
  probe
  misc_feature (1)..(25): SEQ ID NO: 4524; WAN0249HU; Start 10; Stop 34
gttaggaacgttgttattcttcgtt

SEQ ID NO: 384686 - DNA, 25 bp, Artificial
  probe
  misc_feature (1)..(25): SEQ ID NO: 4524; WAN0249HU; Start 16; Stop 40
aacgttgttattcttcgttcctttt

SEQ ID NO: 384687 - DNA, 25 bp, Artificial
  probe
  misc_feature (1)..(25): SEQ ID NO: 4525; WAN024AE3; Start 26; Stop 50
agttagtctagcagaatgaatctct

SEQ ID NO: 384688 - DNA, 25 bp, Artificial
  probe
  misc_feature (1)..(25): SEQ ID NO: 4525; WAN024AE3; Start 27; Stop 51
gttagtctagcagaatgaatctctc

SEQ ID NO: 384689 - DNA, 25 bp, Artificial
  probe
  misc_feature (1)..(25): SEQ ID NO: 4525; WAN024AE3; Start 28; Stop 52
ttagtctagcagaatgaatctctca

SEQ ID NO: 384690 - DNA, 25 bp, Artificial
  probe
  misc_feature (1)..(25): SEQ ID NO: 4525; WAN024AE3; Start 25; Stop 49
aagttagtctagcagaatgaatctc

SEQ ID NO: 384691 - DNA, 25 bp, Artificial
  probe
  misc_feature (1)..(25): SEQ ID NO: 4525; WAN024AE3; Start 24; Stop 48
gaagttagtctagcagaatgaatct

SEQ ID NO: 384692 - DNA, 25 bp, Artificial
  probe
  misc_feature (1)..(25): SEQ ID NO: 4525; WAN024AE3; Start 23; Stop 47
agaagttagtctagcagaatgaatc

SEQ ID NO: 384693 - DNA, 25 bp, Artificial
  probe
  misc_feature (1)..(25): SEQ ID NO: 4525; WAN024AE3; Start 22; Stop 46
aagaagttagtctagcagaatgaat

SEQ ID NO: 384694 - DNA, 25 bp, Artificial
  probe
  misc_feature (1)..(25): SEQ ID NO: 4525; WAN024AE3; Start 21; Stop 45
taagaagttagtctagcagaatgaa

SEQ ID NO: 384695 - DNA, 25 bp, Artificial
  probe
  misc_feature (1)..(25): SEQ ID NO: 4525; WAN024AE3; Start 20; Stop 44
ataagaagttagtctagcagaatga

SEQ ID NO: 384696 - DNA, 25 bp, Artificial
  probe
  misc_feature (1)..(25): SEQ ID NO: 4525; WAN024AE3; Start 29; Stop 53
tagtctagcagaatgaatctctcat

SEQ ID NO: 384697 - DNA, 25 bp, Artificial
  probe
  misc_feature (1)..(25): SEQ ID NO: 4525; WAN024AE3; Start 19; Stop 43
aataagaagttagtctagcagaatg

SEQ ID NO: 384698 - DNA, 25 bp, Artificial
  probe
  misc_feature (1)..(25): SEQ ID NO: 4525; WAN024AE3; Start 17; Stop 41
ctaataagaagttagtctagcagaa

SEQ ID NO: 384699 - DNA, 25 bp, Artificial
  probe
  misc_feature (1)..(25): SEQ ID NO: 4525; WAN024AE3; Start 18; Stop 42
taataagaagttagtctagcagaat

SEQ ID NO: 384700 - DNA, 25 bp, Artificial
  probe
  misc_feature (1)..(25): SEQ ID NO: 4525; WAN024AE3; Start 30; Stop 54
agtctagcagaatgaatctctcatt

SEQ ID NO: 384701 - DNA, 25 bp, Artificial
  probe
  misc_feature (1)..(25): SEQ ID NO: 4525; WAN024AE3; Start 38; Stop 62
agaatgaatctctcatttctcccac

SEQ ID NO: 384702 - DNA, 25 bp, Artificial
  probe
  misc_feature (1)..(25): SEQ ID NO: 4525; WAN024AE3; Start 37; Stop 61
cagaatgaatctctcatttctccca

SEQ ID NO: 384703 - DNA, 25 bp, Artificial
  probe
  misc_feature (1)..(25): SEQ ID NO: 4525; WAN024AE3; Start 39; Stop 63
gaatgaatctctcatttctcccaca

SEQ ID NO: 384704 - DNA, 25 bp, Artificial
  probe
  misc_feature (1)..(25): SEQ ID NO: 4525; WAN024AE3; Start 35; Stop 59
agcagaatgaatctctcatttctcc

SEQ ID NO: 384705 - DNA, 25 bp, Artificial
  probe
  misc_feature (1)..(25): SEQ ID NO: 4525; WAN024AE3; Start 31; Stop 55
gtctagcagaatgaatctctcattt

SEQ ID NO: 384706 - DNA, 25 bp, Artificial
  probe
  misc_feature (1)..(25): SEQ ID NO: 4525; WAN024AE3; Start 36; Stop 60
gcagaatgaatctctcatttctccc

SEQ ID NO: 384707 - DNA, 25 bp, Artificial
  probe
  misc_feature (1)..(25): SEQ ID NO: 4525; WAN024AE3; Start 34; Stop 58
tagcagaatgaatctctcatttctc

SEQ ID NO: 384708 - DNA, 25 bp, Artificial
  probe
  misc_feature (1)..(25): SEQ ID NO: 4525; WAN024AE3; Start 32; Stop 56
tctagcagaatgaatctctcatttc

SEQ ID NO: 384709 - DNA, 25 bp, Artificial
  probe
  misc_feature (1)..(25): SEQ ID NO: 4525; WAN024AE3; Start 33; Stop 57
ctagcagaatgaatctctcatttct

SEQ ID NO: 384710 - DNA, 25 bp, Artificial
  probe
  misc_feature (1)..(25): SEQ ID NO: 4526; WAN024A37; Start 10; Stop 34
caggagcataccaagatgactgatt

SEQ ID NO: 384711 - DNA, 25 bp, Artificial
  probe
  misc_feature (1)..(25): SEQ ID NO: 4526; WAN024A37; Start 11; Stop 35
aggagcataccaagatgactgattt

SEQ ID NO: 384712 - DNA, 25 bp, Artificial
  probe
  misc_feature (1)..(25): SEQ ID NO: 4526; WAN024A37; Start 1; Stop 25
tagtgaaagcaggagcataccaaga

SEQ ID NO: 384713 - DNA, 25 bp, Artificial
  probe
  misc_feature (1)..(25): SEQ ID NO: 4526; WAN024A37; Start 12; Stop 36
ggagcataccaagatgactgatttt

SEQ ID NO: 384714 - DNA, 25 bp, Artificial
  probe
  misc_feature (1)..(25): SEQ ID NO: 4526; WAN024A37; Start 5; Stop 29
gaaagcaggagcataccaagatgac

SEQ ID NO: 384715 - DNA, 25 bp, Artificial
  probe
  misc_feature (1)..(25): SEQ ID NO: 4526; WAN024A37; Start 2; Stop 26
agtgaaagcaggagcataccaagat

SEQ ID NO: 384716 - DNA, 25 bp, Artificial
  probe
  misc_feature (1)..(25): SEQ ID NO: 4526; WAN024A37; Start 9; Stop 33
gcaggagcataccaagatgactgat

SEQ ID NO: 384717 - DNA, 25 bp, Artificial
  probe
  misc_feature (1)..(25): SEQ ID NO: 4526; WAN024A37; Start 6; Stop 30
aaagcaggagcataccaagatgact

SEQ ID NO: 384718 - DNA, 25 bp, Artificial
  probe
  misc_feature (1)..(25): SEQ ID NO: 4526; WAN024A37; Start 4; Stop 28
tgaaagcaggagcataccaagatga

SEQ ID NO: 384719 - DNA, 25 bp, Artificial
  probe
  misc_feature (1)..(25): SEQ ID NO: 4526; WAN024A37; Start 3; Stop 27
gtgaaagcaggagcataccaagatg

SEQ ID NO: 384720 - DNA, 25 bp, Artificial
  probe
  misc_feature (1)..(25): SEQ ID NO: 4526; WAN024A37; Start 7; Stop 31
aagcaggagcataccaagatgactg

SEQ ID NO: 384721 - DNA, 25 bp, Artificial
  probe
  misc_feature (1)..(25): SEQ ID NO: 4526; WAN024A37; Start 35; Stop 59
ttttactgtattttaggtatgcaaa

SEQ ID NO: 384722 - DNA, 25 bp, Artificial
  probe
  misc_feature (1)..(25): SEQ ID NO: 4526; WAN024A37; Start 36; Stop 60
tttactgtattttaggtatgcaaaa

SEQ ID NO: 384723 - DNA, 25 bp, Artificial
  probe
  misc_feature (1)..(25): SEQ ID NO: 4526; WAN024A37; Start 37; Stop 61
ttactgtattttaggtatgcaaaat

SEQ ID NO: 384724 - DNA, 25 bp, Artificial
  probe
  misc_feature (1)..(25): SEQ ID NO: 4526; WAN024A37; Start 39; Stop 63
actgtattttaggtatgcaaaataa

SEQ ID NO: 384725 - DNA, 25 bp, Artificial
  probe
  misc_feature (1)..(25): SEQ ID NO: 4527; WAN024ACI; Start 20; Stop 44
gcgtagcagaaagcttacaaataaa

SEQ ID NO: 384726 - DNA, 25 bp, Artificial
  probe
  misc_feature (1)..(25): SEQ ID NO: 4527; WAN024ACI; Start 19; Stop 43
tgcgtagcagaaagcttacaaataa

SEQ ID NO: 384727 - DNA, 25 bp, Artificial
  probe
  misc_feature (1)..(25): SEQ ID NO: 4527; WAN024ACI; Start 18; Stop 42
ttgcgtagcagaaagcttacaaata

SEQ ID NO: 384728 - DNA, 25 bp, Artificial
  probe
  misc_feature (1)..(25): SEQ ID NO: 4527; WAN024ACI; Start 17; Stop 41
tttgcgtagcagaaagcttacaaat

SEQ ID NO: 384729 - DNA, 25 bp, Artificial
  probe
  misc_feature (1)..(25): SEQ ID NO: 4527; WAN024ACI; Start 25; Stop 49
gcagaaagcttacaaataaaattga

SEQ ID NO: 384730 - DNA, 25 bp, Artificial
  probe
  misc_feature (1)..(25): SEQ ID NO: 4527; WAN024ACI; Start 21; Stop 45
cgtagcagaaagcttacaaataaaa

SEQ ID NO: 384731 - DNA, 25 bp, Artificial
  probe
  misc_feature (1)..(25): SEQ ID NO: 4527; WAN024ACI; Start 8; Stop 32
cgatacgattttgcgtagcagaaag

SEQ ID NO: 384732 - DNA, 25 bp, Artificial
  probe
  misc_feature (1)..(25): SEQ ID NO: 4527; WAN024ACI; Start 9; Stop 33
gatacgattttgcgtagcagaaagc

SEQ ID NO: 384733 - DNA, 25 bp, Artificial
  probe
  misc_feature (1)..(25): SEQ ID NO: 4527; WAN024ACI; Start 15; Stop 39
attttgcgtagcagaaagcttacaa

SEQ ID NO: 384734 - DNA, 25 bp, Artificial
  probe
  misc_feature (1)..(25): SEQ ID NO: 4527; WAN024ACI; Start 16; Stop 40
ttttgcgtagcagaaagcttacaaa

SEQ ID NO: 384735 - DNA, 25 bp, Artificial
  probe
  misc_feature (1)..(25): SEQ ID NO: 4527; WAN024ACI; Start 14; Stop 38
gattttgcgtagcagaaagcttaca

SEQ ID NO: 384736 - DNA, 25 bp, Artificial
  probe
  misc_feature (1)..(25): SEQ ID NO: 4527; WAN024ACI; Start 24; Stop 48
agcagaaagcttacaaataaaattg

SEQ ID NO: 384737 - DNA, 25 bp, Artificial
  probe
  misc_feature (1)..(25): SEQ ID NO: 4527; WAN024ACI; Start 10; Stop 34
atacgattttgcgtagcagaaagct

SEQ ID NO: 384738 - DNA, 25 bp, Artificial
  probe
  misc_feature (1)..(25): SEQ ID NO: 4527; WAN024ACI; Start 7; Stop 31
ccgatacgattttgcgtagcagaaa

SEQ ID NO: 384739 - DNA, 25 bp, Artificial
  probe
  misc_feature (1)..(25): SEQ ID NO: 4527; WAN024ACI; Start 13; Stop 37
cgattttgcgtagcagaaagcttac

SEQ ID NO: 384740 - DNA, 25 bp, Artificial
  probe
  misc_feature (1)..(25): SEQ ID NO: 4527; WAN024ACI; Start 22; Stop 46
gtagcagaaagcttacaaataaaat

SEQ ID NO: 384741 - DNA, 25 bp, Artificial
  probe
  misc_feature (1)..(25): SEQ ID NO: 4527; WAN024ACI; Start 12; Stop 36
acgattttgcgtagcagaaagctta

SEQ ID NO: 384742 - DNA, 25 bp, Artificial
  probe
  misc_feature (1)..(25): SEQ ID NO: 4527; WAN024ACI; Start 26; Stop 50
cagaaagcttacaaataaaattgaa

SEQ ID NO: 384743 - DNA, 25 bp, Artificial
  probe
  misc_feature (1)..(25): SEQ ID NO: 4527; WAN024ACI; Start 23; Stop 47
tagcagaaagcttacaaataaaatt

SEQ ID NO: 384744 - DNA, 25 bp, Artificial
  probe
  misc_feature (1)..(25): SEQ ID NO: 4527; WAN024ACI; Start 1; Stop 25
tagtgcccgatacgattttgcgtag

SEQ ID NO: 384745 - DNA, 25 bp, Artificial
  probe
  misc_feature (1)..(25): SEQ ID NO: 4527; WAN024ACI; Start 11; Stop 35
tacgattttgcgtagcagaaagctt

SEQ ID NO: 384746 - DNA, 25 bp, Artificial
  probe
  misc_feature (1)..(25): SEQ ID NO: 4529; WAN0249JL; Start 139; Stop 163
tcaggaattgatagtgaatgtgtaa

SEQ ID NO: 384747 - DNA, 25 bp, Artificial
  probe
  misc_feature (1)..(25): SEQ ID NO: 4529; WAN0249JL; Start 140; Stop 164
caggaattgatagtgaatgtgtaaa

SEQ ID NO: 384748 - DNA, 25 bp, Artificial
  probe
  misc_feature (1)..(25): SEQ ID NO: 4529; WAN0249JL; Start 138; Stop 162
ttcaggaattgatagtgaatgtgta

SEQ ID NO: 384749 - DNA, 25 bp, Artificial
  probe
  misc_feature (1)..(25): SEQ ID NO: 4529; WAN0249JL; Start 108; Stop 132
tttatcttgttgaggctggtatttt

SEQ ID NO: 384750 - DNA, 25 bp, Artificial
  probe
  misc_feature (1)..(25): SEQ ID NO: 4529; WAN0249JL; Start 107; Stop 131
ttttatcttgttgaggctggtattt

SEQ ID NO: 384751 - DNA, 25 bp, Artificial
  probe
  misc_feature (1)..(25): SEQ ID NO: 4529; WAN0249JL; Start 111; Stop 135
atcttgttgaggctggtattttaac

SEQ ID NO: 384752 - DNA, 25 bp, Artificial
  probe
  misc_feature (1)..(25): SEQ ID NO: 4529; WAN0249JL; Start 117; Stop 141
ttgaggctggtattttaacaattca

SEQ ID NO: 384753 - DNA, 25 bp, Artificial
  probe
  misc_feature (1)..(25): SEQ ID NO: 4529; WAN0249JL; Start 116; Stop 140
gttgaggctggtattttaacaattc

SEQ ID NO: 384754 - DNA, 25 bp, Artificial
  probe
  misc_feature (1)..(25): SEQ ID NO: 4529; WAN0249JL; Start 109; Stop 133
ttatcttgttgaggctggtatttta

SEQ ID NO: 384755 - DNA, 25 bp, Artificial
  probe
  misc_feature (1)..(25): SEQ ID NO: 4529; WAN0249JL; Start 110; Stop 134
tatcttgttgaggctggtattttaa

SEQ ID NO: 384756 - DNA, 25 bp, Artificial
  probe
  misc_feature (1)..(25): SEQ ID NO: 4529; WAN0249JL; Start 121; Stop 145
ggctggtattttaacaattcaggaa

SEQ ID NO: 384757 - DNA, 25 bp, Artificial
  probe
  misc_feature (1)..(25): SEQ ID NO: 4529; WAN0249JL; Start 119; Stop 143
gaggctggtattttaacaattcagg

SEQ ID NO: 384758 - DNA, 25 bp, Artificial
  probe
  misc_feature (1)..(25): SEQ ID NO: 4529; WAN0249JL; Start 120; Stop 144
aggctggtattttaacaattcagga

SEQ ID NO: 384759 - DNA, 25 bp, Artificial
  probe
  misc_feature (1)..(25): SEQ ID NO: 4529; WAN0249JL; Start 118; Stop 142
tgaggctggtattttaacaattcag

SEQ ID NO: 384760 - DNA, 25 bp, Artificial
  probe
  misc_feature (1)..(25): SEQ ID NO: 4529; WAN0249JL; Start 80; Stop 104
tgtttctattttgtcaacttttcct

SEQ ID NO: 384761 - DNA, 25 bp, Artificial
  probe
  misc_feature (1)..(25): SEQ ID NO: 4529; WAN0249JL; Start 122; Stop 146
gctggtattttaacaattcaggaat

SEQ ID NO: 384762 - DNA, 25 bp, Artificial
  probe
  misc_feature (1)..(25): SEQ ID NO: 4529; WAN0249JL; Start 79; Stop 103
ttgtttctattttgtcaacttttcc

SEQ ID NO: 384763 - DNA, 25 bp, Artificial
  probe
  misc_feature (1)..(25): SEQ ID NO: 4529; WAN0249JL; Start 141; Stop 165
aggaattgatagtgaatgtgtaaaa

SEQ ID NO: 384764 - DNA, 25 bp, Artificial
  probe
  misc_feature (1)..(25): SEQ ID NO: 4529; WAN0249JL; Start 137; Stop 161
attcaggaattgatagtgaatgtgt

SEQ ID NO: 384765 - DNA, 25 bp, Artificial
  probe
  misc_feature (1)..(25): SEQ ID NO: 4529; WAN0249JL; Start 17; Stop 41
tacccaaaagttttaaggcggtctt

SEQ ID NO: 384766 - DNA, 25 bp, Artificial
  probe
  misc_feature (1)..(25): SEQ ID NO: 4529; WAN0249JL; Start 16; Stop 40
ttacccaaaagttttaaggcggtct

SEQ ID NO: 384767 - DNA, 25 bp, Artificial
  probe
  misc_feature (1)..(25): SEQ ID NO: 4529; WAN0249JL; Start 115; Stop 139
tgttgaggctggtattttaacaatt

SEQ ID NO: 384768 - DNA, 25 bp, Artificial
  probe
  misc_feature (1)..(25): SEQ ID NO: 4529; WAN0249JL; Start 112; Stop 136
tcttgttgaggctggtattttaaca

SEQ ID NO: 384769 - DNA, 25 bp, Artificial
  probe
  misc_feature (1)..(25): SEQ ID NO: 4529; WAN0249JL; Start 136; Stop 160
aattcaggaattgatagtgaatgtg

SEQ ID NO: 384770 - DNA, 25 bp, Artificial
  probe
  misc_feature (1)..(25): SEQ ID NO: 4529; WAN0249JL; Start 81; Stop 105
gtttctattttgtcaacttttccta

SEQ ID NO: 384771 - DNA, 25 bp, Artificial
  probe
  misc_feature (1)..(25): SEQ ID NO: 4529; WAN0249JL; Start 142; Stop 166
ggaattgatagtgaatgtgtaaaat

SEQ ID NO: 384772 - DNA, 25 bp, Artificial
  probe
  misc_feature (1)..(25): SEQ ID NO: 4529; WAN0249JL; Start 18; Stop 42
acccaaaagttttaaggcggtcttt

SEQ ID NO: 384773 - DNA, 25 bp, Artificial
  probe
  misc_feature (1)..(25): SEQ ID NO: 4529; WAN0249JL; Start 78; Stop 102
tttgtttctattttgtcaacttttc

SEQ ID NO: 384774 - DNA, 25 bp, Artificial
  probe
  misc_feature (1)..(25): SEQ ID NO: 4529; WAN0249JL; Start 135; Stop 159
caattcaggaattgatagtgaatgt

SEQ ID NO: 384775 - DNA, 25 bp, Artificial
  probe
  misc_feature (1)..(25): SEQ ID NO: 4529; WAN0249JL; Start 134; Stop 158
acaattcaggaattgatagtgaatg

SEQ ID NO: 384776 - DNA, 25 bp, Artificial
  probe
  misc_feature (1)..(25): SEQ ID NO: 4529; WAN0249JL; Start 123; Stop 147
ctggtattttaacaattcaggaatt

SEQ ID NO: 384777 - DNA, 25 bp, Artificial
  probe
  misc_feature (1)..(25): SEQ ID NO: 4529; WAN0249JL; Start 84; Stop 108
tctattttgtcaacttttcctattt

SEQ ID NO: 384778 - DNA, 25 bp, Artificial
  probe
  misc_feature (1)..(25): SEQ ID NO: 4529; WAN0249JL; Start 83; Stop 107
ttctattttgtcaacttttcctatt

SEQ ID NO: 384779 - DNA, 25 bp, Artificial
  probe
  misc_feature (1)..(25): SEQ ID NO: 4530; WAN0249RI; Start 10; Stop 34
tgatacctagatgtctgagaatcct

SEQ ID NO: 384780 - DNA, 25 bp, Artificial
  probe
  misc_feature (1)..(25): SEQ ID NO: 4530; WAN0249RI; Start 8; Stop 32
gctgatacctagatgtctgagaatc

SEQ ID NO: 384781 - DNA, 25 bp, Artificial
  probe
  misc_feature (1)..(25): SEQ ID NO: 4530; WAN0249RI; Start 9; Stop 33
ctgatacctagatgtctgagaatcc

SEQ ID NO: 384782 - DNA, 25 bp, Artificial
  probe
  misc_feature (1)..(25): SEQ ID NO: 4530; WAN0249RI; Start 7; Stop 31
ggctgatacctagatgtctgagaat

SEQ ID NO: 384783 - DNA, 25 bp, Artificial
  probe
  misc_feature (1)..(25): SEQ ID NO: 4530; WAN0249RI; Start 12; Stop 36
atacctagatgtctgagaatcctcc

SEQ ID NO: 384784 - DNA, 25 bp, Artificial
  probe
  misc_feature (1)..(25): SEQ ID NO: 4530; WAN0249RI; Start 11; Stop 35
gatacctagatgtctgagaatcctc

SEQ ID NO: 384785 - DNA, 25 bp, Artificial
  probe
  misc_feature (1)..(25): SEQ ID NO: 4530; WAN0249RI; Start 13; Stop 37
tacctagatgtctgagaatcctcct

SEQ ID NO: 384786 - DNA, 25 bp, Artificial
  probe
  misc_feature (1)..(25): SEQ ID NO: 4530; WAN0249RI; Start 14; Stop 38
acctagatgtctgagaatcctcctt

SEQ ID NO: 384787 - DNA, 25 bp, Artificial
  probe
  misc_feature (1)..(25): SEQ ID NO: 4530; WAN0249RI; Start 71; Stop 95
taggtttgctagattctatgcttct

SEQ ID NO: 384788 - DNA, 25 bp, Artificial
  probe
  misc_feature (1)..(25): SEQ ID NO: 4530; WAN0249RI; Start 15; Stop 39
cctagatgtctgagaatcctccttt

SEQ ID NO: 384789 - DNA, 25 bp, Artificial
  probe
  misc_feature (1)..(25): SEQ ID NO: 4530; WAN0249RI; Start 1; Stop 25
tagttgggctgatacctagatgtct

SEQ ID NO: 384790 - DNA, 25 bp, Artificial
  probe
  misc_feature (1)..(25): SEQ ID NO: 4530; WAN0249RI; Start 72; Stop 96
aggtttgctagattctatgcttcta

SEQ ID NO: 384791 - DNA, 25 bp, Artificial
  probe
  misc_feature (1)..(25): SEQ ID NO: 4530; WAN0249RI; Start 39; Stop 63
ttcctccttctattatagcacattt

SEQ ID NO: 384792 - DNA, 25 bp, Artificial
  probe
  misc_feature (1)..(25): SEQ ID NO: 4530; WAN0249RI; Start 38; Stop 62
tttcctccttctattatagcacatt

SEQ ID NO: 384793 - DNA, 25 bp, Artificial
  probe
  misc_feature (1)..(25): SEQ ID NO: 4530; WAN0249RI; Start 73; Stop 97
ggtttgctagattctatgcttctat

SEQ ID NO: 384794 - DNA, 25 bp, Artificial
  probe
  misc_feature (1)..(25): SEQ ID NO: 4530; WAN0249RI; Start 70; Stop 94
ctaggtttgctagattctatgcttc

SEQ ID NO: 384795 - DNA, 25 bp, Artificial
  probe
  misc_feature (1)..(25): SEQ ID NO: 4530; WAN0249RI; Start 6; Stop 30
gggctgatacctagatgtctgagaa

SEQ ID NO: 384796 - DNA, 25 bp, Artificial
  probe
  misc_feature (1)..(25): SEQ ID NO: 4530; WAN0249RI; Start 4; Stop 28
ttgggctgatacctagatgtctgag

SEQ ID NO: 384797 - DNA, 25 bp, Artificial
  probe
  misc_feature (1)..(25): SEQ ID NO: 4530; WAN0249RI; Start 28; Stop 52
gaatcctccttttcctccttctatt

SEQ ID NO: 384798 - DNA, 25 bp, Artificial
  probe
  misc_feature (1)..(25): SEQ ID NO: 4530; WAN0249RI; Start 3; Stop 27
gttgggctgatacctagatgtctga

SEQ ID NO: 384799 - DNA, 25 bp, Artificial
  probe
  misc_feature (1)..(25): SEQ ID NO: 4530; WAN0249RI; Start 2; Stop 26
agttgggctgatacctagatgtctg

SEQ ID NO: 384800 - DNA, 25 bp, Artificial
  probe
  misc_feature (1)..(25): SEQ ID NO: 4530; WAN0249RI; Start 74; Stop 98
gtttgctagattctatgcttctatc

SEQ ID NO: 384801 - DNA, 25 bp, Artificial
  probe
  misc_feature (1)..(25): SEQ ID NO: 4530; WAN0249RI; Start 29; Stop 53
aatcctccttttcctccttctatta

SEQ ID NO: 384802 - DNA, 25 bp, Artificial
  probe
  misc_feature (1)..(25): SEQ ID NO: 4530; WAN0249RI; Start 35; Stop 59
ccttttcctccttctattatagcac

SEQ ID NO: 384803 - DNA, 25 bp, Artificial
  probe
  misc_feature (1)..(25): SEQ ID NO: 4530; WAN0249RI; Start 34; Stop 58
tccttttcctccttctattatagca

SEQ ID NO: 384804 - DNA, 25 bp, Artificial
  probe
  misc_feature (1)..(25): SEQ ID NO: 4530; WAN0249RI; Start 30; Stop 54
atcctccttttcctccttctattat

SEQ ID NO: 384805 - DNA, 25 bp, Artificial
  probe
  misc_feature (1)..(25): SEQ ID NO: 4530; WAN0249RI; Start 17; Stop 41
tagatgtctgagaatcctccttttc

SEQ ID NO: 384806 - DNA, 25 bp, Artificial
  probe
  misc_feature (1)..(25): SEQ ID NO: 4530; WAN0249RI; Start 33; Stop 57
ctccttttcctccttctattatagc

SEQ ID NO: 384807 - DNA, 25 bp, Artificial
  probe
  misc_feature (1)..(25): SEQ ID NO: 4530; WAN0249RI; Start 16; Stop 40
ctagatgtctgagaatcctcctttt

SEQ ID NO: 384808 - DNA, 25 bp, Artificial
  probe
  misc_feature (1)..(25): SEQ ID NO: 4530; WAN0249RI; Start 88; Stop 112
atgcttctatctatttattcggaaa

SEQ ID NO: 384809 - DNA, 25 bp, Artificial
  probe
  misc_feature (1)..(25): SEQ ID NO: 4530; WAN0249RI; Start 36; Stop 60
cttttcctccttctattatagcaca

SEQ ID NO: 384810 - DNA, 25 bp, Artificial
  probe
  misc_feature (1)..(25): SEQ ID NO: 4530; WAN0249RI; Start 31; Stop 55
tcctccttttcctccttctattata

SEQ ID NO: 384811 - DNA, 25 bp, Artificial
  probe
  misc_feature (1)..(25): SEQ ID NO: 4530; WAN0249RI; Start 75; Stop 99
tttgctagattctatgcttctatct

SEQ ID NO: 384812 - DNA, 25 bp, Artificial
  probe
  misc_feature (1)..(25): SEQ ID NO: 4531; WAN024ANH; Start 17; Stop 41
gcagtcgtcccagattattcttatt

SEQ ID NO: 384813 - DNA, 25 bp, Artificial
  probe
  misc_feature (1)..(25): SEQ ID NO: 4531; WAN024ANH; Start 20; Stop 44
gtcgtcccagattattcttattagt

SEQ ID NO: 384814 - DNA, 25 bp, Artificial
  probe
  misc_feature (1)..(25): SEQ ID NO: 4531; WAN024ANH; Start 18; Stop 42
cagtcgtcccagattattcttatta

SEQ ID NO: 384815 - DNA, 25 bp, Artificial
  probe
  misc_feature (1)..(25): SEQ ID NO: 4531; WAN024ANH; Start 19; Stop 43
agtcgtcccagattattcttattag

SEQ ID NO: 384816 - DNA, 25 bp, Artificial
  probe
  misc_feature (1)..(25): SEQ ID NO: 4531; WAN024ANH; Start 69; Stop 93
cgtagttaacaagaccttgagcatt

SEQ ID NO: 384817 - DNA, 25 bp, Artificial
  probe
  misc_feature (1)..(25): SEQ ID NO: 4531; WAN024ANH; Start 68; Stop 92
tcgtagttaacaagaccttgagcat

SEQ ID NO: 384818 - DNA, 25 bp, Artificial
  probe
  misc_feature (1)..(25): SEQ ID NO: 4531; WAN024ANH; Start 16; Stop 40
tgcagtcgtcccagattattcttat

SEQ ID NO: 384819 - DNA, 25 bp, Artificial
  probe
  misc_feature (1)..(25): SEQ ID NO: 4531; WAN024ANH; Start 50; Stop 74
cttgttttctatatcccctcgtagt

SEQ ID NO: 384820 - DNA, 25 bp, Artificial
  probe
  misc_feature (1)..(25): SEQ ID NO: 4531; WAN024ANH; Start 48; Stop 72
gtcttgttttctatatcccctcgta

SEQ ID NO: 384821 - DNA, 25 bp, Artificial
  probe
  misc_feature (1)..(25): SEQ ID NO: 4531; WAN024ANH; Start 49; Stop 73
tcttgttttctatatcccctcgtag

SEQ ID NO: 384822 - DNA, 25 bp, Artificial
  probe
  misc_feature (1)..(25): SEQ ID NO: 4531; WAN024ANH; Start 51; Stop 75
ttgttttctatatcccctcgtagtt

SEQ ID NO: 384823 - DNA, 25 bp, Artificial
  probe
  misc_feature (1)..(25): SEQ ID NO: 4531; WAN024ANH; Start 79; Stop 103
aagaccttgagcattttagaaagag

SEQ ID NO: 384824 - DNA, 25 bp, Artificial
  probe
  misc_feature (1)..(25): SEQ ID NO: 4531; WAN024ANH; Start 67; Stop 91
ctcgtagttaacaagaccttgagca

SEQ ID NO: 384825 - DNA, 25 bp, Artificial
  probe
  misc_feature (1)..(25): SEQ ID NO: 4531; WAN024ANH; Start 21; Stop 45
tcgtcccagattattcttattagta

SEQ ID NO: 384826 - DNA, 25 bp, Artificial
  probe
  misc_feature (1)..(25): SEQ ID NO: 4531; WAN024ANH; Start 70; Stop 94
gtagttaacaagaccttgagcattt

SEQ ID NO: 384827 - DNA, 25 bp, Artificial
  probe
  misc_feature (1)..(25): SEQ ID NO: 4531; WAN024ANH; Start 52; Stop 76
tgttttctatatcccctcgtagtta

SEQ ID NO: 384828 - DNA, 25 bp, Artificial
  probe
  misc_feature (1)..(25): SEQ ID NO: 4531; WAN024ANH; Start 22; Stop 46
cgtcccagattattcttattagtag

SEQ ID NO: 384829 - DNA, 25 bp, Artificial
  probe
  misc_feature (1)..(25): SEQ ID NO: 4531; WAN024ANH; Start 47; Stop 71
ggtcttgttttctatatcccctcgt

SEQ ID NO: 384830 - DNA, 25 bp, Artificial
  probe
  misc_feature (1)..(25): SEQ ID NO: 4531; WAN024ANH; Start 15; Stop 39
gtgcagtcgtcccagattattctta

SEQ ID NO: 384831 - DNA, 25 bp, Artificial
  probe
  misc_feature (1)..(25): SEQ ID NO: 4531; WAN024ANH; Start 85; Stop 109
ttgagcattttagaaagaggaatct

SEQ ID NO: 384832 - DNA, 25 bp, Artificial
  probe
  misc_feature (1)..(25): SEQ ID NO: 4531; WAN024ANH; Start 84; Stop 108
cttgagcattttagaaagaggaatc

SEQ ID NO: 384833 - DNA, 25 bp, Artificial
  probe
  misc_feature (1)..(25): SEQ ID NO: 4531; WAN024ANH; Start 77; Stop 101
acaagaccttgagcattttagaaag

SEQ ID NO: 384834 - DNA, 25 bp, Artificial
  probe
  misc_feature (1)..(25): SEQ ID NO: 4531; WAN024ANH; Start 66; Stop 90
cctcgtagttaacaagaccttgagc

SEQ ID NO: 384835 - DNA, 25 bp, Artificial
  probe
  misc_feature (1)..(25): SEQ ID NO: 4531; WAN024ANH; Start 78; Stop 102
caagaccttgagcattttagaaaga

SEQ ID NO: 384836 - DNA, 25 bp, Artificial
  probe
  misc_feature (1)..(25): SEQ ID NO: 4531; WAN024ANH; Start 82; Stop 106
accttgagcattttagaaagaggaa

SEQ ID NO: 384837 - DNA, 25 bp, Artificial
  probe
  misc_feature (1)..(25): SEQ ID NO: 4531; WAN024ANH; Start 76; Stop 100
aacaagaccttgagcattttagaaa

SEQ ID NO: 384838 - DNA, 25 bp, Artificial
  probe
  misc_feature (1)..(25): SEQ ID NO: 4531; WAN024ANH; Start 83; Stop 107
ccttgagcattttagaaagaggaat

SEQ ID NO: 384839 - DNA, 25 bp, Artificial
  probe
  misc_feature (1)..(25): SEQ ID NO: 4531; WAN024ANH; Start 81; Stop 105
gaccttgagcattttagaaagagga

SEQ ID NO: 384840 - DNA, 25 bp, Artificial
  probe
  misc_feature (1)..(25): SEQ ID NO: 4531; WAN024ANH; Start 80; Stop 104
agaccttgagcattttagaaagagg

SEQ ID NO: 384841 - DNA, 25 bp, Artificial
  probe
  misc_feature (1)..(25): SEQ ID NO: 4531; WAN024ANH; Start 53; Stop 77
gttttctatatcccctcgtagttaa

SEQ ID NO: 384842 - DNA, 25 bp, Artificial
  probe
  misc_feature (1)..(25): SEQ ID NO: 4531; WAN024ANH; Start 26; Stop 50
ccagattattcttattagtagggtc

SEQ ID NO: 384843 - DNA, 25 bp, Artificial
  probe
  misc_feature (1)..(25): SEQ ID NO: 4531; WAN024ANH; Start 23; Stop 47
gtcccagattattcttattagtagg

SEQ ID NO: 384844 - DNA, 25 bp, Artificial
  probe
  misc_feature (1)..(25): SEQ ID NO: 4531; WAN024ANH; Start 75; Stop 99
taacaagaccttgagcattttagaa

SEQ ID NO: 384845 - DNA, 25 bp, Artificial
  probe
  misc_feature (1)..(25): SEQ ID NO: 4532; WAN024AR7; Start 119; Stop 143
gaatagttgataaacagggaactgc

SEQ ID NO: 384846 - DNA, 25 bp, Artificial
  probe
  misc_feature (1)..(25): SEQ ID NO: 4532; WAN024AR7; Start 120; Stop 144
aatagttgataaacagggaactgct

SEQ ID NO: 384847 - DNA, 25 bp, Artificial
  probe
  misc_feature (1)..(25): SEQ ID NO: 4532; WAN024AR7; Start 118; Stop 142
cgaatagttgataaacagggaactg

SEQ ID NO: 384848 - DNA, 25 bp, Artificial
  probe
  misc_feature (1)..(25): SEQ ID NO: 4532; WAN024AR7; Start 121; Stop 145
atagttgataaacagggaactgctg

SEQ ID NO: 384849 - DNA, 25 bp, Artificial
  probe
  misc_feature (1)..(25): SEQ ID NO: 4532; WAN024AR7; Start 87; Stop 111
tgtagggtatgaagcaaaatagaaa

SEQ ID NO: 384850 - DNA, 25 bp, Artificial
  probe
  misc_feature (1)..(25): SEQ ID NO: 4532; WAN024AR7; Start 86; Stop 110
atgtagggtatgaagcaaaatagaa

SEQ ID NO: 384851 - DNA, 25 bp, Artificial
  probe
  misc_feature (1)..(25): SEQ ID NO: 4532; WAN024AR7; Start 90; Stop 114
agggtatgaagcaaaatagaaagta

SEQ ID NO: 384852 - DNA, 25 bp, Artificial
  probe
  misc_feature (1)..(25): SEQ ID NO: 4532; WAN024AR7; Start 89; Stop 113
tagggtatgaagcaaaatagaaagt

SEQ ID NO: 384853 - DNA, 25 bp, Artificial
  probe
  misc_feature (1)..(25): SEQ ID NO: 4532; WAN024AR7; Start 95; Stop 119
atgaagcaaaatagaaagtagttcg

SEQ ID NO: 384854 - DNA, 25 bp, Artificial
  probe
  misc_feature (1)..(25): SEQ ID NO: 4532; WAN024AR7; Start 91; Stop 115
gggtatgaagcaaaatagaaagtag

SEQ ID NO: 384855 - DNA, 25 bp, Artificial
  probe
  misc_feature (1)..(25): SEQ ID NO: 4532; WAN024AR7; Start 88; Stop 112
gtagggtatgaagcaaaatagaaag

SEQ ID NO: 384856 - DNA, 25 bp, Artificial
  probe
  misc_feature (1)..(25): SEQ ID NO: 4532; WAN024AR7; Start 117; Stop 141
tcgaatagttgataaacagggaact

SEQ ID NO: 384857 - DNA, 25 bp, Artificial
  probe
  misc_feature (1)..(25): SEQ ID NO: 4532; WAN024AR7; Start 85; Stop 109
tatgtagggtatgaagcaaaataga

SEQ ID NO: 384858 - DNA, 25 bp, Artificial
  probe
  misc_feature (1)..(25): SEQ ID NO: 4532; WAN024AR7; Start 96; Stop 120
tgaagcaaaatagaaagtagttcga

SEQ ID NO: 384859 - DNA, 25 bp, Artificial
  probe
  misc_feature (1)..(25): SEQ ID NO: 4532; WAN024AR7; Start 92; Stop 116
ggtatgaagcaaaatagaaagtagt

SEQ ID NO: 384860 - DNA, 25 bp, Artificial
  probe
  misc_feature (1)..(25): SEQ ID NO: 4532; WAN024AR7; Start 114; Stop 138
agttcgaatagttgataaacaggga

SEQ ID NO: 384861 - DNA, 25 bp, Artificial
  probe
  misc_feature (1)..(25): SEQ ID NO: 4532; WAN024AR7; Start 116; Stop 140
ttcgaatagttgataaacagggaac

SEQ ID NO: 384862 - DNA, 25 bp, Artificial
  probe
  misc_feature (1)..(25): SEQ ID NO: 4532; WAN024AR7; Start 115; Stop 139
gttcgaatagttgataaacagggaa

SEQ ID NO: 384863 - DNA, 25 bp, Artificial
  probe
  misc_feature (1)..(25): SEQ ID NO: 4532; WAN024AR7; Start 113; Stop 137
tagttcgaatagttgataaacaggg

SEQ ID NO: 384864 - DNA, 25 bp, Artificial
  probe
  misc_feature (1)..(25): SEQ ID NO: 4532; WAN024AR7; Start 83; Stop 107
gctatgtagggtatgaagcaaaata

SEQ ID NO: 384865 - DNA, 25 bp, Artificial
  probe
  misc_feature (1)..(25): SEQ ID NO: 4532; WAN024AR7; Start 84; Stop 108
ctatgtagggtatgaagcaaaatag

SEQ ID NO: 384866 - DNA, 25 bp, Artificial
  probe
  misc_feature (1)..(25): SEQ ID NO: 4532; WAN024AR7; Start 122; Stop 146
tagttgataaacagggaactgctgt

SEQ ID NO: 384867 - DNA, 25 bp, Artificial
  probe
  misc_feature (1)..(25): SEQ ID NO: 4532; WAN024AR7; Start 112; Stop 136
gtagttcgaatagttgataaacagg

SEQ ID NO: 384868 - DNA, 25 bp, Artificial
  probe
  misc_feature (1)..(25): SEQ ID NO: 4532; WAN024AR7; Start 93; Stop 117
gtatgaagcaaaatagaaagtagtt

SEQ ID NO: 384869 - DNA, 25 bp, Artificial
  probe
  misc_feature (1)..(25): SEQ ID NO: 4532; WAN024AR7; Start 111; Stop 135
agtagttcgaatagttgataaacag

SEQ ID NO: 384870 - DNA, 25 bp, Artificial
  probe
  misc_feature (1)..(25): SEQ ID NO: 4532; WAN024AR7; Start 94; Stop 118
tatgaagcaaaatagaaagtagttc

SEQ ID NO: 384871 - DNA, 25 bp, Artificial
  probe
  misc_feature (1)..(25): SEQ ID NO: 4532; WAN024AR7; Start 110; Stop 134
aagtagttcgaatagttgataaaca

SEQ ID NO: 384872 - DNA, 25 bp, Artificial
  probe
  misc_feature (1)..(25): SEQ ID NO: 4532; WAN024AR7; Start 97; Stop 121
gaagcaaaatagaaagtagttcgaa

SEQ ID NO: 384873 - DNA, 25 bp, Artificial
  probe
  misc_feature (1)..(25): SEQ ID NO: 4532; WAN024AR7; Start 107; Stop 131
agaaagtagttcgaatagttgataa

SEQ ID NO: 384874 - DNA, 25 bp, Artificial
  probe
  misc_feature (1)..(25): SEQ ID NO: 4532; WAN024AR7; Start 104; Stop 128
aatagaaagtagttcgaatagttga

SEQ ID NO: 384875 - DNA, 25 bp, Artificial
  probe
  misc_feature (1)..(25): SEQ ID NO: 4532; WAN024AR7; Start 98; Stop 122
aagcaaaatagaaagtagttcgaat

SEQ ID NO: 384876 - DNA, 25 bp, Artificial
  probe
  misc_feature (1)..(25): SEQ ID NO: 4532; WAN024AR7; Start 105; Stop 129
atagaaagtagttcgaatagttgat

SEQ ID NO: 384877 - DNA, 25 bp, Artificial
  probe
  misc_feature (1)..(25): SEQ ID NO: 4532; WAN024AR7; Start 109; Stop 133
aaagtagttcgaatagttgataaac

SEQ ID NO: 384878 - DNA, 25 bp, Artificial
  probe
  misc_feature (1)..(25): SEQ ID NO: 4533; WAN024AH3; Start 47; Stop 71
tattgatataaaagaagggaggcca

SEQ ID NO: 384879 - DNA, 25 bp, Artificial
  probe
  misc_feature (1)..(25): SEQ ID NO: 4533; WAN024AH3; Start 49; Stop 73
ttgatataaaagaagggaggccaat

SEQ ID NO: 384880 - DNA, 25 bp, Artificial
  probe
  misc_feature (1)..(25): SEQ ID NO: 4533; WAN024AH3; Start 48; Stop 72
attgatataaaagaagggaggccaa

SEQ ID NO: 384881 - DNA, 25 bp, Artificial
  probe
  misc_feature (1)..(25): SEQ ID NO: 4533; WAN024AH3; Start 45; Stop 69
aatattgatataaaagaagggaggc

SEQ ID NO: 384882 - DNA, 25 bp, Artificial
  probe
  misc_feature (1)..(25): SEQ ID NO: 4533; WAN024AH3; Start 46; Stop 70
atattgatataaaagaagggaggcc

SEQ ID NO: 384883 - DNA, 25 bp, Artificial
  probe
  misc_feature (1)..(25): SEQ ID NO: 4534; WAN0249VN; Start 25; Stop 49
agtatctcctcaatcttcacaagga

SEQ ID NO: 384884 - DNA, 25 bp, Artificial
  probe
  misc_feature (1)..(25): SEQ ID NO: 4535; WAN024AAD; Start 35; Stop 59
agtctattattcctttcgttccaag

SEQ ID NO: 384885 - DNA, 25 bp, Artificial
  probe
  misc_feature (1)..(25): SEQ ID NO: 4535; WAN024AAD; Start 34; Stop 58
aagtctattattcctttcgttccaa

SEQ ID NO: 384886 - DNA, 25 bp, Artificial
  probe
  misc_feature (1)..(25): SEQ ID NO: 4535; WAN024AAD; Start 23; Stop 47
tgtttcgcagaaagtctattattcc

SEQ ID NO: 384887 - DNA, 25 bp, Artificial
  probe
  misc_feature (1)..(25): SEQ ID NO: 4535; WAN024AAD; Start 24; Stop 48
gtttcgcagaaagtctattattcct

SEQ ID NO: 384888 - DNA, 25 bp, Artificial
  probe
  misc_feature (1)..(25): SEQ ID NO: 4535; WAN024AAD; Start 26; Stop 50
ttcgcagaaagtctattattccttt

SEQ ID NO: 384889 - DNA, 25 bp, Artificial
  probe
  misc_feature (1)..(25): SEQ ID NO: 4535; WAN024AAD; Start 25; Stop 49
tttcgcagaaagtctattattcctt

SEQ ID NO: 384890 - DNA, 25 bp, Artificial
  probe
  misc_feature (1)..(25): SEQ ID NO: 4535; WAN024AAD; Start 33; Stop 57
aaagtctattattcctttcgttcca

SEQ ID NO: 384891 - DNA, 25 bp, Artificial
  probe
  misc_feature (1)..(25): SEQ ID NO: 4535; WAN024AAD; Start 22; Stop 46
ttgtttcgcagaaagtctattattc

SEQ ID NO: 384892 - DNA, 25 bp, Artificial
  probe
  misc_feature (1)..(25): SEQ ID NO: 4535; WAN024AAD; Start 21; Stop 45
tttgtttcgcagaaagtctattatt

SEQ ID NO: 384893 - DNA, 25 bp, Artificial
  probe
  misc_feature (1)..(25): SEQ ID NO: 4535; WAN024AAD; Start 37; Stop 61
tctattattcctttcgttccaaggt

SEQ ID NO: 384894 - DNA, 25 bp, Artificial
  probe
  misc_feature (1)..(25): SEQ ID NO: 4535; WAN024AAD; Start 36; Stop 60
gtctattattcctttcgttccaagg

SEQ ID NO: 384895 - DNA, 25 bp, Artificial
  probe
  misc_feature (1)..(25): SEQ ID NO: 4535; WAN024AAD; Start 38; Stop 62
ctattattcctttcgttccaaggtt

SEQ ID NO: 384896 - DNA, 25 bp, Artificial
  probe
  misc_feature (1)..(25): SEQ ID NO: 4535; WAN024AAD; Start 39; Stop 63
tattattcctttcgttccaaggttt

SEQ ID NO: 384897 - DNA, 25 bp, Artificial
  probe
  misc_feature (1)..(25): SEQ ID NO: 4535; WAN024AAD; Start 20; Stop 44
ttttgtttcgcagaaagtctattat

SEQ ID NO: 384898 - DNA, 25 bp, Artificial
  probe
  misc_feature (1)..(25): SEQ ID NO: 4535; WAN024AAD; Start 72; Stop 96
ttagcaacaagcttacacactccac

SEQ ID NO: 384899 - DNA, 25 bp, Artificial
  probe
  misc_feature (1)..(25): SEQ ID NO: 4535; WAN024AAD; Start 40; Stop 64
attattcctttcgttccaaggtttt

SEQ ID NO: 384900 - DNA, 25 bp, Artificial
  probe
  misc_feature (1)..(25): SEQ ID NO: 4535; WAN024AAD; Start 71; Stop 95
tttagcaacaagcttacacactcca

SEQ ID NO: 384901 - DNA, 25 bp, Artificial
  probe
  misc_feature (1)..(25): SEQ ID NO: 4535; WAN024AAD; Start 69; Stop 93
cttttagcaacaagcttacacactc

SEQ ID NO: 384902 - DNA, 25 bp, Artificial
  probe
  misc_feature (1)..(25): SEQ ID NO: 4535; WAN024AAD; Start 70; Stop 94
ttttagcaacaagcttacacactcc

SEQ ID NO: 384903 - DNA, 25 bp, Artificial
  probe
  misc_feature (1)..(25): SEQ ID NO: 4535; WAN024AAD; Start 62; Stop 86
ttttacgcttttagcaacaagctta

SEQ ID NO: 384904 - DNA, 25 bp, Artificial
  probe
  misc_feature (1)..(25): SEQ ID NO: 4535; WAN024AAD; Start 63; Stop 87
tttacgcttttagcaacaagcttac

SEQ ID NO: 384905 - DNA, 25 bp, Artificial
  probe
  misc_feature (1)..(25): SEQ ID NO: 4535; WAN024AAD; Start 64; Stop 88
ttacgcttttagcaacaagcttaca

SEQ ID NO: 384906 - DNA, 25 bp, Artificial
  probe
  misc_feature (1)..(25): SEQ ID NO: 4535; WAN024AAD; Start 65; Stop 89
tacgcttttagcaacaagcttacac

SEQ ID NO: 384907 - DNA, 25 bp, Artificial
  probe
  misc_feature (1)..(25): SEQ ID NO: 4535; WAN024AAD; Start 68; Stop 92
gcttttagcaacaagcttacacact

SEQ ID NO: 384908 - DNA, 25 bp, Artificial
  probe
  misc_feature (1)..(25): SEQ ID NO: 4535; WAN024AAD; Start 67; Stop 91
cgcttttagcaacaagcttacacac

SEQ ID NO: 384909 - DNA, 25 bp, Artificial
  probe
  misc_feature (1)..(25): SEQ ID NO: 4535; WAN024AAD; Start 66; Stop 90
acgcttttagcaacaagcttacaca

SEQ ID NO: 384910 - DNA, 25 bp, Artificial
  probe
  misc_feature (1)..(25): SEQ ID NO: 4536; WAN024ARF; Start 25; Stop 49
agtttgtttagcatattgaggtgac

SEQ ID NO: 384911 - DNA, 25 bp, Artificial
  probe
  misc_feature (1)..(25): SEQ ID NO: 4536; WAN024ARF; Start 24; Stop 48
cagtttgtttagcatattgaggtga

SEQ ID NO: 384912 - DNA, 25 bp, Artificial
  probe
  misc_feature (1)..(25): SEQ ID NO: 4536; WAN024ARF; Start 23; Stop 47
tcagtttgtttagcatattgaggtg

SEQ ID NO: 384913 - DNA, 25 bp, Artificial
  probe
  misc_feature (1)..(25): SEQ ID NO: 4536; WAN024ARF; Start 26; Stop 50
gtttgtttagcatattgaggtgaca

SEQ ID NO: 384914 - DNA, 25 bp, Artificial
  probe
  misc_feature (1)..(25): SEQ ID NO: 4536; WAN024ARF; Start 27; Stop 51
tttgtttagcatattgaggtgacat

SEQ ID NO: 384915 - DNA, 25 bp, Artificial
  probe
  misc_feature (1)..(25): SEQ ID NO: 4536; WAN024ARF; Start 19; Stop 43
attctcagtttgtttagcatattga

SEQ ID NO: 384916 - DNA, 25 bp, Artificial
  probe
  misc_feature (1)..(25): SEQ ID NO: 4536; WAN024ARF; Start 14; Stop 38
agattattctcagtttgtttagcat

SEQ ID NO: 384917 - DNA, 25 bp, Artificial
  probe
  misc_feature (1)..(25): SEQ ID NO: 4536; WAN024ARF; Start 18; Stop 42
tattctcagtttgtttagcatattg

SEQ ID NO: 384918 - DNA, 25 bp, Artificial
  probe
  misc_feature (1)..(25): SEQ ID NO: 4536; WAN024ARF; Start 22; Stop 46
ctcagtttgtttagcatattgaggt

SEQ ID NO: 384919 - DNA, 25 bp, Artificial
  probe
  misc_feature (1)..(25): SEQ ID NO: 4536; WAN024ARF; Start 21; Stop 45
tctcagtttgtttagcatattgagg

SEQ ID NO: 384920 - DNA, 25 bp, Artificial
  probe
  misc_feature (1)..(25): SEQ ID NO: 4536; WAN024ARF; Start 15; Stop 39
gattattctcagtttgtttagcata

SEQ ID NO: 384921 - DNA, 25 bp, Artificial
  probe
  misc_feature (1)..(25): SEQ ID NO: 4536; WAN024ARF; Start 13; Stop 37
gagattattctcagtttgtttagca

SEQ ID NO: 384922 - DNA, 25 bp, Artificial
  probe
  misc_feature (1)..(25): SEQ ID NO: 4536; WAN024ARF; Start 20; Stop 44
ttctcagtttgtttagcatattgag

SEQ ID NO: 384923 - DNA, 25 bp, Artificial
  probe
  misc_feature (1)..(25): SEQ ID NO: 4536; WAN024ARF; Start 17; Stop 41
ttattctcagtttgtttagcatatt

SEQ ID NO: 384924 - DNA, 25 bp, Artificial
  probe
  misc_feature (1)..(25): SEQ ID NO: 4537; WAN0249RC; Start 19; Stop 43
tcaaatatcttgctagggctttcat

SEQ ID NO: 384925 - DNA, 25 bp, Artificial
  probe
  misc_feature (1)..(25): SEQ ID NO: 4537; WAN0249RC; Start 20; Stop 44
caaatatcttgctagggctttcatt

SEQ ID NO: 384926 - DNA, 25 bp, Artificial
  probe
  misc_feature (1)..(25): SEQ ID NO: 4537; WAN0249RC; Start 18; Stop 42
gtcaaatatcttgctagggctttca

SEQ ID NO: 384927 - DNA, 25 bp, Artificial
  probe
  misc_feature (1)..(25): SEQ ID NO: 4537; WAN0249RC; Start 21; Stop 45
aaatatcttgctagggctttcattt

SEQ ID NO: 384928 - DNA, 25 bp, Artificial
  probe
  misc_feature (1)..(25): SEQ ID NO: 4537; WAN0249RC; Start 17; Stop 41
ggtcaaatatcttgctagggctttc

SEQ ID NO: 384929 - DNA, 25 bp, Artificial
  probe
  misc_feature (1)..(25): SEQ ID NO: 4537; WAN0249RC; Start 72; Stop 96
taatagagacatttggggtgcttta

SEQ ID NO: 384930 - DNA, 25 bp, Artificial
  probe
  misc_feature (1)..(25): SEQ ID NO: 4537; WAN0249RC; Start 71; Stop 95
ataatagagacatttggggtgcttt

SEQ ID NO: 384931 - DNA, 25 bp, Artificial
  probe
  misc_feature (1)..(25): SEQ ID NO: 4537; WAN0249RC; Start 70; Stop 94
aataatagagacatttggggtgctt

SEQ ID NO: 384932 - DNA, 25 bp, Artificial
  probe
  misc_feature (1)..(25): SEQ ID NO: 4537; WAN0249RC; Start 16; Stop 40
cggtcaaatatcttgctagggcttt

SEQ ID NO: 384933 - DNA, 25 bp, Artificial
  probe
  misc_feature (1)..(25): SEQ ID NO: 4537; WAN0249RC; Start 13; Stop 37
tttcggtcaaatatcttgctagggc

SEQ ID NO: 384934 - DNA, 25 bp, Artificial
  probe
  misc_feature (1)..(25): SEQ ID NO: 4537; WAN0249RC; Start 22; Stop 46
aatatcttgctagggctttcatttt

SEQ ID NO: 384935 - DNA, 25 bp, Artificial
  probe
  misc_feature (1)..(25): SEQ ID NO: 4537; WAN0249RC; Start 69; Stop 93
aaataatagagacatttggggtgct

SEQ ID NO: 384936 - DNA, 25 bp, Artificial
  probe
  misc_feature (1)..(25): SEQ ID NO: 4537; WAN0249RC; Start 12; Stop 36
ttttcggtcaaatatcttgctaggg

SEQ ID NO: 384937 - DNA, 25 bp, Artificial
  probe
  misc_feature (1)..(25): SEQ ID NO: 4537; WAN0249RC; Start 68; Stop 92
taaataatagagacatttggggtgc

SEQ ID NO: 384938 - DNA, 25 bp, Artificial
  probe
  misc_feature (1)..(25): SEQ ID NO: 4537; WAN0249RC; Start 15; Stop 39
tcggtcaaatatcttgctagggctt

SEQ ID NO: 384939 - DNA, 25 bp, Artificial
  probe
  misc_feature (1)..(25): SEQ ID NO: 4537; WAN0249RC; Start 14; Stop 38
ttcggtcaaatatcttgctagggct

SEQ ID NO: 384940 - DNA, 25 bp, Artificial
  probe
  misc_feature (1)..(25): SEQ ID NO: 4537; WAN0249RC; Start 67; Stop 91
ttaaataatagagacatttggggtg

SEQ ID NO: 384941 - DNA, 25 bp, Artificial
  probe
  misc_feature (1)..(25): SEQ ID NO: 4538; WAN024A7U; Start 137; Stop 161
tgtaaaattcttgacaagcaatatt

SEQ ID NO: 384942 - DNA, 25 bp, Artificial
  probe
  misc_feature (1)..(25): SEQ ID NO: 4538; WAN024A7U; Start 50; Stop 74
aatattgcttgtcaagaattttaca

SEQ ID NO: 384943 - DNA, 25 bp, Artificial
  probe
  misc_feature (1)..(25): SEQ ID NO: 4538; WAN024A7U; Start 136; Stop 160
atgtaaaattcttgacaagcaatat

SEQ ID NO: 384944 - DNA, 25 bp, Artificial
  probe
  misc_feature (1)..(25): SEQ ID NO: 4538; WAN024A7U; Start 134; Stop 158
atatgtaaaattcttgacaagcaat

SEQ ID NO: 384945 - DNA, 25 bp, Artificial
  probe
  misc_feature (1)..(25): SEQ ID NO: 4538; WAN024A7U; Start 53; Stop 77
attgcttgtcaagaattttacatat

SEQ ID NO: 384946 - DNA, 25 bp, Artificial
  probe
  misc_feature (1)..(25): SEQ ID NO: 4538; WAN024A7U; Start 51; Stop 75
atattgcttgtcaagaattttacat

SEQ ID NO: 384947 - DNA, 25 bp, Artificial
  probe
  misc_feature (1)..(25): SEQ ID NO: 4538; WAN024A7U; Start 135; Stop 159
tatgtaaaattcttgacaagcaata

SEQ ID NO: 384948 - DNA, 25 bp, Artificial
  probe
  misc_feature (1)..(25): SEQ ID NO: 4538; WAN024A7U; Start 133; Stop 157
tatatgtaaaattcttgacaagcaa

SEQ ID NO: 384949 - DNA, 25 bp, Artificial
  probe
  misc_feature (1)..(25): SEQ ID NO: 4538; WAN024A7U; Start 54; Stop 78
ttgcttgtcaagaattttacatata

SEQ ID NO: 384950 - DNA, 25 bp, Artificial
  probe
  misc_feature (1)..(25): SEQ ID NO: 4538; WAN024A7U; Start 52; Stop 76
tattgcttgtcaagaattttacata

SEQ ID NO: 384951 - DNA, 25 bp, Artificial
  probe
  misc_feature (1)..(25): SEQ ID NO: 4538; WAN024A7U; Start 132; Stop 156
atatatgtaaaattcttgacaagca

SEQ ID NO: 384952 - DNA, 25 bp, Artificial
  probe
  misc_feature (1)..(25): SEQ ID NO: 4538; WAN024A7U; Start 55; Stop 79
tgcttgtcaagaattttacatatat

SEQ ID NO: 384953 - DNA, 25 bp, Artificial
  probe
  misc_feature (1)..(25): SEQ ID NO: 4539; WAN0249O4; Start 95; Stop 119
tccaacaccaattttacaaatacca

SEQ ID NO: 384954 - DNA, 25 bp, Artificial
  probe
  misc_feature (1)..(25): SEQ ID NO: 4539; WAN0249O4; Start 96; Stop 120
ccaacaccaattttacaaataccat

SEQ ID NO: 384955 - DNA, 25 bp, Artificial
  probe
  misc_feature (1)..(25): SEQ ID NO: 4539; WAN0249O4; Start 94; Stop 118
atccaacaccaattttacaaatacc

SEQ ID NO: 384956 - DNA, 25 bp, Artificial
  probe
  misc_feature (1)..(25): SEQ ID NO: 4539; WAN0249O4; Start 89; Stop 113
tcataatccaacaccaattttacaa

SEQ ID NO: 384957 - DNA, 25 bp, Artificial
  probe
  misc_feature (1)..(25): SEQ ID NO: 4539; WAN0249O4; Start 150; Stop 174
aagtcctctttccactattttagaa

SEQ ID NO: 384958 - DNA, 25 bp, Artificial
  probe
  misc_feature (1)..(25): SEQ ID NO: 4539; WAN0249O4; Start 88; Stop 112
atcataatccaacaccaattttaca

SEQ ID NO: 384959 - DNA, 25 bp, Artificial
  probe
  misc_feature (1)..(25): SEQ ID NO: 4539; WAN0249O4; Start 90; Stop 114
cataatccaacaccaattttacaaa

SEQ ID NO: 384960 - DNA, 25 bp, Artificial
  probe
  misc_feature (1)..(25): SEQ ID NO: 4539; WAN0249O4; Start 84; Stop 108
ttaaatcataatccaacaccaattt

SEQ ID NO: 384961 - DNA, 25 bp, Artificial
  probe
  misc_feature (1)..(25): SEQ ID NO: 4539; WAN0249O4; Start 93; Stop 117
aatccaacaccaattttacaaatac

SEQ ID NO: 384962 - DNA, 25 bp, Artificial
  probe
  misc_feature (1)..(25): SEQ ID NO: 4539; WAN0249O4; Start 87; Stop 111
aatcataatccaacaccaattttac

SEQ ID NO: 384963 - DNA, 25 bp, Artificial
  probe
  misc_feature (1)..(25): SEQ ID NO: 4539; WAN0249O4; Start 151; Stop 175
agtcctctttccactattttagaaa

SEQ ID NO: 384964 - DNA, 25 bp, Artificial
  probe
  misc_feature (1)..(25): SEQ ID NO: 4539; WAN0249O4; Start 149; Stop 173
aaagtcctctttccactattttaga

SEQ ID NO: 384965 - DNA, 25 bp, Artificial
  probe
  misc_feature (1)..(25): SEQ ID NO: 4539; WAN0249O4; Start 159; Stop 183
ttccactattttagaaagagaactt

SEQ ID NO: 384966 - DNA, 25 bp, Artificial
  probe
  misc_feature (1)..(25): SEQ ID NO: 4539; WAN0249O4; Start 97; Stop 121
caacaccaattttacaaataccata

SEQ ID NO: 384967 - DNA, 25 bp, Artificial
  probe
  misc_feature (1)..(25): SEQ ID NO: 4539; WAN0249O4; Start 148; Stop 172
aaaagtcctctttccactattttag

SEQ ID NO: 384968 - DNA, 25 bp, Artificial
  probe
  misc_feature (1)..(25): SEQ ID NO: 4539; WAN0249O4; Start 91; Stop 115
ataatccaacaccaattttacaaat

SEQ ID NO: 384969 - DNA, 25 bp, Artificial
  probe
  misc_feature (1)..(25): SEQ ID NO: 4539; WAN0249O4; Start 86; Stop 110
aaatcataatccaacaccaatttta

SEQ ID NO: 384970 - DNA, 25 bp, Artificial
  probe
  misc_feature (1)..(25): SEQ ID NO: 4539; WAN0249O4; Start 85; Stop 109
taaatcataatccaacaccaatttt

SEQ ID NO: 384971 - DNA, 25 bp, Artificial
  probe
  misc_feature (1)..(25): SEQ ID NO: 4539; WAN0249O4; Start 99; Stop 123
acaccaattttacaaataccataaa

SEQ ID NO: 384972 - DNA, 25 bp, Artificial
  probe
  misc_feature (1)..(25): SEQ ID NO: 4539; WAN0249O4; Start 98; Stop 122
aacaccaattttacaaataccataa

SEQ ID NO: 384973 - DNA, 25 bp, Artificial
  probe
  misc_feature (1)..(25): SEQ ID NO: 4539; WAN0249O4; Start 100; Stop 124
caccaattttacaaataccataaac

SEQ ID NO: 384974 - DNA, 25 bp, Artificial
  probe
  misc_feature (1)..(25): SEQ ID NO: 4539; WAN0249O4; Start 160; Stop 184
tccactattttagaaagagaacttt

SEQ ID NO: 384975 - DNA, 25 bp, Artificial
  probe
  misc_feature (1)..(25): SEQ ID NO: 4539; WAN0249O4; Start 158; Stop 182
tttccactattttagaaagagaact

SEQ ID NO: 384976 - DNA, 25 bp, Artificial
  probe
  misc_feature (1)..(25): SEQ ID NO: 4539; WAN0249O4; Start 101; Stop 125
accaattttacaaataccataaact

SEQ ID NO: 384977 - DNA, 25 bp, Artificial
  probe
  misc_feature (1)..(25): SEQ ID NO: 4539; WAN0249O4; Start 92; Stop 116
taatccaacaccaattttacaaata

SEQ ID NO: 384978 - DNA, 25 bp, Artificial
  probe
  misc_feature (1)..(25): SEQ ID NO: 4539; WAN0249O4; Start 126; Stop 150
aagcttatatacccaaaacacaaaa

SEQ ID NO: 384979 - DNA, 25 bp, Artificial
  probe
  misc_feature (1)..(25): SEQ ID NO: 4539; WAN0249O4; Start 161; Stop 185
ccactattttagaaagagaactttt

SEQ ID NO: 384980 - DNA, 25 bp, Artificial
  probe
  misc_feature (1)..(25): SEQ ID NO: 4540; WAN0249OB; Start 73; Stop 97
ggttctaagggaagccaatttattc

SEQ ID NO: 384981 - DNA, 25 bp, Artificial
  probe
  misc_feature (1)..(25): SEQ ID NO: 4540; WAN0249OB; Start 74; Stop 98
gttctaagggaagccaatttattca

SEQ ID NO: 384982 - DNA, 25 bp, Artificial
  probe
  misc_feature (1)..(25): SEQ ID NO: 4540; WAN0249OB; Start 78; Stop 102
taagggaagccaatttattcatacc

SEQ ID NO: 384983 - DNA, 25 bp, Artificial
  probe
  misc_feature (1)..(25): SEQ ID NO: 4540; WAN0249OB; Start 81; Stop 105
gggaagccaatttattcatacctat

SEQ ID NO: 384984 - DNA, 25 bp, Artificial
  probe
  misc_feature (1)..(25): SEQ ID NO: 4540; WAN0249OB; Start 75; Stop 99
ttctaagggaagccaatttattcat

SEQ ID NO: 384985 - DNA, 25 bp, Artificial
  probe
  misc_feature (1)..(25): SEQ ID NO: 4540; WAN0249OB; Start 79; Stop 103
aagggaagccaatttattcatacct

SEQ ID NO: 384986 - DNA, 25 bp, Artificial
  probe
  misc_feature (1)..(25): SEQ ID NO: 4540; WAN0249OB; Start 80; Stop 104
agggaagccaatttattcataccta

SEQ ID NO: 384987 - DNA, 25 bp, Artificial
  probe
  misc_feature (1)..(25): SEQ ID NO: 4540; WAN0249OB; Start 77; Stop 101
ctaagggaagccaatttattcatac

SEQ ID NO: 384988 - DNA, 25 bp, Artificial
  probe
  misc_feature (1)..(25): SEQ ID NO: 4540; WAN0249OB; Start 76; Stop 100
tctaagggaagccaatttattcata

SEQ ID NO: 384989 - DNA, 25 bp, Artificial
  probe
  misc_feature (1)..(25): SEQ ID NO: 4540; WAN0249OB; Start 72; Stop 96
tggttctaagggaagccaatttatt

SEQ ID NO: 384990 - DNA, 25 bp, Artificial
  probe
  misc_feature (1)..(25): SEQ ID NO: 4540; WAN0249OB; Start 71; Stop 95
gtggttctaagggaagccaatttat

SEQ ID NO: 384991 - DNA, 25 bp, Artificial
  probe
  misc_feature (1)..(25): SEQ ID NO: 4540; WAN0249OB; Start 82; Stop 106
ggaagccaatttattcatacctatt

SEQ ID NO: 384992 - DNA, 25 bp, Artificial
  probe
  misc_feature (1)..(25): SEQ ID NO: 4540; WAN0249OB; Start 70; Stop 94
tgtggttctaagggaagccaattta

SEQ ID NO: 384993 - DNA, 25 bp, Artificial
  probe
  misc_feature (1)..(25): SEQ ID NO: 4540; WAN0249OB; Start 14; Stop 38
acacgtattgtaaaggagtgatact

SEQ ID NO: 384994 - DNA, 25 bp, Artificial
  probe
  misc_feature (1)..(25): SEQ ID NO: 4540; WAN0249OB; Start 15; Stop 39
cacgtattgtaaaggagtgatactt

SEQ ID NO: 384995 - DNA, 25 bp, Artificial
  probe
  misc_feature (1)..(25): SEQ ID NO: 4540; WAN0249OB; Start 69; Stop 93
atgtggttctaagggaagccaattt

SEQ ID NO: 384996 - DNA, 25 bp, Artificial
  probe
  misc_feature (1)..(25): SEQ ID NO: 4540; WAN0249OB; Start 68; Stop 92
gatgtggttctaagggaagccaatt

SEQ ID NO: 384997 - DNA, 25 bp, Artificial
  probe
  misc_feature (1)..(25): SEQ ID NO: 4540; WAN0249OB; Start 66; Stop 90
tagatgtggttctaagggaagccaa

SEQ ID NO: 384998 - DNA, 25 bp, Artificial
  probe
  misc_feature (1)..(25): SEQ ID NO: 4540; WAN0249OB; Start 13; Stop 37
tacacgtattgtaaaggagtgatac

SEQ ID NO: 384999 - DNA, 25 bp, Artificial
  probe
  misc_feature (1)..(25): SEQ ID NO: 4540; WAN0249OB; Start 55; Stop 79
ataaaagcccctagatgtggttcta

SEQ ID NO: 385000 - DNA, 25 bp, Artificial
  probe
  misc_feature (1)..(25): SEQ ID NO: 4540; WAN0249OB; Start 56; Stop 80
taaaagcccctagatgtggttctaa

SEQ ID NO: 385001 - DNA, 25 bp, Artificial
  probe
  misc_feature (1)..(25): SEQ ID NO: 4540; WAN0249OB; Start 17; Stop 41
cgtattgtaaaggagtgatacttat

SEQ ID NO: 385002 - DNA, 25 bp, Artificial
  probe
  misc_feature (1)..(25): SEQ ID NO: 4540; WAN0249OB; Start 54; Stop 78
cataaaagcccctagatgtggttct

SEQ ID NO: 385003 - DNA, 25 bp, Artificial
  probe
  misc_feature (1)..(25): SEQ ID NO: 4540; WAN0249OB; Start 16; Stop 40
acgtattgtaaaggagtgatactta

SEQ ID NO: 385004 - DNA, 25 bp, Artificial
  probe
  misc_feature (1)..(25): SEQ ID NO: 4540; WAN0249OB; Start 65; Stop 89
ctagatgtggttctaagggaagcca

SEQ ID NO: 385005 - DNA, 25 bp, Artificial
  probe
  misc_feature (1)..(25): SEQ ID NO: 4540; WAN0249OB; Start 67; Stop 91
agatgtggttctaagggaagccaat

SEQ ID NO: 385006 - DNA, 25 bp, Artificial
  probe
  misc_feature (1)..(25): SEQ ID NO: 4540; WAN0249OB; Start 83; Stop 107
gaagccaatttattcatacctattt

SEQ ID NO: 385007 - DNA, 25 bp, Artificial
  probe
  misc_feature (1)..(25): SEQ ID NO: 4540; WAN0249OB; Start 57; Stop 81
aaaagcccctagatgtggttctaag

SEQ ID NO: 385008 - DNA, 25 bp, Artificial
  probe
  misc_feature (1)..(25): SEQ ID NO: 4540; WAN0249OB; Start 64; Stop 88
cctagatgtggttctaagggaagcc

SEQ ID NO: 385009 - DNA, 25 bp, Artificial
  probe
  misc_feature (1)..(25): SEQ ID NO: 4540; WAN0249OB; Start 50; Stop 74
tatacataaaagcccctagatgtgg

SEQ ID NO: 385010 - DNA, 25 bp, Artificial
  probe
  misc_feature (1)..(25): SEQ ID NO: 4540; WAN0249OB; Start 51; Stop 75
atacataaaagcccctagatgtggt

SEQ ID NO: 385011 - DNA, 25 bp, Artificial
  probe
  misc_feature (1)..(25): SEQ ID NO: 4540; WAN0249OB; Start 52; Stop 76
tacataaaagcccctagatgtggtt

SEQ ID NO: 385012 - DNA, 25 bp, Artificial
  probe
  misc_feature (1)..(25): SEQ ID NO: 4540; WAN0249OB; Start 49; Stop 73
ttatacataaaagcccctagatgtg

SEQ ID NO: 385013 - DNA, 25 bp, Artificial
  probe
  misc_feature (1)..(25): SEQ ID NO: 4541; WAN024A4T; Start 67; Stop 91
aatcagacgattcgctcttcttaaa

SEQ ID NO: 385014 - DNA, 25 bp, Artificial
  probe
  misc_feature (1)..(25): SEQ ID NO: 4541; WAN024A4T; Start 69; Stop 93
tcagacgattcgctcttcttaaaat

SEQ ID NO: 385015 - DNA, 25 bp, Artificial
  probe
  misc_feature (1)..(25): SEQ ID NO: 4541; WAN024A4T; Start 68; Stop 92
atcagacgattcgctcttcttaaaa

SEQ ID NO: 385016 - DNA, 25 bp, Artificial
  probe
  misc_feature (1)..(25): SEQ ID NO: 4541; WAN024A4T; Start 77; Stop 101
ttcgctcttcttaaaatctgaaaat

SEQ ID NO: 385017 - DNA, 25 bp, Artificial
  probe
  misc_feature (1)..(25): SEQ ID NO: 4541; WAN024A4T; Start 76; Stop 100
attcgctcttcttaaaatctgaaaa

SEQ ID NO: 385018 - DNA, 25 bp, Artificial
  probe
  misc_feature (1)..(25): SEQ ID NO: 4541; WAN024A4T; Start 74; Stop 98
cgattcgctcttcttaaaatctgaa

SEQ ID NO: 385019 - DNA, 25 bp, Artificial
  probe
  misc_feature (1)..(25): SEQ ID NO: 4541; WAN024A4T; Start 72; Stop 96
gacgattcgctcttcttaaaatctg

SEQ ID NO: 385020 - DNA, 25 bp, Artificial
  probe
  misc_feature (1)..(25): SEQ ID NO: 4541; WAN024A4T; Start 71; Stop 95
agacgattcgctcttcttaaaatct

SEQ ID NO: 385021 - DNA, 25 bp, Artificial
  probe
  misc_feature (1)..(25): SEQ ID NO: 4541; WAN024A4T; Start 70; Stop 94
cagacgattcgctcttcttaaaatc

SEQ ID NO: 385022 - DNA, 25 bp, Artificial
  probe
  misc_feature (1)..(25): SEQ ID NO: 4541; WAN024A4T; Start 73; Stop 97
acgattcgctcttcttaaaatctga

SEQ ID NO: 385023 - DNA, 25 bp, Artificial
  probe
  misc_feature (1)..(25): SEQ ID NO: 4541; WAN024A4T; Start 75; Stop 99
gattcgctcttcttaaaatctgaaa

SEQ ID NO: 385024 - DNA, 25 bp, Artificial
  probe
  misc_feature (1)..(25): SEQ ID NO: 4541; WAN024A4T; Start 78; Stop 102
tcgctcttcttaaaatctgaaaata

SEQ ID NO: 385025 - DNA, 25 bp, Artificial
  probe
  misc_feature (1)..(25): SEQ ID NO: 4541; WAN024A4T; Start 79; Stop 103
cgctcttcttaaaatctgaaaatag

SEQ ID NO: 385026 - DNA, 25 bp, Artificial
  probe
  misc_feature (1)..(25): SEQ ID NO: 4541; WAN024A4T; Start 66; Stop 90
gaatcagacgattcgctcttcttaa

SEQ ID NO: 385027 - DNA, 25 bp, Artificial
  probe
  misc_feature (1)..(25): SEQ ID NO: 4541; WAN024A4T; Start 80; Stop 104
gctcttcttaaaatctgaaaatagc

SEQ ID NO: 385028 - DNA, 25 bp, Artificial
  probe
  misc_feature (1)..(25): SEQ ID NO: 4541; WAN024A4T; Start 93; Stop 117
tctgaaaatagctttccagaaagga

SEQ ID NO: 385029 - DNA, 25 bp, Artificial
  probe
  misc_feature (1)..(25): SEQ ID NO: 4541; WAN024A4T; Start 92; Stop 116
atctgaaaatagctttccagaaagg

SEQ ID NO: 385030 - DNA, 25 bp, Artificial
  probe
  misc_feature (1)..(25): SEQ ID NO: 4541; WAN024A4T; Start 91; Stop 115
aatctgaaaatagctttccagaaag

SEQ ID NO: 385031 - DNA, 25 bp, Artificial
  probe
  misc_feature (1)..(25): SEQ ID NO: 4541; WAN024A4T; Start 90; Stop 114
aaatctgaaaatagctttccagaaa

SEQ ID NO: 385032 - DNA, 25 bp, Artificial
  probe
  misc_feature (1)..(25): SEQ ID NO: 4541; WAN024A4T; Start 89; Stop 113
aaaatctgaaaatagctttccagaa

SEQ ID NO: 385033 - DNA, 25 bp, Artificial
  probe
  misc_feature (1)..(25): SEQ ID NO: 4541; WAN024A4T; Start 81; Stop 105
ctcttcttaaaatctgaaaatagct

SEQ ID NO: 385034 - DNA, 25 bp, Artificial
  probe
  misc_feature (1)..(25): SEQ ID NO: 4541; WAN024A4T; Start 87; Stop 111
ttaaaatctgaaaatagctttccag

SEQ ID NO: 385035 - DNA, 25 bp, Artificial
  probe
  misc_feature (1)..(25): SEQ ID NO: 4541; WAN024A4T; Start 86; Stop 110
cttaaaatctgaaaatagctttcca

SEQ ID NO: 385036 - DNA, 25 bp, Artificial
  probe
  misc_feature (1)..(25): SEQ ID NO: 4541; WAN024A4T; Start 85; Stop 109
tcttaaaatctgaaaatagctttcc

SEQ ID NO: 385037 - DNA, 25 bp, Artificial
  probe
  misc_feature (1)..(25): SEQ ID NO: 4541; WAN024A4T; Start 88; Stop 112
taaaatctgaaaatagctttccaga

SEQ ID NO: 385038 - DNA, 25 bp, Artificial
  probe
  misc_feature (1)..(25): SEQ ID NO: 4542; WAN024A2A; Start 28; Stop 52
gttggactagctgagtttactcttt

SEQ ID NO: 385039 - DNA, 25 bp, Artificial
  probe
  misc_feature (1)..(25): SEQ ID NO: 4542; WAN024A2A; Start 30; Stop 54
tggactagctgagtttactctttaa

SEQ ID NO: 385040 - DNA, 25 bp, Artificial
  probe
  misc_feature (1)..(25): SEQ ID NO: 4542; WAN024A2A; Start 29; Stop 53
ttggactagctgagtttactcttta

SEQ ID NO: 385041 - DNA, 25 bp, Artificial
  probe
  misc_feature (1)..(25): SEQ ID NO: 4542; WAN024A2A; Start 27; Stop 51
agttggactagctgagtttactctt

SEQ ID NO: 385042 - DNA, 25 bp, Artificial
  probe
  misc_feature (1)..(25): SEQ ID NO: 4542; WAN024A2A; Start 31; Stop 55
ggactagctgagtttactctttaaa

SEQ ID NO: 385043 - DNA, 25 bp, Artificial
  probe
  misc_feature (1)..(25): SEQ ID NO: 4542; WAN024A2A; Start 25; Stop 49
ttagttggactagctgagtttactc

SEQ ID NO: 385044 - DNA, 25 bp, Artificial
  probe
  misc_feature (1)..(25): SEQ ID NO: 4542; WAN024A2A; Start 24; Stop 48
gttagttggactagctgagtttact

SEQ ID NO: 385045 - DNA, 25 bp, Artificial
  probe
  misc_feature (1)..(25): SEQ ID NO: 4542; WAN024A2A; Start 23; Stop 47
agttagttggactagctgagtttac

SEQ ID NO: 385046 - DNA, 25 bp, Artificial
  probe
  misc_feature (1)..(25): SEQ ID NO: 4542; WAN024A2A; Start 22; Stop 46
cagttagttggactagctgagttta

SEQ ID NO: 385047 - DNA, 25 bp, Artificial
  probe
  misc_feature (1)..(25): SEQ ID NO: 4542; WAN024A2A; Start 26; Stop 50
tagttggactagctgagtttactct

SEQ ID NO: 385048 - DNA, 25 bp, Artificial
  probe
  misc_feature (1)..(25): SEQ ID NO: 4542; WAN024A2A; Start 21; Stop 45
tcagttagttggactagctgagttt

SEQ ID NO: 385049 - DNA, 25 bp, Artificial
  probe
  misc_feature (1)..(25): SEQ ID NO: 4542; WAN024A2A; Start 17; Stop 41
aaactcagttagttggactagctga

SEQ ID NO: 385050 - DNA, 25 bp, Artificial
  probe
  misc_feature (1)..(25): SEQ ID NO: 4542; WAN024A2A; Start 13; Stop 37
aggaaaactcagttagttggactag

SEQ ID NO: 385051 - DNA, 25 bp, Artificial
  probe
  misc_feature (1)..(25): SEQ ID NO: 4542; WAN024A2A; Start 11; Stop 35
aaaggaaaactcagttagttggact

SEQ ID NO: 385052 - DNA, 25 bp, Artificial
  probe
  misc_feature (1)..(25): SEQ ID NO: 4542; WAN024A2A; Start 12; Stop 36
aaggaaaactcagttagttggacta

SEQ ID NO: 385053 - DNA, 25 bp, Artificial
  probe
  misc_feature (1)..(25): SEQ ID NO: 4542; WAN024A2A; Start 10; Stop 34
taaaggaaaactcagttagttggac

SEQ ID NO: 385054 - DNA, 25 bp, Artificial
  probe
  misc_feature (1)..(25): SEQ ID NO: 4542; WAN024A2A; Start 14; Stop 38
ggaaaactcagttagttggactagc

SEQ ID NO: 385055 - DNA, 25 bp, Artificial
  probe
  misc_feature (1)..(25): SEQ ID NO: 4542; WAN024A2A; Start 15; Stop 39
gaaaactcagttagttggactagct

SEQ ID NO: 385056 - DNA, 25 bp, Artificial
  probe
  misc_feature (1)..(25): SEQ ID NO: 4542; WAN024A2A; Start 16; Stop 40
aaaactcagttagttggactagctg

SEQ ID NO: 385057 - DNA, 25 bp, Artificial
  probe
  misc_feature (1)..(25): SEQ ID NO: 4542; WAN024A2A; Start 9; Stop 33
ataaaggaaaactcagttagttgga

SEQ ID NO: 385058 - DNA, 25 bp, Artificial
  probe
  misc_feature (1)..(25): SEQ ID NO: 4542; WAN024A2A; Start 8; Stop 32
gataaaggaaaactcagttagttgg

SEQ ID NO: 385059 - DNA, 25 bp, Artificial
  probe
  misc_feature (1)..(25): SEQ ID NO: 4542; WAN024A2A; Start 32; Stop 56
gactagctgagtttactctttaaaa

SEQ ID NO: 385060 - DNA, 25 bp, Artificial
  probe
  misc_feature (1)..(25): SEQ ID NO: 4542; WAN024A2A; Start 7; Stop 31
agataaaggaaaactcagttagttg

SEQ ID NO: 385061 - DNA, 25 bp, Artificial
  probe
  misc_feature (1)..(25): SEQ ID NO: 4542; WAN024A2A; Start 5; Stop 29
atagataaaggaaaactcagttagt

SEQ ID NO: 385062 - DNA, 25 bp, Artificial
  probe
  misc_feature (1)..(25): SEQ ID NO: 4542; WAN024A2A; Start 6; Stop 30
tagataaaggaaaactcagttagtt

SEQ ID NO: 385063 - DNA, 25 bp, Artificial
  probe
  misc_feature (1)..(25): SEQ ID NO: 4543; WAN024AMT; Start 17; Stop 41
gcggtggaatttctatcaaacataa

SEQ ID NO: 385064 - DNA, 25 bp, Artificial
  probe
  misc_feature (1)..(25): SEQ ID NO: 4543; WAN024AMT; Start 16; Stop 40
tgcggtggaatttctatcaaacata

SEQ ID NO: 385065 - DNA, 25 bp, Artificial
  probe
  misc_feature (1)..(25): SEQ ID NO: 4543; WAN024AMT; Start 18; Stop 42
cggtggaatttctatcaaacataag

SEQ ID NO: 385066 - DNA, 25 bp, Artificial
  probe
  misc_feature (1)..(25): SEQ ID NO: 4543; WAN024AMT; Start 15; Stop 39
gtgcggtggaatttctatcaaacat

SEQ ID NO: 385067 - DNA, 25 bp, Artificial
  probe
  misc_feature (1)..(25): SEQ ID NO: 4543; WAN024AMT; Start 19; Stop 43
ggtggaatttctatcaaacataaga

SEQ ID NO: 385068 - DNA, 25 bp, Artificial
  probe
  misc_feature (1)..(25): SEQ ID NO: 4543; WAN024AMT; Start 11; Stop 35
ttacgtgcggtggaatttctatcaa

SEQ ID NO: 385069 - DNA, 25 bp, Artificial
  probe
  misc_feature (1)..(25): SEQ ID NO: 4543; WAN024AMT; Start 10; Stop 34
tttacgtgcggtggaatttctatca

SEQ ID NO: 385070 - DNA, 25 bp, Artificial
  probe
  misc_feature (1)..(25): SEQ ID NO: 4543; WAN024AMT; Start 12; Stop 36
tacgtgcggtggaatttctatcaaa

SEQ ID NO: 385071 - DNA, 25 bp, Artificial
  probe
  misc_feature (1)..(25): SEQ ID NO: 4543; WAN024AMT; Start 14; Stop 38
cgtgcggtggaatttctatcaaaca

SEQ ID NO: 385072 - DNA, 25 bp, Artificial
  probe
  misc_feature (1)..(25): SEQ ID NO: 4543; WAN024AMT; Start 1; Stop 25
tataatagttttacgtgcggtggaa

SEQ ID NO: 385073 - DNA, 25 bp, Artificial
  probe
  misc_feature (1)..(25): SEQ ID NO: 4543; WAN024AMT; Start 2; Stop 26
ataatagttttacgtgcggtggaat

SEQ ID NO: 385074 - DNA, 25 bp, Artificial
  probe
  misc_feature (1)..(25): SEQ ID NO: 4543; WAN024AMT; Start 3; Stop 27
taatagttttacgtgcggtggaatt

SEQ ID NO: 385075 - DNA, 25 bp, Artificial
  probe
  misc_feature (1)..(25): SEQ ID NO: 4543; WAN024AMT; Start 4; Stop 28
aatagttttacgtgcggtggaattt

SEQ ID NO: 385076 - DNA, 25 bp, Artificial
  probe
  misc_feature (1)..(25): SEQ ID NO: 4543; WAN024AMT; Start 9; Stop 33
ttttacgtgcggtggaatttctatc

SEQ ID NO: 385077 - DNA, 25 bp, Artificial
  probe
  misc_feature (1)..(25): SEQ ID NO: 4543; WAN024AMT; Start 20; Stop 44
gtggaatttctatcaaacataagat

SEQ ID NO: 385078 - DNA, 25 bp, Artificial
  probe
  misc_feature (1)..(25): SEQ ID NO: 4543; WAN024AMT; Start 8; Stop 32
gttttacgtgcggtggaatttctat

SEQ ID NO: 385079 - DNA, 25 bp, Artificial
  probe
  misc_feature (1)..(25): SEQ ID NO: 4543; WAN024AMT; Start 5; Stop 29
atagttttacgtgcggtggaatttc

SEQ ID NO: 385080 - DNA, 25 bp, Artificial
  probe
  misc_feature (1)..(25): SEQ ID NO: 4543; WAN024AMT; Start 13; Stop 37
acgtgcggtggaatttctatcaaac

SEQ ID NO: 385081 - DNA, 25 bp, Artificial
  probe
  misc_feature (1)..(25): SEQ ID NO: 4543; WAN024AMT; Start 7; Stop 31
agttttacgtgcggtggaatttcta

SEQ ID NO: 385082 - DNA, 25 bp, Artificial
  probe
  misc_feature (1)..(25): SEQ ID NO: 4543; WAN024AMT; Start 6; Stop 30
tagttttacgtgcggtggaatttct

SEQ ID NO: 385083 - DNA, 25 bp, Artificial
  probe
  misc_feature (1)..(25): SEQ ID NO: 4543; WAN024AMT; Start 32; Stop 56
tcaaacataagataggagttttacg

SEQ ID NO: 385084 - DNA, 25 bp, Artificial
  probe
  misc_feature (1)..(25): SEQ ID NO: 4543; WAN024AMT; Start 28; Stop 52
tctatcaaacataagataggagttt

SEQ ID NO: 385085 - DNA, 25 bp, Artificial
  probe
  misc_feature (1)..(25): SEQ ID NO: 4543; WAN024AMT; Start 27; Stop 51
ttctatcaaacataagataggagtt

SEQ ID NO: 385086 - DNA, 25 bp, Artificial
  probe
  misc_feature (1)..(25): SEQ ID NO: 4543; WAN024AMT; Start 26; Stop 50
tttctatcaaacataagataggagt

SEQ ID NO: 385087 - DNA, 25 bp, Artificial
  probe
  misc_feature (1)..(25): SEQ ID NO: 4545; WAN024F8B; Start 18; Stop 42
cttggcggagttagataatggaatc

SEQ ID NO: 385088 - DNA, 25 bp, Artificial
  probe
  misc_feature (1)..(25): SEQ ID NO: 4545; WAN024F8B; Start 17; Stop 41
tcttggcggagttagataatggaat

SEQ ID NO: 385089 - DNA, 25 bp, Artificial
  probe
  misc_feature (1)..(25): SEQ ID NO: 4545; WAN024F8B; Start 217; Stop 241
aattacttctcagatgacctagctt

SEQ ID NO: 385090 - DNA, 25 bp, Artificial
  probe
  misc_feature (1)..(25): SEQ ID NO: 4545; WAN024F8B; Start 16; Stop 40
gtcttggcggagttagataatggaa

SEQ ID NO: 385091 - DNA, 25 bp, Artificial
  probe
  misc_feature (1)..(25): SEQ ID NO: 4545; WAN024F8B; Start 216; Stop 240
taattacttctcagatgacctagct

SEQ ID NO: 385092 - DNA, 25 bp, Artificial
  probe
  misc_feature (1)..(25): SEQ ID NO: 4545; WAN024F8B; Start 23; Stop 47
cggagttagataatggaatccaagt

SEQ ID NO: 385093 - DNA, 25 bp, Artificial
  probe
  misc_feature (1)..(25): SEQ ID NO: 4545; WAN024F8B; Start 19; Stop 43
ttggcggagttagataatggaatcc

SEQ ID NO: 385094 - DNA, 25 bp, Artificial
  probe
  misc_feature (1)..(25): SEQ ID NO: 4545; WAN024F8B; Start 22; Stop 46
gcggagttagataatggaatccaag

SEQ ID NO: 385095 - DNA, 25 bp, Artificial
  probe
  misc_feature (1)..(25): SEQ ID NO: 4545; WAN024F8B; Start 24; Stop 48
ggagttagataatggaatccaagtt

SEQ ID NO: 385096 - DNA, 25 bp, Artificial
  probe
  misc_feature (1)..(25): SEQ ID NO: 4545; WAN024F8B; Start 41; Stop 65
tccaagttatcatcgaaattcaggt

SEQ ID NO: 385097 - DNA, 25 bp, Artificial
  probe
  misc_feature (1)..(25): SEQ ID NO: 4545; WAN024F8B; Start 42; Stop 66
ccaagttatcatcgaaattcaggtt

SEQ ID NO: 385098 - DNA, 25 bp, Artificial
  probe
  misc_feature (1)..(25): SEQ ID NO: 4545; WAN024F8B; Start 218; Stop 242
attacttctcagatgacctagcttt

SEQ ID NO: 385099 - DNA, 25 bp, Artificial
  probe
  misc_feature (1)..(25): SEQ ID NO: 4545; WAN024F8B; Start 54; Stop 78
cgaaattcaggttcatcatcagaat

SEQ ID NO: 385100 - DNA, 25 bp, Artificial
  probe
  misc_feature (1)..(25): SEQ ID NO: 4545; WAN024F8B; Start 40; Stop 64
atccaagttatcatcgaaattcagg

SEQ ID NO: 385101 - DNA, 25 bp, Artificial
  probe
  misc_feature (1)..(25): SEQ ID NO: 4545; WAN024F8B; Start 52; Stop 76
atcgaaattcaggttcatcatcaga

SEQ ID NO: 385102 - DNA, 25 bp, Artificial
  probe
  misc_feature (1)..(25): SEQ ID NO: 4545; WAN024F8B; Start 51; Stop 75
catcgaaattcaggttcatcatcag

SEQ ID NO: 385103 - DNA, 25 bp, Artificial
  probe
  misc_feature (1)..(25): SEQ ID NO: 4545; WAN024F8B; Start 53; Stop 77
tcgaaattcaggttcatcatcagaa

SEQ ID NO: 385104 - DNA, 25 bp, Artificial
  probe
  misc_feature (1)..(25): SEQ ID NO: 4545; WAN024F8B; Start 49; Stop 73
atcatcgaaattcaggttcatcatc

SEQ ID NO: 385105 - DNA, 25 bp, Artificial
  probe
  misc_feature (1)..(25): SEQ ID NO: 4545; WAN024F8B; Start 50; Stop 74
tcatcgaaattcaggttcatcatca

SEQ ID NO: 385106 - DNA, 25 bp, Artificial
  probe
  misc_feature (1)..(25): SEQ ID NO: 4545; WAN024F8B; Start 33; Stop 57
taatggaatccaagttatcatcgaa

SEQ ID NO: 385107 - DNA, 25 bp, Artificial
  probe
  misc_feature (1)..(25): SEQ ID NO: 4545; WAN024F8B; Start 32; Stop 56
ataatggaatccaagttatcatcga

SEQ ID NO: 385108 - DNA, 25 bp, Artificial
  probe
  misc_feature (1)..(25): SEQ ID NO: 4545; WAN024F8B; Start 44; Stop 68
aagttatcatcgaaattcaggttca

SEQ ID NO: 385109 - DNA, 25 bp, Artificial
  probe
  misc_feature (1)..(25): SEQ ID NO: 4545; WAN024F8B; Start 21; Stop 45
ggcggagttagataatggaatccaa

SEQ ID NO: 385110 - DNA, 25 bp, Artificial
  probe
  misc_feature (1)..(25): SEQ ID NO: 4545; WAN024F8B; Start 47; Stop 71
ttatcatcgaaattcaggttcatca

SEQ ID NO: 385111 - DNA, 25 bp, Artificial
  probe
  misc_feature (1)..(25): SEQ ID NO: 4545; WAN024F8B; Start 45; Stop 69
agttatcatcgaaattcaggttcat

SEQ ID NO: 385112 - DNA, 25 bp, Artificial
  probe
  misc_feature (1)..(25): SEQ ID NO: 4545; WAN024F8B; Start 43; Stop 67
caagttatcatcgaaattcaggttc

SEQ ID NO: 385113 - DNA, 25 bp, Artificial
  probe
  misc_feature (1)..(25): SEQ ID NO: 4545; WAN024F8B; Start 48; Stop 72
tatcatcgaaattcaggttcatcat

SEQ ID NO: 385114 - DNA, 25 bp, Artificial
  probe
  misc_feature (1)..(25): SEQ ID NO: 4545; WAN024F8B; Start 46; Stop 70
gttatcatcgaaattcaggttcatc

SEQ ID NO: 385115 - DNA, 25 bp, Artificial
  probe
  misc_feature (1)..(25): SEQ ID NO: 4545; WAN024F8B; Start 158; Stop 182
atacccaccagagctacaaacaaat

SEQ ID NO: 385116 - DNA, 25 bp, Artificial
  probe
  misc_feature (1)..(25): SEQ ID NO: 4545; WAN024F8B; Start 15; Stop 39
cgtcttggcggagttagataatgga

SEQ ID NO: 385117 - DNA, 25 bp, Artificial
  probe
  misc_feature (1)..(25): SEQ ID NO: 4545; WAN024F8B; Start 39; Stop 63
aatccaagttatcatcgaaattcag

SEQ ID NO: 385118 - DNA, 25 bp, Artificial
  probe
  misc_feature (1)..(25): SEQ ID NO: 4545; WAN024F8B; Start 159; Stop 183
tacccaccagagctacaaacaaatc

SEQ ID NO: 385119 - DNA, 25 bp, Artificial
  probe
  misc_feature (1)..(25): SEQ ID NO: 4545; WAN024F8B; Start 157; Stop 181
gatacccaccagagctacaaacaaa

SEQ ID NO: 385120 - DNA, 25 bp, Artificial
  probe
  misc_feature (1)..(25): SEQ ID NO: 4546; WAN024A9I; Start 2; Stop 26
atagaccgtcctctgtaaactttat

SEQ ID NO: 385121 - DNA, 25 bp, Artificial
  probe
  misc_feature (1)..(25): SEQ ID NO: 4546; WAN024A9I; Start 3; Stop 27
tagaccgtcctctgtaaactttata

SEQ ID NO: 385122 - DNA, 25 bp, Artificial
  probe
  misc_feature (1)..(25): SEQ ID NO: 4546; WAN024A9I; Start 1; Stop 25
tatagaccgtcctctgtaaacttta

SEQ ID NO: 385123 - DNA, 25 bp, Artificial
  probe
  misc_feature (1)..(25): SEQ ID NO: 4546; WAN024A9I; Start 4; Stop 28
agaccgtcctctgtaaactttataa

SEQ ID NO: 385124 - DNA, 25 bp, Artificial
  probe
  misc_feature (1)..(25): SEQ ID NO: 4546; WAN024A9I; Start 5; Stop 29
gaccgtcctctgtaaactttataaa

SEQ ID NO: 385125 - DNA, 25 bp, Artificial
  probe
  misc_feature (1)..(25): SEQ ID NO: 4546; WAN024A9I; Start 6; Stop 30
accgtcctctgtaaactttataaat

SEQ ID NO: 385126 - DNA, 25 bp, Artificial
  probe
  misc_feature (1)..(25): SEQ ID NO: 4546; WAN024A9I; Start 8; Stop 32
cgtcctctgtaaactttataaatcc

SEQ ID NO: 385127 - DNA, 25 bp, Artificial
  probe
  misc_feature (1)..(25): SEQ ID NO: 4546; WAN024A9I; Start 7; Stop 31
ccgtcctctgtaaactttataaatc

SEQ ID NO: 385128 - DNA, 25 bp, Artificial
  probe
  misc_feature (1)..(25): SEQ ID NO: 4546; WAN024A9I; Start 9; Stop 33
gtcctctgtaaactttataaatcct

SEQ ID NO: 385129 - DNA, 25 bp, Artificial
  probe
  misc_feature (1)..(25): SEQ ID NO: 4547; WAN024AEQ; Start 167; Stop 191
caagagaagccatttataggtgaaa

SEQ ID NO: 385130 - DNA, 25 bp, Artificial
  probe
  misc_feature (1)..(25): SEQ ID NO: 4547; WAN024AEQ; Start 166; Stop 190
tcaagagaagccatttataggtgaa

SEQ ID NO: 385131 - DNA, 25 bp, Artificial
  probe
  misc_feature (1)..(25): SEQ ID NO: 4547; WAN024AEQ; Start 165; Stop 189
ctcaagagaagccatttataggtga

SEQ ID NO: 385132 - DNA, 25 bp, Artificial
  probe
  misc_feature (1)..(25): SEQ ID NO: 4547; WAN024AEQ; Start 164; Stop 188
tctcaagagaagccatttataggtg

SEQ ID NO: 385133 - DNA, 25 bp, Artificial
  probe
  misc_feature (1)..(25): SEQ ID NO: 4547; WAN024AEQ; Start 168; Stop 192
aagagaagccatttataggtgaaaa

SEQ ID NO: 385134 - DNA, 25 bp, Artificial
  probe
  misc_feature (1)..(25): SEQ ID NO: 4547; WAN024AEQ; Start 4; Stop 28
agagaacagagtaacaataagaata

SEQ ID NO: 385135 - DNA, 25 bp, Artificial
  probe
  misc_feature (1)..(25): SEQ ID NO: 4547; WAN024AEQ; Start 3; Stop 27
tagagaacagagtaacaataagaat

SEQ ID NO: 385136 - DNA, 25 bp, Artificial
  probe
  misc_feature (1)..(25): SEQ ID NO: 4547; WAN024AEQ; Start 2; Stop 26
atagagaacagagtaacaataagaa

SEQ ID NO: 385137 - DNA, 25 bp, Artificial
  probe
  misc_feature (1)..(25): SEQ ID NO: 4547; WAN024AEQ; Start 163; Stop 187
ttctcaagagaagccatttataggt

SEQ ID NO: 385138 - DNA, 25 bp, Artificial
  probe
  misc_feature (1)..(25): SEQ ID NO: 4547; WAN024AEQ; Start 162; Stop 186
tttctcaagagaagccatttatagg

SEQ ID NO: 385139 - DNA, 25 bp, Artificial
  probe
  misc_feature (1)..(25): SEQ ID NO: 4547; WAN024AEQ; Start 169; Stop 193
agagaagccatttataggtgaaaat

SEQ ID NO: 385140 - DNA, 25 bp, Artificial
  probe
  misc_feature (1)..(25): SEQ ID NO: 4547; WAN024AEQ; Start 36; Stop 60
agggtataaaagttctaggagattt

SEQ ID NO: 385141 - DNA, 25 bp, Artificial
  probe
  misc_feature (1)..(25): SEQ ID NO: 4547; WAN024AEQ; Start 33; Stop 57
gatagggtataaaagttctaggaga

SEQ ID NO: 385142 - DNA, 25 bp, Artificial
  probe
  misc_feature (1)..(25): SEQ ID NO: 4547; WAN024AEQ; Start 32; Stop 56
agatagggtataaaagttctaggag

SEQ ID NO: 385143 - DNA, 25 bp, Artificial
  probe
  misc_feature (1)..(25): SEQ ID NO: 4547; WAN024AEQ; Start 35; Stop 59
tagggtataaaagttctaggagatt

SEQ ID NO: 385144 - DNA, 25 bp, Artificial
  probe
  misc_feature (1)..(25): SEQ ID NO: 4547; WAN024AEQ; Start 34; Stop 58
atagggtataaaagttctaggagat

SEQ ID NO: 385145 - DNA, 25 bp, Artificial
  probe
  misc_feature (1)..(25): SEQ ID NO: 4547; WAN024AEQ; Start 37; Stop 61
gggtataaaagttctaggagattta

SEQ ID NO: 385146 - DNA, 25 bp, Artificial
  probe
  misc_feature (1)..(25): SEQ ID NO: 4547; WAN024AEQ; Start 161; Stop 185
ttttctcaagagaagccatttatag

SEQ ID NO: 385147 - DNA, 25 bp, Artificial
  probe
  misc_feature (1)..(25): SEQ ID NO: 4547; WAN024AEQ; Start 31; Stop 55
tagatagggtataaaagttctagga

SEQ ID NO: 385148 - DNA, 25 bp, Artificial
  probe
  misc_feature (1)..(25): SEQ ID NO: 4547; WAN024AEQ; Start 170; Stop 194
gagaagccatttataggtgaaaatg

SEQ ID NO: 385149 - DNA, 25 bp, Artificial
  probe
  misc_feature (1)..(25): SEQ ID NO: 4548; WAN024AGR; Start 28; Stop 52
tgatttccctgagttttccacataa

SEQ ID NO: 385150 - DNA, 25 bp, Artificial
  probe
  misc_feature (1)..(25): SEQ ID NO: 4548; WAN024AGR; Start 29; Stop 53
gatttccctgagttttccacataaa

SEQ ID NO: 385151 - DNA, 25 bp, Artificial
  probe
  misc_feature (1)..(25): SEQ ID NO: 4548; WAN024AGR; Start 27; Stop 51
atgatttccctgagttttccacata

SEQ ID NO: 385152 - DNA, 25 bp, Artificial
  probe
  misc_feature (1)..(25): SEQ ID NO: 4548; WAN024AGR; Start 26; Stop 50
gatgatttccctgagttttccacat

SEQ ID NO: 385153 - DNA, 25 bp, Artificial
  probe
  misc_feature (1)..(25): SEQ ID NO: 4548; WAN024AGR; Start 21; Stop 45
aaagcgatgatttccctgagttttc

SEQ ID NO: 385154 - DNA, 25 bp, Artificial
  probe
  misc_feature (1)..(25): SEQ ID NO: 4548; WAN024AGR; Start 30; Stop 54
atttccctgagttttccacataaaa

SEQ ID NO: 385155 - DNA, 25 bp, Artificial
  probe
  misc_feature (1)..(25): SEQ ID NO: 4548; WAN024AGR; Start 20; Stop 44
aaaagcgatgatttccctgagtttt

SEQ ID NO: 385156 - DNA, 25 bp, Artificial
  probe
  misc_feature (1)..(25): SEQ ID NO: 4548; WAN024AGR; Start 25; Stop 49
cgatgatttccctgagttttccaca

SEQ ID NO: 385157 - DNA, 25 bp, Artificial
  probe
  misc_feature (1)..(25): SEQ ID NO: 4548; WAN024AGR; Start 22; Stop 46
aagcgatgatttccctgagttttcc

SEQ ID NO: 385158 - DNA, 25 bp, Artificial
  probe
  misc_feature (1)..(25): SEQ ID NO: 4548; WAN024AGR; Start 24; Stop 48
gcgatgatttccctgagttttccac

SEQ ID NO: 385159 - DNA, 25 bp, Artificial
  probe
  misc_feature (1)..(25): SEQ ID NO: 4548; WAN024AGR; Start 23; Stop 47
agcgatgatttccctgagttttcca

SEQ ID NO: 385160 - DNA, 25 bp, Artificial
  probe
  misc_feature (1)..(25): SEQ ID NO: 4549; WAN024AAQ; Start 44; Stop 68
agatagttcctttaacaacggacat

SEQ ID NO: 385161 - DNA, 25 bp, Artificial
  probe
  misc_feature (1)..(25): SEQ ID NO: 4549; WAN024AAQ; Start 43; Stop 67
aagatagttcctttaacaacggaca

SEQ ID NO: 385162 - DNA, 25 bp, Artificial
  probe
  misc_feature (1)..(25): SEQ ID NO: 4549; WAN024AAQ; Start 46; Stop 70
atagttcctttaacaacggacattc

SEQ ID NO: 385163 - DNA, 25 bp, Artificial
  probe
  misc_feature (1)..(25): SEQ ID NO: 4549; WAN024AAQ; Start 45; Stop 69
gatagttcctttaacaacggacatt

SEQ ID NO: 385164 - DNA, 25 bp, Artificial
  probe
  misc_feature (1)..(25): SEQ ID NO: 4549; WAN024AAQ; Start 47; Stop 71
tagttcctttaacaacggacattcc

SEQ ID NO: 385165 - DNA, 25 bp, Artificial
  probe
  misc_feature (1)..(25): SEQ ID NO: 4549; WAN024AAQ; Start 50; Stop 74
ttcctttaacaacggacattccttg

SEQ ID NO: 385166 - DNA, 25 bp, Artificial
  probe
  misc_feature (1)..(25): SEQ ID NO: 4549; WAN024AAQ; Start 49; Stop 73
gttcctttaacaacggacattcctt

SEQ ID NO: 385167 - DNA, 25 bp, Artificial
  probe
  misc_feature (1)..(25): SEQ ID NO: 4549; WAN024AAQ; Start 42; Stop 66
aaagatagttcctttaacaacggac

SEQ ID NO: 385168 - DNA, 25 bp, Artificial
  probe
  misc_feature (1)..(25): SEQ ID NO: 4549; WAN024AAQ; Start 48; Stop 72
agttcctttaacaacggacattcct

SEQ ID NO: 385169 - DNA, 25 bp, Artificial
  probe
  misc_feature (1)..(25): SEQ ID NO: 4549; WAN024AAQ; Start 51; Stop 75
tcctttaacaacggacattccttgc

SEQ ID NO: 385170 - DNA, 25 bp, Artificial
  probe
  misc_feature (1)..(25): SEQ ID NO: 4549; WAN024AAQ; Start 41; Stop 65
aaaagatagttcctttaacaacgga

SEQ ID NO: 385171 - DNA, 25 bp, Artificial
  probe
  misc_feature (1)..(25): SEQ ID NO: 4549; WAN024AAQ; Start 56; Stop 80
taacaacggacattccttgcaaata

SEQ ID NO: 385172 - DNA, 25 bp, Artificial
  probe
  misc_feature (1)..(25): SEQ ID NO: 4549; WAN024AAQ; Start 40; Stop 64
taaaagatagttcctttaacaacgg

SEQ ID NO: 385173 - DNA, 25 bp, Artificial
  probe
  misc_feature (1)..(25): SEQ ID NO: 4549; WAN024AAQ; Start 52; Stop 76
cctttaacaacggacattccttgca

SEQ ID NO: 385174 - DNA, 25 bp, Artificial
  probe
  misc_feature (1)..(25): SEQ ID NO: 4549; WAN024AAQ; Start 60; Stop 84
aacggacattccttgcaaatagttt

SEQ ID NO: 385175 - DNA, 25 bp, Artificial
  probe
  misc_feature (1)..(25): SEQ ID NO: 4549; WAN024AAQ; Start 55; Stop 79
ttaacaacggacattccttgcaaat

SEQ ID NO: 385176 - DNA, 25 bp, Artificial
  probe
  misc_feature (1)..(25): SEQ ID NO: 4549; WAN024AAQ; Start 54; Stop 78
tttaacaacggacattccttgcaaa

SEQ ID NO: 385177 - DNA, 25 bp, Artificial
  probe
  misc_feature (1)..(25): SEQ ID NO: 4549; WAN024AAQ; Start 59; Stop 83
caacggacattccttgcaaatagtt

SEQ ID NO: 385178 - DNA, 25 bp, Artificial
  probe
  misc_feature (1)..(25): SEQ ID NO: 4549; WAN024AAQ; Start 57; Stop 81
aacaacggacattccttgcaaatag

SEQ ID NO: 385179 - DNA, 25 bp, Artificial
  probe
  misc_feature (1)..(25): SEQ ID NO: 4549; WAN024AAQ; Start 53; Stop 77
ctttaacaacggacattccttgcaa

SEQ ID NO: 385180 - DNA, 25 bp, Artificial
  probe
  misc_feature (1)..(25): SEQ ID NO: 4549; WAN024AAQ; Start 64; Stop 88
gacattccttgcaaatagttttaca

SEQ ID NO: 385181 - DNA, 25 bp, Artificial
  probe
  misc_feature (1)..(25): SEQ ID NO: 4549; WAN024AAQ; Start 58; Stop 82
acaacggacattccttgcaaatagt

SEQ ID NO: 385182 - DNA, 25 bp, Artificial
  probe
  misc_feature (1)..(25): SEQ ID NO: 4549; WAN024AAQ; Start 62; Stop 86
cggacattccttgcaaatagtttta

SEQ ID NO: 385183 - DNA, 25 bp, Artificial
  probe
  misc_feature (1)..(25): SEQ ID NO: 4549; WAN024AAQ; Start 65; Stop 89
acattccttgcaaatagttttacaa

SEQ ID NO: 385184 - DNA, 25 bp, Artificial
  probe
  misc_feature (1)..(25): SEQ ID NO: 4549; WAN024AAQ; Start 63; Stop 87
ggacattccttgcaaatagttttac

SEQ ID NO: 385185 - DNA, 25 bp, Artificial
  probe
  misc_feature (1)..(25): SEQ ID NO: 4549; WAN024AAQ; Start 39; Stop 63
ttaaaagatagttcctttaacaacg

SEQ ID NO: 385186 - DNA, 25 bp, Artificial
  probe
  misc_feature (1)..(25): SEQ ID NO: 4549; WAN024AAQ; Start 61; Stop 85
acggacattccttgcaaatagtttt

SEQ ID NO: 385187 - DNA, 25 bp, Artificial
  probe
  misc_feature (1)..(25): SEQ ID NO: 4549; WAN024AAQ; Start 66; Stop 90
cattccttgcaaatagttttacaaa

SEQ ID NO: 385188 - DNA, 25 bp, Artificial
  probe
  misc_feature (1)..(25): SEQ ID NO: 4549; WAN024AAQ; Start 67; Stop 91
attccttgcaaatagttttacaaaa

SEQ ID NO: 385189 - DNA, 25 bp, Artificial
  probe
  misc_feature (1)..(25): SEQ ID NO: 4550; WAN024A9H; Start 30; Stop 54
ataaagtttacagaggacggtctat

SEQ ID NO: 385190 - DNA, 25 bp, Artificial
  probe
  misc_feature (1)..(25): SEQ ID NO: 4550; WAN024A9H; Start 31; Stop 55
taaagtttacagaggacggtctata

SEQ ID NO: 385191 - DNA, 25 bp, Artificial
  probe
  misc_feature (1)..(25): SEQ ID NO: 4550; WAN024A9H; Start 29; Stop 53
tataaagtttacagaggacggtcta

SEQ ID NO: 385192 - DNA, 25 bp, Artificial
  probe
  misc_feature (1)..(25): SEQ ID NO: 4550; WAN024A9H; Start 28; Stop 52
ttataaagtttacagaggacggtct

SEQ ID NO: 385193 - DNA, 25 bp, Artificial
  probe
  misc_feature (1)..(25): SEQ ID NO: 4550; WAN024A9H; Start 27; Stop 51
tttataaagtttacagaggacggtc

SEQ ID NO: 385194 - DNA, 25 bp, Artificial
  probe
  misc_feature (1)..(25): SEQ ID NO: 4550; WAN024A9H; Start 26; Stop 50
atttataaagtttacagaggacggt

SEQ ID NO: 385195 - DNA, 25 bp, Artificial
  probe
  misc_feature (1)..(25): SEQ ID NO: 4550; WAN024A9H; Start 25; Stop 49
gatttataaagtttacagaggacgg

SEQ ID NO: 385196 - DNA, 25 bp, Artificial
  probe
  misc_feature (1)..(25): SEQ ID NO: 4550; WAN024A9H; Start 24; Stop 48
ggatttataaagtttacagaggacg

SEQ ID NO: 385197 - DNA, 25 bp, Artificial
  probe
  misc_feature (1)..(25): SEQ ID NO: 4550; WAN024A9H; Start 23; Stop 47
aggatttataaagtttacagaggac

SEQ ID NO: 385198 - DNA, 25 bp, Artificial
  probe
  misc_feature (1)..(25): SEQ ID NO: 4551; WAN0249L4; Start 54; Stop 78
gtatgaggaactgttactagatgct

SEQ ID NO: 385199 - DNA, 25 bp, Artificial
  probe
  misc_feature (1)..(25): SEQ ID NO: 4551; WAN0249L4; Start 55; Stop 79
tatgaggaactgttactagatgctt

SEQ ID NO: 385200 - DNA, 25 bp, Artificial
  probe
  misc_feature (1)..(25): SEQ ID NO: 4551; WAN0249L4; Start 53; Stop 77
agtatgaggaactgttactagatgc

SEQ ID NO: 385201 - DNA, 25 bp, Artificial
  probe
  misc_feature (1)..(25): SEQ ID NO: 4551; WAN0249L4; Start 50; Stop 74
ggaagtatgaggaactgttactaga

SEQ ID NO: 385202 - DNA, 25 bp, Artificial
  probe
  misc_feature (1)..(25): SEQ ID NO: 4551; WAN0249L4; Start 56; Stop 80
atgaggaactgttactagatgcttt

SEQ ID NO: 385203 - DNA, 25 bp, Artificial
  probe
  misc_feature (1)..(25): SEQ ID NO: 4551; WAN0249L4; Start 33; Stop 57
taacagaatttcgcaagggaagtat

SEQ ID NO: 385204 - DNA, 25 bp, Artificial
  probe
  misc_feature (1)..(25): SEQ ID NO: 4551; WAN0249L4; Start 32; Stop 56
ataacagaatttcgcaagggaagta

SEQ ID NO: 385205 - DNA, 25 bp, Artificial
  probe
  misc_feature (1)..(25): SEQ ID NO: 4551; WAN0249L4; Start 91; Stop 115
attgtatatgggctagatgaagagg

SEQ ID NO: 385206 - DNA, 25 bp, Artificial
  probe
  misc_feature (1)..(25): SEQ ID NO: 4551; WAN0249L4; Start 58; Stop 82
gaggaactgttactagatgctttca

SEQ ID NO: 385207 - DNA, 25 bp, Artificial
  probe
  misc_feature (1)..(25): SEQ ID NO: 4551; WAN0249L4; Start 57; Stop 81
tgaggaactgttactagatgctttc

SEQ ID NO: 385208 - DNA, 25 bp, Artificial
  probe
  misc_feature (1)..(25): SEQ ID NO: 4551; WAN0249L4; Start 92; Stop 116
ttgtatatgggctagatgaagaggg

SEQ ID NO: 385209 - DNA, 25 bp, Artificial
  probe
  misc_feature (1)..(25): SEQ ID NO: 4551; WAN0249L4; Start 46; Stop 70
caagggaagtatgaggaactgttac

SEQ ID NO: 385210 - DNA, 25 bp, Artificial
  probe
  misc_feature (1)..(25): SEQ ID NO: 4551; WAN0249L4; Start 31; Stop 55
aataacagaatttcgcaagggaagt

SEQ ID NO: 385211 - DNA, 25 bp, Artificial
  probe
  misc_feature (1)..(25): SEQ ID NO: 4551; WAN0249L4; Start 30; Stop 54
aaataacagaatttcgcaagggaag

SEQ ID NO: 385212 - DNA, 25 bp, Artificial
  probe
  misc_feature (1)..(25): SEQ ID NO: 4551; WAN0249L4; Start 34; Stop 58
aacagaatttcgcaagggaagtatg

SEQ ID NO: 385213 - DNA, 25 bp, Artificial
  probe
  misc_feature (1)..(25): SEQ ID NO: 4551; WAN0249L4; Start 60; Stop 84
ggaactgttactagatgctttcaga

SEQ ID NO: 385214 - DNA, 25 bp, Artificial
  probe
  misc_feature (1)..(25): SEQ ID NO: 4551; WAN0249L4; Start 59; Stop 83
aggaactgttactagatgctttcag

SEQ ID NO: 385215 - DNA, 25 bp, Artificial
  probe
  misc_feature (1)..(25): SEQ ID NO: 4551; WAN0249L4; Start 52; Stop 76
aagtatgaggaactgttactagatg

SEQ ID NO: 385216 - DNA, 25 bp, Artificial
  probe
  misc_feature (1)..(25): SEQ ID NO: 4551; WAN0249L4; Start 36; Stop 60
cagaatttcgcaagggaagtatgag

SEQ ID NO: 385217 - DNA, 25 bp, Artificial
  probe
  misc_feature (1)..(25): SEQ ID NO: 4551; WAN0249L4; Start 51; Stop 75
gaagtatgaggaactgttactagat

SEQ ID NO: 385218 - DNA, 25 bp, Artificial
  probe
  misc_feature (1)..(25): SEQ ID NO: 4551; WAN0249L4; Start 48; Stop 72
agggaagtatgaggaactgttacta

SEQ ID NO: 385219 - DNA, 25 bp, Artificial
  probe
  misc_feature (1)..(25): SEQ ID NO: 4551; WAN0249L4; Start 61; Stop 85
gaactgttactagatgctttcagat

SEQ ID NO: 385220 - DNA, 25 bp, Artificial
  probe
  misc_feature (1)..(25): SEQ ID NO: 4551; WAN0249L4; Start 49; Stop 73
gggaagtatgaggaactgttactag

SEQ ID NO: 385221 - DNA, 25 bp, Artificial
  probe
  misc_feature (1)..(25): SEQ ID NO: 4551; WAN0249L4; Start 45; Stop 69
gcaagggaagtatgaggaactgtta

SEQ ID NO: 385222 - DNA, 25 bp, Artificial
  probe
  misc_feature (1)..(25): SEQ ID NO: 4551; WAN0249L4; Start 39; Stop 63
aatttcgcaagggaagtatgaggaa

SEQ ID NO: 385223 - DNA, 25 bp, Artificial
  probe
  misc_feature (1)..(25): SEQ ID NO: 4551; WAN0249L4; Start 47; Stop 71
aagggaagtatgaggaactgttact

SEQ ID NO: 385224 - DNA, 25 bp, Artificial
  probe
  misc_feature (1)..(25): SEQ ID NO: 4551; WAN0249L4; Start 35; Stop 59
acagaatttcgcaagggaagtatga

SEQ ID NO: 385225 - DNA, 25 bp, Artificial
  probe
  misc_feature (1)..(25): SEQ ID NO: 4551; WAN0249L4; Start 90; Stop 114
tattgtatatgggctagatgaagag

SEQ ID NO: 385226 - DNA, 25 bp, Artificial
  probe
  misc_feature (1)..(25): SEQ ID NO: 4551; WAN0249L4; Start 38; Stop 62
gaatttcgcaagggaagtatgagga

SEQ ID NO: 385227 - DNA, 25 bp, Artificial
  probe
  misc_feature (1)..(25): SEQ ID NO: 4551; WAN0249L4; Start 37; Stop 61
agaatttcgcaagggaagtatgagg

SEQ ID NO: 385228 - DNA, 25 bp, Artificial
  probe
  misc_feature (1)..(25): SEQ ID NO: 4551; WAN0249L4; Start 40; Stop 64
atttcgcaagggaagtatgaggaac

SEQ ID NO: 385229 - DNA, 25 bp, Artificial
  probe
  misc_feature (1)..(25): SEQ ID NO: 4551; WAN0249L4; Start 65; Stop 89
tgttactagatgctttcagatatga

SEQ ID NO: 385230 - DNA, 25 bp, Artificial
  probe
  misc_feature (1)..(25): SEQ ID NO: 4551; WAN0249L4; Start 62; Stop 86
aactgttactagatgctttcagata

SEQ ID NO: 385231 - DNA, 25 bp, Artificial
  probe
  misc_feature (1)..(25): SEQ ID NO: 4552; WAN024AO8; Start 544; Stop 568
cacaatatataagttcatcctcgga

SEQ ID NO: 385232 - DNA, 25 bp, Artificial
  probe
  misc_feature (1)..(25): SEQ ID NO: 4552; WAN024AO8; Start 543; Stop 567
tcacaatatataagttcatcctcgg

SEQ ID NO: 385233 - DNA, 25 bp, Artificial
  probe
  misc_feature (1)..(25): SEQ ID NO: 4552; WAN024AO8; Start 488; Stop 512
agtggatgaaattgatagcgatagt

SEQ ID NO: 385234 - DNA, 25 bp, Artificial
  probe
  misc_feature (1)..(25): SEQ ID NO: 4552; WAN024AO8; Start 489; Stop 513
gtggatgaaattgatagcgatagtc

SEQ ID NO: 385235 - DNA, 25 bp, Artificial
  probe
  misc_feature (1)..(25): SEQ ID NO: 4552; WAN024AO8; Start 509; Stop 533
tagtcaaatcaagaggcatcataac

SEQ ID NO: 385236 - DNA, 25 bp, Artificial
  probe
  misc_feature (1)..(25): SEQ ID NO: 4552; WAN024AO8; Start 506; Stop 530
cgatagtcaaatcaagaggcatcat

SEQ ID NO: 385237 - DNA, 25 bp, Artificial
  probe
  misc_feature (1)..(25): SEQ ID NO: 4552; WAN024AO8; Start 487; Stop 511
aagtggatgaaattgatagcgatag

SEQ ID NO: 385238 - DNA, 25 bp, Artificial
  probe
  misc_feature (1)..(25): SEQ ID NO: 4552; WAN024AO8; Start 510; Stop 534
agtcaaatcaagaggcatcataact

SEQ ID NO: 385239 - DNA, 25 bp, Artificial
  probe
  misc_feature (1)..(25): SEQ ID NO: 4552; WAN024AO8; Start 501; Stop 525
gatagcgatagtcaaatcaagaggc

SEQ ID NO: 385240 - DNA, 25 bp, Artificial
  probe
  misc_feature (1)..(25): SEQ ID NO: 4552; WAN024AO8; Start 545; Stop 569
acaatatataagttcatcctcggaa

SEQ ID NO: 385241 - DNA, 25 bp, Artificial
  probe
  misc_feature (1)..(25): SEQ ID NO: 4552; WAN024AO8; Start 490; Stop 514
tggatgaaattgatagcgatagtca

SEQ ID NO: 385242 - DNA, 25 bp, Artificial
  probe
  misc_feature (1)..(25): SEQ ID NO: 4552; WAN024AO8; Start 507; Stop 531
gatagtcaaatcaagaggcatcata

SEQ ID NO: 385243 - DNA, 25 bp, Artificial
  probe
  misc_feature (1)..(25): SEQ ID NO: 4552; WAN024AO8; Start 486; Stop 510
aaagtggatgaaattgatagcgata

SEQ ID NO: 385244 - DNA, 25 bp, Artificial
  probe
  misc_feature (1)..(25): SEQ ID NO: 4552; WAN024AO8; Start 364; Stop 388
ttgaatagggcgttatcacaagaaa

SEQ ID NO: 385245 - DNA, 25 bp, Artificial
  probe
  misc_feature (1)..(25): SEQ ID NO: 4552; WAN024AO8; Start 363; Stop 387
tttgaatagggcgttatcacaagaa

SEQ ID NO: 385246 - DNA, 25 bp, Artificial
  probe
  misc_feature (1)..(25): SEQ ID NO: 4552; WAN024AO8; Start 542; Stop 566
gtcacaatatataagttcatcctcg

SEQ ID NO: 385247 - DNA, 25 bp, Artificial
  probe
  misc_feature (1)..(25): SEQ ID NO: 4552; WAN024AO8; Start 511; Stop 535
gtcaaatcaagaggcatcataactc

SEQ ID NO: 385248 - DNA, 25 bp, Artificial
  probe
  misc_feature (1)..(25): SEQ ID NO: 4552; WAN024AO8; Start 103; Stop 127
ccttctcgctatgttgagtgattta

SEQ ID NO: 385249 - DNA, 25 bp, Artificial
  probe
  misc_feature (1)..(25): SEQ ID NO: 4552; WAN024AO8; Start 362; Stop 386
ctttgaatagggcgttatcacaaga

SEQ ID NO: 385250 - DNA, 25 bp, Artificial
  probe
  misc_feature (1)..(25): SEQ ID NO: 4552; WAN024AO8; Start 361; Stop 385
tctttgaatagggcgttatcacaag

SEQ ID NO: 385251 - DNA, 25 bp, Artificial
  probe
  misc_feature (1)..(25): SEQ ID NO: 4552; WAN024AO8; Start 360; Stop 384
ctctttgaatagggcgttatcacaa

SEQ ID NO: 385252 - DNA, 25 bp, Artificial
  probe
  misc_feature (1)..(25): SEQ ID NO: 4552; WAN024AO8; Start 508; Stop 532
atagtcaaatcaagaggcatcataa

SEQ ID NO: 385253 - DNA, 25 bp, Artificial
  probe
  misc_feature (1)..(25): SEQ ID NO: 4552; WAN024AO8; Start 624; Stop 648
tgaaacaacgaatacaggtatcaaa

SEQ ID NO: 385254 - DNA, 25 bp, Artificial
  probe
  misc_feature (1)..(25): SEQ ID NO: 4552; WAN024AO8; Start 104; Stop 128
cttctcgctatgttgagtgatttat

SEQ ID NO: 385255 - DNA, 25 bp, Artificial
  probe
  misc_feature (1)..(25): SEQ ID NO: 4552; WAN024AO8; Start 503; Stop 527
tagcgatagtcaaatcaagaggcat

SEQ ID NO: 385256 - DNA, 25 bp, Artificial
  probe
  misc_feature (1)..(25): SEQ ID NO: 4552; WAN024AO8; Start 502; Stop 526
atagcgatagtcaaatcaagaggca

SEQ ID NO: 385257 - DNA, 25 bp, Artificial
  probe
  misc_feature (1)..(25): SEQ ID NO: 4552; WAN024AO8; Start 623; Stop 647
atgaaacaacgaatacaggtatcaa

SEQ ID NO: 385258 - DNA, 25 bp, Artificial
  probe
  misc_feature (1)..(25): SEQ ID NO: 4552; WAN024AO8; Start 622; Stop 646
catgaaacaacgaatacaggtatca

SEQ ID NO: 385259 - DNA, 25 bp, Artificial
  probe
  misc_feature (1)..(25): SEQ ID NO: 4552; WAN024AO8; Start 105; Stop 129
ttctcgctatgttgagtgatttata

SEQ ID NO: 385260 - DNA, 25 bp, Artificial
  probe
  misc_feature (1)..(25): SEQ ID NO: 4552; WAN024AO8; Start 356; Stop 380
attcctctttgaatagggcgttatc

SEQ ID NO: 385261 - DNA, 25 bp, Artificial
  probe
  misc_feature (1)..(25): SEQ ID NO: 4552; WAN024AO8; Start 579; Stop 603
tctaattgttgaaatgcctacatga

SEQ ID NO: 385262 - DNA, 25 bp, Artificial
  probe
  misc_feature (1)..(25): SEQ ID NO: 4552; WAN024AO8; Start 357; Stop 381
ttcctctttgaatagggcgttatca

SEQ ID NO: 385263 - DNA, 25 bp, Artificial
  probe
  misc_feature (1)..(25): SEQ ID NO: 4552; WAN024AO8; Start 445; Stop 469
ctgtacctagatgtttcggttcata

SEQ ID NO: 385264 - DNA, 25 bp, Artificial
  probe
  misc_feature (1)..(25): SEQ ID NO: 4553; WAN024AEP; Start 14; Stop 38
tttcacctataaatggcttctcttg

SEQ ID NO: 385265 - DNA, 25 bp, Artificial
  probe
  misc_feature (1)..(25): SEQ ID NO: 4553; WAN024AEP; Start 15; Stop 39
ttcacctataaatggcttctcttga

SEQ ID NO: 385266 - DNA, 25 bp, Artificial
  probe
  misc_feature (1)..(25): SEQ ID NO: 4553; WAN024AEP; Start 16; Stop 40
tcacctataaatggcttctcttgag

SEQ ID NO: 385267 - DNA, 25 bp, Artificial
  probe
  misc_feature (1)..(25): SEQ ID NO: 4553; WAN024AEP; Start 17; Stop 41
cacctataaatggcttctcttgaga

SEQ ID NO: 385268 - DNA, 25 bp, Artificial
  probe
  misc_feature (1)..(25): SEQ ID NO: 4553; WAN024AEP; Start 13; Stop 37
ttttcacctataaatggcttctctt

SEQ ID NO: 385269 - DNA, 25 bp, Artificial
  probe
  misc_feature (1)..(25): SEQ ID NO: 4553; WAN024AEP; Start 179; Stop 203
ttcttattgttactctgttctctat

SEQ ID NO: 385270 - DNA, 25 bp, Artificial
  probe
  misc_feature (1)..(25): SEQ ID NO: 4553; WAN024AEP; Start 178; Stop 202
attcttattgttactctgttctcta

SEQ ID NO: 385271 - DNA, 25 bp, Artificial
  probe
  misc_feature (1)..(25): SEQ ID NO: 4553; WAN024AEP; Start 177; Stop 201
tattcttattgttactctgttctct

SEQ ID NO: 385272 - DNA, 25 bp, Artificial
  probe
  misc_feature (1)..(25): SEQ ID NO: 4553; WAN024AEP; Start 18; Stop 42
acctataaatggcttctcttgagaa

SEQ ID NO: 385273 - DNA, 25 bp, Artificial
  probe
  misc_feature (1)..(25): SEQ ID NO: 4553; WAN024AEP; Start 19; Stop 43
cctataaatggcttctcttgagaaa

SEQ ID NO: 385274 - DNA, 25 bp, Artificial
  probe
  misc_feature (1)..(25): SEQ ID NO: 4553; WAN024AEP; Start 12; Stop 36
attttcacctataaatggcttctct

SEQ ID NO: 385275 - DNA, 25 bp, Artificial
  probe
  misc_feature (1)..(25): SEQ ID NO: 4553; WAN024AEP; Start 145; Stop 169
aaatctcctagaacttttataccct

SEQ ID NO: 385276 - DNA, 25 bp, Artificial
  probe
  misc_feature (1)..(25): SEQ ID NO: 4553; WAN024AEP; Start 148; Stop 172
tctcctagaacttttataccctatc

SEQ ID NO: 385277 - DNA, 25 bp, Artificial
  probe
  misc_feature (1)..(25): SEQ ID NO: 4553; WAN024AEP; Start 149; Stop 173
ctcctagaacttttataccctatct

SEQ ID NO: 385278 - DNA, 25 bp, Artificial
  probe
  misc_feature (1)..(25): SEQ ID NO: 4553; WAN024AEP; Start 146; Stop 170
aatctcctagaacttttatacccta

SEQ ID NO: 385279 - DNA, 25 bp, Artificial
  probe
  misc_feature (1)..(25): SEQ ID NO: 4553; WAN024AEP; Start 147; Stop 171
atctcctagaacttttataccctat

SEQ ID NO: 385280 - DNA, 25 bp, Artificial
  probe
  misc_feature (1)..(25): SEQ ID NO: 4553; WAN024AEP; Start 144; Stop 168
taaatctcctagaacttttataccc

SEQ ID NO: 385281 - DNA, 25 bp, Artificial
  probe
  misc_feature (1)..(25): SEQ ID NO: 4553; WAN024AEP; Start 20; Stop 44
ctataaatggcttctcttgagaaaa

SEQ ID NO: 385282 - DNA, 25 bp, Artificial
  probe
  misc_feature (1)..(25): SEQ ID NO: 4553; WAN024AEP; Start 150; Stop 174
tcctagaacttttataccctatcta

SEQ ID NO: 385283 - DNA, 25 bp, Artificial
  probe
  misc_feature (1)..(25): SEQ ID NO: 4553; WAN024AEP; Start 11; Stop 35
cattttcacctataaatggcttctc

SEQ ID NO: 385284 - DNA, 25 bp, Artificial
  probe
  misc_feature (1)..(25): SEQ ID NO: 4554; WAN024AOO; Start 383; Stop 407
aatagagatgacaagacagataagc

SEQ ID NO: 385285 - DNA, 25 bp, Artificial
  probe
  misc_feature (1)..(25): SEQ ID NO: 4554; WAN024AOO; Start 378; Stop 402
tccttaatagagatgacaagacaga

SEQ ID NO: 385286 - DNA, 25 bp, Artificial
  probe
  misc_feature (1)..(25): SEQ ID NO: 4554; WAN024AOO; Start 379; Stop 403
ccttaatagagatgacaagacagat

SEQ ID NO: 385287 - DNA, 25 bp, Artificial
  probe
  misc_feature (1)..(25): SEQ ID NO: 4554; WAN024AOO; Start 377; Stop 401
atccttaatagagatgacaagacag

SEQ ID NO: 385288 - DNA, 25 bp, Artificial
  probe
  misc_feature (1)..(25): SEQ ID NO: 4554; WAN024AOO; Start 285; Stop 309
tgagagataggtattccttatgtcc

SEQ ID NO: 385289 - DNA, 25 bp, Artificial
  probe
  misc_feature (1)..(25): SEQ ID NO: 4554; WAN024AOO; Start 384; Stop 408
atagagatgacaagacagataagct

SEQ ID NO: 385290 - DNA, 25 bp, Artificial
  probe
  misc_feature (1)..(25): SEQ ID NO: 4554; WAN024AOO; Start 286; Stop 310
gagagataggtattccttatgtcct

SEQ ID NO: 385291 - DNA, 25 bp, Artificial
  probe
  misc_feature (1)..(25): SEQ ID NO: 4554; WAN024AOO; Start 391; Stop 415
tgacaagacagataagctcagttaa

SEQ ID NO: 385292 - DNA, 25 bp, Artificial
  probe
  misc_feature (1)..(25): SEQ ID NO: 4554; WAN024AOO; Start 392; Stop 416
gacaagacagataagctcagttaat

SEQ ID NO: 385293 - DNA, 25 bp, Artificial
  probe
  misc_feature (1)..(25): SEQ ID NO: 4554; WAN024AOO; Start 390; Stop 414
atgacaagacagataagctcagtta

SEQ ID NO: 385294 - DNA, 25 bp, Artificial
  probe
  misc_feature (1)..(25): SEQ ID NO: 4554; WAN024AOO; Start 389; Stop 413
gatgacaagacagataagctcagtt

SEQ ID NO: 385295 - DNA, 25 bp, Artificial
  probe
  misc_feature (1)..(25): SEQ ID NO: 4554; WAN024AOO; Start 359; Stop 383
cacccgattatctaaaccatcctta

SEQ ID NO: 385296 - DNA, 25 bp, Artificial
  probe
  misc_feature (1)..(25): SEQ ID NO: 4554; WAN024AOO; Start 289; Stop 313
agataggtattccttatgtccttca

SEQ ID NO: 385297 - DNA, 25 bp, Artificial
  probe
  misc_feature (1)..(25): SEQ ID NO: 4554; WAN024AOO; Start 385; Stop 409
tagagatgacaagacagataagctc

SEQ ID NO: 385298 - DNA, 25 bp, Artificial
  probe
  misc_feature (1)..(25): SEQ ID NO: 4554; WAN024AOO; Start 219; Stop 243
taacctttagaaatccaagccttca

SEQ ID NO: 385299 - DNA, 25 bp, Artificial
  probe
  misc_feature (1)..(25): SEQ ID NO: 4554; WAN024AOO; Start 387; Stop 411
gagatgacaagacagataagctcag

SEQ ID NO: 385300 - DNA, 25 bp, Artificial
  probe
  misc_feature (1)..(25): SEQ ID NO: 4554; WAN024AOO; Start 305; Stop 329
tgtccttcaaattcatcactccttt

SEQ ID NO: 385301 - DNA, 25 bp, Artificial
  probe
  misc_feature (1)..(25): SEQ ID NO: 4554; WAN024AOO; Start 222; Stop 246
cctttagaaatccaagccttcacta

SEQ ID NO: 385302 - DNA, 25 bp, Artificial
  probe
  misc_feature (1)..(25): SEQ ID NO: 4554; WAN024AOO; Start 393; Stop 417
acaagacagataagctcagttaatt

SEQ ID NO: 385303 - DNA, 25 bp, Artificial
  probe
  misc_feature (1)..(25): SEQ ID NO: 4554; WAN024AOO; Start 388; Stop 412
agatgacaagacagataagctcagt

SEQ ID NO: 385304 - DNA, 25 bp, Artificial
  probe
  misc_feature (1)..(25): SEQ ID NO: 4554; WAN024AOO; Start 386; Stop 410
agagatgacaagacagataagctca

SEQ ID NO: 385305 - DNA, 25 bp, Artificial
  probe
  misc_feature (1)..(25): SEQ ID NO: 4554; WAN024AOO; Start 360; Stop 384
acccgattatctaaaccatccttaa

SEQ ID NO: 385306 - DNA, 25 bp, Artificial
  probe
  misc_feature (1)..(25): SEQ ID NO: 4554; WAN024AOO; Start 303; Stop 327
tatgtccttcaaattcatcactcct

SEQ ID NO: 385307 - DNA, 25 bp, Artificial
  probe
  misc_feature (1)..(25): SEQ ID NO: 4554; WAN024AOO; Start 127; Stop 151
aaggtgcgaaattattcaagttctt

SEQ ID NO: 385308 - DNA, 25 bp, Artificial
  probe
  misc_feature (1)..(25): SEQ ID NO: 4554; WAN024AOO; Start 304; Stop 328
atgtccttcaaattcatcactcctt

SEQ ID NO: 385309 - DNA, 25 bp, Artificial
  probe
  misc_feature (1)..(25): SEQ ID NO: 4554; WAN024AOO; Start 287; Stop 311
agagataggtattccttatgtcctt

SEQ ID NO: 385310 - DNA, 25 bp, Artificial
  probe
  misc_feature (1)..(25): SEQ ID NO: 4554; WAN024AOO; Start 288; Stop 312
gagataggtattccttatgtccttc

SEQ ID NO: 385311 - DNA, 25 bp, Artificial
  probe
  misc_feature (1)..(25): SEQ ID NO: 4554; WAN024AOO; Start 355; Stop 379
cagacacccgattatctaaaccatc

SEQ ID NO: 385312 - DNA, 25 bp, Artificial
  probe
  misc_feature (1)..(25): SEQ ID NO: 4554; WAN024AOO; Start 302; Stop 326
ttatgtccttcaaattcatcactcc

SEQ ID NO: 385313 - DNA, 25 bp, Artificial
  probe
  misc_feature (1)..(25): SEQ ID NO: 4554; WAN024AOO; Start 299; Stop 323
tccttatgtccttcaaattcatcac

SEQ ID NO: 385314 - DNA, 25 bp, Artificial
  probe
  misc_feature (1)..(25): SEQ ID NO: 4554; WAN024AOO; Start 300; Stop 324
ccttatgtccttcaaattcatcact

SEQ ID NO: 385315 - DNA, 25 bp, Artificial
  probe
  misc_feature (1)..(25): SEQ ID NO: 4554; WAN024AOO; Start 128; Stop 152
aggtgcgaaattattcaagttctta

SEQ ID NO: 385316 - DNA, 25 bp, Artificial
  probe
  misc_feature (1)..(25): SEQ ID NO: 4554; WAN024AOO; Start 126; Stop 150
taaggtgcgaaattattcaagttct

SEQ ID NO: 385317 - DNA, 25 bp, Artificial
  probe
  misc_feature (1)..(25): SEQ ID NO: 4555; WAN0249NC; Start 27; Stop 51
ctattgaactttgttaagaagaggt

SEQ ID NO: 385318 - DNA, 25 bp, Artificial
  probe
  misc_feature (1)..(25): SEQ ID NO: 4555; WAN0249NC; Start 26; Stop 50
actattgaactttgttaagaagagg

SEQ ID NO: 385319 - DNA, 25 bp, Artificial
  probe
  misc_feature (1)..(25): SEQ ID NO: 4555; WAN0249NC; Start 29; Stop 53
attgaactttgttaagaagaggtac

SEQ ID NO: 385320 - DNA, 25 bp, Artificial
  probe
  misc_feature (1)..(25): SEQ ID NO: 4555; WAN0249NC; Start 28; Stop 52
tattgaactttgttaagaagaggta

SEQ ID NO: 385321 - DNA, 25 bp, Artificial
  probe
  misc_feature (1)..(25): SEQ ID NO: 4555; WAN0249NC; Start 30; Stop 54
ttgaactttgttaagaagaggtacc

SEQ ID NO: 385322 - DNA, 25 bp, Artificial
  probe
  misc_feature (1)..(25): SEQ ID NO: 4556; WAN0249MG; Start 54; Stop 78
agaacagatggaagcaattatgatt

SEQ ID NO: 385323 - DNA, 25 bp, Artificial
  probe
  misc_feature (1)..(25): SEQ ID NO: 4556; WAN0249MG; Start 53; Stop 77
aagaacagatggaagcaattatgat

SEQ ID NO: 385324 - DNA, 25 bp, Artificial
  probe
  misc_feature (1)..(25): SEQ ID NO: 4556; WAN0249MG; Start 134; Stop 158
tataggatagtacgaatggaaggct

SEQ ID NO: 385325 - DNA, 25 bp, Artificial
  probe
  misc_feature (1)..(25): SEQ ID NO: 4556; WAN0249MG; Start 133; Stop 157
atataggatagtacgaatggaaggc

SEQ ID NO: 385326 - DNA, 25 bp, Artificial
  probe
  misc_feature (1)..(25): SEQ ID NO: 4556; WAN0249MG; Start 135; Stop 159
ataggatagtacgaatggaaggctt

SEQ ID NO: 385327 - DNA, 25 bp, Artificial
  probe
  misc_feature (1)..(25): SEQ ID NO: 4556; WAN0249MG; Start 13; Stop 37
agaagatacagtgctctagtctaac

SEQ ID NO: 385328 - DNA, 25 bp, Artificial
  probe
  misc_feature (1)..(25): SEQ ID NO: 4556; WAN0249MG; Start 17; Stop 41
gatacagtgctctagtctaacttca

SEQ ID NO: 385329 - DNA, 25 bp, Artificial
  probe
  misc_feature (1)..(25): SEQ ID NO: 4556; WAN0249MG; Start 16; Stop 40
agatacagtgctctagtctaacttc

SEQ ID NO: 385330 - DNA, 25 bp, Artificial
  probe
  misc_feature (1)..(25): SEQ ID NO: 4556; WAN0249MG; Start 14; Stop 38
gaagatacagtgctctagtctaact

SEQ ID NO: 385331 - DNA, 25 bp, Artificial
  probe
  misc_feature (1)..(25): SEQ ID NO: 4556; WAN0249MG; Start 20; Stop 44
acagtgctctagtctaacttcaata

SEQ ID NO: 385332 - DNA, 25 bp, Artificial
  probe
  misc_feature (1)..(25): SEQ ID NO: 4556; WAN0249MG; Start 19; Stop 43
tacagtgctctagtctaacttcaat

SEQ ID NO: 385333 - DNA, 25 bp, Artificial
  probe
  misc_feature (1)..(25): SEQ ID NO: 4556; WAN0249MG; Start 18; Stop 42
atacagtgctctagtctaacttcaa

SEQ ID NO: 385334 - DNA, 25 bp, Artificial
  probe
  misc_feature (1)..(25): SEQ ID NO: 4556; WAN0249MG; Start 15; Stop 39
aagatacagtgctctagtctaactt

SEQ ID NO: 385335 - DNA, 25 bp, Artificial
  probe
  misc_feature (1)..(25): SEQ ID NO: 4556; WAN0249MG; Start 21; Stop 45
cagtgctctagtctaacttcaatat

SEQ ID NO: 385336 - DNA, 25 bp, Artificial
  probe
  misc_feature (1)..(25): SEQ ID NO: 4556; WAN0249MG; Start 52; Stop 76
aaagaacagatggaagcaattatga

SEQ ID NO: 385337 - DNA, 25 bp, Artificial
  probe
  misc_feature (1)..(25): SEQ ID NO: 4556; WAN0249MG; Start 132; Stop 156
aatataggatagtacgaatggaagg

SEQ ID NO: 385338 - DNA, 25 bp, Artificial
  probe
  misc_feature (1)..(25): SEQ ID NO: 4556; WAN0249MG; Start 12; Stop 36
tagaagatacagtgctctagtctaa

SEQ ID NO: 385339 - DNA, 25 bp, Artificial
  probe
  misc_feature (1)..(25): SEQ ID NO: 4556; WAN0249MG; Start 11; Stop 35
ttagaagatacagtgctctagtcta

SEQ ID NO: 385340 - DNA, 25 bp, Artificial
  probe
  misc_feature (1)..(25): SEQ ID NO: 4556; WAN0249MG; Start 136; Stop 160
taggatagtacgaatggaaggcttt

SEQ ID NO: 385341 - DNA, 25 bp, Artificial
  probe
  misc_feature (1)..(25): SEQ ID NO: 4556; WAN0249MG; Start 55; Stop 79
gaacagatggaagcaattatgattt

SEQ ID NO: 385342 - DNA, 25 bp, Artificial
  probe
  misc_feature (1)..(25): SEQ ID NO: 4556; WAN0249MG; Start 57; Stop 81
acagatggaagcaattatgatttac

SEQ ID NO: 385343 - DNA, 25 bp, Artificial
  probe
  misc_feature (1)..(25): SEQ ID NO: 4556; WAN0249MG; Start 23; Stop 47
gtgctctagtctaacttcaatatac

SEQ ID NO: 385344 - DNA, 25 bp, Artificial
  probe
  misc_feature (1)..(25): SEQ ID NO: 4556; WAN0249MG; Start 58; Stop 82
cagatggaagcaattatgatttact

SEQ ID NO: 385345 - DNA, 25 bp, Artificial
  probe
  misc_feature (1)..(25): SEQ ID NO: 4556; WAN0249MG; Start 24; Stop 48
tgctctagtctaacttcaatatact

SEQ ID NO: 385346 - DNA, 25 bp, Artificial
  probe
  misc_feature (1)..(25): SEQ ID NO: 4556; WAN0249MG; Start 22; Stop 46
agtgctctagtctaacttcaatata

SEQ ID NO: 385347 - DNA, 25 bp, Artificial
  probe
  misc_feature (1)..(25): SEQ ID NO: 4556; WAN0249MG; Start 10; Stop 34
tttagaagatacagtgctctagtct

SEQ ID NO: 385348 - DNA, 25 bp, Artificial
  probe
  misc_feature (1)..(25): SEQ ID NO: 4556; WAN0249MG; Start 56; Stop 80
aacagatggaagcaattatgattta

SEQ ID NO: 385349 - DNA, 25 bp, Artificial
  probe
  misc_feature (1)..(25): SEQ ID NO: 4556; WAN0249MG; Start 162; Stop 186
gtagactggaggacgaaggagttta

SEQ ID NO: 385350 - DNA, 25 bp, Artificial
  probe
  misc_feature (1)..(25): SEQ ID NO: 4556; WAN0249MG; Start 59; Stop 83
agatggaagcaattatgatttactt

SEQ ID NO: 385351 - DNA, 25 bp, Artificial
  probe
  misc_feature (1)..(25): SEQ ID NO: 4556; WAN0249MG; Start 140; Stop 164
atagtacgaatggaaggcttttgta

SEQ ID NO: 385352 - DNA, 25 bp, Artificial
  probe
  misc_feature (1)..(25): SEQ ID NO: 4556; WAN0249MG; Start 46; Stop 70
actataaaagaacagatggaagcaa

SEQ ID NO: 385353 - DNA, 25 bp, Artificial
  probe
  misc_feature (1)..(25): SEQ ID NO: 4556; WAN0249MG; Start 141; Stop 165
tagtacgaatggaaggcttttgtag

SEQ ID NO: 385354 - DNA, 25 bp, Artificial
  probe
  misc_feature (1)..(25): SEQ ID NO: 4556; WAN0249MG; Start 51; Stop 75
aaaagaacagatggaagcaattatg

SEQ ID NO: 385355 - DNA, 25 bp, Artificial
  probe
  misc_feature (1)..(25): SEQ ID NO: 4557; WAN0249JI; Start 47; Stop 71
tagtataacgcaggtattcggtaga

SEQ ID NO: 385356 - DNA, 25 bp, Artificial
  probe
  misc_feature (1)..(25): SEQ ID NO: 4557; WAN0249JI; Start 46; Stop 70
ctagtataacgcaggtattcggtag

SEQ ID NO: 385357 - DNA, 25 bp, Artificial
  probe
  misc_feature (1)..(25): SEQ ID NO: 4557; WAN0249JI; Start 49; Stop 73
gtataacgcaggtattcggtagaag

SEQ ID NO: 385358 - DNA, 25 bp, Artificial
  probe
  misc_feature (1)..(25): SEQ ID NO: 4557; WAN0249JI; Start 48; Stop 72
agtataacgcaggtattcggtagaa

SEQ ID NO: 385359 - DNA, 25 bp, Artificial
  probe
  misc_feature (1)..(25): SEQ ID NO: 4557; WAN0249JI; Start 58; Stop 82
aggtattcggtagaaggcaagtatt

SEQ ID NO: 385360 - DNA, 25 bp, Artificial
  probe
  misc_feature (1)..(25): SEQ ID NO: 4557; WAN0249JI; Start 50; Stop 74
tataacgcaggtattcggtagaagg

SEQ ID NO: 385361 - DNA, 25 bp, Artificial
  probe
  misc_feature (1)..(25): SEQ ID NO: 4557; WAN0249JI; Start 57; Stop 81
caggtattcggtagaaggcaagtat

SEQ ID NO: 385362 - DNA, 25 bp, Artificial
  probe
  misc_feature (1)..(25): SEQ ID NO: 4557; WAN0249JI; Start 5; Stop 29
ccctccttgatagtttgaatgctaa

SEQ ID NO: 385363 - DNA, 25 bp, Artificial
  probe
  misc_feature (1)..(25): SEQ ID NO: 4557; WAN0249JI; Start 6; Stop 30
cctccttgatagtttgaatgctaaa

SEQ ID NO: 385364 - DNA, 25 bp, Artificial
  probe
  misc_feature (1)..(25): SEQ ID NO: 4557; WAN0249JI; Start 59; Stop 83
ggtattcggtagaaggcaagtattt

SEQ ID NO: 385365 - DNA, 25 bp, Artificial
  probe
  misc_feature (1)..(25): SEQ ID NO: 4557; WAN0249JI; Start 60; Stop 84
gtattcggtagaaggcaagtattta

SEQ ID NO: 385366 - DNA, 25 bp, Artificial
  probe
  misc_feature (1)..(25): SEQ ID NO: 4557; WAN0249JI; Start 45; Stop 69
actagtataacgcaggtattcggta

SEQ ID NO: 385367 - DNA, 25 bp, Artificial
  probe
  misc_feature (1)..(25): SEQ ID NO: 4557; WAN0249JI; Start 61; Stop 85
tattcggtagaaggcaagtatttat

SEQ ID NO: 385368 - DNA, 25 bp, Artificial
  probe
  misc_feature (1)..(25): SEQ ID NO: 4557; WAN0249JI; Start 56; Stop 80
gcaggtattcggtagaaggcaagta

SEQ ID NO: 385369 - DNA, 25 bp, Artificial
  probe
  misc_feature (1)..(25): SEQ ID NO: 4557; WAN0249JI; Start 119; Stop 143
aaatccagccctttctacttgcata

SEQ ID NO: 385370 - DNA, 25 bp, Artificial
  probe
  misc_feature (1)..(25): SEQ ID NO: 4557; WAN0249JI; Start 51; Stop 75
ataacgcaggtattcggtagaaggc

SEQ ID NO: 385371 - DNA, 25 bp, Artificial
  probe
  misc_feature (1)..(25): SEQ ID NO: 4557; WAN0249JI; Start 120; Stop 144
aatccagccctttctacttgcatag

SEQ ID NO: 385372 - DNA, 25 bp, Artificial
  probe
  misc_feature (1)..(25): SEQ ID NO: 4557; WAN0249JI; Start 1; Stop 25
tatcccctccttgatagtttgaatg

SEQ ID NO: 385373 - DNA, 25 bp, Artificial
  probe
  misc_feature (1)..(25): SEQ ID NO: 4557; WAN0249JI; Start 4; Stop 28
cccctccttgatagtttgaatgcta

SEQ ID NO: 385374 - DNA, 25 bp, Artificial
  probe
  misc_feature (1)..(25): SEQ ID NO: 4557; WAN0249JI; Start 44; Stop 68
tactagtataacgcaggtattcggt

SEQ ID NO: 385375 - DNA, 25 bp, Artificial
  probe
  misc_feature (1)..(25): SEQ ID NO: 4557; WAN0249JI; Start 7; Stop 31
ctccttgatagtttgaatgctaaaa

SEQ ID NO: 385376 - DNA, 25 bp, Artificial
  probe
  misc_feature (1)..(25): SEQ ID NO: 4557; WAN0249JI; Start 2; Stop 26
atcccctccttgatagtttgaatgc

SEQ ID NO: 385377 - DNA, 25 bp, Artificial
  probe
  misc_feature (1)..(25): SEQ ID NO: 4557; WAN0249JI; Start 121; Stop 145
atccagccctttctacttgcatagt

SEQ ID NO: 385378 - DNA, 25 bp, Artificial
  probe
  misc_feature (1)..(25): SEQ ID NO: 4557; WAN0249JI; Start 3; Stop 27
tcccctccttgatagtttgaatgct

SEQ ID NO: 385379 - DNA, 25 bp, Artificial
  probe
  misc_feature (1)..(25): SEQ ID NO: 4557; WAN0249JI; Start 122; Stop 146
tccagccctttctacttgcatagtc

SEQ ID NO: 385380 - DNA, 25 bp, Artificial
  probe
  misc_feature (1)..(25): SEQ ID NO: 4557; WAN0249JI; Start 118; Stop 142
aaaatccagccctttctacttgcat

SEQ ID NO: 385381 - DNA, 25 bp, Artificial
  probe
  misc_feature (1)..(25): SEQ ID NO: 4558; WAN024A7B; Start 24; Stop 48
tgtaaccattatatcatgcctgagg

SEQ ID NO: 385382 - DNA, 25 bp, Artificial
  probe
  misc_feature (1)..(25): SEQ ID NO: 4558; WAN024A7B; Start 22; Stop 46
tctgtaaccattatatcatgcctga

SEQ ID NO: 385383 - DNA, 25 bp, Artificial
  probe
  misc_feature (1)..(25): SEQ ID NO: 4558; WAN024A7B; Start 21; Stop 45
ttctgtaaccattatatcatgcctg

SEQ ID NO: 385384 - DNA, 25 bp, Artificial
  probe
  misc_feature (1)..(25): SEQ ID NO: 4558; WAN024A7B; Start 19; Stop 43
acttctgtaaccattatatcatgcc

SEQ ID NO: 385385 - DNA, 25 bp, Artificial
  probe
  misc_feature (1)..(25): SEQ ID NO: 4558; WAN024A7B; Start 23; Stop 47
ctgtaaccattatatcatgcctgag

SEQ ID NO: 385386 - DNA, 25 bp, Artificial
  probe
  misc_feature (1)..(25): SEQ ID NO: 4558; WAN024A7B; Start 20; Stop 44
cttctgtaaccattatatcatgcct

SEQ ID NO: 385387 - DNA, 25 bp, Artificial
  probe
  misc_feature (1)..(25): SEQ ID NO: 4558; WAN024A7B; Start 18; Stop 42
gacttctgtaaccattatatcatgc

SEQ ID NO: 385388 - DNA, 25 bp, Artificial
  probe
  misc_feature (1)..(25): SEQ ID NO: 4558; WAN024A7B; Start 26; Stop 50
taaccattatatcatgcctgaggga

SEQ ID NO: 385389 - DNA, 25 bp, Artificial
  probe
  misc_feature (1)..(25): SEQ ID NO: 4558; WAN024A7B; Start 25; Stop 49
gtaaccattatatcatgcctgaggg

SEQ ID NO: 385390 - DNA, 25 bp, Artificial
  probe
  misc_feature (1)..(25): SEQ ID NO: 4558; WAN024A7B; Start 28; Stop 52
accattatatcatgcctgagggaaa

SEQ ID NO: 385391 - DNA, 25 bp, Artificial
  probe
  misc_feature (1)..(25): SEQ ID NO: 4558; WAN024A7B; Start 27; Stop 51
aaccattatatcatgcctgagggaa

SEQ ID NO: 385392 - DNA, 25 bp, Artificial
  probe
  misc_feature (1)..(25): SEQ ID NO: 4558; WAN024A7B; Start 17; Stop 41
agacttctgtaaccattatatcatg

SEQ ID NO: 385393 - DNA, 25 bp, Artificial
  probe
  misc_feature (1)..(25): SEQ ID NO: 4558; WAN024A7B; Start 7; Stop 31
tcctctttctagacttctgtaacca

SEQ ID NO: 385394 - DNA, 25 bp, Artificial
  probe
  misc_feature (1)..(25): SEQ ID NO: 4558; WAN024A7B; Start 8; Stop 32
cctctttctagacttctgtaaccat

SEQ ID NO: 385395 - DNA, 25 bp, Artificial
  probe
  misc_feature (1)..(25): SEQ ID NO: 4558; WAN024A7B; Start 6; Stop 30
ttcctctttctagacttctgtaacc

SEQ ID NO: 385396 - DNA, 25 bp, Artificial
  probe
  misc_feature (1)..(25): SEQ ID NO: 4558; WAN024A7B; Start 15; Stop 39
ctagacttctgtaaccattatatca

SEQ ID NO: 385397 - DNA, 25 bp, Artificial
  probe
  misc_feature (1)..(25): SEQ ID NO: 4558; WAN024A7B; Start 33; Stop 57
tatatcatgcctgagggaaaatcaa

SEQ ID NO: 385398 - DNA, 25 bp, Artificial
  probe
  misc_feature (1)..(25): SEQ ID NO: 4558; WAN024A7B; Start 32; Stop 56
ttatatcatgcctgagggaaaatca

SEQ ID NO: 385399 - DNA, 25 bp, Artificial
  probe
  misc_feature (1)..(25): SEQ ID NO: 4558; WAN024A7B; Start 34; Stop 58
atatcatgcctgagggaaaatcaaa

SEQ ID NO: 385400 - DNA, 25 bp, Artificial
  probe
  misc_feature (1)..(25): SEQ ID NO: 4558; WAN024A7B; Start 29; Stop 53
ccattatatcatgcctgagggaaaa

SEQ ID NO: 385401 - DNA, 25 bp, Artificial
  probe
  misc_feature (1)..(25): SEQ ID NO: 4558; WAN024A7B; Start 35; Stop 59
tatcatgcctgagggaaaatcaaaa

SEQ ID NO: 385402 - DNA, 25 bp, Artificial
  probe
  misc_feature (1)..(25): SEQ ID NO: 4558; WAN024A7B; Start 9; Stop 33
ctctttctagacttctgtaaccatt

SEQ ID NO: 385403 - DNA, 25 bp, Artificial
  probe
  misc_feature (1)..(25): SEQ ID NO: 4558; WAN024A7B; Start 30; Stop 54
cattatatcatgcctgagggaaaat

SEQ ID NO: 385404 - DNA, 25 bp, Artificial
  probe
  misc_feature (1)..(25): SEQ ID NO: 4558; WAN024A7B; Start 74; Stop 98
cccactgtttatcttcttttacttt

SEQ ID NO: 385405 - DNA, 25 bp, Artificial
  probe
  misc_feature (1)..(25): SEQ ID NO: 4558; WAN024A7B; Start 31; Stop 55
attatatcatgcctgagggaaaatc

SEQ ID NO: 385406 - DNA, 25 bp, Artificial
  probe
  misc_feature (1)..(25): SEQ ID NO: 4558; WAN024A7B; Start 10; Stop 34
tctttctagacttctgtaaccatta

SEQ ID NO: 385407 - DNA, 25 bp, Artificial
  probe
  misc_feature (1)..(25): SEQ ID NO: 4558; WAN024A7B; Start 14; Stop 38
tctagacttctgtaaccattatatc

SEQ ID NO: 385408 - DNA, 25 bp, Artificial
  probe
  misc_feature (1)..(25): SEQ ID NO: 4558; WAN024A7B; Start 11; Stop 35
ctttctagacttctgtaaccattat

SEQ ID NO: 385409 - DNA, 25 bp, Artificial
  probe
  misc_feature (1)..(25): SEQ ID NO: 4558; WAN024A7B; Start 75; Stop 99
ccactgtttatcttcttttacttta

SEQ ID NO: 385410 - DNA, 25 bp, Artificial
  probe
  misc_feature (1)..(25): SEQ ID NO: 4559; WAN0249PZ; Start 142; Stop 166
ggcaatccagtctcaaacatatatt

SEQ ID NO: 385411 - DNA, 25 bp, Artificial
  probe
  misc_feature (1)..(25): SEQ ID NO: 4559; WAN0249PZ; Start 141; Stop 165
tggcaatccagtctcaaacatatat

SEQ ID NO: 385412 - DNA, 25 bp, Artificial
  probe
  misc_feature (1)..(25): SEQ ID NO: 4559; WAN0249PZ; Start 143; Stop 167
gcaatccagtctcaaacatatatta

SEQ ID NO: 385413 - DNA, 25 bp, Artificial
  probe
  misc_feature (1)..(25): SEQ ID NO: 4559; WAN0249PZ; Start 107; Stop 131
aaaagtctgttgattttgaccatca

SEQ ID NO: 385414 - DNA, 25 bp, Artificial
  probe
  misc_feature (1)..(25): SEQ ID NO: 4559; WAN0249PZ; Start 108; Stop 132
aaagtctgttgattttgaccatcat

SEQ ID NO: 385415 - DNA, 25 bp, Artificial
  probe
  misc_feature (1)..(25): SEQ ID NO: 4559; WAN0249PZ; Start 110; Stop 134
agtctgttgattttgaccatcataa

SEQ ID NO: 385416 - DNA, 25 bp, Artificial
  probe
  misc_feature (1)..(25): SEQ ID NO: 4559; WAN0249PZ; Start 109; Stop 133
aagtctgttgattttgaccatcata

SEQ ID NO: 385417 - DNA, 25 bp, Artificial
  probe
  misc_feature (1)..(25): SEQ ID NO: 4559; WAN0249PZ; Start 111; Stop 135
gtctgttgattttgaccatcataaa

SEQ ID NO: 385418 - DNA, 25 bp, Artificial
  probe
  misc_feature (1)..(25): SEQ ID NO: 4559; WAN0249PZ; Start 112; Stop 136
tctgttgattttgaccatcataaaa

SEQ ID NO: 385419 - DNA, 25 bp, Artificial
  probe
  misc_feature (1)..(25): SEQ ID NO: 4559; WAN0249PZ; Start 140; Stop 164
ctggcaatccagtctcaaacatata

SEQ ID NO: 385420 - DNA, 25 bp, Artificial
  probe
  misc_feature (1)..(25): SEQ ID NO: 4560; WAN024A8C; Start 169; Stop 193
aaagctagaaaggagtttactgtat

SEQ ID NO: 385421 - DNA, 25 bp, Artificial
  probe
  misc_feature (1)..(25): SEQ ID NO: 4560; WAN024A8C; Start 167; Stop 191
ataaagctagaaaggagtttactgt

SEQ ID NO: 385422 - DNA, 25 bp, Artificial
  probe
  misc_feature (1)..(25): SEQ ID NO: 4560; WAN024A8C; Start 168; Stop 192
taaagctagaaaggagtttactgta

SEQ ID NO: 385423 - DNA, 25 bp, Artificial
  probe
  misc_feature (1)..(25): SEQ ID NO: 4560; WAN024A8C; Start 162; Stop 186
aaagtataaagctagaaaggagttt

SEQ ID NO: 385424 - DNA, 25 bp, Artificial
  probe
  misc_feature (1)..(25): SEQ ID NO: 4560; WAN024A8C; Start 166; Stop 190
tataaagctagaaaggagtttactg

SEQ ID NO: 385425 - DNA, 25 bp, Artificial
  probe
  misc_feature (1)..(25): SEQ ID NO: 4560; WAN024A8C; Start 165; Stop 189
gtataaagctagaaaggagtttact

SEQ ID NO: 385426 - DNA, 25 bp, Artificial
  probe
  misc_feature (1)..(25): SEQ ID NO: 4560; WAN024A8C; Start 164; Stop 188
agtataaagctagaaaggagtttac

SEQ ID NO: 385427 - DNA, 25 bp, Artificial
  probe
  misc_feature (1)..(25): SEQ ID NO: 4560; WAN024A8C; Start 161; Stop 185
taaagtataaagctagaaaggagtt

SEQ ID NO: 385428 - DNA, 25 bp, Artificial
  probe
  misc_feature (1)..(25): SEQ ID NO: 4560; WAN024A8C; Start 163; Stop 187
aagtataaagctagaaaggagttta

SEQ ID NO: 385429 - DNA, 25 bp, Artificial
  probe
  misc_feature (1)..(25): SEQ ID NO: 4560; WAN024A8C; Start 160; Stop 184
ataaagtataaagctagaaaggagt

SEQ ID NO: 385430 - DNA, 25 bp, Artificial
  probe
  misc_feature (1)..(25): SEQ ID NO: 4560; WAN024A8C; Start 158; Stop 182
tgataaagtataaagctagaaagga

SEQ ID NO: 385431 - DNA, 25 bp, Artificial
  probe
  misc_feature (1)..(25): SEQ ID NO: 4560; WAN024A8C; Start 37; Stop 61
cagtttgatttatttagaaaaccga

SEQ ID NO: 385432 - DNA, 25 bp, Artificial
  probe
  misc_feature (1)..(25): SEQ ID NO: 4560; WAN024A8C; Start 36; Stop 60
tcagtttgatttatttagaaaaccg

SEQ ID NO: 385433 - DNA, 25 bp, Artificial
  probe
  misc_feature (1)..(25): SEQ ID NO: 4560; WAN024A8C; Start 44; Stop 68
atttatttagaaaaccgattctcag

SEQ ID NO: 385434 - DNA, 25 bp, Artificial
  probe
  misc_feature (1)..(25): SEQ ID NO: 4560; WAN024A8C; Start 43; Stop 67
gatttatttagaaaaccgattctca

SEQ ID NO: 385435 - DNA, 25 bp, Artificial
  probe
  misc_feature (1)..(25): SEQ ID NO: 4560; WAN024A8C; Start 42; Stop 66
tgatttatttagaaaaccgattctc

SEQ ID NO: 385436 - DNA, 25 bp, Artificial
  probe
  misc_feature (1)..(25): SEQ ID NO: 4560; WAN024A8C; Start 38; Stop 62
agtttgatttatttagaaaaccgat

SEQ ID NO: 385437 - DNA, 25 bp, Artificial
  probe
  misc_feature (1)..(25): SEQ ID NO: 4560; WAN024A8C; Start 41; Stop 65
ttgatttatttagaaaaccgattct

SEQ ID NO: 385438 - DNA, 25 bp, Artificial
  probe
  misc_feature (1)..(25): SEQ ID NO: 4560; WAN024A8C; Start 39; Stop 63
gtttgatttatttagaaaaccgatt

SEQ ID NO: 385439 - DNA, 25 bp, Artificial
  probe
  misc_feature (1)..(25): SEQ ID NO: 4560; WAN024A8C; Start 22; Stop 46
tgttatgtaaatgatcagtttgatt

SEQ ID NO: 385440 - DNA, 25 bp, Artificial
  probe
  misc_feature (1)..(25): SEQ ID NO: 4560; WAN024A8C; Start 21; Stop 45
atgttatgtaaatgatcagtttgat

SEQ ID NO: 385441 - DNA, 25 bp, Artificial
  probe
  misc_feature (1)..(25): SEQ ID NO: 4561; WAN024GN4; Start 299; Stop 323
aagacaactactatatcaaggtgcc

SEQ ID NO: 385442 - DNA, 25 bp, Artificial
  probe
  misc_feature (1)..(25): SEQ ID NO: 4561; WAN024GN4; Start 301; Stop 325
gacaactactatatcaaggtgccag

SEQ ID NO: 385443 - DNA, 25 bp, Artificial
  probe
  misc_feature (1)..(25): SEQ ID NO: 4561; WAN024GN4; Start 300; Stop 324
agacaactactatatcaaggtgcca

SEQ ID NO: 385444 - DNA, 25 bp, Artificial
  probe
  misc_feature (1)..(25): SEQ ID NO: 4561; WAN024GN4; Start 148; Stop 172
aagattgttgacatggttgaattgc

SEQ ID NO: 385445 - DNA, 25 bp, Artificial
  probe
  misc_feature (1)..(25): SEQ ID NO: 4561; WAN024GN4; Start 145; Stop 169
tctaagattgttgacatggttgaat

SEQ ID NO: 385446 - DNA, 25 bp, Artificial
  probe
  misc_feature (1)..(25): SEQ ID NO: 4561; WAN024GN4; Start 306; Stop 330
ctactatatcaaggtgccagctatc

SEQ ID NO: 385447 - DNA, 25 bp, Artificial
  probe
  misc_feature (1)..(25): SEQ ID NO: 4561; WAN024GN4; Start 302; Stop 326
acaactactatatcaaggtgccagc

SEQ ID NO: 385448 - DNA, 25 bp, Artificial
  probe
  misc_feature (1)..(25): SEQ ID NO: 4561; WAN024GN4; Start 150; Stop 174
gattgttgacatggttgaattgctg

SEQ ID NO: 385449 - DNA, 25 bp, Artificial
  probe
  misc_feature (1)..(25): SEQ ID NO: 4561; WAN024GN4; Start 149; Stop 173
agattgttgacatggttgaattgct

SEQ ID NO: 385450 - DNA, 25 bp, Artificial
  probe
  misc_feature (1)..(25): SEQ ID NO: 4561; WAN024GN4; Start 305; Stop 329
actactatatcaaggtgccagctat

SEQ ID NO: 385451 - DNA, 25 bp, Artificial
  probe
  misc_feature (1)..(25): SEQ ID NO: 4561; WAN024GN4; Start 147; Stop 171
taagattgttgacatggttgaattg

SEQ ID NO: 385452 - DNA, 25 bp, Artificial
  probe
  misc_feature (1)..(25): SEQ ID NO: 4561; WAN024GN4; Start 304; Stop 328
aactactatatcaaggtgccagcta

SEQ ID NO: 385453 - DNA, 25 bp, Artificial
  probe
  misc_feature (1)..(25): SEQ ID NO: 4561; WAN024GN4; Start 135; Stop 159
gaccaccttgtctaagattgttgac

SEQ ID NO: 385454 - DNA, 25 bp, Artificial
  probe
  misc_feature (1)..(25): SEQ ID NO: 4561; WAN024GN4; Start 146; Stop 170
ctaagattgttgacatggttgaatt

SEQ ID NO: 385455 - DNA, 25 bp, Artificial
  probe
  misc_feature (1)..(25): SEQ ID NO: 4561; WAN024GN4; Start 144; Stop 168
gtctaagattgttgacatggttgaa

SEQ ID NO: 385456 - DNA, 25 bp, Artificial
  probe
  misc_feature (1)..(25): SEQ ID NO: 4561; WAN024GN4; Start 307; Stop 331
tactatatcaaggtgccagctatcc

SEQ ID NO: 385457 - DNA, 25 bp, Artificial
  probe
  misc_feature (1)..(25): SEQ ID NO: 4561; WAN024GN4; Start 57; Stop 81
aattacgcaagaagaggtaacacac

SEQ ID NO: 385458 - DNA, 25 bp, Artificial
  probe
  misc_feature (1)..(25): SEQ ID NO: 4561; WAN024GN4; Start 303; Stop 327
caactactatatcaaggtgccagct

SEQ ID NO: 385459 - DNA, 25 bp, Artificial
  probe
  misc_feature (1)..(25): SEQ ID NO: 4561; WAN024GN4; Start 151; Stop 175
attgttgacatggttgaattgctgg

SEQ ID NO: 385460 - DNA, 25 bp, Artificial
  probe
  misc_feature (1)..(25): SEQ ID NO: 4561; WAN024GN4; Start 310; Stop 334
tatatcaaggtgccagctatcctag

SEQ ID NO: 385461 - DNA, 25 bp, Artificial
  probe
  misc_feature (1)..(25): SEQ ID NO: 4561; WAN024GN4; Start 309; Stop 333
ctatatcaaggtgccagctatccta

SEQ ID NO: 385462 - DNA, 25 bp, Artificial
  probe
  misc_feature (1)..(25): SEQ ID NO: 4561; WAN024GN4; Start 134; Stop 158
cgaccaccttgtctaagattgttga

SEQ ID NO: 385463 - DNA, 25 bp, Artificial
  probe
  misc_feature (1)..(25): SEQ ID NO: 4561; WAN024GN4; Start 56; Stop 80
aaattacgcaagaagaggtaacaca

SEQ ID NO: 385464 - DNA, 25 bp, Artificial
  probe
  misc_feature (1)..(25): SEQ ID NO: 4561; WAN024GN4; Start 311; Stop 335
atatcaaggtgccagctatcctaga

SEQ ID NO: 385465 - DNA, 25 bp, Artificial
  probe
  misc_feature (1)..(25): SEQ ID NO: 4561; WAN024GN4; Start 308; Stop 332
actatatcaaggtgccagctatcct

SEQ ID NO: 385466 - DNA, 25 bp, Artificial
  probe
  misc_feature (1)..(25): SEQ ID NO: 4561; WAN024GN4; Start 58; Stop 82
attacgcaagaagaggtaacacacg

SEQ ID NO: 385467 - DNA, 25 bp, Artificial
  probe
  misc_feature (1)..(25): SEQ ID NO: 4561; WAN024GN4; Start 29; Stop 53
atcatttcacgaaaggatgcaagat

SEQ ID NO: 385468 - DNA, 25 bp, Artificial
  probe
  misc_feature (1)..(25): SEQ ID NO: 4561; WAN024GN4; Start 312; Stop 336
tatcaaggtgccagctatcctagac

SEQ ID NO: 385469 - DNA, 25 bp, Artificial
  probe
  misc_feature (1)..(25): SEQ ID NO: 4561; WAN024GN4; Start 49; Stop 73
aagatgaaaattacgcaagaagagg

SEQ ID NO: 385470 - DNA, 25 bp, Artificial
  probe
  misc_feature (1)..(25): SEQ ID NO: 4561; WAN024GN4; Start 51; Stop 75
gatgaaaattacgcaagaagaggta

SEQ ID NO: 385471 - DNA, 25 bp, Artificial
  probe
  misc_feature (1)..(25): SEQ ID NO: 4561; WAN024GN4; Start 50; Stop 74
agatgaaaattacgcaagaagaggt

SEQ ID NO: 385472 - DNA, 25 bp, Artificial
  probe
  misc_feature (1)..(25): SEQ ID NO: 4561; WAN024GN4; Start 47; Stop 71
gcaagatgaaaattacgcaagaaga

SEQ ID NO: 385473 - DNA, 25 bp, Artificial
  probe
  misc_feature (1)..(25): SEQ ID NO: 4561; WAN024GN4; Start 133; Stop 157
gcgaccaccttgtctaagattgttg

SEQ ID NO: 385474 - DNA, 25 bp, Artificial
  probe
  misc_feature (1)..(25): SEQ ID NO: 4562; WAN024AJE; Start 16; Stop 40
ttagaagaaagagtcacaaacacac

SEQ ID NO: 385475 - DNA, 25 bp, Artificial
  probe
  misc_feature (1)..(25): SEQ ID NO: 4562; WAN024AJE; Start 75; Stop 99
atagtaggagtagaaatggagttcg

SEQ ID NO: 385476 - DNA, 25 bp, Artificial
  probe
  misc_feature (1)..(25): SEQ ID NO: 4562; WAN024AJE; Start 15; Stop 39
gttagaagaaagagtcacaaacaca

SEQ ID NO: 385477 - DNA, 25 bp, Artificial
  probe
  misc_feature (1)..(25): SEQ ID NO: 4562; WAN024AJE; Start 14; Stop 38
agttagaagaaagagtcacaaacac

SEQ ID NO: 385478 - DNA, 25 bp, Artificial
  probe
  misc_feature (1)..(25): SEQ ID NO: 4562; WAN024AJE; Start 13; Stop 37
cagttagaagaaagagtcacaaaca

SEQ ID NO: 385479 - DNA, 25 bp, Artificial
  probe
  misc_feature (1)..(25): SEQ ID NO: 4562; WAN024AJE; Start 17; Stop 41
tagaagaaagagtcacaaacacact

SEQ ID NO: 385480 - DNA, 25 bp, Artificial
  probe
  misc_feature (1)..(25): SEQ ID NO: 4562; WAN024AJE; Start 12; Stop 36
tcagttagaagaaagagtcacaaac

SEQ ID NO: 385481 - DNA, 25 bp, Artificial
  probe
  misc_feature (1)..(25): SEQ ID NO: 4562; WAN024AJE; Start 18; Stop 42
agaagaaagagtcacaaacacactt

SEQ ID NO: 385482 - DNA, 25 bp, Artificial
  probe
  misc_feature (1)..(25): SEQ ID NO: 4562; WAN024AJE; Start 9; Stop 33
gattcagttagaagaaagagtcaca

SEQ ID NO: 385483 - DNA, 25 bp, Artificial
  probe
  misc_feature (1)..(25): SEQ ID NO: 4562; WAN024AJE; Start 11; Stop 35
ttcagttagaagaaagagtcacaaa

SEQ ID NO: 385484 - DNA, 25 bp, Artificial
  probe
  misc_feature (1)..(25): SEQ ID NO: 4562; WAN024AJE; Start 8; Stop 32
agattcagttagaagaaagagtcac

SEQ ID NO: 385485 - DNA, 25 bp, Artificial
  probe
  misc_feature (1)..(25): SEQ ID NO: 4562; WAN024AJE; Start 10; Stop 34
attcagttagaagaaagagtcacaa

SEQ ID NO: 385486 - DNA, 25 bp, Artificial
  probe
  misc_feature (1)..(25): SEQ ID NO: 4562; WAN024AJE; Start 7; Stop 31
aagattcagttagaagaaagagtca

SEQ ID NO: 385487 - DNA, 25 bp, Artificial
  probe
  misc_feature (1)..(25): SEQ ID NO: 4562; WAN024AJE; Start 76; Stop 100
tagtaggagtagaaatggagttcga

SEQ ID NO: 385488 - DNA, 25 bp, Artificial
  probe
  misc_feature (1)..(25): SEQ ID NO: 4562; WAN024AJE; Start 3; Stop 27
tggtaagattcagttagaagaaaga

SEQ ID NO: 385489 - DNA, 25 bp, Artificial
  probe
  misc_feature (1)..(25): SEQ ID NO: 4562; WAN024AJE; Start 79; Stop 103
taggagtagaaatggagttcgagac

SEQ ID NO: 385490 - DNA, 25 bp, Artificial
  probe
  misc_feature (1)..(25): SEQ ID NO: 4562; WAN024AJE; Start 78; Stop 102
gtaggagtagaaatggagttcgaga

SEQ ID NO: 385491 - DNA, 25 bp, Artificial
  probe
  misc_feature (1)..(25): SEQ ID NO: 4562; WAN024AJE; Start 77; Stop 101
agtaggagtagaaatggagttcgag

SEQ ID NO: 385492 - DNA, 25 bp, Artificial
  probe
  misc_feature (1)..(25): SEQ ID NO: 4562; WAN024AJE; Start 74; Stop 98
aatagtaggagtagaaatggagttc

SEQ ID NO: 385493 - DNA, 25 bp, Artificial
  probe
  misc_feature (1)..(25): SEQ ID NO: 4562; WAN024AJE; Start 19; Stop 43
gaagaaagagtcacaaacacacttt

SEQ ID NO: 385494 - DNA, 25 bp, Artificial
  probe
  misc_feature (1)..(25): SEQ ID NO: 4562; WAN024AJE; Start 73; Stop 97
aaatagtaggagtagaaatggagtt

SEQ ID NO: 385495 - DNA, 25 bp, Artificial
  probe
  misc_feature (1)..(25): SEQ ID NO: 4562; WAN024AJE; Start 4; Stop 28
ggtaagattcagttagaagaaagag

SEQ ID NO: 385496 - DNA, 25 bp, Artificial
  probe
  misc_feature (1)..(25): SEQ ID NO: 4562; WAN024AJE; Start 20; Stop 44
aagaaagagtcacaaacacactttg

SEQ ID NO: 385497 - DNA, 25 bp, Artificial
  probe
  misc_feature (1)..(25): SEQ ID NO: 4562; WAN024AJE; Start 2; Stop 26
atggtaagattcagttagaagaaag

SEQ ID NO: 385498 - DNA, 25 bp, Artificial
  probe
  misc_feature (1)..(25): SEQ ID NO: 4562; WAN024AJE; Start 5; Stop 29
gtaagattcagttagaagaaagagt

SEQ ID NO: 385499 - DNA, 25 bp, Artificial
  probe
  misc_feature (1)..(25): SEQ ID NO: 4562; WAN024AJE; Start 6; Stop 30
taagattcagttagaagaaagagtc

SEQ ID NO: 385500 - DNA, 25 bp, Artificial
  probe
  misc_feature (1)..(25): SEQ ID NO: 4562; WAN024AJE; Start 72; Stop 96
aaaatagtaggagtagaaatggagt

SEQ ID NO: 385501 - DNA, 25 bp, Artificial
  probe
  misc_feature (1)..(25): SEQ ID NO: 4562; WAN024AJE; Start 1; Stop 25
tatggtaagattcagttagaagaaa

SEQ ID NO: 385502 - DNA, 25 bp, Artificial
  probe
  misc_feature (1)..(25): SEQ ID NO: 4562; WAN024AJE; Start 69; Stop 93
ggtaaaatagtaggagtagaaatgg

SEQ ID NO: 385503 - DNA, 25 bp, Artificial
  probe
  misc_feature (1)..(25): SEQ ID NO: 4562; WAN024AJE; Start 68; Stop 92
tggtaaaatagtaggagtagaaatg

SEQ ID NO: 385504 - DNA, 25 bp, Artificial
  probe
  misc_feature (1)..(25): SEQ ID NO: 4562; WAN024AJE; Start 70; Stop 94
gtaaaatagtaggagtagaaatgga

SEQ ID NO: 385505 - DNA, 25 bp, Artificial
  probe
  misc_feature (1)..(25): SEQ ID NO: 4562; WAN024AJE; Start 71; Stop 95
taaaatagtaggagtagaaatggag

SEQ ID NO: 385506 - DNA, 25 bp, Artificial
  probe
  misc_feature (1)..(25): SEQ ID NO: 4562; WAN024AJE; Start 66; Stop 90
aatggtaaaatagtaggagtagaaa

SEQ ID NO: 385507 - DNA, 25 bp, Artificial
  probe
  misc_feature (1)..(25): SEQ ID NO: 4563; WAN024A22; Start 31; Stop 55
gaaacgataacaaagagactagcag

SEQ ID NO: 385508 - DNA, 25 bp, Artificial
  probe
  misc_feature (1)..(25): SEQ ID NO: 4563; WAN024A22; Start 30; Stop 54
tgaaacgataacaaagagactagca

SEQ ID NO: 385509 - DNA, 25 bp, Artificial
  probe
  misc_feature (1)..(25): SEQ ID NO: 4563; WAN024A22; Start 29; Stop 53
atgaaacgataacaaagagactagc

SEQ ID NO: 385510 - DNA, 25 bp, Artificial
  probe
  misc_feature (1)..(25): SEQ ID NO: 4563; WAN024A22; Start 34; Stop 58
acgataacaaagagactagcagttt

SEQ ID NO: 385511 - DNA, 25 bp, Artificial
  probe
  misc_feature (1)..(25): SEQ ID NO: 4563; WAN024A22; Start 33; Stop 57
aacgataacaaagagactagcagtt

SEQ ID NO: 385512 - DNA, 25 bp, Artificial
  probe
  misc_feature (1)..(25): SEQ ID NO: 4563; WAN024A22; Start 32; Stop 56
aaacgataacaaagagactagcagt

SEQ ID NO: 385513 - DNA, 25 bp, Artificial
  probe
  misc_feature (1)..(25): SEQ ID NO: 4563; WAN024A22; Start 27; Stop 51
agatgaaacgataacaaagagacta

SEQ ID NO: 385514 - DNA, 25 bp, Artificial
  probe
  misc_feature (1)..(25): SEQ ID NO: 4563; WAN024A22; Start 26; Stop 50
tagatgaaacgataacaaagagact

SEQ ID NO: 385515 - DNA, 25 bp, Artificial
  probe
  misc_feature (1)..(25): SEQ ID NO: 4563; WAN024A22; Start 28; Stop 52
gatgaaacgataacaaagagactag

SEQ ID NO: 385516 - DNA, 25 bp, Artificial
  probe
  misc_feature (1)..(25): SEQ ID NO: 4563; WAN024A22; Start 25; Stop 49
atagatgaaacgataacaaagagac

SEQ ID NO: 385517 - DNA, 25 bp, Artificial
  probe
  misc_feature (1)..(25): SEQ ID NO: 4563; WAN024A22; Start 24; Stop 48
gatagatgaaacgataacaaagaga

SEQ ID NO: 385518 - DNA, 25 bp, Artificial
  probe
  misc_feature (1)..(25): SEQ ID NO: 4563; WAN024A22; Start 23; Stop 47
agatagatgaaacgataacaaagag

SEQ ID NO: 385519 - DNA, 25 bp, Artificial
  probe
  misc_feature (1)..(25): SEQ ID NO: 4563; WAN024A22; Start 19; Stop 43
acaaagatagatgaaacgataacaa

SEQ ID NO: 385520 - DNA, 25 bp, Artificial
  probe
  misc_feature (1)..(25): SEQ ID NO: 4563; WAN024A22; Start 18; Stop 42
aacaaagatagatgaaacgataaca

SEQ ID NO: 385521 - DNA, 25 bp, Artificial
  probe
  misc_feature (1)..(25): SEQ ID NO: 4563; WAN024A22; Start 35; Stop 59
cgataacaaagagactagcagtttg

SEQ ID NO: 385522 - DNA, 25 bp, Artificial
  probe
  misc_feature (1)..(25): SEQ ID NO: 4563; WAN024A22; Start 41; Stop 65
caaagagactagcagtttgtgtttg

SEQ ID NO: 385523 - DNA, 25 bp, Artificial
  probe
  misc_feature (1)..(25): SEQ ID NO: 4563; WAN024A22; Start 22; Stop 46
aagatagatgaaacgataacaaaga

SEQ ID NO: 385524 - DNA, 25 bp, Artificial
  probe
  misc_feature (1)..(25): SEQ ID NO: 4563; WAN024A22; Start 20; Stop 44
caaagatagatgaaacgataacaaa

SEQ ID NO: 385525 - DNA, 25 bp, Artificial
  probe
  misc_feature (1)..(25): SEQ ID NO: 4563; WAN024A22; Start 42; Stop 66
aaagagactagcagtttgtgtttgc

SEQ ID NO: 385526 - DNA, 25 bp, Artificial
  probe
  misc_feature (1)..(25): SEQ ID NO: 4563; WAN024A22; Start 21; Stop 45
aaagatagatgaaacgataacaaag

SEQ ID NO: 385527 - DNA, 25 bp, Artificial
  probe
  misc_feature (1)..(25): SEQ ID NO: 4563; WAN024A22; Start 17; Stop 41
taacaaagatagatgaaacgataac

SEQ ID NO: 385528 - DNA, 25 bp, Artificial
  probe
  misc_feature (1)..(25): SEQ ID NO: 4563; WAN024A22; Start 14; Stop 38
ttttaacaaagatagatgaaacgat

SEQ ID NO: 385529 - DNA, 25 bp, Artificial
  probe
  misc_feature (1)..(25): SEQ ID NO: 4563; WAN024A22; Start 13; Stop 37
cttttaacaaagatagatgaaacga

SEQ ID NO: 385530 - DNA, 25 bp, Artificial
  probe
  misc_feature (1)..(25): SEQ ID NO: 4563; WAN024A22; Start 12; Stop 36
tcttttaacaaagatagatgaaacg

SEQ ID NO: 385531 - DNA, 25 bp, Artificial
  probe
  misc_feature (1)..(25): SEQ ID NO: 4564; WAN0249H3; Start 70; Stop 94
ctgtggtacaacatttaaaggagaa

SEQ ID NO: 385532 - DNA, 25 bp, Artificial
  probe
  misc_feature (1)..(25): SEQ ID NO: 4564; WAN0249H3; Start 71; Stop 95
tgtggtacaacatttaaaggagaaa

SEQ ID NO: 385533 - DNA, 25 bp, Artificial
  probe
  misc_feature (1)..(25): SEQ ID NO: 4564; WAN0249H3; Start 69; Stop 93
gctgtggtacaacatttaaaggaga

SEQ ID NO: 385534 - DNA, 25 bp, Artificial
  probe
  misc_feature (1)..(25): SEQ ID NO: 4564; WAN0249H3; Start 68; Stop 92
cgctgtggtacaacatttaaaggag

SEQ ID NO: 385535 - DNA, 25 bp, Artificial
  probe
  misc_feature (1)..(25): SEQ ID NO: 4564; WAN0249H3; Start 15; Stop 39
cttaagcaactagtaaatccgccag

SEQ ID NO: 385536 - DNA, 25 bp, Artificial
  probe
  misc_feature (1)..(25): SEQ ID NO: 4564; WAN0249H3; Start 67; Stop 91
ccgctgtggtacaacatttaaagga

SEQ ID NO: 385537 - DNA, 25 bp, Artificial
  probe
  misc_feature (1)..(25): SEQ ID NO: 4564; WAN0249H3; Start 72; Stop 96
gtggtacaacatttaaaggagaaaa

SEQ ID NO: 385538 - DNA, 25 bp, Artificial
  probe
  misc_feature (1)..(25): SEQ ID NO: 4564; WAN0249H3; Start 64; Stop 88
aagccgctgtggtacaacatttaaa

SEQ ID NO: 385539 - DNA, 25 bp, Artificial
  probe
  misc_feature (1)..(25): SEQ ID NO: 4564; WAN0249H3; Start 63; Stop 87
caagccgctgtggtacaacatttaa

SEQ ID NO: 385540 - DNA, 25 bp, Artificial
  probe
  misc_feature (1)..(25): SEQ ID NO: 4564; WAN0249H3; Start 16; Stop 40
ttaagcaactagtaaatccgccagc

SEQ ID NO: 385541 - DNA, 25 bp, Artificial
  probe
  misc_feature (1)..(25): SEQ ID NO: 4564; WAN0249H3; Start 65; Stop 89
agccgctgtggtacaacatttaaag

SEQ ID NO: 385542 - DNA, 25 bp, Artificial
  probe
  misc_feature (1)..(25): SEQ ID NO: 4564; WAN0249H3; Start 73; Stop 97
tggtacaacatttaaaggagaaaat

SEQ ID NO: 385543 - DNA, 25 bp, Artificial
  probe
  misc_feature (1)..(25): SEQ ID NO: 4564; WAN0249H3; Start 66; Stop 90
gccgctgtggtacaacatttaaagg

SEQ ID NO: 385544 - DNA, 25 bp, Artificial
  probe
  misc_feature (1)..(25): SEQ ID NO: 4564; WAN0249H3; Start 17; Stop 41
taagcaactagtaaatccgccagct

SEQ ID NO: 385545 - DNA, 25 bp, Artificial
  probe
  misc_feature (1)..(25): SEQ ID NO: 4564; WAN0249H3; Start 74; Stop 98
ggtacaacatttaaaggagaaaata

SEQ ID NO: 385546 - DNA, 25 bp, Artificial
  probe
  misc_feature (1)..(25): SEQ ID NO: 4565; WAN024AGO; Start 36; Stop 60
caaatctgtactttgagtaacttgg

SEQ ID NO: 385547 - DNA, 25 bp, Artificial
  probe
  misc_feature (1)..(25): SEQ ID NO: 4565; WAN024AGO; Start 30; Stop 54
cagcttcaaatctgtactttgagta

SEQ ID NO: 385548 - DNA, 25 bp, Artificial
  probe
  misc_feature (1)..(25): SEQ ID NO: 4565; WAN024AGO; Start 32; Stop 56
gcttcaaatctgtactttgagtaac

SEQ ID NO: 385549 - DNA, 25 bp, Artificial
  probe
  misc_feature (1)..(25): SEQ ID NO: 4565; WAN024AGO; Start 31; Stop 55
agcttcaaatctgtactttgagtaa

SEQ ID NO: 385550 - DNA, 25 bp, Artificial
  probe
  misc_feature (1)..(25): SEQ ID NO: 4565; WAN024AGO; Start 29; Stop 53
gcagcttcaaatctgtactttgagt

SEQ ID NO: 385551 - DNA, 25 bp, Artificial
  probe
  misc_feature (1)..(25): SEQ ID NO: 4565; WAN024AGO; Start 28; Stop 52
tgcagcttcaaatctgtactttgag

SEQ ID NO: 385552 - DNA, 25 bp, Artificial
  probe
  misc_feature (1)..(25): SEQ ID NO: 4565; WAN024AGO; Start 35; Stop 59
tcaaatctgtactttgagtaacttg

SEQ ID NO: 385553 - DNA, 25 bp, Artificial
  probe
  misc_feature (1)..(25): SEQ ID NO: 4565; WAN024AGO; Start 33; Stop 57
cttcaaatctgtactttgagtaact

SEQ ID NO: 385554 - DNA, 25 bp, Artificial
  probe
  misc_feature (1)..(25): SEQ ID NO: 4565; WAN024AGO; Start 34; Stop 58
ttcaaatctgtactttgagtaactt

SEQ ID NO: 385555 - DNA, 25 bp, Artificial
  probe
  misc_feature (1)..(25): SEQ ID NO: 4566; WAN024AKF; Start 4; Stop 28
tacttgacatctattctcagagtgc

SEQ ID NO: 385556 - DNA, 25 bp, Artificial
  probe
  misc_feature (1)..(25): SEQ ID NO: 4566; WAN024AKF; Start 3; Stop 27
ttacttgacatctattctcagagtg

SEQ ID NO: 385557 - DNA, 25 bp, Artificial
  probe
  misc_feature (1)..(25): SEQ ID NO: 4566; WAN024AKF; Start 134; Stop 158
ggtagaagataaccgttaagcctta

SEQ ID NO: 385558 - DNA, 25 bp, Artificial
  probe
  misc_feature (1)..(25): SEQ ID NO: 4566; WAN024AKF; Start 131; Stop 155
ataggtagaagataaccgttaagcc

SEQ ID NO: 385559 - DNA, 25 bp, Artificial
  probe
  misc_feature (1)..(25): SEQ ID NO: 4566; WAN024AKF; Start 132; Stop 156
taggtagaagataaccgttaagcct

SEQ ID NO: 385560 - DNA, 25 bp, Artificial
  probe
  misc_feature (1)..(25): SEQ ID NO: 4566; WAN024AKF; Start 220; Stop 244
gtgtttctggtagttgttcaagttt

SEQ ID NO: 385561 - DNA, 25 bp, Artificial
  probe
  misc_feature (1)..(25): SEQ ID NO: 4566; WAN024AKF; Start 133; Stop 157
aggtagaagataaccgttaagcctt

SEQ ID NO: 385562 - DNA, 25 bp, Artificial
  probe
  misc_feature (1)..(25): SEQ ID NO: 4566; WAN024AKF; Start 130; Stop 154
gataggtagaagataaccgttaagc

SEQ ID NO: 385563 - DNA, 25 bp, Artificial
  probe
  misc_feature (1)..(25): SEQ ID NO: 4566; WAN024AKF; Start 225; Stop 249
tctggtagttgttcaagtttattgc

SEQ ID NO: 385564 - DNA, 25 bp, Artificial
  probe
  misc_feature (1)..(25): SEQ ID NO: 4566; WAN024AKF; Start 226; Stop 250
ctggtagttgttcaagtttattgct

SEQ ID NO: 385565 - DNA, 25 bp, Artificial
  probe
  misc_feature (1)..(25): SEQ ID NO: 4566; WAN024AKF; Start 221; Stop 245
tgtttctggtagttgttcaagttta

SEQ ID NO: 385566 - DNA, 25 bp, Artificial
  probe
  misc_feature (1)..(25): SEQ ID NO: 4566; WAN024AKF; Start 216; Stop 240
tttcgtgtttctggtagttgttcaa

SEQ ID NO: 385567 - DNA, 25 bp, Artificial
  probe
  misc_feature (1)..(25): SEQ ID NO: 4566; WAN024AKF; Start 217; Stop 241
ttcgtgtttctggtagttgttcaag

SEQ ID NO: 385568 - DNA, 25 bp, Artificial
  probe
  misc_feature (1)..(25): SEQ ID NO: 4566; WAN024AKF; Start 2; Stop 26
attacttgacatctattctcagagt

SEQ ID NO: 385569 - DNA, 25 bp, Artificial
  probe
  misc_feature (1)..(25): SEQ ID NO: 4566; WAN024AKF; Start 227; Stop 251
tggtagttgttcaagtttattgcta

SEQ ID NO: 385570 - DNA, 25 bp, Artificial
  probe
  misc_feature (1)..(25): SEQ ID NO: 4566; WAN024AKF; Start 219; Stop 243
cgtgtttctggtagttgttcaagtt

SEQ ID NO: 385571 - DNA, 25 bp, Artificial
  probe
  misc_feature (1)..(25): SEQ ID NO: 4566; WAN024AKF; Start 90; Stop 114
aggttataggtagataaacgactga

SEQ ID NO: 385572 - DNA, 25 bp, Artificial
  probe
  misc_feature (1)..(25): SEQ ID NO: 4566; WAN024AKF; Start 93; Stop 117
ttataggtagataaacgactgagga

SEQ ID NO: 385573 - DNA, 25 bp, Artificial
  probe
  misc_feature (1)..(25): SEQ ID NO: 4566; WAN024AKF; Start 92; Stop 116
gttataggtagataaacgactgagg

SEQ ID NO: 385574 - DNA, 25 bp, Artificial
  probe
  misc_feature (1)..(25): SEQ ID NO: 4566; WAN024AKF; Start 91; Stop 115
ggttataggtagataaacgactgag

SEQ ID NO: 385575 - DNA, 25 bp, Artificial
  probe
  misc_feature (1)..(25): SEQ ID NO: 4566; WAN024AKF; Start 222; Stop 246
gtttctggtagttgttcaagtttat

SEQ ID NO: 385576 - DNA, 25 bp, Artificial
  probe
  misc_feature (1)..(25): SEQ ID NO: 4566; WAN024AKF; Start 218; Stop 242
tcgtgtttctggtagttgttcaagt

SEQ ID NO: 385577 - DNA, 25 bp, Artificial
  probe
  misc_feature (1)..(25): SEQ ID NO: 4566; WAN024AKF; Start 129; Stop 153
agataggtagaagataaccgttaag

SEQ ID NO: 385578 - DNA, 25 bp, Artificial
  probe
  misc_feature (1)..(25): SEQ ID NO: 4566; WAN024AKF; Start 224; Stop 248
ttctggtagttgttcaagtttattg

SEQ ID NO: 385579 - DNA, 25 bp, Artificial
  probe
  misc_feature (1)..(25): SEQ ID NO: 4566; WAN024AKF; Start 223; Stop 247
tttctggtagttgttcaagtttatt

SEQ ID NO: 385580 - DNA, 25 bp, Artificial
  probe
  misc_feature (1)..(25): SEQ ID NO: 4566; WAN024AKF; Start 89; Stop 113
taggttataggtagataaacgactg

SEQ ID NO: 385581 - DNA, 25 bp, Artificial
  probe
  misc_feature (1)..(25): SEQ ID NO: 4566; WAN024AKF; Start 126; Stop 150
aatagataggtagaagataaccgtt

SEQ ID NO: 385582 - DNA, 25 bp, Artificial
  probe
  misc_feature (1)..(25): SEQ ID NO: 4566; WAN024AKF; Start 201; Stop 225
atcaattatgcctgttttcgtgttt

SEQ ID NO: 385583 - DNA, 25 bp, Artificial
  probe
  misc_feature (1)..(25): SEQ ID NO: 4566; WAN024AKF; Start 214; Stop 238
gttttcgtgtttctggtagttgttc

SEQ ID NO: 385584 - DNA, 25 bp, Artificial
  probe
  misc_feature (1)..(25): SEQ ID NO: 4566; WAN024AKF; Start 204; Stop 228
aattatgcctgttttcgtgtttctg

SEQ ID NO: 385585 - DNA, 25 bp, Artificial
  probe
  misc_feature (1)..(25): SEQ ID NO: 4566; WAN024AKF; Start 203; Stop 227
caattatgcctgttttcgtgtttct

SEQ ID NO: 385586 - DNA, 25 bp, Artificial
  probe
  misc_feature (1)..(25): SEQ ID NO: 4566; WAN024AKF; Start 202; Stop 226
tcaattatgcctgttttcgtgtttc

SEQ ID NO: 385587 - DNA, 25 bp, Artificial
  probe
  misc_feature (1)..(25): SEQ ID NO: 4566; WAN024AKF; Start 228; Stop 252
ggtagttgttcaagtttattgctac

SEQ ID NO: 385588 - DNA, 25 bp, Artificial
  probe
  misc_feature (1)..(25): SEQ ID NO: 4567; WAN0249R5; Start 119; Stop 143
ttatccactatatgctcctcgctat

SEQ ID NO: 385589 - DNA, 25 bp, Artificial
  probe
  misc_feature (1)..(25): SEQ ID NO: 4567; WAN0249R5; Start 114; Stop 138
ctaccttatccactatatgctcctc

SEQ ID NO: 385590 - DNA, 25 bp, Artificial
  probe
  misc_feature (1)..(25): SEQ ID NO: 4567; WAN0249R5; Start 108; Stop 132
ttctcgctaccttatccactatatg

SEQ ID NO: 385591 - DNA, 25 bp, Artificial
  probe
  misc_feature (1)..(25): SEQ ID NO: 4567; WAN0249R5; Start 115; Stop 139
taccttatccactatatgctcctcg

SEQ ID NO: 385592 - DNA, 25 bp, Artificial
  probe
  misc_feature (1)..(25): SEQ ID NO: 4567; WAN0249R5; Start 120; Stop 144
tatccactatatgctcctcgctatc

SEQ ID NO: 385593 - DNA, 25 bp, Artificial
  probe
  misc_feature (1)..(25): SEQ ID NO: 4567; WAN0249R5; Start 113; Stop 137
gctaccttatccactatatgctcct

SEQ ID NO: 385594 - DNA, 25 bp, Artificial
  probe
  misc_feature (1)..(25): SEQ ID NO: 4567; WAN0249R5; Start 118; Stop 142
cttatccactatatgctcctcgcta

SEQ ID NO: 385595 - DNA, 25 bp, Artificial
  probe
  misc_feature (1)..(25): SEQ ID NO: 4567; WAN0249R5; Start 111; Stop 135
tcgctaccttatccactatatgctc

SEQ ID NO: 385596 - DNA, 25 bp, Artificial
  probe
  misc_feature (1)..(25): SEQ ID NO: 4567; WAN0249R5; Start 110; Stop 134
ctcgctaccttatccactatatgct

SEQ ID NO: 385597 - DNA, 25 bp, Artificial
  probe
  misc_feature (1)..(25): SEQ ID NO: 4567; WAN0249R5; Start 109; Stop 133
tctcgctaccttatccactatatgc

SEQ ID NO: 385598 - DNA, 25 bp, Artificial
  probe
  misc_feature (1)..(25): SEQ ID NO: 4567; WAN0249R5; Start 112; Stop 136
cgctaccttatccactatatgctcc

SEQ ID NO: 385599 - DNA, 25 bp, Artificial
  probe
  misc_feature (1)..(25): SEQ ID NO: 4567; WAN0249R5; Start 121; Stop 145
atccactatatgctcctcgctatca

SEQ ID NO: 385600 - DNA, 25 bp, Artificial
  probe
  misc_feature (1)..(25): SEQ ID NO: 4567; WAN0249R5; Start 161; Stop 185
cctacgatttcactattgctttctc

SEQ ID NO: 385601 - DNA, 25 bp, Artificial
  probe
  misc_feature (1)..(25): SEQ ID NO: 4567; WAN0249R5; Start 163; Stop 187
tacgatttcactattgctttctctg

SEQ ID NO: 385602 - DNA, 25 bp, Artificial
  probe
  misc_feature (1)..(25): SEQ ID NO: 4567; WAN0249R5; Start 162; Stop 186
ctacgatttcactattgctttctct

SEQ ID NO: 385603 - DNA, 25 bp, Artificial
  probe
  misc_feature (1)..(25): SEQ ID NO: 4567; WAN0249R5; Start 239; Stop 263
ttaatccgctacctcacgatagtca

SEQ ID NO: 385604 - DNA, 25 bp, Artificial
  probe
  misc_feature (1)..(25): SEQ ID NO: 4567; WAN0249R5; Start 181; Stop 205
ttctctgacaattcttatttcctgc

SEQ ID NO: 385605 - DNA, 25 bp, Artificial
  probe
  misc_feature (1)..(25): SEQ ID NO: 4567; WAN0249R5; Start 105; Stop 129
aatttctcgctaccttatccactat

SEQ ID NO: 385606 - DNA, 25 bp, Artificial
  probe
  misc_feature (1)..(25): SEQ ID NO: 4567; WAN0249R5; Start 150; Stop 174
tctattcatagcctacgatttcact

SEQ ID NO: 385607 - DNA, 25 bp, Artificial
  probe
  misc_feature (1)..(25): SEQ ID NO: 4567; WAN0249R5; Start 182; Stop 206
tctctgacaattcttatttcctgcg

SEQ ID NO: 385608 - DNA, 25 bp, Artificial
  probe
  misc_feature (1)..(25): SEQ ID NO: 4567; WAN0249R5; Start 160; Stop 184
gcctacgatttcactattgctttct

SEQ ID NO: 385609 - DNA, 25 bp, Artificial
  probe
  misc_feature (1)..(25): SEQ ID NO: 4567; WAN0249R5; Start 106; Stop 130
atttctcgctaccttatccactata

SEQ ID NO: 385610 - DNA, 25 bp, Artificial
  probe
  misc_feature (1)..(25): SEQ ID NO: 4567; WAN0249R5; Start 107; Stop 131
tttctcgctaccttatccactatat

SEQ ID NO: 385611 - DNA, 25 bp, Artificial
  probe
  misc_feature (1)..(25): SEQ ID NO: 4567; WAN0249R5; Start 165; Stop 189
cgatttcactattgctttctctgac

SEQ ID NO: 385612 - DNA, 25 bp, Artificial
  probe
  misc_feature (1)..(25): SEQ ID NO: 4567; WAN0249R5; Start 164; Stop 188
acgatttcactattgctttctctga

SEQ ID NO: 385613 - DNA, 25 bp, Artificial
  probe
  misc_feature (1)..(25): SEQ ID NO: 4567; WAN0249R5; Start 361; Stop 385
cccaaggtagaagatttcaaactta

SEQ ID NO: 385614 - DNA, 25 bp, Artificial
  probe
  misc_feature (1)..(25): SEQ ID NO: 4567; WAN0249R5; Start 183; Stop 207
ctctgacaattcttatttcctgcgt

SEQ ID NO: 385615 - DNA, 25 bp, Artificial
  probe
  misc_feature (1)..(25): SEQ ID NO: 4567; WAN0249R5; Start 166; Stop 190
gatttcactattgctttctctgaca

SEQ ID NO: 385616 - DNA, 25 bp, Artificial
  probe
  misc_feature (1)..(25): SEQ ID NO: 4567; WAN0249R5; Start 240; Stop 264
taatccgctacctcacgatagtcag

SEQ ID NO: 385617 - DNA, 25 bp, Artificial
  probe
  misc_feature (1)..(25): SEQ ID NO: 4567; WAN0249R5; Start 178; Stop 202
gctttctctgacaattcttatttcc

SEQ ID NO: 385618 - DNA, 25 bp, Artificial
  probe
  misc_feature (1)..(25): SEQ ID NO: 4567; WAN0249R5; Start 149; Stop 173
ttctattcatagcctacgatttcac

SEQ ID NO: 385619 - DNA, 25 bp, Artificial
  probe
  misc_feature (1)..(25): SEQ ID NO: 4567; WAN0249R5; Start 122; Stop 146
tccactatatgctcctcgctatcac

SEQ ID NO: 385620 - DNA, 25 bp, Artificial
  probe
  misc_feature (1)..(25): SEQ ID NO: 4567; WAN0249R5; Start 117; Stop 141
ccttatccactatatgctcctcgct

SEQ ID NO: 385621 - DNA, 25 bp, Artificial
  probe
  misc_feature (1)..(25): SEQ ID NO: 4568; WAN024AOW; Start 1; Stop 25
tattcccctttctttcctcttaaaa

SEQ ID NO: 385622 - DNA, 25 bp, Artificial
  probe
  misc_feature (1)..(25): SEQ ID NO: 4569; WAN024A4R; Start 12; Stop 36
tcgtatcgtttcattataccacaaa

SEQ ID NO: 385623 - DNA, 25 bp, Artificial
  probe
  misc_feature (1)..(25): SEQ ID NO: 4569; WAN024A4R; Start 11; Stop 35
atcgtatcgtttcattataccacaa

SEQ ID NO: 385624 - DNA, 25 bp, Artificial
  probe
  misc_feature (1)..(25): SEQ ID NO: 4569; WAN024A4R; Start 10; Stop 34
tatcgtatcgtttcattataccaca

SEQ ID NO: 385625 - DNA, 25 bp, Artificial
  probe
  misc_feature (1)..(25): SEQ ID NO: 4569; WAN024A4R; Start 17; Stop 41
tcgtttcattataccacaaacaagg

SEQ ID NO: 385626 - DNA, 25 bp, Artificial
  probe
  misc_feature (1)..(25): SEQ ID NO: 4569; WAN024A4R; Start 18; Stop 42
cgtttcattataccacaaacaaggg

SEQ ID NO: 385627 - DNA, 25 bp, Artificial
  probe
  misc_feature (1)..(25): SEQ ID NO: 4569; WAN024A4R; Start 2; Stop 26
attctttctatcgtatcgtttcatt

SEQ ID NO: 385628 - DNA, 25 bp, Artificial
  probe
  misc_feature (1)..(25): SEQ ID NO: 4569; WAN024A4R; Start 13; Stop 37
cgtatcgtttcattataccacaaac

SEQ ID NO: 385629 - DNA, 25 bp, Artificial
  probe
  misc_feature (1)..(25): SEQ ID NO: 4569; WAN024A4R; Start 9; Stop 33
ctatcgtatcgtttcattataccac

SEQ ID NO: 385630 - DNA, 25 bp, Artificial
  probe
  misc_feature (1)..(25): SEQ ID NO: 4569; WAN024A4R; Start 8; Stop 32
tctatcgtatcgtttcattatacca

SEQ ID NO: 385631 - DNA, 25 bp, Artificial
  probe
  misc_feature (1)..(25): SEQ ID NO: 4569; WAN024A4R; Start 16; Stop 40
atcgtttcattataccacaaacaag

SEQ ID NO: 385632 - DNA, 25 bp, Artificial
  probe
  misc_feature (1)..(25): SEQ ID NO: 4569; WAN024A4R; Start 3; Stop 27
ttctttctatcgtatcgtttcatta

SEQ ID NO: 385633 - DNA, 25 bp, Artificial
  probe
  misc_feature (1)..(25): SEQ ID NO: 4569; WAN024A4R; Start 14; Stop 38
gtatcgtttcattataccacaaaca

SEQ ID NO: 385634 - DNA, 25 bp, Artificial
  probe
  misc_feature (1)..(25): SEQ ID NO: 4569; WAN024A4R; Start 4; Stop 28
tctttctatcgtatcgtttcattat

SEQ ID NO: 385635 - DNA, 25 bp, Artificial
  probe
  misc_feature (1)..(25): SEQ ID NO: 4569; WAN024A4R; Start 1; Stop 25
tattctttctatcgtatcgtttcat

SEQ ID NO: 385636 - DNA, 25 bp, Artificial
  probe
  misc_feature (1)..(25): SEQ ID NO: 4569; WAN024A4R; Start 7; Stop 31
ttctatcgtatcgtttcattatacc

SEQ ID NO: 385637 - DNA, 25 bp, Artificial
  probe
  misc_feature (1)..(25): SEQ ID NO: 4569; WAN024A4R; Start 30; Stop 54
ccacaaacaaggggtgaaaatctat

SEQ ID NO: 385638 - DNA, 25 bp, Artificial
  probe
  misc_feature (1)..(25): SEQ ID NO: 4569; WAN024A4R; Start 26; Stop 50
tataccacaaacaaggggtgaaaat

SEQ ID NO: 385639 - DNA, 25 bp, Artificial
  probe
  misc_feature (1)..(25): SEQ ID NO: 4569; WAN024A4R; Start 24; Stop 48
attataccacaaacaaggggtgaaa

SEQ ID NO: 385640 - DNA, 25 bp, Artificial
  probe
  misc_feature (1)..(25): SEQ ID NO: 4569; WAN024A4R; Start 20; Stop 44
tttcattataccacaaacaaggggt

SEQ ID NO: 385641 - DNA, 25 bp, Artificial
  probe
  misc_feature (1)..(25): SEQ ID NO: 4569; WAN024A4R; Start 25; Stop 49
ttataccacaaacaaggggtgaaaa

SEQ ID NO: 385642 - DNA, 25 bp, Artificial
  probe
  misc_feature (1)..(25): SEQ ID NO: 4569; WAN024A4R; Start 15; Stop 39
tatcgtttcattataccacaaacaa

SEQ ID NO: 385643 - DNA, 25 bp, Artificial
  probe
  misc_feature (1)..(25): SEQ ID NO: 4569; WAN024A4R; Start 23; Stop 47
cattataccacaaacaaggggtgaa

SEQ ID NO: 385644 - DNA, 25 bp, Artificial
  probe
  misc_feature (1)..(25): SEQ ID NO: 4569; WAN024A4R; Start 21; Stop 45
ttcattataccacaaacaaggggtg

SEQ ID NO: 385645 - DNA, 25 bp, Artificial
  probe
  misc_feature (1)..(25): SEQ ID NO: 4569; WAN024A4R; Start 27; Stop 51
ataccacaaacaaggggtgaaaatc

SEQ ID NO: 385646 - DNA, 25 bp, Artificial
  probe
  misc_feature (1)..(25): SEQ ID NO: 4569; WAN024A4R; Start 22; Stop 46
tcattataccacaaacaaggggtga

SEQ ID NO: 385647 - DNA, 25 bp, Artificial
  probe
  misc_feature (1)..(25): SEQ ID NO: 4569; WAN024A4R; Start 19; Stop 43
gtttcattataccacaaacaagggg

SEQ ID NO: 385648 - DNA, 25 bp, Artificial
  probe
  misc_feature (1)..(25): SEQ ID NO: 4569; WAN024A4R; Start 29; Stop 53
accacaaacaaggggtgaaaatcta

SEQ ID NO: 385649 - DNA, 25 bp, Artificial
  probe
  misc_feature (1)..(25): SEQ ID NO: 4569; WAN024A4R; Start 28; Stop 52
taccacaaacaaggggtgaaaatct

SEQ ID NO: 385650 - DNA, 25 bp, Artificial
  probe
  misc_feature (1)..(25): SEQ ID NO: 4569; WAN024A4R; Start 6; Stop 30
tttctatcgtatcgtttcattatac

SEQ ID NO: 385651 - DNA, 25 bp, Artificial
  probe
  misc_feature (1)..(25): SEQ ID NO: 4570; WAN024AQ2; Start 9; Stop 33
cctcctaatgtaattatagcgtact

SEQ ID NO: 385652 - DNA, 25 bp, Artificial
  probe
  misc_feature (1)..(25): SEQ ID NO: 4570; WAN024AQ2; Start 8; Stop 32
tcctcctaatgtaattatagcgtac

SEQ ID NO: 385653 - DNA, 25 bp, Artificial
  probe
  misc_feature (1)..(25): SEQ ID NO: 4570; WAN024AQ2; Start 87; Stop 111
ataccctccattatcacataaacag

SEQ ID NO: 385654 - DNA, 25 bp, Artificial
  probe
  misc_feature (1)..(25): SEQ ID NO: 4570; WAN024AQ2; Start 88; Stop 112
taccctccattatcacataaacagg

SEQ ID NO: 385655 - DNA, 25 bp, Artificial
  probe
  misc_feature (1)..(25): SEQ ID NO: 4570; WAN024AQ2; Start 74; Stop 98
ccaccttctttaaataccctccatt

SEQ ID NO: 385656 - DNA, 25 bp, Artificial
  probe
  misc_feature (1)..(25): SEQ ID NO: 4570; WAN024AQ2; Start 71; Stop 95
ctaccaccttctttaaataccctcc

SEQ ID NO: 385657 - DNA, 25 bp, Artificial
  probe
  misc_feature (1)..(25): SEQ ID NO: 4570; WAN024AQ2; Start 70; Stop 94
tctaccaccttctttaaataccctc

SEQ ID NO: 385658 - DNA, 25 bp, Artificial
  probe
  misc_feature (1)..(25): SEQ ID NO: 4570; WAN024AQ2; Start 86; Stop 110
aataccctccattatcacataaaca

SEQ ID NO: 385659 - DNA, 25 bp, Artificial
  probe
  misc_feature (1)..(25): SEQ ID NO: 4570; WAN024AQ2; Start 72; Stop 96
taccaccttctttaaataccctcca

SEQ ID NO: 385660 - DNA, 25 bp, Artificial
  probe
  misc_feature (1)..(25): SEQ ID NO: 4570; WAN024AQ2; Start 69; Stop 93
atctaccaccttctttaaataccct

SEQ ID NO: 385661 - DNA, 25 bp, Artificial
  probe
  misc_feature (1)..(25): SEQ ID NO: 4570; WAN024AQ2; Start 73; Stop 97
accaccttctttaaataccctccat

SEQ ID NO: 385662 - DNA, 25 bp, Artificial
  probe
  misc_feature (1)..(25): SEQ ID NO: 4570; WAN024AQ2; Start 7; Stop 31
atcctcctaatgtaattatagcgta

SEQ ID NO: 385663 - DNA, 25 bp, Artificial
  probe
  misc_feature (1)..(25): SEQ ID NO: 4570; WAN024AQ2; Start 6; Stop 30
tatcctcctaatgtaattatagcgt

SEQ ID NO: 385664 - DNA, 25 bp, Artificial
  probe
  misc_feature (1)..(25): SEQ ID NO: 4570; WAN024AQ2; Start 5; Stop 29
gtatcctcctaatgtaattatagcg

SEQ ID NO: 385665 - DNA, 25 bp, Artificial
  probe
  misc_feature (1)..(25): SEQ ID NO: 4570; WAN024AQ2; Start 75; Stop 99
caccttctttaaataccctccatta

SEQ ID NO: 385666 - DNA, 25 bp, Artificial
  probe
  misc_feature (1)..(25): SEQ ID NO: 4570; WAN024AQ2; Start 68; Stop 92
aatctaccaccttctttaaataccc

SEQ ID NO: 385667 - DNA, 25 bp, Artificial
  probe
  misc_feature (1)..(25): SEQ ID NO: 4570; WAN024AQ2; Start 57; Stop 81
tagaatcaagaaatctaccaccttc

SEQ ID NO: 385668 - DNA, 25 bp, Artificial
  probe
  misc_feature (1)..(25): SEQ ID NO: 4570; WAN024AQ2; Start 58; Stop 82
agaatcaagaaatctaccaccttct

SEQ ID NO: 385669 - DNA, 25 bp, Artificial
  probe
  misc_feature (1)..(25): SEQ ID NO: 4570; WAN024AQ2; Start 85; Stop 109
aaataccctccattatcacataaac

SEQ ID NO: 385670 - DNA, 25 bp, Artificial
  probe
  misc_feature (1)..(25): SEQ ID NO: 4570; WAN024AQ2; Start 80; Stop 104
tctttaaataccctccattatcaca

SEQ ID NO: 385671 - DNA, 25 bp, Artificial
  probe
  misc_feature (1)..(25): SEQ ID NO: 4570; WAN024AQ2; Start 56; Stop 80
atagaatcaagaaatctaccacctt

SEQ ID NO: 385672 - DNA, 25 bp, Artificial
  probe
  misc_feature (1)..(25): SEQ ID NO: 4570; WAN024AQ2; Start 76; Stop 100
accttctttaaataccctccattat

SEQ ID NO: 385673 - DNA, 25 bp, Artificial
  probe
  misc_feature (1)..(25): SEQ ID NO: 4570; WAN024AQ2; Start 77; Stop 101
ccttctttaaataccctccattatc

SEQ ID NO: 385674 - DNA, 25 bp, Artificial
  probe
  misc_feature (1)..(25): SEQ ID NO: 4570; WAN024AQ2; Start 67; Stop 91
aaatctaccaccttctttaaatacc

SEQ ID NO: 385675 - DNA, 25 bp, Artificial
  probe
  misc_feature (1)..(25): SEQ ID NO: 4570; WAN024AQ2; Start 55; Stop 79
tatagaatcaagaaatctaccacct

SEQ ID NO: 385676 - DNA, 25 bp, Artificial
  probe
  misc_feature (1)..(25): SEQ ID NO: 4570; WAN024AQ2; Start 81; Stop 105
ctttaaataccctccattatcacat

SEQ ID NO: 385677 - DNA, 25 bp, Artificial
  probe
  misc_feature (1)..(25): SEQ ID NO: 4570; WAN024AQ2; Start 79; Stop 103
ttctttaaataccctccattatcac

SEQ ID NO: 385678 - DNA, 25 bp, Artificial
  probe
  misc_feature (1)..(25): SEQ ID NO: 4570; WAN024AQ2; Start 4; Stop 28
tgtatcctcctaatgtaattatagc

SEQ ID NO: 385679 - DNA, 25 bp, Artificial
  probe
  misc_feature (1)..(25): SEQ ID NO: 4570; WAN024AQ2; Start 10; Stop 34
ctcctaatgtaattatagcgtacta

SEQ ID NO: 385680 - DNA, 25 bp, Artificial
  probe
  misc_feature (1)..(25): SEQ ID NO: 4570; WAN024AQ2; Start 78; Stop 102
cttctttaaataccctccattatca

SEQ ID NO: 385681 - DNA, 25 bp, Artificial
  probe
  misc_feature (1)..(25): SEQ ID NO: 4570; WAN024AQ2; Start 84; Stop 108
taaataccctccattatcacataaa

SEQ ID NO: 385682 - DNA, 25 bp, Artificial
  probe
  misc_feature (1)..(25): SEQ ID NO: 4570; WAN024AQ2; Start 83; Stop 107
ttaaataccctccattatcacataa

SEQ ID NO: 385683 - DNA, 25 bp, Artificial
  probe
  misc_feature (1)..(25): SEQ ID NO: 4570; WAN024AQ2; Start 54; Stop 78
ctatagaatcaagaaatctaccacc

SEQ ID NO: 385684 - DNA, 25 bp, Artificial
  probe
  misc_feature (1)..(25): SEQ ID NO: 4571; WAN0249NM; Start 268; Stop 292
attgtgaataggtggttggaagtag

SEQ ID NO: 385685 - DNA, 25 bp, Artificial
  probe
  misc_feature (1)..(25): SEQ ID NO: 4571; WAN0249NM; Start 267; Stop 291
gattgtgaataggtggttggaagta

SEQ ID NO: 385686 - DNA, 25 bp, Artificial
  probe
  misc_feature (1)..(25): SEQ ID NO: 4571; WAN0249NM; Start 272; Stop 296
tgaataggtggttggaagtagtgaa

SEQ ID NO: 385687 - DNA, 25 bp, Artificial
  probe
  misc_feature (1)..(25): SEQ ID NO: 4571; WAN0249NM; Start 269; Stop 293
ttgtgaataggtggttggaagtagt

SEQ ID NO: 385688 - DNA, 25 bp, Artificial
  probe
  misc_feature (1)..(25): SEQ ID NO: 4571; WAN0249NM; Start 265; Stop 289
gtgattgtgaataggtggttggaag

SEQ ID NO: 385689 - DNA, 25 bp, Artificial
  probe
  misc_feature (1)..(25): SEQ ID NO: 4571; WAN0249NM; Start 271; Stop 295
gtgaataggtggttggaagtagtga

SEQ ID NO: 385690 - DNA, 25 bp, Artificial
  probe
  misc_feature (1)..(25): SEQ ID NO: 4571; WAN0249NM; Start 266; Stop 290
tgattgtgaataggtggttggaagt

SEQ ID NO: 385691 - DNA, 25 bp, Artificial
  probe
  misc_feature (1)..(25): SEQ ID NO: 4571; WAN0249NM; Start 270; Stop 294
tgtgaataggtggttggaagtagtg

SEQ ID NO: 385692 - DNA, 25 bp, Artificial
  probe
  misc_feature (1)..(25): SEQ ID NO: 4571; WAN0249NM; Start 113; Stop 137
catgttcatgttcgatctaaggaag

SEQ ID NO: 385693 - DNA, 25 bp, Artificial
  probe
  misc_feature (1)..(25): SEQ ID NO: 4571; WAN0249NM; Start 114; Stop 138
atgttcatgttcgatctaaggaaga

SEQ ID NO: 385694 - DNA, 25 bp, Artificial
  probe
  misc_feature (1)..(25): SEQ ID NO: 4571; WAN0249NM; Start 115; Stop 139
tgttcatgttcgatctaaggaagac

SEQ ID NO: 385695 - DNA, 25 bp, Artificial
  probe
  misc_feature (1)..(25): SEQ ID NO: 4571; WAN0249NM; Start 58; Stop 82
tgtttagcctccattcagtttctat

SEQ ID NO: 385696 - DNA, 25 bp, Artificial
  probe
  misc_feature (1)..(25): SEQ ID NO: 4571; WAN0249NM; Start 50; Stop 74
ataagttctgtttagcctccattca

SEQ ID NO: 385697 - DNA, 25 bp, Artificial
  probe
  misc_feature (1)..(25): SEQ ID NO: 4571; WAN0249NM; Start 274; Stop 298
aataggtggttggaagtagtgaaag

SEQ ID NO: 385698 - DNA, 25 bp, Artificial
  probe
  misc_feature (1)..(25): SEQ ID NO: 4571; WAN0249NM; Start 273; Stop 297
gaataggtggttggaagtagtgaaa

SEQ ID NO: 385699 - DNA, 25 bp, Artificial
  probe
  misc_feature (1)..(25): SEQ ID NO: 4571; WAN0249NM; Start 264; Stop 288
ggtgattgtgaataggtggttggaa

SEQ ID NO: 385700 - DNA, 25 bp, Artificial
  probe
  misc_feature (1)..(25): SEQ ID NO: 4571; WAN0249NM; Start 260; Stop 284
ctgtggtgattgtgaataggtggtt

SEQ ID NO: 385701 - DNA, 25 bp, Artificial
  probe
  misc_feature (1)..(25): SEQ ID NO: 4571; WAN0249NM; Start 60; Stop 84
tttagcctccattcagtttctattg

SEQ ID NO: 385702 - DNA, 25 bp, Artificial
  probe
  misc_feature (1)..(25): SEQ ID NO: 4571; WAN0249NM; Start 59; Stop 83
gtttagcctccattcagtttctatt

SEQ ID NO: 385703 - DNA, 25 bp, Artificial
  probe
  misc_feature (1)..(25): SEQ ID NO: 4571; WAN0249NM; Start 49; Stop 73
aataagttctgtttagcctccattc

SEQ ID NO: 385704 - DNA, 25 bp, Artificial
  probe
  misc_feature (1)..(25): SEQ ID NO: 4571; WAN0249NM; Start 116; Stop 140
gttcatgttcgatctaaggaagaca

SEQ ID NO: 385705 - DNA, 25 bp, Artificial
  probe
  misc_feature (1)..(25): SEQ ID NO: 4571; WAN0249NM; Start 275; Stop 299
ataggtggttggaagtagtgaaagt

SEQ ID NO: 385706 - DNA, 25 bp, Artificial
  probe
  misc_feature (1)..(25): SEQ ID NO: 4571; WAN0249NM; Start 48; Stop 72
aaataagttctgtttagcctccatt

SEQ ID NO: 385707 - DNA, 25 bp, Artificial
  probe
  misc_feature (1)..(25): SEQ ID NO: 4571; WAN0249NM; Start 61; Stop 85
ttagcctccattcagtttctattga

SEQ ID NO: 385708 - DNA, 25 bp, Artificial
  probe
  misc_feature (1)..(25): SEQ ID NO: 4571; WAN0249NM; Start 261; Stop 285
tgtggtgattgtgaataggtggttg

SEQ ID NO: 385709 - DNA, 25 bp, Artificial
  probe
  misc_feature (1)..(25): SEQ ID NO: 4571; WAN0249NM; Start 375; Stop 399
aaggcagagatgtaaagggatagtc

SEQ ID NO: 385710 - DNA, 25 bp, Artificial
  probe
  misc_feature (1)..(25): SEQ ID NO: 4571; WAN0249NM; Start 62; Stop 86
tagcctccattcagtttctattgag

SEQ ID NO: 385711 - DNA, 25 bp, Artificial
  probe
  misc_feature (1)..(25): SEQ ID NO: 4571; WAN0249NM; Start 65; Stop 89
cctccattcagtttctattgagttg

SEQ ID NO: 385712 - DNA, 25 bp, Artificial
  probe
  misc_feature (1)..(25): SEQ ID NO: 4571; WAN0249NM; Start 374; Stop 398
caaggcagagatgtaaagggatagt

SEQ ID NO: 385713 - DNA, 25 bp, Artificial
  probe
  misc_feature (1)..(25): SEQ ID NO: 4571; WAN0249NM; Start 368; Stop 392
gttaaacaaggcagagatgtaaagg

SEQ ID NO: 385714 - DNA, 25 bp, Artificial
  probe
  misc_feature (1)..(25): SEQ ID NO: 4571; WAN0249NM; Start 64; Stop 88
gcctccattcagtttctattgagtt

SEQ ID NO: 385715 - DNA, 25 bp, Artificial
  probe
  misc_feature (1)..(25): SEQ ID NO: 4571; WAN0249NM; Start 276; Stop 300
taggtggttggaagtagtgaaagtg

SEQ ID NO: 385716 - DNA, 25 bp, Artificial
  probe
  misc_feature (1)..(25): SEQ ID NO: 4571; WAN0249NM; Start 369; Stop 393
ttaaacaaggcagagatgtaaaggg

SEQ ID NO: 385717 - DNA, 25 bp, Artificial
  probe
  misc_feature (1)..(25): SEQ ID NO: 4572; WAN024AQE; Start 49; Stop 73
tccaatgaggtttatagtacagaaa

SEQ ID NO: 385718 - DNA, 25 bp, Artificial
  probe
  misc_feature (1)..(25): SEQ ID NO: 4572; WAN024AQE; Start 47; Stop 71
tttccaatgaggtttatagtacaga

SEQ ID NO: 385719 - DNA, 25 bp, Artificial
  probe
  misc_feature (1)..(25): SEQ ID NO: 4572; WAN024AQE; Start 48; Stop 72
ttccaatgaggtttatagtacagaa

SEQ ID NO: 385720 - DNA, 25 bp, Artificial
  probe
  misc_feature (1)..(25): SEQ ID NO: 4572; WAN024AQE; Start 10; Stop 34
aaacctcttaacaagattacggaag

SEQ ID NO: 385721 - DNA, 25 bp, Artificial
  probe
  misc_feature (1)..(25): SEQ ID NO: 4572; WAN024AQE; Start 85; Stop 109
gatgtcttctcaggcttttgttaag

SEQ ID NO: 385722 - DNA, 25 bp, Artificial
  probe
  misc_feature (1)..(25): SEQ ID NO: 4572; WAN024AQE; Start 84; Stop 108
agatgtcttctcaggcttttgttaa

SEQ ID NO: 385723 - DNA, 25 bp, Artificial
  probe
  misc_feature (1)..(25): SEQ ID NO: 4572; WAN024AQE; Start 83; Stop 107
aagatgtcttctcaggcttttgtta

SEQ ID NO: 385724 - DNA, 25 bp, Artificial
  probe
  misc_feature (1)..(25): SEQ ID NO: 4572; WAN024AQE; Start 36; Stop 60
agtctctatcttttccaatgaggtt

SEQ ID NO: 385725 - DNA, 25 bp, Artificial
  probe
  misc_feature (1)..(25): SEQ ID NO: 4572; WAN024AQE; Start 126; Stop 150
tgctatgacaaaatcacccagaaaa

SEQ ID NO: 385726 - DNA, 25 bp, Artificial
  probe
  misc_feature (1)..(25): SEQ ID NO: 4572; WAN024AQE; Start 37; Stop 61
gtctctatcttttccaatgaggttt

SEQ ID NO: 385727 - DNA, 25 bp, Artificial
  probe
  misc_feature (1)..(25): SEQ ID NO: 4572; WAN024AQE; Start 120; Stop 144
caatagtgctatgacaaaatcaccc

SEQ ID NO: 385728 - DNA, 25 bp, Artificial
  probe
  misc_feature (1)..(25): SEQ ID NO: 4572; WAN024AQE; Start 121; Stop 145
aatagtgctatgacaaaatcaccca

SEQ ID NO: 385729 - DNA, 25 bp, Artificial
  probe
  misc_feature (1)..(25): SEQ ID NO: 4572; WAN024AQE; Start 119; Stop 143
acaatagtgctatgacaaaatcacc

SEQ ID NO: 385730 - DNA, 25 bp, Artificial
  probe
  misc_feature (1)..(25): SEQ ID NO: 4572; WAN024AQE; Start 122; Stop 146
atagtgctatgacaaaatcacccag

SEQ ID NO: 385731 - DNA, 25 bp, Artificial
  probe
  misc_feature (1)..(25): SEQ ID NO: 4572; WAN024AQE; Start 125; Stop 149
gtgctatgacaaaatcacccagaaa

SEQ ID NO: 385732 - DNA, 25 bp, Artificial
  probe
  misc_feature (1)..(25): SEQ ID NO: 4572; WAN024AQE; Start 123; Stop 147
tagtgctatgacaaaatcacccaga

SEQ ID NO: 385733 - DNA, 25 bp, Artificial
  probe
  misc_feature (1)..(25): SEQ ID NO: 4572; WAN024AQE; Start 111; Stop 135
acataaatacaatagtgctatgaca

SEQ ID NO: 385734 - DNA, 25 bp, Artificial
  probe
  misc_feature (1)..(25): SEQ ID NO: 4572; WAN024AQE; Start 38; Stop 62
tctctatcttttccaatgaggttta

SEQ ID NO: 385735 - DNA, 25 bp, Artificial
  probe
  misc_feature (1)..(25): SEQ ID NO: 4572; WAN024AQE; Start 110; Stop 134
cacataaatacaatagtgctatgac

SEQ ID NO: 385736 - DNA, 25 bp, Artificial
  probe
  misc_feature (1)..(25): SEQ ID NO: 4572; WAN024AQE; Start 124; Stop 148
agtgctatgacaaaatcacccagaa

SEQ ID NO: 385737 - DNA, 25 bp, Artificial
  probe
  misc_feature (1)..(25): SEQ ID NO: 4572; WAN024AQE; Start 118; Stop 142
tacaatagtgctatgacaaaatcac

SEQ ID NO: 385738 - DNA, 25 bp, Artificial
  probe
  misc_feature (1)..(25): SEQ ID NO: 4572; WAN024AQE; Start 9; Stop 33
aaaacctcttaacaagattacggaa

SEQ ID NO: 385739 - DNA, 25 bp, Artificial
  probe
  misc_feature (1)..(25): SEQ ID NO: 4572; WAN024AQE; Start 103; Stop 127
tgttaagcacataaatacaatagtg

SEQ ID NO: 385740 - DNA, 25 bp, Artificial
  probe
  misc_feature (1)..(25): SEQ ID NO: 4572; WAN024AQE; Start 50; Stop 74
ccaatgaggtttatagtacagaaaa

SEQ ID NO: 385741 - DNA, 25 bp, Artificial
  probe
  misc_feature (1)..(25): SEQ ID NO: 4572; WAN024AQE; Start 46; Stop 70
ttttccaatgaggtttatagtacag

SEQ ID NO: 385742 - DNA, 25 bp, Artificial
  probe
  misc_feature (1)..(25): SEQ ID NO: 4572; WAN024AQE; Start 45; Stop 69
cttttccaatgaggtttatagtaca

SEQ ID NO: 385743 - DNA, 25 bp, Artificial
  probe
  misc_feature (1)..(25): SEQ ID NO: 4572; WAN024AQE; Start 117; Stop 141
atacaatagtgctatgacaaaatca

SEQ ID NO: 385744 - DNA, 25 bp, Artificial
  probe
  misc_feature (1)..(25): SEQ ID NO: 4572; WAN024AQE; Start 44; Stop 68
tcttttccaatgaggtttatagtac

SEQ ID NO: 385745 - DNA, 25 bp, Artificial
  probe
  misc_feature (1)..(25): SEQ ID NO: 4572; WAN024AQE; Start 7; Stop 31
gtaaaacctcttaacaagattacgg

SEQ ID NO: 385746 - DNA, 25 bp, Artificial
  probe
  misc_feature (1)..(25): SEQ ID NO: 4572; WAN024AQE; Start 39; Stop 63
ctctatcttttccaatgaggtttat

SEQ ID NO: 385747 - DNA, 25 bp, Artificial
  probe
  misc_feature (1)..(25): SEQ ID NO: 4572; WAN024AQE; Start 8; Stop 32
taaaacctcttaacaagattacgga

SEQ ID NO: 385748 - DNA, 25 bp, Artificial
  probe
  misc_feature (1)..(25): SEQ ID NO: 4572; WAN024AQE; Start 112; Stop 136
cataaatacaatagtgctatgacaa

SEQ ID NO: 385749 - DNA, 25 bp, Artificial
  probe
  misc_feature (1)..(25): SEQ ID NO: 4572; WAN024AQE; Start 116; Stop 140
aatacaatagtgctatgacaaaatc

SEQ ID NO: 385750 - DNA, 25 bp, Artificial
  probe
  misc_feature (1)..(25): SEQ ID NO: 4573; WAN0249LT; Start 2; Stop 26
atttccaagtgaaattcacagattt

SEQ ID NO: 385751 - DNA, 25 bp, Artificial
  probe
  misc_feature (1)..(25): SEQ ID NO: 4573; WAN0249LT; Start 1; Stop 25
tatttccaagtgaaattcacagatt

SEQ ID NO: 385752 - DNA, 25 bp, Artificial
  probe
  misc_feature (1)..(25): SEQ ID NO: 4573; WAN0249LT; Start 3; Stop 27
tttccaagtgaaattcacagatttt

SEQ ID NO: 385753 - DNA, 25 bp, Artificial
  probe
  misc_feature (1)..(25): SEQ ID NO: 4574; WAN0249SK; Start 138; Stop 162
ggcaagcaaataagcaaataaacaa

SEQ ID NO: 385754 - DNA, 25 bp, Artificial
  probe
  misc_feature (1)..(25): SEQ ID NO: 4574; WAN0249SK; Start 137; Stop 161
aggcaagcaaataagcaaataaaca

SEQ ID NO: 385755 - DNA, 25 bp, Artificial
  probe
  misc_feature (1)..(25): SEQ ID NO: 4574; WAN0249SK; Start 104; Stop 128
gtggtttgaagagtataggcttagt

SEQ ID NO: 385756 - DNA, 25 bp, Artificial
  probe
  misc_feature (1)..(25): SEQ ID NO: 4574; WAN0249SK; Start 136; Stop 160
taggcaagcaaataagcaaataaac

SEQ ID NO: 385757 - DNA, 25 bp, Artificial
  probe
  misc_feature (1)..(25): SEQ ID NO: 4574; WAN0249SK; Start 132; Stop 156
ctactaggcaagcaaataagcaaat

SEQ ID NO: 385758 - DNA, 25 bp, Artificial
  probe
  misc_feature (1)..(25): SEQ ID NO: 4574; WAN0249SK; Start 129; Stop 153
atactactaggcaagcaaataagca

SEQ ID NO: 385759 - DNA, 25 bp, Artificial
  probe
  misc_feature (1)..(25): SEQ ID NO: 4574; WAN0249SK; Start 130; Stop 154
tactactaggcaagcaaataagcaa

SEQ ID NO: 385760 - DNA, 25 bp, Artificial
  probe
  misc_feature (1)..(25): SEQ ID NO: 4574; WAN0249SK; Start 134; Stop 158
actaggcaagcaaataagcaaataa

SEQ ID NO: 385761 - DNA, 25 bp, Artificial
  probe
  misc_feature (1)..(25): SEQ ID NO: 4574; WAN0249SK; Start 103; Stop 127
cgtggtttgaagagtataggcttag

SEQ ID NO: 385762 - DNA, 25 bp, Artificial
  probe
  misc_feature (1)..(25): SEQ ID NO: 4574; WAN0249SK; Start 139; Stop 163
gcaagcaaataagcaaataaacaaa

SEQ ID NO: 385763 - DNA, 25 bp, Artificial
  probe
  misc_feature (1)..(25): SEQ ID NO: 4574; WAN0249SK; Start 131; Stop 155
actactaggcaagcaaataagcaaa

SEQ ID NO: 385764 - DNA, 25 bp, Artificial
  probe
  misc_feature (1)..(25): SEQ ID NO: 4574; WAN0249SK; Start 105; Stop 129
tggtttgaagagtataggcttagta

SEQ ID NO: 385765 - DNA, 25 bp, Artificial
  probe
  misc_feature (1)..(25): SEQ ID NO: 4574; WAN0249SK; Start 133; Stop 157
tactaggcaagcaaataagcaaata

SEQ ID NO: 385766 - DNA, 25 bp, Artificial
  probe
  misc_feature (1)..(25): SEQ ID NO: 4574; WAN0249SK; Start 135; Stop 159
ctaggcaagcaaataagcaaataaa

SEQ ID NO: 385767 - DNA, 25 bp, Artificial
  probe
  misc_feature (1)..(25): SEQ ID NO: 4574; WAN0249SK; Start 128; Stop 152
tatactactaggcaagcaaataagc

SEQ ID NO: 385768 - DNA, 25 bp, Artificial
  probe
  misc_feature (1)..(25): SEQ ID NO: 4574; WAN0249SK; Start 227; Stop 251
cagcttgactgattcgtcttcttac

SEQ ID NO: 385769 - DNA, 25 bp, Artificial
  probe
  misc_feature (1)..(25): SEQ ID NO: 4574; WAN0249SK; Start 106; Stop 130
ggtttgaagagtataggcttagtat

SEQ ID NO: 385770 - DNA, 25 bp, Artificial
  probe
  misc_feature (1)..(25): SEQ ID NO: 4574; WAN0249SK; Start 226; Stop 250
ccagcttgactgattcgtcttctta

SEQ ID NO: 385771 - DNA, 25 bp, Artificial
  probe
  misc_feature (1)..(25): SEQ ID NO: 4574; WAN0249SK; Start 102; Stop 126
acgtggtttgaagagtataggctta

SEQ ID NO: 385772 - DNA, 25 bp, Artificial
  probe
  misc_feature (1)..(25): SEQ ID NO: 4574; WAN0249SK; Start 230; Stop 254
cttgactgattcgtcttcttacgtt

SEQ ID NO: 385773 - DNA, 25 bp, Artificial
  probe
  misc_feature (1)..(25): SEQ ID NO: 4574; WAN0249SK; Start 140; Stop 164
caagcaaataagcaaataaacaaat

SEQ ID NO: 385774 - DNA, 25 bp, Artificial
  probe
  misc_feature (1)..(25): SEQ ID NO: 4574; WAN0249SK; Start 101; Stop 125
gacgtggtttgaagagtataggctt

SEQ ID NO: 385775 - DNA, 25 bp, Artificial
  probe
  misc_feature (1)..(25): SEQ ID NO: 4574; WAN0249SK; Start 223; Stop 247
gaaccagcttgactgattcgtcttc

SEQ ID NO: 385776 - DNA, 25 bp, Artificial
  probe
  misc_feature (1)..(25): SEQ ID NO: 4574; WAN0249SK; Start 228; Stop 252
agcttgactgattcgtcttcttacg

SEQ ID NO: 385777 - DNA, 25 bp, Artificial
  probe
  misc_feature (1)..(25): SEQ ID NO: 4574; WAN0249SK; Start 127; Stop 151
gtatactactaggcaagcaaataag

SEQ ID NO: 385778 - DNA, 25 bp, Artificial
  probe
  misc_feature (1)..(25): SEQ ID NO: 4574; WAN0249SK; Start 99; Stop 123
ctgacgtggtttgaagagtataggc

SEQ ID NO: 385779 - DNA, 25 bp, Artificial
  probe
  misc_feature (1)..(25): SEQ ID NO: 4574; WAN0249SK; Start 98; Stop 122
gctgacgtggtttgaagagtatagg

SEQ ID NO: 385780 - DNA, 25 bp, Artificial
  probe
  misc_feature (1)..(25): SEQ ID NO: 4574; WAN0249SK; Start 232; Stop 256
tgactgattcgtcttcttacgttta

SEQ ID NO: 385781 - DNA, 25 bp, Artificial
  probe
  misc_feature (1)..(25): SEQ ID NO: 4574; WAN0249SK; Start 231; Stop 255
ttgactgattcgtcttcttacgttt

SEQ ID NO: 385782 - DNA, 25 bp, Artificial
  probe
  misc_feature (1)..(25): SEQ ID NO: 4574; WAN0249SK; Start 225; Stop 249
accagcttgactgattcgtcttctt

SEQ ID NO: 385783 - DNA, 25 bp, Artificial
  probe
  misc_feature (1)..(25): SEQ ID NO: 4574; WAN0249SK; Start 224; Stop 248
aaccagcttgactgattcgtcttct

SEQ ID NO: 385784 - DNA, 25 bp, Artificial
  probe
  misc_feature (1)..(25): SEQ ID NO: 4574; WAN0249SK; Start 234; Stop 258
actgattcgtcttcttacgtttatc

SEQ ID NO: 385785 - DNA, 25 bp, Artificial
  probe
  misc_feature (1)..(25): SEQ ID NO: 4574; WAN0249SK; Start 233; Stop 257
gactgattcgtcttcttacgtttat

SEQ ID NO: 385786 - DNA, 25 bp, Artificial
  probe
  misc_feature (1)..(25): SEQ ID NO: 4575; WAN024AZ7; Start 34; Stop 58
gggattagccatttgatactatctc

SEQ ID NO: 385787 - DNA, 25 bp, Artificial
  probe
  misc_feature (1)..(25): SEQ ID NO: 4575; WAN024AZ7; Start 40; Stop 64
agccatttgatactatctcacagag

SEQ ID NO: 385788 - DNA, 25 bp, Artificial
  probe
  misc_feature (1)..(25): SEQ ID NO: 4575; WAN024AZ7; Start 39; Stop 63
tagccatttgatactatctcacaga

SEQ ID NO: 385789 - DNA, 25 bp, Artificial
  probe
  misc_feature (1)..(25): SEQ ID NO: 4575; WAN024AZ7; Start 38; Stop 62
ttagccatttgatactatctcacag

SEQ ID NO: 385790 - DNA, 25 bp, Artificial
  probe
  misc_feature (1)..(25): SEQ ID NO: 4575; WAN024AZ7; Start 35; Stop 59
ggattagccatttgatactatctca

SEQ ID NO: 385791 - DNA, 25 bp, Artificial
  probe
  misc_feature (1)..(25): SEQ ID NO: 4575; WAN024AZ7; Start 29; Stop 53
tctttgggattagccatttgatact

SEQ ID NO: 385792 - DNA, 25 bp, Artificial
  probe
  misc_feature (1)..(25): SEQ ID NO: 4575; WAN024AZ7; Start 28; Stop 52
atctttgggattagccatttgatac

SEQ ID NO: 385793 - DNA, 25 bp, Artificial
  probe
  misc_feature (1)..(25): SEQ ID NO: 4575; WAN024AZ7; Start 33; Stop 57
tgggattagccatttgatactatct

SEQ ID NO: 385794 - DNA, 25 bp, Artificial
  probe
  misc_feature (1)..(25): SEQ ID NO: 4575; WAN024AZ7; Start 37; Stop 61
attagccatttgatactatctcaca

SEQ ID NO: 385795 - DNA, 25 bp, Artificial
  probe
  misc_feature (1)..(25): SEQ ID NO: 4575; WAN024AZ7; Start 30; Stop 54
ctttgggattagccatttgatacta

SEQ ID NO: 385796 - DNA, 25 bp, Artificial
  probe
  misc_feature (1)..(25): SEQ ID NO: 4575; WAN024AZ7; Start 32; Stop 56
ttgggattagccatttgatactatc

SEQ ID NO: 385797 - DNA, 25 bp, Artificial
  probe
  misc_feature (1)..(25): SEQ ID NO: 4575; WAN024AZ7; Start 36; Stop 60
gattagccatttgatactatctcac

SEQ ID NO: 385798 - DNA, 25 bp, Artificial
  probe
  misc_feature (1)..(25): SEQ ID NO: 4575; WAN024AZ7; Start 31; Stop 55
tttgggattagccatttgatactat

SEQ ID NO: 385799 - DNA, 25 bp, Artificial
  probe
  misc_feature (1)..(25): SEQ ID NO: 4575; WAN024AZ7; Start 41; Stop 65
gccatttgatactatctcacagaga

SEQ ID NO: 385800 - DNA, 25 bp, Artificial
  probe
  misc_feature (1)..(25): SEQ ID NO: 4576; WAN0249XT; Start 4; Stop 28
tttcgctgattctccactacatttg

SEQ ID NO: 385801 - DNA, 25 bp, Artificial
  probe
  misc_feature (1)..(25): SEQ ID NO: 4576; WAN0249XT; Start 8; Stop 32
gctgattctccactacatttgactg

SEQ ID NO: 385802 - DNA, 25 bp, Artificial
  probe
  misc_feature (1)..(25): SEQ ID NO: 4576; WAN0249XT; Start 5; Stop 29
ttcgctgattctccactacatttga

SEQ ID NO: 385803 - DNA, 25 bp, Artificial
  probe
  misc_feature (1)..(25): SEQ ID NO: 4576; WAN0249XT; Start 7; Stop 31
cgctgattctccactacatttgact

SEQ ID NO: 385804 - DNA, 25 bp, Artificial
  probe
  misc_feature (1)..(25): SEQ ID NO: 4576; WAN0249XT; Start 6; Stop 30
tcgctgattctccactacatttgac

SEQ ID NO: 385805 - DNA, 25 bp, Artificial
  probe
  misc_feature (1)..(25): SEQ ID NO: 4576; WAN0249XT; Start 9; Stop 33
ctgattctccactacatttgactgg

SEQ ID NO: 385806 - DNA, 25 bp, Artificial
  probe
  misc_feature (1)..(25): SEQ ID NO: 4576; WAN0249XT; Start 17; Stop 41
ccactacatttgactggattctaat

SEQ ID NO: 385807 - DNA, 25 bp, Artificial
  probe
  misc_feature (1)..(25): SEQ ID NO: 4576; WAN0249XT; Start 18; Stop 42
cactacatttgactggattctaatt

SEQ ID NO: 385808 - DNA, 25 bp, Artificial
  probe
  misc_feature (1)..(25): SEQ ID NO: 4576; WAN0249XT; Start 1; Stop 25
tattttcgctgattctccactacat

SEQ ID NO: 385809 - DNA, 25 bp, Artificial
  probe
  misc_feature (1)..(25): SEQ ID NO: 4576; WAN0249XT; Start 2; Stop 26
attttcgctgattctccactacatt

SEQ ID NO: 385810 - DNA, 25 bp, Artificial
  probe
  misc_feature (1)..(25): SEQ ID NO: 4576; WAN0249XT; Start 3; Stop 27
ttttcgctgattctccactacattt

SEQ ID NO: 385811 - DNA, 25 bp, Artificial
  probe
  misc_feature (1)..(25): SEQ ID NO: 4576; WAN0249XT; Start 19; Stop 43
actacatttgactggattctaattt

SEQ ID NO: 385812 - DNA, 25 bp, Artificial
  probe
  misc_feature (1)..(25): SEQ ID NO: 4576; WAN0249XT; Start 15; Stop 39
ctccactacatttgactggattcta

SEQ ID NO: 385813 - DNA, 25 bp, Artificial
  probe
  misc_feature (1)..(25): SEQ ID NO: 4576; WAN0249XT; Start 12; Stop 36
attctccactacatttgactggatt

SEQ ID NO: 385814 - DNA, 25 bp, Artificial
  probe
  misc_feature (1)..(25): SEQ ID NO: 4576; WAN0249XT; Start 11; Stop 35
gattctccactacatttgactggat

SEQ ID NO: 385815 - DNA, 25 bp, Artificial
  probe
  misc_feature (1)..(25): SEQ ID NO: 4576; WAN0249XT; Start 13; Stop 37
ttctccactacatttgactggattc

SEQ ID NO: 385816 - DNA, 25 bp, Artificial
  probe
  misc_feature (1)..(25): SEQ ID NO: 4576; WAN0249XT; Start 16; Stop 40
tccactacatttgactggattctaa

SEQ ID NO: 385817 - DNA, 25 bp, Artificial
  probe
  misc_feature (1)..(25): SEQ ID NO: 4576; WAN0249XT; Start 14; Stop 38
tctccactacatttgactggattct

SEQ ID NO: 385818 - DNA, 25 bp, Artificial
  probe
  misc_feature (1)..(25): SEQ ID NO: 4576; WAN0249XT; Start 10; Stop 34
tgattctccactacatttgactgga

SEQ ID NO: 385819 - DNA, 25 bp, Artificial
  probe
  misc_feature (1)..(25): SEQ ID NO: 4576; WAN0249XT; Start 20; Stop 44
ctacatttgactggattctaatttt

SEQ ID NO: 385820 - DNA, 25 bp, Artificial
  probe
  misc_feature (1)..(25): SEQ ID NO: 4576; WAN0249XT; Start 43; Stop 67
ttttagagaaatacaaaagagctag

SEQ ID NO: 385821 - DNA, 25 bp, Artificial
  probe
  misc_feature (1)..(25): SEQ ID NO: 4577; WAN0249QQ; Start 136; Stop 160
ggttggatgcttatagtcaatggaa

SEQ ID NO: 385822 - DNA, 25 bp, Artificial
  probe
  misc_feature (1)..(25): SEQ ID NO: 4577; WAN0249QQ; Start 12; Stop 36
accacttcttaatgattactacctt

SEQ ID NO: 385823 - DNA, 25 bp, Artificial
  probe
  misc_feature (1)..(25): SEQ ID NO: 4577; WAN0249QQ; Start 11; Stop 35
aaccacttcttaatgattactacct

SEQ ID NO: 385824 - DNA, 25 bp, Artificial
  probe
  misc_feature (1)..(25): SEQ ID NO: 4577; WAN0249QQ; Start 449; Stop 473
actatcacatccctctttcaaatca

SEQ ID NO: 385825 - DNA, 25 bp, Artificial
  probe
  misc_feature (1)..(25): SEQ ID NO: 4577; WAN0249QQ; Start 446; Stop 470
gctactatcacatccctctttcaaa

SEQ ID NO: 385826 - DNA, 25 bp, Artificial
  probe
  misc_feature (1)..(25): SEQ ID NO: 4577; WAN0249QQ; Start 452; Stop 476
atcacatccctctttcaaatcatcg

SEQ ID NO: 385827 - DNA, 25 bp, Artificial
  probe
  misc_feature (1)..(25): SEQ ID NO: 4577; WAN0249QQ; Start 445; Stop 469
tgctactatcacatccctctttcaa

SEQ ID NO: 385828 - DNA, 25 bp, Artificial
  probe
  misc_feature (1)..(25): SEQ ID NO: 4577; WAN0249QQ; Start 139; Stop 163
tggatgcttatagtcaatggaaatc

SEQ ID NO: 385829 - DNA, 25 bp, Artificial
  probe
  misc_feature (1)..(25): SEQ ID NO: 4577; WAN0249QQ; Start 164; Stop 188
catcagcaaactaggaaactaaacc

SEQ ID NO: 385830 - DNA, 25 bp, Artificial
  probe
  misc_feature (1)..(25): SEQ ID NO: 4577; WAN0249QQ; Start 163; Stop 187
ccatcagcaaactaggaaactaaac

SEQ ID NO: 385831 - DNA, 25 bp, Artificial
  probe
  misc_feature (1)..(25): SEQ ID NO: 4577; WAN0249QQ; Start 451; Stop 475
tatcacatccctctttcaaatcatc

SEQ ID NO: 385832 - DNA, 25 bp, Artificial
  probe
  misc_feature (1)..(25): SEQ ID NO: 4577; WAN0249QQ; Start 450; Stop 474
ctatcacatccctctttcaaatcat

SEQ ID NO: 385833 - DNA, 25 bp, Artificial
  probe
  misc_feature (1)..(25): SEQ ID NO: 4577; WAN0249QQ; Start 137; Stop 161
gttggatgcttatagtcaatggaaa

SEQ ID NO: 385834 - DNA, 25 bp, Artificial
  probe
  misc_feature (1)..(25): SEQ ID NO: 4577; WAN0249QQ; Start 165; Stop 189
atcagcaaactaggaaactaaaccc

SEQ ID NO: 385835 - DNA, 25 bp, Artificial
  probe
  misc_feature (1)..(25): SEQ ID NO: 4577; WAN0249QQ; Start 130; Stop 154
aaagagggttggatgcttatagtca

SEQ ID NO: 385836 - DNA, 25 bp, Artificial
  probe
  misc_feature (1)..(25): SEQ ID NO: 4577; WAN0249QQ; Start 133; Stop 157
gagggttggatgcttatagtcaatg

SEQ ID NO: 385837 - DNA, 25 bp, Artificial
  probe
  misc_feature (1)..(25): SEQ ID NO: 4577; WAN0249QQ; Start 132; Stop 156
agagggttggatgcttatagtcaat

SEQ ID NO: 385838 - DNA, 25 bp, Artificial
  probe
  misc_feature (1)..(25): SEQ ID NO: 4577; WAN0249QQ; Start 448; Stop 472
tactatcacatccctctttcaaatc

SEQ ID NO: 385839 - DNA, 25 bp, Artificial
  probe
  misc_feature (1)..(25): SEQ ID NO: 4577; WAN0249QQ; Start 447; Stop 471
ctactatcacatccctctttcaaat

SEQ ID NO: 385840 - DNA, 25 bp, Artificial
  probe
  misc_feature (1)..(25): SEQ ID NO: 4577; WAN0249QQ; Start 131; Stop 155
aagagggttggatgcttatagtcaa

SEQ ID NO: 385841 - DNA, 25 bp, Artificial
  probe
  misc_feature (1)..(25): SEQ ID NO: 4577; WAN0249QQ; Start 138; Stop 162
ttggatgcttatagtcaatggaaat

SEQ ID NO: 385842 - DNA, 25 bp, Artificial
  probe
  misc_feature (1)..(25): SEQ ID NO: 4577; WAN0249QQ; Start 167; Stop 191
cagcaaactaggaaactaaacccag

SEQ ID NO: 385843 - DNA, 25 bp, Artificial
  probe
  misc_feature (1)..(25): SEQ ID NO: 4577; WAN0249QQ; Start 276; Stop 300
attgaaataagatgaaaccaagtcg

SEQ ID NO: 385844 - DNA, 25 bp, Artificial
  probe
  misc_feature (1)..(25): SEQ ID NO: 4577; WAN0249QQ; Start 166; Stop 190
tcagcaaactaggaaactaaaccca

SEQ ID NO: 385845 - DNA, 25 bp, Artificial
  probe
  misc_feature (1)..(25): SEQ ID NO: 4577; WAN0249QQ; Start 286; Stop 310
gatgaaaccaagtcgattaggaaag

SEQ ID NO: 385846 - DNA, 25 bp, Artificial
  probe
  misc_feature (1)..(25): SEQ ID NO: 4577; WAN0249QQ; Start 162; Stop 186
tccatcagcaaactaggaaactaaa

SEQ ID NO: 385847 - DNA, 25 bp, Artificial
  probe
  misc_feature (1)..(25): SEQ ID NO: 4577; WAN0249QQ; Start 161; Stop 185
atccatcagcaaactaggaaactaa

SEQ ID NO: 385848 - DNA, 25 bp, Artificial
  probe
  misc_feature (1)..(25): SEQ ID NO: 4577; WAN0249QQ; Start 160; Stop 184
aatccatcagcaaactaggaaacta

SEQ ID NO: 385849 - DNA, 25 bp, Artificial
  probe
  misc_feature (1)..(25): SEQ ID NO: 4577; WAN0249QQ; Start 293; Stop 317
ccaagtcgattaggaaaggtaaatg

SEQ ID NO: 385850 - DNA, 25 bp, Artificial
  probe
  misc_feature (1)..(25): SEQ ID NO: 4577; WAN0249QQ; Start 285; Stop 309
agatgaaaccaagtcgattaggaaa

SEQ ID NO: 385851 - DNA, 25 bp, Artificial
  probe
  misc_feature (1)..(25): SEQ ID NO: 4577; WAN0249QQ; Start 284; Stop 308
aagatgaaaccaagtcgattaggaa

SEQ ID NO: 385852 - DNA, 25 bp, Artificial
  probe
  misc_feature (1)..(25): SEQ ID NO: 4577; WAN0249QQ; Start 158; Stop 182
gaaatccatcagcaaactaggaaac

SEQ ID NO: 385853 - DNA, 25 bp, Artificial
  probe
  misc_feature (1)..(25): SEQ ID NO: 4577; WAN0249QQ; Start 283; Stop 307
taagatgaaaccaagtcgattagga

SEQ ID NO: 385854 - DNA, 25 bp, Artificial
  probe
  misc_feature (1)..(25): SEQ ID NO: 4578; WAN0249EN; Start 11; Stop 35
ttggcacccattataccataatacc

SEQ ID NO: 385855 - DNA, 25 bp, Artificial
  probe
  misc_feature (1)..(25): SEQ ID NO: 4578; WAN0249EN; Start 8; Stop 32
ctcttggcacccattataccataat

SEQ ID NO: 385856 - DNA, 25 bp, Artificial
  probe
  misc_feature (1)..(25): SEQ ID NO: 4578; WAN0249EN; Start 10; Stop 34
cttggcacccattataccataatac

SEQ ID NO: 385857 - DNA, 25 bp, Artificial
  probe
  misc_feature (1)..(25): SEQ ID NO: 4578; WAN0249EN; Start 9; Stop 33
tcttggcacccattataccataata

SEQ ID NO: 385858 - DNA, 25 bp, Artificial
  probe
  misc_feature (1)..(25): SEQ ID NO: 4578; WAN0249EN; Start 7; Stop 31
cctcttggcacccattataccataa

SEQ ID NO: 385859 - DNA, 25 bp, Artificial
  probe
  misc_feature (1)..(25): SEQ ID NO: 4578; WAN0249EN; Start 12; Stop 36
tggcacccattataccataataccc

SEQ ID NO: 385860 - DNA, 25 bp, Artificial
  probe
  misc_feature (1)..(25): SEQ ID NO: 4578; WAN0249EN; Start 111; Stop 135
aaacctacctttacacatattgaaa

SEQ ID NO: 385861 - DNA, 25 bp, Artificial
  probe
  misc_feature (1)..(25): SEQ ID NO: 4578; WAN0249EN; Start 6; Stop 30
acctcttggcacccattataccata

SEQ ID NO: 385862 - DNA, 25 bp, Artificial
  probe
  misc_feature (1)..(25): SEQ ID NO: 4578; WAN0249EN; Start 110; Stop 134
taaacctacctttacacatattgaa

SEQ ID NO: 385863 - DNA, 25 bp, Artificial
  probe
  misc_feature (1)..(25): SEQ ID NO: 4578; WAN0249EN; Start 15; Stop 39
cacccattataccataatacccctc

SEQ ID NO: 385864 - DNA, 25 bp, Artificial
  probe
  misc_feature (1)..(25): SEQ ID NO: 4578; WAN0249EN; Start 16; Stop 40
acccattataccataatacccctca

SEQ ID NO: 385865 - DNA, 25 bp, Artificial
  probe
  misc_feature (1)..(25): SEQ ID NO: 4578; WAN0249EN; Start 17; Stop 41
cccattataccataatacccctcaa

SEQ ID NO: 385866 - DNA, 25 bp, Artificial
  probe
  misc_feature (1)..(25): SEQ ID NO: 4578; WAN0249EN; Start 5; Stop 29
aacctcttggcacccattataccat

SEQ ID NO: 385867 - DNA, 25 bp, Artificial
  probe
  misc_feature (1)..(25): SEQ ID NO: 4578; WAN0249EN; Start 14; Stop 38
gcacccattataccataatacccct

SEQ ID NO: 385868 - DNA, 25 bp, Artificial
  probe
  misc_feature (1)..(25): SEQ ID NO: 4578; WAN0249EN; Start 4; Stop 28
aaacctcttggcacccattatacca

SEQ ID NO: 385869 - DNA, 25 bp, Artificial
  probe
  misc_feature (1)..(25): SEQ ID NO: 4578; WAN0249EN; Start 2; Stop 26
caaaacctcttggcacccattatac

SEQ ID NO: 385870 - DNA, 25 bp, Artificial
  probe
  misc_feature (1)..(25): SEQ ID NO: 4578; WAN0249EN; Start 1; Stop 25
tcaaaacctcttggcacccattata

SEQ ID NO: 385871 - DNA, 25 bp, Artificial
  probe
  misc_feature (1)..(25): SEQ ID NO: 4578; WAN0249EN; Start 99; Stop 123
ttacaattcagtaaacctaccttta

SEQ ID NO: 385872 - DNA, 25 bp, Artificial
  probe
  misc_feature (1)..(25): SEQ ID NO: 4578; WAN0249EN; Start 103; Stop 127
aattcagtaaacctacctttacaca

SEQ ID NO: 385873 - DNA, 25 bp, Artificial
  probe
  misc_feature (1)..(25): SEQ ID NO: 4578; WAN0249EN; Start 101; Stop 125
acaattcagtaaacctacctttaca

SEQ ID NO: 385874 - DNA, 25 bp, Artificial
  probe
  misc_feature (1)..(25): SEQ ID NO: 4578; WAN0249EN; Start 18; Stop 42
ccattataccataatacccctcaaa

SEQ ID NO: 385875 - DNA, 25 bp, Artificial
  probe
  misc_feature (1)..(25): SEQ ID NO: 4578; WAN0249EN; Start 104; Stop 128
attcagtaaacctacctttacacat

SEQ ID NO: 385876 - DNA, 25 bp, Artificial
  probe
  misc_feature (1)..(25): SEQ ID NO: 4578; WAN0249EN; Start 102; Stop 126
caattcagtaaacctacctttacac

SEQ ID NO: 385877 - DNA, 25 bp, Artificial
  probe
  misc_feature (1)..(25): SEQ ID NO: 4578; WAN0249EN; Start 13; Stop 37
ggcacccattataccataatacccc

SEQ ID NO: 385878 - DNA, 25 bp, Artificial
  probe
  misc_feature (1)..(25): SEQ ID NO: 4578; WAN0249EN; Start 3; Stop 27
aaaacctcttggcacccattatacc

SEQ ID NO: 385879 - DNA, 25 bp, Artificial
  probe
  misc_feature (1)..(25): SEQ ID NO: 4578; WAN0249EN; Start 105; Stop 129
ttcagtaaacctacctttacacata

SEQ ID NO: 385880 - DNA, 25 bp, Artificial
  probe
  misc_feature (1)..(25): SEQ ID NO: 4578; WAN0249EN; Start 106; Stop 130
tcagtaaacctacctttacacatat

SEQ ID NO: 385881 - DNA, 25 bp, Artificial
  probe
  misc_feature (1)..(25): SEQ ID NO: 4578; WAN0249EN; Start 109; Stop 133
gtaaacctacctttacacatattga

SEQ ID NO: 385882 - DNA, 25 bp, Artificial
  probe
  misc_feature (1)..(25): SEQ ID NO: 4578; WAN0249EN; Start 108; Stop 132
agtaaacctacctttacacatattg

SEQ ID NO: 385883 - DNA, 25 bp, Artificial
  probe
  misc_feature (1)..(25): SEQ ID NO: 4578; WAN0249EN; Start 107; Stop 131
cagtaaacctacctttacacatatt

SEQ ID NO: 385884 - DNA, 25 bp, Artificial
  probe
  misc_feature (1)..(25): SEQ ID NO: 4578; WAN0249EN; Start 100; Stop 124
tacaattcagtaaacctacctttac

SEQ ID NO: 385885 - DNA, 25 bp, Artificial
  probe
  misc_feature (1)..(25): SEQ ID NO: 4578; WAN0249EN; Start 98; Stop 122
tttacaattcagtaaacctaccttt

SEQ ID NO: 385886 - DNA, 25 bp, Artificial
  probe
  misc_feature (1)..(25): SEQ ID NO: 4578; WAN0249EN; Start 19; Stop 43
cattataccataatacccctcaaaa

SEQ ID NO: 385887 - DNA, 25 bp, Artificial
  probe
  misc_feature (1)..(25): SEQ ID NO: 4578; WAN0249EN; Start 89; Stop 113
aaaaggtagtttacaattcagtaaa

SEQ ID NO: 385888 - DNA, 25 bp, Artificial
  probe
  misc_feature (1)..(25): SEQ ID NO: 4579; WAN024A6P; Start 184; Stop 208
atcactttcattttacttaccgctt

SEQ ID NO: 385889 - DNA, 25 bp, Artificial
  probe
  misc_feature (1)..(25): SEQ ID NO: 4579; WAN024A6P; Start 185; Stop 209
tcactttcattttacttaccgctta

SEQ ID NO: 385890 - DNA, 25 bp, Artificial
  probe
  misc_feature (1)..(25): SEQ ID NO: 4579; WAN024A6P; Start 183; Stop 207
tatcactttcattttacttaccgct

SEQ ID NO: 385891 - DNA, 25 bp, Artificial
  probe
  misc_feature (1)..(25): SEQ ID NO: 4579; WAN024A6P; Start 182; Stop 206
ttatcactttcattttacttaccgc

SEQ ID NO: 385892 - DNA, 25 bp, Artificial
  probe
  misc_feature (1)..(25): SEQ ID NO: 4579; WAN024A6P; Start 186; Stop 210
cactttcattttacttaccgcttat

SEQ ID NO: 385893 - DNA, 25 bp, Artificial
  probe
  misc_feature (1)..(25): SEQ ID NO: 4579; WAN024A6P; Start 187; Stop 211
actttcattttacttaccgcttatt

SEQ ID NO: 385894 - DNA, 25 bp, Artificial
  probe
  misc_feature (1)..(25): SEQ ID NO: 4579; WAN024A6P; Start 188; Stop 212
ctttcattttacttaccgcttattt

SEQ ID NO: 385895 - DNA, 25 bp, Artificial
  probe
  misc_feature (1)..(25): SEQ ID NO: 4579; WAN024A6P; Start 73; Stop 97
tctaaacgttcgtaaatatctctgt

SEQ ID NO: 385896 - DNA, 25 bp, Artificial
  probe
  misc_feature (1)..(25): SEQ ID NO: 4579; WAN024A6P; Start 189; Stop 213
tttcattttacttaccgcttatttt

SEQ ID NO: 385897 - DNA, 25 bp, Artificial
  probe
  misc_feature (1)..(25): SEQ ID NO: 4579; WAN024A6P; Start 72; Stop 96
ctctaaacgttcgtaaatatctctg

SEQ ID NO: 385898 - DNA, 25 bp, Artificial
  probe
  misc_feature (1)..(25): SEQ ID NO: 4579; WAN024A6P; Start 181; Stop 205
tttatcactttcattttacttaccg

SEQ ID NO: 385899 - DNA, 25 bp, Artificial
  probe
  misc_feature (1)..(25): SEQ ID NO: 4579; WAN024A6P; Start 74; Stop 98
ctaaacgttcgtaaatatctctgtt

SEQ ID NO: 385900 - DNA, 25 bp, Artificial
  probe
  misc_feature (1)..(25): SEQ ID NO: 4579; WAN024A6P; Start 2; Stop 26
caaaattcctctaacctcttatatg

SEQ ID NO: 385901 - DNA, 25 bp, Artificial
  probe
  misc_feature (1)..(25): SEQ ID NO: 4579; WAN024A6P; Start 3; Stop 27
aaaattcctctaacctcttatatga

SEQ ID NO: 385902 - DNA, 25 bp, Artificial
  probe
  misc_feature (1)..(25): SEQ ID NO: 4579; WAN024A6P; Start 1; Stop 25
tcaaaattcctctaacctcttatat

SEQ ID NO: 385903 - DNA, 25 bp, Artificial
  probe
  misc_feature (1)..(25): SEQ ID NO: 4579; WAN024A6P; Start 75; Stop 99
taaacgttcgtaaatatctctgttt

SEQ ID NO: 385904 - DNA, 25 bp, Artificial
  probe
  misc_feature (1)..(25): SEQ ID NO: 4579; WAN024A6P; Start 76; Stop 100
aaacgttcgtaaatatctctgtttt

SEQ ID NO: 385905 - DNA, 25 bp, Artificial
  probe
  misc_feature (1)..(25): SEQ ID NO: 4580; WAN0249PH; Start 27; Stop 51
cattttgaaatctatttaccccacc

SEQ ID NO: 385906 - DNA, 25 bp, Artificial
  probe
  misc_feature (1)..(25): SEQ ID NO: 4580; WAN0249PH; Start 26; Stop 50
tcattttgaaatctatttaccccac

SEQ ID NO: 385907 - DNA, 25 bp, Artificial
  probe
  misc_feature (1)..(25): SEQ ID NO: 4580; WAN0249PH; Start 25; Stop 49
atcattttgaaatctatttacccca

SEQ ID NO: 385908 - DNA, 25 bp, Artificial
  probe
  misc_feature (1)..(25): SEQ ID NO: 4580; WAN0249PH; Start 24; Stop 48
tatcattttgaaatctatttacccc

SEQ ID NO: 385909 - DNA, 25 bp, Artificial
  probe
  misc_feature (1)..(25): SEQ ID NO: 4581; WAN0249Y4; Start 12; Stop 36
tctagtcacatagcattctaccatt

SEQ ID NO: 385910 - DNA, 25 bp, Artificial
  probe
  misc_feature (1)..(25): SEQ ID NO: 4581; WAN0249Y4; Start 11; Stop 35
ttctagtcacatagcattctaccat

SEQ ID NO: 385911 - DNA, 25 bp, Artificial
  probe
  misc_feature (1)..(25): SEQ ID NO: 4581; WAN0249Y4; Start 13; Stop 37
ctagtcacatagcattctaccatta

SEQ ID NO: 385912 - DNA, 25 bp, Artificial
  probe
  misc_feature (1)..(25): SEQ ID NO: 4581; WAN0249Y4; Start 18; Stop 42
cacatagcattctaccattatactg

SEQ ID NO: 385913 - DNA, 25 bp, Artificial
  probe
  misc_feature (1)..(25): SEQ ID NO: 4581; WAN0249Y4; Start 16; Stop 40
gtcacatagcattctaccattatac

SEQ ID NO: 385914 - DNA, 25 bp, Artificial
  probe
  misc_feature (1)..(25): SEQ ID NO: 4581; WAN0249Y4; Start 17; Stop 41
tcacatagcattctaccattatact

SEQ ID NO: 385915 - DNA, 25 bp, Artificial
  probe
  misc_feature (1)..(25): SEQ ID NO: 4581; WAN0249Y4; Start 15; Stop 39
agtcacatagcattctaccattata

SEQ ID NO: 385916 - DNA, 25 bp, Artificial
  probe
  misc_feature (1)..(25): SEQ ID NO: 4581; WAN0249Y4; Start 14; Stop 38
tagtcacatagcattctaccattat

SEQ ID NO: 385917 - DNA, 25 bp, Artificial
  probe
  misc_feature (1)..(25): SEQ ID NO: 4581; WAN0249Y4; Start 6; Stop 30
ttcctttctagtcacatagcattct

SEQ ID NO: 385918 - DNA, 25 bp, Artificial
  probe
  misc_feature (1)..(25): SEQ ID NO: 4581; WAN0249Y4; Start 5; Stop 29
cttcctttctagtcacatagcattc

SEQ ID NO: 385919 - DNA, 25 bp, Artificial
  probe
  misc_feature (1)..(25): SEQ ID NO: 4581; WAN0249Y4; Start 10; Stop 34
tttctagtcacatagcattctacca

SEQ ID NO: 385920 - DNA, 25 bp, Artificial
  probe
  misc_feature (1)..(25): SEQ ID NO: 4581; WAN0249Y4; Start 101; Stop 125
tggtataatggtactactcaaggga

SEQ ID NO: 385921 - DNA, 25 bp, Artificial
  probe
  misc_feature (1)..(25): SEQ ID NO: 4581; WAN0249Y4; Start 19; Stop 43
acatagcattctaccattatactgg

SEQ ID NO: 385922 - DNA, 25 bp, Artificial
  probe
  misc_feature (1)..(25): SEQ ID NO: 4581; WAN0249Y4; Start 9; Stop 33
ctttctagtcacatagcattctacc

SEQ ID NO: 385923 - DNA, 25 bp, Artificial
  probe
  misc_feature (1)..(25): SEQ ID NO: 4581; WAN0249Y4; Start 8; Stop 32
cctttctagtcacatagcattctac

SEQ ID NO: 385924 - DNA, 25 bp, Artificial
  probe
  misc_feature (1)..(25): SEQ ID NO: 4581; WAN0249Y4; Start 7; Stop 31
tcctttctagtcacatagcattcta

SEQ ID NO: 385925 - DNA, 25 bp, Artificial
  probe
  misc_feature (1)..(25): SEQ ID NO: 4581; WAN0249Y4; Start 4; Stop 28
acttcctttctagtcacatagcatt

SEQ ID NO: 385926 - DNA, 25 bp, Artificial
  probe
  misc_feature (1)..(25): SEQ ID NO: 4581; WAN0249Y4; Start 3; Stop 27
aacttcctttctagtcacatagcat

SEQ ID NO: 385927 - DNA, 25 bp, Artificial
  probe
  misc_feature (1)..(25): SEQ ID NO: 4581; WAN0249Y4; Start 1; Stop 25
tcaacttcctttctagtcacatagc

SEQ ID NO: 385928 - DNA, 25 bp, Artificial
  probe
  misc_feature (1)..(25): SEQ ID NO: 4581; WAN0249Y4; Start 2; Stop 26
caacttcctttctagtcacatagca

SEQ ID NO: 385929 - DNA, 25 bp, Artificial
  probe
  misc_feature (1)..(25): SEQ ID NO: 4581; WAN0249Y4; Start 100; Stop 124
ttggtataatggtactactcaaggg

SEQ ID NO: 385930 - DNA, 25 bp, Artificial
  probe
  misc_feature (1)..(25): SEQ ID NO: 4581; WAN0249Y4; Start 136; Stop 160
gaaacctgtgatagtgtcgtcattc

SEQ ID NO: 385931 - DNA, 25 bp, Artificial
  probe
  misc_feature (1)..(25): SEQ ID NO: 4581; WAN0249Y4; Start 102; Stop 126
ggtataatggtactactcaagggag

SEQ ID NO: 385932 - DNA, 25 bp, Artificial
  probe
  misc_feature (1)..(25): SEQ ID NO: 4581; WAN0249Y4; Start 135; Stop 159
agaaacctgtgatagtgtcgtcatt

SEQ ID NO: 385933 - DNA, 25 bp, Artificial
  probe
  misc_feature (1)..(25): SEQ ID NO: 4581; WAN0249Y4; Start 142; Stop 166
tgtgatagtgtcgtcattccgaatt

SEQ ID NO: 385934 - DNA, 25 bp, Artificial
  probe
  misc_feature (1)..(25): SEQ ID NO: 4581; WAN0249Y4; Start 99; Stop 123
tttggtataatggtactactcaagg

SEQ ID NO: 385935 - DNA, 25 bp, Artificial
  probe
  misc_feature (1)..(25): SEQ ID NO: 4581; WAN0249Y4; Start 141; Stop 165
ctgtgatagtgtcgtcattccgaat

SEQ ID NO: 385936 - DNA, 25 bp, Artificial
  probe
  misc_feature (1)..(25): SEQ ID NO: 4581; WAN0249Y4; Start 137; Stop 161
aaacctgtgatagtgtcgtcattcc

SEQ ID NO: 385937 - DNA, 25 bp, Artificial
  probe
  misc_feature (1)..(25): SEQ ID NO: 4581; WAN0249Y4; Start 134; Stop 158
cagaaacctgtgatagtgtcgtcat

SEQ ID NO: 385938 - DNA, 25 bp, Artificial
  probe
  misc_feature (1)..(25): SEQ ID NO: 4581; WAN0249Y4; Start 143; Stop 167
gtgatagtgtcgtcattccgaattt

SEQ ID NO: 385939 - DNA, 25 bp, Artificial
  probe
  misc_feature (1)..(25): SEQ ID NO: 4581; WAN0249Y4; Start 153; Stop 177
cgtcattccgaattttatgctgaaa

SEQ ID NO: 385940 - DNA, 25 bp, Artificial
  probe
  misc_feature (1)..(25): SEQ ID NO: 4581; WAN0249Y4; Start 138; Stop 162
aacctgtgatagtgtcgtcattccg

SEQ ID NO: 385941 - DNA, 25 bp, Artificial
  probe
  misc_feature (1)..(25): SEQ ID NO: 4581; WAN0249Y4; Start 160; Stop 184
ccgaattttatgctgaaaagtatgc

SEQ ID NO: 385942 - DNA, 25 bp, Artificial
  probe
  misc_feature (1)..(25): SEQ ID NO: 4582; WAN024ARO; Start 19; Stop 43
accaggttctaaaatctgattcctt

SEQ ID NO: 385943 - DNA, 25 bp, Artificial
  probe
  misc_feature (1)..(25): SEQ ID NO: 4582; WAN024ARO; Start 20; Stop 44
ccaggttctaaaatctgattccttt

SEQ ID NO: 385944 - DNA, 25 bp, Artificial
  probe
  misc_feature (1)..(25): SEQ ID NO: 4582; WAN024ARO; Start 18; Stop 42
aaccaggttctaaaatctgattcct

SEQ ID NO: 385945 - DNA, 25 bp, Artificial
  probe
  misc_feature (1)..(25): SEQ ID NO: 4582; WAN024ARO; Start 21; Stop 45
caggttctaaaatctgattcctttt

SEQ ID NO: 385946 - DNA, 25 bp, Artificial
  probe
  misc_feature (1)..(25): SEQ ID NO: 4582; WAN024ARO; Start 13; Stop 37
aaaggaaccaggttctaaaatctga

SEQ ID NO: 385947 - DNA, 25 bp, Artificial
  probe
  misc_feature (1)..(25): SEQ ID NO: 4582; WAN024ARO; Start 17; Stop 41
gaaccaggttctaaaatctgattcc

SEQ ID NO: 385948 - DNA, 25 bp, Artificial
  probe
  misc_feature (1)..(25): SEQ ID NO: 4582; WAN024ARO; Start 16; Stop 40
ggaaccaggttctaaaatctgattc

SEQ ID NO: 385949 - DNA, 25 bp, Artificial
  probe
  misc_feature (1)..(25): SEQ ID NO: 4582; WAN024ARO; Start 15; Stop 39
aggaaccaggttctaaaatctgatt

SEQ ID NO: 385950 - DNA, 25 bp, Artificial
  probe
  misc_feature (1)..(25): SEQ ID NO: 4582; WAN024ARO; Start 14; Stop 38
aaggaaccaggttctaaaatctgat

SEQ ID NO: 385951 - DNA, 25 bp, Artificial
  probe
  misc_feature (1)..(25): SEQ ID NO: 4582; WAN024ARO; Start 12; Stop 36
aaaaggaaccaggttctaaaatctg

SEQ ID NO: 385952 - DNA, 25 bp, Artificial
  probe
  misc_feature (1)..(25): SEQ ID NO: 4583; WAN024ACQ; Start 19; Stop 43
taaatgctaacctgatggcttcttt

SEQ ID NO: 385953 - DNA, 25 bp, Artificial
  probe
  misc_feature (1)..(25): SEQ ID NO: 4583; WAN024ACQ; Start 18; Stop 42
ttaaatgctaacctgatggcttctt

SEQ ID NO: 385954 - DNA, 25 bp, Artificial
  probe
  misc_feature (1)..(25): SEQ ID NO: 4583; WAN024ACQ; Start 17; Stop 41
gttaaatgctaacctgatggcttct

SEQ ID NO: 385955 - DNA, 25 bp, Artificial
  probe
  misc_feature (1)..(25): SEQ ID NO: 4583; WAN024ACQ; Start 1; Stop 25
tcaaggagctgtttaggttaaatgc

SEQ ID NO: 385956 - DNA, 25 bp, Artificial
  probe
  misc_feature (1)..(25): SEQ ID NO: 4583; WAN024ACQ; Start 33; Stop 57
atggcttcttttgtttgtgaatagt

SEQ ID NO: 385957 - DNA, 25 bp, Artificial
  probe
  misc_feature (1)..(25): SEQ ID NO: 4583; WAN024ACQ; Start 31; Stop 55
tgatggcttcttttgtttgtgaata

SEQ ID NO: 385958 - DNA, 25 bp, Artificial
  probe
  misc_feature (1)..(25): SEQ ID NO: 4583; WAN024ACQ; Start 30; Stop 54
ctgatggcttcttttgtttgtgaat

SEQ ID NO: 385959 - DNA, 25 bp, Artificial
  probe
  misc_feature (1)..(25): SEQ ID NO: 4583; WAN024ACQ; Start 32; Stop 56
gatggcttcttttgtttgtgaatag

SEQ ID NO: 385960 - DNA, 25 bp, Artificial
  probe
  misc_feature (1)..(25): SEQ ID NO: 4583; WAN024ACQ; Start 34; Stop 58
tggcttcttttgtttgtgaatagta

SEQ ID NO: 385961 - DNA, 25 bp, Artificial
  probe
  misc_feature (1)..(25): SEQ ID NO: 4583; WAN024ACQ; Start 25; Stop 49
ctaacctgatggcttcttttgtttg

SEQ ID NO: 385962 - DNA, 25 bp, Artificial
  probe
  misc_feature (1)..(25): SEQ ID NO: 4583; WAN024ACQ; Start 20; Stop 44
aaatgctaacctgatggcttctttt

SEQ ID NO: 385963 - DNA, 25 bp, Artificial
  probe
  misc_feature (1)..(25): SEQ ID NO: 4583; WAN024ACQ; Start 26; Stop 50
taacctgatggcttcttttgtttgt

SEQ ID NO: 385964 - DNA, 25 bp, Artificial
  probe
  misc_feature (1)..(25): SEQ ID NO: 4583; WAN024ACQ; Start 5; Stop 29
ggagctgtttaggttaaatgctaac

SEQ ID NO: 385965 - DNA, 25 bp, Artificial
  probe
  misc_feature (1)..(25): SEQ ID NO: 4583; WAN024ACQ; Start 4; Stop 28
aggagctgtttaggttaaatgctaa

SEQ ID NO: 385966 - DNA, 25 bp, Artificial
  probe
  misc_feature (1)..(25): SEQ ID NO: 4583; WAN024ACQ; Start 3; Stop 27
aaggagctgtttaggttaaatgcta

SEQ ID NO: 385967 - DNA, 25 bp, Artificial
  probe
  misc_feature (1)..(25): SEQ ID NO: 4583; WAN024ACQ; Start 21; Stop 45
aatgctaacctgatggcttcttttg

SEQ ID NO: 385968 - DNA, 25 bp, Artificial
  probe
  misc_feature (1)..(25): SEQ ID NO: 4583; WAN024ACQ; Start 35; Stop 59
ggcttcttttgtttgtgaatagtat

SEQ ID NO: 385969 - DNA, 25 bp, Artificial
  probe
  misc_feature (1)..(25): SEQ ID NO: 4583; WAN024ACQ; Start 2; Stop 26
caaggagctgtttaggttaaatgct

SEQ ID NO: 385970 - DNA, 25 bp, Artificial
  probe
  misc_feature (1)..(25): SEQ ID NO: 4583; WAN024ACQ; Start 24; Stop 48
gctaacctgatggcttcttttgttt

SEQ ID NO: 385971 - DNA, 25 bp, Artificial
  probe
  misc_feature (1)..(25): SEQ ID NO: 4583; WAN024ACQ; Start 29; Stop 53
cctgatggcttcttttgtttgtgaa

SEQ ID NO: 385972 - DNA, 25 bp, Artificial
  probe
  misc_feature (1)..(25): SEQ ID NO: 4583; WAN024ACQ; Start 27; Stop 51
aacctgatggcttcttttgtttgtg

SEQ ID NO: 385973 - DNA, 25 bp, Artificial
  probe
  misc_feature (1)..(25): SEQ ID NO: 4583; WAN024ACQ; Start 22; Stop 46
atgctaacctgatggcttcttttgt

SEQ ID NO: 385974 - DNA, 25 bp, Artificial
  probe
  misc_feature (1)..(25): SEQ ID NO: 4583; WAN024ACQ; Start 28; Stop 52
acctgatggcttcttttgtttgtga

SEQ ID NO: 385975 - DNA, 25 bp, Artificial
  probe
  misc_feature (1)..(25): SEQ ID NO: 4583; WAN024ACQ; Start 23; Stop 47
tgctaacctgatggcttcttttgtt

SEQ ID NO: 385976 - DNA, 25 bp, Artificial
  probe
  misc_feature (1)..(25): SEQ ID NO: 4583; WAN024ACQ; Start 36; Stop 60
gcttcttttgtttgtgaatagtata

SEQ ID NO: 385977 - DNA, 25 bp, Artificial
  probe
  misc_feature (1)..(25): SEQ ID NO: 4584; WAN024A4I; Start 10; Stop 34
gatctatccatttgggtaggtcttt

SEQ ID NO: 385978 - DNA, 25 bp, Artificial
  probe
  misc_feature (1)..(25): SEQ ID NO: 4584; WAN024A4I; Start 62; Stop 86
ttggacctagcttggttattatgag

SEQ ID NO: 385979 - DNA, 25 bp, Artificial
  probe
  misc_feature (1)..(25): SEQ ID NO: 4584; WAN024A4I; Start 61; Stop 85
cttggacctagcttggttattatga

SEQ ID NO: 385980 - DNA, 25 bp, Artificial
  probe
  misc_feature (1)..(25): SEQ ID NO: 4584; WAN024A4I; Start 60; Stop 84
gcttggacctagcttggttattatg

SEQ ID NO: 385981 - DNA, 25 bp, Artificial
  probe
  misc_feature (1)..(25): SEQ ID NO: 4584; WAN024A4I; Start 63; Stop 87
tggacctagcttggttattatgagc

SEQ ID NO: 385982 - DNA, 25 bp, Artificial
  probe
  misc_feature (1)..(25): SEQ ID NO: 4584; WAN024A4I; Start 11; Stop 35
atctatccatttgggtaggtctttt

SEQ ID NO: 385983 - DNA, 25 bp, Artificial
  probe
  misc_feature (1)..(25): SEQ ID NO: 4584; WAN024A4I; Start 59; Stop 83
cgcttggacctagcttggttattat

SEQ ID NO: 385984 - DNA, 25 bp, Artificial
  probe
  misc_feature (1)..(25): SEQ ID NO: 4584; WAN024A4I; Start 7; Stop 31
aaagatctatccatttgggtaggtc

SEQ ID NO: 385985 - DNA, 25 bp, Artificial
  probe
  misc_feature (1)..(25): SEQ ID NO: 4584; WAN024A4I; Start 9; Stop 33
agatctatccatttgggtaggtctt

SEQ ID NO: 385986 - DNA, 25 bp, Artificial
  probe
  misc_feature (1)..(25): SEQ ID NO: 4584; WAN024A4I; Start 8; Stop 32
aagatctatccatttgggtaggtct

SEQ ID NO: 385987 - DNA, 25 bp, Artificial
  probe
  misc_feature (1)..(25): SEQ ID NO: 4584; WAN024A4I; Start 6; Stop 30
taaagatctatccatttgggtaggt

SEQ ID NO: 385988 - DNA, 25 bp, Artificial
  probe
  misc_feature (1)..(25): SEQ ID NO: 4584; WAN024A4I; Start 5; Stop 29
gtaaagatctatccatttgggtagg

SEQ ID NO: 385989 - DNA, 25 bp, Artificial
  probe
  misc_feature (1)..(25): SEQ ID NO: 4584; WAN024A4I; Start 2; Stop 26
caagtaaagatctatccatttgggt

SEQ ID NO: 385990 - DNA, 25 bp, Artificial
  probe
  misc_feature (1)..(25): SEQ ID NO: 4584; WAN024A4I; Start 1; Stop 25
tcaagtaaagatctatccatttggg

SEQ ID NO: 385991 - DNA, 25 bp, Artificial
  probe
  misc_feature (1)..(25): SEQ ID NO: 4584; WAN024A4I; Start 4; Stop 28
agtaaagatctatccatttgggtag

SEQ ID NO: 385992 - DNA, 25 bp, Artificial
  probe
  misc_feature (1)..(25): SEQ ID NO: 4584; WAN024A4I; Start 3; Stop 27
aagtaaagatctatccatttgggta

SEQ ID NO: 385993 - DNA, 25 bp, Artificial
  probe
  misc_feature (1)..(25): SEQ ID NO: 4584; WAN024A4I; Start 58; Stop 82
ccgcttggacctagcttggttatta

SEQ ID NO: 385994 - DNA, 25 bp, Artificial
  probe
  misc_feature (1)..(25): SEQ ID NO: 4584; WAN024A4I; Start 64; Stop 88
ggacctagcttggttattatgagct

SEQ ID NO: 385995 - DNA, 25 bp, Artificial
  probe
  misc_feature (1)..(25): SEQ ID NO: 4585; WAN024AOF; Start 105; Stop 129
gaaggaatagtggaccgaatctgaa

SEQ ID NO: 385996 - DNA, 25 bp, Artificial
  probe
  misc_feature (1)..(25): SEQ ID NO: 4585; WAN024AOF; Start 106; Stop 130
aaggaatagtggaccgaatctgaaa

SEQ ID NO: 385997 - DNA, 25 bp, Artificial
  probe
  misc_feature (1)..(25): SEQ ID NO: 4585; WAN024AOF; Start 104; Stop 128
ggaaggaatagtggaccgaatctga

SEQ ID NO: 385998 - DNA, 25 bp, Artificial
  probe
  misc_feature (1)..(25): SEQ ID NO: 4585; WAN024AOF; Start 100; Stop 124
tttgggaaggaatagtggaccgaat

SEQ ID NO: 385999 - DNA, 25 bp, Artificial
  probe
  misc_feature (1)..(25): SEQ ID NO: 4585; WAN024AOF; Start 101; Stop 125
ttgggaaggaatagtggaccgaatc

SEQ ID NO: 386000 - DNA, 25 bp, Artificial
  probe
  misc_feature (1)..(25): SEQ ID NO: 4585; WAN024AOF; Start 103; Stop 127
gggaaggaatagtggaccgaatctg

SEQ ID NO: 386001 - DNA, 25 bp, Artificial
  probe
  misc_feature (1)..(25): SEQ ID NO: 4585; WAN024AOF; Start 102; Stop 126
tgggaaggaatagtggaccgaatct

SEQ ID NO: 386002 - DNA, 25 bp, Artificial
  probe
  misc_feature (1)..(25): SEQ ID NO: 4585; WAN024AOF; Start 99; Stop 123
ttttgggaaggaatagtggaccgaa

SEQ ID NO: 386003 - DNA, 25 bp, Artificial
  probe
  misc_feature (1)..(25): SEQ ID NO: 4585; WAN024AOF; Start 42; Stop 66
ctgagggttttgtgcttgggatagt

SEQ ID NO: 386004 - DNA, 25 bp, Artificial
  probe
  misc_feature (1)..(25): SEQ ID NO: 4585; WAN024AOF; Start 41; Stop 65
actgagggttttgtgcttgggatag

SEQ ID NO: 386005 - DNA, 25 bp, Artificial
  probe
  misc_feature (1)..(25): SEQ ID NO: 4585; WAN024AOF; Start 40; Stop 64
gactgagggttttgtgcttgggata

SEQ ID NO: 386006 - DNA, 25 bp, Artificial
  probe
  misc_feature (1)..(25): SEQ ID NO: 4585; WAN024AOF; Start 73; Stop 97
aattccttcggcgcaatatgcaatg

SEQ ID NO: 386007 - DNA, 25 bp, Artificial
  probe
  misc_feature (1)..(25): SEQ ID NO: 4585; WAN024AOF; Start 72; Stop 96
caattccttcggcgcaatatgcaat

SEQ ID NO: 386008 - DNA, 25 bp, Artificial
  probe
  misc_feature (1)..(25): SEQ ID NO: 4586; WAN024AKJ; Start 182; Stop 206
tgaaccacttacaaggagaatagaa

SEQ ID NO: 386009 - DNA, 25 bp, Artificial
  probe
  misc_feature (1)..(25): SEQ ID NO: 4586; WAN024AKJ; Start 181; Stop 205
ttgaaccacttacaaggagaataga

SEQ ID NO: 386010 - DNA, 25 bp, Artificial
  probe
  misc_feature (1)..(25): SEQ ID NO: 4586; WAN024AKJ; Start 178; Stop 202
cgattgaaccacttacaaggagaat

SEQ ID NO: 386011 - DNA, 25 bp, Artificial
  probe
  misc_feature (1)..(25): SEQ ID NO: 4586; WAN024AKJ; Start 180; Stop 204
attgaaccacttacaaggagaatag

SEQ ID NO: 386012 - DNA, 25 bp, Artificial
  probe
  misc_feature (1)..(25): SEQ ID NO: 4586; WAN024AKJ; Start 179; Stop 203
gattgaaccacttacaaggagaata

SEQ ID NO: 386013 - DNA, 25 bp, Artificial
  probe
  misc_feature (1)..(25): SEQ ID NO: 4586; WAN024AKJ; Start 17; Stop 41
aaatctcacagcagtctattagttg

SEQ ID NO: 386014 - DNA, 25 bp, Artificial
  probe
  misc_feature (1)..(25): SEQ ID NO: 4586; WAN024AKJ; Start 183; Stop 207
gaaccacttacaaggagaatagaaa

SEQ ID NO: 386015 - DNA, 25 bp, Artificial
  probe
  misc_feature (1)..(25): SEQ ID NO: 4586; WAN024AKJ; Start 177; Stop 201
tcgattgaaccacttacaaggagaa

SEQ ID NO: 386016 - DNA, 25 bp, Artificial
  probe
  misc_feature (1)..(25): SEQ ID NO: 4586; WAN024AKJ; Start 18; Stop 42
aatctcacagcagtctattagttgc

SEQ ID NO: 386017 - DNA, 25 bp, Artificial
  probe
  misc_feature (1)..(25): SEQ ID NO: 4586; WAN024AKJ; Start 44; Stop 68
tttcatactaggcaagtgactgagg

SEQ ID NO: 386018 - DNA, 25 bp, Artificial
  probe
  misc_feature (1)..(25): SEQ ID NO: 4586; WAN024AKJ; Start 47; Stop 71
catactaggcaagtgactgaggctt

SEQ ID NO: 386019 - DNA, 25 bp, Artificial
  probe
  misc_feature (1)..(25): SEQ ID NO: 4586; WAN024AKJ; Start 45; Stop 69
ttcatactaggcaagtgactgaggc

SEQ ID NO: 386020 - DNA, 25 bp, Artificial
  probe
  misc_feature (1)..(25): SEQ ID NO: 4586; WAN024AKJ; Start 114; Stop 138
aaaatagtagactgaaaacccgcaa

SEQ ID NO: 386021 - DNA, 25 bp, Artificial
  probe
  misc_feature (1)..(25): SEQ ID NO: 4586; WAN024AKJ; Start 5; Stop 29
taacacagtagaaaatctcacagca

SEQ ID NO: 386022 - DNA, 25 bp, Artificial
  probe
  misc_feature (1)..(25): SEQ ID NO: 4586; WAN024AKJ; Start 15; Stop 39
gaaaatctcacagcagtctattagt

SEQ ID NO: 386023 - DNA, 25 bp, Artificial
  probe
  misc_feature (1)..(25): SEQ ID NO: 4586; WAN024AKJ; Start 115; Stop 139
aaatagtagactgaaaacccgcaag

SEQ ID NO: 386024 - DNA, 25 bp, Artificial
  probe
  misc_feature (1)..(25): SEQ ID NO: 4586; WAN024AKJ; Start 4; Stop 28
ataacacagtagaaaatctcacagc

SEQ ID NO: 386025 - DNA, 25 bp, Artificial
  probe
  misc_feature (1)..(25): SEQ ID NO: 4586; WAN024AKJ; Start 176; Stop 200
atcgattgaaccacttacaaggaga

SEQ ID NO: 386026 - DNA, 25 bp, Artificial
  probe
  misc_feature (1)..(25): SEQ ID NO: 4586; WAN024AKJ; Start 6; Stop 30
aacacagtagaaaatctcacagcag

SEQ ID NO: 386027 - DNA, 25 bp, Artificial
  probe
  misc_feature (1)..(25): SEQ ID NO: 4586; WAN024AKJ; Start 16; Stop 40
aaaatctcacagcagtctattagtt

SEQ ID NO: 386028 - DNA, 25 bp, Artificial
  probe
  misc_feature (1)..(25): SEQ ID NO: 4586; WAN024AKJ; Start 43; Stop 67
ttttcatactaggcaagtgactgag

SEQ ID NO: 386029 - DNA, 25 bp, Artificial
  probe
  misc_feature (1)..(25): SEQ ID NO: 4586; WAN024AKJ; Start 42; Stop 66
cttttcatactaggcaagtgactga

SEQ ID NO: 386030 - DNA, 25 bp, Artificial
  probe
  misc_feature (1)..(25): SEQ ID NO: 4586; WAN024AKJ; Start 14; Stop 38
agaaaatctcacagcagtctattag

SEQ ID NO: 386031 - DNA, 25 bp, Artificial
  probe
  misc_feature (1)..(25): SEQ ID NO: 4586; WAN024AKJ; Start 9; Stop 33
acagtagaaaatctcacagcagtct

SEQ ID NO: 386032 - DNA, 25 bp, Artificial
  probe
  misc_feature (1)..(25): SEQ ID NO: 4586; WAN024AKJ; Start 8; Stop 32
cacagtagaaaatctcacagcagtc

SEQ ID NO: 386033 - DNA, 25 bp, Artificial
  probe
  misc_feature (1)..(25): SEQ ID NO: 4586; WAN024AKJ; Start 116; Stop 140
aatagtagactgaaaacccgcaaga

SEQ ID NO: 386034 - DNA, 25 bp, Artificial
  probe
  misc_feature (1)..(25): SEQ ID NO: 4586; WAN024AKJ; Start 7; Stop 31
acacagtagaaaatctcacagcagt

SEQ ID NO: 386035 - DNA, 25 bp, Artificial
  probe
  misc_feature (1)..(25): SEQ ID NO: 4586; WAN024AKJ; Start 10; Stop 34
cagtagaaaatctcacagcagtcta

SEQ ID NO: 386036 - DNA, 25 bp, Artificial
  probe
  misc_feature (1)..(25): SEQ ID NO: 4586; WAN024AKJ; Start 128; Stop 152
aaaacccgcaagacttcatcatttc

SEQ ID NO: 386037 - DNA, 25 bp, Artificial
  probe
  misc_feature (1)..(25): SEQ ID NO: 4586; WAN024AKJ; Start 11; Stop 35
agtagaaaatctcacagcagtctat

SEQ ID NO: 386038 - DNA, 25 bp, Artificial
  probe
  misc_feature (1)..(25): SEQ ID NO: 4586; WAN024AKJ; Start 117; Stop 141
atagtagactgaaaacccgcaagac

SEQ ID NO: 386039 - DNA, 25 bp, Artificial
  probe
  misc_feature (1)..(25): SEQ ID NO: 4586; WAN024AKJ; Start 46; Stop 70
tcatactaggcaagtgactgaggct

SEQ ID NO: 386040 - DNA, 25 bp, Artificial
  probe
  misc_feature (1)..(25): SEQ ID NO: 4586; WAN024AKJ; Start 41; Stop 65
gcttttcatactaggcaagtgactg

SEQ ID NO: 386041 - DNA, 25 bp, Artificial
  probe
  misc_feature (1)..(25): SEQ ID NO: 4587; WAN0249US; Start 3; Stop 27
aatcctctctaatgtgaaaacgaac

SEQ ID NO: 386042 - DNA, 25 bp, Artificial
  probe
  misc_feature (1)..(25): SEQ ID NO: 4587; WAN0249US; Start 2; Stop 26
caatcctctctaatgtgaaaacgaa

SEQ ID NO: 386043 - DNA, 25 bp, Artificial
  probe
  misc_feature (1)..(25): SEQ ID NO: 4587; WAN0249US; Start 1; Stop 25
tcaatcctctctaatgtgaaaacga

SEQ ID NO: 386044 - DNA, 25 bp, Artificial
  probe
  misc_feature (1)..(25): SEQ ID NO: 4587; WAN0249US; Start 6; Stop 30
cctctctaatgtgaaaacgaacaaa

SEQ ID NO: 386045 - DNA, 25 bp, Artificial
  probe
  misc_feature (1)..(25): SEQ ID NO: 4587; WAN0249US; Start 4; Stop 28
atcctctctaatgtgaaaacgaaca

SEQ ID NO: 386046 - DNA, 25 bp, Artificial
  probe
  misc_feature (1)..(25): SEQ ID NO: 4587; WAN0249US; Start 5; Stop 29
tcctctctaatgtgaaaacgaacaa

SEQ ID NO: 386047 - DNA, 25 bp, Artificial
  probe
  misc_feature (1)..(25): SEQ ID NO: 4587; WAN0249US; Start 11; Stop 35
ctaatgtgaaaacgaacaaatgaca

SEQ ID NO: 386048 - DNA, 25 bp, Artificial
  probe
  misc_feature (1)..(25): SEQ ID NO: 4587; WAN0249US; Start 10; Stop 34
tctaatgtgaaaacgaacaaatgac

SEQ ID NO: 386049 - DNA, 25 bp, Artificial
  probe
  misc_feature (1)..(25): SEQ ID NO: 4587; WAN0249US; Start 9; Stop 33
ctctaatgtgaaaacgaacaaatga

SEQ ID NO: 386050 - DNA, 25 bp, Artificial
  probe
  misc_feature (1)..(25): SEQ ID NO: 4587; WAN0249US; Start 8; Stop 32
tctctaatgtgaaaacgaacaaatg

SEQ ID NO: 386051 - DNA, 25 bp, Artificial
  probe
  misc_feature (1)..(25): SEQ ID NO: 4587; WAN0249US; Start 7; Stop 31
ctctctaatgtgaaaacgaacaaat

SEQ ID NO: 386052 - DNA, 25 bp, Artificial
  probe
  misc_feature (1)..(25): SEQ ID NO: 4587; WAN0249US; Start 13; Stop 37
aatgtgaaaacgaacaaatgacatg

SEQ ID NO: 386053 - DNA, 25 bp, Artificial
  probe
  misc_feature (1)..(25): SEQ ID NO: 4587; WAN0249US; Start 12; Stop 36
taatgtgaaaacgaacaaatgacat

SEQ ID NO: 386054 - DNA, 25 bp, Artificial
  probe
  misc_feature (1)..(25): SEQ ID NO: 4587; WAN0249US; Start 86; Stop 110
aatagagacatttagactttcgaag

SEQ ID NO: 386055 - DNA, 25 bp, Artificial
  probe
  misc_feature (1)..(25): SEQ ID NO: 4587; WAN0249US; Start 84; Stop 108
aaaatagagacatttagactttcga

SEQ ID NO: 386056 - DNA, 25 bp, Artificial
  probe
  misc_feature (1)..(25): SEQ ID NO: 4587; WAN0249US; Start 90; Stop 114
gagacatttagactttcgaagtatg

SEQ ID NO: 386057 - DNA, 25 bp, Artificial
  probe
  misc_feature (1)..(25): SEQ ID NO: 4587; WAN0249US; Start 89; Stop 113
agagacatttagactttcgaagtat

SEQ ID NO: 386058 - DNA, 25 bp, Artificial
  probe
  misc_feature (1)..(25): SEQ ID NO: 4587; WAN0249US; Start 87; Stop 111
atagagacatttagactttcgaagt

SEQ ID NO: 386059 - DNA, 25 bp, Artificial
  probe
  misc_feature (1)..(25): SEQ ID NO: 4587; WAN0249US; Start 85; Stop 109
aaatagagacatttagactttcgaa

SEQ ID NO: 386060 - DNA, 25 bp, Artificial
  probe
  misc_feature (1)..(25): SEQ ID NO: 4587; WAN0249US; Start 88; Stop 112
tagagacatttagactttcgaagta

SEQ ID NO: 386061 - DNA, 25 bp, Artificial
  probe
  misc_feature (1)..(25): SEQ ID NO: 4587; WAN0249US; Start 14; Stop 38
atgtgaaaacgaacaaatgacatgt

SEQ ID NO: 386062 - DNA, 25 bp, Artificial
  probe
  misc_feature (1)..(25): SEQ ID NO: 4587; WAN0249US; Start 17; Stop 41
tgaaaacgaacaaatgacatgtttg

SEQ ID NO: 386063 - DNA, 25 bp, Artificial
  probe
  misc_feature (1)..(25): SEQ ID NO: 4587; WAN0249US; Start 16; Stop 40
gtgaaaacgaacaaatgacatgttt

SEQ ID NO: 386064 - DNA, 25 bp, Artificial
  probe
  misc_feature (1)..(25): SEQ ID NO: 4587; WAN0249US; Start 54; Stop 78
agatagtaagatttacagaggaaaa

SEQ ID NO: 386065 - DNA, 25 bp, Artificial
  probe
  misc_feature (1)..(25): SEQ ID NO: 4587; WAN0249US; Start 15; Stop 39
tgtgaaaacgaacaaatgacatgtt

SEQ ID NO: 386066 - DNA, 25 bp, Artificial
  probe
  misc_feature (1)..(25): SEQ ID NO: 4588; WAN024A5U; Start 40; Stop 64
aataagaaatgaagggcagtaagtc

SEQ ID NO: 386067 - DNA, 25 bp, Artificial
  probe
  misc_feature (1)..(25): SEQ ID NO: 4588; WAN024A5U; Start 37; Stop 61
gctaataagaaatgaagggcagtaa

SEQ ID NO: 386068 - DNA, 25 bp, Artificial
  probe
  misc_feature (1)..(25): SEQ ID NO: 4588; WAN024A5U; Start 50; Stop 74
gaagggcagtaagtcaagtaatcac

SEQ ID NO: 386069 - DNA, 25 bp, Artificial
  probe
  misc_feature (1)..(25): SEQ ID NO: 4588; WAN024A5U; Start 42; Stop 66
taagaaatgaagggcagtaagtcaa

SEQ ID NO: 386070 - DNA, 25 bp, Artificial
  probe
  misc_feature (1)..(25): SEQ ID NO: 4588; WAN024A5U; Start 41; Stop 65
ataagaaatgaagggcagtaagtca

SEQ ID NO: 386071 - DNA, 25 bp, Artificial
  probe
  misc_feature (1)..(25): SEQ ID NO: 4588; WAN024A5U; Start 47; Stop 71
aatgaagggcagtaagtcaagtaat

SEQ ID NO: 386072 - DNA, 25 bp, Artificial
  probe
  misc_feature (1)..(25): SEQ ID NO: 4588; WAN024A5U; Start 46; Stop 70
aaatgaagggcagtaagtcaagtaa

SEQ ID NO: 386073 - DNA, 25 bp, Artificial
  probe
  misc_feature (1)..(25): SEQ ID NO: 4588; WAN024A5U; Start 48; Stop 72
atgaagggcagtaagtcaagtaatc

SEQ ID NO: 386074 - DNA, 25 bp, Artificial
  probe
  misc_feature (1)..(25): SEQ ID NO: 4588; WAN024A5U; Start 45; Stop 69
gaaatgaagggcagtaagtcaagta

SEQ ID NO: 386075 - DNA, 25 bp, Artificial
  probe
  misc_feature (1)..(25): SEQ ID NO: 4588; WAN024A5U; Start 144; Stop 168
tttcgcagccatttattagtaattg

SEQ ID NO: 386076 - DNA, 25 bp, Artificial
  probe
  misc_feature (1)..(25): SEQ ID NO: 4588; WAN024A5U; Start 43; Stop 67
aagaaatgaagggcagtaagtcaag

SEQ ID NO: 386077 - DNA, 25 bp, Artificial
  probe
  misc_feature (1)..(25): SEQ ID NO: 4588; WAN024A5U; Start 39; Stop 63
taataagaaatgaagggcagtaagt

SEQ ID NO: 386078 - DNA, 25 bp, Artificial
  probe
  misc_feature (1)..(25): SEQ ID NO: 4588; WAN024A5U; Start 275; Stop 299
ggactagattgtggtataatagaga

SEQ ID NO: 386079 - DNA, 25 bp, Artificial
  probe
  misc_feature (1)..(25): SEQ ID NO: 4588; WAN024A5U; Start 51; Stop 75
aagggcagtaagtcaagtaatcact

SEQ ID NO: 386080 - DNA, 25 bp, Artificial
  probe
  misc_feature (1)..(25): SEQ ID NO: 4588; WAN024A5U; Start 49; Stop 73
tgaagggcagtaagtcaagtaatca

SEQ ID NO: 386081 - DNA, 25 bp, Artificial
  probe
  misc_feature (1)..(25): SEQ ID NO: 4588; WAN024A5U; Start 274; Stop 298
aggactagattgtggtataatagag

SEQ ID NO: 386082 - DNA, 25 bp, Artificial
  probe
  misc_feature (1)..(25): SEQ ID NO: 4588; WAN024A5U; Start 143; Stop 167
atttcgcagccatttattagtaatt

SEQ ID NO: 386083 - DNA, 25 bp, Artificial
  probe
  misc_feature (1)..(25): SEQ ID NO: 4588; WAN024A5U; Start 142; Stop 166
aatttcgcagccatttattagtaat

SEQ ID NO: 386084 - DNA, 25 bp, Artificial
  probe
  misc_feature (1)..(25): SEQ ID NO: 4588; WAN024A5U; Start 36; Stop 60
agctaataagaaatgaagggcagta

SEQ ID NO: 386085 - DNA, 25 bp, Artificial
  probe
  misc_feature (1)..(25): SEQ ID NO: 4588; WAN024A5U; Start 38; Stop 62
ctaataagaaatgaagggcagtaag

SEQ ID NO: 386086 - DNA, 25 bp, Artificial
  probe
  misc_feature (1)..(25): SEQ ID NO: 4588; WAN024A5U; Start 166; Stop 190
ttgctacagaattcctagtcattac

SEQ ID NO: 386087 - DNA, 25 bp, Artificial
  probe
  misc_feature (1)..(25): SEQ ID NO: 4588; WAN024A5U; Start 44; Stop 68
agaaatgaagggcagtaagtcaagt

SEQ ID NO: 386088 - DNA, 25 bp, Artificial
  probe
  misc_feature (1)..(25): SEQ ID NO: 4588; WAN024A5U; Start 167; Stop 191
tgctacagaattcctagtcattact

SEQ ID NO: 386089 - DNA, 25 bp, Artificial
  probe
  misc_feature (1)..(25): SEQ ID NO: 4588; WAN024A5U; Start 270; Stop 294
tgataggactagattgtggtataat

SEQ ID NO: 386090 - DNA, 25 bp, Artificial
  probe
  misc_feature (1)..(25): SEQ ID NO: 4588; WAN024A5U; Start 269; Stop 293
atgataggactagattgtggtataa

SEQ ID NO: 386091 - DNA, 25 bp, Artificial
  probe
  misc_feature (1)..(25): SEQ ID NO: 4588; WAN024A5U; Start 267; Stop 291
ttatgataggactagattgtggtat

SEQ ID NO: 386092 - DNA, 25 bp, Artificial
  probe
  misc_feature (1)..(25): SEQ ID NO: 4588; WAN024A5U; Start 151; Stop 175
gccatttattagtaattgctacaga

SEQ ID NO: 386093 - DNA, 25 bp, Artificial
  probe
  misc_feature (1)..(25): SEQ ID NO: 4588; WAN024A5U; Start 162; Stop 186
gtaattgctacagaattcctagtca

SEQ ID NO: 386094 - DNA, 25 bp, Artificial
  probe
  misc_feature (1)..(25): SEQ ID NO: 4588; WAN024A5U; Start 164; Stop 188
aattgctacagaattcctagtcatt

SEQ ID NO: 386095 - DNA, 25 bp, Artificial
  probe
  misc_feature (1)..(25): SEQ ID NO: 4588; WAN024A5U; Start 220; Stop 244
gaactgcataattctcctattctag

SEQ ID NO: 386096 - DNA, 25 bp, Artificial
  probe
  misc_feature (1)..(25): SEQ ID NO: 4588; WAN024A5U; Start 165; Stop 189
attgctacagaattcctagtcatta

SEQ ID NO: 386097 - DNA, 25 bp, Artificial
  probe
  misc_feature (1)..(25): SEQ ID NO: 4588; WAN024A5U; Start 161; Stop 185
agtaattgctacagaattcctagtc

SEQ ID NO: 386098 - DNA, 25 bp, Artificial
  probe
  misc_feature (1)..(25): SEQ ID NO: 4588; WAN024A5U; Start 248; Stop 272
gggaggaccagtatttcttttatga

SEQ ID NO: 386099 - DNA, 25 bp, Artificial
  probe
  misc_feature (1)..(25): SEQ ID NO: 4589; WAN024APU; Start 22; Stop 46
tgagggacatatatactagatgaca

SEQ ID NO: 386100 - DNA, 25 bp, Artificial
  probe
  misc_feature (1)..(25): SEQ ID NO: 4589; WAN024APU; Start 23; Stop 47
gagggacatatatactagatgacaa

SEQ ID NO: 386101 - DNA, 25 bp, Artificial
  probe
  misc_feature (1)..(25): SEQ ID NO: 4589; WAN024APU; Start 21; Stop 45
ttgagggacatatatactagatgac

SEQ ID NO: 386102 - DNA, 25 bp, Artificial
  probe
  misc_feature (1)..(25): SEQ ID NO: 4589; WAN024APU; Start 8; Stop 32
ctccttttcctatttgagggacata

SEQ ID NO: 386103 - DNA, 25 bp, Artificial
  probe
  misc_feature (1)..(25): SEQ ID NO: 4589; WAN024APU; Start 5; Stop 29
tttctccttttcctatttgagggac

SEQ ID NO: 386104 - DNA, 25 bp, Artificial
  probe
  misc_feature (1)..(25): SEQ ID NO: 4589; WAN024APU; Start 4; Stop 28
atttctccttttcctatttgaggga

SEQ ID NO: 386105 - DNA, 25 bp, Artificial
  probe
  misc_feature (1)..(25): SEQ ID NO: 4589; WAN024APU; Start 24; Stop 48
agggacatatatactagatgacaaa

SEQ ID NO: 386106 - DNA, 25 bp, Artificial
  probe
  misc_feature (1)..(25): SEQ ID NO: 4589; WAN024APU; Start 3; Stop 27
aatttctccttttcctatttgaggg

SEQ ID NO: 386107 - DNA, 25 bp, Artificial
  probe
  misc_feature (1)..(25): SEQ ID NO: 4589; WAN024APU; Start 9; Stop 33
tccttttcctatttgagggacatat

SEQ ID NO: 386108 - DNA, 25 bp, Artificial
  probe
  misc_feature (1)..(25): SEQ ID NO: 4589; WAN024APU; Start 7; Stop 31
tctccttttcctatttgagggacat

SEQ ID NO: 386109 - DNA, 25 bp, Artificial
  probe
  misc_feature (1)..(25): SEQ ID NO: 4589; WAN024APU; Start 6; Stop 30
ttctccttttcctatttgagggaca

SEQ ID NO: 386110 - DNA, 25 bp, Artificial
  probe
  misc_feature (1)..(25): SEQ ID NO: 4589; WAN024APU; Start 20; Stop 44
tttgagggacatatatactagatga

SEQ ID NO: 386111 - DNA, 25 bp, Artificial
  probe
  misc_feature (1)..(25): SEQ ID NO: 4589; WAN024APU; Start 2; Stop 26
caatttctccttttcctatttgagg

SEQ ID NO: 386112 - DNA, 25 bp, Artificial
  probe
  misc_feature (1)..(25): SEQ ID NO: 4589; WAN024APU; Start 10; Stop 34
ccttttcctatttgagggacatata

SEQ ID NO: 386113 - DNA, 25 bp, Artificial
  probe
  misc_feature (1)..(25): SEQ ID NO: 4589; WAN024APU; Start 14; Stop 38
ttcctatttgagggacatatatact

SEQ ID NO: 386114 - DNA, 25 bp, Artificial
  probe
  misc_feature (1)..(25): SEQ ID NO: 4589; WAN024APU; Start 25; Stop 49
gggacatatatactagatgacaaat

SEQ ID NO: 386115 - DNA, 25 bp, Artificial
  probe
  misc_feature (1)..(25): SEQ ID NO: 4589; WAN024APU; Start 19; Stop 43
atttgagggacatatatactagatg

SEQ ID NO: 386116 - DNA, 25 bp, Artificial
  probe
  misc_feature (1)..(25): SEQ ID NO: 4589; WAN024APU; Start 13; Stop 37
tttcctatttgagggacatatatac

SEQ ID NO: 386117 - DNA, 25 bp, Artificial
  probe
  misc_feature (1)..(25): SEQ ID NO: 4589; WAN024APU; Start 15; Stop 39
tcctatttgagggacatatatacta

SEQ ID NO: 386118 - DNA, 25 bp, Artificial
  probe
  misc_feature (1)..(25): SEQ ID NO: 4589; WAN024APU; Start 16; Stop 40
cctatttgagggacatatatactag

SEQ ID NO: 386119 - DNA, 25 bp, Artificial
  probe
  misc_feature (1)..(25): SEQ ID NO: 4589; WAN024APU; Start 1; Stop 25
tcaatttctccttttcctatttgag

SEQ ID NO: 386120 - DNA, 25 bp, Artificial
  probe
  misc_feature (1)..(25): SEQ ID NO: 4589; WAN024APU; Start 11; Stop 35
cttttcctatttgagggacatatat

SEQ ID NO: 386121 - DNA, 25 bp, Artificial
  probe
  misc_feature (1)..(25): SEQ ID NO: 4590; WAN024A7E; Start 102; Stop 126
agcaagtaaatgaatagtaggtgga

SEQ ID NO: 386122 - DNA, 25 bp, Artificial
  probe
  misc_feature (1)..(25): SEQ ID NO: 4590; WAN024A7E; Start 103; Stop 127
gcaagtaaatgaatagtaggtggag

SEQ ID NO: 386123 - DNA, 25 bp, Artificial
  probe
  misc_feature (1)..(25): SEQ ID NO: 4590; WAN024A7E; Start 101; Stop 125
gagcaagtaaatgaatagtaggtgg

SEQ ID NO: 386124 - DNA, 25 bp, Artificial
  probe
  misc_feature (1)..(25): SEQ ID NO: 4590; WAN024A7E; Start 100; Stop 124
agagcaagtaaatgaatagtaggtg

SEQ ID NO: 386125 - DNA, 25 bp, Artificial
  probe
  misc_feature (1)..(25): SEQ ID NO: 4590; WAN024A7E; Start 92; Stop 116
cccatgaaagagcaagtaaatgaat

SEQ ID NO: 386126 - DNA, 25 bp, Artificial
  probe
  misc_feature (1)..(25): SEQ ID NO: 4590; WAN024A7E; Start 90; Stop 114
tacccatgaaagagcaagtaaatga

SEQ ID NO: 386127 - DNA, 25 bp, Artificial
  probe
  misc_feature (1)..(25): SEQ ID NO: 4590; WAN024A7E; Start 89; Stop 113
atacccatgaaagagcaagtaaatg

SEQ ID NO: 386128 - DNA, 25 bp, Artificial
  probe
  misc_feature (1)..(25): SEQ ID NO: 4590; WAN024A7E; Start 91; Stop 115
acccatgaaagagcaagtaaatgaa

SEQ ID NO: 386129 - DNA, 25 bp, Artificial
  probe
  misc_feature (1)..(25): SEQ ID NO: 4590; WAN024A7E; Start 88; Stop 112
aatacccatgaaagagcaagtaaat

SEQ ID NO: 386130 - DNA, 25 bp, Artificial
  probe
  misc_feature (1)..(25): SEQ ID NO: 4590; WAN024A7E; Start 99; Stop 123
aagagcaagtaaatgaatagtaggt

SEQ ID NO: 386131 - DNA, 25 bp, Artificial
  probe
  misc_feature (1)..(25): SEQ ID NO: 4590; WAN024A7E; Start 35; Stop 59
ttccctcataatggtacataaatgg

SEQ ID NO: 386132 - DNA, 25 bp, Artificial
  probe
  misc_feature (1)..(25): SEQ ID NO: 4590; WAN024A7E; Start 37; Stop 61
ccctcataatggtacataaatggag

SEQ ID NO: 386133 - DNA, 25 bp, Artificial
  probe
  misc_feature (1)..(25): SEQ ID NO: 4590; WAN024A7E; Start 87; Stop 111
taatacccatgaaagagcaagtaaa

SEQ ID NO: 386134 - DNA, 25 bp, Artificial
  probe
  misc_feature (1)..(25): SEQ ID NO: 4590; WAN024A7E; Start 84; Stop 108
taataatacccatgaaagagcaagt

SEQ ID NO: 386135 - DNA, 25 bp, Artificial
  probe
  misc_feature (1)..(25): SEQ ID NO: 4590; WAN024A7E; Start 86; Stop 110
ataatacccatgaaagagcaagtaa

SEQ ID NO: 386136 - DNA, 25 bp, Artificial
  probe
  misc_feature (1)..(25): SEQ ID NO: 4590; WAN024A7E; Start 85; Stop 109
aataatacccatgaaagagcaagta

SEQ ID NO: 386137 - DNA, 25 bp, Artificial
  probe
  misc_feature (1)..(25): SEQ ID NO: 4590; WAN024A7E; Start 36; Stop 60
tccctcataatggtacataaatgga

SEQ ID NO: 386138 - DNA, 25 bp, Artificial
  probe
  misc_feature (1)..(25): SEQ ID NO: 4590; WAN024A7E; Start 38; Stop 62
cctcataatggtacataaatggaga

SEQ ID NO: 386139 - DNA, 25 bp, Artificial
  probe
  misc_feature (1)..(25): SEQ ID NO: 4590; WAN024A7E; Start 98; Stop 122
aaagagcaagtaaatgaatagtagg

SEQ ID NO: 386140 - DNA, 25 bp, Artificial
  probe
  misc_feature (1)..(25): SEQ ID NO: 4590; WAN024A7E; Start 93; Stop 117
ccatgaaagagcaagtaaatgaata

SEQ ID NO: 386141 - DNA, 25 bp, Artificial
  probe
  misc_feature (1)..(25): SEQ ID NO: 4590; WAN024A7E; Start 95; Stop 119
atgaaagagcaagtaaatgaatagt

SEQ ID NO: 386142 - DNA, 25 bp, Artificial
  probe
  misc_feature (1)..(25): SEQ ID NO: 4590; WAN024A7E; Start 34; Stop 58
tttccctcataatggtacataaatg

SEQ ID NO: 386143 - DNA, 25 bp, Artificial
  probe
  misc_feature (1)..(25): SEQ ID NO: 4590; WAN024A7E; Start 83; Stop 107
ataataatacccatgaaagagcaag

SEQ ID NO: 386144 - DNA, 25 bp, Artificial
  probe
  misc_feature (1)..(25): SEQ ID NO: 4590; WAN024A7E; Start 96; Stop 120
tgaaagagcaagtaaatgaatagta

SEQ ID NO: 386145 - DNA, 25 bp, Artificial
  probe
  misc_feature (1)..(25): SEQ ID NO: 4590; WAN024A7E; Start 94; Stop 118
catgaaagagcaagtaaatgaatag

SEQ ID NO: 386146 - DNA, 25 bp, Artificial
  probe
  misc_feature (1)..(25): SEQ ID NO: 4590; WAN024A7E; Start 97; Stop 121
gaaagagcaagtaaatgaatagtag

SEQ ID NO: 386147 - DNA, 25 bp, Artificial
  probe
  misc_feature (1)..(25): SEQ ID NO: 4590; WAN024A7E; Start 39; Stop 63
ctcataatggtacataaatggagat

SEQ ID NO: 386148 - DNA, 25 bp, Artificial
  probe
  misc_feature (1)..(25): SEQ ID NO: 4590; WAN024A7E; Start 81; Stop 105
gtataataatacccatgaaagagca

SEQ ID NO: 386149 - DNA, 25 bp, Artificial
  probe
  misc_feature (1)..(25): SEQ ID NO: 4590; WAN024A7E; Start 40; Stop 64
tcataatggtacataaatggagatt

SEQ ID NO: 386150 - DNA, 25 bp, Artificial
  probe
  misc_feature (1)..(25): SEQ ID NO: 4590; WAN024A7E; Start 82; Stop 106
tataataatacccatgaaagagcaa

SEQ ID NO: 386151 - DNA, 25 bp, Artificial
  probe
  misc_feature (1)..(25): SEQ ID NO: 4590; WAN024A7E; Start 41; Stop 65
cataatggtacataaatggagattt

SEQ ID NO: 386152 - DNA, 25 bp, Artificial
  probe
  misc_feature (1)..(25): SEQ ID NO: 4590; WAN024A7E; Start 33; Stop 57
ttttccctcataatggtacataaat

SEQ ID NO: 386153 - DNA, 25 bp, Artificial
  probe
  misc_feature (1)..(25): SEQ ID NO: 4590; WAN024A7E; Start 80; Stop 104
ggtataataatacccatgaaagagc

SEQ ID NO: 386154 - DNA, 25 bp, Artificial
  probe
  misc_feature (1)..(25): SEQ ID NO: 4591; WAN024ARK; Start 75; Stop 99
tctgcctgctttctgttataataga

SEQ ID NO: 386155 - DNA, 25 bp, Artificial
  probe
  misc_feature (1)..(25): SEQ ID NO: 4591; WAN024ARK; Start 74; Stop 98
ttctgcctgctttctgttataatag

SEQ ID NO: 386156 - DNA, 25 bp, Artificial
  probe
  misc_feature (1)..(25): SEQ ID NO: 4591; WAN024ARK; Start 73; Stop 97
tttctgcctgctttctgttataata

SEQ ID NO: 386157 - DNA, 25 bp, Artificial
  probe
  misc_feature (1)..(25): SEQ ID NO: 4591; WAN024ARK; Start 77; Stop 101
tgcctgctttctgttataatagaag

SEQ ID NO: 386158 - DNA, 25 bp, Artificial
  probe
  misc_feature (1)..(25): SEQ ID NO: 4591; WAN024ARK; Start 76; Stop 100
ctgcctgctttctgttataatagaa

SEQ ID NO: 386159 - DNA, 25 bp, Artificial
  probe
  misc_feature (1)..(25): SEQ ID NO: 4591; WAN024ARK; Start 111; Stop 135
ctgaaaacacactagaaaggtccat

SEQ ID NO: 386160 - DNA, 25 bp, Artificial
  probe
  misc_feature (1)..(25): SEQ ID NO: 4591; WAN024ARK; Start 78; Stop 102
gcctgctttctgttataatagaaga

SEQ ID NO: 386161 - DNA, 25 bp, Artificial
  probe
  misc_feature (1)..(25): SEQ ID NO: 4591; WAN024ARK; Start 55; Stop 79
ttttgtttggaatctgcttttctgc

SEQ ID NO: 386162 - DNA, 25 bp, Artificial
  probe
  misc_feature (1)..(25): SEQ ID NO: 4591; WAN024ARK; Start 109; Stop 133
atctgaaaacacactagaaaggtcc

SEQ ID NO: 386163 - DNA, 25 bp, Artificial
  probe
  misc_feature (1)..(25): SEQ ID NO: 4591; WAN024ARK; Start 70; Stop 94
gcttttctgcctgctttctgttata

SEQ ID NO: 386164 - DNA, 25 bp, Artificial
  probe
  misc_feature (1)..(25): SEQ ID NO: 4591; WAN024ARK; Start 71; Stop 95
cttttctgcctgctttctgttataa

SEQ ID NO: 386165 - DNA, 25 bp, Artificial
  probe
  misc_feature (1)..(25): SEQ ID NO: 4591; WAN024ARK; Start 72; Stop 96
ttttctgcctgctttctgttataat

SEQ ID NO: 386166 - DNA, 25 bp, Artificial
  probe
  misc_feature (1)..(25): SEQ ID NO: 4591; WAN024ARK; Start 108; Stop 132
tatctgaaaacacactagaaaggtc

SEQ ID NO: 386167 - DNA, 25 bp, Artificial
  probe
  misc_feature (1)..(25): SEQ ID NO: 4591; WAN024ARK; Start 110; Stop 134
tctgaaaacacactagaaaggtcca

SEQ ID NO: 386168 - DNA, 25 bp, Artificial
  probe
  misc_feature (1)..(25): SEQ ID NO: 4591; WAN024ARK; Start 99; Stop 123
aagacatcttatctgaaaacacact

SEQ ID NO: 386169 - DNA, 25 bp, Artificial
  probe
  misc_feature (1)..(25): SEQ ID NO: 4591; WAN024ARK; Start 107; Stop 131
ttatctgaaaacacactagaaaggt

SEQ ID NO: 386170 - DNA, 25 bp, Artificial
  probe
  misc_feature (1)..(25): SEQ ID NO: 4591; WAN024ARK; Start 98; Stop 122
gaagacatcttatctgaaaacacac

SEQ ID NO: 386171 - DNA, 25 bp, Artificial
  probe
  misc_feature (1)..(25): SEQ ID NO: 4591; WAN024ARK; Start 97; Stop 121
agaagacatcttatctgaaaacaca

SEQ ID NO: 386172 - DNA, 25 bp, Artificial
  probe
  misc_feature (1)..(25): SEQ ID NO: 4591; WAN024ARK; Start 100; Stop 124
agacatcttatctgaaaacacacta

SEQ ID NO: 386173 - DNA, 25 bp, Artificial
  probe
  misc_feature (1)..(25): SEQ ID NO: 4591; WAN024ARK; Start 101; Stop 125
gacatcttatctgaaaacacactag

SEQ ID NO: 386174 - DNA, 25 bp, Artificial
  probe
  misc_feature (1)..(25): SEQ ID NO: 4591; WAN024ARK; Start 106; Stop 130
cttatctgaaaacacactagaaagg

SEQ ID NO: 386175 - DNA, 25 bp, Artificial
  probe
  misc_feature (1)..(25): SEQ ID NO: 4591; WAN024ARK; Start 102; Stop 126
acatcttatctgaaaacacactaga

SEQ ID NO: 386176 - DNA, 25 bp, Artificial
  probe
  misc_feature (1)..(25): SEQ ID NO: 4591; WAN024ARK; Start 79; Stop 103
cctgctttctgttataatagaagac

SEQ ID NO: 386177 - DNA, 25 bp, Artificial
  probe
  misc_feature (1)..(25): SEQ ID NO: 4591; WAN024ARK; Start 10; Stop 34
caatgtctttgtttgatttgtttaa

SEQ ID NO: 386178 - DNA, 25 bp, Artificial
  probe
  misc_feature (1)..(25): SEQ ID NO: 4591; WAN024ARK; Start 56; Stop 80
tttgtttggaatctgcttttctgcc

SEQ ID NO: 386179 - DNA, 25 bp, Artificial
  probe
  misc_feature (1)..(25): SEQ ID NO: 4591; WAN024ARK; Start 8; Stop 32
ttcaatgtctttgtttgatttgttt

SEQ ID NO: 386180 - DNA, 25 bp, Artificial
  probe
  misc_feature (1)..(25): SEQ ID NO: 4591; WAN024ARK; Start 7; Stop 31
tttcaatgtctttgtttgatttgtt

SEQ ID NO: 386181 - DNA, 25 bp, Artificial
  probe
  misc_feature (1)..(25): SEQ ID NO: 4591; WAN024ARK; Start 11; Stop 35
aatgtctttgtttgatttgtttaag

SEQ ID NO: 386182 - DNA, 25 bp, Artificial
  probe
  misc_feature (1)..(25): SEQ ID NO: 4591; WAN024ARK; Start 69; Stop 93
tgcttttctgcctgctttctgttat

SEQ ID NO: 386183 - DNA, 25 bp, Artificial
  probe
  misc_feature (1)..(25): SEQ ID NO: 4591; WAN024ARK; Start 80; Stop 104
ctgctttctgttataatagaagaca

SEQ ID NO: 386184 - DNA, 25 bp, Artificial
  probe
  misc_feature (1)..(25): SEQ ID NO: 4591; WAN024ARK; Start 103; Stop 127
catcttatctgaaaacacactagaa

SEQ ID NO: 386185 - DNA, 25 bp, Artificial
  probe
  misc_feature (1)..(25): SEQ ID NO: 4591; WAN024ARK; Start 105; Stop 129
tcttatctgaaaacacactagaaag

SEQ ID NO: 386186 - DNA, 25 bp, Artificial
  probe
  misc_feature (1)..(25): SEQ ID NO: 4591; WAN024ARK; Start 13; Stop 37
tgtctttgtttgatttgtttaagaa

SEQ ID NO: 386187 - DNA, 25 bp, Artificial
  probe
  misc_feature (1)..(25): SEQ ID NO: 4592; WAN024A4E; Start 17; Stop 41
ttggtctaattcaacggagatcatt

SEQ ID NO: 386188 - DNA, 25 bp, Artificial
  probe
  misc_feature (1)..(25): SEQ ID NO: 4592; WAN024A4E; Start 16; Stop 40
attggtctaattcaacggagatcat

SEQ ID NO: 386189 - DNA, 25 bp, Artificial
  probe
  misc_feature (1)..(25): SEQ ID NO: 4592; WAN024A4E; Start 15; Stop 39
aattggtctaattcaacggagatca

SEQ ID NO: 386190 - DNA, 25 bp, Artificial
  probe
  misc_feature (1)..(25): SEQ ID NO: 4592; WAN024A4E; Start 2; Stop 26
cagagatgtagggaattggtctaat

SEQ ID NO: 386191 - DNA, 25 bp, Artificial
  probe
  misc_feature (1)..(25): SEQ ID NO: 4592; WAN024A4E; Start 1; Stop 25
tcagagatgtagggaattggtctaa

SEQ ID NO: 386192 - DNA, 25 bp, Artificial
  probe
  misc_feature (1)..(25): SEQ ID NO: 4592; WAN024A4E; Start 19; Stop 43
ggtctaattcaacggagatcatttc

SEQ ID NO: 386193 - DNA, 25 bp, Artificial
  probe
  misc_feature (1)..(25): SEQ ID NO: 4592; WAN024A4E; Start 18; Stop 42
tggtctaattcaacggagatcattt

SEQ ID NO: 386194 - DNA, 25 bp, Artificial
  probe
  misc_feature (1)..(25): SEQ ID NO: 4592; WAN024A4E; Start 3; Stop 27
agagatgtagggaattggtctaatt

SEQ ID NO: 386195 - DNA, 25 bp, Artificial
  probe
  misc_feature (1)..(25): SEQ ID NO: 4592; WAN024A4E; Start 23; Stop 47
taattcaacggagatcatttccagt

SEQ ID NO: 386196 - DNA, 25 bp, Artificial
  probe
  misc_feature (1)..(25): SEQ ID NO: 4592; WAN024A4E; Start 22; Stop 46
ctaattcaacggagatcatttccag

SEQ ID NO: 386197 - DNA, 25 bp, Artificial
  probe
  misc_feature (1)..(25): SEQ ID NO: 4592; WAN024A4E; Start 21; Stop 45
tctaattcaacggagatcatttcca

SEQ ID NO: 386198 - DNA, 25 bp, Artificial
  probe
  misc_feature (1)..(25): SEQ ID NO: 4592; WAN024A4E; Start 20; Stop 44
gtctaattcaacggagatcatttcc

SEQ ID NO: 386199 - DNA, 25 bp, Artificial
  probe
  misc_feature (1)..(25): SEQ ID NO: 4592; WAN024A4E; Start 24; Stop 48
aattcaacggagatcatttccagtt

SEQ ID NO: 386200 - DNA, 25 bp, Artificial
  probe
  misc_feature (1)..(25): SEQ ID NO: 4592; WAN024A4E; Start 14; Stop 38
gaattggtctaattcaacggagatc

SEQ ID NO: 386201 - DNA, 25 bp, Artificial
  probe
  misc_feature (1)..(25): SEQ ID NO: 4592; WAN024A4E; Start 13; Stop 37
ggaattggtctaattcaacggagat

SEQ ID NO: 386202 - DNA, 25 bp, Artificial
  probe
  misc_feature (1)..(25): SEQ ID NO: 4592; WAN024A4E; Start 25; Stop 49
attcaacggagatcatttccagttg

SEQ ID NO: 386203 - DNA, 25 bp, Artificial
  probe
  misc_feature (1)..(25): SEQ ID NO: 4592; WAN024A4E; Start 32; Stop 56
ggagatcatttccagttgacgcaag

SEQ ID NO: 386204 - DNA, 25 bp, Artificial
  probe
  misc_feature (1)..(25): SEQ ID NO: 4592; WAN024A4E; Start 8; Stop 32
tgtagggaattggtctaattcaacg

SEQ ID NO: 386205 - DNA, 25 bp, Artificial
  probe
  misc_feature (1)..(25): SEQ ID NO: 4592; WAN024A4E; Start 5; Stop 29
agatgtagggaattggtctaattca

SEQ ID NO: 386206 - DNA, 25 bp, Artificial
  probe
  misc_feature (1)..(25): SEQ ID NO: 4592; WAN024A4E; Start 7; Stop 31
atgtagggaattggtctaattcaac

SEQ ID NO: 386207 - DNA, 25 bp, Artificial
  probe
  misc_feature (1)..(25): SEQ ID NO: 4592; WAN024A4E; Start 4; Stop 28
gagatgtagggaattggtctaattc

SEQ ID NO: 386208 - DNA, 25 bp, Artificial
  probe
  misc_feature (1)..(25): SEQ ID NO: 4592; WAN024A4E; Start 33; Stop 57
gagatcatttccagttgacgcaagc

SEQ ID NO: 386209 - DNA, 25 bp, Artificial
  probe
  misc_feature (1)..(25): SEQ ID NO: 4592; WAN024A4E; Start 10; Stop 34
tagggaattggtctaattcaacgga

SEQ ID NO: 386210 - DNA, 25 bp, Artificial
  probe
  misc_feature (1)..(25): SEQ ID NO: 4592; WAN024A4E; Start 9; Stop 33
gtagggaattggtctaattcaacgg

SEQ ID NO: 386211 - DNA, 25 bp, Artificial
  probe
  misc_feature (1)..(25): SEQ ID NO: 4592; WAN024A4E; Start 6; Stop 30
gatgtagggaattggtctaattcaa

SEQ ID NO: 386212 - DNA, 25 bp, Artificial
  probe
  misc_feature (1)..(25): SEQ ID NO: 4592; WAN024A4E; Start 38; Stop 62
catttccagttgacgcaagcttaaa

SEQ ID NO: 386213 - DNA, 25 bp, Artificial
  probe
  misc_feature (1)..(25): SEQ ID NO: 4592; WAN024A4E; Start 12; Stop 36
gggaattggtctaattcaacggaga

SEQ ID NO: 386214 - DNA, 25 bp, Artificial
  probe
  misc_feature (1)..(25): SEQ ID NO: 4592; WAN024A4E; Start 11; Stop 35
agggaattggtctaattcaacggag

SEQ ID NO: 386215 - DNA, 25 bp, Artificial
  probe
  misc_feature (1)..(25): SEQ ID NO: 4592; WAN024A4E; Start 36; Stop 60
atcatttccagttgacgcaagctta

SEQ ID NO: 386216 - DNA, 25 bp, Artificial
  probe
  misc_feature (1)..(25): SEQ ID NO: 4592; WAN024A4E; Start 37; Stop 61
tcatttccagttgacgcaagcttaa

SEQ ID NO: 386217 - DNA, 25 bp, Artificial
  probe
  misc_feature (1)..(25): SEQ ID NO: 4592; WAN024A4E; Start 34; Stop 58
agatcatttccagttgacgcaagct

SEQ ID NO: 386218 - DNA, 25 bp, Artificial
  probe
  misc_feature (1)..(25): SEQ ID NO: 4592; WAN024A4E; Start 39; Stop 63
atttccagttgacgcaagcttaaaa

SEQ ID NO: 386219 - DNA, 25 bp, Artificial
  probe
  misc_feature (1)..(25): SEQ ID NO: 4592; WAN024A4E; Start 28; Stop 52
caacggagatcatttccagttgacg

SEQ ID NO: 386220 - DNA, 25 bp, Artificial
  probe
  misc_feature (1)..(25): SEQ ID NO: 4592; WAN024A4E; Start 35; Stop 59
gatcatttccagttgacgcaagctt

SEQ ID NO: 386221 - DNA, 25 bp, Artificial
  probe
  misc_feature (1)..(25): SEQ ID NO: 4593; WAN024AI8; Start 47; Stop 71
ttaacaactcaatcagcaatcagga

SEQ ID NO: 386222 - DNA, 25 bp, Artificial
  probe
  misc_feature (1)..(25): SEQ ID NO: 4593; WAN024AI8; Start 48; Stop 72
taacaactcaatcagcaatcaggac

SEQ ID NO: 386223 - DNA, 25 bp, Artificial
  probe
  misc_feature (1)..(25): SEQ ID NO: 4593; WAN024AI8; Start 50; Stop 74
acaactcaatcagcaatcaggactt

SEQ ID NO: 386224 - DNA, 25 bp, Artificial
  probe
  misc_feature (1)..(25): SEQ ID NO: 4593; WAN024AI8; Start 49; Stop 73
aacaactcaatcagcaatcaggact

SEQ ID NO: 386225 - DNA, 25 bp, Artificial
  probe
  misc_feature (1)..(25): SEQ ID NO: 4593; WAN024AI8; Start 11; Stop 35
aaataaatgatggatagtgggctga

SEQ ID NO: 386226 - DNA, 25 bp, Artificial
  probe
  misc_feature (1)..(25): SEQ ID NO: 4593; WAN024AI8; Start 10; Stop 34
gaaataaatgatggatagtgggctg

SEQ ID NO: 386227 - DNA, 25 bp, Artificial
  probe
  misc_feature (1)..(25): SEQ ID NO: 4593; WAN024AI8; Start 63; Stop 87
caatcaggactttctttcaatagca

SEQ ID NO: 386228 - DNA, 25 bp, Artificial
  probe
  misc_feature (1)..(25): SEQ ID NO: 4593; WAN024AI8; Start 60; Stop 84
cagcaatcaggactttctttcaata

SEQ ID NO: 386229 - DNA, 25 bp, Artificial
  probe
  misc_feature (1)..(25): SEQ ID NO: 4593; WAN024AI8; Start 56; Stop 80
caatcagcaatcaggactttctttc

SEQ ID NO: 386230 - DNA, 25 bp, Artificial
  probe
  misc_feature (1)..(25): SEQ ID NO: 4593; WAN024AI8; Start 46; Stop 70
tttaacaactcaatcagcaatcagg

SEQ ID NO: 386231 - DNA, 25 bp, Artificial
  probe
  misc_feature (1)..(25): SEQ ID NO: 4593; WAN024AI8; Start 12; Stop 36
aataaatgatggatagtgggctgac

SEQ ID NO: 386232 - DNA, 25 bp, Artificial
  probe
  misc_feature (1)..(25): SEQ ID NO: 4593; WAN024AI8; Start 9; Stop 33
ggaaataaatgatggatagtgggct

SEQ ID NO: 386233 - DNA, 25 bp, Artificial
  probe
  misc_feature (1)..(25): SEQ ID NO: 4593; WAN024AI8; Start 8; Stop 32
aggaaataaatgatggatagtgggc

SEQ ID NO: 386234 - DNA, 25 bp, Artificial
  probe
  misc_feature (1)..(25): SEQ ID NO: 4593; WAN024AI8; Start 64; Stop 88
aatcaggactttctttcaatagcag

SEQ ID NO: 386235 - DNA, 25 bp, Artificial
  probe
  misc_feature (1)..(25): SEQ ID NO: 4593; WAN024AI8; Start 62; Stop 86
gcaatcaggactttctttcaatagc

SEQ ID NO: 386236 - DNA, 25 bp, Artificial
  probe
  misc_feature (1)..(25): SEQ ID NO: 4593; WAN024AI8; Start 61; Stop 85
agcaatcaggactttctttcaatag

SEQ ID NO: 386237 - DNA, 25 bp, Artificial
  probe
  misc_feature (1)..(25): SEQ ID NO: 4593; WAN024AI8; Start 59; Stop 83
tcagcaatcaggactttctttcaat

SEQ ID NO: 386238 - DNA, 25 bp, Artificial
  probe
  misc_feature (1)..(25): SEQ ID NO: 4593; WAN024AI8; Start 58; Stop 82
atcagcaatcaggactttctttcaa

SEQ ID NO: 386239 - DNA, 25 bp, Artificial
  probe
  misc_feature (1)..(25): SEQ ID NO: 4593; WAN024AI8; Start 57; Stop 81
aatcagcaatcaggactttctttca

SEQ ID NO: 386240 - DNA, 25 bp, Artificial
  probe
  misc_feature (1)..(25): SEQ ID NO: 4593; WAN024AI8; Start 55; Stop 79
tcaatcagcaatcaggactttcttt

SEQ ID NO: 386241 - DNA, 25 bp, Artificial
  probe
  misc_feature (1)..(25): SEQ ID NO: 4593; WAN024AI8; Start 66; Stop 90
tcaggactttctttcaatagcagat

SEQ ID NO: 386242 - DNA, 25 bp, Artificial
  probe
  misc_feature (1)..(25): SEQ ID NO: 4593; WAN024AI8; Start 65; Stop 89
atcaggactttctttcaatagcaga

SEQ ID NO: 386243 - DNA, 25 bp, Artificial
  probe
  misc_feature (1)..(25): SEQ ID NO: 4593; WAN024AI8; Start 54; Stop 78
ctcaatcagcaatcaggactttctt

SEQ ID NO: 386244 - DNA, 25 bp, Artificial
  probe
  misc_feature (1)..(25): SEQ ID NO: 4593; WAN024AI8; Start 67; Stop 91
caggactttctttcaatagcagatt

SEQ ID NO: 386245 - DNA, 25 bp, Artificial
  probe
  misc_feature (1)..(25): SEQ ID NO: 4593; WAN024AI8; Start 45; Stop 69
gtttaacaactcaatcagcaatcag

SEQ ID NO: 386246 - DNA, 25 bp, Artificial
  probe
  misc_feature (1)..(25): SEQ ID NO: 4593; WAN024AI8; Start 7; Stop 31
aaggaaataaatgatggatagtggg

SEQ ID NO: 386247 - DNA, 25 bp, Artificial
  probe
  misc_feature (1)..(25): SEQ ID NO: 4593; WAN024AI8; Start 52; Stop 76
aactcaatcagcaatcaggactttc

SEQ ID NO: 386248 - DNA, 25 bp, Artificial
  probe
  misc_feature (1)..(25): SEQ ID NO: 4593; WAN024AI8; Start 51; Stop 75
caactcaatcagcaatcaggacttt

SEQ ID NO: 386249 - DNA, 25 bp, Artificial
  probe
  misc_feature (1)..(25): SEQ ID NO: 4593; WAN024AI8; Start 13; Stop 37
ataaatgatggatagtgggctgact

SEQ ID NO: 386250 - DNA, 25 bp, Artificial
  probe
  misc_feature (1)..(25): SEQ ID NO: 4593; WAN024AI8; Start 53; Stop 77
actcaatcagcaatcaggactttct

SEQ ID NO: 386251 - DNA, 25 bp, Artificial
  probe
  misc_feature (1)..(25): SEQ ID NO: 4593; WAN024AI8; Start 68; Stop 92
aggactttctttcaatagcagatta

SEQ ID NO: 386252 - DNA, 25 bp, Artificial
  probe
  misc_feature (1)..(25): SEQ ID NO: 4593; WAN024AI8; Start 20; Stop 44
atggatagtgggctgactaagatta

SEQ ID NO: 386253 - DNA, 25 bp, Artificial
  probe
  misc_feature (1)..(25): SEQ ID NO: 4593; WAN024AI8; Start 14; Stop 38
taaatgatggatagtgggctgacta

SEQ ID NO: 386254 - DNA, 25 bp, Artificial
  probe
  misc_feature (1)..(25): SEQ ID NO: 4594; WAN0249K9; Start 69; Stop 93
atctttaagcctctgttacaaatgc

SEQ ID NO: 386255 - DNA, 25 bp, Artificial
  probe
  misc_feature (1)..(25): SEQ ID NO: 4594; WAN0249K9; Start 191; Stop 215
aacctacgacaaatgattacccata

SEQ ID NO: 386256 - DNA, 25 bp, Artificial
  probe
  misc_feature (1)..(25): SEQ ID NO: 4594; WAN0249K9; Start 192; Stop 216
acctacgacaaatgattacccatat

SEQ ID NO: 386257 - DNA, 25 bp, Artificial
  probe
  misc_feature (1)..(25): SEQ ID NO: 4594; WAN0249K9; Start 190; Stop 214
aaacctacgacaaatgattacccat

SEQ ID NO: 386258 - DNA, 25 bp, Artificial
  probe
  misc_feature (1)..(25): SEQ ID NO: 4594; WAN0249K9; Start 193; Stop 217
cctacgacaaatgattacccatatt

SEQ ID NO: 386259 - DNA, 25 bp, Artificial
  probe
  misc_feature (1)..(25): SEQ ID NO: 4594; WAN0249K9; Start 66; Stop 90
agaatctttaagcctctgttacaaa

SEQ ID NO: 386260 - DNA, 25 bp, Artificial
  probe
  misc_feature (1)..(25): SEQ ID NO: 4594; WAN0249K9; Start 140; Stop 164
tttcagaagatttaactgctgtgag

SEQ ID NO: 386261 - DNA, 25 bp, Artificial
  probe
  misc_feature (1)..(25): SEQ ID NO: 4594; WAN0249K9; Start 68; Stop 92
aatctttaagcctctgttacaaatg

SEQ ID NO: 386262 - DNA, 25 bp, Artificial
  probe
  misc_feature (1)..(25): SEQ ID NO: 4594; WAN0249K9; Start 67; Stop 91
gaatctttaagcctctgttacaaat

SEQ ID NO: 386263 - DNA, 25 bp, Artificial
  probe
  misc_feature (1)..(25): SEQ ID NO: 4594; WAN0249K9; Start 71; Stop 95
ctttaagcctctgttacaaatgctc

SEQ ID NO: 386264 - DNA, 25 bp, Artificial
  probe
  misc_feature (1)..(25): SEQ ID NO: 4594; WAN0249K9; Start 70; Stop 94
tctttaagcctctgttacaaatgct

SEQ ID NO: 386265 - DNA, 25 bp, Artificial
  probe
  misc_feature (1)..(25): SEQ ID NO: 4594; WAN0249K9; Start 72; Stop 96
tttaagcctctgttacaaatgctca

SEQ ID NO: 386266 - DNA, 25 bp, Artificial
  probe
  misc_feature (1)..(25): SEQ ID NO: 4594; WAN0249K9; Start 187; Stop 211
acaaaacctacgacaaatgattacc

SEQ ID NO: 386267 - DNA, 25 bp, Artificial
  probe
  misc_feature (1)..(25): SEQ ID NO: 4594; WAN0249K9; Start 184; Stop 208
cagacaaaacctacgacaaatgatt

SEQ ID NO: 386268 - DNA, 25 bp, Artificial
  probe
  misc_feature (1)..(25): SEQ ID NO: 4594; WAN0249K9; Start 181; Stop 205
tttcagacaaaacctacgacaaatg

SEQ ID NO: 386269 - DNA, 25 bp, Artificial
  probe
  misc_feature (1)..(25): SEQ ID NO: 4594; WAN0249K9; Start 188; Stop 212
caaaacctacgacaaatgattaccc

SEQ ID NO: 386270 - DNA, 25 bp, Artificial
  probe
  misc_feature (1)..(25): SEQ ID NO: 4594; WAN0249K9; Start 189; Stop 213
aaaacctacgacaaatgattaccca

SEQ ID NO: 386271 - DNA, 25 bp, Artificial
  probe
  misc_feature (1)..(25): SEQ ID NO: 4594; WAN0249K9; Start 237; Stop 261
ttttcaaggggtttcagtaggtttt

SEQ ID NO: 386272 - DNA, 25 bp, Artificial
  probe
  misc_feature (1)..(25): SEQ ID NO: 4594; WAN0249K9; Start 179; Stop 203
tatttcagacaaaacctacgacaaa

SEQ ID NO: 386273 - DNA, 25 bp, Artificial
  probe
  misc_feature (1)..(25): SEQ ID NO: 4594; WAN0249K9; Start 141; Stop 165
ttcagaagatttaactgctgtgagc

SEQ ID NO: 386274 - DNA, 25 bp, Artificial
  probe
  misc_feature (1)..(25): SEQ ID NO: 4594; WAN0249K9; Start 56; Stop 80
acgaattttcagaatctttaagcct

SEQ ID NO: 386275 - DNA, 25 bp, Artificial
  probe
  misc_feature (1)..(25): SEQ ID NO: 4594; WAN0249K9; Start 186; Stop 210
gacaaaacctacgacaaatgattac

SEQ ID NO: 386276 - DNA, 25 bp, Artificial
  probe
  misc_feature (1)..(25): SEQ ID NO: 4594; WAN0249K9; Start 185; Stop 209
agacaaaacctacgacaaatgatta

SEQ ID NO: 386277 - DNA, 25 bp, Artificial
  probe
  misc_feature (1)..(25): SEQ ID NO: 4594; WAN0249K9; Start 55; Stop 79
gacgaattttcagaatctttaagcc

SEQ ID NO: 386278 - DNA, 25 bp, Artificial
  probe
  misc_feature (1)..(25): SEQ ID NO: 4594; WAN0249K9; Start 178; Stop 202
atatttcagacaaaacctacgacaa

SEQ ID NO: 386279 - DNA, 25 bp, Artificial
  probe
  misc_feature (1)..(25): SEQ ID NO: 4594; WAN0249K9; Start 277; Stop 301
catagaaaacttggcatcacattcg

SEQ ID NO: 386280 - DNA, 25 bp, Artificial
  probe
  misc_feature (1)..(25): SEQ ID NO: 4594; WAN0249K9; Start 57; Stop 81
cgaattttcagaatctttaagcctc

SEQ ID NO: 386281 - DNA, 25 bp, Artificial
  probe
  misc_feature (1)..(25): SEQ ID NO: 4594; WAN0249K9; Start 194; Stop 218
ctacgacaaatgattacccatatta

SEQ ID NO: 386282 - DNA, 25 bp, Artificial
  probe
  misc_feature (1)..(25): SEQ ID NO: 4594; WAN0249K9; Start 48; Stop 72
tcctcttgacgaattttcagaatct

SEQ ID NO: 386283 - DNA, 25 bp, Artificial
  probe
  misc_feature (1)..(25): SEQ ID NO: 4594; WAN0249K9; Start 49; Stop 73
cctcttgacgaattttcagaatctt

SEQ ID NO: 386284 - DNA, 25 bp, Artificial
  probe
  misc_feature (1)..(25): SEQ ID NO: 4594; WAN0249K9; Start 183; Stop 207
tcagacaaaacctacgacaaatgat

SEQ ID NO: 386285 - DNA, 25 bp, Artificial
  probe
  misc_feature (1)..(25): SEQ ID NO: 4594; WAN0249K9; Start 199; Stop 223
acaaatgattacccatattataccc

SEQ ID NO: 386286 - DNA, 25 bp, Artificial
  probe
  misc_feature (1)..(25): SEQ ID NO: 4594; WAN0249K9; Start 182; Stop 206
ttcagacaaaacctacgacaaatga

SEQ ID NO: 386287 - DNA, 25 bp, Artificial
  probe
  misc_feature (1)..(25): SEQ ID NO: 4595; WAN024ASC; Start 327; Stop 351
tcttaatcttaaccgtcttgtcgta

SEQ ID NO: 386288 - DNA, 25 bp, Artificial
  probe
  misc_feature (1)..(25): SEQ ID NO: 4595; WAN024ASC; Start 325; Stop 349
tctcttaatcttaaccgtcttgtcg

SEQ ID NO: 386289 - DNA, 25 bp, Artificial
  probe
  misc_feature (1)..(25): SEQ ID NO: 4595; WAN024ASC; Start 326; Stop 350
ctcttaatcttaaccgtcttgtcgt

SEQ ID NO: 386290 - DNA, 25 bp, Artificial
  probe
  misc_feature (1)..(25): SEQ ID NO: 4595; WAN024ASC; Start 322; Stop 346
cgttctcttaatcttaaccgtcttg

SEQ ID NO: 386291 - DNA, 25 bp, Artificial
  probe
  misc_feature (1)..(25): SEQ ID NO: 4595; WAN024ASC; Start 324; Stop 348
ttctcttaatcttaaccgtcttgtc

SEQ ID NO: 386292 - DNA, 25 bp, Artificial
  probe
  misc_feature (1)..(25): SEQ ID NO: 4595; WAN024ASC; Start 328; Stop 352
cttaatcttaaccgtcttgtcgtac

SEQ ID NO: 386293 - DNA, 25 bp, Artificial
  probe
  misc_feature (1)..(25): SEQ ID NO: 4595; WAN024ASC; Start 323; Stop 347
gttctcttaatcttaaccgtcttgt

SEQ ID NO: 386294 - DNA, 25 bp, Artificial
  probe
  misc_feature (1)..(25): SEQ ID NO: 4595; WAN024ASC; Start 224; Stop 248
tgcttgtctagtagtggcgtattaa

SEQ ID NO: 386295 - DNA, 25 bp, Artificial
  probe
  misc_feature (1)..(25): SEQ ID NO: 4595; WAN024ASC; Start 223; Stop 247
ttgcttgtctagtagtggcgtatta

SEQ ID NO: 386296 - DNA, 25 bp, Artificial
  probe
  misc_feature (1)..(25): SEQ ID NO: 4595; WAN024ASC; Start 329; Stop 353
ttaatcttaaccgtcttgtcgtaca

SEQ ID NO: 386297 - DNA, 25 bp, Artificial
  probe
  misc_feature (1)..(25): SEQ ID NO: 4595; WAN024ASC; Start 330; Stop 354
taatcttaaccgtcttgtcgtacag

SEQ ID NO: 386298 - DNA, 25 bp, Artificial
  probe
  misc_feature (1)..(25): SEQ ID NO: 4595; WAN024ASC; Start 235; Stop 259
tagtggcgtattaaatgagaagtga

SEQ ID NO: 386299 - DNA, 25 bp, Artificial
  probe
  misc_feature (1)..(25): SEQ ID NO: 4595; WAN024ASC; Start 234; Stop 258
gtagtggcgtattaaatgagaagtg

SEQ ID NO: 386300 - DNA, 25 bp, Artificial
  probe
  misc_feature (1)..(25): SEQ ID NO: 4595; WAN024ASC; Start 233; Stop 257
agtagtggcgtattaaatgagaagt

SEQ ID NO: 386301 - DNA, 25 bp, Artificial
  probe
  misc_feature (1)..(25): SEQ ID NO: 4595; WAN024ASC; Start 124; Stop 148
taactaagaaataggtctgtggtcg

SEQ ID NO: 386302 - DNA, 25 bp, Artificial
  probe
  misc_feature (1)..(25): SEQ ID NO: 4595; WAN024ASC; Start 238; Stop 262
tggcgtattaaatgagaagtgacat

SEQ ID NO: 386303 - DNA, 25 bp, Artificial
  probe
  misc_feature (1)..(25): SEQ ID NO: 4595; WAN024ASC; Start 236; Stop 260
agtggcgtattaaatgagaagtgac

SEQ ID NO: 386304 - DNA, 25 bp, Artificial
  probe
  misc_feature (1)..(25): SEQ ID NO: 4595; WAN024ASC; Start 228; Stop 252
tgtctagtagtggcgtattaaatga

SEQ ID NO: 386305 - DNA, 25 bp, Artificial
  probe
  misc_feature (1)..(25): SEQ ID NO: 4595; WAN024ASC; Start 225; Stop 249
gcttgtctagtagtggcgtattaaa

SEQ ID NO: 386306 - DNA, 25 bp, Artificial
  probe
  misc_feature (1)..(25): SEQ ID NO: 4595; WAN024ASC; Start 237; Stop 261
gtggcgtattaaatgagaagtgaca

SEQ ID NO: 386307 - DNA, 25 bp, Artificial
  probe
  misc_feature (1)..(25): SEQ ID NO: 4595; WAN024ASC; Start 172; Stop 196
tgattgtaagtgactgttaattgaa

SEQ ID NO: 386308 - DNA, 25 bp, Artificial
  probe
  misc_feature (1)..(25): SEQ ID NO: 4595; WAN024ASC; Start 171; Stop 195
ttgattgtaagtgactgttaattga

SEQ ID NO: 386309 - DNA, 25 bp, Artificial
  probe
  misc_feature (1)..(25): SEQ ID NO: 4595; WAN024ASC; Start 229; Stop 253
gtctagtagtggcgtattaaatgag

SEQ ID NO: 386310 - DNA, 25 bp, Artificial
  probe
  misc_feature (1)..(25): SEQ ID NO: 4595; WAN024ASC; Start 232; Stop 256
tagtagtggcgtattaaatgagaag

SEQ ID NO: 386311 - DNA, 25 bp, Artificial
  probe
  misc_feature (1)..(25): SEQ ID NO: 4595; WAN024ASC; Start 227; Stop 251
ttgtctagtagtggcgtattaaatg

SEQ ID NO: 386312 - DNA, 25 bp, Artificial
  probe
  misc_feature (1)..(25): SEQ ID NO: 4595; WAN024ASC; Start 230; Stop 254
tctagtagtggcgtattaaatgaga

SEQ ID NO: 386313 - DNA, 25 bp, Artificial
  probe
  misc_feature (1)..(25): SEQ ID NO: 4595; WAN024ASC; Start 226; Stop 250
cttgtctagtagtggcgtattaaat

SEQ ID NO: 386314 - DNA, 25 bp, Artificial
  probe
  misc_feature (1)..(25): SEQ ID NO: 4595; WAN024ASC; Start 239; Stop 263
ggcgtattaaatgagaagtgacatg

SEQ ID NO: 386315 - DNA, 25 bp, Artificial
  probe
  misc_feature (1)..(25): SEQ ID NO: 4595; WAN024ASC; Start 231; Stop 255
ctagtagtggcgtattaaatgagaa

SEQ ID NO: 386316 - DNA, 25 bp, Artificial
  probe
  misc_feature (1)..(25): SEQ ID NO: 4595; WAN024ASC; Start 173; Stop 197
gattgtaagtgactgttaattgaag

SEQ ID NO: 386317 - DNA, 25 bp, Artificial
  probe
  misc_feature (1)..(25): SEQ ID NO: 4595; WAN024ASC; Start 123; Stop 147
ataactaagaaataggtctgtggtc

SEQ ID NO: 386318 - DNA, 25 bp, Artificial
  probe
  misc_feature (1)..(25): SEQ ID NO: 4595; WAN024ASC; Start 222; Stop 246
tttgcttgtctagtagtggcgtatt

SEQ ID NO: 386319 - DNA, 25 bp, Artificial
  probe
  misc_feature (1)..(25): SEQ ID NO: 4595; WAN024ASC; Start 128; Stop 152
taagaaataggtctgtggtcgcttc

SEQ ID NO: 386320 - DNA, 25 bp, Artificial
  probe
  misc_feature (1)..(25): SEQ ID NO: 4596; WAN0249QW; Start 135; Stop 159
caagtctgacgctggaaataagaat

SEQ ID NO: 386321 - DNA, 25 bp, Artificial
  probe
  misc_feature (1)..(25): SEQ ID NO: 4596; WAN0249QW; Start 134; Stop 158
ccaagtctgacgctggaaataagaa

SEQ ID NO: 386322 - DNA, 25 bp, Artificial
  probe
  misc_feature (1)..(25): SEQ ID NO: 4596; WAN0249QW; Start 117; Stop 141
gaacccaatagcgattcccaagtct

SEQ ID NO: 386323 - DNA, 25 bp, Artificial
  probe
  misc_feature (1)..(25): SEQ ID NO: 4596; WAN0249QW; Start 74; Stop 98
gtatatctgaggtgtaagtcctcgg

SEQ ID NO: 386324 - DNA, 25 bp, Artificial
  probe
  misc_feature (1)..(25): SEQ ID NO: 4596; WAN0249QW; Start 75; Stop 99
tatatctgaggtgtaagtcctcggt

SEQ ID NO: 386325 - DNA, 25 bp, Artificial
  probe
  misc_feature (1)..(25): SEQ ID NO: 4596; WAN0249QW; Start 118; Stop 142
aacccaatagcgattcccaagtctg

SEQ ID NO: 386326 - DNA, 25 bp, Artificial
  probe
  misc_feature (1)..(25): SEQ ID NO: 4596; WAN0249QW; Start 116; Stop 140
tgaacccaatagcgattcccaagtc

SEQ ID NO: 386327 - DNA, 25 bp, Artificial
  probe
  misc_feature (1)..(25): SEQ ID NO: 4596; WAN0249QW; Start 115; Stop 139
gtgaacccaatagcgattcccaagt

SEQ ID NO: 386328 - DNA, 25 bp, Artificial
  probe
  misc_feature (1)..(25): SEQ ID NO: 4596; WAN0249QW; Start 133; Stop 157
cccaagtctgacgctggaaataaga

SEQ ID NO: 386329 - DNA, 25 bp, Artificial
  probe
  misc_feature (1)..(25): SEQ ID NO: 4596; WAN0249QW; Start 132; Stop 156
tcccaagtctgacgctggaaataag

SEQ ID NO: 386330 - DNA, 25 bp, Artificial
  probe
  misc_feature (1)..(25): SEQ ID NO: 4596; WAN0249QW; Start 76; Stop 100
atatctgaggtgtaagtcctcggtg

SEQ ID NO: 386331 - DNA, 25 bp, Artificial
  probe
  misc_feature (1)..(25): SEQ ID NO: 4596; WAN0249QW; Start 130; Stop 154
attcccaagtctgacgctggaaata

SEQ ID NO: 386332 - DNA, 25 bp, Artificial
  probe
  misc_feature (1)..(25): SEQ ID NO: 4596; WAN0249QW; Start 131; Stop 155
ttcccaagtctgacgctggaaataa

SEQ ID NO: 386333 - DNA, 25 bp, Artificial
  probe
  misc_feature (1)..(25): SEQ ID NO: 4596; WAN0249QW; Start 77; Stop 101
tatctgaggtgtaagtcctcggtgg

SEQ ID NO: 386334 - DNA, 25 bp, Artificial
  probe
  misc_feature (1)..(25): SEQ ID NO: 4596; WAN0249QW; Start 129; Stop 153
gattcccaagtctgacgctggaaat

SEQ ID NO: 386335 - DNA, 25 bp, Artificial
  probe
  misc_feature (1)..(25): SEQ ID NO: 4597; WAN0249DB; Start 19; Stop 43
ccatgagctagggatttgataagaa

SEQ ID NO: 386336 - DNA, 25 bp, Artificial
  probe
  misc_feature (1)..(25): SEQ ID NO: 4597; WAN0249DB; Start 20; Stop 44
catgagctagggatttgataagaat

SEQ ID NO: 386337 - DNA, 25 bp, Artificial
  probe
  misc_feature (1)..(25): SEQ ID NO: 4597; WAN0249DB; Start 16; Stop 40
ttgccatgagctagggatttgataa

SEQ ID NO: 386338 - DNA, 25 bp, Artificial
  probe
  misc_feature (1)..(25): SEQ ID NO: 4597; WAN0249DB; Start 18; Stop 42
gccatgagctagggatttgataaga

SEQ ID NO: 386339 - DNA, 25 bp, Artificial
  probe
  misc_feature (1)..(25): SEQ ID NO: 4597; WAN0249DB; Start 17; Stop 41
tgccatgagctagggatttgataag

SEQ ID NO: 386340 - DNA, 25 bp, Artificial
  probe
  misc_feature (1)..(25): SEQ ID NO: 4597; WAN0249DB; Start 15; Stop 39
cttgccatgagctagggatttgata

SEQ ID NO: 386341 - DNA, 25 bp, Artificial
  probe
  misc_feature (1)..(25): SEQ ID NO: 4597; WAN0249DB; Start 22; Stop 46
tgagctagggatttgataagaatat

SEQ ID NO: 386342 - DNA, 25 bp, Artificial
  probe
  misc_feature (1)..(25): SEQ ID NO: 4597; WAN0249DB; Start 21; Stop 45
atgagctagggatttgataagaata

SEQ ID NO: 386343 - DNA, 25 bp, Artificial
  probe
  misc_feature (1)..(25): SEQ ID NO: 4597; WAN0249DB; Start 23; Stop 47
gagctagggatttgataagaatatc

SEQ ID NO: 386344 - DNA, 25 bp, Artificial
  probe
  misc_feature (1)..(25): SEQ ID NO: 4597; WAN0249DB; Start 5; Stop 29
tctagacttgcttgccatgagctag

SEQ ID NO: 386345 - DNA, 25 bp, Artificial
  probe
  misc_feature (1)..(25): SEQ ID NO: 4597; WAN0249DB; Start 6; Stop 30
ctagacttgcttgccatgagctagg

SEQ ID NO: 386346 - DNA, 25 bp, Artificial
  probe
  misc_feature (1)..(25): SEQ ID NO: 4597; WAN0249DB; Start 24; Stop 48
agctagggatttgataagaatatca

SEQ ID NO: 386347 - DNA, 25 bp, Artificial
  probe
  misc_feature (1)..(25): SEQ ID NO: 4598; WAN0249PQ; Start 30; Stop 54
ctttctagcttggtcagtaggtttt

SEQ ID NO: 386348 - DNA, 25 bp, Artificial
  probe
  misc_feature (1)..(25): SEQ ID NO: 4598; WAN0249PQ; Start 89; Stop 113
aagttgaatgttccgaaaatattgt

SEQ ID NO: 386349 - DNA, 25 bp, Artificial
  probe
  misc_feature (1)..(25): SEQ ID NO: 4598; WAN0249PQ; Start 29; Stop 53
gctttctagcttggtcagtaggttt

SEQ ID NO: 386350 - DNA, 25 bp, Artificial
  probe
  misc_feature (1)..(25): SEQ ID NO: 4598; WAN0249PQ; Start 90; Stop 114
agttgaatgttccgaaaatattgta

SEQ ID NO: 386351 - DNA, 25 bp, Artificial
  probe
  misc_feature (1)..(25): SEQ ID NO: 4598; WAN0249PQ; Start 88; Stop 112
aaagttgaatgttccgaaaatattg

SEQ ID NO: 386352 - DNA, 25 bp, Artificial
  probe
  misc_feature (1)..(25): SEQ ID NO: 4598; WAN0249PQ; Start 14; Stop 38
agcctattgtatcaagctttctagc

SEQ ID NO: 386353 - DNA, 25 bp, Artificial
  probe
  misc_feature (1)..(25): SEQ ID NO: 4598; WAN0249PQ; Start 91; Stop 115
gttgaatgttccgaaaatattgtat

SEQ ID NO: 386354 - DNA, 25 bp, Artificial
  probe
  misc_feature (1)..(25): SEQ ID NO: 4598; WAN0249PQ; Start 87; Stop 111
aaaagttgaatgttccgaaaatatt

SEQ ID NO: 386355 - DNA, 25 bp, Artificial
  probe
  misc_feature (1)..(25): SEQ ID NO: 4598; WAN0249PQ; Start 92; Stop 116
ttgaatgttccgaaaatattgtata

SEQ ID NO: 386356 - DNA, 25 bp, Artificial
  probe
  misc_feature (1)..(25): SEQ ID NO: 4598; WAN0249PQ; Start 28; Stop 52
agctttctagcttggtcagtaggtt

SEQ ID NO: 386357 - DNA, 25 bp, Artificial
  probe
  misc_feature (1)..(25): SEQ ID NO: 4598; WAN0249PQ; Start 13; Stop 37
aagcctattgtatcaagctttctag

SEQ ID NO: 386358 - DNA, 25 bp, Artificial
  probe
  misc_feature (1)..(25): SEQ ID NO: 4598; WAN0249PQ; Start 15; Stop 39
gcctattgtatcaagctttctagct

SEQ ID NO: 386359 - DNA, 25 bp, Artificial
  probe
  misc_feature (1)..(25): SEQ ID NO: 4599; WAN024A8K; Start 3; Stop 27
agttctcctctctaaacagcctaaa

SEQ ID NO: 386360 - DNA, 25 bp, Artificial
  probe
  misc_feature (1)..(25): SEQ ID NO: 4599; WAN024A8K; Start 2; Stop 26
cagttctcctctctaaacagcctaa

SEQ ID NO: 386361 - DNA, 25 bp, Artificial
  probe
  misc_feature (1)..(25): SEQ ID NO: 4599; WAN024A8K; Start 1; Stop 25
tcagttctcctctctaaacagccta

SEQ ID NO: 386362 - DNA, 25 bp, Artificial
  probe
  misc_feature (1)..(25): SEQ ID NO: 4599; WAN024A8K; Start 4; Stop 28
gttctcctctctaaacagcctaaaa

SEQ ID NO: 386363 - DNA, 25 bp, Artificial
  probe
  misc_feature (1)..(25): SEQ ID NO: 4599; WAN024A8K; Start 35; Stop 59
tgaagtcatcatacgattttatcta

SEQ ID NO: 386364 - DNA, 25 bp, Artificial
  probe
  misc_feature (1)..(25): SEQ ID NO: 4599; WAN024A8K; Start 34; Stop 58
atgaagtcatcatacgattttatct

SEQ ID NO: 386365 - DNA, 25 bp, Artificial
  probe
  misc_feature (1)..(25): SEQ ID NO: 4600; WAN024ALB; Start 49; Stop 73
ggttaagtgatgaagaatagtgcta

SEQ ID NO: 386366 - DNA, 25 bp, Artificial
  probe
  misc_feature (1)..(25): SEQ ID NO: 4600; WAN024ALB; Start 53; Stop 77
aagtgatgaagaatagtgctattgg

SEQ ID NO: 386367 - DNA, 25 bp, Artificial
  probe
  misc_feature (1)..(25): SEQ ID NO: 4600; WAN024ALB; Start 48; Stop 72
gggttaagtgatgaagaatagtgct

SEQ ID NO: 386368 - DNA, 25 bp, Artificial
  probe
  misc_feature (1)..(25): SEQ ID NO: 4600; WAN024ALB; Start 47; Stop 71
agggttaagtgatgaagaatagtgc

SEQ ID NO: 386369 - DNA, 25 bp, Artificial
  probe
  misc_feature (1)..(25): SEQ ID NO: 4600; WAN024ALB; Start 46; Stop 70
gagggttaagtgatgaagaatagtg

SEQ ID NO: 386370 - DNA, 25 bp, Artificial
  probe
  misc_feature (1)..(25): SEQ ID NO: 4600; WAN024ALB; Start 45; Stop 69
agagggttaagtgatgaagaatagt

SEQ ID NO: 386371 - DNA, 25 bp, Artificial
  probe
  misc_feature (1)..(25): SEQ ID NO: 4600; WAN024ALB; Start 50; Stop 74
gttaagtgatgaagaatagtgctat

SEQ ID NO: 386372 - DNA, 25 bp, Artificial
  probe
  misc_feature (1)..(25): SEQ ID NO: 4600; WAN024ALB; Start 57; Stop 81
gatgaagaatagtgctattgggagt

SEQ ID NO: 386373 - DNA, 25 bp, Artificial
  probe
  misc_feature (1)..(25): SEQ ID NO: 4600; WAN024ALB; Start 56; Stop 80
tgatgaagaatagtgctattgggag

SEQ ID NO: 386374 - DNA, 25 bp, Artificial
  probe
  misc_feature (1)..(25): SEQ ID NO: 4600; WAN024ALB; Start 55; Stop 79
gtgatgaagaatagtgctattggga

SEQ ID NO: 386375 - DNA, 25 bp, Artificial
  probe
  misc_feature (1)..(25): SEQ ID NO: 4600; WAN024ALB; Start 54; Stop 78
agtgatgaagaatagtgctattggg

SEQ ID NO: 386376 - DNA, 25 bp, Artificial
  probe
  misc_feature (1)..(25): SEQ ID NO: 4600; WAN024ALB; Start 44; Stop 68
aagagggttaagtgatgaagaatag

SEQ ID NO: 386377 - DNA, 25 bp, Artificial
  probe
  misc_feature (1)..(25): SEQ ID NO: 4600; WAN024ALB; Start 59; Stop 83
tgaagaatagtgctattgggagtaa

SEQ ID NO: 386378 - DNA, 25 bp, Artificial
  probe
  misc_feature (1)..(25): SEQ ID NO: 4600; WAN024ALB; Start 58; Stop 82
atgaagaatagtgctattgggagta

SEQ ID NO: 386379 - DNA, 25 bp, Artificial
  probe
  misc_feature (1)..(25): SEQ ID NO: 4600; WAN024ALB; Start 43; Stop 67
aaagagggttaagtgatgaagaata

SEQ ID NO: 386380 - DNA, 25 bp, Artificial
  probe
  misc_feature (1)..(25): SEQ ID NO: 4600; WAN024ALB; Start 52; Stop 76
taagtgatgaagaatagtgctattg

SEQ ID NO: 386381 - DNA, 25 bp, Artificial
  probe
  misc_feature (1)..(25): SEQ ID NO: 4600; WAN024ALB; Start 60; Stop 84
gaagaatagtgctattgggagtaat

SEQ ID NO: 386382 - DNA, 25 bp, Artificial
  probe
  misc_feature (1)..(25): SEQ ID NO: 4600; WAN024ALB; Start 51; Stop 75
ttaagtgatgaagaatagtgctatt

SEQ ID NO: 386383 - DNA, 25 bp, Artificial
  probe
  misc_feature (1)..(25): SEQ ID NO: 4601; WAN024ABK; Start 27; Stop 51
ctccttctttgaaatagagaggtgt

SEQ ID NO: 386384 - DNA, 25 bp, Artificial
  probe
  misc_feature (1)..(25): SEQ ID NO: 4601; WAN024ABK; Start 26; Stop 50
actccttctttgaaatagagaggtg

SEQ ID NO: 386385 - DNA, 25 bp, Artificial
  probe
  misc_feature (1)..(25): SEQ ID NO: 4601; WAN024ABK; Start 28; Stop 52
tccttctttgaaatagagaggtgtt

SEQ ID NO: 386386 - DNA, 25 bp, Artificial
  probe
  misc_feature (1)..(25): SEQ ID NO: 4601; WAN024ABK; Start 2; Stop 26
catatcgtttaggagttcagatgaa

SEQ ID NO: 386387 - DNA, 25 bp, Artificial
  probe
  misc_feature (1)..(25): SEQ ID NO: 4601; WAN024ABK; Start 25; Stop 49
aactccttctttgaaatagagaggt

SEQ ID NO: 386388 - DNA, 25 bp, Artificial
  probe
  misc_feature (1)..(25): SEQ ID NO: 4601; WAN024ABK; Start 23; Stop 47
tgaactccttctttgaaatagagag

SEQ ID NO: 386389 - DNA, 25 bp, Artificial
  probe
  misc_feature (1)..(25): SEQ ID NO: 4601; WAN024ABK; Start 29; Stop 53
ccttctttgaaatagagaggtgttt

SEQ ID NO: 386390 - DNA, 25 bp, Artificial
  probe
  misc_feature (1)..(25): SEQ ID NO: 4601; WAN024ABK; Start 24; Stop 48
gaactccttctttgaaatagagagg

SEQ ID NO: 386391 - DNA, 25 bp, Artificial
  probe
  misc_feature (1)..(25): SEQ ID NO: 4601; WAN024ABK; Start 19; Stop 43
cagatgaactccttctttgaaatag

SEQ ID NO: 386392 - DNA, 25 bp, Artificial
  probe
  misc_feature (1)..(25): SEQ ID NO: 4601; WAN024ABK; Start 18; Stop 42
tcagatgaactccttctttgaaata

SEQ ID NO: 386393 - DNA, 25 bp, Artificial
  probe
  misc_feature (1)..(25): SEQ ID NO: 4601; WAN024ABK; Start 20; Stop 44
agatgaactccttctttgaaataga

SEQ ID NO: 386394 - DNA, 25 bp, Artificial
  probe
  misc_feature (1)..(25): SEQ ID NO: 4601; WAN024ABK; Start 22; Stop 46
atgaactccttctttgaaatagaga

SEQ ID NO: 386395 - DNA, 25 bp, Artificial
  probe
  misc_feature (1)..(25): SEQ ID NO: 4601; WAN024ABK; Start 21; Stop 45
gatgaactccttctttgaaatagag

SEQ ID NO: 386396 - DNA, 25 bp, Artificial
  probe
  misc_feature (1)..(25): SEQ ID NO: 4601; WAN024ABK; Start 1; Stop 25
tcatatcgtttaggagttcagatga

SEQ ID NO: 386397 - DNA, 25 bp, Artificial
  probe
  misc_feature (1)..(25): SEQ ID NO: 4601; WAN024ABK; Start 17; Stop 41
ttcagatgaactccttctttgaaat

SEQ ID NO: 386398 - DNA, 25 bp, Artificial
  probe
  misc_feature (1)..(25): SEQ ID NO: 4601; WAN024ABK; Start 30; Stop 54
cttctttgaaatagagaggtgtttt

SEQ ID NO: 386399 - DNA, 25 bp, Artificial
  probe
  misc_feature (1)..(25): SEQ ID NO: 4601; WAN024ABK; Start 16; Stop 40
gttcagatgaactccttctttgaaa

SEQ ID NO: 386400 - DNA, 25 bp, Artificial
  probe
  misc_feature (1)..(25): SEQ ID NO: 4601; WAN024ABK; Start 3; Stop 27
atatcgtttaggagttcagatgaac

SEQ ID NO: 386401 - DNA, 25 bp, Artificial
  probe
  misc_feature (1)..(25): SEQ ID NO: 4601; WAN024ABK; Start 31; Stop 55
ttctttgaaatagagaggtgttttc

SEQ ID NO: 386402 - DNA, 25 bp, Artificial
  probe
  misc_feature (1)..(25): SEQ ID NO: 4602; WAN0249UA; Start 99; Stop 123
ctgaccttgagtatgtgatagttct

SEQ ID NO: 386403 - DNA, 25 bp, Artificial
  probe
  misc_feature (1)..(25): SEQ ID NO: 4602; WAN0249UA; Start 98; Stop 122
gctgaccttgagtatgtgatagttc

SEQ ID NO: 386404 - DNA, 25 bp, Artificial
  probe
  misc_feature (1)..(25): SEQ ID NO: 4602; WAN0249UA; Start 100; Stop 124
tgaccttgagtatgtgatagttcta

SEQ ID NO: 386405 - DNA, 25 bp, Artificial
  probe
  misc_feature (1)..(25): SEQ ID NO: 4602; WAN0249UA; Start 102; Stop 126
accttgagtatgtgatagttctagt

SEQ ID NO: 386406 - DNA, 25 bp, Artificial
  probe
  misc_feature (1)..(25): SEQ ID NO: 4602; WAN0249UA; Start 101; Stop 125
gaccttgagtatgtgatagttctag

SEQ ID NO: 386407 - DNA, 25 bp, Artificial
  probe
  misc_feature (1)..(25): SEQ ID NO: 4602; WAN0249UA; Start 97; Stop 121
agctgaccttgagtatgtgatagtt

SEQ ID NO: 386408 - DNA, 25 bp, Artificial
  probe
  misc_feature (1)..(25): SEQ ID NO: 4602; WAN0249UA; Start 357; Stop 381
aactttcccgtagcatacttcataa

SEQ ID NO: 386409 - DNA, 25 bp, Artificial
  probe
  misc_feature (1)..(25): SEQ ID NO: 4602; WAN0249UA; Start 355; Stop 379
ataactttcccgtagcatacttcat

SEQ ID NO: 386410 - DNA, 25 bp, Artificial
  probe
  misc_feature (1)..(25): SEQ ID NO: 4602; WAN0249UA; Start 96; Stop 120
gagctgaccttgagtatgtgatagt

SEQ ID NO: 386411 - DNA, 25 bp, Artificial
  probe
  misc_feature (1)..(25): SEQ ID NO: 4602; WAN0249UA; Start 95; Stop 119
tgagctgaccttgagtatgtgatag

SEQ ID NO: 386412 - DNA, 25 bp, Artificial
  probe
  misc_feature (1)..(25): SEQ ID NO: 4602; WAN0249UA; Start 356; Stop 380
taactttcccgtagcatacttcata

SEQ ID NO: 386413 - DNA, 25 bp, Artificial
  probe
  misc_feature (1)..(25): SEQ ID NO: 4602; WAN0249UA; Start 354; Stop 378
cataactttcccgtagcatacttca

SEQ ID NO: 386414 - DNA, 25 bp, Artificial
  probe
  misc_feature (1)..(25): SEQ ID NO: 4602; WAN0249UA; Start 358; Stop 382
actttcccgtagcatacttcataag

SEQ ID NO: 386415 - DNA, 25 bp, Artificial
  probe
  misc_feature (1)..(25): SEQ ID NO: 4602; WAN0249UA; Start 153; Stop 177
tcaatcaatctataacacaacaaca

SEQ ID NO: 386416 - DNA, 25 bp, Artificial
  probe
  misc_feature (1)..(25): SEQ ID NO: 4602; WAN0249UA; Start 94; Stop 118
gtgagctgaccttgagtatgtgata

SEQ ID NO: 386417 - DNA, 25 bp, Artificial
  probe
  misc_feature (1)..(25): SEQ ID NO: 4602; WAN0249UA; Start 359; Stop 383
ctttcccgtagcatacttcataagg

SEQ ID NO: 386418 - DNA, 25 bp, Artificial
  probe
  misc_feature (1)..(25): SEQ ID NO: 4602; WAN0249UA; Start 353; Stop 377
gcataactttcccgtagcatacttc

SEQ ID NO: 386419 - DNA, 25 bp, Artificial
  probe
  misc_feature (1)..(25): SEQ ID NO: 4602; WAN0249UA; Start 103; Stop 127
ccttgagtatgtgatagttctagta

SEQ ID NO: 386420 - DNA, 25 bp, Artificial
  probe
  misc_feature (1)..(25): SEQ ID NO: 4602; WAN0249UA; Start 154; Stop 178
caatcaatctataacacaacaacat

SEQ ID NO: 386421 - DNA, 25 bp, Artificial
  probe
  misc_feature (1)..(25): SEQ ID NO: 4602; WAN0249UA; Start 152; Stop 176
ttcaatcaatctataacacaacaac

SEQ ID NO: 386422 - DNA, 25 bp, Artificial
  probe
  misc_feature (1)..(25): SEQ ID NO: 4602; WAN0249UA; Start 89; Stop 113
catctgtgagctgaccttgagtatg

SEQ ID NO: 386423 - DNA, 25 bp, Artificial
  probe
  misc_feature (1)..(25): SEQ ID NO: 4602; WAN0249UA; Start 360; Stop 384
tttcccgtagcatacttcataaggc

SEQ ID NO: 386424 - DNA, 25 bp, Artificial
  probe
  misc_feature (1)..(25): SEQ ID NO: 4602; WAN0249UA; Start 90; Stop 114
atctgtgagctgaccttgagtatgt

SEQ ID NO: 386425 - DNA, 25 bp, Artificial
  probe
  misc_feature (1)..(25): SEQ ID NO: 4602; WAN0249UA; Start 88; Stop 112
tcatctgtgagctgaccttgagtat

SEQ ID NO: 386426 - DNA, 25 bp, Artificial
  probe
  misc_feature (1)..(25): SEQ ID NO: 4602; WAN0249UA; Start 93; Stop 117
tgtgagctgaccttgagtatgtgat

SEQ ID NO: 386427 - DNA, 25 bp, Artificial
  probe
  misc_feature (1)..(25): SEQ ID NO: 4602; WAN0249UA; Start 364; Stop 388
ccgtagcatacttcataaggcgttt

SEQ ID NO: 386428 - DNA, 25 bp, Artificial
  probe
  misc_feature (1)..(25): SEQ ID NO: 4602; WAN0249UA; Start 406; Stop 430
cgtggtcgattatttagaacctgta

SEQ ID NO: 386429 - DNA, 25 bp, Artificial
  probe
  misc_feature (1)..(25): SEQ ID NO: 4602; WAN0249UA; Start 366; Stop 390
gtagcatacttcataaggcgttttc

SEQ ID NO: 386430 - DNA, 25 bp, Artificial
  probe
  misc_feature (1)..(25): SEQ ID NO: 4602; WAN0249UA; Start 371; Stop 395
atacttcataaggcgttttccactt

SEQ ID NO: 386431 - DNA, 25 bp, Artificial
  probe
  misc_feature (1)..(25): SEQ ID NO: 4602; WAN0249UA; Start 412; Stop 436
cgattatttagaacctgtattcaca

SEQ ID NO: 386432 - DNA, 25 bp, Artificial
  probe
  misc_feature (1)..(25): SEQ ID NO: 4602; WAN0249UA; Start 72; Stop 96
taaccaaaatagttgctcatctgtg

SEQ ID NO: 386433 - DNA, 25 bp, Artificial
  probe
  misc_feature (1)..(25): SEQ ID NO: 4602; WAN0249UA; Start 71; Stop 95
gtaaccaaaatagttgctcatctgt

SEQ ID NO: 386434 - DNA, 25 bp, Artificial
  probe
  misc_feature (1)..(25): SEQ ID NO: 4602; WAN0249UA; Start 70; Stop 94
tgtaaccaaaatagttgctcatctg

SEQ ID NO: 386435 - DNA, 25 bp, Artificial
  probe
  misc_feature (1)..(25): SEQ ID NO: 4603; WAN0249GX; Start 117; Stop 141
acttcgtcgtacattgtatataatt

SEQ ID NO: 386436 - DNA, 25 bp, Artificial
  probe
  misc_feature (1)..(25): SEQ ID NO: 4603; WAN0249GX; Start 116; Stop 140
gacttcgtcgtacattgtatataat

SEQ ID NO: 386437 - DNA, 25 bp, Artificial
  probe
  misc_feature (1)..(25): SEQ ID NO: 4603; WAN0249GX; Start 63; Stop 87
ttatcaatgttgtttaaagttccct

SEQ ID NO: 386438 - DNA, 25 bp, Artificial
  probe
  misc_feature (1)..(25): SEQ ID NO: 4603; WAN0249GX; Start 64; Stop 88
tatcaatgttgtttaaagttccctt

SEQ ID NO: 386439 - DNA, 25 bp, Artificial
  probe
  misc_feature (1)..(25): SEQ ID NO: 4603; WAN0249GX; Start 120; Stop 144
tcgtcgtacattgtatataattact

SEQ ID NO: 386440 - DNA, 25 bp, Artificial
  probe
  misc_feature (1)..(25): SEQ ID NO: 4603; WAN0249GX; Start 62; Stop 86
cttatcaatgttgtttaaagttccc

SEQ ID NO: 386441 - DNA, 25 bp, Artificial
  probe
  misc_feature (1)..(25): SEQ ID NO: 4603; WAN0249GX; Start 65; Stop 89
atcaatgttgtttaaagttcccttt

SEQ ID NO: 386442 - DNA, 25 bp, Artificial
  probe
  misc_feature (1)..(25): SEQ ID NO: 4603; WAN0249GX; Start 76; Stop 100
ttaaagttccctttaggtggtggat

SEQ ID NO: 386443 - DNA, 25 bp, Artificial
  probe
  misc_feature (1)..(25): SEQ ID NO: 4603; WAN0249GX; Start 71; Stop 95
gttgtttaaagttccctttaggtgg

SEQ ID NO: 386444 - DNA, 25 bp, Artificial
  probe
  misc_feature (1)..(25): SEQ ID NO: 4603; WAN0249GX; Start 72; Stop 96
ttgtttaaagttccctttaggtggt

SEQ ID NO: 386445 - DNA, 25 bp, Artificial
  probe
  misc_feature (1)..(25): SEQ ID NO: 4603; WAN0249GX; Start 70; Stop 94
tgttgtttaaagttccctttaggtg

SEQ ID NO: 386446 - DNA, 25 bp, Artificial
  probe
  misc_feature (1)..(25): SEQ ID NO: 4603; WAN0249GX; Start 77; Stop 101
taaagttccctttaggtggtggatc

SEQ ID NO: 386447 - DNA, 25 bp, Artificial
  probe
  misc_feature (1)..(25): SEQ ID NO: 4603; WAN0249GX; Start 73; Stop 97
tgtttaaagttccctttaggtggtg

SEQ ID NO: 386448 - DNA, 25 bp, Artificial
  probe
  misc_feature (1)..(25): SEQ ID NO: 4603; WAN0249GX; Start 69; Stop 93
atgttgtttaaagttccctttaggt

SEQ ID NO: 386449 - DNA, 25 bp, Artificial
  probe
  misc_feature (1)..(25): SEQ ID NO: 4603; WAN0249GX; Start 121; Stop 145
cgtcgtacattgtatataattactt

SEQ ID NO: 386450 - DNA, 25 bp, Artificial
  probe
  misc_feature (1)..(25): SEQ ID NO: 4603; WAN0249GX; Start 119; Stop 143
ttcgtcgtacattgtatataattac

SEQ ID NO: 386451 - DNA, 25 bp, Artificial
  probe
  misc_feature (1)..(25): SEQ ID NO: 4603; WAN0249GX; Start 78; Stop 102
aaagttccctttaggtggtggatca

SEQ ID NO: 386452 - DNA, 25 bp, Artificial
  probe
  misc_feature (1)..(25): SEQ ID NO: 4603; WAN0249GX; Start 75; Stop 99
tttaaagttccctttaggtggtgga

SEQ ID NO: 386453 - DNA, 25 bp, Artificial
  probe
  misc_feature (1)..(25): SEQ ID NO: 4603; WAN0249GX; Start 74; Stop 98
gtttaaagttccctttaggtggtgg

SEQ ID NO: 386454 - DNA, 25 bp, Artificial
  probe
  misc_feature (1)..(25): SEQ ID NO: 4603; WAN0249GX; Start 79; Stop 103
aagttccctttaggtggtggatcag

SEQ ID NO: 386455 - DNA, 25 bp, Artificial
  probe
  misc_feature (1)..(25): SEQ ID NO: 4603; WAN0249GX; Start 61; Stop 85
tcttatcaatgttgtttaaagttcc

SEQ ID NO: 386456 - DNA, 25 bp, Artificial
  probe
  misc_feature (1)..(25): SEQ ID NO: 4603; WAN0249GX; Start 68; Stop 92
aatgttgtttaaagttccctttagg

SEQ ID NO: 386457 - DNA, 25 bp, Artificial
  probe
  misc_feature (1)..(25): SEQ ID NO: 4603; WAN0249GX; Start 66; Stop 90
tcaatgttgtttaaagttcccttta

SEQ ID NO: 386458 - DNA, 25 bp, Artificial
  probe
  misc_feature (1)..(25): SEQ ID NO: 4603; WAN0249GX; Start 67; Stop 91
caatgttgtttaaagttccctttag

SEQ ID NO: 386459 - DNA, 25 bp, Artificial
  probe
  misc_feature (1)..(25): SEQ ID NO: 4603; WAN0249GX; Start 20; Stop 44
attaattgggtataacgtattttcg

SEQ ID NO: 386460 - DNA, 25 bp, Artificial
  probe
  misc_feature (1)..(25): SEQ ID NO: 4603; WAN0249GX; Start 151; Stop 175
aaaagagagaaaaggaatgatctta

SEQ ID NO: 386461 - DNA, 25 bp, Artificial
  probe
  misc_feature (1)..(25): SEQ ID NO: 4603; WAN0249GX; Start 21; Stop 45
ttaattgggtataacgtattttcgt

SEQ ID NO: 386462 - DNA, 25 bp, Artificial
  probe
  misc_feature (1)..(25): SEQ ID NO: 4603; WAN0249GX; Start 152; Stop 176
aaagagagaaaaggaatgatcttat

SEQ ID NO: 386463 - DNA, 25 bp, Artificial
  probe
  misc_feature (1)..(25): SEQ ID NO: 4603; WAN0249GX; Start 26; Stop 50
tgggtataacgtattttcgttgttt

SEQ ID NO: 386464 - DNA, 25 bp, Artificial
  probe
  misc_feature (1)..(25): SEQ ID NO: 4603; WAN0249GX; Start 25; Stop 49
ttgggtataacgtattttcgttgtt

SEQ ID NO: 386465 - DNA, 25 bp, Artificial
  probe
  misc_feature (1)..(25): SEQ ID NO: 4603; WAN0249GX; Start 24; Stop 48
attgggtataacgtattttcgttgt

SEQ ID NO: 386466 - DNA, 25 bp, Artificial
  probe
  misc_feature (1)..(25): SEQ ID NO: 4603; WAN0249GX; Start 87; Stop 111
tttaggtggtggatcagcattgcaa

SEQ ID NO: 386467 - DNA, 25 bp, Artificial
  probe
  misc_feature (1)..(25): SEQ ID NO: 4603; WAN0249GX; Start 23; Stop 47
aattgggtataacgtattttcgttg

SEQ ID NO: 386468 - DNA, 25 bp, Artificial
  probe
  misc_feature (1)..(25): SEQ ID NO: 4604; WAN0249FN; Start 43; Stop 67
tcacaaatctttctagttattccct

SEQ ID NO: 386469 - DNA, 25 bp, Artificial
  probe
  misc_feature (1)..(25): SEQ ID NO: 4604; WAN0249FN; Start 44; Stop 68
cacaaatctttctagttattccctt

SEQ ID NO: 386470 - DNA, 25 bp, Artificial
  probe
  misc_feature (1)..(25): SEQ ID NO: 4604; WAN0249FN; Start 42; Stop 66
ttcacaaatctttctagttattccc

SEQ ID NO: 386471 - DNA, 25 bp, Artificial
  probe
  misc_feature (1)..(25): SEQ ID NO: 4604; WAN0249FN; Start 53; Stop 77
ttctagttattcccttatcattcct

SEQ ID NO: 386472 - DNA, 25 bp, Artificial
  probe
  misc_feature (1)..(25): SEQ ID NO: 4604; WAN0249FN; Start 52; Stop 76
tttctagttattcccttatcattcc

SEQ ID NO: 386473 - DNA, 25 bp, Artificial
  probe
  misc_feature (1)..(25): SEQ ID NO: 4604; WAN0249FN; Start 70; Stop 94
tcattcctaattaagggagataaca

SEQ ID NO: 386474 - DNA, 25 bp, Artificial
  probe
  misc_feature (1)..(25): SEQ ID NO: 4604; WAN0249FN; Start 54; Stop 78
tctagttattcccttatcattccta

SEQ ID NO: 386475 - DNA, 25 bp, Artificial
  probe
  misc_feature (1)..(25): SEQ ID NO: 4604; WAN0249FN; Start 45; Stop 69
acaaatctttctagttattccctta

SEQ ID NO: 386476 - DNA, 25 bp, Artificial
  probe
  misc_feature (1)..(25): SEQ ID NO: 4604; WAN0249FN; Start 74; Stop 98
tcctaattaagggagataacataca

SEQ ID NO: 386477 - DNA, 25 bp, Artificial
  probe
  misc_feature (1)..(25): SEQ ID NO: 4604; WAN0249FN; Start 57; Stop 81
agttattcccttatcattcctaatt

SEQ ID NO: 386478 - DNA, 25 bp, Artificial
  probe
  misc_feature (1)..(25): SEQ ID NO: 4604; WAN0249FN; Start 41; Stop 65
attcacaaatctttctagttattcc

SEQ ID NO: 386479 - DNA, 25 bp, Artificial
  probe
  misc_feature (1)..(25): SEQ ID NO: 4604; WAN0249FN; Start 55; Stop 79
ctagttattcccttatcattcctaa

SEQ ID NO: 386480 - DNA, 25 bp, Artificial
  probe
  misc_feature (1)..(25): SEQ ID NO: 4604; WAN0249FN; Start 71; Stop 95
cattcctaattaagggagataacat

SEQ ID NO: 386481 - DNA, 25 bp, Artificial
  probe
  misc_feature (1)..(25): SEQ ID NO: 4604; WAN0249FN; Start 69; Stop 93
atcattcctaattaagggagataac

SEQ ID NO: 386482 - DNA, 25 bp, Artificial
  probe
  misc_feature (1)..(25): SEQ ID NO: 4604; WAN0249FN; Start 75; Stop 99
cctaattaagggagataacatacaa

SEQ ID NO: 386483 - DNA, 25 bp, Artificial
  probe
  misc_feature (1)..(25): SEQ ID NO: 4604; WAN0249FN; Start 50; Stop 74
tctttctagttattcccttatcatt

SEQ ID NO: 386484 - DNA, 25 bp, Artificial
  probe
  misc_feature (1)..(25): SEQ ID NO: 4604; WAN0249FN; Start 48; Stop 72
aatctttctagttattcccttatca

SEQ ID NO: 386485 - DNA, 25 bp, Artificial
  probe
  misc_feature (1)..(25): SEQ ID NO: 4604; WAN0249FN; Start 51; Stop 75
ctttctagttattcccttatcattc

SEQ ID NO: 386486 - DNA, 25 bp, Artificial
  probe
  misc_feature (1)..(25): SEQ ID NO: 4604; WAN0249FN; Start 73; Stop 97
ttcctaattaagggagataacatac

SEQ ID NO: 386487 - DNA, 25 bp, Artificial
  probe
  misc_feature (1)..(25): SEQ ID NO: 4604; WAN0249FN; Start 66; Stop 90
cttatcattcctaattaagggagat

SEQ ID NO: 386488 - DNA, 25 bp, Artificial
  probe
  misc_feature (1)..(25): SEQ ID NO: 4604; WAN0249FN; Start 65; Stop 89
ccttatcattcctaattaagggaga

SEQ ID NO: 386489 - DNA, 25 bp, Artificial
  probe
  misc_feature (1)..(25): SEQ ID NO: 4604; WAN0249FN; Start 61; Stop 85
attcccttatcattcctaattaagg

SEQ ID NO: 386490 - DNA, 25 bp, Artificial
  probe
  misc_feature (1)..(25): SEQ ID NO: 4605; WAN0249IF; Start 18; Stop 42
atattataaccaattccgccagaca

SEQ ID NO: 386491 - DNA, 25 bp, Artificial
  probe
  misc_feature (1)..(25): SEQ ID NO: 4605; WAN0249IF; Start 15; Stop 39
cgtatattataaccaattccgccag

SEQ ID NO: 386492 - DNA, 25 bp, Artificial
  probe
  misc_feature (1)..(25): SEQ ID NO: 4605; WAN0249IF; Start 19; Stop 43
tattataaccaattccgccagacaa

SEQ ID NO: 386493 - DNA, 25 bp, Artificial
  probe
  misc_feature (1)..(25): SEQ ID NO: 4605; WAN0249IF; Start 14; Stop 38
ccgtatattataaccaattccgcca

SEQ ID NO: 386494 - DNA, 25 bp, Artificial
  probe
  misc_feature (1)..(25): SEQ ID NO: 4605; WAN0249IF; Start 13; Stop 37
accgtatattataaccaattccgcc

SEQ ID NO: 386495 - DNA, 25 bp, Artificial
  probe
  misc_feature (1)..(25): SEQ ID NO: 4605; WAN0249IF; Start 12; Stop 36
taccgtatattataaccaattccgc

SEQ ID NO: 386496 - DNA, 25 bp, Artificial
  probe
  misc_feature (1)..(25): SEQ ID NO: 4605; WAN0249IF; Start 20; Stop 44
attataaccaattccgccagacaag

SEQ ID NO: 386497 - DNA, 25 bp, Artificial
  probe
  misc_feature (1)..(25): SEQ ID NO: 4605; WAN0249IF; Start 17; Stop 41
tatattataaccaattccgccagac

SEQ ID NO: 386498 - DNA, 25 bp, Artificial
  probe
  misc_feature (1)..(25): SEQ ID NO: 4605; WAN0249IF; Start 16; Stop 40
gtatattataaccaattccgccaga

SEQ ID NO: 386499 - DNA, 25 bp, Artificial
  probe
  misc_feature (1)..(25): SEQ ID NO: 4605; WAN0249IF; Start 37; Stop 61
cagacaaggaaagaaatatgctcat

SEQ ID NO: 386500 - DNA, 25 bp, Artificial
  probe
  misc_feature (1)..(25): SEQ ID NO: 4605; WAN0249IF; Start 36; Stop 60
ccagacaaggaaagaaatatgctca

SEQ ID NO: 386501 - DNA, 25 bp, Artificial
  probe
  misc_feature (1)..(25): SEQ ID NO: 4605; WAN0249IF; Start 38; Stop 62
agacaaggaaagaaatatgctcatt

SEQ ID NO: 386502 - DNA, 25 bp, Artificial
  probe
  misc_feature (1)..(25): SEQ ID NO: 4605; WAN0249IF; Start 11; Stop 35
gtaccgtatattataaccaattccg

SEQ ID NO: 386503 - DNA, 25 bp, Artificial
  probe
  misc_feature (1)..(25): SEQ ID NO: 4605; WAN0249IF; Start 35; Stop 59
gccagacaaggaaagaaatatgctc

SEQ ID NO: 386504 - DNA, 25 bp, Artificial
  probe
  misc_feature (1)..(25): SEQ ID NO: 4605; WAN0249IF; Start 21; Stop 45
ttataaccaattccgccagacaagg

SEQ ID NO: 386505 - DNA, 25 bp, Artificial
  probe
  misc_feature (1)..(25): SEQ ID NO: 4605; WAN0249IF; Start 92; Stop 116
tctgatggatgactgaatttctatt

SEQ ID NO: 386506 - DNA, 25 bp, Artificial
  probe
  misc_feature (1)..(25): SEQ ID NO: 4605; WAN0249IF; Start 39; Stop 63
gacaaggaaagaaatatgctcattt

SEQ ID NO: 386507 - DNA, 25 bp, Artificial
  probe
  misc_feature (1)..(25): SEQ ID NO: 4605; WAN0249IF; Start 91; Stop 115
atctgatggatgactgaatttctat

SEQ ID NO: 386508 - DNA, 25 bp, Artificial
  probe
  misc_feature (1)..(25): SEQ ID NO: 4605; WAN0249IF; Start 93; Stop 117
ctgatggatgactgaatttctattt

SEQ ID NO: 386509 - DNA, 25 bp, Artificial
  probe
  misc_feature (1)..(25): SEQ ID NO: 4605; WAN0249IF; Start 10; Stop 34
tgtaccgtatattataaccaattcc

SEQ ID NO: 386510 - DNA, 25 bp, Artificial
  probe
  misc_feature (1)..(25): SEQ ID NO: 4605; WAN0249IF; Start 22; Stop 46
tataaccaattccgccagacaagga

SEQ ID NO: 386511 - DNA, 25 bp, Artificial
  probe
  misc_feature (1)..(25): SEQ ID NO: 4605; WAN0249IF; Start 5; Stop 29
tcctttgtaccgtatattataacca

SEQ ID NO: 386512 - DNA, 25 bp, Artificial
  probe
  misc_feature (1)..(25): SEQ ID NO: 4605; WAN0249IF; Start 34; Stop 58
cgccagacaaggaaagaaatatgct

SEQ ID NO: 386513 - DNA, 25 bp, Artificial
  probe
  misc_feature (1)..(25): SEQ ID NO: 4605; WAN0249IF; Start 97; Stop 121
tggatgactgaatttctatttactt

SEQ ID NO: 386514 - DNA, 25 bp, Artificial
  probe
  misc_feature (1)..(25): SEQ ID NO: 4605; WAN0249IF; Start 32; Stop 56
tccgccagacaaggaaagaaatatg

SEQ ID NO: 386515 - DNA, 25 bp, Artificial
  probe
  misc_feature (1)..(25): SEQ ID NO: 4605; WAN0249IF; Start 90; Stop 114
catctgatggatgactgaatttcta

SEQ ID NO: 386516 - DNA, 25 bp, Artificial
  probe
  misc_feature (1)..(25): SEQ ID NO: 4605; WAN0249IF; Start 96; Stop 120
atggatgactgaatttctatttact

SEQ ID NO: 386517 - DNA, 25 bp, Artificial
  probe
  misc_feature (1)..(25): SEQ ID NO: 4605; WAN0249IF; Start 94; Stop 118
tgatggatgactgaatttctattta

SEQ ID NO: 386518 - DNA, 25 bp, Artificial
  probe
  misc_feature (1)..(25): SEQ ID NO: 4605; WAN0249IF; Start 95; Stop 119
gatggatgactgaatttctatttac

SEQ ID NO: 386519 - DNA, 25 bp, Artificial
  probe
  misc_feature (1)..(25): SEQ ID NO: 4605; WAN0249IF; Start 6; Stop 30
cctttgtaccgtatattataaccaa

SEQ ID NO: 386520 - DNA, 25 bp, Artificial
  probe
  misc_feature (1)..(25): SEQ ID NO: 4605; WAN0249IF; Start 4; Stop 28
ttcctttgtaccgtatattataacc

SEQ ID NO: 386521 - DNA, 25 bp, Artificial
  probe
  misc_feature (1)..(25): SEQ ID NO: 4605; WAN0249IF; Start 33; Stop 57
ccgccagacaaggaaagaaatatgc

SEQ ID NO: 386522 - DNA, 25 bp, Artificial
  probe
  misc_feature (1)..(25): SEQ ID NO: 4605; WAN0249IF; Start 31; Stop 55
ttccgccagacaaggaaagaaatat

SEQ ID NO: 386523 - DNA, 25 bp, Artificial
  probe
  misc_feature (1)..(25): SEQ ID NO: 4606; WAN0249UO; Start 13; Stop 37
atgatgaccaataagaggcttgatt

SEQ ID NO: 386524 - DNA, 25 bp, Artificial
  probe
  misc_feature (1)..(25): SEQ ID NO: 4606; WAN0249UO; Start 12; Stop 36
aatgatgaccaataagaggcttgat

SEQ ID NO: 386525 - DNA, 25 bp, Artificial
  probe
  misc_feature (1)..(25): SEQ ID NO: 4606; WAN0249UO; Start 21; Stop 45
caataagaggcttgatttggtgaat

SEQ ID NO: 386526 - DNA, 25 bp, Artificial
  probe
  misc_feature (1)..(25): SEQ ID NO: 4606; WAN0249UO; Start 15; Stop 39
gatgaccaataagaggcttgatttg

SEQ ID NO: 386527 - DNA, 25 bp, Artificial
  probe
  misc_feature (1)..(25): SEQ ID NO: 4606; WAN0249UO; Start 14; Stop 38
tgatgaccaataagaggcttgattt

SEQ ID NO: 386528 - DNA, 25 bp, Artificial
  probe
  misc_feature (1)..(25): SEQ ID NO: 4606; WAN0249UO; Start 11; Stop 35
aaatgatgaccaataagaggcttga

SEQ ID NO: 386529 - DNA, 25 bp, Artificial
  probe
  misc_feature (1)..(25): SEQ ID NO: 4606; WAN0249UO; Start 22; Stop 46
aataagaggcttgatttggtgaatc

SEQ ID NO: 386530 - DNA, 25 bp, Artificial
  probe
  misc_feature (1)..(25): SEQ ID NO: 4606; WAN0249UO; Start 55; Stop 79
tttctctcttttactgccatttgtg

SEQ ID NO: 386531 - DNA, 25 bp, Artificial
  probe
  misc_feature (1)..(25): SEQ ID NO: 4606; WAN0249UO; Start 57; Stop 81
tctctcttttactgccatttgtgat

SEQ ID NO: 386532 - DNA, 25 bp, Artificial
  probe
  misc_feature (1)..(25): SEQ ID NO: 4606; WAN0249UO; Start 56; Stop 80
ttctctcttttactgccatttgtga

SEQ ID NO: 386533 - DNA, 25 bp, Artificial
  probe
  misc_feature (1)..(25): SEQ ID NO: 4606; WAN0249UO; Start 54; Stop 78
ttttctctcttttactgccatttgt

SEQ ID NO: 386534 - DNA, 25 bp, Artificial
  probe
  misc_feature (1)..(25): SEQ ID NO: 4606; WAN0249UO; Start 58; Stop 82
ctctcttttactgccatttgtgata

SEQ ID NO: 386535 - DNA, 25 bp, Artificial
  probe
  misc_feature (1)..(25): SEQ ID NO: 4606; WAN0249UO; Start 59; Stop 83
tctcttttactgccatttgtgataa

SEQ ID NO: 386536 - DNA, 25 bp, Artificial
  probe
  misc_feature (1)..(25): SEQ ID NO: 4606; WAN0249UO; Start 10; Stop 34
aaaatgatgaccaataagaggcttg

SEQ ID NO: 386537 - DNA, 25 bp, Artificial
  probe
  misc_feature (1)..(25): SEQ ID NO: 4606; WAN0249UO; Start 8; Stop 32
ttaaaatgatgaccaataagaggct

SEQ ID NO: 386538 - DNA, 25 bp, Artificial
  probe
  misc_feature (1)..(25): SEQ ID NO: 4606; WAN0249UO; Start 9; Stop 33
taaaatgatgaccaataagaggctt

SEQ ID NO: 386539 - DNA, 25 bp, Artificial
  probe
  misc_feature (1)..(25): SEQ ID NO: 4606; WAN0249UO; Start 60; Stop 84
ctcttttactgccatttgtgataaa

SEQ ID NO: 386540 - DNA, 25 bp, Artificial
  probe
  misc_feature (1)..(25): SEQ ID NO: 4606; WAN0249UO; Start 7; Stop 31
tttaaaatgatgaccaataagaggc

SEQ ID NO: 386541 - DNA, 25 bp, Artificial
  probe
  misc_feature (1)..(25): SEQ ID NO: 4606; WAN0249UO; Start 16; Stop 40
atgaccaataagaggcttgatttgg

SEQ ID NO: 386542 - DNA, 25 bp, Artificial
  probe
  misc_feature (1)..(25): SEQ ID NO: 4606; WAN0249UO; Start 65; Stop 89
ttactgccatttgtgataaaatagt

SEQ ID NO: 386543 - DNA, 25 bp, Artificial
  probe
  misc_feature (1)..(25): SEQ ID NO: 4606; WAN0249UO; Start 20; Stop 44
ccaataagaggcttgatttggtgaa

SEQ ID NO: 386544 - DNA, 25 bp, Artificial
  probe
  misc_feature (1)..(25): SEQ ID NO: 4606; WAN0249UO; Start 67; Stop 91
actgccatttgtgataaaatagtat

SEQ ID NO: 386545 - DNA, 25 bp, Artificial
  probe
  misc_feature (1)..(25): SEQ ID NO: 4606; WAN0249UO; Start 61; Stop 85
tcttttactgccatttgtgataaaa

SEQ ID NO: 386546 - DNA, 25 bp, Artificial
  probe
  misc_feature (1)..(25): SEQ ID NO: 4606; WAN0249UO; Start 64; Stop 88
tttactgccatttgtgataaaatag

SEQ ID NO: 386547 - DNA, 25 bp, Artificial
  probe
  misc_feature (1)..(25): SEQ ID NO: 4606; WAN0249UO; Start 23; Stop 47
ataagaggcttgatttggtgaatca

SEQ ID NO: 386548 - DNA, 25 bp, Artificial
  probe
  misc_feature (1)..(25): SEQ ID NO: 4606; WAN0249UO; Start 66; Stop 90
tactgccatttgtgataaaatagta

SEQ ID NO: 386549 - DNA, 25 bp, Artificial
  probe
  misc_feature (1)..(25): SEQ ID NO: 4606; WAN0249UO; Start 62; Stop 86
cttttactgccatttgtgataaaat

SEQ ID NO: 386550 - DNA, 25 bp, Artificial
  probe
  misc_feature (1)..(25): SEQ ID NO: 4606; WAN0249UO; Start 6; Stop 30
ctttaaaatgatgaccaataagagg

SEQ ID NO: 386551 - DNA, 25 bp, Artificial
  probe
  misc_feature (1)..(25): SEQ ID NO: 4606; WAN0249UO; Start 69; Stop 93
tgccatttgtgataaaatagtatag

SEQ ID NO: 386552 - DNA, 25 bp, Artificial
  probe
  misc_feature (1)..(25): SEQ ID NO: 4606; WAN0249UO; Start 68; Stop 92
ctgccatttgtgataaaatagtata

SEQ ID NO: 386553 - DNA, 25 bp, Artificial
  probe
  misc_feature (1)..(25): SEQ ID NO: 4606; WAN0249UO; Start 70; Stop 94
gccatttgtgataaaatagtataga

SEQ ID NO: 386554 - DNA, 25 bp, Artificial
  probe
  misc_feature (1)..(25): SEQ ID NO: 4606; WAN0249UO; Start 63; Stop 87
ttttactgccatttgtgataaaata

SEQ ID NO: 386555 - DNA, 25 bp, Artificial
  probe
  misc_feature (1)..(25): SEQ ID NO: 4606; WAN0249UO; Start 5; Stop 29
tctttaaaatgatgaccaataagag

SEQ ID NO: 386556 - DNA, 25 bp, Artificial
  probe
  misc_feature (1)..(25): SEQ ID NO: 4606; WAN0249UO; Start 1; Stop 25
tcattctttaaaatgatgaccaata

SEQ ID NO: 386557 - DNA, 25 bp, Artificial
  probe
  misc_feature (1)..(25): SEQ ID NO: 4607; WAN0249WL; Start 87; Stop 111
agtttcaaattactgccttataaca

SEQ ID NO: 386558 - DNA, 25 bp, Artificial
  probe
  misc_feature (1)..(25): SEQ ID NO: 4607; WAN0249WL; Start 91; Stop 115
tcaaattactgccttataacatctt

SEQ ID NO: 386559 - DNA, 25 bp, Artificial
  probe
  misc_feature (1)..(25): SEQ ID NO: 4607; WAN0249WL; Start 90; Stop 114
ttcaaattactgccttataacatct

SEQ ID NO: 386560 - DNA, 25 bp, Artificial
  probe
  misc_feature (1)..(25): SEQ ID NO: 4607; WAN0249WL; Start 92; Stop 116
caaattactgccttataacatcttc

SEQ ID NO: 386561 - DNA, 25 bp, Artificial
  probe
  misc_feature (1)..(25): SEQ ID NO: 4607; WAN0249WL; Start 88; Stop 112
gtttcaaattactgccttataacat

SEQ ID NO: 386562 - DNA, 25 bp, Artificial
  probe
  misc_feature (1)..(25): SEQ ID NO: 4607; WAN0249WL; Start 89; Stop 113
tttcaaattactgccttataacatc

SEQ ID NO: 386563 - DNA, 25 bp, Artificial
  probe
  misc_feature (1)..(25): SEQ ID NO: 4608; WAN024AHZ; Start 30; Stop 54
tggtcaaatgactgaagataagact

SEQ ID NO: 386564 - DNA, 25 bp, Artificial
  probe
  misc_feature (1)..(25): SEQ ID NO: 4608; WAN024AHZ; Start 27; Stop 51
tgttggtcaaatgactgaagataag

SEQ ID NO: 386565 - DNA, 25 bp, Artificial
  probe
  misc_feature (1)..(25): SEQ ID NO: 4608; WAN024AHZ; Start 29; Stop 53
ttggtcaaatgactgaagataagac

SEQ ID NO: 386566 - DNA, 25 bp, Artificial
  probe
  misc_feature (1)..(25): SEQ ID NO: 4608; WAN024AHZ; Start 28; Stop 52
gttggtcaaatgactgaagataaga

SEQ ID NO: 386567 - DNA, 25 bp, Artificial
  probe
  misc_feature (1)..(25): SEQ ID NO: 4608; WAN024AHZ; Start 26; Stop 50
ttgttggtcaaatgactgaagataa

SEQ ID NO: 386568 - DNA, 25 bp, Artificial
  probe
  misc_feature (1)..(25): SEQ ID NO: 4608; WAN024AHZ; Start 31; Stop 55
ggtcaaatgactgaagataagacta

SEQ ID NO: 386569 - DNA, 25 bp, Artificial
  probe
  misc_feature (1)..(25): SEQ ID NO: 4608; WAN024AHZ; Start 25; Stop 49
tttgttggtcaaatgactgaagata

SEQ ID NO: 386570 - DNA, 25 bp, Artificial
  probe
  misc_feature (1)..(25): SEQ ID NO: 4608; WAN024AHZ; Start 9; Stop 33
ccttttgagttttaattttgttggt

SEQ ID NO: 386571 - DNA, 25 bp, Artificial
  probe
  misc_feature (1)..(25): SEQ ID NO: 4608; WAN024AHZ; Start 8; Stop 32
tccttttgagttttaattttgttgg

SEQ ID NO: 386572 - DNA, 25 bp, Artificial
  probe
  misc_feature (1)..(25): SEQ ID NO: 4608; WAN024AHZ; Start 33; Stop 57
tcaaatgactgaagataagactatt

SEQ ID NO: 386573 - DNA, 25 bp, Artificial
  probe
  misc_feature (1)..(25): SEQ ID NO: 4608; WAN024AHZ; Start 32; Stop 56
gtcaaatgactgaagataagactat

SEQ ID NO: 386574 - DNA, 25 bp, Artificial
  probe
  misc_feature (1)..(25): SEQ ID NO: 4608; WAN024AHZ; Start 11; Stop 35
ttttgagttttaattttgttggtca

SEQ ID NO: 386575 - DNA, 25 bp, Artificial
  probe
  misc_feature (1)..(25): SEQ ID NO: 4608; WAN024AHZ; Start 24; Stop 48
ttttgttggtcaaatgactgaagat

SEQ ID NO: 386576 - DNA, 25 bp, Artificial
  probe
  misc_feature (1)..(25): SEQ ID NO: 4608; WAN024AHZ; Start 23; Stop 47
attttgttggtcaaatgactgaaga

SEQ ID NO: 386577 - DNA, 25 bp, Artificial
  probe
  misc_feature (1)..(25): SEQ ID NO: 4608; WAN024AHZ; Start 10; Stop 34
cttttgagttttaattttgttggtc

SEQ ID NO: 386578 - DNA, 25 bp, Artificial
  probe
  misc_feature (1)..(25): SEQ ID NO: 4608; WAN024AHZ; Start 22; Stop 46
aattttgttggtcaaatgactgaag

SEQ ID NO: 386579 - DNA, 25 bp, Artificial
  probe
  misc_feature (1)..(25): SEQ ID NO: 4608; WAN024AHZ; Start 21; Stop 45
taattttgttggtcaaatgactgaa

SEQ ID NO: 386580 - DNA, 25 bp, Artificial
  probe
  misc_feature (1)..(25): SEQ ID NO: 4608; WAN024AHZ; Start 20; Stop 44
ttaattttgttggtcaaatgactga

SEQ ID NO: 386581 - DNA, 25 bp, Artificial
  probe
  misc_feature (1)..(25): SEQ ID NO: 4608; WAN024AHZ; Start 7; Stop 31
ctccttttgagttttaattttgttg

SEQ ID NO: 386582 - DNA, 25 bp, Artificial
  probe
  misc_feature (1)..(25): SEQ ID NO: 4608; WAN024AHZ; Start 6; Stop 30
tctccttttgagttttaattttgtt

SEQ ID NO: 386583 - DNA, 25 bp, Artificial
  probe
  misc_feature (1)..(25): SEQ ID NO: 4608; WAN024AHZ; Start 5; Stop 29
ttctccttttgagttttaattttgt

SEQ ID NO: 386584 - DNA, 25 bp, Artificial
  probe
  misc_feature (1)..(25): SEQ ID NO: 4608; WAN024AHZ; Start 19; Stop 43
tttaattttgttggtcaaatgactg

SEQ ID NO: 386585 - DNA, 25 bp, Artificial
  probe
  misc_feature (1)..(25): SEQ ID NO: 4608; WAN024AHZ; Start 1; Stop 25
tcatttctccttttgagttttaatt

SEQ ID NO: 386586 - DNA, 25 bp, Artificial
  probe
  misc_feature (1)..(25): SEQ ID NO: 4608; WAN024AHZ; Start 16; Stop 40
agttttaattttgttggtcaaatga

SEQ ID NO: 386587 - DNA, 25 bp, Artificial
  probe
  misc_feature (1)..(25): SEQ ID NO: 4608; WAN024AHZ; Start 14; Stop 38
tgagttttaattttgttggtcaaat

SEQ ID NO: 386588 - DNA, 25 bp, Artificial
  probe
  misc_feature (1)..(25): SEQ ID NO: 4608; WAN024AHZ; Start 13; Stop 37
ttgagttttaattttgttggtcaaa

SEQ ID NO: 386589 - DNA, 25 bp, Artificial
  probe
  misc_feature (1)..(25): SEQ ID NO: 4608; WAN024AHZ; Start 12; Stop 36
tttgagttttaattttgttggtcaa

SEQ ID NO: 386590 - DNA, 25 bp, Artificial
  probe
  misc_feature (1)..(25): SEQ ID NO: 4608; WAN024AHZ; Start 17; Stop 41
gttttaattttgttggtcaaatgac

SEQ ID NO: 386591 - DNA, 25 bp, Artificial
  probe
  misc_feature (1)..(25): SEQ ID NO: 4608; WAN024AHZ; Start 15; Stop 39
gagttttaattttgttggtcaaatg

SEQ ID NO: 386592 - DNA, 25 bp, Artificial
  probe
  misc_feature (1)..(25): SEQ ID NO: 4608; WAN024AHZ; Start 18; Stop 42
ttttaattttgttggtcaaatgact

SEQ ID NO: 386593 - DNA, 25 bp, Artificial
  probe
  misc_feature (1)..(25): SEQ ID NO: 4608; WAN024AHZ; Start 4; Stop 28
tttctccttttgagttttaattttg

SEQ ID NO: 386594 - DNA, 25 bp, Artificial
  probe
  misc_feature (1)..(25): SEQ ID NO: 4608; WAN024AHZ; Start 2; Stop 26
catttctccttttgagttttaattt

SEQ ID NO: 386595 - DNA, 25 bp, Artificial
  probe
  misc_feature (1)..(25): SEQ ID NO: 4609; WAN024ARU; Start 67; Stop 91
aagccactaagtgacttccttctag

SEQ ID NO: 386596 - DNA, 25 bp, Artificial
  probe
  misc_feature (1)..(25): SEQ ID NO: 4609; WAN024ARU; Start 72; Stop 96
actaagtgacttccttctagagtga

SEQ ID NO: 386597 - DNA, 25 bp, Artificial
  probe
  misc_feature (1)..(25): SEQ ID NO: 4609; WAN024ARU; Start 73; Stop 97
ctaagtgacttccttctagagtgag

SEQ ID NO: 386598 - DNA, 25 bp, Artificial
  probe
  misc_feature (1)..(25): SEQ ID NO: 4609; WAN024ARU; Start 74; Stop 98
taagtgacttccttctagagtgagg

SEQ ID NO: 386599 - DNA, 25 bp, Artificial
  probe
  misc_feature (1)..(25): SEQ ID NO: 4609; WAN024ARU; Start 70; Stop 94
ccactaagtgacttccttctagagt

SEQ ID NO: 386600 - DNA, 25 bp, Artificial
  probe
  misc_feature (1)..(25): SEQ ID NO: 4609; WAN024ARU; Start 66; Stop 90
gaagccactaagtgacttccttcta

SEQ ID NO: 386601 - DNA, 25 bp, Artificial
  probe
  misc_feature (1)..(25): SEQ ID NO: 4609; WAN024ARU; Start 53; Stop 77
ctaaagacaaaaggaagccactaag

SEQ ID NO: 386602 - DNA, 25 bp, Artificial
  probe
  misc_feature (1)..(25): SEQ ID NO: 4609; WAN024ARU; Start 52; Stop 76
tctaaagacaaaaggaagccactaa

SEQ ID NO: 386603 - DNA, 25 bp, Artificial
  probe
  misc_feature (1)..(25): SEQ ID NO: 4609; WAN024ARU; Start 54; Stop 78
taaagacaaaaggaagccactaagt

SEQ ID NO: 386604 - DNA, 25 bp, Artificial
  probe
  misc_feature (1)..(25): SEQ ID NO: 4609; WAN024ARU; Start 51; Stop 75
ttctaaagacaaaaggaagccacta

SEQ ID NO: 386605 - DNA, 25 bp, Artificial
  probe
  misc_feature (1)..(25): SEQ ID NO: 4609; WAN024ARU; Start 69; Stop 93
gccactaagtgacttccttctagag

SEQ ID NO: 386606 - DNA, 25 bp, Artificial
  probe
  misc_feature (1)..(25): SEQ ID NO: 4609; WAN024ARU; Start 50; Stop 74
tttctaaagacaaaaggaagccact

SEQ ID NO: 386607 - DNA, 25 bp, Artificial
  probe
  misc_feature (1)..(25): SEQ ID NO: 4609; WAN024ARU; Start 68; Stop 92
agccactaagtgacttccttctaga

SEQ ID NO: 386608 - DNA, 25 bp, Artificial
  probe
  misc_feature (1)..(25): SEQ ID NO: 4609; WAN024ARU; Start 6; Stop 30
ttcctcacattattcttctactatt

SEQ ID NO: 386609 - DNA, 25 bp, Artificial
  probe
  misc_feature (1)..(25): SEQ ID NO: 4609; WAN024ARU; Start 49; Stop 73
ttttctaaagacaaaaggaagccac

SEQ ID NO: 386610 - DNA, 25 bp, Artificial
  probe
  misc_feature (1)..(25): SEQ ID NO: 4609; WAN024ARU; Start 48; Stop 72
attttctaaagacaaaaggaagcca

SEQ ID NO: 386611 - DNA, 25 bp, Artificial
  probe
  misc_feature (1)..(25): SEQ ID NO: 4609; WAN024ARU; Start 71; Stop 95
cactaagtgacttccttctagagtg

SEQ ID NO: 386612 - DNA, 25 bp, Artificial
  probe
  misc_feature (1)..(25): SEQ ID NO: 4609; WAN024ARU; Start 47; Stop 71
tattttctaaagacaaaaggaagcc

SEQ ID NO: 386613 - DNA, 25 bp, Artificial
  probe
  misc_feature (1)..(25): SEQ ID NO: 4609; WAN024ARU; Start 55; Stop 79
aaagacaaaaggaagccactaagtg

SEQ ID NO: 386614 - DNA, 25 bp, Artificial
  probe
  misc_feature (1)..(25): SEQ ID NO: 4609; WAN024ARU; Start 7; Stop 31
tcctcacattattcttctactattt

SEQ ID NO: 386615 - DNA, 25 bp, Artificial
  probe
  misc_feature (1)..(25): SEQ ID NO: 4609; WAN024ARU; Start 5; Stop 29
tttcctcacattattcttctactat

SEQ ID NO: 386616 - DNA, 25 bp, Artificial
  probe
  misc_feature (1)..(25): SEQ ID NO: 4609; WAN024ARU; Start 56; Stop 80
aagacaaaaggaagccactaagtga

SEQ ID NO: 386617 - DNA, 25 bp, Artificial
  probe
  misc_feature (1)..(25): SEQ ID NO: 4609; WAN024ARU; Start 46; Stop 70
gtattttctaaagacaaaaggaagc

SEQ ID NO: 386618 - DNA, 25 bp, Artificial
  probe
  misc_feature (1)..(25): SEQ ID NO: 4609; WAN024ARU; Start 43; Stop 67
gaggtattttctaaagacaaaagga

SEQ ID NO: 386619 - DNA, 25 bp, Artificial
  probe
  misc_feature (1)..(25): SEQ ID NO: 4609; WAN024ARU; Start 75; Stop 99
aagtgacttccttctagagtgagga

SEQ ID NO: 386620 - DNA, 25 bp, Artificial
  probe
  misc_feature (1)..(25): SEQ ID NO: 4609; WAN024ARU; Start 59; Stop 83
acaaaaggaagccactaagtgactt

SEQ ID NO: 386621 - DNA, 25 bp, Artificial
  probe
  misc_feature (1)..(25): SEQ ID NO: 4609; WAN024ARU; Start 42; Stop 66
agaggtattttctaaagacaaaagg

SEQ ID NO: 386622 - DNA, 25 bp, Artificial
  probe
  misc_feature (1)..(25): SEQ ID NO: 4609; WAN024ARU; Start 2; Stop 26
cattttcctcacattattcttctac

SEQ ID NO: 386623 - DNA, 25 bp, Artificial
  probe
  misc_feature (1)..(25): SEQ ID NO: 4609; WAN024ARU; Start 58; Stop 82
gacaaaaggaagccactaagtgact

SEQ ID NO: 386624 - DNA, 25 bp, Artificial
  probe
  misc_feature (1)..(25): SEQ ID NO: 4609; WAN024ARU; Start 57; Stop 81
agacaaaaggaagccactaagtgac

SEQ ID NO: 386625 - DNA, 25 bp, Artificial
  probe
  misc_feature (1)..(25): SEQ ID NO: 4609; WAN024ARU; Start 3; Stop 27
attttcctcacattattcttctact

SEQ ID NO: 386626 - DNA, 25 bp, Artificial
  probe
  misc_feature (1)..(25): SEQ ID NO: 4609; WAN024ARU; Start 1; Stop 25
tcattttcctcacattattcttcta

SEQ ID NO: 386627 - DNA, 25 bp, Artificial
  probe
  misc_feature (1)..(25): SEQ ID NO: 4609; WAN024ARU; Start 44; Stop 68
aggtattttctaaagacaaaaggaa

SEQ ID NO: 386628 - DNA, 25 bp, Artificial
  probe
  misc_feature (1)..(25): SEQ ID NO: 4610; WAN0249QS; Start 254; Stop 278
ggttcagctattacaattccaggaa

SEQ ID NO: 386629 - DNA, 25 bp, Artificial
  probe
  misc_feature (1)..(25): SEQ ID NO: 4610; WAN0249QS; Start 250; Stop 274
agatggttcagctattacaattcca

SEQ ID NO: 386630 - DNA, 25 bp, Artificial
  probe
  misc_feature (1)..(25): SEQ ID NO: 4610; WAN0249QS; Start 251; Stop 275
gatggttcagctattacaattccag

SEQ ID NO: 386631 - DNA, 25 bp, Artificial
  probe
  misc_feature (1)..(25): SEQ ID NO: 4610; WAN0249QS; Start 252; Stop 276
atggttcagctattacaattccagg

SEQ ID NO: 386632 - DNA, 25 bp, Artificial
  probe
  misc_feature (1)..(25): SEQ ID NO: 4610; WAN0249QS; Start 253; Stop 277
tggttcagctattacaattccagga

SEQ ID NO: 386633 - DNA, 25 bp, Artificial
  probe
  misc_feature (1)..(25): SEQ ID NO: 4610; WAN0249QS; Start 255; Stop 279
gttcagctattacaattccaggaaa

SEQ ID NO: 386634 - DNA, 25 bp, Artificial
  probe
  misc_feature (1)..(25): SEQ ID NO: 4610; WAN0249QS; Start 258; Stop 282
cagctattacaattccaggaaatca

SEQ ID NO: 386635 - DNA, 25 bp, Artificial
  probe
  misc_feature (1)..(25): SEQ ID NO: 4610; WAN0249QS; Start 64; Stop 88
aagttcagtagatgcaaatggattc

SEQ ID NO: 386636 - DNA, 25 bp, Artificial
  probe
  misc_feature (1)..(25): SEQ ID NO: 4610; WAN0249QS; Start 257; Stop 281
tcagctattacaattccaggaaatc

SEQ ID NO: 386637 - DNA, 25 bp, Artificial
  probe
  misc_feature (1)..(25): SEQ ID NO: 4610; WAN0249QS; Start 63; Stop 87
aaagttcagtagatgcaaatggatt

SEQ ID NO: 386638 - DNA, 25 bp, Artificial
  probe
  misc_feature (1)..(25): SEQ ID NO: 4610; WAN0249QS; Start 259; Stop 283
agctattacaattccaggaaatcaa

SEQ ID NO: 386639 - DNA, 25 bp, Artificial
  probe
  misc_feature (1)..(25): SEQ ID NO: 4610; WAN0249QS; Start 256; Stop 280
ttcagctattacaattccaggaaat

SEQ ID NO: 386640 - DNA, 25 bp, Artificial
  probe
  misc_feature (1)..(25): SEQ ID NO: 4610; WAN0249QS; Start 65; Stop 89
agttcagtagatgcaaatggattcg

SEQ ID NO: 386641 - DNA, 25 bp, Artificial
  probe
  misc_feature (1)..(25): SEQ ID NO: 4610; WAN0249QS; Start 110; Stop 134
tgaaactagaatagtacacctctgt

SEQ ID NO: 386642 - DNA, 25 bp, Artificial
  probe
  misc_feature (1)..(25): SEQ ID NO: 4610; WAN0249QS; Start 69; Stop 93
cagtagatgcaaatggattcggaag

SEQ ID NO: 386643 - DNA, 25 bp, Artificial
  probe
  misc_feature (1)..(25): SEQ ID NO: 4610; WAN0249QS; Start 66; Stop 90
gttcagtagatgcaaatggattcgg

SEQ ID NO: 386644 - DNA, 25 bp, Artificial
  probe
  misc_feature (1)..(25): SEQ ID NO: 4610; WAN0249QS; Start 113; Stop 137
aactagaatagtacacctctgtttc

SEQ ID NO: 386645 - DNA, 25 bp, Artificial
  probe
  misc_feature (1)..(25): SEQ ID NO: 4610; WAN0249QS; Start 111; Stop 135
gaaactagaatagtacacctctgtt

SEQ ID NO: 386646 - DNA, 25 bp, Artificial
  probe
  misc_feature (1)..(25): SEQ ID NO: 4610; WAN0249QS; Start 68; Stop 92
tcagtagatgcaaatggattcggaa

SEQ ID NO: 386647 - DNA, 25 bp, Artificial
  probe
  misc_feature (1)..(25): SEQ ID NO: 4610; WAN0249QS; Start 67; Stop 91
ttcagtagatgcaaatggattcgga

SEQ ID NO: 386648 - DNA, 25 bp, Artificial
  probe
  misc_feature (1)..(25): SEQ ID NO: 4610; WAN0249QS; Start 114; Stop 138
actagaatagtacacctctgtttct

SEQ ID NO: 386649 - DNA, 25 bp, Artificial
  probe
  misc_feature (1)..(25): SEQ ID NO: 4610; WAN0249QS; Start 112; Stop 136
aaactagaatagtacacctctgttt

SEQ ID NO: 386650 - DNA, 25 bp, Artificial
  probe
  misc_feature (1)..(25): SEQ ID NO: 4610; WAN0249QS; Start 166; Stop 190
gtcctgatcgatttgtcctgttatt

SEQ ID NO: 386651 - DNA, 25 bp, Artificial
  probe
  misc_feature (1)..(25): SEQ ID NO: 4610; WAN0249QS; Start 117; Stop 141
agaatagtacacctctgtttctaaa

SEQ ID NO: 386652 - DNA, 25 bp, Artificial
  probe
  misc_feature (1)..(25): SEQ ID NO: 4610; WAN0249QS; Start 70; Stop 94
agtagatgcaaatggattcggaagc

SEQ ID NO: 386653 - DNA, 25 bp, Artificial
  probe
  misc_feature (1)..(25): SEQ ID NO: 4610; WAN0249QS; Start 62; Stop 86
aaaagttcagtagatgcaaatggat

SEQ ID NO: 386654 - DNA, 25 bp, Artificial
  probe
  misc_feature (1)..(25): SEQ ID NO: 4610; WAN0249QS; Start 165; Stop 189
tgtcctgatcgatttgtcctgttat

SEQ ID NO: 386655 - DNA, 25 bp, Artificial
  probe
  misc_feature (1)..(25): SEQ ID NO: 4610; WAN0249QS; Start 164; Stop 188
ctgtcctgatcgatttgtcctgtta

SEQ ID NO: 386656 - DNA, 25 bp, Artificial
  probe
  misc_feature (1)..(25): SEQ ID NO: 4610; WAN0249QS; Start 77; Stop 101
gcaaatggattcggaagcgatgtta

SEQ ID NO: 386657 - DNA, 25 bp, Artificial
  probe
  misc_feature (1)..(25): SEQ ID NO: 4610; WAN0249QS; Start 71; Stop 95
gtagatgcaaatggattcggaagcg

SEQ ID NO: 386658 - DNA, 25 bp, Artificial
  probe
  misc_feature (1)..(25): SEQ ID NO: 4610; WAN0249QS; Start 118; Stop 142
gaatagtacacctctgtttctaaaa

SEQ ID NO: 386659 - DNA, 25 bp, Artificial
  probe
  misc_feature (1)..(25): SEQ ID NO: 4610; WAN0249QS; Start 115; Stop 139
ctagaatagtacacctctgtttcta

SEQ ID NO: 386660 - DNA, 25 bp, Artificial
  probe
  misc_feature (1)..(25): SEQ ID NO: 4610; WAN0249QS; Start 119; Stop 143
aatagtacacctctgtttctaaaac

SEQ ID NO: 386661 - DNA, 25 bp, Artificial
  probe
  misc_feature (1)..(25): SEQ ID NO: 4611; WAN0249Q7; Start 44; Stop 68
atgaagcaaacattcccacaataaa

SEQ ID NO: 386662 - DNA, 25 bp, Artificial
  probe
  misc_feature (1)..(25): SEQ ID NO: 4611; WAN0249Q7; Start 43; Stop 67
aatgaagcaaacattcccacaataa

SEQ ID NO: 386663 - DNA, 25 bp, Artificial
  probe
  misc_feature (1)..(25): SEQ ID NO: 4611; WAN0249Q7; Start 42; Stop 66
aaatgaagcaaacattcccacaata

SEQ ID NO: 386664 - DNA, 25 bp, Artificial
  probe
  misc_feature (1)..(25): SEQ ID NO: 4611; WAN0249Q7; Start 54; Stop 78
cattcccacaataaaacgcatagta

SEQ ID NO: 386665 - DNA, 25 bp, Artificial
  probe
  misc_feature (1)..(25): SEQ ID NO: 4611; WAN0249Q7; Start 51; Stop 75
aaacattcccacaataaaacgcata

SEQ ID NO: 386666 - DNA, 25 bp, Artificial
  probe
  misc_feature (1)..(25): SEQ ID NO: 4611; WAN0249Q7; Start 52; Stop 76
aacattcccacaataaaacgcatag

SEQ ID NO: 386667 - DNA, 25 bp, Artificial
  probe
  misc_feature (1)..(25): SEQ ID NO: 4611; WAN0249Q7; Start 46; Stop 70
gaagcaaacattcccacaataaaac

SEQ ID NO: 386668 - DNA, 25 bp, Artificial
  probe
  misc_feature (1)..(25): SEQ ID NO: 4611; WAN0249Q7; Start 45; Stop 69
tgaagcaaacattcccacaataaaa

SEQ ID NO: 386669 - DNA, 25 bp, Artificial
  probe
  misc_feature (1)..(25): SEQ ID NO: 4611; WAN0249Q7; Start 53; Stop 77
acattcccacaataaaacgcatagt

SEQ ID NO: 386670 - DNA, 25 bp, Artificial
  probe
  misc_feature (1)..(25): SEQ ID NO: 4611; WAN0249Q7; Start 50; Stop 74
caaacattcccacaataaaacgcat

SEQ ID NO: 386671 - DNA, 25 bp, Artificial
  probe
  misc_feature (1)..(25): SEQ ID NO: 4611; WAN0249Q7; Start 47; Stop 71
aagcaaacattcccacaataaaacg

SEQ ID NO: 386672 - DNA, 25 bp, Artificial
  probe
  misc_feature (1)..(25): SEQ ID NO: 4611; WAN0249Q7; Start 60; Stop 84
cacaataaaacgcatagtacaaggt

SEQ ID NO: 386673 - DNA, 25 bp, Artificial
  probe
  misc_feature (1)..(25): SEQ ID NO: 4611; WAN0249Q7; Start 55; Stop 79
attcccacaataaaacgcatagtac

SEQ ID NO: 386674 - DNA, 25 bp, Artificial
  probe
  misc_feature (1)..(25): SEQ ID NO: 4611; WAN0249Q7; Start 59; Stop 83
ccacaataaaacgcatagtacaagg

SEQ ID NO: 386675 - DNA, 25 bp, Artificial
  probe
  misc_feature (1)..(25): SEQ ID NO: 4611; WAN0249Q7; Start 58; Stop 82
cccacaataaaacgcatagtacaag

SEQ ID NO: 386676 - DNA, 25 bp, Artificial
  probe
  misc_feature (1)..(25): SEQ ID NO: 4611; WAN0249Q7; Start 57; Stop 81
tcccacaataaaacgcatagtacaa

SEQ ID NO: 386677 - DNA, 25 bp, Artificial
  probe
  misc_feature (1)..(25): SEQ ID NO: 4611; WAN0249Q7; Start 56; Stop 80
ttcccacaataaaacgcatagtaca

SEQ ID NO: 386678 - DNA, 25 bp, Artificial
  probe
  misc_feature (1)..(25): SEQ ID NO: 4611; WAN0249Q7; Start 61; Stop 85
acaataaaacgcatagtacaaggtt

SEQ ID NO: 386679 - DNA, 25 bp, Artificial
  probe
  misc_feature (1)..(25): SEQ ID NO: 4611; WAN0249Q7; Start 41; Stop 65
aaaatgaagcaaacattcccacaat

SEQ ID NO: 386680 - DNA, 25 bp, Artificial
  probe
  misc_feature (1)..(25): SEQ ID NO: 4611; WAN0249Q7; Start 48; Stop 72
agcaaacattcccacaataaaacgc

SEQ ID NO: 386681 - DNA, 25 bp, Artificial
  probe
  misc_feature (1)..(25): SEQ ID NO: 4611; WAN0249Q7; Start 49; Stop 73
gcaaacattcccacaataaaacgca

SEQ ID NO: 386682 - DNA, 25 bp, Artificial
  probe
  misc_feature (1)..(25): SEQ ID NO: 4611; WAN0249Q7; Start 63; Stop 87
aataaaacgcatagtacaaggtttg

SEQ ID NO: 386683 - DNA, 25 bp, Artificial
  probe
  misc_feature (1)..(25): SEQ ID NO: 4611; WAN0249Q7; Start 62; Stop 86
caataaaacgcatagtacaaggttt

SEQ ID NO: 386684 - DNA, 25 bp, Artificial
  probe
  misc_feature (1)..(25): SEQ ID NO: 4611; WAN0249Q7; Start 64; Stop 88
ataaaacgcatagtacaaggtttgt

SEQ ID NO: 386685 - DNA, 25 bp, Artificial
  probe
  misc_feature (1)..(25): SEQ ID NO: 4611; WAN0249Q7; Start 65; Stop 89
taaaacgcatagtacaaggtttgta

SEQ ID NO: 386686 - DNA, 25 bp, Artificial
  probe
  misc_feature (1)..(25): SEQ ID NO: 4612; WAN0249ZR; Start 30; Stop 54
cttacatcaactccaacatccgtat

SEQ ID NO: 386687 - DNA, 25 bp, Artificial
  probe
  misc_feature (1)..(25): SEQ ID NO: 4612; WAN0249ZR; Start 31; Stop 55
ttacatcaactccaacatccgtatc

SEQ ID NO: 386688 - DNA, 25 bp, Artificial
  probe
  misc_feature (1)..(25): SEQ ID NO: 4612; WAN0249ZR; Start 25; Stop 49
agcatcttacatcaactccaacatc

SEQ ID NO: 386689 - DNA, 25 bp, Artificial
  probe
  misc_feature (1)..(25): SEQ ID NO: 4612; WAN0249ZR; Start 24; Stop 48
aagcatcttacatcaactccaacat

SEQ ID NO: 386690 - DNA, 25 bp, Artificial
  probe
  misc_feature (1)..(25): SEQ ID NO: 4612; WAN0249ZR; Start 32; Stop 56
tacatcaactccaacatccgtatct

SEQ ID NO: 386691 - DNA, 25 bp, Artificial
  probe
  misc_feature (1)..(25): SEQ ID NO: 4612; WAN0249ZR; Start 29; Stop 53
tcttacatcaactccaacatccgta

SEQ ID NO: 386692 - DNA, 25 bp, Artificial
  probe
  misc_feature (1)..(25): SEQ ID NO: 4612; WAN0249ZR; Start 27; Stop 51
catcttacatcaactccaacatccg

SEQ ID NO: 386693 - DNA, 25 bp, Artificial
  probe
  misc_feature (1)..(25): SEQ ID NO: 4612; WAN0249ZR; Start 26; Stop 50
gcatcttacatcaactccaacatcc

SEQ ID NO: 386694 - DNA, 25 bp, Artificial
  probe
  misc_feature (1)..(25): SEQ ID NO: 4612; WAN0249ZR; Start 28; Stop 52
atcttacatcaactccaacatccgt

SEQ ID NO: 386695 - DNA, 25 bp, Artificial
  probe
  misc_feature (1)..(25): SEQ ID NO: 4612; WAN0249ZR; Start 35; Stop 59
atcaactccaacatccgtatctgta

SEQ ID NO: 386696 - DNA, 25 bp, Artificial
  probe
  misc_feature (1)..(25): SEQ ID NO: 4612; WAN0249ZR; Start 38; Stop 62
aactccaacatccgtatctgtagag

SEQ ID NO: 386697 - DNA, 25 bp, Artificial
  probe
  misc_feature (1)..(25): SEQ ID NO: 4612; WAN0249ZR; Start 33; Stop 57
acatcaactccaacatccgtatctg

SEQ ID NO: 386698 - DNA, 25 bp, Artificial
  probe
  misc_feature (1)..(25): SEQ ID NO: 4612; WAN0249ZR; Start 37; Stop 61
caactccaacatccgtatctgtaga

SEQ ID NO: 386699 - DNA, 25 bp, Artificial
  probe
  misc_feature (1)..(25): SEQ ID NO: 4612; WAN0249ZR; Start 36; Stop 60
tcaactccaacatccgtatctgtag

SEQ ID NO: 386700 - DNA, 25 bp, Artificial
  probe
  misc_feature (1)..(25): SEQ ID NO: 4612; WAN0249ZR; Start 39; Stop 63
actccaacatccgtatctgtagaga

SEQ ID NO: 386701 - DNA, 25 bp, Artificial
  probe
  misc_feature (1)..(25): SEQ ID NO: 4612; WAN0249ZR; Start 42; Stop 66
ccaacatccgtatctgtagagatta

SEQ ID NO: 386702 - DNA, 25 bp, Artificial
  probe
  misc_feature (1)..(25): SEQ ID NO: 4612; WAN0249ZR; Start 22; Stop 46
caaagcatcttacatcaactccaac

SEQ ID NO: 386703 - DNA, 25 bp, Artificial
  probe
  misc_feature (1)..(25): SEQ ID NO: 4612; WAN0249ZR; Start 23; Stop 47
aaagcatcttacatcaactccaaca

SEQ ID NO: 386704 - DNA, 25 bp, Artificial
  probe
  misc_feature (1)..(25): SEQ ID NO: 4612; WAN0249ZR; Start 41; Stop 65
tccaacatccgtatctgtagagatt

SEQ ID NO: 386705 - DNA, 25 bp, Artificial
  probe
  misc_feature (1)..(25): SEQ ID NO: 4612; WAN0249ZR; Start 34; Stop 58
catcaactccaacatccgtatctgt

SEQ ID NO: 386706 - DNA, 25 bp, Artificial
  probe
  misc_feature (1)..(25): SEQ ID NO: 4612; WAN0249ZR; Start 40; Stop 64
ctccaacatccgtatctgtagagat

SEQ ID NO: 386707 - DNA, 25 bp, Artificial
  probe
  misc_feature (1)..(25): SEQ ID NO: 4612; WAN0249ZR; Start 21; Stop 45
ccaaagcatcttacatcaactccaa

SEQ ID NO: 386708 - DNA, 25 bp, Artificial
  probe
  misc_feature (1)..(25): SEQ ID NO: 4612; WAN0249ZR; Start 18; Stop 42
aagccaaagcatcttacatcaactc

SEQ ID NO: 386709 - DNA, 25 bp, Artificial
  probe
  misc_feature (1)..(25): SEQ ID NO: 4612; WAN0249ZR; Start 17; Stop 41
caagccaaagcatcttacatcaact

SEQ ID NO: 386710 - DNA, 25 bp, Artificial
  probe
  misc_feature (1)..(25): SEQ ID NO: 4612; WAN0249ZR; Start 48; Stop 72
tccgtatctgtagagattatgtagt

SEQ ID NO: 386711 - DNA, 25 bp, Artificial
  probe
  misc_feature (1)..(25): SEQ ID NO: 4612; WAN0249ZR; Start 44; Stop 68
aacatccgtatctgtagagattatg

SEQ ID NO: 386712 - DNA, 25 bp, Artificial
  probe
  misc_feature (1)..(25): SEQ ID NO: 4612; WAN0249ZR; Start 43; Stop 67
caacatccgtatctgtagagattat

SEQ ID NO: 386713 - DNA, 25 bp, Artificial
  probe
  misc_feature (1)..(25): SEQ ID NO: 4612; WAN0249ZR; Start 45; Stop 69
acatccgtatctgtagagattatgt

SEQ ID NO: 386714 - DNA, 25 bp, Artificial
  probe
  misc_feature (1)..(25): SEQ ID NO: 4612; WAN0249ZR; Start 13; Stop 37
ctagcaagccaaagcatcttacatc

SEQ ID NO: 386715 - DNA, 25 bp, Artificial
  probe
  misc_feature (1)..(25): SEQ ID NO: 4612; WAN0249ZR; Start 14; Stop 38
tagcaagccaaagcatcttacatca

SEQ ID NO: 386716 - DNA, 25 bp, Artificial
  probe
  misc_feature (1)..(25): SEQ ID NO: 4612; WAN0249ZR; Start 49; Stop 73
ccgtatctgtagagattatgtagtt

SEQ ID NO: 386717 - DNA, 25 bp, Artificial
  probe
  misc_feature (1)..(25): SEQ ID NO: 4612; WAN0249ZR; Start 12; Stop 36
tctagcaagccaaagcatcttacat

SEQ ID NO: 386718 - DNA, 25 bp, Artificial
  probe
  misc_feature (1)..(25): SEQ ID NO: 4612; WAN0249ZR; Start 46; Stop 70
catccgtatctgtagagattatgta

SEQ ID NO: 386719 - DNA, 25 bp, Artificial
  probe
  misc_feature (1)..(25): SEQ ID NO: 4613; WAN024AEL; Start 3; Stop 27
cacctagacgaaagcaaccatattc

SEQ ID NO: 386720 - DNA, 25 bp, Artificial
  probe
  misc_feature (1)..(25): SEQ ID NO: 4613; WAN024AEL; Start 12; Stop 36
gaaagcaaccatattcgtaccatcg

SEQ ID NO: 386721 - DNA, 25 bp, Artificial
  probe
  misc_feature (1)..(25): SEQ ID NO: 4613; WAN024AEL; Start 2; Stop 26
ccacctagacgaaagcaaccatatt

SEQ ID NO: 386722 - DNA, 25 bp, Artificial
  probe
  misc_feature (1)..(25): SEQ ID NO: 4613; WAN024AEL; Start 18; Stop 42
aaccatattcgtaccatcgggaaag

SEQ ID NO: 386723 - DNA, 25 bp, Artificial
  probe
  misc_feature (1)..(25): SEQ ID NO: 4613; WAN024AEL; Start 17; Stop 41
caaccatattcgtaccatcgggaaa

SEQ ID NO: 386724 - DNA, 25 bp, Artificial
  probe
  misc_feature (1)..(25): SEQ ID NO: 4613; WAN024AEL; Start 1; Stop 25
tccacctagacgaaagcaaccatat

SEQ ID NO: 386725 - DNA, 25 bp, Artificial
  probe
  misc_feature (1)..(25): SEQ ID NO: 4613; WAN024AEL; Start 13; Stop 37
aaagcaaccatattcgtaccatcgg

SEQ ID NO: 386726 - DNA, 25 bp, Artificial
  probe
  misc_feature (1)..(25): SEQ ID NO: 4613; WAN024AEL; Start 44; Stop 68
tgtcaggctatatagggagaattaa

SEQ ID NO: 386727 - DNA, 25 bp, Artificial
  probe
  misc_feature (1)..(25): SEQ ID NO: 4613; WAN024AEL; Start 45; Stop 69
gtcaggctatatagggagaattaaa

SEQ ID NO: 386728 - DNA, 25 bp, Artificial
  probe
  misc_feature (1)..(25): SEQ ID NO: 4613; WAN024AEL; Start 14; Stop 38
aagcaaccatattcgtaccatcggg

SEQ ID NO: 386729 - DNA, 25 bp, Artificial
  probe
  misc_feature (1)..(25): SEQ ID NO: 4613; WAN024AEL; Start 16; Stop 40
gcaaccatattcgtaccatcgggaa

SEQ ID NO: 386730 - DNA, 25 bp, Artificial
  probe
  misc_feature (1)..(25): SEQ ID NO: 4613; WAN024AEL; Start 11; Stop 35
cgaaagcaaccatattcgtaccatc

SEQ ID NO: 386731 - DNA, 25 bp, Artificial
  probe
  misc_feature (1)..(25): SEQ ID NO: 4613; WAN024AEL; Start 4; Stop 28
acctagacgaaagcaaccatattcg

SEQ ID NO: 386732 - DNA, 25 bp, Artificial
  probe
  misc_feature (1)..(25): SEQ ID NO: 4613; WAN024AEL; Start 46; Stop 70
tcaggctatatagggagaattaaaa

SEQ ID NO: 386733 - DNA, 25 bp, Artificial
  probe
  misc_feature (1)..(25): SEQ ID NO: 4613; WAN024AEL; Start 96; Stop 120
caaacagattttaaaagattcgaaa

SEQ ID NO: 386734 - DNA, 25 bp, Artificial
  probe
  misc_feature (1)..(25): SEQ ID NO: 4614; WAN024A8G; Start 176; Stop 200
ttgaagtgtattccgtacctaagaa

SEQ ID NO: 386735 - DNA, 25 bp, Artificial
  probe
  misc_feature (1)..(25): SEQ ID NO: 4614; WAN024A8G; Start 175; Stop 199
attgaagtgtattccgtacctaaga

SEQ ID NO: 386736 - DNA, 25 bp, Artificial
  probe
  misc_feature (1)..(25): SEQ ID NO: 4614; WAN024A8G; Start 174; Stop 198
cattgaagtgtattccgtacctaag

SEQ ID NO: 386737 - DNA, 25 bp, Artificial
  probe
  misc_feature (1)..(25): SEQ ID NO: 4614; WAN024A8G; Start 252; Stop 276
ttcagtagccagacttattctatct

SEQ ID NO: 386738 - DNA, 25 bp, Artificial
  probe
  misc_feature (1)..(25): SEQ ID NO: 4614; WAN024A8G; Start 173; Stop 197
acattgaagtgtattccgtacctaa

SEQ ID NO: 386739 - DNA, 25 bp, Artificial
  probe
  misc_feature (1)..(25): SEQ ID NO: 4614; WAN024A8G; Start 172; Stop 196
cacattgaagtgtattccgtaccta

SEQ ID NO: 386740 - DNA, 25 bp, Artificial
  probe
  misc_feature (1)..(25): SEQ ID NO: 4614; WAN024A8G; Start 253; Stop 277
tcagtagccagacttattctatcta

SEQ ID NO: 386741 - DNA, 25 bp, Artificial
  probe
  misc_feature (1)..(25): SEQ ID NO: 4614; WAN024A8G; Start 152; Stop 176
acattaagatactgggacaacacat

SEQ ID NO: 386742 - DNA, 25 bp, Artificial
  probe
  misc_feature (1)..(25): SEQ ID NO: 4614; WAN024A8G; Start 151; Stop 175
gacattaagatactgggacaacaca

SEQ ID NO: 386743 - DNA, 25 bp, Artificial
  probe
  misc_feature (1)..(25): SEQ ID NO: 4614; WAN024A8G; Start 153; Stop 177
cattaagatactgggacaacacatt

SEQ ID NO: 386744 - DNA, 25 bp, Artificial
  probe
  misc_feature (1)..(25): SEQ ID NO: 4614; WAN024A8G; Start 121; Stop 145
gatggcgataaatcagacaatctac

SEQ ID NO: 386745 - DNA, 25 bp, Artificial
  probe
  misc_feature (1)..(25): SEQ ID NO: 4614; WAN024A8G; Start 156; Stop 180
taagatactgggacaacacattgaa

SEQ ID NO: 386746 - DNA, 25 bp, Artificial
  probe
  misc_feature (1)..(25): SEQ ID NO: 4614; WAN024A8G; Start 155; Stop 179
ttaagatactgggacaacacattga

SEQ ID NO: 386747 - DNA, 25 bp, Artificial
  probe
  misc_feature (1)..(25): SEQ ID NO: 4614; WAN024A8G; Start 125; Stop 149
gcgataaatcagacaatctaccagt

SEQ ID NO: 386748 - DNA, 25 bp, Artificial
  probe
  misc_feature (1)..(25): SEQ ID NO: 4614; WAN024A8G; Start 122; Stop 146
atggcgataaatcagacaatctacc

SEQ ID NO: 386749 - DNA, 25 bp, Artificial
  probe
  misc_feature (1)..(25): SEQ ID NO: 4614; WAN024A8G; Start 91; Stop 115
tcttctgatatcgaattagagtccg

SEQ ID NO: 386750 - DNA, 25 bp, Artificial
  probe
  misc_feature (1)..(25): SEQ ID NO: 4614; WAN024A8G; Start 254; Stop 278
cagtagccagacttattctatctaa

SEQ ID NO: 386751 - DNA, 25 bp, Artificial
  probe
  misc_feature (1)..(25): SEQ ID NO: 4614; WAN024A8G; Start 150; Stop 174
cgacattaagatactgggacaacac

SEQ ID NO: 386752 - DNA, 25 bp, Artificial
  probe
  misc_feature (1)..(25): SEQ ID NO: 4614; WAN024A8G; Start 154; Stop 178
attaagatactgggacaacacattg

SEQ ID NO: 386753 - DNA, 25 bp, Artificial
  probe
  misc_feature (1)..(25): SEQ ID NO: 4614; WAN024A8G; Start 157; Stop 181
aagatactgggacaacacattgaag

SEQ ID NO: 386754 - DNA, 25 bp, Artificial
  probe
  misc_feature (1)..(25): SEQ ID NO: 4614; WAN024A8G; Start 124; Stop 148
ggcgataaatcagacaatctaccag

SEQ ID NO: 386755 - DNA, 25 bp, Artificial
  probe
  misc_feature (1)..(25): SEQ ID NO: 4614; WAN024A8G; Start 177; Stop 201
tgaagtgtattccgtacctaagaaa

SEQ ID NO: 386756 - DNA, 25 bp, Artificial
  probe
  misc_feature (1)..(25): SEQ ID NO: 4614; WAN024A8G; Start 107; Stop 131
tagagtccgatgttgatggcgataa

SEQ ID NO: 386757 - DNA, 25 bp, Artificial
  probe
  misc_feature (1)..(25): SEQ ID NO: 4614; WAN024A8G; Start 106; Stop 130
ttagagtccgatgttgatggcgata

SEQ ID NO: 386758 - DNA, 25 bp, Artificial
  probe
  misc_feature (1)..(25): SEQ ID NO: 4614; WAN024A8G; Start 178; Stop 202
gaagtgtattccgtacctaagaaac

SEQ ID NO: 386759 - DNA, 25 bp, Artificial
  probe
  misc_feature (1)..(25): SEQ ID NO: 4614; WAN024A8G; Start 258; Stop 282
agccagacttattctatctaataca

SEQ ID NO: 386760 - DNA, 25 bp, Artificial
  probe
  misc_feature (1)..(25): SEQ ID NO: 4614; WAN024A8G; Start 127; Stop 151
gataaatcagacaatctaccagtcg

SEQ ID NO: 386761 - DNA, 25 bp, Artificial
  probe
  misc_feature (1)..(25): SEQ ID NO: 4614; WAN024A8G; Start 126; Stop 150
cgataaatcagacaatctaccagtc

SEQ ID NO: 386762 - DNA, 25 bp, Artificial
  probe
  misc_feature (1)..(25): SEQ ID NO: 4614; WAN024A8G; Start 183; Stop 207
gtattccgtacctaagaaacaatca

SEQ ID NO: 386763 - DNA, 25 bp, Artificial
  probe
  misc_feature (1)..(25): SEQ ID NO: 4614; WAN024A8G; Start 180; Stop 204
agtgtattccgtacctaagaaacaa

SEQ ID NO: 386764 - DNA, 25 bp, Artificial
  probe
  misc_feature (1)..(25): SEQ ID NO: 4614; WAN024A8G; Start 179; Stop 203
aagtgtattccgtacctaagaaaca

SEQ ID NO: 386765 - DNA, 25 bp, Artificial
  probe
  misc_feature (1)..(25): SEQ ID NO: 4614; WAN024A8G; Start 158; Stop 182
agatactgggacaacacattgaagt

SEQ ID NO: 386766 - DNA, 25 bp, Artificial
  probe
  misc_feature (1)..(25): SEQ ID NO: 4614; WAN024A8G; Start 187; Stop 211
tccgtacctaagaaacaatcataaa

SEQ ID NO: 386767 - DNA, 25 bp, Artificial
  probe
  misc_feature (1)..(25): SEQ ID NO: 4615; WAN024FAI; Start 122; Stop 146
ttctgctgaatataggtccacaatt

SEQ ID NO: 386768 - DNA, 25 bp, Artificial
  probe
  misc_feature (1)..(25): SEQ ID NO: 4615; WAN024FAI; Start 222; Stop 246
tatgattcagcagatattctcgcat

SEQ ID NO: 386769 - DNA, 25 bp, Artificial
  probe
  misc_feature (1)..(25): SEQ ID NO: 4615; WAN024FAI; Start 221; Stop 245
atatgattcagcagatattctcgca

SEQ ID NO: 386770 - DNA, 25 bp, Artificial
  probe
  misc_feature (1)..(25): SEQ ID NO: 4615; WAN024FAI; Start 223; Stop 247
atgattcagcagatattctcgcatt

SEQ ID NO: 386771 - DNA, 25 bp, Artificial
  probe
  misc_feature (1)..(25): SEQ ID NO: 4615; WAN024FAI; Start 324; Stop 348
taatcatcacttgctcattgacaga

SEQ ID NO: 386772 - DNA, 25 bp, Artificial
  probe
  misc_feature (1)..(25): SEQ ID NO: 4615; WAN024FAI; Start 323; Stop 347
ttaatcatcacttgctcattgacag

SEQ ID NO: 386773 - DNA, 25 bp, Artificial
  probe
  misc_feature (1)..(25): SEQ ID NO: 4615; WAN024FAI; Start 322; Stop 346
cttaatcatcacttgctcattgaca

SEQ ID NO: 386774 - DNA, 25 bp, Artificial
  probe
  misc_feature (1)..(25): SEQ ID NO: 4615; WAN024FAI; Start 321; Stop 345
acttaatcatcacttgctcattgac

SEQ ID NO: 386775 - DNA, 25 bp, Artificial
  probe
  misc_feature (1)..(25): SEQ ID NO: 4615; WAN024FAI; Start 320; Stop 344
cacttaatcatcacttgctcattga

SEQ ID NO: 386776 - DNA, 25 bp, Artificial
  probe
  misc_feature (1)..(25): SEQ ID NO: 4615; WAN024FAI; Start 325; Stop 349
aatcatcacttgctcattgacagac

SEQ ID NO: 386777 - DNA, 25 bp, Artificial
  probe
  misc_feature (1)..(25): SEQ ID NO: 4615; WAN024FAI; Start 326; Stop 350
atcatcacttgctcattgacagact

SEQ ID NO: 386778 - DNA, 25 bp, Artificial
  probe
  misc_feature (1)..(25): SEQ ID NO: 4615; WAN024FAI; Start 83; Stop 107
aacatggtcttacgaatagcctgaa

SEQ ID NO: 386779 - DNA, 25 bp, Artificial
  probe
  misc_feature (1)..(25): SEQ ID NO: 4615; WAN024FAI; Start 13; Stop 37
tttggtgatttgatagacgacattg

SEQ ID NO: 386780 - DNA, 25 bp, Artificial
  probe
  misc_feature (1)..(25): SEQ ID NO: 4615; WAN024FAI; Start 9; Stop 33
cagatttggtgatttgatagacgac

SEQ ID NO: 386781 - DNA, 25 bp, Artificial
  probe
  misc_feature (1)..(25): SEQ ID NO: 4615; WAN024FAI; Start 10; Stop 34
agatttggtgatttgatagacgaca

SEQ ID NO: 386782 - DNA, 25 bp, Artificial
  probe
  misc_feature (1)..(25): SEQ ID NO: 4615; WAN024FAI; Start 8; Stop 32
acagatttggtgatttgatagacga

SEQ ID NO: 386783 - DNA, 25 bp, Artificial
  probe
  misc_feature (1)..(25): SEQ ID NO: 4615; WAN024FAI; Start 7; Stop 31
aacagatttggtgatttgatagacg

SEQ ID NO: 386784 - DNA, 25 bp, Artificial
  probe
  misc_feature (1)..(25): SEQ ID NO: 4615; WAN024FAI; Start 20; Stop 44
atttgatagacgacattggacagtt

SEQ ID NO: 386785 - DNA, 25 bp, Artificial
  probe
  misc_feature (1)..(25): SEQ ID NO: 4615; WAN024FAI; Start 11; Stop 35
gatttggtgatttgatagacgacat

SEQ ID NO: 386786 - DNA, 25 bp, Artificial
  probe
  misc_feature (1)..(25): SEQ ID NO: 4615; WAN024FAI; Start 359; Stop 383
cgcccaatcaaataacgatagaaat

SEQ ID NO: 386787 - DNA, 25 bp, Artificial
  probe
  misc_feature (1)..(25): SEQ ID NO: 4615; WAN024FAI; Start 21; Stop 45
tttgatagacgacattggacagttt

SEQ ID NO: 386788 - DNA, 25 bp, Artificial
  probe
  misc_feature (1)..(25): SEQ ID NO: 4615; WAN024FAI; Start 220; Stop 244
aatatgattcagcagatattctcgc

SEQ ID NO: 386789 - DNA, 25 bp, Artificial
  probe
  misc_feature (1)..(25): SEQ ID NO: 4615; WAN024FAI; Start 19; Stop 43
gatttgatagacgacattggacagt

SEQ ID NO: 386790 - DNA, 25 bp, Artificial
  probe
  misc_feature (1)..(25): SEQ ID NO: 4615; WAN024FAI; Start 18; Stop 42
tgatttgatagacgacattggacag

SEQ ID NO: 386791 - DNA, 25 bp, Artificial
  probe
  misc_feature (1)..(25): SEQ ID NO: 4615; WAN024FAI; Start 12; Stop 36
atttggtgatttgatagacgacatt

SEQ ID NO: 386792 - DNA, 25 bp, Artificial
  probe
  misc_feature (1)..(25): SEQ ID NO: 4615; WAN024FAI; Start 121; Stop 145
tttctgctgaatataggtccacaat

SEQ ID NO: 386793 - DNA, 25 bp, Artificial
  probe
  misc_feature (1)..(25): SEQ ID NO: 4615; WAN024FAI; Start 97; Stop 121
aatagcctgaaagacttctggattt

SEQ ID NO: 386794 - DNA, 25 bp, Artificial
  probe
  misc_feature (1)..(25): SEQ ID NO: 4615; WAN024FAI; Start 91; Stop 115
cttacgaatagcctgaaagacttct

SEQ ID NO: 386795 - DNA, 25 bp, Artificial
  probe
  misc_feature (1)..(25): SEQ ID NO: 4615; WAN024FAI; Start 96; Stop 120
gaatagcctgaaagacttctggatt

SEQ ID NO: 386796 - DNA, 25 bp, Artificial
  probe
  misc_feature (1)..(25): SEQ ID NO: 4615; WAN024FAI; Start 17; Stop 41
gtgatttgatagacgacattggaca

SEQ ID NO: 386797 - DNA, 25 bp, Artificial
  probe
  misc_feature (1)..(25): SEQ ID NO: 4615; WAN024FAI; Start 92; Stop 116
ttacgaatagcctgaaagacttctg

SEQ ID NO: 386798 - DNA, 25 bp, Artificial
  probe
  misc_feature (1)..(25): SEQ ID NO: 4615; WAN024FAI; Start 80; Stop 104
ctcaacatggtcttacgaatagcct

SEQ ID NO: 386799 - DNA, 25 bp, Artificial
  probe
  misc_feature (1)..(25): SEQ ID NO: 4615; WAN024FAI; Start 311; Stop 335
tggtcaatgcacttaatcatcactt

SEQ ID NO: 386800 - DNA, 25 bp, Artificial
  probe
  misc_feature (1)..(25): SEQ ID NO: 4616; WAN024AE5; Start 15; Stop 39
gctcaatttctttgtgacttggttt

SEQ ID NO: 386801 - DNA, 25 bp, Artificial
  probe
  misc_feature (1)..(25): SEQ ID NO: 4616; WAN024AE5; Start 167; Stop 191
tgtaagattgggtgaaatataagca

SEQ ID NO: 386802 - DNA, 25 bp, Artificial
  probe
  misc_feature (1)..(25): SEQ ID NO: 4616; WAN024AE5; Start 120; Stop 144
gcttgccataacctaaccttacaaa

SEQ ID NO: 386803 - DNA, 25 bp, Artificial
  probe
  misc_feature (1)..(25): SEQ ID NO: 4616; WAN024AE5; Start 310; Stop 334
acataccattcaatttaacacttgc

SEQ ID NO: 386804 - DNA, 25 bp, Artificial
  probe
  misc_feature (1)..(25): SEQ ID NO: 4616; WAN024AE5; Start 119; Stop 143
cgcttgccataacctaaccttacaa

SEQ ID NO: 386805 - DNA, 25 bp, Artificial
  probe
  misc_feature (1)..(25): SEQ ID NO: 4616; WAN024AE5; Start 338; Stop 362
tcgttcaacctataaggaaagaagg

SEQ ID NO: 386806 - DNA, 25 bp, Artificial
  probe
  misc_feature (1)..(25): SEQ ID NO: 4616; WAN024AE5; Start 336; Stop 360
agtcgttcaacctataaggaaagaa

SEQ ID NO: 386807 - DNA, 25 bp, Artificial
  probe
  misc_feature (1)..(25): SEQ ID NO: 4616; WAN024AE5; Start 335; Stop 359
aagtcgttcaacctataaggaaaga

SEQ ID NO: 386808 - DNA, 25 bp, Artificial
  probe
  misc_feature (1)..(25): SEQ ID NO: 4616; WAN024AE5; Start 334; Stop 358
caagtcgttcaacctataaggaaag

SEQ ID NO: 386809 - DNA, 25 bp, Artificial
  probe
  misc_feature (1)..(25): SEQ ID NO: 4616; WAN024AE5; Start 337; Stop 361
gtcgttcaacctataaggaaagaag

SEQ ID NO: 386810 - DNA, 25 bp, Artificial
  probe
  misc_feature (1)..(25): SEQ ID NO: 4616; WAN024AE5; Start 333; Stop 357
gcaagtcgttcaacctataaggaaa

SEQ ID NO: 386811 - DNA, 25 bp, Artificial
  probe
  misc_feature (1)..(25): SEQ ID NO: 4616; WAN024AE5; Start 166; Stop 190
ttgtaagattgggtgaaatataagc

SEQ ID NO: 386812 - DNA, 25 bp, Artificial
  probe
  misc_feature (1)..(25): SEQ ID NO: 4616; WAN024AE5; Start 78; Stop 102
tcctttgttctttatgagtctagtt

SEQ ID NO: 386813 - DNA, 25 bp, Artificial
  probe
  misc_feature (1)..(25): SEQ ID NO: 4616; WAN024AE5; Start 69; Stop 93
tgatgttactcctttgttctttatg

SEQ ID NO: 386814 - DNA, 25 bp, Artificial
  probe
  misc_feature (1)..(25): SEQ ID NO: 4616; WAN024AE5; Start 77; Stop 101
ctcctttgttctttatgagtctagt

SEQ ID NO: 386815 - DNA, 25 bp, Artificial
  probe
  misc_feature (1)..(25): SEQ ID NO: 4616; WAN024AE5; Start 168; Stop 192
gtaagattgggtgaaatataagcaa

SEQ ID NO: 386816 - DNA, 25 bp, Artificial
  probe
  misc_feature (1)..(25): SEQ ID NO: 4616; WAN024AE5; Start 70; Stop 94
gatgttactcctttgttctttatga

SEQ ID NO: 386817 - DNA, 25 bp, Artificial
  probe
  misc_feature (1)..(25): SEQ ID NO: 4616; WAN024AE5; Start 332; Stop 356
tgcaagtcgttcaacctataaggaa

SEQ ID NO: 386818 - DNA, 25 bp, Artificial
  probe
  misc_feature (1)..(25): SEQ ID NO: 4616; WAN024AE5; Start 14; Stop 38
cgctcaatttctttgtgacttggtt

SEQ ID NO: 386819 - DNA, 25 bp, Artificial
  probe
  misc_feature (1)..(25): SEQ ID NO: 4616; WAN024AE5; Start 79; Stop 103
cctttgttctttatgagtctagttt

SEQ ID NO: 386820 - DNA, 25 bp, Artificial
  probe
  misc_feature (1)..(25): SEQ ID NO: 4616; WAN024AE5; Start 67; Stop 91
catgatgttactcctttgttcttta

SEQ ID NO: 386821 - DNA, 25 bp, Artificial
  probe
  misc_feature (1)..(25): SEQ ID NO: 4616; WAN024AE5; Start 311; Stop 335
cataccattcaatttaacacttgca

SEQ ID NO: 386822 - DNA, 25 bp, Artificial
  probe
  misc_feature (1)..(25): SEQ ID NO: 4616; WAN024AE5; Start 123; Stop 147
tgccataacctaaccttacaaaaga

SEQ ID NO: 386823 - DNA, 25 bp, Artificial
  probe
  misc_feature (1)..(25): SEQ ID NO: 4616; WAN024AE5; Start 71; Stop 95
atgttactcctttgttctttatgag

SEQ ID NO: 386824 - DNA, 25 bp, Artificial
  probe
  misc_feature (1)..(25): SEQ ID NO: 4616; WAN024AE5; Start 124; Stop 148
gccataacctaaccttacaaaagag

SEQ ID NO: 386825 - DNA, 25 bp, Artificial
  probe
  misc_feature (1)..(25): SEQ ID NO: 4616; WAN024AE5; Start 116; Stop 140
gaccgcttgccataacctaacctta

SEQ ID NO: 386826 - DNA, 25 bp, Artificial
  probe
  misc_feature (1)..(25): SEQ ID NO: 4616; WAN024AE5; Start 169; Stop 193
taagattgggtgaaatataagcaaa

SEQ ID NO: 386827 - DNA, 25 bp, Artificial
  probe
  misc_feature (1)..(25): SEQ ID NO: 4616; WAN024AE5; Start 122; Stop 146
ttgccataacctaaccttacaaaag

SEQ ID NO: 386828 - DNA, 25 bp, Artificial
  probe
  misc_feature (1)..(25): SEQ ID NO: 4616; WAN024AE5; Start 121; Stop 145
cttgccataacctaaccttacaaaa

SEQ ID NO: 386829 - DNA, 25 bp, Artificial
  probe
  misc_feature (1)..(25): SEQ ID NO: 4616; WAN024AE5; Start 68; Stop 92
atgatgttactcctttgttctttat

SEQ ID NO: 386830 - DNA, 25 bp, Artificial
  probe
  misc_feature (1)..(25): SEQ ID NO: 4616; WAN024AE5; Start 309; Stop 333
aacataccattcaatttaacacttg

SEQ ID NO: 386831 - DNA, 25 bp, Artificial
  probe
  misc_feature (1)..(25): SEQ ID NO: 4616; WAN024AE5; Start 18; Stop 42
caatttctttgtgacttggttttct

SEQ ID NO: 386832 - DNA, 25 bp, Artificial
  probe
  misc_feature (1)..(25): SEQ ID NO: 4616; WAN024AE5; Start 251; Stop 275
aaggcttactttgaaaaggaggaag

SEQ ID NO: 386833 - DNA, 25 bp, Artificial
  probe
  misc_feature (1)..(25): SEQ ID NO: 4617; WAN024ARA; Start 93; Stop 117
tatttattgacatttcatgtgttca

SEQ ID NO: 386834 - DNA, 25 bp, Artificial
  probe
  misc_feature (1)..(25): SEQ ID NO: 4617; WAN024ARA; Start 65; Stop 89
aactcaaaacaatttatcttaacct

SEQ ID NO: 386835 - DNA, 25 bp, Artificial
  probe
  misc_feature (1)..(25): SEQ ID NO: 4617; WAN024ARA; Start 12; Stop 36
acgtatgttttcatatattgaagca

SEQ ID NO: 386836 - DNA, 25 bp, Artificial
  probe
  misc_feature (1)..(25): SEQ ID NO: 4617; WAN024ARA; Start 13; Stop 37
cgtatgttttcatatattgaagcat

SEQ ID NO: 386837 - DNA, 25 bp, Artificial
  probe
  misc_feature (1)..(25): SEQ ID NO: 4617; WAN024ARA; Start 11; Stop 35
aacgtatgttttcatatattgaagc

SEQ ID NO: 386838 - DNA, 25 bp, Artificial
  probe
  misc_feature (1)..(25): SEQ ID NO: 4617; WAN024ARA; Start 1; Stop 25
tccctcctaaaacgtatgttttcat

SEQ ID NO: 386839 - DNA, 25 bp, Artificial
  probe
  misc_feature (1)..(25): SEQ ID NO: 4617; WAN024ARA; Start 2; Stop 26
ccctcctaaaacgtatgttttcata

SEQ ID NO: 386840 - DNA, 25 bp, Artificial
  probe
  misc_feature (1)..(25): SEQ ID NO: 4617; WAN024ARA; Start 3; Stop 27
cctcctaaaacgtatgttttcatat

SEQ ID NO: 386841 - DNA, 25 bp, Artificial
  probe
  misc_feature (1)..(25): SEQ ID NO: 4617; WAN024ARA; Start 52; Stop 76
tcagtttatatcaaactcaaaacaa

SEQ ID NO: 386842 - DNA, 25 bp, Artificial
  probe
  misc_feature (1)..(25): SEQ ID NO: 4617; WAN024ARA; Start 51; Stop 75
atcagtttatatcaaactcaaaaca

SEQ ID NO: 386843 - DNA, 25 bp, Artificial
  probe
  misc_feature (1)..(25): SEQ ID NO: 4617; WAN024ARA; Start 4; Stop 28
ctcctaaaacgtatgttttcatata

SEQ ID NO: 386844 - DNA, 25 bp, Artificial
  probe
  misc_feature (1)..(25): SEQ ID NO: 4618; WAN024A7Y; Start 1; Stop 25
tccctttctgattttgaaatcattt

SEQ ID NO: 386845 - DNA, 25 bp, Artificial
  probe
  misc_feature (1)..(25): SEQ ID NO: 4618; WAN024A7Y; Start 2; Stop 26
ccctttctgattttgaaatcattta

SEQ ID NO: 386846 - DNA, 25 bp, Artificial
  probe
  misc_feature (1)..(25): SEQ ID NO: 4618; WAN024A7Y; Start 3; Stop 27
cctttctgattttgaaatcatttac

SEQ ID NO: 386847 - DNA, 25 bp, Artificial
  probe
  misc_feature (1)..(25): SEQ ID NO: 4619; WAN024FAB; Start 16; Stop 40
ttggtagtagcgcatgactgttaat

SEQ ID NO: 386848 - DNA, 25 bp, Artificial
  probe
  misc_feature (1)..(25): SEQ ID NO: 4619; WAN024FAB; Start 18; Stop 42
ggtagtagcgcatgactgttaatca

SEQ ID NO: 386849 - DNA, 25 bp, Artificial
  probe
  misc_feature (1)..(25): SEQ ID NO: 4619; WAN024FAB; Start 17; Stop 41
tggtagtagcgcatgactgttaatc

SEQ ID NO: 386850 - DNA, 25 bp, Artificial
  probe
  misc_feature (1)..(25): SEQ ID NO: 4619; WAN024FAB; Start 41; Stop 65
catgatgtcgtaggttcgagtccta

SEQ ID NO: 386851 - DNA, 25 bp, Artificial
  probe
  misc_feature (1)..(25): SEQ ID NO: 4619; WAN024FAB; Start 19; Stop 43
gtagtagcgcatgactgttaatcat

SEQ ID NO: 386852 - DNA, 25 bp, Artificial
  probe
  misc_feature (1)..(25): SEQ ID NO: 4619; WAN024FAB; Start 15; Stop 39
gttggtagtagcgcatgactgttaa

SEQ ID NO: 386853 - DNA, 25 bp, Artificial
  probe
  misc_feature (1)..(25): SEQ ID NO: 4619; WAN024FAB; Start 14; Stop 38
agttggtagtagcgcatgactgtta

SEQ ID NO: 386854 - DNA, 25 bp, Artificial
  probe
  misc_feature (1)..(25): SEQ ID NO: 4619; WAN024FAB; Start 7; Stop 31
atagctcagttggtagtagcgcatg

SEQ ID NO: 386855 - DNA, 25 bp, Artificial
  probe
  misc_feature (1)..(25): SEQ ID NO: 4619; WAN024FAB; Start 6; Stop 30
catagctcagttggtagtagcgcat

SEQ ID NO: 386856 - DNA, 25 bp, Artificial
  probe
  misc_feature (1)..(25): SEQ ID NO: 4619; WAN024FAB; Start 40; Stop 64
tcatgatgtcgtaggttcgagtcct

SEQ ID NO: 386857 - DNA, 25 bp, Artificial
  probe
  misc_feature (1)..(25): SEQ ID NO: 4619; WAN024FAB; Start 13; Stop 37
cagttggtagtagcgcatgactgtt

SEQ ID NO: 386858 - DNA, 25 bp, Artificial
  probe
  misc_feature (1)..(25): SEQ ID NO: 4620; WAN024ARV; Start 13; Stop 37
ctagaaggaagtcacttagtggctt

SEQ ID NO: 386859 - DNA, 25 bp, Artificial
  probe
  misc_feature (1)..(25): SEQ ID NO: 4620; WAN024ARV; Start 8; Stop 32
tcactctagaaggaagtcacttagt

SEQ ID NO: 386860 - DNA, 25 bp, Artificial
  probe
  misc_feature (1)..(25): SEQ ID NO: 4620; WAN024ARV; Start 7; Stop 31
ctcactctagaaggaagtcacttag

SEQ ID NO: 386861 - DNA, 25 bp, Artificial
  probe
  misc_feature (1)..(25): SEQ ID NO: 4620; WAN024ARV; Start 6; Stop 30
cctcactctagaaggaagtcactta

SEQ ID NO: 386862 - DNA, 25 bp, Artificial
  probe
  misc_feature (1)..(25): SEQ ID NO: 4620; WAN024ARV; Start 10; Stop 34
actctagaaggaagtcacttagtgg

SEQ ID NO: 386863 - DNA, 25 bp, Artificial
  probe
  misc_feature (1)..(25): SEQ ID NO: 4620; WAN024ARV; Start 14; Stop 38
tagaaggaagtcacttagtggcttc

SEQ ID NO: 386864 - DNA, 25 bp, Artificial
  probe
  misc_feature (1)..(25): SEQ ID NO: 4620; WAN024ARV; Start 27; Stop 51
cttagtggcttccttttgtctttag

SEQ ID NO: 386865 - DNA, 25 bp, Artificial
  probe
  misc_feature (1)..(25): SEQ ID NO: 4620; WAN024ARV; Start 28; Stop 52
ttagtggcttccttttgtctttaga

SEQ ID NO: 386866 - DNA, 25 bp, Artificial
  probe
  misc_feature (1)..(25): SEQ ID NO: 4620; WAN024ARV; Start 26; Stop 50
acttagtggcttccttttgtcttta

SEQ ID NO: 386867 - DNA, 25 bp, Artificial
  probe
  misc_feature (1)..(25): SEQ ID NO: 4620; WAN024ARV; Start 29; Stop 53
tagtggcttccttttgtctttagaa

SEQ ID NO: 386868 - DNA, 25 bp, Artificial
  probe
  misc_feature (1)..(25): SEQ ID NO: 4620; WAN024ARV; Start 11; Stop 35
ctctagaaggaagtcacttagtggc

SEQ ID NO: 386869 - DNA, 25 bp, Artificial
  probe
  misc_feature (1)..(25): SEQ ID NO: 4620; WAN024ARV; Start 30; Stop 54
agtggcttccttttgtctttagaaa

SEQ ID NO: 386870 - DNA, 25 bp, Artificial
  probe
  misc_feature (1)..(25): SEQ ID NO: 4620; WAN024ARV; Start 12; Stop 36
tctagaaggaagtcacttagtggct

SEQ ID NO: 386871 - DNA, 25 bp, Artificial
  probe
  misc_feature (1)..(25): SEQ ID NO: 4620; WAN024ARV; Start 74; Stop 98
aatagtagaagaataatgtgaggaa

SEQ ID NO: 386872 - DNA, 25 bp, Artificial
  probe
  misc_feature (1)..(25): SEQ ID NO: 4620; WAN024ARV; Start 31; Stop 55
gtggcttccttttgtctttagaaaa

SEQ ID NO: 386873 - DNA, 25 bp, Artificial
  probe
  misc_feature (1)..(25): SEQ ID NO: 4620; WAN024ARV; Start 32; Stop 56
tggcttccttttgtctttagaaaat

SEQ ID NO: 386874 - DNA, 25 bp, Artificial
  probe
  misc_feature (1)..(25): SEQ ID NO: 4620; WAN024ARV; Start 33; Stop 57
ggcttccttttgtctttagaaaata

SEQ ID NO: 386875 - DNA, 25 bp, Artificial
  probe
  misc_feature (1)..(25): SEQ ID NO: 4620; WAN024ARV; Start 9; Stop 33
cactctagaaggaagtcacttagtg

SEQ ID NO: 386876 - DNA, 25 bp, Artificial
  probe
  misc_feature (1)..(25): SEQ ID NO: 4620; WAN024ARV; Start 25; Stop 49
cacttagtggcttccttttgtcttt

SEQ ID NO: 386877 - DNA, 25 bp, Artificial
  probe
  misc_feature (1)..(25): SEQ ID NO: 4620; WAN024ARV; Start 75; Stop 99
atagtagaagaataatgtgaggaaa

SEQ ID NO: 386878 - DNA, 25 bp, Artificial
  probe
  misc_feature (1)..(25): SEQ ID NO: 4620; WAN024ARV; Start 73; Stop 97
aaatagtagaagaataatgtgagga

SEQ ID NO: 386879 - DNA, 25 bp, Artificial
  probe
  misc_feature (1)..(25): SEQ ID NO: 4620; WAN024ARV; Start 24; Stop 48
tcacttagtggcttccttttgtctt

SEQ ID NO: 386880 - DNA, 25 bp, Artificial
  probe
  misc_feature (1)..(25): SEQ ID NO: 4620; WAN024ARV; Start 37; Stop 61
tccttttgtctttagaaaatacctc

SEQ ID NO: 386881 - DNA, 25 bp, Artificial
  probe
  misc_feature (1)..(25): SEQ ID NO: 4620; WAN024ARV; Start 34; Stop 58
gcttccttttgtctttagaaaatac

SEQ ID NO: 386882 - DNA, 25 bp, Artificial
  probe
  misc_feature (1)..(25): SEQ ID NO: 4620; WAN024ARV; Start 38; Stop 62
ccttttgtctttagaaaatacctct

SEQ ID NO: 386883 - DNA, 25 bp, Artificial
  probe
  misc_feature (1)..(25): SEQ ID NO: 4620; WAN024ARV; Start 21; Stop 45
aagtcacttagtggcttccttttgt

SEQ ID NO: 386884 - DNA, 25 bp, Artificial
  probe
  misc_feature (1)..(25): SEQ ID NO: 4620; WAN024ARV; Start 5; Stop 29
tcctcactctagaaggaagtcactt

SEQ ID NO: 386885 - DNA, 25 bp, Artificial
  probe
  misc_feature (1)..(25): SEQ ID NO: 4620; WAN024ARV; Start 78; Stop 102
gtagaagaataatgtgaggaaaatg

SEQ ID NO: 386886 - DNA, 25 bp, Artificial
  probe
  misc_feature (1)..(25): SEQ ID NO: 4620; WAN024ARV; Start 23; Stop 47
gtcacttagtggcttccttttgtct

SEQ ID NO: 386887 - DNA, 25 bp, Artificial
  probe
  misc_feature (1)..(25): SEQ ID NO: 4620; WAN024ARV; Start 22; Stop 46
agtcacttagtggcttccttttgtc

SEQ ID NO: 386888 - DNA, 25 bp, Artificial
  probe
  misc_feature (1)..(25): SEQ ID NO: 4620; WAN024ARV; Start 79; Stop 103
tagaagaataatgtgaggaaaatga

SEQ ID NO: 386889 - DNA, 25 bp, Artificial
  probe
  misc_feature (1)..(25): SEQ ID NO: 4620; WAN024ARV; Start 77; Stop 101
agtagaagaataatgtgaggaaaat

SEQ ID NO: 386890 - DNA, 25 bp, Artificial
  probe
  misc_feature (1)..(25): SEQ ID NO: 4620; WAN024ARV; Start 36; Stop 60
ttccttttgtctttagaaaatacct

SEQ ID NO: 386891 - DNA, 25 bp, Artificial
  probe
  misc_feature (1)..(25): SEQ ID NO: 4621; WAN0249T6; Start 111; Stop 135
tccatattcaatcgctattatcgtt

SEQ ID NO: 386892 - DNA, 25 bp, Artificial
  probe
  misc_feature (1)..(25): SEQ ID NO: 4621; WAN0249T6; Start 110; Stop 134
atccatattcaatcgctattatcgt

SEQ ID NO: 386893 - DNA, 25 bp, Artificial
  probe
  misc_feature (1)..(25): SEQ ID NO: 4621; WAN0249T6; Start 102; Stop 126
attcaattatccatattcaatcgct

SEQ ID NO: 386894 - DNA, 25 bp, Artificial
  probe
  misc_feature (1)..(25): SEQ ID NO: 4621; WAN0249T6; Start 75; Stop 99
tttagaaatcacagtgggctattcc

SEQ ID NO: 386895 - DNA, 25 bp, Artificial
  probe
  misc_feature (1)..(25): SEQ ID NO: 4621; WAN0249T6; Start 90; Stop 114
gggctattccatattcaattatcca

SEQ ID NO: 386896 - DNA, 25 bp, Artificial
  probe
  misc_feature (1)..(25): SEQ ID NO: 4621; WAN0249T6; Start 91; Stop 115
ggctattccatattcaattatccat

SEQ ID NO: 386897 - DNA, 25 bp, Artificial
  probe
  misc_feature (1)..(25): SEQ ID NO: 4621; WAN0249T6; Start 109; Stop 133
tatccatattcaatcgctattatcg

SEQ ID NO: 386898 - DNA, 25 bp, Artificial
  probe
  misc_feature (1)..(25): SEQ ID NO: 4621; WAN0249T6; Start 103; Stop 127
ttcaattatccatattcaatcgcta

SEQ ID NO: 386899 - DNA, 25 bp, Artificial
  probe
  misc_feature (1)..(25): SEQ ID NO: 4621; WAN0249T6; Start 112; Stop 136
ccatattcaatcgctattatcgttt

SEQ ID NO: 386900 - DNA, 25 bp, Artificial
  probe
  misc_feature (1)..(25): SEQ ID NO: 4621; WAN0249T6; Start 104; Stop 128
tcaattatccatattcaatcgctat

SEQ ID NO: 386901 - DNA, 25 bp, Artificial
  probe
  misc_feature (1)..(25): SEQ ID NO: 4621; WAN0249T6; Start 85; Stop 109
acagtgggctattccatattcaatt

SEQ ID NO: 386902 - DNA, 25 bp, Artificial
  probe
  misc_feature (1)..(25): SEQ ID NO: 4621; WAN0249T6; Start 80; Stop 104
aaatcacagtgggctattccatatt

SEQ ID NO: 386903 - DNA, 25 bp, Artificial
  probe
  misc_feature (1)..(25): SEQ ID NO: 4621; WAN0249T6; Start 81; Stop 105
aatcacagtgggctattccatattc

SEQ ID NO: 386904 - DNA, 25 bp, Artificial
  probe
  misc_feature (1)..(25): SEQ ID NO: 4621; WAN0249T6; Start 79; Stop 103
gaaatcacagtgggctattccatat

SEQ ID NO: 386905 - DNA, 25 bp, Artificial
  probe
  misc_feature (1)..(25): SEQ ID NO: 4621; WAN0249T6; Start 84; Stop 108
cacagtgggctattccatattcaat

SEQ ID NO: 386906 - DNA, 25 bp, Artificial
  probe
  misc_feature (1)..(25): SEQ ID NO: 4621; WAN0249T6; Start 86; Stop 110
cagtgggctattccatattcaatta

SEQ ID NO: 386907 - DNA, 25 bp, Artificial
  probe
  misc_feature (1)..(25): SEQ ID NO: 4621; WAN0249T6; Start 89; Stop 113
tgggctattccatattcaattatcc

SEQ ID NO: 386908 - DNA, 25 bp, Artificial
  probe
  misc_feature (1)..(25): SEQ ID NO: 4621; WAN0249T6; Start 82; Stop 106
atcacagtgggctattccatattca

SEQ ID NO: 386909 - DNA, 25 bp, Artificial
  probe
  misc_feature (1)..(25): SEQ ID NO: 4621; WAN0249T6; Start 78; Stop 102
agaaatcacagtgggctattccata

SEQ ID NO: 386910 - DNA, 25 bp, Artificial
  probe
  misc_feature (1)..(25): SEQ ID NO: 4621; WAN0249T6; Start 77; Stop 101
tagaaatcacagtgggctattccat

SEQ ID NO: 386911 - DNA, 25 bp, Artificial
  probe
  misc_feature (1)..(25): SEQ ID NO: 4621; WAN0249T6; Start 83; Stop 107
tcacagtgggctattccatattcaa

SEQ ID NO: 386912 - DNA, 25 bp, Artificial
  probe
  misc_feature (1)..(25): SEQ ID NO: 4621; WAN0249T6; Start 76; Stop 100
ttagaaatcacagtgggctattcca

SEQ ID NO: 386913 - DNA, 25 bp, Artificial
  probe
  misc_feature (1)..(25): SEQ ID NO: 4621; WAN0249T6; Start 105; Stop 129
caattatccatattcaatcgctatt

SEQ ID NO: 386914 - DNA, 25 bp, Artificial
  probe
  misc_feature (1)..(25): SEQ ID NO: 4621; WAN0249T6; Start 101; Stop 125
tattcaattatccatattcaatcgc

SEQ ID NO: 386915 - DNA, 25 bp, Artificial
  probe
  misc_feature (1)..(25): SEQ ID NO: 4621; WAN0249T6; Start 87; Stop 111
agtgggctattccatattcaattat

SEQ ID NO: 386916 - DNA, 25 bp, Artificial
  probe
  misc_feature (1)..(25): SEQ ID NO: 4621; WAN0249T6; Start 116; Stop 140
attcaatcgctattatcgttttcct

SEQ ID NO: 386917 - DNA, 25 bp, Artificial
  probe
  misc_feature (1)..(25): SEQ ID NO: 4621; WAN0249T6; Start 73; Stop 97
gttttagaaatcacagtgggctatt

SEQ ID NO: 386918 - DNA, 25 bp, Artificial
  probe
  misc_feature (1)..(25): SEQ ID NO: 4621; WAN0249T6; Start 88; Stop 112
gtgggctattccatattcaattatc

SEQ ID NO: 386919 - DNA, 25 bp, Artificial
  probe
  misc_feature (1)..(25): SEQ ID NO: 4621; WAN0249T6; Start 117; Stop 141
ttcaatcgctattatcgttttccta

SEQ ID NO: 386920 - DNA, 25 bp, Artificial
  probe
  misc_feature (1)..(25): SEQ ID NO: 4621; WAN0249T6; Start 74; Stop 98
ttttagaaatcacagtgggctattc

SEQ ID NO: 386921 - DNA, 25 bp, Artificial
  probe
  misc_feature (1)..(25): SEQ ID NO: 4621; WAN0249T6; Start 14; Stop 38
acatcagtatttcattacagaacat

SEQ ID NO: 386922 - DNA, 25 bp, Artificial
  probe
  misc_feature (1)..(25): SEQ ID NO: 4621; WAN0249T6; Start 119; Stop 143
caatcgctattatcgttttcctaga

SEQ ID NO: 386923 - DNA, 25 bp, Artificial
  probe
  misc_feature (1)..(25): SEQ ID NO: 4621; WAN0249T6; Start 118; Stop 142
tcaatcgctattatcgttttcctag

SEQ ID NO: 386924 - DNA, 25 bp, Artificial
  probe
  misc_feature (1)..(25): SEQ ID NO: 4622; WAN024AAW; Start 182; Stop 206
tatgatgagatgatacagagagcct

SEQ ID NO: 386925 - DNA, 25 bp, Artificial
  probe
  misc_feature (1)..(25): SEQ ID NO: 4622; WAN024AAW; Start 181; Stop 205
atatgatgagatgatacagagagcc

SEQ ID NO: 386926 - DNA, 25 bp, Artificial
  probe
  misc_feature (1)..(25): SEQ ID NO: 4622; WAN024AAW; Start 188; Stop 212
gagatgatacagagagcctgaattg

SEQ ID NO: 386927 - DNA, 25 bp, Artificial
  probe
  misc_feature (1)..(25): SEQ ID NO: 4622; WAN024AAW; Start 186; Stop 210
atgagatgatacagagagcctgaat

SEQ ID NO: 386928 - DNA, 25 bp, Artificial
  probe
  misc_feature (1)..(25): SEQ ID NO: 4622; WAN024AAW; Start 180; Stop 204
aatatgatgagatgatacagagagc

SEQ ID NO: 386929 - DNA, 25 bp, Artificial
  probe
  misc_feature (1)..(25): SEQ ID NO: 4622; WAN024AAW; Start 187; Stop 211
tgagatgatacagagagcctgaatt

SEQ ID NO: 386930 - DNA, 25 bp, Artificial
  probe
  misc_feature (1)..(25): SEQ ID NO: 4622; WAN024AAW; Start 185; Stop 209
gatgagatgatacagagagcctgaa

SEQ ID NO: 386931 - DNA, 25 bp, Artificial
  probe
  misc_feature (1)..(25): SEQ ID NO: 4622; WAN024AAW; Start 183; Stop 207
atgatgagatgatacagagagcctg

SEQ ID NO: 386932 - DNA, 25 bp, Artificial
  probe
  misc_feature (1)..(25): SEQ ID NO: 4622; WAN024AAW; Start 56; Stop 80
gtatcactgcttgtacgagttgaag

SEQ ID NO: 386933 - DNA, 25 bp, Artificial
  probe
  misc_feature (1)..(25): SEQ ID NO: 4622; WAN024AAW; Start 189; Stop 213
agatgatacagagagcctgaattgg

SEQ ID NO: 386934 - DNA, 25 bp, Artificial
  probe
  misc_feature (1)..(25): SEQ ID NO: 4622; WAN024AAW; Start 191; Stop 215
atgatacagagagcctgaattggtc

SEQ ID NO: 386935 - DNA, 25 bp, Artificial
  probe
  misc_feature (1)..(25): SEQ ID NO: 4622; WAN024AAW; Start 190; Stop 214
gatgatacagagagcctgaattggt

SEQ ID NO: 386936 - DNA, 25 bp, Artificial
  probe
  misc_feature (1)..(25): SEQ ID NO: 4622; WAN024AAW; Start 184; Stop 208
tgatgagatgatacagagagcctga

SEQ ID NO: 386937 - DNA, 25 bp, Artificial
  probe
  misc_feature (1)..(25): SEQ ID NO: 4622; WAN024AAW; Start 55; Stop 79
ggtatcactgcttgtacgagttgaa

SEQ ID NO: 386938 - DNA, 25 bp, Artificial
  probe
  misc_feature (1)..(25): SEQ ID NO: 4622; WAN024AAW; Start 192; Stop 216
tgatacagagagcctgaattggtca

SEQ ID NO: 386939 - DNA, 25 bp, Artificial
  probe
  misc_feature (1)..(25): SEQ ID NO: 4622; WAN024AAW; Start 134; Stop 158
gtcgataaggtgtgttctgggtata

SEQ ID NO: 386940 - DNA, 25 bp, Artificial
  probe
  misc_feature (1)..(25): SEQ ID NO: 4622; WAN024AAW; Start 176; Stop 200
aggaaatatgatgagatgatacaga

SEQ ID NO: 386941 - DNA, 25 bp, Artificial
  probe
  misc_feature (1)..(25): SEQ ID NO: 4622; WAN024AAW; Start 177; Stop 201
ggaaatatgatgagatgatacagag

SEQ ID NO: 386942 - DNA, 25 bp, Artificial
  probe
  misc_feature (1)..(25): SEQ ID NO: 4622; WAN024AAW; Start 91; Stop 115
gtaaaagtagatgttcagccaatgc

SEQ ID NO: 386943 - DNA, 25 bp, Artificial
  probe
  misc_feature (1)..(25): SEQ ID NO: 4622; WAN024AAW; Start 90; Stop 114
agtaaaagtagatgttcagccaatg

SEQ ID NO: 386944 - DNA, 25 bp, Artificial
  probe
  misc_feature (1)..(25): SEQ ID NO: 4622; WAN024AAW; Start 89; Stop 113
aagtaaaagtagatgttcagccaat

SEQ ID NO: 386945 - DNA, 25 bp, Artificial
  probe
  misc_feature (1)..(25): SEQ ID NO: 4622; WAN024AAW; Start 94; Stop 118
aaagtagatgttcagccaatgcgac

SEQ ID NO: 386946 - DNA, 25 bp, Artificial
  probe
  misc_feature (1)..(25): SEQ ID NO: 4622; WAN024AAW; Start 92; Stop 116
taaaagtagatgttcagccaatgcg

SEQ ID NO: 386947 - DNA, 25 bp, Artificial
  probe
  misc_feature (1)..(25): SEQ ID NO: 4622; WAN024AAW; Start 162; Stop 186
ctcgtaaagtaagtaggaaatatga

SEQ ID NO: 386948 - DNA, 25 bp, Artificial
  probe
  misc_feature (1)..(25): SEQ ID NO: 4622; WAN024AAW; Start 161; Stop 185
actcgtaaagtaagtaggaaatatg

SEQ ID NO: 386949 - DNA, 25 bp, Artificial
  probe
  misc_feature (1)..(25): SEQ ID NO: 4622; WAN024AAW; Start 54; Stop 78
cggtatcactgcttgtacgagttga

SEQ ID NO: 386950 - DNA, 25 bp, Artificial
  probe
  misc_feature (1)..(25): SEQ ID NO: 4622; WAN024AAW; Start 179; Stop 203
aaatatgatgagatgatacagagag

SEQ ID NO: 386951 - DNA, 25 bp, Artificial
  probe
  misc_feature (1)..(25): SEQ ID NO: 4622; WAN024AAW; Start 178; Stop 202
gaaatatgatgagatgatacagaga

SEQ ID NO: 386952 - DNA, 25 bp, Artificial
  probe
  misc_feature (1)..(25): SEQ ID NO: 4622; WAN024AAW; Start 193; Stop 217
gatacagagagcctgaattggtcag

SEQ ID NO: 386953 - DNA, 25 bp, Artificial
  probe
  misc_feature (1)..(25): SEQ ID NO: 4622; WAN024AAW; Start 174; Stop 198
gtaggaaatatgatgagatgataca

SEQ ID NO: 386954 - DNA, 25 bp, Artificial
  probe
  misc_feature (1)..(25): SEQ ID NO: 4622; WAN024AAW; Start 160; Stop 184
gactcgtaaagtaagtaggaaatat

SEQ ID NO: 386955 - DNA, 25 bp, Artificial
  probe
  misc_feature (1)..(25): SEQ ID NO: 4622; WAN024AAW; Start 170; Stop 194
gtaagtaggaaatatgatgagatga

SEQ ID NO: 386956 - DNA, 25 bp, Artificial
  probe
  misc_feature (1)..(25): SEQ ID NO: 4622; WAN024AAW; Start 169; Stop 193
agtaagtaggaaatatgatgagatg

SEQ ID NO: 386957 - DNA, 25 bp, Artificial
  probe
  misc_feature (1)..(25): SEQ ID NO: 4623; WAN024ARN; Start 40; Stop 64
aagactgtttaagtataaaccgttt

SEQ ID NO: 386958 - DNA, 25 bp, Artificial
  probe
  misc_feature (1)..(25): SEQ ID NO: 4623; WAN024ARN; Start 39; Stop 63
taagactgtttaagtataaaccgtt

SEQ ID NO: 386959 - DNA, 25 bp, Artificial
  probe
  misc_feature (1)..(25): SEQ ID NO: 4623; WAN024ARN; Start 38; Stop 62
ttaagactgtttaagtataaaccgt

SEQ ID NO: 386960 - DNA, 25 bp, Artificial
  probe
  misc_feature (1)..(25): SEQ ID NO: 4623; WAN024ARN; Start 23; Stop 47
tcatttaagaaaactttaagactgt

SEQ ID NO: 386961 - DNA, 25 bp, Artificial
  probe
  misc_feature (1)..(25): SEQ ID NO: 4623; WAN024ARN; Start 191; Stop 215
agcttccaacttttaaaataggttt

SEQ ID NO: 386962 - DNA, 25 bp, Artificial
  probe
  misc_feature (1)..(25): SEQ ID NO: 4623; WAN024ARN; Start 190; Stop 214
aagcttccaacttttaaaataggtt

SEQ ID NO: 386963 - DNA, 25 bp, Artificial
  probe
  misc_feature (1)..(25): SEQ ID NO: 4623; WAN024ARN; Start 192; Stop 216
gcttccaacttttaaaataggtttc

SEQ ID NO: 386964 - DNA, 25 bp, Artificial
  probe
  misc_feature (1)..(25): SEQ ID NO: 4623; WAN024ARN; Start 43; Stop 67
actgtttaagtataaaccgttttca

SEQ ID NO: 386965 - DNA, 25 bp, Artificial
  probe
  misc_feature (1)..(25): SEQ ID NO: 4623; WAN024ARN; Start 41; Stop 65
agactgtttaagtataaaccgtttt

SEQ ID NO: 386966 - DNA, 25 bp, Artificial
  probe
  misc_feature (1)..(25): SEQ ID NO: 4623; WAN024ARN; Start 42; Stop 66
gactgtttaagtataaaccgttttc

SEQ ID NO: 386967 - DNA, 25 bp, Artificial
  probe
  misc_feature (1)..(25): SEQ ID NO: 4623; WAN024ARN; Start 37; Stop 61
tttaagactgtttaagtataaaccg

SEQ ID NO: 386968 - DNA, 25 bp, Artificial
  probe
  misc_feature (1)..(25): SEQ ID NO: 4623; WAN024ARN; Start 44; Stop 68
ctgtttaagtataaaccgttttcat

SEQ ID NO: 386969 - DNA, 25 bp, Artificial
  probe
  misc_feature (1)..(25): SEQ ID NO: 4623; WAN024ARN; Start 29; Stop 53
aagaaaactttaagactgtttaagt

SEQ ID NO: 386970 - DNA, 25 bp, Artificial
  probe
  misc_feature (1)..(25): SEQ ID NO: 4623; WAN024ARN; Start 193; Stop 217
cttccaacttttaaaataggtttct

SEQ ID NO: 386971 - DNA, 25 bp, Artificial
  probe
  misc_feature (1)..(25): SEQ ID NO: 4623; WAN024ARN; Start 45; Stop 69
tgtttaagtataaaccgttttcata

SEQ ID NO: 386972 - DNA, 25 bp, Artificial
  probe
  misc_feature (1)..(25): SEQ ID NO: 4624; WAN024ANL; Start 17; Stop 41
cccttaacctttgactattccgcaa

SEQ ID NO: 386973 - DNA, 25 bp, Artificial
  probe
  misc_feature (1)..(25): SEQ ID NO: 4624; WAN024ANL; Start 28; Stop 52
tgactattccgcaaaattatcgtaa

SEQ ID NO: 386974 - DNA, 25 bp, Artificial
  probe
  misc_feature (1)..(25): SEQ ID NO: 4624; WAN024ANL; Start 18; Stop 42
ccttaacctttgactattccgcaaa

SEQ ID NO: 386975 - DNA, 25 bp, Artificial
  probe
  misc_feature (1)..(25): SEQ ID NO: 4624; WAN024ANL; Start 27; Stop 51
ttgactattccgcaaaattatcgta

SEQ ID NO: 386976 - DNA, 25 bp, Artificial
  probe
  misc_feature (1)..(25): SEQ ID NO: 4624; WAN024ANL; Start 29; Stop 53
gactattccgcaaaattatcgtaaa

SEQ ID NO: 386977 - DNA, 25 bp, Artificial
  probe
  misc_feature (1)..(25): SEQ ID NO: 4624; WAN024ANL; Start 30; Stop 54
actattccgcaaaattatcgtaaaa

SEQ ID NO: 386978 - DNA, 25 bp, Artificial
  probe
  misc_feature (1)..(25): SEQ ID NO: 4624; WAN024ANL; Start 63; Stop 87
aaatgataaaatgaggtcagagtct

SEQ ID NO: 386979 - DNA, 25 bp, Artificial
  probe
  misc_feature (1)..(25): SEQ ID NO: 4624; WAN024ANL; Start 66; Stop 90
tgataaaatgaggtcagagtctgtt

SEQ ID NO: 386980 - DNA, 25 bp, Artificial
  probe
  misc_feature (1)..(25): SEQ ID NO: 4624; WAN024ANL; Start 65; Stop 89
atgataaaatgaggtcagagtctgt

SEQ ID NO: 386981 - DNA, 25 bp, Artificial
  probe
  misc_feature (1)..(25): SEQ ID NO: 4624; WAN024ANL; Start 68; Stop 92
ataaaatgaggtcagagtctgttcg

SEQ ID NO: 386982 - DNA, 25 bp, Artificial
  probe
  misc_feature (1)..(25): SEQ ID NO: 4624; WAN024ANL; Start 67; Stop 91
gataaaatgaggtcagagtctgttc

SEQ ID NO: 386983 - DNA, 25 bp, Artificial
  probe
  misc_feature (1)..(25): SEQ ID NO: 4624; WAN024ANL; Start 64; Stop 88
aatgataaaatgaggtcagagtctg

SEQ ID NO: 386984 - DNA, 25 bp, Artificial
  probe
  misc_feature (1)..(25): SEQ ID NO: 4624; WAN024ANL; Start 19; Stop 43
cttaacctttgactattccgcaaaa

SEQ ID NO: 386985 - DNA, 25 bp, Artificial
  probe
  misc_feature (1)..(25): SEQ ID NO: 4624; WAN024ANL; Start 36; Stop 60
ccgcaaaattatcgtaaaataaaga

SEQ ID NO: 386986 - DNA, 25 bp, Artificial
  probe
  misc_feature (1)..(25): SEQ ID NO: 4624; WAN024ANL; Start 35; Stop 59
tccgcaaaattatcgtaaaataaag

SEQ ID NO: 386987 - DNA, 25 bp, Artificial
  probe
  misc_feature (1)..(25): SEQ ID NO: 4624; WAN024ANL; Start 26; Stop 50
tttgactattccgcaaaattatcgt

SEQ ID NO: 386988 - DNA, 25 bp, Artificial
  probe
  misc_feature (1)..(25): SEQ ID NO: 4624; WAN024ANL; Start 31; Stop 55
ctattccgcaaaattatcgtaaaat

SEQ ID NO: 386989 - DNA, 25 bp, Artificial
  probe
  misc_feature (1)..(25): SEQ ID NO: 4624; WAN024ANL; Start 22; Stop 46
aacctttgactattccgcaaaatta

SEQ ID NO: 386990 - DNA, 25 bp, Artificial
  probe
  misc_feature (1)..(25): SEQ ID NO: 4624; WAN024ANL; Start 21; Stop 45
taacctttgactattccgcaaaatt

SEQ ID NO: 386991 - DNA, 25 bp, Artificial
  probe
  misc_feature (1)..(25): SEQ ID NO: 4624; WAN024ANL; Start 20; Stop 44
ttaacctttgactattccgcaaaat

SEQ ID NO: 386992 - DNA, 25 bp, Artificial
  probe
  misc_feature (1)..(25): SEQ ID NO: 4624; WAN024ANL; Start 61; Stop 85
gtaaatgataaaatgaggtcagagt

SEQ ID NO: 386993 - DNA, 25 bp, Artificial
  probe
  misc_feature (1)..(25): SEQ ID NO: 4624; WAN024ANL; Start 23; Stop 47
acctttgactattccgcaaaattat

SEQ ID NO: 386994 - DNA, 25 bp, Artificial
  probe
  misc_feature (1)..(25): SEQ ID NO: 4624; WAN024ANL; Start 25; Stop 49
ctttgactattccgcaaaattatcg

SEQ ID NO: 386995 - DNA, 25 bp, Artificial
  probe
  misc_feature (1)..(25): SEQ ID NO: 4624; WAN024ANL; Start 24; Stop 48
cctttgactattccgcaaaattatc

SEQ ID NO: 386996 - DNA, 25 bp, Artificial
  probe
  misc_feature (1)..(25): SEQ ID NO: 4624; WAN024ANL; Start 62; Stop 86
taaatgataaaatgaggtcagagtc

SEQ ID NO: 386997 - DNA, 25 bp, Artificial
  probe
  misc_feature (1)..(25): SEQ ID NO: 4624; WAN024ANL; Start 60; Stop 84
agtaaatgataaaatgaggtcagag

SEQ ID NO: 386998 - DNA, 25 bp, Artificial
  probe
  misc_feature (1)..(25): SEQ ID NO: 4624; WAN024ANL; Start 59; Stop 83
gagtaaatgataaaatgaggtcaga

SEQ ID NO: 386999 - DNA, 25 bp, Artificial
  probe
  misc_feature (1)..(25): SEQ ID NO: 4624; WAN024ANL; Start 58; Stop 82
agagtaaatgataaaatgaggtcag

SEQ ID NO: 387000 - DNA, 25 bp, Artificial
  probe
  misc_feature (1)..(25): SEQ ID NO: 4624; WAN024ANL; Start 34; Stop 58
ttccgcaaaattatcgtaaaataaa

SEQ ID NO: 387001 - DNA, 25 bp, Artificial
  probe
  misc_feature (1)..(25): SEQ ID NO: 4624; WAN024ANL; Start 69; Stop 93
taaaatgaggtcagagtctgttcgc

SEQ ID NO: 387002 - DNA, 25 bp, Artificial
  probe
  misc_feature (1)..(25): SEQ ID NO: 4624; WAN024ANL; Start 33; Stop 57
attccgcaaaattatcgtaaaataa

SEQ ID NO: 387003 - DNA, 25 bp, Artificial
  probe
  misc_feature (1)..(25): SEQ ID NO: 4624; WAN024ANL; Start 71; Stop 95
aaatgaggtcagagtctgttcgctc

SEQ ID NO: 387004 - DNA, 25 bp, Artificial
  probe
  misc_feature (1)..(25): SEQ ID NO: 4624; WAN024ANL; Start 57; Stop 81
aagagtaaatgataaaatgaggtca

SEQ ID NO: 387005 - DNA, 25 bp, Artificial
  probe
  misc_feature (1)..(25): SEQ ID NO: 4625; WAN0249VU; Start 102; Stop 126
aaatgtaagaaactgtcacgaaatt

SEQ ID NO: 387006 - DNA, 25 bp, Artificial
  probe
  misc_feature (1)..(25): SEQ ID NO: 4625; WAN0249VU; Start 105; Stop 129
tgtaagaaactgtcacgaaattaaa

SEQ ID NO: 387007 - DNA, 25 bp, Artificial
  probe
  misc_feature (1)..(25): SEQ ID NO: 4625; WAN0249VU; Start 104; Stop 128
atgtaagaaactgtcacgaaattaa

SEQ ID NO: 387008 - DNA, 25 bp, Artificial
  probe
  misc_feature (1)..(25): SEQ ID NO: 4625; WAN0249VU; Start 103; Stop 127
aatgtaagaaactgtcacgaaatta

SEQ ID NO: 387009 - DNA, 25 bp, Artificial
  probe
  misc_feature (1)..(25): SEQ ID NO: 4625; WAN0249VU; Start 30; Stop 54
ttaaagaacctaagagtgtataccc

SEQ ID NO: 387010 - DNA, 25 bp, Artificial
  probe
  misc_feature (1)..(25): SEQ ID NO: 4625; WAN0249VU; Start 101; Stop 125
aaaatgtaagaaactgtcacgaaat

SEQ ID NO: 387011 - DNA, 25 bp, Artificial
  probe
  misc_feature (1)..(25): SEQ ID NO: 4625; WAN0249VU; Start 100; Stop 124
taaaatgtaagaaactgtcacgaaa

SEQ ID NO: 387012 - DNA, 25 bp, Artificial
  probe
  misc_feature (1)..(25): SEQ ID NO: 4625; WAN0249VU; Start 113; Stop 137
actgtcacgaaattaaaatgaagtt

SEQ ID NO: 387013 - DNA, 25 bp, Artificial
  probe
  misc_feature (1)..(25): SEQ ID NO: 4625; WAN0249VU; Start 112; Stop 136
aactgtcacgaaattaaaatgaagt

SEQ ID NO: 387014 - DNA, 25 bp, Artificial
  probe
  misc_feature (1)..(25): SEQ ID NO: 4625; WAN0249VU; Start 99; Stop 123
ttaaaatgtaagaaactgtcacgaa

SEQ ID NO: 387015 - DNA, 25 bp, Artificial
  probe
  misc_feature (1)..(25): SEQ ID NO: 4625; WAN0249VU; Start 115; Stop 139
tgtcacgaaattaaaatgaagttct

SEQ ID NO: 387016 - DNA, 25 bp, Artificial
  probe
  misc_feature (1)..(25): SEQ ID NO: 4625; WAN0249VU; Start 109; Stop 133
agaaactgtcacgaaattaaaatga

SEQ ID NO: 387017 - DNA, 25 bp, Artificial
  probe
  misc_feature (1)..(25): SEQ ID NO: 4625; WAN0249VU; Start 114; Stop 138
ctgtcacgaaattaaaatgaagttc

SEQ ID NO: 387018 - DNA, 25 bp, Artificial
  probe
  misc_feature (1)..(25): SEQ ID NO: 4625; WAN0249VU; Start 108; Stop 132
aagaaactgtcacgaaattaaaatg

SEQ ID NO: 387019 - DNA, 25 bp, Artificial
  probe
  misc_feature (1)..(25): SEQ ID NO: 4625; WAN0249VU; Start 54; Stop 78
cccttttccctctacacagatagtg

SEQ ID NO: 387020 - DNA, 25 bp, Artificial
  probe
  misc_feature (1)..(25): SEQ ID NO: 4625; WAN0249VU; Start 31; Stop 55
taaagaacctaagagtgtatacccc

SEQ ID NO: 387021 - DNA, 25 bp, Artificial
  probe
  misc_feature (1)..(25): SEQ ID NO: 4625; WAN0249VU; Start 53; Stop 77
ccccttttccctctacacagatagt

SEQ ID NO: 387022 - DNA, 25 bp, Artificial
  probe
  misc_feature (1)..(25): SEQ ID NO: 4625; WAN0249VU; Start 110; Stop 134
gaaactgtcacgaaattaaaatgaa

SEQ ID NO: 387023 - DNA, 25 bp, Artificial
  probe
  misc_feature (1)..(25): SEQ ID NO: 4625; WAN0249VU; Start 111; Stop 135
aaactgtcacgaaattaaaatgaag

SEQ ID NO: 387024 - DNA, 25 bp, Artificial
  probe
  misc_feature (1)..(25): SEQ ID NO: 4625; WAN0249VU; Start 88; Stop 112
ggggcttttgtttaaaatgtaagaa

SEQ ID NO: 387025 - DNA, 25 bp, Artificial
  probe
  misc_feature (1)..(25): SEQ ID NO: 4625; WAN0249VU; Start 116; Stop 140
gtcacgaaattaaaatgaagttctt

SEQ ID NO: 387026 - DNA, 25 bp, Artificial
  probe
  misc_feature (1)..(25): SEQ ID NO: 4625; WAN0249VU; Start 98; Stop 122
tttaaaatgtaagaaactgtcacga

SEQ ID NO: 387027 - DNA, 25 bp, Artificial
  probe
  misc_feature (1)..(25): SEQ ID NO: 4625; WAN0249VU; Start 106; Stop 130
gtaagaaactgtcacgaaattaaaa

SEQ ID NO: 387028 - DNA, 25 bp, Artificial
  probe
  misc_feature (1)..(25): SEQ ID NO: 4625; WAN0249VU; Start 29; Stop 53
tttaaagaacctaagagtgtatacc

SEQ ID NO: 387029 - DNA, 25 bp, Artificial
  probe
  misc_feature (1)..(25): SEQ ID NO: 4625; WAN0249VU; Start 89; Stop 113
gggcttttgtttaaaatgtaagaaa

SEQ ID NO: 387030 - DNA, 25 bp, Artificial
  probe
  misc_feature (1)..(25): SEQ ID NO: 4625; WAN0249VU; Start 107; Stop 131
taagaaactgtcacgaaattaaaat

SEQ ID NO: 387031 - DNA, 25 bp, Artificial
  probe
  misc_feature (1)..(25): SEQ ID NO: 4625; WAN0249VU; Start 119; Stop 143
acgaaattaaaatgaagttcttaca

SEQ ID NO: 387032 - DNA, 25 bp, Artificial
  probe
  misc_feature (1)..(25): SEQ ID NO: 4625; WAN0249VU; Start 97; Stop 121
gtttaaaatgtaagaaactgtcacg

SEQ ID NO: 387033 - DNA, 25 bp, Artificial
  probe
  misc_feature (1)..(25): SEQ ID NO: 4625; WAN0249VU; Start 118; Stop 142
cacgaaattaaaatgaagttcttac

SEQ ID NO: 387034 - DNA, 25 bp, Artificial
  probe
  misc_feature (1)..(25): SEQ ID NO: 4625; WAN0249VU; Start 117; Stop 141
tcacgaaattaaaatgaagttctta

SEQ ID NO: 387035 - DNA, 25 bp, Artificial
  probe
  misc_feature (1)..(25): SEQ ID NO: 4625; WAN0249VU; Start 55; Stop 79
ccttttccctctacacagatagtgt

SEQ ID NO: 387036 - DNA, 25 bp, Artificial
  probe
  misc_feature (1)..(25): SEQ ID NO: 4625; WAN0249VU; Start 96; Stop 120
tgtttaaaatgtaagaaactgtcac

SEQ ID NO: 387037 - DNA, 25 bp, Artificial
  probe
  misc_feature (1)..(25): SEQ ID NO: 4625; WAN0249VU; Start 90; Stop 114
ggcttttgtttaaaatgtaagaaac

SEQ ID NO: 387038 - DNA, 25 bp, Artificial
  probe
  misc_feature (1)..(25): SEQ ID NO: 4626; WAN024A2C; Start 7; Stop 31
cgtgattgacaagaaagagttagaa

SEQ ID NO: 387039 - DNA, 25 bp, Artificial
  probe
  misc_feature (1)..(25): SEQ ID NO: 4626; WAN024A2C; Start 6; Stop 30
gcgtgattgacaagaaagagttaga

SEQ ID NO: 387040 - DNA, 25 bp, Artificial
  probe
  misc_feature (1)..(25): SEQ ID NO: 4626; WAN024A2C; Start 5; Stop 29
tgcgtgattgacaagaaagagttag

SEQ ID NO: 387041 - DNA, 25 bp, Artificial
  probe
  misc_feature (1)..(25): SEQ ID NO: 4626; WAN024A2C; Start 4; Stop 28
ttgcgtgattgacaagaaagagtta

SEQ ID NO: 387042 - DNA, 25 bp, Artificial
  probe
  misc_feature (1)..(25): SEQ ID NO: 4626; WAN024A2C; Start 39; Stop 63
agttacaacaagaaagaaggaatct

SEQ ID NO: 387043 - DNA, 25 bp, Artificial
  probe
  misc_feature (1)..(25): SEQ ID NO: 4626; WAN024A2C; Start 35; Stop 59
agatagttacaacaagaaagaagga

SEQ ID NO: 387044 - DNA, 25 bp, Artificial
  probe
  misc_feature (1)..(25): SEQ ID NO: 4626; WAN024A2C; Start 8; Stop 32
gtgattgacaagaaagagttagaat

SEQ ID NO: 387045 - DNA, 25 bp, Artificial
  probe
  misc_feature (1)..(25): SEQ ID NO: 4626; WAN024A2C; Start 38; Stop 62
tagttacaacaagaaagaaggaatc

SEQ ID NO: 387046 - DNA, 25 bp, Artificial
  probe
  misc_feature (1)..(25): SEQ ID NO: 4626; WAN024A2C; Start 36; Stop 60
gatagttacaacaagaaagaaggaa

SEQ ID NO: 387047 - DNA, 25 bp, Artificial
  probe
  misc_feature (1)..(25): SEQ ID NO: 4626; WAN024A2C; Start 34; Stop 58
aagatagttacaacaagaaagaagg

SEQ ID NO: 387048 - DNA, 25 bp, Artificial
  probe
  misc_feature (1)..(25): SEQ ID NO: 4626; WAN024A2C; Start 40; Stop 64
gttacaacaagaaagaaggaatcta

SEQ ID NO: 387049 - DNA, 25 bp, Artificial
  probe
  misc_feature (1)..(25): SEQ ID NO: 4626; WAN024A2C; Start 37; Stop 61
atagttacaacaagaaagaaggaat

SEQ ID NO: 387050 - DNA, 25 bp, Artificial
  probe
  misc_feature (1)..(25): SEQ ID NO: 4626; WAN024A2C; Start 41; Stop 65
ttacaacaagaaagaaggaatctat

SEQ ID NO: 387051 - DNA, 25 bp, Artificial
  probe
  misc_feature (1)..(25): SEQ ID NO: 4626; WAN024A2C; Start 13; Stop 37
tgacaagaaagagttagaataaaga

SEQ ID NO: 387052 - DNA, 25 bp, Artificial
  probe
  misc_feature (1)..(25): SEQ ID NO: 4626; WAN024A2C; Start 9; Stop 33
tgattgacaagaaagagttagaata

SEQ ID NO: 387053 - DNA, 25 bp, Artificial
  probe
  misc_feature (1)..(25): SEQ ID NO: 4626; WAN024A2C; Start 33; Stop 57
aaagatagttacaacaagaaagaag

SEQ ID NO: 387054 - DNA, 25 bp, Artificial
  probe
  misc_feature (1)..(25): SEQ ID NO: 4626; WAN024A2C; Start 3; Stop 27
cttgcgtgattgacaagaaagagtt

SEQ ID NO: 387055 - DNA, 25 bp, Artificial
  probe
  misc_feature (1)..(25): SEQ ID NO: 4626; WAN024A2C; Start 12; Stop 36
ttgacaagaaagagttagaataaag

SEQ ID NO: 387056 - DNA, 25 bp, Artificial
  probe
  misc_feature (1)..(25): SEQ ID NO: 4626; WAN024A2C; Start 10; Stop 34
gattgacaagaaagagttagaataa

SEQ ID NO: 387057 - DNA, 25 bp, Artificial
  probe
  misc_feature (1)..(25): SEQ ID NO: 4626; WAN024A2C; Start 1; Stop 25
tccttgcgtgattgacaagaaagag

SEQ ID NO: 387058 - DNA, 25 bp, Artificial
  probe
  misc_feature (1)..(25): SEQ ID NO: 4626; WAN024A2C; Start 2; Stop 26
ccttgcgtgattgacaagaaagagt

SEQ ID NO: 387059 - DNA, 25 bp, Artificial
  probe
  misc_feature (1)..(25): SEQ ID NO: 4627; WAN0249NS; Start 47; Stop 71
aaatagtttgctaactttactggcg

SEQ ID NO: 387060 - DNA, 25 bp, Artificial
  probe
  misc_feature (1)..(25): SEQ ID NO: 4627; WAN0249NS; Start 49; Stop 73
atagtttgctaactttactggcgaa

SEQ ID NO: 387061 - DNA, 25 bp, Artificial
  probe
  misc_feature (1)..(25): SEQ ID NO: 4627; WAN0249NS; Start 48; Stop 72
aatagtttgctaactttactggcga

SEQ ID NO: 387062 - DNA, 25 bp, Artificial
  probe
  misc_feature (1)..(25): SEQ ID NO: 4627; WAN0249NS; Start 50; Stop 74
tagtttgctaactttactggcgaaa

SEQ ID NO: 387063 - DNA, 25 bp, Artificial
  probe
  misc_feature (1)..(25): SEQ ID NO: 4627; WAN0249NS; Start 52; Stop 76
gtttgctaactttactggcgaaaag

SEQ ID NO: 387064 - DNA, 25 bp, Artificial
  probe
  misc_feature (1)..(25): SEQ ID NO: 4627; WAN0249NS; Start 51; Stop 75
agtttgctaactttactggcgaaaa

SEQ ID NO: 387065 - DNA, 25 bp, Artificial
  probe
  misc_feature (1)..(25): SEQ ID NO: 4627; WAN0249NS; Start 46; Stop 70
aaaatagtttgctaactttactggc

SEQ ID NO: 387066 - DNA, 25 bp, Artificial
  probe
  misc_feature (1)..(25): SEQ ID NO: 4627; WAN0249NS; Start 1; Stop 25
tcctttcgatttaacatttaaacta

SEQ ID NO: 387067 - DNA, 25 bp, Artificial
  probe
  misc_feature (1)..(25): SEQ ID NO: 4627; WAN0249NS; Start 53; Stop 77
tttgctaactttactggcgaaaagt

SEQ ID NO: 387068 - DNA, 25 bp, Artificial
  probe
  misc_feature (1)..(25): SEQ ID NO: 4628; WAN024A4S; Start 27; Stop 51
tttaagaagagcgaatcgtctgatt

SEQ ID NO: 387069 - DNA, 25 bp, Artificial
  probe
  misc_feature (1)..(25): SEQ ID NO: 4628; WAN024A4S; Start 26; Stop 50
ttttaagaagagcgaatcgtctgat

SEQ ID NO: 387070 - DNA, 25 bp, Artificial
  probe
  misc_feature (1)..(25): SEQ ID NO: 4628; WAN024A4S; Start 25; Stop 49
attttaagaagagcgaatcgtctga

SEQ ID NO: 387071 - DNA, 25 bp, Artificial
  probe
  misc_feature (1)..(25): SEQ ID NO: 4628; WAN024A4S; Start 18; Stop 42
ttttcagattttaagaagagcgaat

SEQ ID NO: 387072 - DNA, 25 bp, Artificial
  probe
  misc_feature (1)..(25): SEQ ID NO: 4628; WAN024A4S; Start 17; Stop 41
attttcagattttaagaagagcgaa

SEQ ID NO: 387073 - DNA, 25 bp, Artificial
  probe
  misc_feature (1)..(25): SEQ ID NO: 4628; WAN024A4S; Start 20; Stop 44
ttcagattttaagaagagcgaatcg

SEQ ID NO: 387074 - DNA, 25 bp, Artificial
  probe
  misc_feature (1)..(25): SEQ ID NO: 4628; WAN024A4S; Start 24; Stop 48
gattttaagaagagcgaatcgtctg

SEQ ID NO: 387075 - DNA, 25 bp, Artificial
  probe
  misc_feature (1)..(25): SEQ ID NO: 4628; WAN024A4S; Start 23; Stop 47
agattttaagaagagcgaatcgtct

SEQ ID NO: 387076 - DNA, 25 bp, Artificial
  probe
  misc_feature (1)..(25): SEQ ID NO: 4628; WAN024A4S; Start 22; Stop 46
cagattttaagaagagcgaatcgtc

SEQ ID NO: 387077 - DNA, 25 bp, Artificial
  probe
  misc_feature (1)..(25): SEQ ID NO: 4628; WAN024A4S; Start 21; Stop 45
tcagattttaagaagagcgaatcgt

SEQ ID NO: 387078 - DNA, 25 bp, Artificial
  probe
  misc_feature (1)..(25): SEQ ID NO: 4628; WAN024A4S; Start 19; Stop 43
tttcagattttaagaagagcgaatc

SEQ ID NO: 387079 - DNA, 25 bp, Artificial
  probe
  misc_feature (1)..(25): SEQ ID NO: 4628; WAN024A4S; Start 16; Stop 40
tattttcagattttaagaagagcga

SEQ ID NO: 387080 - DNA, 25 bp, Artificial
  probe
  misc_feature (1)..(25): SEQ ID NO: 4628; WAN024A4S; Start 15; Stop 39
ctattttcagattttaagaagagcg

SEQ ID NO: 387081 - DNA, 25 bp, Artificial
  probe
  misc_feature (1)..(25): SEQ ID NO: 4628; WAN024A4S; Start 28; Stop 52
ttaagaagagcgaatcgtctgattc

SEQ ID NO: 387082 - DNA, 25 bp, Artificial
  probe
  misc_feature (1)..(25): SEQ ID NO: 4628; WAN024A4S; Start 14; Stop 38
gctattttcagattttaagaagagc

SEQ ID NO: 387083 - DNA, 25 bp, Artificial
  probe
  misc_feature (1)..(25): SEQ ID NO: 4628; WAN024A4S; Start 1; Stop 25
tcctttctggaaagctattttcaga

SEQ ID NO: 387084 - DNA, 25 bp, Artificial
  probe
  misc_feature (1)..(25): SEQ ID NO: 4628; WAN024A4S; Start 2; Stop 26
cctttctggaaagctattttcagat

SEQ ID NO: 387085 - DNA, 25 bp, Artificial
  probe
  misc_feature (1)..(25): SEQ ID NO: 4628; WAN024A4S; Start 3; Stop 27
ctttctggaaagctattttcagatt

SEQ ID NO: 387086 - DNA, 25 bp, Artificial
  probe
  misc_feature (1)..(25): SEQ ID NO: 4628; WAN024A4S; Start 5; Stop 29
ttctggaaagctattttcagatttt

SEQ ID NO: 387087 - DNA, 25 bp, Artificial
  probe
  misc_feature (1)..(25): SEQ ID NO: 4628; WAN024A4S; Start 4; Stop 28
tttctggaaagctattttcagattt

SEQ ID NO: 387088 - DNA, 25 bp, Artificial
  probe
  misc_feature (1)..(25): SEQ ID NO: 4628; WAN024A4S; Start 13; Stop 37
agctattttcagattttaagaagag

SEQ ID NO: 387089 - DNA, 25 bp, Artificial
  probe
  misc_feature (1)..(25): SEQ ID NO: 4628; WAN024A4S; Start 8; Stop 32
tggaaagctattttcagattttaag

SEQ ID NO: 387090 - DNA, 25 bp, Artificial
  probe
  misc_feature (1)..(25): SEQ ID NO: 4628; WAN024A4S; Start 7; Stop 31
ctggaaagctattttcagattttaa

SEQ ID NO: 387091 - DNA, 25 bp, Artificial
  probe
  misc_feature (1)..(25): SEQ ID NO: 4628; WAN024A4S; Start 9; Stop 33
ggaaagctattttcagattttaaga

SEQ ID NO: 387092 - DNA, 25 bp, Artificial
  probe
  misc_feature (1)..(25): SEQ ID NO: 4628; WAN024A4S; Start 6; Stop 30
tctggaaagctattttcagatttta

SEQ ID NO: 387093 - DNA, 25 bp, Artificial
  probe
  misc_feature (1)..(25): SEQ ID NO: 4629; WAN0249MP; Start 27; Stop 51
accttgttcattatcattatccact

SEQ ID NO: 387094 - DNA, 25 bp, Artificial
  probe
  misc_feature (1)..(25): SEQ ID NO: 4629; WAN0249MP; Start 26; Stop 50
caccttgttcattatcattatccac

SEQ ID NO: 387095 - DNA, 25 bp, Artificial
  probe
  misc_feature (1)..(25): SEQ ID NO: 4629; WAN0249MP; Start 25; Stop 49
acaccttgttcattatcattatcca

SEQ ID NO: 387096 - DNA, 25 bp, Artificial
  probe
  misc_feature (1)..(25): SEQ ID NO: 4629; WAN0249MP; Start 54; Stop 78
aactcaaagaaaggatagaagcaaa

SEQ ID NO: 387097 - DNA, 25 bp, Artificial
  probe
  misc_feature (1)..(25): SEQ ID NO: 4629; WAN0249MP; Start 53; Stop 77
aaactcaaagaaaggatagaagcaa

SEQ ID NO: 387098 - DNA, 25 bp, Artificial
  probe
  misc_feature (1)..(25): SEQ ID NO: 4629; WAN0249MP; Start 28; Stop 52
ccttgttcattatcattatccacta

SEQ ID NO: 387099 - DNA, 25 bp, Artificial
  probe
  misc_feature (1)..(25): SEQ ID NO: 4629; WAN0249MP; Start 57; Stop 81
tcaaagaaaggatagaagcaaaacg

SEQ ID NO: 387100 - DNA, 25 bp, Artificial
  probe
  misc_feature (1)..(25): SEQ ID NO: 4629; WAN0249MP; Start 94; Stop 118
agttctgaacaatttgccttaagtg

SEQ ID NO: 387101 - DNA, 25 bp, Artificial
  probe
  misc_feature (1)..(25): SEQ ID NO: 4629; WAN0249MP; Start 93; Stop 117
cagttctgaacaatttgccttaagt

SEQ ID NO: 387102 - DNA, 25 bp, Artificial
  probe
  misc_feature (1)..(25): SEQ ID NO: 4629; WAN0249MP; Start 92; Stop 116
tcagttctgaacaatttgccttaag

SEQ ID NO: 387103 - DNA, 25 bp, Artificial
  probe
  misc_feature (1)..(25): SEQ ID NO: 4629; WAN0249MP; Start 55; Stop 79
actcaaagaaaggatagaagcaaaa

SEQ ID NO: 387104 - DNA, 25 bp, Artificial
  probe
  misc_feature (1)..(25): SEQ ID NO: 4629; WAN0249MP; Start 52; Stop 76
aaaactcaaagaaaggatagaagca

SEQ ID NO: 387105 - DNA, 25 bp, Artificial
  probe
  misc_feature (1)..(25): SEQ ID NO: 4629; WAN0249MP; Start 56; Stop 80
ctcaaagaaaggatagaagcaaaac

SEQ ID NO: 387106 - DNA, 25 bp, Artificial
  probe
  misc_feature (1)..(25): SEQ ID NO: 4629; WAN0249MP; Start 96; Stop 120
ttctgaacaatttgccttaagtgtc

SEQ ID NO: 387107 - DNA, 25 bp, Artificial
  probe
  misc_feature (1)..(25): SEQ ID NO: 4629; WAN0249MP; Start 95; Stop 119
gttctgaacaatttgccttaagtgt

SEQ ID NO: 387108 - DNA, 25 bp, Artificial
  probe
  misc_feature (1)..(25): SEQ ID NO: 4629; WAN0249MP; Start 24; Stop 48
aacaccttgttcattatcattatcc

SEQ ID NO: 387109 - DNA, 25 bp, Artificial
  probe
  misc_feature (1)..(25): SEQ ID NO: 4629; WAN0249MP; Start 99; Stop 123
tgaacaatttgccttaagtgtccat

SEQ ID NO: 387110 - DNA, 25 bp, Artificial
  probe
  misc_feature (1)..(25): SEQ ID NO: 4629; WAN0249MP; Start 97; Stop 121
tctgaacaatttgccttaagtgtcc

SEQ ID NO: 387111 - DNA, 25 bp, Artificial
  probe
  misc_feature (1)..(25): SEQ ID NO: 4629; WAN0249MP; Start 98; Stop 122
ctgaacaatttgccttaagtgtcca

SEQ ID NO: 387112 - DNA, 25 bp, Artificial
  probe
  misc_feature (1)..(25): SEQ ID NO: 4629; WAN0249MP; Start 47; Stop 71
ccactaaaactcaaagaaaggatag

SEQ ID NO: 387113 - DNA, 25 bp, Artificial
  probe
  misc_feature (1)..(25): SEQ ID NO: 4629; WAN0249MP; Start 91; Stop 115
ttcagttctgaacaatttgccttaa

SEQ ID NO: 387114 - DNA, 25 bp, Artificial
  probe
  misc_feature (1)..(25): SEQ ID NO: 4629; WAN0249MP; Start 51; Stop 75
taaaactcaaagaaaggatagaagc

SEQ ID NO: 387115 - DNA, 25 bp, Artificial
  probe
  misc_feature (1)..(25): SEQ ID NO: 4629; WAN0249MP; Start 90; Stop 114
attcagttctgaacaatttgcctta

SEQ ID NO: 387116 - DNA, 25 bp, Artificial
  probe
  misc_feature (1)..(25): SEQ ID NO: 4629; WAN0249MP; Start 89; Stop 113
tattcagttctgaacaatttgcctt

SEQ ID NO: 387117 - DNA, 25 bp, Artificial
  probe
  misc_feature (1)..(25): SEQ ID NO: 4629; WAN0249MP; Start 88; Stop 112
ttattcagttctgaacaatttgcct

SEQ ID NO: 387118 - DNA, 25 bp, Artificial
  probe
  misc_feature (1)..(25): SEQ ID NO: 4629; WAN0249MP; Start 59; Stop 83
aaagaaaggatagaagcaaaacgtc

SEQ ID NO: 387119 - DNA, 25 bp, Artificial
  probe
  misc_feature (1)..(25): SEQ ID NO: 4629; WAN0249MP; Start 58; Stop 82
caaagaaaggatagaagcaaaacgt

SEQ ID NO: 387120 - DNA, 25 bp, Artificial
  probe
  misc_feature (1)..(25): SEQ ID NO: 4629; WAN0249MP; Start 43; Stop 67
ttatccactaaaactcaaagaaagg

SEQ ID NO: 387121 - DNA, 25 bp, Artificial
  probe
  misc_feature (1)..(25): SEQ ID NO: 4629; WAN0249MP; Start 60; Stop 84
aagaaaggatagaagcaaaacgtca

SEQ ID NO: 387122 - DNA, 25 bp, Artificial
  probe
  misc_feature (1)..(25): SEQ ID NO: 4629; WAN0249MP; Start 87; Stop 111
tttattcagttctgaacaatttgcc

SEQ ID NO: 387123 - DNA, 25 bp, Artificial
  probe
  misc_feature (1)..(25): SEQ ID NO: 4629; WAN0249MP; Start 75; Stop 99
caaaacgtcagctttattcagttct

SEQ ID NO: 387124 - DNA, 25 bp, Artificial
  probe
  misc_feature (1)..(25): SEQ ID NO: 4629; WAN0249MP; Start 61; Stop 85
agaaaggatagaagcaaaacgtcag

SEQ ID NO: 387125 - DNA, 25 bp, Artificial
  probe
  misc_feature (1)..(25): SEQ ID NO: 4629; WAN0249MP; Start 83; Stop 107
cagctttattcagttctgaacaatt

SEQ ID NO: 387126 - DNA, 25 bp, Artificial
  probe
  misc_feature (1)..(25): SEQ ID NO: 4630; WAN0249DV; Start 2; Stop 26
cgaagtttcctcttttctttctttt

SEQ ID NO: 387127 - DNA, 25 bp, Artificial
  probe
  misc_feature (1)..(25): SEQ ID NO: 4630; WAN0249DV; Start 1; Stop 25
tcgaagtttcctcttttctttcttt

SEQ ID NO: 387128 - DNA, 25 bp, Artificial
  probe
  misc_feature (1)..(25): SEQ ID NO: 4630; WAN0249DV; Start 75; Stop 99
tttgtcaaatgttacaggggtaaat

SEQ ID NO: 387129 - DNA, 25 bp, Artificial
  probe
  misc_feature (1)..(25): SEQ ID NO: 4630; WAN0249DV; Start 77; Stop 101
tgtcaaatgttacaggggtaaataa

SEQ ID NO: 387130 - DNA, 25 bp, Artificial
  probe
  misc_feature (1)..(25): SEQ ID NO: 4630; WAN0249DV; Start 76; Stop 100
ttgtcaaatgttacaggggtaaata

SEQ ID NO: 387131 - DNA, 25 bp, Artificial
  probe
  misc_feature (1)..(25): SEQ ID NO: 4630; WAN0249DV; Start 71; Stop 95
aaaatttgtcaaatgttacaggggt

SEQ ID NO: 387132 - DNA, 25 bp, Artificial
  probe
  misc_feature (1)..(25): SEQ ID NO: 4630; WAN0249DV; Start 74; Stop 98
atttgtcaaatgttacaggggtaaa

SEQ ID NO: 387133 - DNA, 25 bp, Artificial
  probe
  misc_feature (1)..(25): SEQ ID NO: 4630; WAN0249DV; Start 73; Stop 97
aatttgtcaaatgttacaggggtaa

SEQ ID NO: 387134 - DNA, 25 bp, Artificial
  probe
  misc_feature (1)..(25): SEQ ID NO: 4630; WAN0249DV; Start 72; Stop 96
aaatttgtcaaatgttacaggggta

SEQ ID NO: 387135 - DNA, 25 bp, Artificial
  probe
  misc_feature (1)..(25): SEQ ID NO: 4630; WAN0249DV; Start 78; Stop 102
gtcaaatgttacaggggtaaataaa

SEQ ID NO: 387136 - DNA, 25 bp, Artificial
  probe
  misc_feature (1)..(25): SEQ ID NO: 4630; WAN0249DV; Start 79; Stop 103
tcaaatgttacaggggtaaataaaa

SEQ ID NO: 387137 - DNA, 25 bp, Artificial
  probe
  misc_feature (1)..(25): SEQ ID NO: 4631; WAN024DFM; Start 378; Stop 402
tcagagattatctacggtcacaatg

SEQ ID NO: 387138 - DNA, 25 bp, Artificial
  probe
  misc_feature (1)..(25): SEQ ID NO: 4631; WAN024DFM; Start 376; Stop 400
gttcagagattatctacggtcacaa

SEQ ID NO: 387139 - DNA, 25 bp, Artificial
  probe
  misc_feature (1)..(25): SEQ ID NO: 4631; WAN024DFM; Start 372; Stop 396
gaaggttcagagattatctacggtc

SEQ ID NO: 387140 - DNA, 25 bp, Artificial
  probe
  misc_feature (1)..(25): SEQ ID NO: 4631; WAN024DFM; Start 377; Stop 401
ttcagagattatctacggtcacaat

SEQ ID NO: 387141 - DNA, 25 bp, Artificial
  probe
  misc_feature (1)..(25): SEQ ID NO: 4631; WAN024DFM; Start 383; Stop 407
gattatctacggtcacaatgccaag

SEQ ID NO: 387142 - DNA, 25 bp, Artificial
  probe
  misc_feature (1)..(25): SEQ ID NO: 4631; WAN024DFM; Start 373; Stop 397
aaggttcagagattatctacggtca

SEQ ID NO: 387143 - DNA, 25 bp, Artificial
  probe
  misc_feature (1)..(25): SEQ ID NO: 4631; WAN024DFM; Start 370; Stop 394
atgaaggttcagagattatctacgg

SEQ ID NO: 387144 - DNA, 25 bp, Artificial
  probe
  misc_feature (1)..(25): SEQ ID NO: 4631; WAN024DFM; Start 379; Stop 403
cagagattatctacggtcacaatgc

SEQ ID NO: 387145 - DNA, 25 bp, Artificial
  probe
  misc_feature (1)..(25): SEQ ID NO: 4631; WAN024DFM; Start 374; Stop 398
aggttcagagattatctacggtcac

SEQ ID NO: 387146 - DNA, 25 bp, Artificial
  probe
  misc_feature (1)..(25): SEQ ID NO: 4631; WAN024DFM; Start 371; Stop 395
tgaaggttcagagattatctacggt

SEQ ID NO: 387147 - DNA, 25 bp, Artificial
  probe
  misc_feature (1)..(25): SEQ ID NO: 4631; WAN024DFM; Start 384; Stop 408
attatctacggtcacaatgccaagt

SEQ ID NO: 387148 - DNA, 25 bp, Artificial
  probe
  misc_feature (1)..(25): SEQ ID NO: 4631; WAN024DFM; Start 375; Stop 399
ggttcagagattatctacggtcaca

SEQ ID NO: 387149 - DNA, 25 bp, Artificial
  probe
  misc_feature (1)..(25): SEQ ID NO: 4631; WAN024DFM; Start 369; Stop 393
gatgaaggttcagagattatctacg

SEQ ID NO: 387150 - DNA, 25 bp, Artificial
  probe
  misc_feature (1)..(25): SEQ ID NO: 4631; WAN024DFM; Start 382; Stop 406
agattatctacggtcacaatgccaa

SEQ ID NO: 387151 - DNA, 25 bp, Artificial
  probe
  misc_feature (1)..(25): SEQ ID NO: 4631; WAN024DFM; Start 380; Stop 404
agagattatctacggtcacaatgcc

SEQ ID NO: 387152 - DNA, 25 bp, Artificial
  probe
  misc_feature (1)..(25): SEQ ID NO: 4631; WAN024DFM; Start 385; Stop 409
ttatctacggtcacaatgccaagtc

SEQ ID NO: 387153 - DNA, 25 bp, Artificial
  probe
  misc_feature (1)..(25): SEQ ID NO: 4631; WAN024DFM; Start 381; Stop 405
gagattatctacggtcacaatgcca

SEQ ID NO: 387154 - DNA, 25 bp, Artificial
  probe
  misc_feature (1)..(25): SEQ ID NO: 4631; WAN024DFM; Start 875; Stop 899
ctttatcctaccaagtgatgttgaa

SEQ ID NO: 387155 - DNA, 25 bp, Artificial
  probe
  misc_feature (1)..(25): SEQ ID NO: 4631; WAN024DFM; Start 201; Stop 225
gaacaccgtgaattatttggcaatc

SEQ ID NO: 387156 - DNA, 25 bp, Artificial
  probe
  misc_feature (1)..(25): SEQ ID NO: 4631; WAN024DFM; Start 386; Stop 410
tatctacggtcacaatgccaagtca

SEQ ID NO: 387157 - DNA, 25 bp, Artificial
  probe
  misc_feature (1)..(25): SEQ ID NO: 4631; WAN024DFM; Start 200; Stop 224
ggaacaccgtgaattatttggcaat

SEQ ID NO: 387158 - DNA, 25 bp, Artificial
  probe
  misc_feature (1)..(25): SEQ ID NO: 4631; WAN024DFM; Start 210; Stop 234
gaattatttggcaatcgtccagaac

SEQ ID NO: 387159 - DNA, 25 bp, Artificial
  probe
  misc_feature (1)..(25): SEQ ID NO: 4631; WAN024DFM; Start 180; Stop 204
gatcttgctactttgtatgcggaac

SEQ ID NO: 387160 - DNA, 25 bp, Artificial
  probe
  misc_feature (1)..(25): SEQ ID NO: 4631; WAN024DFM; Start 209; Stop 233
tgaattatttggcaatcgtccagaa

SEQ ID NO: 387161 - DNA, 25 bp, Artificial
  probe
  misc_feature (1)..(25): SEQ ID NO: 4631; WAN024DFM; Start 202; Stop 226
aacaccgtgaattatttggcaatcg

SEQ ID NO: 387162 - DNA, 25 bp, Artificial
  probe
  misc_feature (1)..(25): SEQ ID NO: 4631; WAN024DFM; Start 208; Stop 232
gtgaattatttggcaatcgtccaga

SEQ ID NO: 387163 - DNA, 25 bp, Artificial
  probe
  misc_feature (1)..(25): SEQ ID NO: 4631; WAN024DFM; Start 211; Stop 235
aattatttggcaatcgtccagaacc

SEQ ID NO: 387164 - DNA, 25 bp, Artificial
  probe
  misc_feature (1)..(25): SEQ ID NO: 4631; WAN024DFM; Start 204; Stop 228
caccgtgaattatttggcaatcgtc

SEQ ID NO: 387165 - DNA, 25 bp, Artificial
  probe
  misc_feature (1)..(25): SEQ ID NO: 4631; WAN024DFM; Start 181; Stop 205
atcttgctactttgtatgcggaaca

SEQ ID NO: 387166 - DNA, 25 bp, Artificial
  probe
  misc_feature (1)..(25): SEQ ID NO: 4631; WAN024DFM; Start 387; Stop 411
atctacggtcacaatgccaagtcaa

SEQ ID NO: 387167 - DNA, 25 bp, Artificial
  probe
  misc_feature (1)..(25): SEQ ID NO: 4631; WAN024DFM; Start 222; Stop 246
aatcgtccagaacctgtatttccac

SEQ ID NO: 387168 - DNA, 25 bp, Artificial
  probe
  misc_feature (1)..(25): SEQ ID NO: 4631; WAN024DFM; Start 221; Stop 245
caatcgtccagaacctgtatttcca

SEQ ID NO: 387169 - DNA, 25 bp, Artificial
  probe
  misc_feature (1)..(25): SEQ ID NO: 4631; WAN024DFM; Start 235; Stop 259
ctgtatttccacttttgaccaagat

SEQ ID NO: 387170 - DNA, 25 bp, Artificial
  probe
  misc_feature (1)..(25): SEQ ID NO: 4632; WAN024AEH; Start 45; Stop 69
acagatgaaactacaaagaataaac

SEQ ID NO: 387171 - DNA, 25 bp, Artificial
  probe
  misc_feature (1)..(25): SEQ ID NO: 4632; WAN024AEH; Start 39; Stop 63
actaatacagatgaaactacaaaga

SEQ ID NO: 387172 - DNA, 25 bp, Artificial
  probe
  misc_feature (1)..(25): SEQ ID NO: 4632; WAN024AEH; Start 46; Stop 70
cagatgaaactacaaagaataaact

SEQ ID NO: 387173 - DNA, 25 bp, Artificial
  probe
  misc_feature (1)..(25): SEQ ID NO: 4632; WAN024AEH; Start 1; Stop 25
tcgattagtcctcctattttctcta

SEQ ID NO: 387174 - DNA, 25 bp, Artificial
  probe
  misc_feature (1)..(25): SEQ ID NO: 4632; WAN024AEH; Start 66; Stop 90
aaactttaagaaatcttctcactga

SEQ ID NO: 387175 - DNA, 25 bp, Artificial
  probe
  misc_feature (1)..(25): SEQ ID NO: 4632; WAN024AEH; Start 2; Stop 26
cgattagtcctcctattttctctaa

SEQ ID NO: 387176 - DNA, 25 bp, Artificial
  probe
  misc_feature (1)..(25): SEQ ID NO: 4632; WAN024AEH; Start 80; Stop 104
cttctcactgataagattttagcat

SEQ ID NO: 387177 - DNA, 25 bp, Artificial
  probe
  misc_feature (1)..(25): SEQ ID NO: 4632; WAN024AEH; Start 7; Stop 31
agtcctcctattttctctaagttaa

SEQ ID NO: 387178 - DNA, 25 bp, Artificial
  probe
  misc_feature (1)..(25): SEQ ID NO: 4632; WAN024AEH; Start 67; Stop 91
aactttaagaaatcttctcactgat

SEQ ID NO: 387179 - DNA, 25 bp, Artificial
  probe
  misc_feature (1)..(25): SEQ ID NO: 4632; WAN024AEH; Start 81; Stop 105
ttctcactgataagattttagcatt

SEQ ID NO: 387180 - DNA, 25 bp, Artificial
  probe
  misc_feature (1)..(25): SEQ ID NO: 4632; WAN024AEH; Start 79; Stop 103
tcttctcactgataagattttagca

SEQ ID NO: 387181 - DNA, 25 bp, Artificial
  probe
  misc_feature (1)..(25): SEQ ID NO: 4632; WAN024AEH; Start 5; Stop 29
ttagtcctcctattttctctaagtt

SEQ ID NO: 387182 - DNA, 25 bp, Artificial
  probe
  misc_feature (1)..(25): SEQ ID NO: 4632; WAN024AEH; Start 8; Stop 32
gtcctcctattttctctaagttaaa

SEQ ID NO: 387183 - DNA, 25 bp, Artificial
  probe
  misc_feature (1)..(25): SEQ ID NO: 4632; WAN024AEH; Start 85; Stop 109
cactgataagattttagcattagac

SEQ ID NO: 387184 - DNA, 25 bp, Artificial
  probe
  misc_feature (1)..(25): SEQ ID NO: 4632; WAN024AEH; Start 6; Stop 30
tagtcctcctattttctctaagtta

SEQ ID NO: 387185 - DNA, 25 bp, Artificial
  probe
  misc_feature (1)..(25): SEQ ID NO: 4632; WAN024AEH; Start 4; Stop 28
attagtcctcctattttctctaagt

SEQ ID NO: 387186 - DNA, 25 bp, Artificial
  probe
  misc_feature (1)..(25): SEQ ID NO: 4632; WAN024AEH; Start 86; Stop 110
actgataagattttagcattagact

SEQ ID NO: 387187 - DNA, 25 bp, Artificial
  probe
  misc_feature (1)..(25): SEQ ID NO: 4632; WAN024AEH; Start 68; Stop 92
actttaagaaatcttctcactgata

SEQ ID NO: 387188 - DNA, 25 bp, Artificial
  probe
  misc_feature (1)..(25): SEQ ID NO: 4632; WAN024AEH; Start 84; Stop 108
tcactgataagattttagcattaga

SEQ ID NO: 387189 - DNA, 25 bp, Artificial
  probe
  misc_feature (1)..(25): SEQ ID NO: 4632; WAN024AEH; Start 83; Stop 107
ctcactgataagattttagcattag

SEQ ID NO: 387190 - DNA, 25 bp, Artificial
  probe
  misc_feature (1)..(25): SEQ ID NO: 4632; WAN024AEH; Start 36; Stop 60
tgtactaatacagatgaaactacaa

SEQ ID NO: 387191 - DNA, 25 bp, Artificial
  probe
  misc_feature (1)..(25): SEQ ID NO: 4632; WAN024AEH; Start 82; Stop 106
tctcactgataagattttagcatta

SEQ ID NO: 387192 - DNA, 25 bp, Artificial
  probe
  misc_feature (1)..(25): SEQ ID NO: 4632; WAN024AEH; Start 71; Stop 95
ttaagaaatcttctcactgataaga

SEQ ID NO: 387193 - DNA, 25 bp, Artificial
  probe
  misc_feature (1)..(25): SEQ ID NO: 4632; WAN024AEH; Start 3; Stop 27
gattagtcctcctattttctctaag

SEQ ID NO: 387194 - DNA, 25 bp, Artificial
  probe
  misc_feature (1)..(25): SEQ ID NO: 4632; WAN024AEH; Start 35; Stop 59
atgtactaatacagatgaaactaca

SEQ ID NO: 387195 - DNA, 25 bp, Artificial
  probe
  misc_feature (1)..(25): SEQ ID NO: 4632; WAN024AEH; Start 65; Stop 89
taaactttaagaaatcttctcactg

SEQ ID NO: 387196 - DNA, 25 bp, Artificial
  probe
  misc_feature (1)..(25): SEQ ID NO: 4632; WAN024AEH; Start 88; Stop 112
tgataagattttagcattagacttc

SEQ ID NO: 387197 - DNA, 25 bp, Artificial
  probe
  misc_feature (1)..(25): SEQ ID NO: 4632; WAN024AEH; Start 87; Stop 111
ctgataagattttagcattagactt

SEQ ID NO: 387198 - DNA, 25 bp, Artificial
  probe
  misc_feature (1)..(25): SEQ ID NO: 4632; WAN024AEH; Start 9; Stop 33
tcctcctattttctctaagttaaat

SEQ ID NO: 387199 - DNA, 25 bp, Artificial
  probe
  misc_feature (1)..(25): SEQ ID NO: 4632; WAN024AEH; Start 78; Stop 102
atcttctcactgataagattttagc

SEQ ID NO: 387200 - DNA, 25 bp, Artificial
  probe
  misc_feature (1)..(25): SEQ ID NO: 4632; WAN024AEH; Start 72; Stop 96
taagaaatcttctcactgataagat

SEQ ID NO: 387201 - DNA, 25 bp, Artificial
  probe
  misc_feature (1)..(25): SEQ ID NO: 4633; WAN024A2M; Start 26; Stop 50
aaatcaacggttacagaggattaaa

SEQ ID NO: 387202 - DNA, 25 bp, Artificial
  probe
  misc_feature (1)..(25): SEQ ID NO: 4633; WAN024A2M; Start 49; Stop 73
aaaactgtaactgggattaaaacgg

SEQ ID NO: 387203 - DNA, 25 bp, Artificial
  probe
  misc_feature (1)..(25): SEQ ID NO: 4633; WAN024A2M; Start 56; Stop 80
taactgggattaaaacgggaacatt

SEQ ID NO: 387204 - DNA, 25 bp, Artificial
  probe
  misc_feature (1)..(25): SEQ ID NO: 4633; WAN024A2M; Start 55; Stop 79
gtaactgggattaaaacgggaacat

SEQ ID NO: 387205 - DNA, 25 bp, Artificial
  probe
  misc_feature (1)..(25): SEQ ID NO: 4633; WAN024A2M; Start 57; Stop 81
aactgggattaaaacgggaacattt

SEQ ID NO: 387206 - DNA, 25 bp, Artificial
  probe
  misc_feature (1)..(25): SEQ ID NO: 4633; WAN024A2M; Start 50; Stop 74
aaactgtaactgggattaaaacggg

SEQ ID NO: 387207 - DNA, 25 bp, Artificial
  probe
  misc_feature (1)..(25): SEQ ID NO: 4633; WAN024A2M; Start 53; Stop 77
ctgtaactgggattaaaacgggaac

SEQ ID NO: 387208 - DNA, 25 bp, Artificial
  probe
  misc_feature (1)..(25): SEQ ID NO: 4633; WAN024A2M; Start 52; Stop 76
actgtaactgggattaaaacgggaa

SEQ ID NO: 387209 - DNA, 25 bp, Artificial
  probe
  misc_feature (1)..(25): SEQ ID NO: 4633; WAN024A2M; Start 51; Stop 75
aactgtaactgggattaaaacggga

SEQ ID NO: 387210 - DNA, 25 bp, Artificial
  probe
  misc_feature (1)..(25): SEQ ID NO: 4633; WAN024A2M; Start 187; Stop 211
aatttaattagagagccaactttct

SEQ ID NO: 387211 - DNA, 25 bp, Artificial
  probe
  misc_feature (1)..(25): SEQ ID NO: 4633; WAN024A2M; Start 23; Stop 47
gtaaaatcaacggttacagaggatt

SEQ ID NO: 387212 - DNA, 25 bp, Artificial
  probe
  misc_feature (1)..(25): SEQ ID NO: 4633; WAN024A2M; Start 27; Stop 51
aatcaacggttacagaggattaaaa

SEQ ID NO: 387213 - DNA, 25 bp, Artificial
  probe
  misc_feature (1)..(25): SEQ ID NO: 4633; WAN024A2M; Start 25; Stop 49
aaaatcaacggttacagaggattaa

SEQ ID NO: 387214 - DNA, 25 bp, Artificial
  probe
  misc_feature (1)..(25): SEQ ID NO: 4633; WAN024A2M; Start 54; Stop 78
tgtaactgggattaaaacgggaaca

SEQ ID NO: 387215 - DNA, 25 bp, Artificial
  probe
  misc_feature (1)..(25): SEQ ID NO: 4633; WAN024A2M; Start 24; Stop 48
taaaatcaacggttacagaggatta

SEQ ID NO: 387216 - DNA, 25 bp, Artificial
  probe
  misc_feature (1)..(25): SEQ ID NO: 4633; WAN024A2M; Start 188; Stop 212
atttaattagagagccaactttcta

SEQ ID NO: 387217 - DNA, 25 bp, Artificial
  probe
  misc_feature (1)..(25): SEQ ID NO: 4633; WAN024A2M; Start 186; Stop 210
taatttaattagagagccaactttc

SEQ ID NO: 387218 - DNA, 25 bp, Artificial
  probe
  misc_feature (1)..(25): SEQ ID NO: 4633; WAN024A2M; Start 189; Stop 213
tttaattagagagccaactttctaa

SEQ ID NO: 387219 - DNA, 25 bp, Artificial
  probe
  misc_feature (1)..(25): SEQ ID NO: 4633; WAN024A2M; Start 157; Stop 181
tgcggtcttttgatatatataatga

SEQ ID NO: 387220 - DNA, 25 bp, Artificial
  probe
  misc_feature (1)..(25): SEQ ID NO: 4633; WAN024A2M; Start 22; Stop 46
tgtaaaatcaacggttacagaggat

SEQ ID NO: 387221 - DNA, 25 bp, Artificial
  probe
  misc_feature (1)..(25): SEQ ID NO: 4633; WAN024A2M; Start 20; Stop 44
tttgtaaaatcaacggttacagagg

SEQ ID NO: 387222 - DNA, 25 bp, Artificial
  probe
  misc_feature (1)..(25): SEQ ID NO: 4633; WAN024A2M; Start 18; Stop 42
gctttgtaaaatcaacggttacaga

SEQ ID NO: 387223 - DNA, 25 bp, Artificial
  probe
  misc_feature (1)..(25): SEQ ID NO: 4633; WAN024A2M; Start 21; Stop 45
ttgtaaaatcaacggttacagagga

SEQ ID NO: 387224 - DNA, 25 bp, Artificial
  probe
  misc_feature (1)..(25): SEQ ID NO: 4633; WAN024A2M; Start 156; Stop 180
ctgcggtcttttgatatatataatg

SEQ ID NO: 387225 - DNA, 25 bp, Artificial
  probe
  misc_feature (1)..(25): SEQ ID NO: 4633; WAN024A2M; Start 17; Stop 41
agctttgtaaaatcaacggttacag

SEQ ID NO: 387226 - DNA, 25 bp, Artificial
  probe
  misc_feature (1)..(25): SEQ ID NO: 4633; WAN024A2M; Start 19; Stop 43
ctttgtaaaatcaacggttacagag

SEQ ID NO: 387227 - DNA, 25 bp, Artificial
  probe
  misc_feature (1)..(25): SEQ ID NO: 4633; WAN024A2M; Start 158; Stop 182
gcggtcttttgatatatataatgag

SEQ ID NO: 387228 - DNA, 25 bp, Artificial
  probe
  misc_feature (1)..(25): SEQ ID NO: 4633; WAN024A2M; Start 16; Stop 40
aagctttgtaaaatcaacggttaca

SEQ ID NO: 387229 - DNA, 25 bp, Artificial
  probe
  misc_feature (1)..(25): SEQ ID NO: 4634; WAN0249L7; Start 208; Stop 232
atatgcctcctgaatagtgagttcg

SEQ ID NO: 387230 - DNA, 25 bp, Artificial
  probe
  misc_feature (1)..(25): SEQ ID NO: 4634; WAN0249L7; Start 63; Stop 87
acattaccctacatatcgtttgaca

SEQ ID NO: 387231 - DNA, 25 bp, Artificial
  probe
  misc_feature (1)..(25): SEQ ID NO: 4634; WAN0249L7; Start 58; Stop 82
ctctcacattaccctacatatcgtt

SEQ ID NO: 387232 - DNA, 25 bp, Artificial
  probe
  misc_feature (1)..(25): SEQ ID NO: 4634; WAN0249L7; Start 62; Stop 86
cacattaccctacatatcgtttgac

SEQ ID NO: 387233 - DNA, 25 bp, Artificial
  probe
  misc_feature (1)..(25): SEQ ID NO: 4634; WAN0249L7; Start 60; Stop 84
ctcacattaccctacatatcgtttg

SEQ ID NO: 387234 - DNA, 25 bp, Artificial
  probe
  misc_feature (1)..(25): SEQ ID NO: 4634; WAN0249L7; Start 59; Stop 83
tctcacattaccctacatatcgttt

SEQ ID NO: 387235 - DNA, 25 bp, Artificial
  probe
  misc_feature (1)..(25): SEQ ID NO: 4634; WAN0249L7; Start 141; Stop 165
gcaggacttactatttcacttctac

SEQ ID NO: 387236 - DNA, 25 bp, Artificial
  probe
  misc_feature (1)..(25): SEQ ID NO: 4634; WAN0249L7; Start 57; Stop 81
cctctcacattaccctacatatcgt

SEQ ID NO: 387237 - DNA, 25 bp, Artificial
  probe
  misc_feature (1)..(25): SEQ ID NO: 4634; WAN0249L7; Start 64; Stop 88
cattaccctacatatcgtttgacat

SEQ ID NO: 387238 - DNA, 25 bp, Artificial
  probe
  misc_feature (1)..(25): SEQ ID NO: 4634; WAN0249L7; Start 61; Stop 85
tcacattaccctacatatcgtttga

SEQ ID NO: 387239 - DNA, 25 bp, Artificial
  probe
  misc_feature (1)..(25): SEQ ID NO: 4634; WAN0249L7; Start 56; Stop 80
ccctctcacattaccctacatatcg

SEQ ID NO: 387240 - DNA, 25 bp, Artificial
  probe
  misc_feature (1)..(25): SEQ ID NO: 4634; WAN0249L7; Start 200; Stop 224
aattgctcatatgcctcctgaatag

SEQ ID NO: 387241 - DNA, 25 bp, Artificial
  probe
  misc_feature (1)..(25): SEQ ID NO: 4634; WAN0249L7; Start 199; Stop 223
gaattgctcatatgcctcctgaata

SEQ ID NO: 387242 - DNA, 25 bp, Artificial
  probe
  misc_feature (1)..(25): SEQ ID NO: 4634; WAN0249L7; Start 131; Stop 155
catccactatgcaggacttactatt

SEQ ID NO: 387243 - DNA, 25 bp, Artificial
  probe
  misc_feature (1)..(25): SEQ ID NO: 4634; WAN0249L7; Start 130; Stop 154
tcatccactatgcaggacttactat

SEQ ID NO: 387244 - DNA, 25 bp, Artificial
  probe
  misc_feature (1)..(25): SEQ ID NO: 4634; WAN0249L7; Start 207; Stop 231
catatgcctcctgaatagtgagttc

SEQ ID NO: 387245 - DNA, 25 bp, Artificial
  probe
  misc_feature (1)..(25): SEQ ID NO: 4634; WAN0249L7; Start 66; Stop 90
ttaccctacatatcgtttgacatgc

SEQ ID NO: 387246 - DNA, 25 bp, Artificial
  probe
  misc_feature (1)..(25): SEQ ID NO: 4634; WAN0249L7; Start 206; Stop 230
tcatatgcctcctgaatagtgagtt

SEQ ID NO: 387247 - DNA, 25 bp, Artificial
  probe
  misc_feature (1)..(25): SEQ ID NO: 4634; WAN0249L7; Start 129; Stop 153
ctcatccactatgcaggacttacta

SEQ ID NO: 387248 - DNA, 25 bp, Artificial
  probe
  misc_feature (1)..(25): SEQ ID NO: 4634; WAN0249L7; Start 65; Stop 89
attaccctacatatcgtttgacatg

SEQ ID NO: 387249 - DNA, 25 bp, Artificial
  probe
  misc_feature (1)..(25): SEQ ID NO: 4634; WAN0249L7; Start 142; Stop 166
caggacttactatttcacttctact

SEQ ID NO: 387250 - DNA, 25 bp, Artificial
  probe
  misc_feature (1)..(25): SEQ ID NO: 4634; WAN0249L7; Start 201; Stop 225
attgctcatatgcctcctgaatagt

SEQ ID NO: 387251 - DNA, 25 bp, Artificial
  probe
  misc_feature (1)..(25): SEQ ID NO: 4634; WAN0249L7; Start 145; Stop 169
gacttactatttcacttctactcct

SEQ ID NO: 387252 - DNA, 25 bp, Artificial
  probe
  misc_feature (1)..(25): SEQ ID NO: 4634; WAN0249L7; Start 143; Stop 167
aggacttactatttcacttctactc

SEQ ID NO: 387253 - DNA, 25 bp, Artificial
  probe
  misc_feature (1)..(25): SEQ ID NO: 4634; WAN0249L7; Start 134; Stop 158
ccactatgcaggacttactatttca

SEQ ID NO: 387254 - DNA, 25 bp, Artificial
  probe
  misc_feature (1)..(25): SEQ ID NO: 4634; WAN0249L7; Start 139; Stop 163
atgcaggacttactatttcacttct

SEQ ID NO: 387255 - DNA, 25 bp, Artificial
  probe
  misc_feature (1)..(25): SEQ ID NO: 4634; WAN0249L7; Start 216; Stop 240
cctgaatagtgagttcgatttatcc

SEQ ID NO: 387256 - DNA, 25 bp, Artificial
  probe
  misc_feature (1)..(25): SEQ ID NO: 4634; WAN0249L7; Start 135; Stop 159
cactatgcaggacttactatttcac

SEQ ID NO: 387257 - DNA, 25 bp, Artificial
  probe
  misc_feature (1)..(25): SEQ ID NO: 4634; WAN0249L7; Start 140; Stop 164
tgcaggacttactatttcacttcta

SEQ ID NO: 387258 - DNA, 25 bp, Artificial
  probe
  misc_feature (1)..(25): SEQ ID NO: 4634; WAN0249L7; Start 136; Stop 160
actatgcaggacttactatttcact

SEQ ID NO: 387259 - DNA, 25 bp, Artificial
  probe
  misc_feature (1)..(25): SEQ ID NO: 4634; WAN0249L7; Start 213; Stop 237
cctcctgaatagtgagttcgattta

SEQ ID NO: 387260 - DNA, 25 bp, Artificial
  probe
  misc_feature (1)..(25): SEQ ID NO: 4634; WAN0249L7; Start 209; Stop 233
tatgcctcctgaatagtgagttcga

SEQ ID NO: 387261 - DNA, 25 bp, Artificial
  probe
  misc_feature (1)..(25): SEQ ID NO: 4634; WAN0249L7; Start 144; Stop 168
ggacttactatttcacttctactcc

SEQ ID NO: 387262 - DNA, 25 bp, Artificial
  probe
  misc_feature (1)..(25): SEQ ID NO: 4635; WAN024AL5; Start 54; Stop 78
gaaccgtccaaaatatcttgtgtaa

SEQ ID NO: 387263 - DNA, 25 bp, Artificial
  probe
  misc_feature (1)..(25): SEQ ID NO: 4635; WAN024AL5; Start 55; Stop 79
aaccgtccaaaatatcttgtgtaat

SEQ ID NO: 387264 - DNA, 25 bp, Artificial
  probe
  misc_feature (1)..(25): SEQ ID NO: 4635; WAN024AL5; Start 56; Stop 80
accgtccaaaatatcttgtgtaatt

SEQ ID NO: 387265 - DNA, 25 bp, Artificial
  probe
  misc_feature (1)..(25): SEQ ID NO: 4635; WAN024AL5; Start 57; Stop 81
ccgtccaaaatatcttgtgtaattg

SEQ ID NO: 387266 - DNA, 25 bp, Artificial
  probe
  misc_feature (1)..(25): SEQ ID NO: 4635; WAN024AL5; Start 53; Stop 77
cgaaccgtccaaaatatcttgtgta

SEQ ID NO: 387267 - DNA, 25 bp, Artificial
  probe
  misc_feature (1)..(25): SEQ ID NO: 4635; WAN024AL5; Start 65; Stop 89
aatatcttgtgtaattgaacacggc

SEQ ID NO: 387268 - DNA, 25 bp, Artificial
  probe
  misc_feature (1)..(25): SEQ ID NO: 4635; WAN024AL5; Start 58; Stop 82
cgtccaaaatatcttgtgtaattga

SEQ ID NO: 387269 - DNA, 25 bp, Artificial
  probe
  misc_feature (1)..(25): SEQ ID NO: 4635; WAN024AL5; Start 52; Stop 76
ccgaaccgtccaaaatatcttgtgt

SEQ ID NO: 387270 - DNA, 25 bp, Artificial
  probe
  misc_feature (1)..(25): SEQ ID NO: 4635; WAN024AL5; Start 48; Stop 72
caagccgaaccgtccaaaatatctt

SEQ ID NO: 387271 - DNA, 25 bp, Artificial
  probe
  misc_feature (1)..(25): SEQ ID NO: 4635; WAN024AL5; Start 66; Stop 90
atatcttgtgtaattgaacacggcc

SEQ ID NO: 387272 - DNA, 25 bp, Artificial
  probe
  misc_feature (1)..(25): SEQ ID NO: 4635; WAN024AL5; Start 64; Stop 88
aaatatcttgtgtaattgaacacgg

SEQ ID NO: 387273 - DNA, 25 bp, Artificial
  probe
  misc_feature (1)..(25): SEQ ID NO: 4635; WAN024AL5; Start 49; Stop 73
aagccgaaccgtccaaaatatcttg

SEQ ID NO: 387274 - DNA, 25 bp, Artificial
  probe
  misc_feature (1)..(25): SEQ ID NO: 4635; WAN024AL5; Start 61; Stop 85
ccaaaatatcttgtgtaattgaaca

SEQ ID NO: 387275 - DNA, 25 bp, Artificial
  probe
  misc_feature (1)..(25): SEQ ID NO: 4635; WAN024AL5; Start 60; Stop 84
tccaaaatatcttgtgtaattgaac

SEQ ID NO: 387276 - DNA, 25 bp, Artificial
  probe
  misc_feature (1)..(25): SEQ ID NO: 4635; WAN024AL5; Start 59; Stop 83
gtccaaaatatcttgtgtaattgaa

SEQ ID NO: 387277 - DNA, 25 bp, Artificial
  probe
  misc_feature (1)..(25): SEQ ID NO: 4635; WAN024AL5; Start 29; Stop 53
tttctacagaaatgttcggcaagcc

SEQ ID NO: 387278 - DNA, 25 bp, Artificial
  probe
  misc_feature (1)..(25): SEQ ID NO: 4635; WAN024AL5; Start 28; Stop 52
ttttctacagaaatgttcggcaagc

SEQ ID NO: 387279 - DNA, 25 bp, Artificial
  probe
  misc_feature (1)..(25): SEQ ID NO: 4635; WAN024AL5; Start 51; Stop 75
gccgaaccgtccaaaatatcttgtg

SEQ ID NO: 387280 - DNA, 25 bp, Artificial
  probe
  misc_feature (1)..(25): SEQ ID NO: 4635; WAN024AL5; Start 50; Stop 74
agccgaaccgtccaaaatatcttgt

SEQ ID NO: 387281 - DNA, 25 bp, Artificial
  probe
  misc_feature (1)..(25): SEQ ID NO: 4635; WAN024AL5; Start 63; Stop 87
aaaatatcttgtgtaattgaacacg

SEQ ID NO: 387282 - DNA, 25 bp, Artificial
  probe
  misc_feature (1)..(25): SEQ ID NO: 4635; WAN024AL5; Start 62; Stop 86
caaaatatcttgtgtaattgaacac

SEQ ID NO: 387283 - DNA, 25 bp, Artificial
  probe
  misc_feature (1)..(25): SEQ ID NO: 4636; WAN024A99; Start 67; Stop 91
gcatagtcaactcttcaagtatagc

SEQ ID NO: 387284 - DNA, 25 bp, Artificial
  probe
  misc_feature (1)..(25): SEQ ID NO: 4636; WAN024A99; Start 76; Stop 100
actcttcaagtatagcatatctcct

SEQ ID NO: 387285 - DNA, 25 bp, Artificial
  probe
  misc_feature (1)..(25): SEQ ID NO: 4636; WAN024A99; Start 68; Stop 92
catagtcaactcttcaagtatagca

SEQ ID NO: 387286 - DNA, 25 bp, Artificial
  probe
  misc_feature (1)..(25): SEQ ID NO: 4636; WAN024A99; Start 75; Stop 99
aactcttcaagtatagcatatctcc

SEQ ID NO: 387287 - DNA, 25 bp, Artificial
  probe
  misc_feature (1)..(25): SEQ ID NO: 4636; WAN024A99; Start 6; Stop 30
ggacgaaccacttaaacttgaataa

SEQ ID NO: 387288 - DNA, 25 bp, Artificial
  probe
  misc_feature (1)..(25): SEQ ID NO: 4636; WAN024A99; Start 5; Stop 29
gggacgaaccacttaaacttgaata

SEQ ID NO: 387289 - DNA, 25 bp, Artificial
  probe
  misc_feature (1)..(25): SEQ ID NO: 4636; WAN024A99; Start 71; Stop 95
agtcaactcttcaagtatagcatat

SEQ ID NO: 387290 - DNA, 25 bp, Artificial
  probe
  misc_feature (1)..(25): SEQ ID NO: 4636; WAN024A99; Start 69; Stop 93
atagtcaactcttcaagtatagcat

SEQ ID NO: 387291 - DNA, 25 bp, Artificial
  probe
  misc_feature (1)..(25): SEQ ID NO: 4636; WAN024A99; Start 72; Stop 96
gtcaactcttcaagtatagcatatc

SEQ ID NO: 387292 - DNA, 25 bp, Artificial
  probe
  misc_feature (1)..(25): SEQ ID NO: 4636; WAN024A99; Start 64; Stop 88
cgtgcatagtcaactcttcaagtat

SEQ ID NO: 387293 - DNA, 25 bp, Artificial
  probe
  misc_feature (1)..(25): SEQ ID NO: 4636; WAN024A99; Start 73; Stop 97
tcaactcttcaagtatagcatatct

SEQ ID NO: 387294 - DNA, 25 bp, Artificial
  probe
  misc_feature (1)..(25): SEQ ID NO: 4636; WAN024A99; Start 61; Stop 85
gatcgtgcatagtcaactcttcaag

SEQ ID NO: 387295 - DNA, 25 bp, Artificial
  probe
  misc_feature (1)..(25): SEQ ID NO: 4636; WAN024A99; Start 77; Stop 101
ctcttcaagtatagcatatctccta

SEQ ID NO: 387296 - DNA, 25 bp, Artificial
  probe
  misc_feature (1)..(25): SEQ ID NO: 4636; WAN024A99; Start 74; Stop 98
caactcttcaagtatagcatatctc

SEQ ID NO: 387297 - DNA, 25 bp, Artificial
  probe
  misc_feature (1)..(25): SEQ ID NO: 4636; WAN024A99; Start 65; Stop 89
gtgcatagtcaactcttcaagtata

SEQ ID NO: 387298 - DNA, 25 bp, Artificial
  probe
  misc_feature (1)..(25): SEQ ID NO: 4636; WAN024A99; Start 63; Stop 87
tcgtgcatagtcaactcttcaagta

SEQ ID NO: 387299 - DNA, 25 bp, Artificial
  probe
  misc_feature (1)..(25): SEQ ID NO: 4636; WAN024A99; Start 70; Stop 94
tagtcaactcttcaagtatagcata

SEQ ID NO: 387300 - DNA, 25 bp, Artificial
  probe
  misc_feature (1)..(25): SEQ ID NO: 4636; WAN024A99; Start 8; Stop 32
acgaaccacttaaacttgaataatc

SEQ ID NO: 387301 - DNA, 25 bp, Artificial
  probe
  misc_feature (1)..(25): SEQ ID NO: 4636; WAN024A99; Start 7; Stop 31
gacgaaccacttaaacttgaataat

SEQ ID NO: 387302 - DNA, 25 bp, Artificial
  probe
  misc_feature (1)..(25): SEQ ID NO: 4636; WAN024A99; Start 66; Stop 90
tgcatagtcaactcttcaagtatag

SEQ ID NO: 387303 - DNA, 25 bp, Artificial
  probe
  misc_feature (1)..(25): SEQ ID NO: 4636; WAN024A99; Start 23; Stop 47
ttgaataatcaagcaacgatgttcg

SEQ ID NO: 387304 - DNA, 25 bp, Artificial
  probe
  misc_feature (1)..(25): SEQ ID NO: 4636; WAN024A99; Start 9; Stop 33
cgaaccacttaaacttgaataatca

SEQ ID NO: 387305 - DNA, 25 bp, Artificial
  probe
  misc_feature (1)..(25): SEQ ID NO: 4636; WAN024A99; Start 62; Stop 86
atcgtgcatagtcaactcttcaagt

SEQ ID NO: 387306 - DNA, 25 bp, Artificial
  probe
  misc_feature (1)..(25): SEQ ID NO: 4636; WAN024A99; Start 60; Stop 84
ggatcgtgcatagtcaactcttcaa

SEQ ID NO: 387307 - DNA, 25 bp, Artificial
  probe
  misc_feature (1)..(25): SEQ ID NO: 4636; WAN024A99; Start 58; Stop 82
caggatcgtgcatagtcaactcttc

SEQ ID NO: 387308 - DNA, 25 bp, Artificial
  probe
  misc_feature (1)..(25): SEQ ID NO: 4636; WAN024A99; Start 78; Stop 102
tcttcaagtatagcatatctcctat

SEQ ID NO: 387309 - DNA, 25 bp, Artificial
  probe
  misc_feature (1)..(25): SEQ ID NO: 4636; WAN024A99; Start 59; Stop 83
aggatcgtgcatagtcaactcttca

SEQ ID NO: 387310 - DNA, 25 bp, Artificial
  probe
  misc_feature (1)..(25): SEQ ID NO: 4636; WAN024A99; Start 57; Stop 81
acaggatcgtgcatagtcaactctt

SEQ ID NO: 387311 - DNA, 25 bp, Artificial
  probe
  misc_feature (1)..(25): SEQ ID NO: 4636; WAN024A99; Start 4; Stop 28
tgggacgaaccacttaaacttgaat

SEQ ID NO: 387312 - DNA, 25 bp, Artificial
  probe
  misc_feature (1)..(25): SEQ ID NO: 4636; WAN024A99; Start 79; Stop 103
cttcaagtatagcatatctcctatt

SEQ ID NO: 387313 - DNA, 25 bp, Artificial
  probe
  misc_feature (1)..(25): SEQ ID NO: 4636; WAN024A99; Start 90; Stop 114
gcatatctcctattttcttacaagt

SEQ ID NO: 387314 - DNA, 25 bp, Artificial
  probe
  misc_feature (1)..(25): SEQ ID NO: 4636; WAN024A99; Start 56; Stop 80
cacaggatcgtgcatagtcaactct

SEQ ID NO: 387315 - DNA, 25 bp, Artificial
  probe
  misc_feature (1)..(25): SEQ ID NO: 4636; WAN024A99; Start 89; Stop 113
agcatatctcctattttcttacaag

SEQ ID NO: 387316 - DNA, 25 bp, Artificial
  probe
  misc_feature (1)..(25): SEQ ID NO: 4637; WAN0249J5; Start 43; Stop 67
gccttgctttctatcaactcaagaa

SEQ ID NO: 387317 - DNA, 25 bp, Artificial
  probe
  misc_feature (1)..(25): SEQ ID NO: 4637; WAN0249J5; Start 42; Stop 66
agccttgctttctatcaactcaaga

SEQ ID NO: 387318 - DNA, 25 bp, Artificial
  probe
  misc_feature (1)..(25): SEQ ID NO: 4637; WAN0249J5; Start 41; Stop 65
aagccttgctttctatcaactcaag

SEQ ID NO: 387319 - DNA, 25 bp, Artificial
  probe
  misc_feature (1)..(25): SEQ ID NO: 4638; WAN024AKT; Start 1; Stop 25
tcgttgaaataaacagagagaaagt

SEQ ID NO: 387320 - DNA, 25 bp, Artificial
  probe
  misc_feature (1)..(25): SEQ ID NO: 4638; WAN024AKT; Start 3; Stop 27
gttgaaataaacagagagaaagtcg

SEQ ID NO: 387321 - DNA, 25 bp, Artificial
  probe
  misc_feature (1)..(25): SEQ ID NO: 4638; WAN024AKT; Start 2; Stop 26
cgttgaaataaacagagagaaagtc

SEQ ID NO: 387322 - DNA, 25 bp, Artificial
  probe
  misc_feature (1)..(25): SEQ ID NO: 4638; WAN024AKT; Start 6; Stop 30
gaaataaacagagagaaagtcgagt

SEQ ID NO: 387323 - DNA, 25 bp, Artificial
  probe
  misc_feature (1)..(25): SEQ ID NO: 4638; WAN024AKT; Start 5; Stop 29
tgaaataaacagagagaaagtcgag

SEQ ID NO: 387324 - DNA, 25 bp, Artificial
  probe
  misc_feature (1)..(25): SEQ ID NO: 4638; WAN024AKT; Start 4; Stop 28
ttgaaataaacagagagaaagtcga

SEQ ID NO: 387325 - DNA, 25 bp, Artificial
  probe
  misc_feature (1)..(25): SEQ ID NO: 4638; WAN024AKT; Start 7; Stop 31
aaataaacagagagaaagtcgagtt

SEQ ID NO: 387326 - DNA, 25 bp, Artificial
  probe
  misc_feature (1)..(25): SEQ ID NO: 4638; WAN024AKT; Start 10; Stop 34
taaacagagagaaagtcgagtttcg

SEQ ID NO: 387327 - DNA, 25 bp, Artificial
  probe
  misc_feature (1)..(25): SEQ ID NO: 4638; WAN024AKT; Start 9; Stop 33
ataaacagagagaaagtcgagtttc

SEQ ID NO: 387328 - DNA, 25 bp, Artificial
  probe
  misc_feature (1)..(25): SEQ ID NO: 4638; WAN024AKT; Start 8; Stop 32
aataaacagagagaaagtcgagttt

SEQ ID NO: 387329 - DNA, 25 bp, Artificial
  probe
  misc_feature (1)..(25): SEQ ID NO: 4638; WAN024AKT; Start 11; Stop 35
aaacagagagaaagtcgagtttcgg

SEQ ID NO: 387330 - DNA, 25 bp, Artificial
  probe
  misc_feature (1)..(25): SEQ ID NO: 4638; WAN024AKT; Start 15; Stop 39
agagagaaagtcgagtttcggcttt

SEQ ID NO: 387331 - DNA, 25 bp, Artificial
  probe
  misc_feature (1)..(25): SEQ ID NO: 4638; WAN024AKT; Start 14; Stop 38
cagagagaaagtcgagtttcggctt

SEQ ID NO: 387332 - DNA, 25 bp, Artificial
  probe
  misc_feature (1)..(25): SEQ ID NO: 4638; WAN024AKT; Start 16; Stop 40
gagagaaagtcgagtttcggctttt

SEQ ID NO: 387333 - DNA, 25 bp, Artificial
  probe
  misc_feature (1)..(25): SEQ ID NO: 4638; WAN024AKT; Start 12; Stop 36
aacagagagaaagtcgagtttcggc

SEQ ID NO: 387334 - DNA, 25 bp, Artificial
  probe
  misc_feature (1)..(25): SEQ ID NO: 4639; WAN0249WS; Start 1; Stop 25
tcgtttcctcttgtctaatatcttt

SEQ ID NO: 387335 - DNA, 25 bp, Artificial
  probe
  misc_feature (1)..(25): SEQ ID NO: 4639; WAN0249WS; Start 2; Stop 26
cgtttcctcttgtctaatatcttta

SEQ ID NO: 387336 - DNA, 25 bp, Artificial
  probe
  misc_feature (1)..(25): SEQ ID NO: 4639; WAN0249WS; Start 46; Stop 70
ctagatttctctagctgtgactttt

SEQ ID NO: 387337 - DNA, 25 bp, Artificial
  probe
  misc_feature (1)..(25): SEQ ID NO: 4639; WAN0249WS; Start 72; Stop 96
atgttatacttattgcaagagaaaa

SEQ ID NO: 387338 - DNA, 25 bp, Artificial
  probe
  misc_feature (1)..(25): SEQ ID NO: 4640; WAN0249HN; Start 134; Stop 158
ccctttgtatcttagacttgagcat

SEQ ID NO: 387339 - DNA, 25 bp, Artificial
  probe
  misc_feature (1)..(25): SEQ ID NO: 4640; WAN0249HN; Start 34; Stop 58
aatctaattgaacacgggctaaact

SEQ ID NO: 387340 - DNA, 25 bp, Artificial
  probe
  misc_feature (1)..(25): SEQ ID NO: 4640; WAN0249HN; Start 35; Stop 59
atctaattgaacacgggctaaactc

SEQ ID NO: 387341 - DNA, 25 bp, Artificial
  probe
  misc_feature (1)..(25): SEQ ID NO: 4640; WAN0249HN; Start 124; Stop 148
gagtttgacgccctttgtatcttag

SEQ ID NO: 387342 - DNA, 25 bp, Artificial
  probe
  misc_feature (1)..(25): SEQ ID NO: 4640; WAN0249HN; Start 68; Stop 92
aaagataaacttcctagtgtctgct

SEQ ID NO: 387343 - DNA, 25 bp, Artificial
  probe
  misc_feature (1)..(25): SEQ ID NO: 4640; WAN0249HN; Start 135; Stop 159
cctttgtatcttagacttgagcata

SEQ ID NO: 387344 - DNA, 25 bp, Artificial
  probe
  misc_feature (1)..(25): SEQ ID NO: 4640; WAN0249HN; Start 128; Stop 152
ttgacgccctttgtatcttagactt

SEQ ID NO: 387345 - DNA, 25 bp, Artificial
  probe
  misc_feature (1)..(25): SEQ ID NO: 4640; WAN0249HN; Start 127; Stop 151
tttgacgccctttgtatcttagact

SEQ ID NO: 387346 - DNA, 25 bp, Artificial
  probe
  misc_feature (1)..(25): SEQ ID NO: 4640; WAN0249HN; Start 126; Stop 150
gtttgacgccctttgtatcttagac

SEQ ID NO: 387347 - DNA, 25 bp, Artificial
  probe
  misc_feature (1)..(25): SEQ ID NO: 4640; WAN0249HN; Start 125; Stop 149
agtttgacgccctttgtatcttaga

SEQ ID NO: 387348 - DNA, 25 bp, Artificial
  probe
  misc_feature (1)..(25): SEQ ID NO: 4640; WAN0249HN; Start 69; Stop 93
aagataaacttcctagtgtctgcta

SEQ ID NO: 387349 - DNA, 25 bp, Artificial
  probe
  misc_feature (1)..(25): SEQ ID NO: 4640; WAN0249HN; Start 123; Stop 147
tgagtttgacgccctttgtatctta

SEQ ID NO: 387350 - DNA, 25 bp, Artificial
  probe
  misc_feature (1)..(25): SEQ ID NO: 4640; WAN0249HN; Start 131; Stop 155
acgccctttgtatcttagacttgag

SEQ ID NO: 387351 - DNA, 25 bp, Artificial
  probe
  misc_feature (1)..(25): SEQ ID NO: 4640; WAN0249HN; Start 130; Stop 154
gacgccctttgtatcttagacttga

SEQ ID NO: 387352 - DNA, 25 bp, Artificial
  probe
  misc_feature (1)..(25): SEQ ID NO: 4640; WAN0249HN; Start 18; Stop 42
cagaggctggtgtttcaatctaatt

SEQ ID NO: 387353 - DNA, 25 bp, Artificial
  probe
  misc_feature (1)..(25): SEQ ID NO: 4640; WAN0249HN; Start 133; Stop 157
gccctttgtatcttagacttgagca

SEQ ID NO: 387354 - DNA, 25 bp, Artificial
  probe
  misc_feature (1)..(25): SEQ ID NO: 4640; WAN0249HN; Start 129; Stop 153
tgacgccctttgtatcttagacttg

SEQ ID NO: 387355 - DNA, 25 bp, Artificial
  probe
  misc_feature (1)..(25): SEQ ID NO: 4640; WAN0249HN; Start 71; Stop 95
gataaacttcctagtgtctgctaga

SEQ ID NO: 387356 - DNA, 25 bp, Artificial
  probe
  misc_feature (1)..(25): SEQ ID NO: 4640; WAN0249HN; Start 70; Stop 94
agataaacttcctagtgtctgctag

SEQ ID NO: 387357 - DNA, 25 bp, Artificial
  probe
  misc_feature (1)..(25): SEQ ID NO: 4640; WAN0249HN; Start 122; Stop 146
ttgagtttgacgccctttgtatctt

SEQ ID NO: 387358 - DNA, 25 bp, Artificial
  probe
  misc_feature (1)..(25): SEQ ID NO: 4640; WAN0249HN; Start 33; Stop 57
caatctaattgaacacgggctaaac

SEQ ID NO: 387359 - DNA, 25 bp, Artificial
  probe
  misc_feature (1)..(25): SEQ ID NO: 4640; WAN0249HN; Start 36; Stop 60
tctaattgaacacgggctaaactcg

SEQ ID NO: 387360 - DNA, 25 bp, Artificial
  probe
  misc_feature (1)..(25): SEQ ID NO: 4640; WAN0249HN; Start 19; Stop 43
agaggctggtgtttcaatctaattg

SEQ ID NO: 387361 - DNA, 25 bp, Artificial
  probe
  misc_feature (1)..(25): SEQ ID NO: 4640; WAN0249HN; Start 136; Stop 160
ctttgtatcttagacttgagcataa

SEQ ID NO: 387362 - DNA, 25 bp, Artificial
  probe
  misc_feature (1)..(25): SEQ ID NO: 4640; WAN0249HN; Start 132; Stop 156
cgccctttgtatcttagacttgagc

SEQ ID NO: 387363 - DNA, 25 bp, Artificial
  probe
  misc_feature (1)..(25): SEQ ID NO: 4640; WAN0249HN; Start 121; Stop 145
gttgagtttgacgccctttgtatct

SEQ ID NO: 387364 - DNA, 25 bp, Artificial
  probe
  misc_feature (1)..(25): SEQ ID NO: 4640; WAN0249HN; Start 137; Stop 161
tttgtatcttagacttgagcataaa

SEQ ID NO: 387365 - DNA, 25 bp, Artificial
  probe
  misc_feature (1)..(25): SEQ ID NO: 4640; WAN0249HN; Start 17; Stop 41
gcagaggctggtgtttcaatctaat

SEQ ID NO: 387366 - DNA, 25 bp, Artificial
  probe
  misc_feature (1)..(25): SEQ ID NO: 4640; WAN0249HN; Start 67; Stop 91
aaaagataaacttcctagtgtctgc

SEQ ID NO: 387367 - DNA, 25 bp, Artificial
  probe
  misc_feature (1)..(25): SEQ ID NO: 4640; WAN0249HN; Start 37; Stop 61
ctaattgaacacgggctaaactcgg

SEQ ID NO: 387368 - DNA, 25 bp, Artificial
  probe
  misc_feature (1)..(25): SEQ ID NO: 4640; WAN0249HN; Start 72; Stop 96
ataaacttcctagtgtctgctagac

SEQ ID NO: 387369 - DNA, 25 bp, Artificial
  probe
  misc_feature (1)..(25): SEQ ID NO: 4640; WAN0249HN; Start 38; Stop 62
taattgaacacgggctaaactcggt

SEQ ID NO: 387370 - DNA, 25 bp, Artificial
  probe
  misc_feature (1)..(25): SEQ ID NO: 4640; WAN0249HN; Start 108; Stop 132
ttcctattttcacgttgagtttgac

SEQ ID NO: 387371 - DNA, 25 bp, Artificial
  probe
  misc_feature (1)..(25): SEQ ID NO: 4641; WAN0249G3; Start 41; Stop 65
ttctgataagaatcggttgagctaa

SEQ ID NO: 387372 - DNA, 25 bp, Artificial
  probe
  misc_feature (1)..(25): SEQ ID NO: 4641; WAN0249G3; Start 43; Stop 67
ctgataagaatcggttgagctaaag

SEQ ID NO: 387373 - DNA, 25 bp, Artificial
  probe
  misc_feature (1)..(25): SEQ ID NO: 4641; WAN0249G3; Start 42; Stop 66
tctgataagaatcggttgagctaaa

SEQ ID NO: 387374 - DNA, 25 bp, Artificial
  probe
  misc_feature (1)..(25): SEQ ID NO: 4641; WAN0249G3; Start 44; Stop 68
tgataagaatcggttgagctaaagc

SEQ ID NO: 387375 - DNA, 25 bp, Artificial
  probe
  misc_feature (1)..(25): SEQ ID NO: 4641; WAN0249G3; Start 45; Stop 69
gataagaatcggttgagctaaagcg

SEQ ID NO: 387376 - DNA, 25 bp, Artificial
  probe
  misc_feature (1)..(25): SEQ ID NO: 4641; WAN0249G3; Start 27; Stop 51
atgtaaacttgtgattctgataaga

SEQ ID NO: 387377 - DNA, 25 bp, Artificial
  probe
  misc_feature (1)..(25): SEQ ID NO: 4641; WAN0249G3; Start 40; Stop 64
attctgataagaatcggttgagcta

SEQ ID NO: 387378 - DNA, 25 bp, Artificial
  probe
  misc_feature (1)..(25): SEQ ID NO: 4641; WAN0249G3; Start 46; Stop 70
ataagaatcggttgagctaaagcga

SEQ ID NO: 387379 - DNA, 25 bp, Artificial
  probe
  misc_feature (1)..(25): SEQ ID NO: 4641; WAN0249G3; Start 26; Stop 50
aatgtaaacttgtgattctgataag

SEQ ID NO: 387380 - DNA, 25 bp, Artificial
  probe
  misc_feature (1)..(25): SEQ ID NO: 4641; WAN0249G3; Start 47; Stop 71
taagaatcggttgagctaaagcgag

SEQ ID NO: 387381 - DNA, 25 bp, Artificial
  probe
  misc_feature (1)..(25): SEQ ID NO: 4641; WAN0249G3; Start 28; Stop 52
tgtaaacttgtgattctgataagaa

SEQ ID NO: 387382 - DNA, 25 bp, Artificial
  probe
  misc_feature (1)..(25): SEQ ID NO: 4641; WAN0249G3; Start 25; Stop 49
aaatgtaaacttgtgattctgataa

SEQ ID NO: 387383 - DNA, 25 bp, Artificial
  probe
  misc_feature (1)..(25): SEQ ID NO: 4641; WAN0249G3; Start 23; Stop 47
ttaaatgtaaacttgtgattctgat

SEQ ID NO: 387384 - DNA, 25 bp, Artificial
  probe
  misc_feature (1)..(25): SEQ ID NO: 4641; WAN0249G3; Start 22; Stop 46
tttaaatgtaaacttgtgattctga

SEQ ID NO: 387385 - DNA, 25 bp, Artificial
  probe
  misc_feature (1)..(25): SEQ ID NO: 4641; WAN0249G3; Start 18; Stop 42
acgttttaaatgtaaacttgtgatt

SEQ ID NO: 387386 - DNA, 25 bp, Artificial
  probe
  misc_feature (1)..(25): SEQ ID NO: 4641; WAN0249G3; Start 19; Stop 43
cgttttaaatgtaaacttgtgattc

SEQ ID NO: 387387 - DNA, 25 bp, Artificial
  probe
  misc_feature (1)..(25): SEQ ID NO: 4641; WAN0249G3; Start 29; Stop 53
gtaaacttgtgattctgataagaat

SEQ ID NO: 387388 - DNA, 25 bp, Artificial
  probe
  misc_feature (1)..(25): SEQ ID NO: 4641; WAN0249G3; Start 17; Stop 41
aacgttttaaatgtaaacttgtgat

SEQ ID NO: 387389 - DNA, 25 bp, Artificial
  probe
  misc_feature (1)..(25): SEQ ID NO: 4641; WAN0249G3; Start 16; Stop 40
taacgttttaaatgtaaacttgtga

SEQ ID NO: 387390 - DNA, 25 bp, Artificial
  probe
  misc_feature (1)..(25): SEQ ID NO: 4641; WAN0249G3; Start 15; Stop 39
ttaacgttttaaatgtaaacttgtg

SEQ ID NO: 387391 - DNA, 25 bp, Artificial
  probe
  misc_feature (1)..(25): SEQ ID NO: 4642; WAN0249KQ; Start 50; Stop 74
ccttctacaattcaggcagtctatt

SEQ ID NO: 387392 - DNA, 25 bp, Artificial
  probe
  misc_feature (1)..(25): SEQ ID NO: 4642; WAN0249KQ; Start 42; Stop 66
attccttaccttctacaattcaggc

SEQ ID NO: 387393 - DNA, 25 bp, Artificial
  probe
  misc_feature (1)..(25): SEQ ID NO: 4642; WAN0249KQ; Start 48; Stop 72
taccttctacaattcaggcagtcta

SEQ ID NO: 387394 - DNA, 25 bp, Artificial
  probe
  misc_feature (1)..(25): SEQ ID NO: 4642; WAN0249KQ; Start 36; Stop 60
agcataattccttaccttctacaat

SEQ ID NO: 387395 - DNA, 25 bp, Artificial
  probe
  misc_feature (1)..(25): SEQ ID NO: 4642; WAN0249KQ; Start 46; Stop 70
cttaccttctacaattcaggcagtc

SEQ ID NO: 387396 - DNA, 25 bp, Artificial
  probe
  misc_feature (1)..(25): SEQ ID NO: 4642; WAN0249KQ; Start 49; Stop 73
accttctacaattcaggcagtctat

SEQ ID NO: 387397 - DNA, 25 bp, Artificial
  probe
  misc_feature (1)..(25): SEQ ID NO: 4642; WAN0249KQ; Start 47; Stop 71
ttaccttctacaattcaggcagtct

SEQ ID NO: 387398 - DNA, 25 bp, Artificial
  probe
  misc_feature (1)..(25): SEQ ID NO: 4642; WAN0249KQ; Start 41; Stop 65
aattccttaccttctacaattcagg

SEQ ID NO: 387399 - DNA, 25 bp, Artificial
  probe
  misc_feature (1)..(25): SEQ ID NO: 4642; WAN0249KQ; Start 43; Stop 67
ttccttaccttctacaattcaggca

SEQ ID NO: 387400 - DNA, 25 bp, Artificial
  probe
  misc_feature (1)..(25): SEQ ID NO: 4642; WAN0249KQ; Start 35; Stop 59
tagcataattccttaccttctacaa

SEQ ID NO: 387401 - DNA, 25 bp, Artificial
  probe
  misc_feature (1)..(25): SEQ ID NO: 4642; WAN0249KQ; Start 44; Stop 68
tccttaccttctacaattcaggcag

SEQ ID NO: 387402 - DNA, 25 bp, Artificial
  probe
  misc_feature (1)..(25): SEQ ID NO: 4642; WAN0249KQ; Start 34; Stop 58
atagcataattccttaccttctaca

SEQ ID NO: 387403 - DNA, 25 bp, Artificial
  probe
  misc_feature (1)..(25): SEQ ID NO: 4642; WAN0249KQ; Start 45; Stop 69
ccttaccttctacaattcaggcagt

SEQ ID NO: 387404 - DNA, 25 bp, Artificial
  probe
  misc_feature (1)..(25): SEQ ID NO: 4642; WAN0249KQ; Start 51; Stop 75
cttctacaattcaggcagtctattt

SEQ ID NO: 387405 - DNA, 25 bp, Artificial
  probe
  misc_feature (1)..(25): SEQ ID NO: 4642; WAN0249KQ; Start 61; Stop 85
tcaggcagtctatttatttggattt

SEQ ID NO: 387406 - DNA, 25 bp, Artificial
  probe
  misc_feature (1)..(25): SEQ ID NO: 4642; WAN0249KQ; Start 60; Stop 84
ttcaggcagtctatttatttggatt

SEQ ID NO: 387407 - DNA, 25 bp, Artificial
  probe
  misc_feature (1)..(25): SEQ ID NO: 4642; WAN0249KQ; Start 59; Stop 83
attcaggcagtctatttatttggat

SEQ ID NO: 387408 - DNA, 25 bp, Artificial
  probe
  misc_feature (1)..(25): SEQ ID NO: 4642; WAN0249KQ; Start 58; Stop 82
aattcaggcagtctatttatttgga

SEQ ID NO: 387409 - DNA, 25 bp, Artificial
  probe
  misc_feature (1)..(25): SEQ ID NO: 4642; WAN0249KQ; Start 4; Stop 28
aacaccctctttccttagaatagta

SEQ ID NO: 387410 - DNA, 25 bp, Artificial
  probe
  misc_feature (1)..(25): SEQ ID NO: 4642; WAN0249KQ; Start 3; Stop 27
taacaccctctttccttagaatagt

SEQ ID NO: 387411 - DNA, 25 bp, Artificial
  probe
  misc_feature (1)..(25): SEQ ID NO: 4642; WAN0249KQ; Start 7; Stop 31
accctctttccttagaatagtacca

SEQ ID NO: 387412 - DNA, 25 bp, Artificial
  probe
  misc_feature (1)..(25): SEQ ID NO: 4642; WAN0249KQ; Start 6; Stop 30
caccctctttccttagaatagtacc

SEQ ID NO: 387413 - DNA, 25 bp, Artificial
  probe
  misc_feature (1)..(25): SEQ ID NO: 4642; WAN0249KQ; Start 37; Stop 61
gcataattccttaccttctacaatt

SEQ ID NO: 387414 - DNA, 25 bp, Artificial
  probe
  misc_feature (1)..(25): SEQ ID NO: 4642; WAN0249KQ; Start 5; Stop 29
acaccctctttccttagaatagtac

SEQ ID NO: 387415 - DNA, 25 bp, Artificial
  probe
  misc_feature (1)..(25): SEQ ID NO: 4642; WAN0249KQ; Start 57; Stop 81
caattcaggcagtctatttatttgg

SEQ ID NO: 387416 - DNA, 25 bp, Artificial
  probe
  misc_feature (1)..(25): SEQ ID NO: 4642; WAN0249KQ; Start 8; Stop 32
ccctctttccttagaatagtaccat

SEQ ID NO: 387417 - DNA, 25 bp, Artificial
  probe
  misc_feature (1)..(25): SEQ ID NO: 4642; WAN0249KQ; Start 52; Stop 76
ttctacaattcaggcagtctattta

SEQ ID NO: 387418 - DNA, 25 bp, Artificial
  probe
  misc_feature (1)..(25): SEQ ID NO: 4642; WAN0249KQ; Start 56; Stop 80
acaattcaggcagtctatttatttg

SEQ ID NO: 387419 - DNA, 25 bp, Artificial
  probe
  misc_feature (1)..(25): SEQ ID NO: 4642; WAN0249KQ; Start 53; Stop 77
tctacaattcaggcagtctatttat

SEQ ID NO: 387420 - DNA, 25 bp, Artificial
  probe
  misc_feature (1)..(25): SEQ ID NO: 4642; WAN0249KQ; Start 28; Stop 52
accattatagcataattccttacct

SEQ ID NO: 387421 - DNA, 25 bp, Artificial
  probe
  misc_feature (1)..(25): SEQ ID NO: 4642; WAN0249KQ; Start 2; Stop 26
ctaacaccctctttccttagaatag

SEQ ID NO: 387422 - DNA, 25 bp, Artificial
  probe
  misc_feature (1)..(25): SEQ ID NO: 4642; WAN0249KQ; Start 15; Stop 39
tccttagaatagtaccattatagca

SEQ ID NO: 387423 - DNA, 25 bp, Artificial
  probe
  misc_feature (1)..(25): SEQ ID NO: 4642; WAN0249KQ; Start 40; Stop 64
taattccttaccttctacaattcag

SEQ ID NO: 387424 - DNA, 25 bp, Artificial
  probe
  misc_feature (1)..(25): SEQ ID NO: 4643; WAN0249KE; Start 5; Stop 29
acttcctctccattatttcttcctt

SEQ ID NO: 387425 - DNA, 25 bp, Artificial
  probe
  misc_feature (1)..(25): SEQ ID NO: 4643; WAN0249KE; Start 4; Stop 28
aacttcctctccattatttcttcct

SEQ ID NO: 387426 - DNA, 25 bp, Artificial
  probe
  misc_feature (1)..(25): SEQ ID NO: 4643; WAN0249KE; Start 6; Stop 30
cttcctctccattatttcttccttt

SEQ ID NO: 387427 - DNA, 25 bp, Artificial
  probe
  misc_feature (1)..(25): SEQ ID NO: 4643; WAN0249KE; Start 3; Stop 27
taacttcctctccattatttcttcc

SEQ ID NO: 387428 - DNA, 25 bp, Artificial
  probe
  misc_feature (1)..(25): SEQ ID NO: 4643; WAN0249KE; Start 7; Stop 31
ttcctctccattatttcttccttta

SEQ ID NO: 387429 - DNA, 25 bp, Artificial
  probe
  misc_feature (1)..(25): SEQ ID NO: 4643; WAN0249KE; Start 122; Stop 146
ttcagtaactcatcgtgcaattaaa

SEQ ID NO: 387430 - DNA, 25 bp, Artificial
  probe
  misc_feature (1)..(25): SEQ ID NO: 4643; WAN0249KE; Start 121; Stop 145
tttcagtaactcatcgtgcaattaa

SEQ ID NO: 387431 - DNA, 25 bp, Artificial
  probe
  misc_feature (1)..(25): SEQ ID NO: 4643; WAN0249KE; Start 120; Stop 144
atttcagtaactcatcgtgcaatta

SEQ ID NO: 387432 - DNA, 25 bp, Artificial
  probe
  misc_feature (1)..(25): SEQ ID NO: 4643; WAN0249KE; Start 119; Stop 143
tatttcagtaactcatcgtgcaatt

SEQ ID NO: 387433 - DNA, 25 bp, Artificial
  probe
  misc_feature (1)..(25): SEQ ID NO: 4643; WAN0249KE; Start 117; Stop 141
aatatttcagtaactcatcgtgcaa

SEQ ID NO: 387434 - DNA, 25 bp, Artificial
  probe
  misc_feature (1)..(25): SEQ ID NO: 4643; WAN0249KE; Start 8; Stop 32
tcctctccattatttcttcctttat

SEQ ID NO: 387435 - DNA, 25 bp, Artificial
  probe
  misc_feature (1)..(25): SEQ ID NO: 4643; WAN0249KE; Start 1; Stop 25
tctaacttcctctccattatttctt

SEQ ID NO: 387436 - DNA, 25 bp, Artificial
  probe
  misc_feature (1)..(25): SEQ ID NO: 4643; WAN0249KE; Start 118; Stop 142
atatttcagtaactcatcgtgcaat

SEQ ID NO: 387437 - DNA, 25 bp, Artificial
  probe
  misc_feature (1)..(25): SEQ ID NO: 4643; WAN0249KE; Start 9; Stop 33
cctctccattatttcttcctttatc

SEQ ID NO: 387438 - DNA, 25 bp, Artificial
  probe
  misc_feature (1)..(25): SEQ ID NO: 4643; WAN0249KE; Start 2; Stop 26
ctaacttcctctccattatttcttc

SEQ ID NO: 387439 - DNA, 25 bp, Artificial
  probe
  misc_feature (1)..(25): SEQ ID NO: 4643; WAN0249KE; Start 116; Stop 140
taatatttcagtaactcatcgtgca

SEQ ID NO: 387440 - DNA, 25 bp, Artificial
  probe
  misc_feature (1)..(25): SEQ ID NO: 4643; WAN0249KE; Start 115; Stop 139
ataatatttcagtaactcatcgtgc

SEQ ID NO: 387441 - DNA, 25 bp, Artificial
  probe
  misc_feature (1)..(25): SEQ ID NO: 4643; WAN0249KE; Start 90; Stop 114
aattaactccaattcttgattcatg

SEQ ID NO: 387442 - DNA, 25 bp, Artificial
  probe
  misc_feature (1)..(25): SEQ ID NO: 4643; WAN0249KE; Start 10; Stop 34
ctctccattatttcttcctttatca

SEQ ID NO: 387443 - DNA, 25 bp, Artificial
  probe
  misc_feature (1)..(25): SEQ ID NO: 4643; WAN0249KE; Start 11; Stop 35
tctccattatttcttcctttatcaa

SEQ ID NO: 387444 - DNA, 25 bp, Artificial
  probe
  misc_feature (1)..(25): SEQ ID NO: 4643; WAN0249KE; Start 12; Stop 36
ctccattatttcttcctttatcaag

SEQ ID NO: 387445 - DNA, 25 bp, Artificial
  probe
  misc_feature (1)..(25): SEQ ID NO: 4643; WAN0249KE; Start 123; Stop 147
tcagtaactcatcgtgcaattaaaa

SEQ ID NO: 387446 - DNA, 25 bp, Artificial
  probe
  misc_feature (1)..(25): SEQ ID NO: 4643; WAN0249KE; Start 94; Stop 118
aactccaattcttgattcatgataa

SEQ ID NO: 387447 - DNA, 25 bp, Artificial
  probe
  misc_feature (1)..(25): SEQ ID NO: 4643; WAN0249KE; Start 92; Stop 116
ttaactccaattcttgattcatgat

SEQ ID NO: 387448 - DNA, 25 bp, Artificial
  probe
  misc_feature (1)..(25): SEQ ID NO: 4643; WAN0249KE; Start 91; Stop 115
attaactccaattcttgattcatga

SEQ ID NO: 387449 - DNA, 25 bp, Artificial
  probe
  misc_feature (1)..(25): SEQ ID NO: 4643; WAN0249KE; Start 95; Stop 119
actccaattcttgattcatgataat

SEQ ID NO: 387450 - DNA, 25 bp, Artificial
  probe
  misc_feature (1)..(25): SEQ ID NO: 4643; WAN0249KE; Start 114; Stop 138
gataatatttcagtaactcatcgtg

SEQ ID NO: 387451 - DNA, 25 bp, Artificial
  probe
  misc_feature (1)..(25): SEQ ID NO: 4643; WAN0249KE; Start 113; Stop 137
tgataatatttcagtaactcatcgt

SEQ ID NO: 387452 - DNA, 25 bp, Artificial
  probe
  misc_feature (1)..(25): SEQ ID NO: 4643; WAN0249KE; Start 89; Stop 113
aaattaactccaattcttgattcat

SEQ ID NO: 387453 - DNA, 25 bp, Artificial
  probe
  misc_feature (1)..(25): SEQ ID NO: 4643; WAN0249KE; Start 93; Stop 117
taactccaattcttgattcatgata

SEQ ID NO: 387454 - DNA, 25 bp, Artificial
  probe
  misc_feature (1)..(25): SEQ ID NO: 4643; WAN0249KE; Start 13; Stop 37
tccattatttcttcctttatcaaga

SEQ ID NO: 387455 - DNA, 25 bp, Artificial
  probe
  misc_feature (1)..(25): SEQ ID NO: 4643; WAN0249KE; Start 96; Stop 120
ctccaattcttgattcatgataata

SEQ ID NO: 387456 - DNA, 25 bp, Artificial
  probe
  misc_feature (1)..(25): SEQ ID NO: 4643; WAN0249KE; Start 14; Stop 38
ccattatttcttcctttatcaagaa

SEQ ID NO: 387457 - DNA, 25 bp, Artificial
  probe
  misc_feature (1)..(25): SEQ ID NO: 4644; WAN024ARM; Start 160; Stop 184
aaacggtttatacttaaacagtctt

SEQ ID NO: 387458 - DNA, 25 bp, Artificial
  probe
  misc_feature (1)..(25): SEQ ID NO: 4644; WAN024ARM; Start 162; Stop 186
acggtttatacttaaacagtcttaa

SEQ ID NO: 387459 - DNA, 25 bp, Artificial
  probe
  misc_feature (1)..(25): SEQ ID NO: 4644; WAN024ARM; Start 161; Stop 185
aacggtttatacttaaacagtctta

SEQ ID NO: 387460 - DNA, 25 bp, Artificial
  probe
  misc_feature (1)..(25): SEQ ID NO: 4644; WAN024ARM; Start 177; Stop 201
acagtcttaaagttttcttaaatga

SEQ ID NO: 387461 - DNA, 25 bp, Artificial
  probe
  misc_feature (1)..(25): SEQ ID NO: 4644; WAN024ARM; Start 10; Stop 34
aacctattttaaaagttggaagctt

SEQ ID NO: 387462 - DNA, 25 bp, Artificial
  probe
  misc_feature (1)..(25): SEQ ID NO: 4644; WAN024ARM; Start 9; Stop 33
aaacctattttaaaagttggaagct

SEQ ID NO: 387463 - DNA, 25 bp, Artificial
  probe
  misc_feature (1)..(25): SEQ ID NO: 4644; WAN024ARM; Start 8; Stop 32
gaaacctattttaaaagttggaagc

SEQ ID NO: 387464 - DNA, 25 bp, Artificial
  probe
  misc_feature (1)..(25): SEQ ID NO: 4644; WAN024ARM; Start 157; Stop 181
tgaaaacggtttatacttaaacagt

SEQ ID NO: 387465 - DNA, 25 bp, Artificial
  probe
  misc_feature (1)..(25): SEQ ID NO: 4644; WAN024ARM; Start 159; Stop 183
aaaacggtttatacttaaacagtct

SEQ ID NO: 387466 - DNA, 25 bp, Artificial
  probe
  misc_feature (1)..(25): SEQ ID NO: 4644; WAN024ARM; Start 163; Stop 187
cggtttatacttaaacagtcttaaa

SEQ ID NO: 387467 - DNA, 25 bp, Artificial
  probe
  misc_feature (1)..(25): SEQ ID NO: 4644; WAN024ARM; Start 158; Stop 182
gaaaacggtttatacttaaacagtc

SEQ ID NO: 387468 - DNA, 25 bp, Artificial
  probe
  misc_feature (1)..(25): SEQ ID NO: 4644; WAN024ARM; Start 156; Stop 180
atgaaaacggtttatacttaaacag

SEQ ID NO: 387469 - DNA, 25 bp, Artificial
  probe
  misc_feature (1)..(25): SEQ ID NO: 4644; WAN024ARM; Start 171; Stop 195
acttaaacagtcttaaagttttctt

SEQ ID NO: 387470 - DNA, 25 bp, Artificial
  probe
  misc_feature (1)..(25): SEQ ID NO: 4644; WAN024ARM; Start 7; Stop 31
agaaacctattttaaaagttggaag

SEQ ID NO: 387471 - DNA, 25 bp, Artificial
  probe
  misc_feature (1)..(25): SEQ ID NO: 4644; WAN024ARM; Start 155; Stop 179
tatgaaaacggtttatacttaaaca

SEQ ID NO: 387472 - DNA, 25 bp, Artificial
  probe
  misc_feature (1)..(25): SEQ ID NO: 4645; WAN0249UB; Start 175; Stop 199
ttcctaatcaatttgttcgtatcct

SEQ ID NO: 387473 - DNA, 25 bp, Artificial
  probe
  misc_feature (1)..(25): SEQ ID NO: 4645; WAN0249UB; Start 183; Stop 207
caatttgttcgtatcctatttcact

SEQ ID NO: 387474 - DNA, 25 bp, Artificial
  probe
  misc_feature (1)..(25): SEQ ID NO: 4645; WAN0249UB; Start 182; Stop 206
tcaatttgttcgtatcctatttcac

SEQ ID NO: 387475 - DNA, 25 bp, Artificial
  probe
  misc_feature (1)..(25): SEQ ID NO: 4645; WAN0249UB; Start 174; Stop 198
tttcctaatcaatttgttcgtatcc

SEQ ID NO: 387476 - DNA, 25 bp, Artificial
  probe
  misc_feature (1)..(25): SEQ ID NO: 4645; WAN0249UB; Start 176; Stop 200
tcctaatcaatttgttcgtatccta

SEQ ID NO: 387477 - DNA, 25 bp, Artificial
  probe
  misc_feature (1)..(25): SEQ ID NO: 4645; WAN0249UB; Start 184; Stop 208
aatttgttcgtatcctatttcactc

SEQ ID NO: 387478 - DNA, 25 bp, Artificial
  probe
  misc_feature (1)..(25): SEQ ID NO: 4645; WAN0249UB; Start 181; Stop 205
atcaatttgttcgtatcctatttca

SEQ ID NO: 387479 - DNA, 25 bp, Artificial
  probe
  misc_feature (1)..(25): SEQ ID NO: 4645; WAN0249UB; Start 177; Stop 201
cctaatcaatttgttcgtatcctat

SEQ ID NO: 387480 - DNA, 25 bp, Artificial
  probe
  misc_feature (1)..(25): SEQ ID NO: 4645; WAN0249UB; Start 77; Stop 101
aaactgaatctagactagcacaatg

SEQ ID NO: 387481 - DNA, 25 bp, Artificial
  probe
  misc_feature (1)..(25): SEQ ID NO: 4645; WAN0249UB; Start 75; Stop 99
gtaaactgaatctagactagcacaa

SEQ ID NO: 387482 - DNA, 25 bp, Artificial
  probe
  misc_feature (1)..(25): SEQ ID NO: 4645; WAN0249UB; Start 74; Stop 98
agtaaactgaatctagactagcaca

SEQ ID NO: 387483 - DNA, 25 bp, Artificial
  probe
  misc_feature (1)..(25): SEQ ID NO: 4645; WAN0249UB; Start 78; Stop 102
aactgaatctagactagcacaatgc

SEQ ID NO: 387484 - DNA, 25 bp, Artificial
  probe
  misc_feature (1)..(25): SEQ ID NO: 4645; WAN0249UB; Start 180; Stop 204
aatcaatttgttcgtatcctatttc

SEQ ID NO: 387485 - DNA, 25 bp, Artificial
  probe
  misc_feature (1)..(25): SEQ ID NO: 4645; WAN0249UB; Start 5; Stop 29
gctgaataatacagataaaacctgc

SEQ ID NO: 387486 - DNA, 25 bp, Artificial
  probe
  misc_feature (1)..(25): SEQ ID NO: 4645; WAN0249UB; Start 76; Stop 100
taaactgaatctagactagcacaat

SEQ ID NO: 387487 - DNA, 25 bp, Artificial
  probe
  misc_feature (1)..(25): SEQ ID NO: 4645; WAN0249UB; Start 7; Stop 31
tgaataatacagataaaacctgcct

SEQ ID NO: 387488 - DNA, 25 bp, Artificial
  probe
  misc_feature (1)..(25): SEQ ID NO: 4645; WAN0249UB; Start 47; Stop 71
ttgatttcaagctactcgttttagt

SEQ ID NO: 387489 - DNA, 25 bp, Artificial
  probe
  misc_feature (1)..(25): SEQ ID NO: 4645; WAN0249UB; Start 8; Stop 32
gaataatacagataaaacctgcctg

SEQ ID NO: 387490 - DNA, 25 bp, Artificial
  probe
  misc_feature (1)..(25): SEQ ID NO: 4645; WAN0249UB; Start 6; Stop 30
ctgaataatacagataaaacctgcc

SEQ ID NO: 387491 - DNA, 25 bp, Artificial
  probe
  misc_feature (1)..(25): SEQ ID NO: 4645; WAN0249UB; Start 46; Stop 70
tttgatttcaagctactcgttttag

SEQ ID NO: 387492 - DNA, 25 bp, Artificial
  probe
  misc_feature (1)..(25): SEQ ID NO: 4645; WAN0249UB; Start 178; Stop 202
ctaatcaatttgttcgtatcctatt

SEQ ID NO: 387493 - DNA, 25 bp, Artificial
  probe
  misc_feature (1)..(25): SEQ ID NO: 4645; WAN0249UB; Start 45; Stop 69
ttttgatttcaagctactcgtttta

SEQ ID NO: 387494 - DNA, 25 bp, Artificial
  probe
  misc_feature (1)..(25): SEQ ID NO: 4645; WAN0249UB; Start 73; Stop 97
tagtaaactgaatctagactagcac

SEQ ID NO: 387495 - DNA, 25 bp, Artificial
  probe
  misc_feature (1)..(25): SEQ ID NO: 4645; WAN0249UB; Start 48; Stop 72
tgatttcaagctactcgttttagta

SEQ ID NO: 387496 - DNA, 25 bp, Artificial
  probe
  misc_feature (1)..(25): SEQ ID NO: 4645; WAN0249UB; Start 173; Stop 197
ttttcctaatcaatttgttcgtatc

SEQ ID NO: 387497 - DNA, 25 bp, Artificial
  probe
  misc_feature (1)..(25): SEQ ID NO: 4645; WAN0249UB; Start 52; Stop 76
ttcaagctactcgttttagtatagt

SEQ ID NO: 387498 - DNA, 25 bp, Artificial
  probe
  misc_feature (1)..(25): SEQ ID NO: 4645; WAN0249UB; Start 72; Stop 96
atagtaaactgaatctagactagca

SEQ ID NO: 387499 - DNA, 25 bp, Artificial
  probe
  misc_feature (1)..(25): SEQ ID NO: 4645; WAN0249UB; Start 49; Stop 73
gatttcaagctactcgttttagtat

SEQ ID NO: 387500 - DNA, 25 bp, Artificial
  probe
  misc_feature (1)..(25): SEQ ID NO: 4645; WAN0249UB; Start 4; Stop 28
agctgaataatacagataaaacctg

SEQ ID NO: 387501 - DNA, 25 bp, Artificial
  probe
  misc_feature (1)..(25): SEQ ID NO: 4645; WAN0249UB; Start 172; Stop 196
attttcctaatcaatttgttcgtat

SEQ ID NO: 387502 - DNA, 25 bp, Artificial
  probe
  misc_feature (1)..(25): SEQ ID NO: 4645; WAN0249UB; Start 53; Stop 77
tcaagctactcgttttagtatagta

SEQ ID NO: 387503 - DNA, 25 bp, Artificial
  probe
  misc_feature (1)..(25): SEQ ID NO: 4645; WAN0249UB; Start 171; Stop 195
gattttcctaatcaatttgttcgta

SEQ ID NO: 387504 - DNA, 25 bp, Artificial
  probe
  misc_feature (1)..(25): SEQ ID NO: 4645; WAN0249UB; Start 51; Stop 75
tttcaagctactcgttttagtatag

SEQ ID NO: 387505 - DNA, 25 bp, Artificial
  probe
  misc_feature (1)..(25): SEQ ID NO: 4646; WAN024ACL; Start 1; Stop 25
tctaggatcttgagtcggagctgag

SEQ ID NO: 387506 - DNA, 25 bp, Artificial
  probe
  misc_feature (1)..(25): SEQ ID NO: 4647; WAN024AAS; Start 1; Stop 25
tctccagtacgtcagatttctcttt

SEQ ID NO: 387507 - DNA, 25 bp, Artificial
  probe
  misc_feature (1)..(25): SEQ ID NO: 4647; WAN024AAS; Start 4; Stop 28
ccagtacgtcagatttctcttttct

SEQ ID NO: 387508 - DNA, 25 bp, Artificial
  probe
  misc_feature (1)..(25): SEQ ID NO: 4647; WAN024AAS; Start 3; Stop 27
tccagtacgtcagatttctcttttc

SEQ ID NO: 387509 - DNA, 25 bp, Artificial
  probe
  misc_feature (1)..(25): SEQ ID NO: 4647; WAN024AAS; Start 2; Stop 26
ctccagtacgtcagatttctctttt

SEQ ID NO: 387510 - DNA, 25 bp, Artificial
  probe
  misc_feature (1)..(25): SEQ ID NO: 4647; WAN024AAS; Start 17; Stop 41
tttctcttttctgtattttcattgt

SEQ ID NO: 387511 - DNA, 25 bp, Artificial
  probe
  misc_feature (1)..(25): SEQ ID NO: 4647; WAN024AAS; Start 6; Stop 30
agtacgtcagatttctcttttctgt

SEQ ID NO: 387512 - DNA, 25 bp, Artificial
  probe
  misc_feature (1)..(25): SEQ ID NO: 4647; WAN024AAS; Start 5; Stop 29
cagtacgtcagatttctcttttctg

SEQ ID NO: 387513 - DNA, 25 bp, Artificial
  probe
  misc_feature (1)..(25): SEQ ID NO: 4647; WAN024AAS; Start 10; Stop 34
cgtcagatttctcttttctgtattt

SEQ ID NO: 387514 - DNA, 25 bp, Artificial
  probe
  misc_feature (1)..(25): SEQ ID NO: 4647; WAN024AAS; Start 7; Stop 31
gtacgtcagatttctcttttctgta

SEQ ID NO: 387515 - DNA, 25 bp, Artificial
  probe
  misc_feature (1)..(25): SEQ ID NO: 4647; WAN024AAS; Start 9; Stop 33
acgtcagatttctcttttctgtatt

SEQ ID NO: 387516 - DNA, 25 bp, Artificial
  probe
  misc_feature (1)..(25): SEQ ID NO: 4647; WAN024AAS; Start 8; Stop 32
tacgtcagatttctcttttctgtat

SEQ ID NO: 387517 - DNA, 25 bp, Artificial
  probe
  misc_feature (1)..(25): SEQ ID NO: 4647; WAN024AAS; Start 13; Stop 37
cagatttctcttttctgtattttca

SEQ ID NO: 387518 - DNA, 25 bp, Artificial
  probe
  misc_feature (1)..(25): SEQ ID NO: 4647; WAN024AAS; Start 11; Stop 35
gtcagatttctcttttctgtatttt

SEQ ID NO: 387519 - DNA, 25 bp, Artificial
  probe
  misc_feature (1)..(25): SEQ ID NO: 4647; WAN024AAS; Start 12; Stop 36
tcagatttctcttttctgtattttc

SEQ ID NO: 387520 - DNA, 25 bp, Artificial
  probe
  misc_feature (1)..(25): SEQ ID NO: 4648; WAN0249VP; Start 53; Stop 77
cccacctattttctagtcttttaca

SEQ ID NO: 387521 - DNA, 25 bp, Artificial
  probe
  misc_feature (1)..(25): SEQ ID NO: 4648; WAN0249VP; Start 17; Stop 41
tttacaagattgggctagagctttt

SEQ ID NO: 387522 - DNA, 25 bp, Artificial
  probe
  misc_feature (1)..(25): SEQ ID NO: 4648; WAN0249VP; Start 16; Stop 40
ttttacaagattgggctagagcttt

SEQ ID NO: 387523 - DNA, 25 bp, Artificial
  probe
  misc_feature (1)..(25): SEQ ID NO: 4648; WAN0249VP; Start 18; Stop 42
ttacaagattgggctagagcttttc

SEQ ID NO: 387524 - DNA, 25 bp, Artificial
  probe
  misc_feature (1)..(25): SEQ ID NO: 4648; WAN0249VP; Start 15; Stop 39
cttttacaagattgggctagagctt

SEQ ID NO: 387525 - DNA, 25 bp, Artificial
  probe
  misc_feature (1)..(25): SEQ ID NO: 4648; WAN0249VP; Start 2; Stop 26
ctccttctcccttcttttacaagat

SEQ ID NO: 387526 - DNA, 25 bp, Artificial
  probe
  misc_feature (1)..(25): SEQ ID NO: 4648; WAN0249VP; Start 19; Stop 43
tacaagattgggctagagcttttca

SEQ ID NO: 387527 - DNA, 25 bp, Artificial
  probe
  misc_feature (1)..(25): SEQ ID NO: 4648; WAN0249VP; Start 11; Stop 35
ccttcttttacaagattgggctaga

SEQ ID NO: 387528 - DNA, 25 bp, Artificial
  probe
  misc_feature (1)..(25): SEQ ID NO: 4648; WAN0249VP; Start 5; Stop 29
cttctcccttcttttacaagattgg

SEQ ID NO: 387529 - DNA, 25 bp, Artificial
  probe
  misc_feature (1)..(25): SEQ ID NO: 4648; WAN0249VP; Start 4; Stop 28
ccttctcccttcttttacaagattg

SEQ ID NO: 387530 - DNA, 25 bp, Artificial
  probe
  misc_feature (1)..(25): SEQ ID NO: 4648; WAN0249VP; Start 3; Stop 27
tccttctcccttcttttacaagatt

SEQ ID NO: 387531 - DNA, 25 bp, Artificial
  probe
  misc_feature (1)..(25): SEQ ID NO: 4648; WAN0249VP; Start 12; Stop 36
cttcttttacaagattgggctagag

SEQ ID NO: 387532 - DNA, 25 bp, Artificial
  probe
  misc_feature (1)..(25): SEQ ID NO: 4648; WAN0249VP; Start 1; Stop 25
tctccttctcccttcttttacaaga

SEQ ID NO: 387533 - DNA, 25 bp, Artificial
  probe
  misc_feature (1)..(25): SEQ ID NO: 4648; WAN0249VP; Start 13; Stop 37
ttcttttacaagattgggctagagc

SEQ ID NO: 387534 - DNA, 25 bp, Artificial
  probe
  misc_feature (1)..(25): SEQ ID NO: 4648; WAN0249VP; Start 6; Stop 30
ttctcccttcttttacaagattggg

SEQ ID NO: 387535 - DNA, 25 bp, Artificial
  probe
  misc_feature (1)..(25): SEQ ID NO: 4648; WAN0249VP; Start 54; Stop 78
ccacctattttctagtcttttacat

SEQ ID NO: 387536 - DNA, 25 bp, Artificial
  probe
  misc_feature (1)..(25): SEQ ID NO: 4648; WAN0249VP; Start 10; Stop 34
cccttcttttacaagattgggctag

SEQ ID NO: 387537 - DNA, 25 bp, Artificial
  probe
  misc_feature (1)..(25): SEQ ID NO: 4648; WAN0249VP; Start 9; Stop 33
tcccttcttttacaagattgggcta

SEQ ID NO: 387538 - DNA, 25 bp, Artificial
  probe
  misc_feature (1)..(25): SEQ ID NO: 4648; WAN0249VP; Start 20; Stop 44
acaagattgggctagagcttttcag

SEQ ID NO: 387539 - DNA, 25 bp, Artificial
  probe
  misc_feature (1)..(25): SEQ ID NO: 4648; WAN0249VP; Start 14; Stop 38
tcttttacaagattgggctagagct

SEQ ID NO: 387540 - DNA, 25 bp, Artificial
  probe
  misc_feature (1)..(25): SEQ ID NO: 4648; WAN0249VP; Start 8; Stop 32
ctcccttcttttacaagattgggct

SEQ ID NO: 387541 - DNA, 25 bp, Artificial
  probe
  misc_feature (1)..(25): SEQ ID NO: 4648; WAN0249VP; Start 7; Stop 31
tctcccttcttttacaagattgggc

SEQ ID NO: 387542 - DNA, 25 bp, Artificial
  probe
  misc_feature (1)..(25): SEQ ID NO: 4648; WAN0249VP; Start 21; Stop 45
caagattgggctagagcttttcagc

SEQ ID NO: 387543 - DNA, 25 bp, Artificial
  probe
  misc_feature (1)..(25): SEQ ID NO: 4648; WAN0249VP; Start 22; Stop 46
aagattgggctagagcttttcagct

SEQ ID NO: 387544 - DNA, 25 bp, Artificial
  probe
  misc_feature (1)..(25): SEQ ID NO: 4649; WAN024ADL; Start 1; Stop 25
tctccttctttcatcctacctattt

SEQ ID NO: 387545 - DNA, 25 bp, Artificial
  probe
  misc_feature (1)..(25): SEQ ID NO: 4649; WAN024ADL; Start 2; Stop 26
ctccttctttcatcctacctatttt

SEQ ID NO: 387546 - DNA, 25 bp, Artificial
  probe
  misc_feature (1)..(25): SEQ ID NO: 4649; WAN024ADL; Start 3; Stop 27
tccttctttcatcctacctatttta

SEQ ID NO: 387547 - DNA, 25 bp, Artificial
  probe
  misc_feature (1)..(25): SEQ ID NO: 4649; WAN024ADL; Start 8; Stop 32
ctttcatcctacctattttatcaca

SEQ ID NO: 387548 - DNA, 25 bp, Artificial
  probe
  misc_feature (1)..(25): SEQ ID NO: 4649; WAN024ADL; Start 7; Stop 31
tctttcatcctacctattttatcac

SEQ ID NO: 387549 - DNA, 25 bp, Artificial
  probe
  misc_feature (1)..(25): SEQ ID NO: 4649; WAN024ADL; Start 4; Stop 28
ccttctttcatcctacctattttat

SEQ ID NO: 387550 - DNA, 25 bp, Artificial
  probe
  misc_feature (1)..(25): SEQ ID NO: 4649; WAN024ADL; Start 49; Stop 73
tagtatcatgagcaattctttcaaa

SEQ ID NO: 387551 - DNA, 25 bp, Artificial
  probe
  misc_feature (1)..(25): SEQ ID NO: 4649; WAN024ADL; Start 9; Stop 33
tttcatcctacctattttatcacaa

SEQ ID NO: 387552 - DNA, 25 bp, Artificial
  probe
  misc_feature (1)..(25): SEQ ID NO: 4649; WAN024ADL; Start 48; Stop 72
atagtatcatgagcaattctttcaa

SEQ ID NO: 387553 - DNA, 25 bp, Artificial
  probe
  misc_feature (1)..(25): SEQ ID NO: 4649; WAN024ADL; Start 10; Stop 34
ttcatcctacctattttatcacaat

SEQ ID NO: 387554 - DNA, 25 bp, Artificial
  probe
  misc_feature (1)..(25): SEQ ID NO: 4649; WAN024ADL; Start 14; Stop 38
tcctacctattttatcacaatttct

SEQ ID NO: 387555 - DNA, 25 bp, Artificial
  probe
  misc_feature (1)..(25): SEQ ID NO: 4649; WAN024ADL; Start 11; Stop 35
tcatcctacctattttatcacaatt

SEQ ID NO: 387556 - DNA, 25 bp, Artificial
  probe
  misc_feature (1)..(25): SEQ ID NO: 4649; WAN024ADL; Start 6; Stop 30
ttctttcatcctacctattttatca

SEQ ID NO: 387557 - DNA, 25 bp, Artificial
  probe
  misc_feature (1)..(25): SEQ ID NO: 4649; WAN024ADL; Start 47; Stop 71
tatagtatcatgagcaattctttca

SEQ ID NO: 387558 - DNA, 25 bp, Artificial
  probe
  misc_feature (1)..(25): SEQ ID NO: 4649; WAN024ADL; Start 50; Stop 74
agtatcatgagcaattctttcaaaa

SEQ ID NO: 387559 - DNA, 25 bp, Artificial
  probe
  misc_feature (1)..(25): SEQ ID NO: 4649; WAN024ADL; Start 12; Stop 36
catcctacctattttatcacaattt

SEQ ID NO: 387560 - DNA, 25 bp, Artificial
  probe
  misc_feature (1)..(25): SEQ ID NO: 4649; WAN024ADL; Start 5; Stop 29
cttctttcatcctacctattttatc

SEQ ID NO: 387561 - DNA, 25 bp, Artificial
  probe
  misc_feature (1)..(25): SEQ ID NO: 4649; WAN024ADL; Start 46; Stop 70
ttatagtatcatgagcaattctttc

SEQ ID NO: 387562 - DNA, 25 bp, Artificial
  probe
  misc_feature (1)..(25): SEQ ID NO: 4650; WAN0249HZ; Start 2; Stop 26
ctctcctcctgatgaaaagaaactc

SEQ ID NO: 387563 - DNA, 25 bp, Artificial
  probe
  misc_feature (1)..(25): SEQ ID NO: 4650; WAN0249HZ; Start 1; Stop 25
tctctcctcctgatgaaaagaaact

SEQ ID NO: 387564 - DNA, 25 bp, Artificial
  probe
  misc_feature (1)..(25): SEQ ID NO: 4650; WAN0249HZ; Start 3; Stop 27
tctcctcctgatgaaaagaaactca

SEQ ID NO: 387565 - DNA, 25 bp, Artificial
  probe
  misc_feature (1)..(25): SEQ ID NO: 4650; WAN0249HZ; Start 11; Stop 35
tgatgaaaagaaactcagttggttt

SEQ ID NO: 387566 - DNA, 25 bp, Artificial
  probe
  misc_feature (1)..(25): SEQ ID NO: 4650; WAN0249HZ; Start 10; Stop 34
ctgatgaaaagaaactcagttggtt

SEQ ID NO: 387567 - DNA, 25 bp, Artificial
  probe
  misc_feature (1)..(25): SEQ ID NO: 4650; WAN0249HZ; Start 7; Stop 31
ctcctgatgaaaagaaactcagttg

SEQ ID NO: 387568 - DNA, 25 bp, Artificial
  probe
  misc_feature (1)..(25): SEQ ID NO: 4650; WAN0249HZ; Start 6; Stop 30
cctcctgatgaaaagaaactcagtt

SEQ ID NO: 387569 - DNA, 25 bp, Artificial
  probe
  misc_feature (1)..(25): SEQ ID NO: 4650; WAN0249HZ; Start 8; Stop 32
tcctgatgaaaagaaactcagttgg

SEQ ID NO: 387570 - DNA, 25 bp, Artificial
  probe
  misc_feature (1)..(25): SEQ ID NO: 4650; WAN0249HZ; Start 4; Stop 28
ctcctcctgatgaaaagaaactcag

SEQ ID NO: 387571 - DNA, 25 bp, Artificial
  probe
  misc_feature (1)..(25): SEQ ID NO: 4650; WAN0249HZ; Start 9; Stop 33
cctgatgaaaagaaactcagttggt

SEQ ID NO: 387572 - DNA, 25 bp, Artificial
  probe
  misc_feature (1)..(25): SEQ ID NO: 4650; WAN0249HZ; Start 5; Stop 29
tcctcctgatgaaaagaaactcagt

SEQ ID NO: 387573 - DNA, 25 bp, Artificial
  probe
  misc_feature (1)..(25): SEQ ID NO: 4651; WAN0249I8; Start 24; Stop 48
atacatagttcgtgacagttcctac

SEQ ID NO: 387574 - DNA, 25 bp, Artificial
  probe
  misc_feature (1)..(25): SEQ ID NO: 4651; WAN0249I8; Start 22; Stop 46
ttatacatagttcgtgacagttcct

SEQ ID NO: 387575 - DNA, 25 bp, Artificial
  probe
  misc_feature (1)..(25): SEQ ID NO: 4651; WAN0249I8; Start 21; Stop 45
cttatacatagttcgtgacagttcc

SEQ ID NO: 387576 - DNA, 25 bp, Artificial
  probe
  misc_feature (1)..(25): SEQ ID NO: 4651; WAN0249I8; Start 23; Stop 47
tatacatagttcgtgacagttccta

SEQ ID NO: 387577 - DNA, 25 bp, Artificial
  probe
  misc_feature (1)..(25): SEQ ID NO: 4651; WAN0249I8; Start 18; Stop 42
gttcttatacatagttcgtgacagt

SEQ ID NO: 387578 - DNA, 25 bp, Artificial
  probe
  misc_feature (1)..(25): SEQ ID NO: 4651; WAN0249I8; Start 25; Stop 49
tacatagttcgtgacagttcctact

SEQ ID NO: 387579 - DNA, 25 bp, Artificial
  probe
  misc_feature (1)..(25): SEQ ID NO: 4651; WAN0249I8; Start 20; Stop 44
tcttatacatagttcgtgacagttc

SEQ ID NO: 387580 - DNA, 25 bp, Artificial
  probe
  misc_feature (1)..(25): SEQ ID NO: 4651; WAN0249I8; Start 17; Stop 41
agttcttatacatagttcgtgacag

SEQ ID NO: 387581 - DNA, 25 bp, Artificial
  probe
  misc_feature (1)..(25): SEQ ID NO: 4651; WAN0249I8; Start 26; Stop 50
acatagttcgtgacagttcctactt

SEQ ID NO: 387582 - DNA, 25 bp, Artificial
  probe
  misc_feature (1)..(25): SEQ ID NO: 4651; WAN0249I8; Start 19; Stop 43
ttcttatacatagttcgtgacagtt

SEQ ID NO: 387583 - DNA, 25 bp, Artificial
  probe
  misc_feature (1)..(25): SEQ ID NO: 4651; WAN0249I8; Start 16; Stop 40
tagttcttatacatagttcgtgaca

SEQ ID NO: 387584 - DNA, 25 bp, Artificial
  probe
  misc_feature (1)..(25): SEQ ID NO: 4651; WAN0249I8; Start 12; Stop 36
accatagttcttatacatagttcgt

SEQ ID NO: 387585 - DNA, 25 bp, Artificial
  probe
  misc_feature (1)..(25): SEQ ID NO: 4651; WAN0249I8; Start 13; Stop 37
ccatagttcttatacatagttcgtg

SEQ ID NO: 387586 - DNA, 25 bp, Artificial
  probe
  misc_feature (1)..(25): SEQ ID NO: 4651; WAN0249I8; Start 27; Stop 51
catagttcgtgacagttcctacttt

SEQ ID NO: 387587 - DNA, 25 bp, Artificial
  probe
  misc_feature (1)..(25): SEQ ID NO: 4651; WAN0249I8; Start 86; Stop 110
actgtatgaactgggactgtctttc

SEQ ID NO: 387588 - DNA, 25 bp, Artificial
  probe
  misc_feature (1)..(25): SEQ ID NO: 4651; WAN0249I8; Start 85; Stop 109
cactgtatgaactgggactgtcttt

SEQ ID NO: 387589 - DNA, 25 bp, Artificial
  probe
  misc_feature (1)..(25): SEQ ID NO: 4651; WAN0249I8; Start 15; Stop 39
atagttcttatacatagttcgtgac

SEQ ID NO: 387590 - DNA, 25 bp, Artificial
  probe
  misc_feature (1)..(25): SEQ ID NO: 4651; WAN0249I8; Start 14; Stop 38
catagttcttatacatagttcgtga

SEQ ID NO: 387591 - DNA, 25 bp, Artificial
  probe
  misc_feature (1)..(25): SEQ ID NO: 4651; WAN0249I8; Start 11; Stop 35
taccatagttcttatacatagttcg

SEQ ID NO: 387592 - DNA, 25 bp, Artificial
  probe
  misc_feature (1)..(25): SEQ ID NO: 4651; WAN0249I8; Start 28; Stop 52
atagttcgtgacagttcctactttt

SEQ ID NO: 387593 - DNA, 25 bp, Artificial
  probe
  misc_feature (1)..(25): SEQ ID NO: 4651; WAN0249I8; Start 87; Stop 111
ctgtatgaactgggactgtctttcc

SEQ ID NO: 387594 - DNA, 25 bp, Artificial
  probe
  misc_feature (1)..(25): SEQ ID NO: 4651; WAN0249I8; Start 84; Stop 108
acactgtatgaactgggactgtctt

SEQ ID NO: 387595 - DNA, 25 bp, Artificial
  probe
  misc_feature (1)..(25): SEQ ID NO: 4651; WAN0249I8; Start 58; Stop 82
taaaatcatacagtgtgtccttggg

SEQ ID NO: 387596 - DNA, 25 bp, Artificial
  probe
  misc_feature (1)..(25): SEQ ID NO: 4651; WAN0249I8; Start 57; Stop 81
ataaaatcatacagtgtgtccttgg

SEQ ID NO: 387597 - DNA, 25 bp, Artificial
  probe
  misc_feature (1)..(25): SEQ ID NO: 4651; WAN0249I8; Start 56; Stop 80
gataaaatcatacagtgtgtccttg

SEQ ID NO: 387598 - DNA, 25 bp, Artificial
  probe
  misc_feature (1)..(25): SEQ ID NO: 4651; WAN0249I8; Start 83; Stop 107
cacactgtatgaactgggactgtct

SEQ ID NO: 387599 - DNA, 25 bp, Artificial
  probe
  misc_feature (1)..(25): SEQ ID NO: 4651; WAN0249I8; Start 60; Stop 84
aaatcatacagtgtgtccttgggca

SEQ ID NO: 387600 - DNA, 25 bp, Artificial
  probe
  misc_feature (1)..(25): SEQ ID NO: 4651; WAN0249I8; Start 55; Stop 79
tgataaaatcatacagtgtgtcctt

SEQ ID NO: 387601 - DNA, 25 bp, Artificial
  probe
  misc_feature (1)..(25): SEQ ID NO: 4651; WAN0249I8; Start 54; Stop 78
ttgataaaatcatacagtgtgtcct

SEQ ID NO: 387602 - DNA, 25 bp, Artificial
  probe
  misc_feature (1)..(25): SEQ ID NO: 4651; WAN0249I8; Start 59; Stop 83
aaaatcatacagtgtgtccttgggc

SEQ ID NO: 387603 - DNA, 25 bp, Artificial
  probe
  misc_feature (1)..(25): SEQ ID NO: 4651; WAN0249I8; Start 53; Stop 77
tttgataaaatcatacagtgtgtcc

SEQ ID NO: 387604 - DNA, 25 bp, Artificial
  probe
  misc_feature (1)..(25): SEQ ID NO: 4651; WAN0249I8; Start 61; Stop 85
aatcatacagtgtgtccttgggcac

SEQ ID NO: 387605 - DNA, 25 bp, Artificial
  probe
  misc_feature (1)..(25): SEQ ID NO: 4651; WAN0249I8; Start 52; Stop 76
ttttgataaaatcatacagtgtgtc

SEQ ID NO: 387606 - DNA, 25 bp, Artificial
  probe
  misc_feature (1)..(25): SEQ ID NO: 4651; WAN0249I8; Start 104; Stop 128
gtctttcccagcttcggaggtaaaa

SEQ ID NO: 387607 - DNA, 25 bp, Artificial
  probe
  misc_feature (1)..(25): SEQ ID NO: 4652; WAN024AHC; Start 36; Stop 60
accctaaaaggaagtggatttcaaa

SEQ ID NO: 387608 - DNA, 25 bp, Artificial
  probe
  misc_feature (1)..(25): SEQ ID NO: 4652; WAN024AHC; Start 37; Stop 61
ccctaaaaggaagtggatttcaaat

SEQ ID NO: 387609 - DNA, 25 bp, Artificial
  probe
  misc_feature (1)..(25): SEQ ID NO: 4652; WAN024AHC; Start 43; Stop 67
aaggaagtggatttcaaatattagt

SEQ ID NO: 387610 - DNA, 25 bp, Artificial
  probe
  misc_feature (1)..(25): SEQ ID NO: 4652; WAN024AHC; Start 44; Stop 68
aggaagtggatttcaaatattagta

SEQ ID NO: 387611 - DNA, 25 bp, Artificial
  probe
  misc_feature (1)..(25): SEQ ID NO: 4652; WAN024AHC; Start 38; Stop 62
cctaaaaggaagtggatttcaaata

SEQ ID NO: 387612 - DNA, 25 bp, Artificial
  probe
  misc_feature (1)..(25): SEQ ID NO: 4652; WAN024AHC; Start 45; Stop 69
ggaagtggatttcaaatattagtag

SEQ ID NO: 387613 - DNA, 25 bp, Artificial
  probe
  misc_feature (1)..(25): SEQ ID NO: 4652; WAN024AHC; Start 42; Stop 66
aaaggaagtggatttcaaatattag

SEQ ID NO: 387614 - DNA, 25 bp, Artificial
  probe
  misc_feature (1)..(25): SEQ ID NO: 4652; WAN024AHC; Start 59; Stop 83
aatattagtagtttacagaactggc

SEQ ID NO: 387615 - DNA, 25 bp, Artificial
  probe
  misc_feature (1)..(25): SEQ ID NO: 4652; WAN024AHC; Start 39; Stop 63
ctaaaaggaagtggatttcaaatat

SEQ ID NO: 387616 - DNA, 25 bp, Artificial
  probe
  misc_feature (1)..(25): SEQ ID NO: 4652; WAN024AHC; Start 41; Stop 65
aaaaggaagtggatttcaaatatta

SEQ ID NO: 387617 - DNA, 25 bp, Artificial
  probe
  misc_feature (1)..(25): SEQ ID NO: 4652; WAN024AHC; Start 40; Stop 64
taaaaggaagtggatttcaaatatt

SEQ ID NO: 387618 - DNA, 25 bp, Artificial
  probe
  misc_feature (1)..(25): SEQ ID NO: 4653; WAN024AGC; Start 56; Stop 80
cttgaataggactcaggtagctctc

SEQ ID NO: 387619 - DNA, 25 bp, Artificial
  probe
  misc_feature (1)..(25): SEQ ID NO: 4653; WAN024AGC; Start 45; Stop 69
tactacctgagcttgaataggactc

SEQ ID NO: 387620 - DNA, 25 bp, Artificial
  probe
  misc_feature (1)..(25): SEQ ID NO: 4653; WAN024AGC; Start 44; Stop 68
gtactacctgagcttgaataggact

SEQ ID NO: 387621 - DNA, 25 bp, Artificial
  probe
  misc_feature (1)..(25): SEQ ID NO: 4653; WAN024AGC; Start 57; Stop 81
ttgaataggactcaggtagctctct

SEQ ID NO: 387622 - DNA, 25 bp, Artificial
  probe
  misc_feature (1)..(25): SEQ ID NO: 4653; WAN024AGC; Start 42; Stop 66
aagtactacctgagcttgaatagga

SEQ ID NO: 387623 - DNA, 25 bp, Artificial
  probe
  misc_feature (1)..(25): SEQ ID NO: 4653; WAN024AGC; Start 43; Stop 67
agtactacctgagcttgaataggac

SEQ ID NO: 387624 - DNA, 25 bp, Artificial
  probe
  misc_feature (1)..(25): SEQ ID NO: 4653; WAN024AGC; Start 38; Stop 62
aagaaagtactacctgagcttgaat

SEQ ID NO: 387625 - DNA, 25 bp, Artificial
  probe
  misc_feature (1)..(25): SEQ ID NO: 4653; WAN024AGC; Start 37; Stop 61
taagaaagtactacctgagcttgaa

SEQ ID NO: 387626 - DNA, 25 bp, Artificial
  probe
  misc_feature (1)..(25): SEQ ID NO: 4653; WAN024AGC; Start 39; Stop 63
agaaagtactacctgagcttgaata

SEQ ID NO: 387627 - DNA, 25 bp, Artificial
  probe
  misc_feature (1)..(25): SEQ ID NO: 4653; WAN024AGC; Start 36; Stop 60
ataagaaagtactacctgagcttga

SEQ ID NO: 387628 - DNA, 25 bp, Artificial
  probe
  misc_feature (1)..(25): SEQ ID NO: 4653; WAN024AGC; Start 40; Stop 64
gaaagtactacctgagcttgaatag

SEQ ID NO: 387629 - DNA, 25 bp, Artificial
  probe
  misc_feature (1)..(25): SEQ ID NO: 4653; WAN024AGC; Start 55; Stop 79
gcttgaataggactcaggtagctct

SEQ ID NO: 387630 - DNA, 25 bp, Artificial
  probe
  misc_feature (1)..(25): SEQ ID NO: 4653; WAN024AGC; Start 41; Stop 65
aaagtactacctgagcttgaatagg

SEQ ID NO: 387631 - DNA, 25 bp, Artificial
  probe
  misc_feature (1)..(25): SEQ ID NO: 4653; WAN024AGC; Start 46; Stop 70
actacctgagcttgaataggactca

SEQ ID NO: 387632 - DNA, 25 bp, Artificial
  probe
  misc_feature (1)..(25): SEQ ID NO: 4653; WAN024AGC; Start 35; Stop 59
tataagaaagtactacctgagcttg

SEQ ID NO: 387633 - DNA, 25 bp, Artificial
  probe
  misc_feature (1)..(25): SEQ ID NO: 4653; WAN024AGC; Start 32; Stop 56
gtttataagaaagtactacctgagc

SEQ ID NO: 387634 - DNA, 25 bp, Artificial
  probe
  misc_feature (1)..(25): SEQ ID NO: 4653; WAN024AGC; Start 33; Stop 57
tttataagaaagtactacctgagct

SEQ ID NO: 387635 - DNA, 25 bp, Artificial
  probe
  misc_feature (1)..(25): SEQ ID NO: 4653; WAN024AGC; Start 34; Stop 58
ttataagaaagtactacctgagctt

SEQ ID NO: 387636 - DNA, 25 bp, Artificial
  probe
  misc_feature (1)..(25): SEQ ID NO: 4653; WAN024AGC; Start 52; Stop 76
tgagcttgaataggactcaggtagc

SEQ ID NO: 387637 - DNA, 25 bp, Artificial
  probe
  misc_feature (1)..(25): SEQ ID NO: 4653; WAN024AGC; Start 54; Stop 78
agcttgaataggactcaggtagctc

SEQ ID NO: 387638 - DNA, 25 bp, Artificial
  probe
  misc_feature (1)..(25): SEQ ID NO: 4653; WAN024AGC; Start 53; Stop 77
gagcttgaataggactcaggtagct

SEQ ID NO: 387639 - DNA, 25 bp, Artificial
  probe
  misc_feature (1)..(25): SEQ ID NO: 4653; WAN024AGC; Start 31; Stop 55
agtttataagaaagtactacctgag

SEQ ID NO: 387640 - DNA, 25 bp, Artificial
  probe
  misc_feature (1)..(25): SEQ ID NO: 4654; WAN024APS; Start 143; Stop 167
actttggatatcttttggttagtca

SEQ ID NO: 387641 - DNA, 25 bp, Artificial
  probe
  misc_feature (1)..(25): SEQ ID NO: 4654; WAN024APS; Start 138; Stop 162
agactactttggatatcttttggtt

SEQ ID NO: 387642 - DNA, 25 bp, Artificial
  probe
  misc_feature (1)..(25): SEQ ID NO: 4654; WAN024APS; Start 144; Stop 168
ctttggatatcttttggttagtcat

SEQ ID NO: 387643 - DNA, 25 bp, Artificial
  probe
  misc_feature (1)..(25): SEQ ID NO: 4654; WAN024APS; Start 101; Stop 125
ttcctaactaaaacactcataaagt

SEQ ID NO: 387644 - DNA, 25 bp, Artificial
  probe
  misc_feature (1)..(25): SEQ ID NO: 4654; WAN024APS; Start 137; Stop 161
tagactactttggatatcttttggt

SEQ ID NO: 387645 - DNA, 25 bp, Artificial
  probe
  misc_feature (1)..(25): SEQ ID NO: 4654; WAN024APS; Start 150; Stop 174
atatcttttggttagtcattttcca

SEQ ID NO: 387646 - DNA, 25 bp, Artificial
  probe
  misc_feature (1)..(25): SEQ ID NO: 4654; WAN024APS; Start 147; Stop 171
tggatatcttttggttagtcatttt

SEQ ID NO: 387647 - DNA, 25 bp, Artificial
  probe
  misc_feature (1)..(25): SEQ ID NO: 4654; WAN024APS; Start 146; Stop 170
ttggatatcttttggttagtcattt

SEQ ID NO: 387648 - DNA, 25 bp, Artificial
  probe
  misc_feature (1)..(25): SEQ ID NO: 4654; WAN024APS; Start 145; Stop 169
tttggatatcttttggttagtcatt

SEQ ID NO: 387649 - DNA, 25 bp, Artificial
  probe
  misc_feature (1)..(25): SEQ ID NO: 4654; WAN024APS; Start 139; Stop 163
gactactttggatatcttttggtta

SEQ ID NO: 387650 - DNA, 25 bp, Artificial
  probe
  misc_feature (1)..(25): SEQ ID NO: 4654; WAN024APS; Start 140; Stop 164
actactttggatatcttttggttag

SEQ ID NO: 387651 - DNA, 25 bp, Artificial
  probe
  misc_feature (1)..(25): SEQ ID NO: 4654; WAN024APS; Start 128; Stop 152
agacaattttagactactttggata

SEQ ID NO: 387652 - DNA, 25 bp, Artificial
  probe
  misc_feature (1)..(25): SEQ ID NO: 4654; WAN024APS; Start 127; Stop 151
tagacaattttagactactttggat

SEQ ID NO: 387653 - DNA, 25 bp, Artificial
  probe
  misc_feature (1)..(25): SEQ ID NO: 4654; WAN024APS; Start 126; Stop 150
atagacaattttagactactttgga

SEQ ID NO: 387654 - DNA, 25 bp, Artificial
  probe
  misc_feature (1)..(25): SEQ ID NO: 4654; WAN024APS; Start 142; Stop 166
tactttggatatcttttggttagtc

SEQ ID NO: 387655 - DNA, 25 bp, Artificial
  probe
  misc_feature (1)..(25): SEQ ID NO: 4654; WAN024APS; Start 149; Stop 173
gatatcttttggttagtcattttcc

SEQ ID NO: 387656 - DNA, 25 bp, Artificial
  probe
  misc_feature (1)..(25): SEQ ID NO: 4654; WAN024APS; Start 148; Stop 172
ggatatcttttggttagtcattttc

SEQ ID NO: 387657 - DNA, 25 bp, Artificial
  probe
  misc_feature (1)..(25): SEQ ID NO: 4654; WAN024APS; Start 100; Stop 124
tttcctaactaaaacactcataaag

SEQ ID NO: 387658 - DNA, 25 bp, Artificial
  probe
  misc_feature (1)..(25): SEQ ID NO: 4654; WAN024APS; Start 141; Stop 165
ctactttggatatcttttggttagt

SEQ ID NO: 387659 - DNA, 25 bp, Artificial
  probe
  misc_feature (1)..(25): SEQ ID NO: 4654; WAN024APS; Start 136; Stop 160
ttagactactttggatatcttttgg

SEQ ID NO: 387660 - DNA, 25 bp, Artificial
  probe
  misc_feature (1)..(25): SEQ ID NO: 4654; WAN024APS; Start 102; Stop 126
tcctaactaaaacactcataaagta

SEQ ID NO: 387661 - DNA, 25 bp, Artificial
  probe
  misc_feature (1)..(25): SEQ ID NO: 4654; WAN024APS; Start 157; Stop 181
ttggttagtcattttccaaaactaa

SEQ ID NO: 387662 - DNA, 25 bp, Artificial
  probe
  misc_feature (1)..(25): SEQ ID NO: 4654; WAN024APS; Start 158; Stop 182
tggttagtcattttccaaaactaat

SEQ ID NO: 387663 - DNA, 25 bp, Artificial
  probe
  misc_feature (1)..(25): SEQ ID NO: 4654; WAN024APS; Start 151; Stop 175
tatcttttggttagtcattttccaa

SEQ ID NO: 387664 - DNA, 25 bp, Artificial
  probe
  misc_feature (1)..(25): SEQ ID NO: 4654; WAN024APS; Start 159; Stop 183
ggttagtcattttccaaaactaatt

SEQ ID NO: 387665 - DNA, 25 bp, Artificial
  probe
  misc_feature (1)..(25): SEQ ID NO: 4655; WAN024FPM; Start 790; Stop 814
aatcaatcaataatgccgcatacat

SEQ ID NO: 387666 - DNA, 25 bp, Artificial
  probe
  misc_feature (1)..(25): SEQ ID NO: 4655; WAN024FPM; Start 785; Stop 809
caattaatcaatcaataatgccgca

SEQ ID NO: 387667 - DNA, 25 bp, Artificial
  probe
  misc_feature (1)..(25): SEQ ID NO: 4655; WAN024FPM; Start 789; Stop 813
taatcaatcaataatgccgcataca

SEQ ID NO: 387668 - DNA, 25 bp, Artificial
  probe
  misc_feature (1)..(25): SEQ ID NO: 4655; WAN024FPM; Start 649; Stop 673
ataccgcatttcttatcgcactata

SEQ ID NO: 387669 - DNA, 25 bp, Artificial
  probe
  misc_feature (1)..(25): SEQ ID NO: 4655; WAN024FPM; Start 638; Stop 662
cattacctttgataccgcatttctt

SEQ ID NO: 387670 - DNA, 25 bp, Artificial
  probe
  misc_feature (1)..(25): SEQ ID NO: 4655; WAN024FPM; Start 652; Stop 676
ccgcatttcttatcgcactatattt

SEQ ID NO: 387671 - DNA, 25 bp, Artificial
  probe
  misc_feature (1)..(25): SEQ ID NO: 4655; WAN024FPM; Start 650; Stop 674
taccgcatttcttatcgcactatat

SEQ ID NO: 387672 - DNA, 25 bp, Artificial
  probe
  misc_feature (1)..(25): SEQ ID NO: 4655; WAN024FPM; Start 937; Stop 961
ggcggcaataaatataaggaatcaa

SEQ ID NO: 387673 - DNA, 25 bp, Artificial
  probe
  misc_feature (1)..(25): SEQ ID NO: 4655; WAN024FPM; Start 936; Stop 960
aggcggcaataaatataaggaatca

SEQ ID NO: 387674 - DNA, 25 bp, Artificial
  probe
  misc_feature (1)..(25): SEQ ID NO: 4655; WAN024FPM; Start 651; Stop 675
accgcatttcttatcgcactatatt

SEQ ID NO: 387675 - DNA, 25 bp, Artificial
  probe
  misc_feature (1)..(25): SEQ ID NO: 4655; WAN024FPM; Start 788; Stop 812
ttaatcaatcaataatgccgcatac

SEQ ID NO: 387676 - DNA, 25 bp, Artificial
  probe
  misc_feature (1)..(25): SEQ ID NO: 4655; WAN024FPM; Start 194; Stop 218
agggattggtagaatttgagaatga

SEQ ID NO: 387677 - DNA, 25 bp, Artificial
  probe
  misc_feature (1)..(25): SEQ ID NO: 4655; WAN024FPM; Start 707; Stop 731
tgtttgatggtaaggagaaattagc

SEQ ID NO: 387678 - DNA, 25 bp, Artificial
  probe
  misc_feature (1)..(25): SEQ ID NO: 4655; WAN024FPM; Start 887; Stop 911
ggattacagctctctcaattctatt

SEQ ID NO: 387679 - DNA, 25 bp, Artificial
  probe
  misc_feature (1)..(25): SEQ ID NO: 4655; WAN024FPM; Start 979; Stop 1003
attgccatctcggtttatttccttt

SEQ ID NO: 387680 - DNA, 25 bp, Artificial
  probe
  misc_feature (1)..(25): SEQ ID NO: 4655; WAN024FPM; Start 786; Stop 810
aattaatcaatcaataatgccgcat

SEQ ID NO: 387681 - DNA, 25 bp, Artificial
  probe
  misc_feature (1)..(25): SEQ ID NO: 4655; WAN024FPM; Start 935; Stop 959
taggcggcaataaatataaggaatc

SEQ ID NO: 387682 - DNA, 25 bp, Artificial
  probe
  misc_feature (1)..(25): SEQ ID NO: 4655; WAN024FPM; Start 193; Stop 217
aagggattggtagaatttgagaatg

SEQ ID NO: 387683 - DNA, 25 bp, Artificial
  probe
  misc_feature (1)..(25): SEQ ID NO: 4655; WAN024FPM; Start 640; Stop 664
ttacctttgataccgcatttcttat

SEQ ID NO: 387684 - DNA, 25 bp, Artificial
  probe
  misc_feature (1)..(25): SEQ ID NO: 4655; WAN024FPM; Start 639; Stop 663
attacctttgataccgcatttctta

SEQ ID NO: 387685 - DNA, 25 bp, Artificial
  probe
  misc_feature (1)..(25): SEQ ID NO: 4655; WAN024FPM; Start 978; Stop 1002
aattgccatctcggtttatttcctt

SEQ ID NO: 387686 - DNA, 25 bp, Artificial
  probe
  misc_feature (1)..(25): SEQ ID NO: 4655; WAN024FPM; Start 683; Stop 707
agtctgaccgtttgatgattaacat

SEQ ID NO: 387687 - DNA, 25 bp, Artificial
  probe
  misc_feature (1)..(25): SEQ ID NO: 4655; WAN024FPM; Start 195; Stop 219
gggattggtagaatttgagaatgat

SEQ ID NO: 387688 - DNA, 25 bp, Artificial
  probe
  misc_feature (1)..(25): SEQ ID NO: 4655; WAN024FPM; Start 636; Stop 660
ttcattacctttgataccgcatttc

SEQ ID NO: 387689 - DNA, 25 bp, Artificial
  probe
  misc_feature (1)..(25): SEQ ID NO: 4655; WAN024FPM; Start 637; Stop 661
tcattacctttgataccgcatttct

SEQ ID NO: 387690 - DNA, 25 bp, Artificial
  probe
  misc_feature (1)..(25): SEQ ID NO: 4655; WAN024FPM; Start 632; Stop 656
gttattcattacctttgataccgca

SEQ ID NO: 387691 - DNA, 25 bp, Artificial
  probe
  misc_feature (1)..(25): SEQ ID NO: 4655; WAN024FPM; Start 934; Stop 958
ttaggcggcaataaatataaggaat

SEQ ID NO: 387692 - DNA, 25 bp, Artificial
  probe
  misc_feature (1)..(25): SEQ ID NO: 4655; WAN024FPM; Start 635; Stop 659
attcattacctttgataccgcattt

SEQ ID NO: 387693 - DNA, 25 bp, Artificial
  probe
  misc_feature (1)..(25): SEQ ID NO: 4655; WAN024FPM; Start 631; Stop 655
agttattcattacctttgataccgc

SEQ ID NO: 387694 - DNA, 25 bp, Artificial
  probe
  misc_feature (1)..(25): SEQ ID NO: 4655; WAN024FPM; Start 682; Stop 706
cagtctgaccgtttgatgattaaca

SEQ ID NO: 387695 - DNA, 25 bp, Artificial
  probe
  misc_feature (1)..(25): SEQ ID NO: 4655; WAN024FPM; Start 938; Stop 962
gcggcaataaatataaggaatcaat

SEQ ID NO: 387696 - DNA, 25 bp, Artificial
  probe
  misc_feature (1)..(25): SEQ ID NO: 4655; WAN024FPM; Start 933; Stop 957
tttaggcggcaataaatataaggaa

SEQ ID NO: 387697 - DNA, 25 bp, Artificial
  probe
  misc_feature (1)..(25): SEQ ID NO: 4655; WAN024FPM; Start 634; Stop 658
tattcattacctttgataccgcatt

SEQ ID NO: 387698 - DNA, 25 bp, Artificial
  probe
  misc_feature (1)..(25): SEQ ID NO: 4657; WAN024A7R; Start 7; Stop 31
tacatcatccagaagaaactgcttt

SEQ ID NO: 387699 - DNA, 25 bp, Artificial
  probe
  misc_feature (1)..(25): SEQ ID NO: 4657; WAN024A7R; Start 4; Stop 28
tagtacatcatccagaagaaactgc

SEQ ID NO: 387700 - DNA, 25 bp, Artificial
  probe
  misc_feature (1)..(25): SEQ ID NO: 4657; WAN024A7R; Start 6; Stop 30
gtacatcatccagaagaaactgctt

SEQ ID NO: 387701 - DNA, 25 bp, Artificial
  probe
  misc_feature (1)..(25): SEQ ID NO: 4657; WAN024A7R; Start 2; Stop 26
cttagtacatcatccagaagaaact

SEQ ID NO: 387702 - DNA, 25 bp, Artificial
  probe
  misc_feature (1)..(25): SEQ ID NO: 4657; WAN024A7R; Start 5; Stop 29
agtacatcatccagaagaaactgct

SEQ ID NO: 387703 - DNA, 25 bp, Artificial
  probe
  misc_feature (1)..(25): SEQ ID NO: 4657; WAN024A7R; Start 3; Stop 27
ttagtacatcatccagaagaaactg

SEQ ID NO: 387704 - DNA, 25 bp, Artificial
  probe
  misc_feature (1)..(25): SEQ ID NO: 4657; WAN024A7R; Start 23; Stop 47
aactgcttttagggctaacttagaa

SEQ ID NO: 387705 - DNA, 25 bp, Artificial
  probe
  misc_feature (1)..(25): SEQ ID NO: 4657; WAN024A7R; Start 22; Stop 46
aaactgcttttagggctaacttaga

SEQ ID NO: 387706 - DNA, 25 bp, Artificial
  probe
  misc_feature (1)..(25): SEQ ID NO: 4657; WAN024A7R; Start 21; Stop 45
gaaactgcttttagggctaacttag

SEQ ID NO: 387707 - DNA, 25 bp, Artificial
  probe
  misc_feature (1)..(25): SEQ ID NO: 4657; WAN024A7R; Start 20; Stop 44
agaaactgcttttagggctaactta

SEQ ID NO: 387708 - DNA, 25 bp, Artificial
  probe
  misc_feature (1)..(25): SEQ ID NO: 4657; WAN024A7R; Start 24; Stop 48
actgcttttagggctaacttagaag

SEQ ID NO: 387709 - DNA, 25 bp, Artificial
  probe
  misc_feature (1)..(25): SEQ ID NO: 4657; WAN024A7R; Start 19; Stop 43
aagaaactgcttttagggctaactt

SEQ ID NO: 387710 - DNA, 25 bp, Artificial
  probe
  misc_feature (1)..(25): SEQ ID NO: 4657; WAN024A7R; Start 18; Stop 42
gaagaaactgcttttagggctaact

SEQ ID NO: 387711 - DNA, 25 bp, Artificial
  probe
  misc_feature (1)..(25): SEQ ID NO: 4657; WAN024A7R; Start 17; Stop 41
agaagaaactgcttttagggctaac

SEQ ID NO: 387712 - DNA, 25 bp, Artificial
  probe
  misc_feature (1)..(25): SEQ ID NO: 4657; WAN024A7R; Start 1; Stop 25
tcttagtacatcatccagaagaaac

SEQ ID NO: 387713 - DNA, 25 bp, Artificial
  probe
  misc_feature (1)..(25): SEQ ID NO: 4657; WAN024A7R; Start 9; Stop 33
catcatccagaagaaactgctttta

SEQ ID NO: 387714 - DNA, 25 bp, Artificial
  probe
  misc_feature (1)..(25): SEQ ID NO: 4657; WAN024A7R; Start 10; Stop 34
atcatccagaagaaactgcttttag

SEQ ID NO: 387715 - DNA, 25 bp, Artificial
  probe
  misc_feature (1)..(25): SEQ ID NO: 4657; WAN024A7R; Start 11; Stop 35
tcatccagaagaaactgcttttagg

SEQ ID NO: 387716 - DNA, 25 bp, Artificial
  probe
  misc_feature (1)..(25): SEQ ID NO: 4657; WAN024A7R; Start 8; Stop 32
acatcatccagaagaaactgctttt

SEQ ID NO: 387717 - DNA, 25 bp, Artificial
  probe
  misc_feature (1)..(25): SEQ ID NO: 4657; WAN024A7R; Start 16; Stop 40
cagaagaaactgcttttagggctaa

SEQ ID NO: 387718 - DNA, 25 bp, Artificial
  probe
  misc_feature (1)..(25): SEQ ID NO: 4657; WAN024A7R; Start 12; Stop 36
catccagaagaaactgcttttaggg

SEQ ID NO: 387719 - DNA, 25 bp, Artificial
  probe
  misc_feature (1)..(25): SEQ ID NO: 4657; WAN024A7R; Start 36; Stop 60
gctaacttagaagcctttcttttgt

SEQ ID NO: 387720 - DNA, 25 bp, Artificial
  probe
  misc_feature (1)..(25): SEQ ID NO: 4657; WAN024A7R; Start 15; Stop 39
ccagaagaaactgcttttagggcta

SEQ ID NO: 387721 - DNA, 25 bp, Artificial
  probe
  misc_feature (1)..(25): SEQ ID NO: 4657; WAN024A7R; Start 13; Stop 37
atccagaagaaactgcttttagggc

SEQ ID NO: 387722 - DNA, 25 bp, Artificial
  probe
  misc_feature (1)..(25): SEQ ID NO: 4657; WAN024A7R; Start 40; Stop 64
acttagaagcctttcttttgtaatt

SEQ ID NO: 387723 - DNA, 25 bp, Artificial
  probe
  misc_feature (1)..(25): SEQ ID NO: 4657; WAN024A7R; Start 39; Stop 63
aacttagaagcctttcttttgtaat

SEQ ID NO: 387724 - DNA, 25 bp, Artificial
  probe
  misc_feature (1)..(25): SEQ ID NO: 4657; WAN024A7R; Start 37; Stop 61
ctaacttagaagcctttcttttgta

SEQ ID NO: 387725 - DNA, 25 bp, Artificial
  probe
  misc_feature (1)..(25): SEQ ID NO: 4657; WAN024A7R; Start 14; Stop 38
tccagaagaaactgcttttagggct

SEQ ID NO: 387726 - DNA, 25 bp, Artificial
  probe
  misc_feature (1)..(25): SEQ ID NO: 4657; WAN024A7R; Start 38; Stop 62
taacttagaagcctttcttttgtaa

SEQ ID NO: 387727 - DNA, 25 bp, Artificial
  probe
  misc_feature (1)..(25): SEQ ID NO: 4657; WAN024A7R; Start 44; Stop 68
agaagcctttcttttgtaattagat

SEQ ID NO: 387728 - DNA, 25 bp, Artificial
  probe
  misc_feature (1)..(25): SEQ ID NO: 4657; WAN024A7R; Start 47; Stop 71
agcctttcttttgtaattagataag

SEQ ID NO: 387729 - DNA, 25 bp, Artificial
  probe
  misc_feature (1)..(25): SEQ ID NO: 4657; WAN024A7R; Start 45; Stop 69
gaagcctttcttttgtaattagata

SEQ ID NO: 387730 - DNA, 25 bp, Artificial
  probe
  misc_feature (1)..(25): SEQ ID NO: 4657; WAN024A7R; Start 43; Stop 67
tagaagcctttcttttgtaattaga

SEQ ID NO: 387731 - DNA, 25 bp, Artificial
  probe
  misc_feature (1)..(25): SEQ ID NO: 4659; WAN0249SF; Start 99; Stop 123
agcataattgttagttgtagtcatt

SEQ ID NO: 387732 - DNA, 25 bp, Artificial
  probe
  misc_feature (1)..(25): SEQ ID NO: 4659; WAN0249SF; Start 98; Stop 122
aagcataattgttagttgtagtcat

SEQ ID NO: 387733 - DNA, 25 bp, Artificial
  probe
  misc_feature (1)..(25): SEQ ID NO: 4659; WAN0249SF; Start 63; Stop 87
ttctgatgttaaagactttctacca

SEQ ID NO: 387734 - DNA, 25 bp, Artificial
  probe
  misc_feature (1)..(25): SEQ ID NO: 4659; WAN0249SF; Start 64; Stop 88
tctgatgttaaagactttctaccag

SEQ ID NO: 387735 - DNA, 25 bp, Artificial
  probe
  misc_feature (1)..(25): SEQ ID NO: 4659; WAN0249SF; Start 97; Stop 121
aaagcataattgttagttgtagtca

SEQ ID NO: 387736 - DNA, 25 bp, Artificial
  probe
  misc_feature (1)..(25): SEQ ID NO: 4659; WAN0249SF; Start 12; Stop 36
taaagcaaaacgcatagtatcaagg

SEQ ID NO: 387737 - DNA, 25 bp, Artificial
  probe
  misc_feature (1)..(25): SEQ ID NO: 4659; WAN0249SF; Start 47; Stop 71
cttgatactatgcgttttctgatgt

SEQ ID NO: 387738 - DNA, 25 bp, Artificial
  probe
  misc_feature (1)..(25): SEQ ID NO: 4659; WAN0249SF; Start 46; Stop 70
acttgatactatgcgttttctgatg

SEQ ID NO: 387739 - DNA, 25 bp, Artificial
  probe
  misc_feature (1)..(25): SEQ ID NO: 4659; WAN0249SF; Start 45; Stop 69
cacttgatactatgcgttttctgat

SEQ ID NO: 387740 - DNA, 25 bp, Artificial
  probe
  misc_feature (1)..(25): SEQ ID NO: 4659; WAN0249SF; Start 44; Stop 68
acacttgatactatgcgttttctga

SEQ ID NO: 387741 - DNA, 25 bp, Artificial
  probe
  misc_feature (1)..(25): SEQ ID NO: 4659; WAN0249SF; Start 62; Stop 86
tttctgatgttaaagactttctacc

SEQ ID NO: 387742 - DNA, 25 bp, Artificial
  probe
  misc_feature (1)..(25): SEQ ID NO: 4659; WAN0249SF; Start 48; Stop 72
ttgatactatgcgttttctgatgtt

SEQ ID NO: 387743 - DNA, 25 bp, Artificial
  probe
  misc_feature (1)..(25): SEQ ID NO: 4659; WAN0249SF; Start 43; Stop 67
aacacttgatactatgcgttttctg

SEQ ID NO: 387744 - DNA, 25 bp, Artificial
  probe
  misc_feature (1)..(25): SEQ ID NO: 4659; WAN0249SF; Start 23; Stop 47
gcatagtatcaagggttttcaacac

SEQ ID NO: 387745 - DNA, 25 bp, Artificial
  probe
  misc_feature (1)..(25): SEQ ID NO: 4659; WAN0249SF; Start 56; Stop 80
atgcgttttctgatgttaaagactt

SEQ ID NO: 387746 - DNA, 25 bp, Artificial
  probe
  misc_feature (1)..(25): SEQ ID NO: 4659; WAN0249SF; Start 42; Stop 66
caacacttgatactatgcgttttct

SEQ ID NO: 387747 - DNA, 25 bp, Artificial
  probe
  misc_feature (1)..(25): SEQ ID NO: 4659; WAN0249SF; Start 39; Stop 63
tttcaacacttgatactatgcgttt

SEQ ID NO: 387748 - DNA, 25 bp, Artificial
  probe
  misc_feature (1)..(25): SEQ ID NO: 4659; WAN0249SF; Start 20; Stop 44
aacgcatagtatcaagggttttcaa

SEQ ID NO: 387749 - DNA, 25 bp, Artificial
  probe
  misc_feature (1)..(25): SEQ ID NO: 4659; WAN0249SF; Start 55; Stop 79
tatgcgttttctgatgttaaagact

SEQ ID NO: 387750 - DNA, 25 bp, Artificial
  probe
  misc_feature (1)..(25): SEQ ID NO: 4659; WAN0249SF; Start 53; Stop 77
actatgcgttttctgatgttaaaga

SEQ ID NO: 387751 - DNA, 25 bp, Artificial
  probe
  misc_feature (1)..(25): SEQ ID NO: 4659; WAN0249SF; Start 54; Stop 78
ctatgcgttttctgatgttaaagac

SEQ ID NO: 387752 - DNA, 25 bp, Artificial
  probe
  misc_feature (1)..(25): SEQ ID NO: 4659; WAN0249SF; Start 49; Stop 73
tgatactatgcgttttctgatgtta

SEQ ID NO: 387753 - DNA, 25 bp, Artificial
  probe
  misc_feature (1)..(25): SEQ ID NO: 4659; WAN0249SF; Start 7; Stop 31
taggataaagcaaaacgcatagtat

SEQ ID NO: 387754 - DNA, 25 bp, Artificial
  probe
  misc_feature (1)..(25): SEQ ID NO: 4659; WAN0249SF; Start 6; Stop 30
ctaggataaagcaaaacgcatagta

SEQ ID NO: 387755 - DNA, 25 bp, Artificial
  probe
  misc_feature (1)..(25): SEQ ID NO: 4659; WAN0249SF; Start 57; Stop 81
tgcgttttctgatgttaaagacttt

SEQ ID NO: 387756 - DNA, 25 bp, Artificial
  probe
  misc_feature (1)..(25): SEQ ID NO: 4659; WAN0249SF; Start 11; Stop 35
ataaagcaaaacgcatagtatcaag

SEQ ID NO: 387757 - DNA, 25 bp, Artificial
  probe
  misc_feature (1)..(25): SEQ ID NO: 4659; WAN0249SF; Start 58; Stop 82
gcgttttctgatgttaaagactttc

SEQ ID NO: 387758 - DNA, 25 bp, Artificial
  probe
  misc_feature (1)..(25): SEQ ID NO: 4659; WAN0249SF; Start 24; Stop 48
catagtatcaagggttttcaacact

SEQ ID NO: 387759 - DNA, 25 bp, Artificial
  probe
  misc_feature (1)..(25): SEQ ID NO: 4659; WAN0249SF; Start 9; Stop 33
ggataaagcaaaacgcatagtatca

SEQ ID NO: 387760 - DNA, 25 bp, Artificial
  probe
  misc_feature (1)..(25): SEQ ID NO: 4659; WAN0249SF; Start 8; Stop 32
aggataaagcaaaacgcatagtatc

SEQ ID NO: 387761 - DNA, 25 bp, Artificial
  probe
  misc_feature (1)..(25): SEQ ID NO: 4659; WAN0249SF; Start 22; Stop 46
cgcatagtatcaagggttttcaaca

SEQ ID NO: 387762 - DNA, 25 bp, Artificial
  probe
  misc_feature (1)..(25): SEQ ID NO: 4659; WAN0249SF; Start 21; Stop 45
acgcatagtatcaagggttttcaac

SEQ ID NO: 387763 - DNA, 25 bp, Artificial
  probe
  misc_feature (1)..(25): SEQ ID NO: 4659; WAN0249SF; Start 100; Stop 124
gcataattgttagttgtagtcattt

SEQ ID NO: 387764 - DNA, 25 bp, Artificial
  probe
  misc_feature (1)..(25): SEQ ID NO: 4660; WAN024AQG; Start 1; Stop 25
tcttctttctccttaatagtgggaa

SEQ ID NO: 387765 - DNA, 25 bp, Artificial
  probe
  misc_feature (1)..(25): SEQ ID NO: 4660; WAN024AQG; Start 6; Stop 30
tttctccttaatagtgggaatttgt

SEQ ID NO: 387766 - DNA, 25 bp, Artificial
  probe
  misc_feature (1)..(25): SEQ ID NO: 4660; WAN024AQG; Start 2; Stop 26
cttctttctccttaatagtgggaat

SEQ ID NO: 387767 - DNA, 25 bp, Artificial
  probe
  misc_feature (1)..(25): SEQ ID NO: 4660; WAN024AQG; Start 11; Stop 35
ccttaatagtgggaatttgtaaagt

SEQ ID NO: 387768 - DNA, 25 bp, Artificial
  probe
  misc_feature (1)..(25): SEQ ID NO: 4660; WAN024AQG; Start 5; Stop 29
ctttctccttaatagtgggaatttg

SEQ ID NO: 387769 - DNA, 25 bp, Artificial
  probe
  misc_feature (1)..(25): SEQ ID NO: 4660; WAN024AQG; Start 4; Stop 28
tctttctccttaatagtgggaattt

SEQ ID NO: 387770 - DNA, 25 bp, Artificial
  probe
  misc_feature (1)..(25): SEQ ID NO: 4660; WAN024AQG; Start 3; Stop 27
ttctttctccttaatagtgggaatt

SEQ ID NO: 387771 - DNA, 25 bp, Artificial
  probe
  misc_feature (1)..(25): SEQ ID NO: 4660; WAN024AQG; Start 18; Stop 42
agtgggaatttgtaaagttaattga

SEQ ID NO: 387772 - DNA, 25 bp, Artificial
  probe
  misc_feature (1)..(25): SEQ ID NO: 4660; WAN024AQG; Start 8; Stop 32
tctccttaatagtgggaatttgtaa

SEQ ID NO: 387773 - DNA, 25 bp, Artificial
  probe
  misc_feature (1)..(25): SEQ ID NO: 4660; WAN024AQG; Start 7; Stop 31
ttctccttaatagtgggaatttgta

SEQ ID NO: 387774 - DNA, 25 bp, Artificial
  probe
  misc_feature (1)..(25): SEQ ID NO: 4660; WAN024AQG; Start 19; Stop 43
gtgggaatttgtaaagttaattgaa

SEQ ID NO: 387775 - DNA, 25 bp, Artificial
  probe
  misc_feature (1)..(25): SEQ ID NO: 4660; WAN024AQG; Start 10; Stop 34
tccttaatagtgggaatttgtaaag

SEQ ID NO: 387776 - DNA, 25 bp, Artificial
  probe
  misc_feature (1)..(25): SEQ ID NO: 4660; WAN024AQG; Start 9; Stop 33
ctccttaatagtgggaatttgtaaa

SEQ ID NO: 387777 - DNA, 25 bp, Artificial
  probe
  misc_feature (1)..(25): SEQ ID NO: 4660; WAN024AQG; Start 17; Stop 41
tagtgggaatttgtaaagttaattg

SEQ ID NO: 387778 - DNA, 25 bp, Artificial
  probe
  misc_feature (1)..(25): SEQ ID NO: 4660; WAN024AQG; Start 12; Stop 36
cttaatagtgggaatttgtaaagtt

SEQ ID NO: 387779 - DNA, 25 bp, Artificial
  probe
  misc_feature (1)..(25): SEQ ID NO: 4660; WAN024AQG; Start 20; Stop 44
tgggaatttgtaaagttaattgaat

SEQ ID NO: 387780 - DNA, 25 bp, Artificial
  probe
  misc_feature (1)..(25): SEQ ID NO: 4661; WAN0249FH; Start 34; Stop 58
ccaaataccacctccacactttcta

SEQ ID NO: 387781 - DNA, 25 bp, Artificial
  probe
  misc_feature (1)..(25): SEQ ID NO: 4661; WAN0249FH; Start 29; Stop 53
atatcccaaataccacctccacact

SEQ ID NO: 387782 - DNA, 25 bp, Artificial
  probe
  misc_feature (1)..(25): SEQ ID NO: 4661; WAN0249FH; Start 30; Stop 54
tatcccaaataccacctccacactt

SEQ ID NO: 387783 - DNA, 25 bp, Artificial
  probe
  misc_feature (1)..(25): SEQ ID NO: 4661; WAN0249FH; Start 18; Stop 42
aaatggaggtgatatcccaaatacc

SEQ ID NO: 387784 - DNA, 25 bp, Artificial
  probe
  misc_feature (1)..(25): SEQ ID NO: 4661; WAN0249FH; Start 31; Stop 55
atcccaaataccacctccacacttt

SEQ ID NO: 387785 - DNA, 25 bp, Artificial
  probe
  misc_feature (1)..(25): SEQ ID NO: 4661; WAN0249FH; Start 28; Stop 52
gatatcccaaataccacctccacac

SEQ ID NO: 387786 - DNA, 25 bp, Artificial
  probe
  misc_feature (1)..(25): SEQ ID NO: 4661; WAN0249FH; Start 19; Stop 43
aatggaggtgatatcccaaatacca

SEQ ID NO: 387787 - DNA, 25 bp, Artificial
  probe
  misc_feature (1)..(25): SEQ ID NO: 4661; WAN0249FH; Start 27; Stop 51
tgatatcccaaataccacctccaca

SEQ ID NO: 387788 - DNA, 25 bp, Artificial
  probe
  misc_feature (1)..(25): SEQ ID NO: 4661; WAN0249FH; Start 20; Stop 44
atggaggtgatatcccaaataccac

SEQ ID NO: 387789 - DNA, 25 bp, Artificial
  probe
  misc_feature (1)..(25): SEQ ID NO: 4661; WAN0249FH; Start 26; Stop 50
gtgatatcccaaataccacctccac

SEQ ID NO: 387790 - DNA, 25 bp, Artificial
  probe
  misc_feature (1)..(25): SEQ ID NO: 4661; WAN0249FH; Start 33; Stop 57
cccaaataccacctccacactttct

SEQ ID NO: 387791 - DNA, 25 bp, Artificial
  probe
  misc_feature (1)..(25): SEQ ID NO: 4661; WAN0249FH; Start 32; Stop 56
tcccaaataccacctccacactttc

SEQ ID NO: 387792 - DNA, 25 bp, Artificial
  probe
  misc_feature (1)..(25): SEQ ID NO: 4661; WAN0249FH; Start 15; Stop 39
ccaaaatggaggtgatatcccaaat

SEQ ID NO: 387793 - DNA, 25 bp, Artificial
  probe
  misc_feature (1)..(25): SEQ ID NO: 4661; WAN0249FH; Start 17; Stop 41
aaaatggaggtgatatcccaaatac

SEQ ID NO: 387794 - DNA, 25 bp, Artificial
  probe
  misc_feature (1)..(25): SEQ ID NO: 4661; WAN0249FH; Start 16; Stop 40
caaaatggaggtgatatcccaaata

SEQ ID NO: 387795 - DNA, 25 bp, Artificial
  probe
  misc_feature (1)..(25): SEQ ID NO: 4661; WAN0249FH; Start 8; Stop 32
ctctcttccaaaatggaggtgatat

SEQ ID NO: 387796 - DNA, 25 bp, Artificial
  probe
  misc_feature (1)..(25): SEQ ID NO: 4661; WAN0249FH; Start 1; Stop 25
tctttacctctcttccaaaatggag

SEQ ID NO: 387797 - DNA, 25 bp, Artificial
  probe
  misc_feature (1)..(25): SEQ ID NO: 4661; WAN0249FH; Start 2; Stop 26
ctttacctctcttccaaaatggagg

SEQ ID NO: 387798 - DNA, 25 bp, Artificial
  probe
  misc_feature (1)..(25): SEQ ID NO: 4661; WAN0249FH; Start 9; Stop 33
tctcttccaaaatggaggtgatatc

SEQ ID NO: 387799 - DNA, 25 bp, Artificial
  probe
  misc_feature (1)..(25): SEQ ID NO: 4661; WAN0249FH; Start 10; Stop 34
ctcttccaaaatggaggtgatatcc

SEQ ID NO: 387800 - DNA, 25 bp, Artificial
  probe
  misc_feature (1)..(25): SEQ ID NO: 4661; WAN0249FH; Start 7; Stop 31
cctctcttccaaaatggaggtgata

SEQ ID NO: 387801 - DNA, 25 bp, Artificial
  probe
  misc_feature (1)..(25): SEQ ID NO: 4661; WAN0249FH; Start 14; Stop 38
tccaaaatggaggtgatatcccaaa

SEQ ID NO: 387802 - DNA, 25 bp, Artificial
  probe
  misc_feature (1)..(25): SEQ ID NO: 4661; WAN0249FH; Start 13; Stop 37
ttccaaaatggaggtgatatcccaa

SEQ ID NO: 387803 - DNA, 25 bp, Artificial
  probe
  misc_feature (1)..(25): SEQ ID NO: 4661; WAN0249FH; Start 11; Stop 35
tcttccaaaatggaggtgatatccc

SEQ ID NO: 387804 - DNA, 25 bp, Artificial
  probe
  misc_feature (1)..(25): SEQ ID NO: 4661; WAN0249FH; Start 12; Stop 36
cttccaaaatggaggtgatatccca

SEQ ID NO: 387805 - DNA, 25 bp, Artificial
  probe
  misc_feature (1)..(25): SEQ ID NO: 4662; WAN0249I3; Start 81; Stop 105
acagaactgtctattccttgtaaca

SEQ ID NO: 387806 - DNA, 25 bp, Artificial
  probe
  misc_feature (1)..(25): SEQ ID NO: 4662; WAN0249I3; Start 82; Stop 106
cagaactgtctattccttgtaacaa

SEQ ID NO: 387807 - DNA, 25 bp, Artificial
  probe
  misc_feature (1)..(25): SEQ ID NO: 4662; WAN0249I3; Start 80; Stop 104
aacagaactgtctattccttgtaac

SEQ ID NO: 387808 - DNA, 25 bp, Artificial
  probe
  misc_feature (1)..(25): SEQ ID NO: 4662; WAN0249I3; Start 120; Stop 144
aaatagtttgttaggtctctgtcac

SEQ ID NO: 387809 - DNA, 25 bp, Artificial
  probe
  misc_feature (1)..(25): SEQ ID NO: 4662; WAN0249I3; Start 119; Stop 143
gaaatagtttgttaggtctctgtca

SEQ ID NO: 387810 - DNA, 25 bp, Artificial
  probe
  misc_feature (1)..(25): SEQ ID NO: 4662; WAN0249I3; Start 118; Stop 142
tgaaatagtttgttaggtctctgtc

SEQ ID NO: 387811 - DNA, 25 bp, Artificial
  probe
  misc_feature (1)..(25): SEQ ID NO: 4662; WAN0249I3; Start 9; Stop 33
attcctttcaaatgagtacctgtct

SEQ ID NO: 387812 - DNA, 25 bp, Artificial
  probe
  misc_feature (1)..(25): SEQ ID NO: 4662; WAN0249I3; Start 10; Stop 34
ttcctttcaaatgagtacctgtcta

SEQ ID NO: 387813 - DNA, 25 bp, Artificial
  probe
  misc_feature (1)..(25): SEQ ID NO: 4662; WAN0249I3; Start 8; Stop 32
aattcctttcaaatgagtacctgtc

SEQ ID NO: 387814 - DNA, 25 bp, Artificial
  probe
  misc_feature (1)..(25): SEQ ID NO: 4662; WAN0249I3; Start 11; Stop 35
tcctttcaaatgagtacctgtctat

SEQ ID NO: 387815 - DNA, 25 bp, Artificial
  probe
  misc_feature (1)..(25): SEQ ID NO: 4662; WAN0249I3; Start 121; Stop 145
aatagtttgttaggtctctgtcaca

SEQ ID NO: 387816 - DNA, 25 bp, Artificial
  probe
  misc_feature (1)..(25): SEQ ID NO: 4662; WAN0249I3; Start 117; Stop 141
ttgaaatagtttgttaggtctctgt

SEQ ID NO: 387817 - DNA, 25 bp, Artificial
  probe
  misc_feature (1)..(25): SEQ ID NO: 4662; WAN0249I3; Start 7; Stop 31
aaattcctttcaaatgagtacctgt

SEQ ID NO: 387818 - DNA, 25 bp, Artificial
  probe
  misc_feature (1)..(25): SEQ ID NO: 4662; WAN0249I3; Start 6; Stop 30
caaattcctttcaaatgagtacctg

SEQ ID NO: 387819 - DNA, 25 bp, Artificial
  probe
  misc_feature (1)..(25): SEQ ID NO: 4662; WAN0249I3; Start 116; Stop 140
cttgaaatagtttgttaggtctctg

SEQ ID NO: 387820 - DNA, 25 bp, Artificial
  probe
  misc_feature (1)..(25): SEQ ID NO: 4662; WAN0249I3; Start 79; Stop 103
taacagaactgtctattccttgtaa

SEQ ID NO: 387821 - DNA, 25 bp, Artificial
  probe
  misc_feature (1)..(25): SEQ ID NO: 4662; WAN0249I3; Start 78; Stop 102
ttaacagaactgtctattccttgta

SEQ ID NO: 387822 - DNA, 25 bp, Artificial
  probe
  misc_feature (1)..(25): SEQ ID NO: 4662; WAN0249I3; Start 5; Stop 29
tcaaattcctttcaaatgagtacct

SEQ ID NO: 387823 - DNA, 25 bp, Artificial
  probe
  misc_feature (1)..(25): SEQ ID NO: 4662; WAN0249I3; Start 115; Stop 139
acttgaaatagtttgttaggtctct

SEQ ID NO: 387824 - DNA, 25 bp, Artificial
  probe
  misc_feature (1)..(25): SEQ ID NO: 4662; WAN0249I3; Start 4; Stop 28
ttcaaattcctttcaaatgagtacc

SEQ ID NO: 387825 - DNA, 25 bp, Artificial
  probe
  misc_feature (1)..(25): SEQ ID NO: 4662; WAN0249I3; Start 1; Stop 25
tctttcaaattcctttcaaatgagt

SEQ ID NO: 387826 - DNA, 25 bp, Artificial
  probe
  misc_feature (1)..(25): SEQ ID NO: 4662; WAN0249I3; Start 85; Stop 109
aactgtctattccttgtaacaaact

SEQ ID NO: 387827 - DNA, 25 bp, Artificial
  probe
  misc_feature (1)..(25): SEQ ID NO: 4662; WAN0249I3; Start 84; Stop 108
gaactgtctattccttgtaacaaac

SEQ ID NO: 387828 - DNA, 25 bp, Artificial
  probe
  misc_feature (1)..(25): SEQ ID NO: 4662; WAN0249I3; Start 83; Stop 107
agaactgtctattccttgtaacaaa

SEQ ID NO: 387829 - DNA, 25 bp, Artificial
  probe
  misc_feature (1)..(25): SEQ ID NO: 4662; WAN0249I3; Start 111; Stop 135
ggttacttgaaatagtttgttaggt

SEQ ID NO: 387830 - DNA, 25 bp, Artificial
  probe
  misc_feature (1)..(25): SEQ ID NO: 4662; WAN0249I3; Start 89; Stop 113
gtctattccttgtaacaaactaggt

SEQ ID NO: 387831 - DNA, 25 bp, Artificial
  probe
  misc_feature (1)..(25): SEQ ID NO: 4662; WAN0249I3; Start 88; Stop 112
tgtctattccttgtaacaaactagg

SEQ ID NO: 387832 - DNA, 25 bp, Artificial
  probe
  misc_feature (1)..(25): SEQ ID NO: 4662; WAN0249I3; Start 77; Stop 101
tttaacagaactgtctattccttgt

SEQ ID NO: 387833 - DNA, 25 bp, Artificial
  probe
  misc_feature (1)..(25): SEQ ID NO: 4662; WAN0249I3; Start 110; Stop 134
aggttacttgaaatagtttgttagg

SEQ ID NO: 387834 - DNA, 25 bp, Artificial
  probe
  misc_feature (1)..(25): SEQ ID NO: 4662; WAN0249I3; Start 86; Stop 110
actgtctattccttgtaacaaacta

SEQ ID NO: 387835 - DNA, 25 bp, Artificial
  probe
  misc_feature (1)..(25): SEQ ID NO: 4662; WAN0249I3; Start 90; Stop 114
tctattccttgtaacaaactaggtt

SEQ ID NO: 387836 - DNA, 25 bp, Artificial
  probe
  misc_feature (1)..(25): SEQ ID NO: 4662; WAN0249I3; Start 72; Stop 96
gcctatttaacagaactgtctattc

SEQ ID NO: 387837 - DNA, 25 bp, Artificial
  probe
  misc_feature (1)..(25): SEQ ID NO: 4662; WAN0249I3; Start 87; Stop 111
ctgtctattccttgtaacaaactag

SEQ ID NO: 387838 - DNA, 25 bp, Artificial
  probe
  misc_feature (1)..(25): SEQ ID NO: 4663; WAN024A9N; Start 77; Stop 101
tatcggaatacggctgttcaactaa

SEQ ID NO: 387839 - DNA, 25 bp, Artificial
  probe
  misc_feature (1)..(25): SEQ ID NO: 4663; WAN024A9N; Start 152; Stop 176
acataccgtcctatcagacaatcta

SEQ ID NO: 387840 - DNA, 25 bp, Artificial
  probe
  misc_feature (1)..(25): SEQ ID NO: 4663; WAN024A9N; Start 151; Stop 175
tacataccgtcctatcagacaatct

SEQ ID NO: 387841 - DNA, 25 bp, Artificial
  probe
  misc_feature (1)..(25): SEQ ID NO: 4663; WAN024A9N; Start 150; Stop 174
atacataccgtcctatcagacaatc

SEQ ID NO: 387842 - DNA, 25 bp, Artificial
  probe
  misc_feature (1)..(25): SEQ ID NO: 4663; WAN024A9N; Start 68; Stop 92
ttatctaagtatcggaatacggctg

SEQ ID NO: 387843 - DNA, 25 bp, Artificial
  probe
  misc_feature (1)..(25): SEQ ID NO: 4663; WAN024A9N; Start 67; Stop 91
cttatctaagtatcggaatacggct

SEQ ID NO: 387844 - DNA, 25 bp, Artificial
  probe
  misc_feature (1)..(25): SEQ ID NO: 4663; WAN024A9N; Start 66; Stop 90
tcttatctaagtatcggaatacggc

SEQ ID NO: 387845 - DNA, 25 bp, Artificial
  probe
  misc_feature (1)..(25): SEQ ID NO: 4663; WAN024A9N; Start 69; Stop 93
tatctaagtatcggaatacggctgt

SEQ ID NO: 387846 - DNA, 25 bp, Artificial
  probe
  misc_feature (1)..(25): SEQ ID NO: 4663; WAN024A9N; Start 148; Stop 172
ttatacataccgtcctatcagacaa

SEQ ID NO: 387847 - DNA, 25 bp, Artificial
  probe
  misc_feature (1)..(25): SEQ ID NO: 4663; WAN024A9N; Start 149; Stop 173
tatacataccgtcctatcagacaat

SEQ ID NO: 387848 - DNA, 25 bp, Artificial
  probe
  misc_feature (1)..(25): SEQ ID NO: 4663; WAN024A9N; Start 70; Stop 94
atctaagtatcggaatacggctgtt

SEQ ID NO: 387849 - DNA, 25 bp, Artificial
  probe
  misc_feature (1)..(25): SEQ ID NO: 4663; WAN024A9N; Start 73; Stop 97
taagtatcggaatacggctgttcaa

SEQ ID NO: 387850 - DNA, 25 bp, Artificial
  probe
  misc_feature (1)..(25): SEQ ID NO: 4663; WAN024A9N; Start 71; Stop 95
tctaagtatcggaatacggctgttc

SEQ ID NO: 387851 - DNA, 25 bp, Artificial
  probe
  misc_feature (1)..(25): SEQ ID NO: 4663; WAN024A9N; Start 65; Stop 89
ctcttatctaagtatcggaatacgg

SEQ ID NO: 387852 - DNA, 25 bp, Artificial
  probe
  misc_feature (1)..(25): SEQ ID NO: 4663; WAN024A9N; Start 72; Stop 96
ctaagtatcggaatacggctgttca

SEQ ID NO: 387853 - DNA, 25 bp, Artificial
  probe
  misc_feature (1)..(25): SEQ ID NO: 4663; WAN024A9N; Start 76; Stop 100
gtatcggaatacggctgttcaacta

SEQ ID NO: 387854 - DNA, 25 bp, Artificial
  probe
  misc_feature (1)..(25): SEQ ID NO: 4663; WAN024A9N; Start 80; Stop 104
cggaatacggctgttcaactaaatt

SEQ ID NO: 387855 - DNA, 25 bp, Artificial
  probe
  misc_feature (1)..(25): SEQ ID NO: 4663; WAN024A9N; Start 64; Stop 88
tctcttatctaagtatcggaatacg

SEQ ID NO: 387856 - DNA, 25 bp, Artificial
  probe
  misc_feature (1)..(25): SEQ ID NO: 4663; WAN024A9N; Start 147; Stop 171
tttatacataccgtcctatcagaca

SEQ ID NO: 387857 - DNA, 25 bp, Artificial
  probe
  misc_feature (1)..(25): SEQ ID NO: 4663; WAN024A9N; Start 74; Stop 98
aagtatcggaatacggctgttcaac

SEQ ID NO: 387858 - DNA, 25 bp, Artificial
  probe
  misc_feature (1)..(25): SEQ ID NO: 4663; WAN024A9N; Start 79; Stop 103
tcggaatacggctgttcaactaaat

SEQ ID NO: 387859 - DNA, 25 bp, Artificial
  probe
  misc_feature (1)..(25): SEQ ID NO: 4663; WAN024A9N; Start 78; Stop 102
atcggaatacggctgttcaactaaa

SEQ ID NO: 387860 - DNA, 25 bp, Artificial
  probe
  misc_feature (1)..(25): SEQ ID NO: 4663; WAN024A9N; Start 81; Stop 105
ggaatacggctgttcaactaaattt

SEQ ID NO: 387861 - DNA, 25 bp, Artificial
  probe
  misc_feature (1)..(25): SEQ ID NO: 4663; WAN024A9N; Start 142; Stop 166
agcgttttatacataccgtcctatc

SEQ ID NO: 387862 - DNA, 25 bp, Artificial
  probe
  misc_feature (1)..(25): SEQ ID NO: 4663; WAN024A9N; Start 141; Stop 165
aagcgttttatacataccgtcctat

SEQ ID NO: 387863 - DNA, 25 bp, Artificial
  probe
  misc_feature (1)..(25): SEQ ID NO: 4663; WAN024A9N; Start 140; Stop 164
gaagcgttttatacataccgtccta

SEQ ID NO: 387864 - DNA, 25 bp, Artificial
  probe
  misc_feature (1)..(25): SEQ ID NO: 4663; WAN024A9N; Start 143; Stop 167
gcgttttatacataccgtcctatca

SEQ ID NO: 387865 - DNA, 25 bp, Artificial
  probe
  misc_feature (1)..(25): SEQ ID NO: 4663; WAN024A9N; Start 75; Stop 99
agtatcggaatacggctgttcaact

SEQ ID NO: 387866 - DNA, 25 bp, Artificial
  probe
  misc_feature (1)..(25): SEQ ID NO: 4663; WAN024A9N; Start 131; Stop 155
cagttcacagaagcgttttatacat

SEQ ID NO: 387867 - DNA, 25 bp, Artificial
  probe
  misc_feature (1)..(25): SEQ ID NO: 4663; WAN024A9N; Start 144; Stop 168
cgttttatacataccgtcctatcag

SEQ ID NO: 387868 - DNA, 25 bp, Artificial
  probe
  misc_feature (1)..(25): SEQ ID NO: 4663; WAN024A9N; Start 129; Stop 153
ctcagttcacagaagcgttttatac

SEQ ID NO: 387869 - DNA, 25 bp, Artificial
  probe
  misc_feature (1)..(25): SEQ ID NO: 4663; WAN024A9N; Start 134; Stop 158
ttcacagaagcgttttatacatacc

SEQ ID NO: 387870 - DNA, 25 bp, Artificial
  probe
  misc_feature (1)..(25): SEQ ID NO: 4663; WAN024A9N; Start 130; Stop 154
tcagttcacagaagcgttttataca

SEQ ID NO: 387871 - DNA, 25 bp, Artificial
  probe
  misc_feature (1)..(25): SEQ ID NO: 4664; WAN024AHT; Start 64; Stop 88
tttacaatctcctcataaaagcagc

SEQ ID NO: 387872 - DNA, 25 bp, Artificial
  probe
  misc_feature (1)..(25): SEQ ID NO: 4664; WAN024AHT; Start 67; Stop 91
acaatctcctcataaaagcagctat

SEQ ID NO: 387873 - DNA, 25 bp, Artificial
  probe
  misc_feature (1)..(25): SEQ ID NO: 4664; WAN024AHT; Start 65; Stop 89
ttacaatctcctcataaaagcagct

SEQ ID NO: 387874 - DNA, 25 bp, Artificial
  probe
  misc_feature (1)..(25): SEQ ID NO: 4664; WAN024AHT; Start 66; Stop 90
tacaatctcctcataaaagcagcta

SEQ ID NO: 387875 - DNA, 25 bp, Artificial
  probe
  misc_feature (1)..(25): SEQ ID NO: 4664; WAN024AHT; Start 68; Stop 92
caatctcctcataaaagcagctatt

SEQ ID NO: 387876 - DNA, 25 bp, Artificial
  probe
  misc_feature (1)..(25): SEQ ID NO: 4664; WAN024AHT; Start 69; Stop 93
aatctcctcataaaagcagctattt

SEQ ID NO: 387877 - DNA, 25 bp, Artificial
  probe
  misc_feature (1)..(25): SEQ ID NO: 4664; WAN024AHT; Start 70; Stop 94
atctcctcataaaagcagctatttt

SEQ ID NO: 387878 - DNA, 25 bp, Artificial
  probe
  misc_feature (1)..(25): SEQ ID NO: 4664; WAN024AHT; Start 63; Stop 87
ttttacaatctcctcataaaagcag

SEQ ID NO: 387879 - DNA, 25 bp, Artificial
  probe
  misc_feature (1)..(25): SEQ ID NO: 4664; WAN024AHT; Start 72; Stop 96
ctcctcataaaagcagctattttac

SEQ ID NO: 387880 - DNA, 25 bp, Artificial
  probe
  misc_feature (1)..(25): SEQ ID NO: 4664; WAN024AHT; Start 71; Stop 95
tctcctcataaaagcagctatttta

SEQ ID NO: 387881 - DNA, 25 bp, Artificial
  probe
  misc_feature (1)..(25): SEQ ID NO: 4664; WAN024AHT; Start 62; Stop 86
attttacaatctcctcataaaagca

SEQ ID NO: 387882 - DNA, 25 bp, Artificial
  probe
  misc_feature (1)..(25): SEQ ID NO: 4664; WAN024AHT; Start 61; Stop 85
gattttacaatctcctcataaaagc

SEQ ID NO: 387883 - DNA, 25 bp, Artificial
  probe
  misc_feature (1)..(25): SEQ ID NO: 4664; WAN024AHT; Start 1; Stop 25
tctttggaagctcttttcttctgcg

SEQ ID NO: 387884 - DNA, 25 bp, Artificial
  probe
  misc_feature (1)..(25): SEQ ID NO: 4664; WAN024AHT; Start 60; Stop 84
agattttacaatctcctcataaaag

SEQ ID NO: 387885 - DNA, 25 bp, Artificial
  probe
  misc_feature (1)..(25): SEQ ID NO: 4664; WAN024AHT; Start 2; Stop 26
ctttggaagctcttttcttctgcgc

SEQ ID NO: 387886 - DNA, 25 bp, Artificial
  probe
  misc_feature (1)..(25): SEQ ID NO: 4665; WAN024AON; Start 24; Stop 48
gaccttcaagtagtagagatagaga

SEQ ID NO: 387887 - DNA, 25 bp, Artificial
  probe
  misc_feature (1)..(25): SEQ ID NO: 4665; WAN024AON; Start 23; Stop 47
tgaccttcaagtagtagagatagag

SEQ ID NO: 387888 - DNA, 25 bp, Artificial
  probe
  misc_feature (1)..(25): SEQ ID NO: 4665; WAN024AON; Start 25; Stop 49
accttcaagtagtagagatagagaa

SEQ ID NO: 387889 - DNA, 25 bp, Artificial
  probe
  misc_feature (1)..(25): SEQ ID NO: 4665; WAN024AON; Start 32; Stop 56
agtagtagagatagagaatctgcct

SEQ ID NO: 387890 - DNA, 25 bp, Artificial
  probe
  misc_feature (1)..(25): SEQ ID NO: 4665; WAN024AON; Start 33; Stop 57
gtagtagagatagagaatctgcctt

SEQ ID NO: 387891 - DNA, 25 bp, Artificial
  probe
  misc_feature (1)..(25): SEQ ID NO: 4665; WAN024AON; Start 31; Stop 55
aagtagtagagatagagaatctgcc

SEQ ID NO: 387892 - DNA, 25 bp, Artificial
  probe
  misc_feature (1)..(25): SEQ ID NO: 4665; WAN024AON; Start 26; Stop 50
ccttcaagtagtagagatagagaat

SEQ ID NO: 387893 - DNA, 25 bp, Artificial
  probe
  misc_feature (1)..(25): SEQ ID NO: 4665; WAN024AON; Start 30; Stop 54
caagtagtagagatagagaatctgc

SEQ ID NO: 387894 - DNA, 25 bp, Artificial
  probe
  misc_feature (1)..(25): SEQ ID NO: 4665; WAN024AON; Start 22; Stop 46
ttgaccttcaagtagtagagataga

SEQ ID NO: 387895 - DNA, 25 bp, Artificial
  probe
  misc_feature (1)..(25): SEQ ID NO: 4665; WAN024AON; Start 27; Stop 51
cttcaagtagtagagatagagaatc

SEQ ID NO: 387896 - DNA, 25 bp, Artificial
  probe
  misc_feature (1)..(25): SEQ ID NO: 4665; WAN024AON; Start 34; Stop 58
tagtagagatagagaatctgccttt

SEQ ID NO: 387897 - DNA, 25 bp, Artificial
  probe
  misc_feature (1)..(25): SEQ ID NO: 4665; WAN024AON; Start 29; Stop 53
tcaagtagtagagatagagaatctg

SEQ ID NO: 387898 - DNA, 25 bp, Artificial
  probe
  misc_feature (1)..(25): SEQ ID NO: 4665; WAN024AON; Start 7; Stop 31
gataacggcggattcttgaccttca

SEQ ID NO: 387899 - DNA, 25 bp, Artificial
  probe
  misc_feature (1)..(25): SEQ ID NO: 4665; WAN024AON; Start 2; Stop 26
ctttggataacggcggattcttgac

SEQ ID NO: 387900 - DNA, 25 bp, Artificial
  probe
  misc_feature (1)..(25): SEQ ID NO: 4665; WAN024AON; Start 1; Stop 25
tctttggataacggcggattcttga

SEQ ID NO: 387901 - DNA, 25 bp, Artificial
  probe
  misc_feature (1)..(25): SEQ ID NO: 4665; WAN024AON; Start 28; Stop 52
ttcaagtagtagagatagagaatct

SEQ ID NO: 387902 - DNA, 25 bp, Artificial
  probe
  misc_feature (1)..(25): SEQ ID NO: 4665; WAN024AON; Start 38; Stop 62
agagatagagaatctgccttttcat

SEQ ID NO: 387903 - DNA, 25 bp, Artificial
  probe
  misc_feature (1)..(25): SEQ ID NO: 4665; WAN024AON; Start 37; Stop 61
tagagatagagaatctgccttttca

SEQ ID NO: 387904 - DNA, 25 bp, Artificial
  probe
  misc_feature (1)..(25): SEQ ID NO: 4665; WAN024AON; Start 35; Stop 59
agtagagatagagaatctgcctttt

SEQ ID NO: 387905 - DNA, 25 bp, Artificial
  probe
  misc_feature (1)..(25): SEQ ID NO: 4665; WAN024AON; Start 36; Stop 60
gtagagatagagaatctgccttttc

SEQ ID NO: 387906 - DNA, 25 bp, Artificial
  probe
  misc_feature (1)..(25): SEQ ID NO: 4665; WAN024AON; Start 8; Stop 32
ataacggcggattcttgaccttcaa

SEQ ID NO: 387907 - DNA, 25 bp, Artificial
  probe
  misc_feature (1)..(25): SEQ ID NO: 4666; WAN0249JG; Start 6; Stop 30
tacaagtagaggtactgattgaagc

SEQ ID NO: 387908 - DNA, 25 bp, Artificial
  probe
  misc_feature (1)..(25): SEQ ID NO: 4666; WAN0249JG; Start 15; Stop 39
aggtactgattgaagctctatatct

SEQ ID NO: 387909 - DNA, 25 bp, Artificial
  probe
  misc_feature (1)..(25): SEQ ID NO: 4666; WAN0249JG; Start 175; Stop 199
ttgctaccaccttagactaaacaaa

SEQ ID NO: 387910 - DNA, 25 bp, Artificial
  probe
  misc_feature (1)..(25): SEQ ID NO: 4666; WAN0249JG; Start 174; Stop 198
cttgctaccaccttagactaaacaa

SEQ ID NO: 387911 - DNA, 25 bp, Artificial
  probe
  misc_feature (1)..(25): SEQ ID NO: 4666; WAN0249JG; Start 171; Stop 195
ctccttgctaccaccttagactaaa

SEQ ID NO: 387912 - DNA, 25 bp, Artificial
  probe
  misc_feature (1)..(25): SEQ ID NO: 4666; WAN0249JG; Start 172; Stop 196
tccttgctaccaccttagactaaac

SEQ ID NO: 387913 - DNA, 25 bp, Artificial
  probe
  misc_feature (1)..(25): SEQ ID NO: 4666; WAN0249JG; Start 14; Stop 38
gaggtactgattgaagctctatatc

SEQ ID NO: 387914 - DNA, 25 bp, Artificial
  probe
  misc_feature (1)..(25): SEQ ID NO: 4666; WAN0249JG; Start 8; Stop 32
caagtagaggtactgattgaagctc

SEQ ID NO: 387915 - DNA, 25 bp, Artificial
  probe
  misc_feature (1)..(25): SEQ ID NO: 4666; WAN0249JG; Start 173; Stop 197
ccttgctaccaccttagactaaaca

SEQ ID NO: 387916 - DNA, 25 bp, Artificial
  probe
  misc_feature (1)..(25): SEQ ID NO: 4666; WAN0249JG; Start 7; Stop 31
acaagtagaggtactgattgaagct

SEQ ID NO: 387917 - DNA, 25 bp, Artificial
  probe
  misc_feature (1)..(25): SEQ ID NO: 4666; WAN0249JG; Start 5; Stop 29
ttacaagtagaggtactgattgaag

SEQ ID NO: 387918 - DNA, 25 bp, Artificial
  probe
  misc_feature (1)..(25): SEQ ID NO: 4666; WAN0249JG; Start 170; Stop 194
gctccttgctaccaccttagactaa

SEQ ID NO: 387919 - DNA, 25 bp, Artificial
  probe
  misc_feature (1)..(25): SEQ ID NO: 4666; WAN0249JG; Start 16; Stop 40
ggtactgattgaagctctatatcta

SEQ ID NO: 387920 - DNA, 25 bp, Artificial
  probe
  misc_feature (1)..(25): SEQ ID NO: 4666; WAN0249JG; Start 19; Stop 43
actgattgaagctctatatctactt

SEQ ID NO: 387921 - DNA, 25 bp, Artificial
  probe
  misc_feature (1)..(25): SEQ ID NO: 4666; WAN0249JG; Start 9; Stop 33
aagtagaggtactgattgaagctct

SEQ ID NO: 387922 - DNA, 25 bp, Artificial
  probe
  misc_feature (1)..(25): SEQ ID NO: 4666; WAN0249JG; Start 176; Stop 200
tgctaccaccttagactaaacaaaa

SEQ ID NO: 387923 - DNA, 25 bp, Artificial
  probe
  misc_feature (1)..(25): SEQ ID NO: 4666; WAN0249JG; Start 98; Stop 122
tcactaattgtaaacactttcaagt

SEQ ID NO: 387924 - DNA, 25 bp, Artificial
  probe
  misc_feature (1)..(25): SEQ ID NO: 4666; WAN0249JG; Start 17; Stop 41
gtactgattgaagctctatatctac

SEQ ID NO: 387925 - DNA, 25 bp, Artificial
  probe
  misc_feature (1)..(25): SEQ ID NO: 4666; WAN0249JG; Start 13; Stop 37
agaggtactgattgaagctctatat

SEQ ID NO: 387926 - DNA, 25 bp, Artificial
  probe
  misc_feature (1)..(25): SEQ ID NO: 4666; WAN0249JG; Start 18; Stop 42
tactgattgaagctctatatctact

SEQ ID NO: 387927 - DNA, 25 bp, Artificial
  probe
  misc_feature (1)..(25): SEQ ID NO: 4666; WAN0249JG; Start 4; Stop 28
tttacaagtagaggtactgattgaa

SEQ ID NO: 387928 - DNA, 25 bp, Artificial
  probe
  misc_feature (1)..(25): SEQ ID NO: 4666; WAN0249JG; Start 90; Stop 114
ccattctatcactaattgtaaacac

SEQ ID NO: 387929 - DNA, 25 bp, Artificial
  probe
  misc_feature (1)..(25): SEQ ID NO: 4666; WAN0249JG; Start 89; Stop 113
tccattctatcactaattgtaaaca

SEQ ID NO: 387930 - DNA, 25 bp, Artificial
  probe
  misc_feature (1)..(25): SEQ ID NO: 4666; WAN0249JG; Start 97; Stop 121
atcactaattgtaaacactttcaag

SEQ ID NO: 387931 - DNA, 25 bp, Artificial
  probe
  misc_feature (1)..(25): SEQ ID NO: 4666; WAN0249JG; Start 22; Stop 46
gattgaagctctatatctacttaca

SEQ ID NO: 387932 - DNA, 25 bp, Artificial
  probe
  misc_feature (1)..(25): SEQ ID NO: 4666; WAN0249JG; Start 21; Stop 45
tgattgaagctctatatctacttac

SEQ ID NO: 387933 - DNA, 25 bp, Artificial
  probe
  misc_feature (1)..(25): SEQ ID NO: 4666; WAN0249JG; Start 10; Stop 34
agtagaggtactgattgaagctcta

SEQ ID NO: 387934 - DNA, 25 bp, Artificial
  probe
  misc_feature (1)..(25): SEQ ID NO: 4666; WAN0249JG; Start 11; Stop 35
gtagaggtactgattgaagctctat

SEQ ID NO: 387935 - DNA, 25 bp, Artificial
  probe
  misc_feature (1)..(25): SEQ ID NO: 4666; WAN0249JG; Start 20; Stop 44
ctgattgaagctctatatctactta

SEQ ID NO: 387936 - DNA, 25 bp, Artificial
  probe
  misc_feature (1)..(25): SEQ ID NO: 4666; WAN0249JG; Start 48; Stop 72
aagtgaagatgtgaaaatttcgttt

SEQ ID NO: 387937 - DNA, 25 bp, Artificial
  probe
  misc_feature (1)..(25): SEQ ID NO: 4666; WAN0249JG; Start 47; Stop 71
aaagtgaagatgtgaaaatttcgtt

SEQ ID NO: 387938 - DNA, 25 bp, Artificial
  probe
  misc_feature (1)..(25): SEQ ID NO: 4666; WAN0249JG; Start 46; Stop 70
aaaagtgaagatgtgaaaatttcgt

SEQ ID NO: 387939 - DNA, 25 bp, Artificial
  probe
  misc_feature (1)..(25): SEQ ID NO: 4666; WAN0249JG; Start 45; Stop 69
caaaagtgaagatgtgaaaatttcg

SEQ ID NO: 387940 - DNA, 25 bp, Artificial
  probe
  misc_feature (1)..(25): SEQ ID NO: 4667; WAN024AEO; Start 60; Stop 84
taaccattatagcattcttctcagc

SEQ ID NO: 387941 - DNA, 25 bp, Artificial
  probe
  misc_feature (1)..(25): SEQ ID NO: 4667; WAN024AEO; Start 71; Stop 95
gcattcttctcagctagtgtactaa

SEQ ID NO: 387942 - DNA, 25 bp, Artificial
  probe
  misc_feature (1)..(25): SEQ ID NO: 4667; WAN024AEO; Start 74; Stop 98
ttcttctcagctagtgtactaagga

SEQ ID NO: 387943 - DNA, 25 bp, Artificial
  probe
  misc_feature (1)..(25): SEQ ID NO: 4667; WAN024AEO; Start 73; Stop 97
attcttctcagctagtgtactaagg

SEQ ID NO: 387944 - DNA, 25 bp, Artificial
  probe
  misc_feature (1)..(25): SEQ ID NO: 4667; WAN024AEO; Start 58; Stop 82
tctaaccattatagcattcttctca

SEQ ID NO: 387945 - DNA, 25 bp, Artificial
  probe
  misc_feature (1)..(25): SEQ ID NO: 4667; WAN024AEO; Start 56; Stop 80
actctaaccattatagcattcttct

SEQ ID NO: 387946 - DNA, 25 bp, Artificial
  probe
  misc_feature (1)..(25): SEQ ID NO: 4667; WAN024AEO; Start 75; Stop 99
tcttctcagctagtgtactaaggag

SEQ ID NO: 387947 - DNA, 25 bp, Artificial
  probe
  misc_feature (1)..(25): SEQ ID NO: 4667; WAN024AEO; Start 59; Stop 83
ctaaccattatagcattcttctcag

SEQ ID NO: 387948 - DNA, 25 bp, Artificial
  probe
  misc_feature (1)..(25): SEQ ID NO: 4667; WAN024AEO; Start 76; Stop 100
cttctcagctagtgtactaaggagt

SEQ ID NO: 387949 - DNA, 25 bp, Artificial
  probe
  misc_feature (1)..(25): SEQ ID NO: 4667; WAN024AEO; Start 72; Stop 96
cattcttctcagctagtgtactaag

SEQ ID NO: 387950 - DNA, 25 bp, Artificial
  probe
  misc_feature (1)..(25): SEQ ID NO: 4667; WAN024AEO; Start 77; Stop 101
ttctcagctagtgtactaaggagtg

SEQ ID NO: 387951 - DNA, 25 bp, Artificial
  probe
  misc_feature (1)..(25): SEQ ID NO: 4667; WAN024AEO; Start 57; Stop 81
ctctaaccattatagcattcttctc

SEQ ID NO: 387952 - DNA, 25 bp, Artificial
  probe
  misc_feature (1)..(25): SEQ ID NO: 4667; WAN024AEO; Start 79; Stop 103
ctcagctagtgtactaaggagtgtg

SEQ ID NO: 387953 - DNA, 25 bp, Artificial
  probe
  misc_feature (1)..(25): SEQ ID NO: 4667; WAN024AEO; Start 78; Stop 102
tctcagctagtgtactaaggagtgt

SEQ ID NO: 387954 - DNA, 25 bp, Artificial
  probe
  misc_feature (1)..(25): SEQ ID NO: 4667; WAN024AEO; Start 12; Stop 36
cgtgagtgtagatgttatttactgt

SEQ ID NO: 387955 - DNA, 25 bp, Artificial
  probe
  misc_feature (1)..(25): SEQ ID NO: 4667; WAN024AEO; Start 61; Stop 85
aaccattatagcattcttctcagct

SEQ ID NO: 387956 - DNA, 25 bp, Artificial
  probe
  misc_feature (1)..(25): SEQ ID NO: 4667; WAN024AEO; Start 70; Stop 94
agcattcttctcagctagtgtacta

SEQ ID NO: 387957 - DNA, 25 bp, Artificial
  probe
  misc_feature (1)..(25): SEQ ID NO: 4667; WAN024AEO; Start 6; Stop 30
tacttacgtgagtgtagatgttatt

SEQ ID NO: 387958 - DNA, 25 bp, Artificial
  probe
  misc_feature (1)..(25): SEQ ID NO: 4667; WAN024AEO; Start 5; Stop 29
ttacttacgtgagtgtagatgttat

SEQ ID NO: 387959 - DNA, 25 bp, Artificial
  probe
  misc_feature (1)..(25): SEQ ID NO: 4667; WAN024AEO; Start 11; Stop 35
acgtgagtgtagatgttatttactg

SEQ ID NO: 387960 - DNA, 25 bp, Artificial
  probe
  misc_feature (1)..(25): SEQ ID NO: 4667; WAN024AEO; Start 13; Stop 37
gtgagtgtagatgttatttactgtt

SEQ ID NO: 387961 - DNA, 25 bp, Artificial
  probe
  misc_feature (1)..(25): SEQ ID NO: 4667; WAN024AEO; Start 7; Stop 31
acttacgtgagtgtagatgttattt

SEQ ID NO: 387962 - DNA, 25 bp, Artificial
  probe
  misc_feature (1)..(25): SEQ ID NO: 4667; WAN024AEO; Start 68; Stop 92
atagcattcttctcagctagtgtac

SEQ ID NO: 387963 - DNA, 25 bp, Artificial
  probe
  misc_feature (1)..(25): SEQ ID NO: 4667; WAN024AEO; Start 66; Stop 90
ttatagcattcttctcagctagtgt

SEQ ID NO: 387964 - DNA, 25 bp, Artificial
  probe
  misc_feature (1)..(25): SEQ ID NO: 4667; WAN024AEO; Start 62; Stop 86
accattatagcattcttctcagcta

SEQ ID NO: 387965 - DNA, 25 bp, Artificial
  probe
  misc_feature (1)..(25): SEQ ID NO: 4667; WAN024AEO; Start 69; Stop 93
tagcattcttctcagctagtgtact

SEQ ID NO: 387966 - DNA, 25 bp, Artificial
  probe
  misc_feature (1)..(25): SEQ ID NO: 4667; WAN024AEO; Start 63; Stop 87
ccattatagcattcttctcagctag

SEQ ID NO: 387967 - DNA, 25 bp, Artificial
  probe
  misc_feature (1)..(25): SEQ ID NO: 4667; WAN024AEO; Start 4; Stop 28
tttacttacgtgagtgtagatgtta

SEQ ID NO: 387968 - DNA, 25 bp, Artificial
  probe
  misc_feature (1)..(25): SEQ ID NO: 4667; WAN024AEO; Start 67; Stop 91
tatagcattcttctcagctagtgta

SEQ ID NO: 387969 - DNA, 25 bp, Artificial
  probe
  misc_feature (1)..(25): SEQ ID NO: 4667; WAN024AEO; Start 10; Stop 34
tacgtgagtgtagatgttatttact

SEQ ID NO: 387970 - DNA, 25 bp, Artificial
  probe
  misc_feature (1)..(25): SEQ ID NO: 4667; WAN024AEO; Start 14; Stop 38
tgagtgtagatgttatttactgttt

SEQ ID NO: 387971 - DNA, 25 bp, Artificial
  probe
  misc_feature (1)..(25): SEQ ID NO: 4667; WAN024AEO; Start 65; Stop 89
attatagcattcttctcagctagtg

SEQ ID NO: 387972 - DNA, 25 bp, Artificial
  probe
  misc_feature (1)..(25): SEQ ID NO: 4667; WAN024AEO; Start 64; Stop 88
cattatagcattcttctcagctagt

SEQ ID NO: 387973 - DNA, 25 bp, Artificial
  probe
  misc_feature (1)..(25): SEQ ID NO: 4668; WAN0249SA; Start 143; Stop 167
ttgagttatctgcggtaatctttct

SEQ ID NO: 387974 - DNA, 25 bp, Artificial
  probe
  misc_feature (1)..(25): SEQ ID NO: 4668; WAN0249SA; Start 141; Stop 165
gtttgagttatctgcggtaatcttt

SEQ ID NO: 387975 - DNA, 25 bp, Artificial
  probe
  misc_feature (1)..(25): SEQ ID NO: 4668; WAN0249SA; Start 140; Stop 164
tgtttgagttatctgcggtaatctt

SEQ ID NO: 387976 - DNA, 25 bp, Artificial
  probe
  misc_feature (1)..(25): SEQ ID NO: 4668; WAN0249SA; Start 142; Stop 166
tttgagttatctgcggtaatctttc

SEQ ID NO: 387977 - DNA, 25 bp, Artificial
  probe
  misc_feature (1)..(25): SEQ ID NO: 4668; WAN0249SA; Start 144; Stop 168
tgagttatctgcggtaatctttcta

SEQ ID NO: 387978 - DNA, 25 bp, Artificial
  probe
  misc_feature (1)..(25): SEQ ID NO: 4668; WAN0249SA; Start 139; Stop 163
ctgtttgagttatctgcggtaatct

SEQ ID NO: 387979 - DNA, 25 bp, Artificial
  probe
  misc_feature (1)..(25): SEQ ID NO: 4668; WAN0249SA; Start 13; Stop 37
atctcttcaaatcaggttagcatcg

SEQ ID NO: 387980 - DNA, 25 bp, Artificial
  probe
  misc_feature (1)..(25): SEQ ID NO: 4668; WAN0249SA; Start 12; Stop 36
aatctcttcaaatcaggttagcatc

SEQ ID NO: 387981 - DNA, 25 bp, Artificial
  probe
  misc_feature (1)..(25): SEQ ID NO: 4668; WAN0249SA; Start 11; Stop 35
aaatctcttcaaatcaggttagcat

SEQ ID NO: 387982 - DNA, 25 bp, Artificial
  probe
  misc_feature (1)..(25): SEQ ID NO: 4668; WAN0249SA; Start 146; Stop 170
agttatctgcggtaatctttctagc

SEQ ID NO: 387983 - DNA, 25 bp, Artificial
  probe
  misc_feature (1)..(25): SEQ ID NO: 4668; WAN0249SA; Start 43; Stop 67
tcttaggcatatgttactgacttcg

SEQ ID NO: 387984 - DNA, 25 bp, Artificial
  probe
  misc_feature (1)..(25): SEQ ID NO: 4668; WAN0249SA; Start 44; Stop 68
cttaggcatatgttactgacttcgt

SEQ ID NO: 387985 - DNA, 25 bp, Artificial
  probe
  misc_feature (1)..(25): SEQ ID NO: 4668; WAN0249SA; Start 145; Stop 169
gagttatctgcggtaatctttctag

SEQ ID NO: 387986 - DNA, 25 bp, Artificial
  probe
  misc_feature (1)..(25): SEQ ID NO: 4668; WAN0249SA; Start 138; Stop 162
actgtttgagttatctgcggtaatc

SEQ ID NO: 387987 - DNA, 25 bp, Artificial
  probe
  misc_feature (1)..(25): SEQ ID NO: 4668; WAN0249SA; Start 137; Stop 161
cactgtttgagttatctgcggtaat

SEQ ID NO: 387988 - DNA, 25 bp, Artificial
  probe
  misc_feature (1)..(25): SEQ ID NO: 4668; WAN0249SA; Start 45; Stop 69
ttaggcatatgttactgacttcgtc

SEQ ID NO: 387989 - DNA, 25 bp, Artificial
  probe
  misc_feature (1)..(25): SEQ ID NO: 4668; WAN0249SA; Start 41; Stop 65
tgtcttaggcatatgttactgactt

SEQ ID NO: 387990 - DNA, 25 bp, Artificial
  probe
  misc_feature (1)..(25): SEQ ID NO: 4668; WAN0249SA; Start 40; Stop 64
ttgtcttaggcatatgttactgact

SEQ ID NO: 387991 - DNA, 25 bp, Artificial
  probe
  misc_feature (1)..(25): SEQ ID NO: 4668; WAN0249SA; Start 42; Stop 66
gtcttaggcatatgttactgacttc

SEQ ID NO: 387992 - DNA, 25 bp, Artificial
  probe
  misc_feature (1)..(25): SEQ ID NO: 4668; WAN0249SA; Start 136; Stop 160
acactgtttgagttatctgcggtaa

SEQ ID NO: 387993 - DNA, 25 bp, Artificial
  probe
  misc_feature (1)..(25): SEQ ID NO: 4668; WAN0249SA; Start 14; Stop 38
tctcttcaaatcaggttagcatcgc

SEQ ID NO: 387994 - DNA, 25 bp, Artificial
  probe
  misc_feature (1)..(25): SEQ ID NO: 4668; WAN0249SA; Start 37; Stop 61
gctttgtcttaggcatatgttactg

SEQ ID NO: 387995 - DNA, 25 bp, Artificial
  probe
  misc_feature (1)..(25): SEQ ID NO: 4668; WAN0249SA; Start 34; Stop 58
atcgctttgtcttaggcatatgtta

SEQ ID NO: 387996 - DNA, 25 bp, Artificial
  probe
  misc_feature (1)..(25): SEQ ID NO: 4668; WAN0249SA; Start 135; Stop 159
aacactgtttgagttatctgcggta

SEQ ID NO: 387997 - DNA, 25 bp, Artificial
  probe
  misc_feature (1)..(25): SEQ ID NO: 4668; WAN0249SA; Start 36; Stop 60
cgctttgtcttaggcatatgttact

SEQ ID NO: 387998 - DNA, 25 bp, Artificial
  probe
  misc_feature (1)..(25): SEQ ID NO: 4668; WAN0249SA; Start 35; Stop 59
tcgctttgtcttaggcatatgttac

SEQ ID NO: 387999 - DNA, 25 bp, Artificial
  probe
  misc_feature (1)..(25): SEQ ID NO: 4668; WAN0249SA; Start 38; Stop 62
ctttgtcttaggcatatgttactga

SEQ ID NO: 388000 - DNA, 25 bp, Artificial
  probe
  misc_feature (1)..(25): SEQ ID NO: 4668; WAN0249SA; Start 10; Stop 34
aaaatctcttcaaatcaggttagca

SEQ ID NO: 388001 - DNA, 25 bp, Artificial
  probe
  misc_feature (1)..(25): SEQ ID NO: 4668; WAN0249SA; Start 33; Stop 57
catcgctttgtcttaggcatatgtt

SEQ ID NO: 388002 - DNA, 25 bp, Artificial
  probe
  misc_feature (1)..(25): SEQ ID NO: 4668; WAN0249SA; Start 9; Stop 33
gaaaatctcttcaaatcaggttagc

SEQ ID NO: 388003 - DNA, 25 bp, Artificial
  probe
  misc_feature (1)..(25): SEQ ID NO: 4668; WAN0249SA; Start 17; Stop 41
cttcaaatcaggttagcatcgcttt

SEQ ID NO: 388004 - DNA, 25 bp, Artificial
  probe
  misc_feature (1)..(25): SEQ ID NO: 4668; WAN0249SA; Start 39; Stop 63
tttgtcttaggcatatgttactgac

SEQ ID NO: 388005 - DNA, 25 bp, Artificial
  probe
  misc_feature (1)..(25): SEQ ID NO: 4668; WAN0249SA; Start 8; Stop 32
cgaaaatctcttcaaatcaggttag

SEQ ID NO: 388006 - DNA, 25 bp, Artificial
  probe
  misc_feature (1)..(25): SEQ ID NO: 4669; WAN0249XY; Start 108; Stop 132
aaaggactaagtgtttgagatttgt

SEQ ID NO: 388007 - DNA, 25 bp, Artificial
  probe
  misc_feature (1)..(25): SEQ ID NO: 4669; WAN0249XY; Start 157; Stop 181
gaaagagtacagttaggagagggtt

SEQ ID NO: 388008 - DNA, 25 bp, Artificial
  probe
  misc_feature (1)..(25): SEQ ID NO: 4669; WAN0249XY; Start 113; Stop 137
actaagtgtttgagatttgtcttca

SEQ ID NO: 388009 - DNA, 25 bp, Artificial
  probe
  misc_feature (1)..(25): SEQ ID NO: 4669; WAN0249XY; Start 110; Stop 134
aggactaagtgtttgagatttgtct

SEQ ID NO: 388010 - DNA, 25 bp, Artificial
  probe
  misc_feature (1)..(25): SEQ ID NO: 4669; WAN0249XY; Start 111; Stop 135
ggactaagtgtttgagatttgtctt

SEQ ID NO: 388011 - DNA, 25 bp, Artificial
  probe
  misc_feature (1)..(25): SEQ ID NO: 4669; WAN0249XY; Start 109; Stop 133
aaggactaagtgtttgagatttgtc

SEQ ID NO: 388012 - DNA, 25 bp, Artificial
  probe
  misc_feature (1)..(25): SEQ ID NO: 4669; WAN0249XY; Start 145; Stop 169
gcaattattcctgaaagagtacagt

SEQ ID NO: 388013 - DNA, 25 bp, Artificial
  probe
  misc_feature (1)..(25): SEQ ID NO: 4669; WAN0249XY; Start 156; Stop 180
tgaaagagtacagttaggagagggt

SEQ ID NO: 388014 - DNA, 25 bp, Artificial
  probe
  misc_feature (1)..(25): SEQ ID NO: 4669; WAN0249XY; Start 112; Stop 136
gactaagtgtttgagatttgtcttc

SEQ ID NO: 388015 - DNA, 25 bp, Artificial
  probe
  misc_feature (1)..(25): SEQ ID NO: 4669; WAN0249XY; Start 155; Stop 179
ctgaaagagtacagttaggagaggg

SEQ ID NO: 388016 - DNA, 25 bp, Artificial
  probe
  misc_feature (1)..(25): SEQ ID NO: 4669; WAN0249XY; Start 154; Stop 178
cctgaaagagtacagttaggagagg

SEQ ID NO: 388017 - DNA, 25 bp, Artificial
  probe
  misc_feature (1)..(25): SEQ ID NO: 4669; WAN0249XY; Start 143; Stop 167
atgcaattattcctgaaagagtaca

SEQ ID NO: 388018 - DNA, 25 bp, Artificial
  probe
  misc_feature (1)..(25): SEQ ID NO: 4669; WAN0249XY; Start 149; Stop 173
ttattcctgaaagagtacagttagg

SEQ ID NO: 388019 - DNA, 25 bp, Artificial
  probe
  misc_feature (1)..(25): SEQ ID NO: 4669; WAN0249XY; Start 144; Stop 168
tgcaattattcctgaaagagtacag

SEQ ID NO: 388020 - DNA, 25 bp, Artificial
  probe
  misc_feature (1)..(25): SEQ ID NO: 4669; WAN0249XY; Start 146; Stop 170
caattattcctgaaagagtacagtt

SEQ ID NO: 388021 - DNA, 25 bp, Artificial
  probe
  misc_feature (1)..(25): SEQ ID NO: 4669; WAN0249XY; Start 17; Stop 41
ggctgttttctctacactaggatat

SEQ ID NO: 388022 - DNA, 25 bp, Artificial
  probe
  misc_feature (1)..(25): SEQ ID NO: 4669; WAN0249XY; Start 107; Stop 131
aaaaggactaagtgtttgagatttg

SEQ ID NO: 388023 - DNA, 25 bp, Artificial
  probe
  misc_feature (1)..(25): SEQ ID NO: 4669; WAN0249XY; Start 140; Stop 164
catatgcaattattcctgaaagagt

SEQ ID NO: 388024 - DNA, 25 bp, Artificial
  probe
  misc_feature (1)..(25): SEQ ID NO: 4669; WAN0249XY; Start 139; Stop 163
acatatgcaattattcctgaaagag

SEQ ID NO: 388025 - DNA, 25 bp, Artificial
  probe
  misc_feature (1)..(25): SEQ ID NO: 4669; WAN0249XY; Start 16; Stop 40
gggctgttttctctacactaggata

SEQ ID NO: 388026 - DNA, 25 bp, Artificial
  probe
  misc_feature (1)..(25): SEQ ID NO: 4669; WAN0249XY; Start 142; Stop 166
tatgcaattattcctgaaagagtac

SEQ ID NO: 388027 - DNA, 25 bp, Artificial
  probe
  misc_feature (1)..(25): SEQ ID NO: 4669; WAN0249XY; Start 114; Stop 138
ctaagtgtttgagatttgtcttcaa

SEQ ID NO: 388028 - DNA, 25 bp, Artificial
  probe
  misc_feature (1)..(25): SEQ ID NO: 4669; WAN0249XY; Start 133; Stop 157
cttcaaacatatgcaattattcctg

SEQ ID NO: 388029 - DNA, 25 bp, Artificial
  probe
  misc_feature (1)..(25): SEQ ID NO: 4669; WAN0249XY; Start 131; Stop 155
gtcttcaaacatatgcaattattcc

SEQ ID NO: 388030 - DNA, 25 bp, Artificial
  probe
  misc_feature (1)..(25): SEQ ID NO: 4669; WAN0249XY; Start 138; Stop 162
aacatatgcaattattcctgaaaga

SEQ ID NO: 388031 - DNA, 25 bp, Artificial
  probe
  misc_feature (1)..(25): SEQ ID NO: 4669; WAN0249XY; Start 135; Stop 159
tcaaacatatgcaattattcctgaa

SEQ ID NO: 388032 - DNA, 25 bp, Artificial
  probe
  misc_feature (1)..(25): SEQ ID NO: 4669; WAN0249XY; Start 134; Stop 158
ttcaaacatatgcaattattcctga

SEQ ID NO: 388033 - DNA, 25 bp, Artificial
  probe
  misc_feature (1)..(25): SEQ ID NO: 4669; WAN0249XY; Start 132; Stop 156
tcttcaaacatatgcaattattcct

SEQ ID NO: 388034 - DNA, 25 bp, Artificial
  probe
  misc_feature (1)..(25): SEQ ID NO: 4669; WAN0249XY; Start 123; Stop 147
tgagatttgtcttcaaacatatgca

SEQ ID NO: 388035 - DNA, 25 bp, Artificial
  probe
  misc_feature (1)..(25): SEQ ID NO: 4669; WAN0249XY; Start 14; Stop 38
tagggctgttttctctacactagga

SEQ ID NO: 388036 - DNA, 25 bp, Artificial
  probe
  misc_feature (1)..(25): SEQ ID NO: 4669; WAN0249XY; Start 136; Stop 160
caaacatatgcaattattcctgaaa

SEQ ID NO: 388037 - DNA, 25 bp, Artificial
  probe
  misc_feature (1)..(25): SEQ ID NO: 4669; WAN0249XY; Start 148; Stop 172
attattcctgaaagagtacagttag

SEQ ID NO: 388038 - DNA, 25 bp, Artificial
  probe
  misc_feature (1)..(25): SEQ ID NO: 4669; WAN0249XY; Start 124; Stop 148
gagatttgtcttcaaacatatgcaa

SEQ ID NO: 388039 - DNA, 25 bp, Artificial
  probe
  misc_feature (1)..(25): SEQ ID NO: 4670; WAN024A9E; Start 61; Stop 85
actgccattaattcctgagaactaa

SEQ ID NO: 388040 - DNA, 25 bp, Artificial
  probe
  misc_feature (1)..(25): SEQ ID NO: 4670; WAN024A9E; Start 60; Stop 84
cactgccattaattcctgagaacta

SEQ ID NO: 388041 - DNA, 25 bp, Artificial
  probe
  misc_feature (1)..(25): SEQ ID NO: 4670; WAN024A9E; Start 116; Stop 140
ccaagcgatgatatcctgtctatac

SEQ ID NO: 388042 - DNA, 25 bp, Artificial
  probe
  misc_feature (1)..(25): SEQ ID NO: 4670; WAN024A9E; Start 115; Stop 139
tccaagcgatgatatcctgtctata

SEQ ID NO: 388043 - DNA, 25 bp, Artificial
  probe
  misc_feature (1)..(25): SEQ ID NO: 4670; WAN024A9E; Start 114; Stop 138
ttccaagcgatgatatcctgtctat

SEQ ID NO: 388044 - DNA, 25 bp, Artificial
  probe
  misc_feature (1)..(25): SEQ ID NO: 4670; WAN024A9E; Start 74; Stop 98
cctgagaactaaattactgattggt

SEQ ID NO: 388045 - DNA, 25 bp, Artificial
  probe
  misc_feature (1)..(25): SEQ ID NO: 4670; WAN024A9E; Start 126; Stop 150
atatcctgtctatacacgacctata

SEQ ID NO: 388046 - DNA, 25 bp, Artificial
  probe
  misc_feature (1)..(25): SEQ ID NO: 4670; WAN024A9E; Start 117; Stop 141
caagcgatgatatcctgtctataca

SEQ ID NO: 388047 - DNA, 25 bp, Artificial
  probe
  misc_feature (1)..(25): SEQ ID NO: 4670; WAN024A9E; Start 118; Stop 142
aagcgatgatatcctgtctatacac

SEQ ID NO: 388048 - DNA, 25 bp, Artificial
  probe
  misc_feature (1)..(25): SEQ ID NO: 4670; WAN024A9E; Start 73; Stop 97
tcctgagaactaaattactgattgg

SEQ ID NO: 388049 - DNA, 25 bp, Artificial
  probe
  misc_feature (1)..(25): SEQ ID NO: 4670; WAN024A9E; Start 113; Stop 137
cttccaagcgatgatatcctgtcta

SEQ ID NO: 388050 - DNA, 25 bp, Artificial
  probe
  misc_feature (1)..(25): SEQ ID NO: 4670; WAN024A9E; Start 122; Stop 146
gatgatatcctgtctatacacgacc

SEQ ID NO: 388051 - DNA, 25 bp, Artificial
  probe
  misc_feature (1)..(25): SEQ ID NO: 4670; WAN024A9E; Start 123; Stop 147
atgatatcctgtctatacacgacct

SEQ ID NO: 388052 - DNA, 25 bp, Artificial
  probe
  misc_feature (1)..(25): SEQ ID NO: 4670; WAN024A9E; Start 121; Stop 145
cgatgatatcctgtctatacacgac

SEQ ID NO: 388053 - DNA, 25 bp, Artificial
  probe
  misc_feature (1)..(25): SEQ ID NO: 4670; WAN024A9E; Start 124; Stop 148
tgatatcctgtctatacacgaccta

SEQ ID NO: 388054 - DNA, 25 bp, Artificial
  probe
  misc_feature (1)..(25): SEQ ID NO: 4670; WAN024A9E; Start 76; Stop 100
tgagaactaaattactgattggtgt

SEQ ID NO: 388055 - DNA, 25 bp, Artificial
  probe
  misc_feature (1)..(25): SEQ ID NO: 4670; WAN024A9E; Start 57; Stop 81
aagcactgccattaattcctgagaa

SEQ ID NO: 388056 - DNA, 25 bp, Artificial
  probe
  misc_feature (1)..(25): SEQ ID NO: 4670; WAN024A9E; Start 77; Stop 101
gagaactaaattactgattggtgtc

SEQ ID NO: 388057 - DNA, 25 bp, Artificial
  probe
  misc_feature (1)..(25): SEQ ID NO: 4670; WAN024A9E; Start 75; Stop 99
ctgagaactaaattactgattggtg

SEQ ID NO: 388058 - DNA, 25 bp, Artificial
  probe
  misc_feature (1)..(25): SEQ ID NO: 4670; WAN024A9E; Start 125; Stop 149
gatatcctgtctatacacgacctat

SEQ ID NO: 388059 - DNA, 25 bp, Artificial
  probe
  misc_feature (1)..(25): SEQ ID NO: 4670; WAN024A9E; Start 78; Stop 102
agaactaaattactgattggtgtca

SEQ ID NO: 388060 - DNA, 25 bp, Artificial
  probe
  misc_feature (1)..(25): SEQ ID NO: 4670; WAN024A9E; Start 62; Stop 86
ctgccattaattcctgagaactaaa

SEQ ID NO: 388061 - DNA, 25 bp, Artificial
  probe
  misc_feature (1)..(25): SEQ ID NO: 4670; WAN024A9E; Start 120; Stop 144
gcgatgatatcctgtctatacacga

SEQ ID NO: 388062 - DNA, 25 bp, Artificial
  probe
  misc_feature (1)..(25): SEQ ID NO: 4670; WAN024A9E; Start 119; Stop 143
agcgatgatatcctgtctatacacg

SEQ ID NO: 388063 - DNA, 25 bp, Artificial
  probe
  misc_feature (1)..(25): SEQ ID NO: 4670; WAN024A9E; Start 63; Stop 87
tgccattaattcctgagaactaaat

SEQ ID NO: 388064 - DNA, 25 bp, Artificial
  probe
  misc_feature (1)..(25): SEQ ID NO: 4670; WAN024A9E; Start 111; Stop 135
aacttccaagcgatgatatcctgtc

SEQ ID NO: 388065 - DNA, 25 bp, Artificial
  probe
  misc_feature (1)..(25): SEQ ID NO: 4670; WAN024A9E; Start 59; Stop 83
gcactgccattaattcctgagaact

SEQ ID NO: 388066 - DNA, 25 bp, Artificial
  probe
  misc_feature (1)..(25): SEQ ID NO: 4670; WAN024A9E; Start 58; Stop 82
agcactgccattaattcctgagaac

SEQ ID NO: 388067 - DNA, 25 bp, Artificial
  probe
  misc_feature (1)..(25): SEQ ID NO: 4670; WAN024A9E; Start 79; Stop 103
gaactaaattactgattggtgtcaa

SEQ ID NO: 388068 - DNA, 25 bp, Artificial
  probe
  misc_feature (1)..(25): SEQ ID NO: 4670; WAN024A9E; Start 127; Stop 151
tatcctgtctatacacgacctatag

SEQ ID NO: 388069 - DNA, 25 bp, Artificial
  probe
  misc_feature (1)..(25): SEQ ID NO: 4670; WAN024A9E; Start 80; Stop 104
aactaaattactgattggtgtcaaa

SEQ ID NO: 388070 - DNA, 25 bp, Artificial
  probe
  misc_feature (1)..(25): SEQ ID NO: 4670; WAN024A9E; Start 72; Stop 96
ttcctgagaactaaattactgattg

SEQ ID NO: 388071 - DNA, 25 bp, Artificial
  probe
  misc_feature (1)..(25): SEQ ID NO: 4670; WAN024A9E; Start 112; Stop 136
acttccaagcgatgatatcctgtct

SEQ ID NO: 388072 - DNA, 25 bp, Artificial
  probe
  misc_feature (1)..(25): SEQ ID NO: 4671; WAN0249EZ; Start 32; Stop 56
catttgtcagatttatgctatgctt

SEQ ID NO: 388073 - DNA, 25 bp, Artificial
  probe
  misc_feature (1)..(25): SEQ ID NO: 4671; WAN0249EZ; Start 34; Stop 58
tttgtcagatttatgctatgcttaa

SEQ ID NO: 388074 - DNA, 25 bp, Artificial
  probe
  misc_feature (1)..(25): SEQ ID NO: 4671; WAN0249EZ; Start 33; Stop 57
atttgtcagatttatgctatgctta

SEQ ID NO: 388075 - DNA, 25 bp, Artificial
  probe
  misc_feature (1)..(25): SEQ ID NO: 4671; WAN0249EZ; Start 37; Stop 61
gtcagatttatgctatgcttaaggt

SEQ ID NO: 388076 - DNA, 25 bp, Artificial
  probe
  misc_feature (1)..(25): SEQ ID NO: 4671; WAN0249EZ; Start 36; Stop 60
tgtcagatttatgctatgcttaagg

SEQ ID NO: 388077 - DNA, 25 bp, Artificial
  probe
  misc_feature (1)..(25): SEQ ID NO: 4671; WAN0249EZ; Start 38; Stop 62
tcagatttatgctatgcttaaggta

SEQ ID NO: 388078 - DNA, 25 bp, Artificial
  probe
  misc_feature (1)..(25): SEQ ID NO: 4671; WAN0249EZ; Start 35; Stop 59
ttgtcagatttatgctatgcttaag

SEQ ID NO: 388079 - DNA, 25 bp, Artificial
  probe
  misc_feature (1)..(25): SEQ ID NO: 4671; WAN0249EZ; Start 39; Stop 63
cagatttatgctatgcttaaggtag

SEQ ID NO: 388080 - DNA, 25 bp, Artificial
  probe
  misc_feature (1)..(25): SEQ ID NO: 4671; WAN0249EZ; Start 40; Stop 64
agatttatgctatgcttaaggtaga

SEQ ID NO: 388081 - DNA, 25 bp, Artificial
  probe
  misc_feature (1)..(25): SEQ ID NO: 4671; WAN0249EZ; Start 41; Stop 65
gatttatgctatgcttaaggtagaa

SEQ ID NO: 388082 - DNA, 25 bp, Artificial
  probe
  misc_feature (1)..(25): SEQ ID NO: 4671; WAN0249EZ; Start 51; Stop 75
atgcttaaggtagaaaatgaaaggg

SEQ ID NO: 388083 - DNA, 25 bp, Artificial
  probe
  misc_feature (1)..(25): SEQ ID NO: 4671; WAN0249EZ; Start 47; Stop 71
tgctatgcttaaggtagaaaatgaa

SEQ ID NO: 388084 - DNA, 25 bp, Artificial
  probe
  misc_feature (1)..(25): SEQ ID NO: 4671; WAN0249EZ; Start 18; Stop 42
acagattattttagcatttgtcaga

SEQ ID NO: 388085 - DNA, 25 bp, Artificial
  probe
  misc_feature (1)..(25): SEQ ID NO: 4671; WAN0249EZ; Start 42; Stop 66
atttatgctatgcttaaggtagaaa

SEQ ID NO: 388086 - DNA, 25 bp, Artificial
  probe
  misc_feature (1)..(25): SEQ ID NO: 4671; WAN0249EZ; Start 46; Stop 70
atgctatgcttaaggtagaaaatga

SEQ ID NO: 388087 - DNA, 25 bp, Artificial
  probe
  misc_feature (1)..(25): SEQ ID NO: 4671; WAN0249EZ; Start 48; Stop 72
gctatgcttaaggtagaaaatgaaa

SEQ ID NO: 388088 - DNA, 25 bp, Artificial
  probe
  misc_feature (1)..(25): SEQ ID NO: 4671; WAN0249EZ; Start 19; Stop 43
cagattattttagcatttgtcagat

SEQ ID NO: 388089 - DNA, 25 bp, Artificial
  probe
  misc_feature (1)..(25): SEQ ID NO: 4671; WAN0249EZ; Start 31; Stop 55
gcatttgtcagatttatgctatgct

SEQ ID NO: 388090 - DNA, 25 bp, Artificial
  probe
  misc_feature (1)..(25): SEQ ID NO: 4671; WAN0249EZ; Start 17; Stop 41
aacagattattttagcatttgtcag

SEQ ID NO: 388091 - DNA, 25 bp, Artificial
  probe
  misc_feature (1)..(25): SEQ ID NO: 4671; WAN0249EZ; Start 45; Stop 69
tatgctatgcttaaggtagaaaatg

SEQ ID NO: 388092 - DNA, 25 bp, Artificial
  probe
  misc_feature (1)..(25): SEQ ID NO: 4671; WAN0249EZ; Start 50; Stop 74
tatgcttaaggtagaaaatgaaagg

SEQ ID NO: 388093 - DNA, 25 bp, Artificial
  probe
  misc_feature (1)..(25): SEQ ID NO: 4671; WAN0249EZ; Start 16; Stop 40
aaacagattattttagcatttgtca

SEQ ID NO: 388094 - DNA, 25 bp, Artificial
  probe
  misc_feature (1)..(25): SEQ ID NO: 4671; WAN0249EZ; Start 13; Stop 37
gagaaacagattattttagcatttg

SEQ ID NO: 388095 - DNA, 25 bp, Artificial
  probe
  misc_feature (1)..(25): SEQ ID NO: 4671; WAN0249EZ; Start 14; Stop 38
agaaacagattattttagcatttgt

SEQ ID NO: 388096 - DNA, 25 bp, Artificial
  probe
  misc_feature (1)..(25): SEQ ID NO: 4671; WAN0249EZ; Start 20; Stop 44
agattattttagcatttgtcagatt

SEQ ID NO: 388097 - DNA, 25 bp, Artificial
  probe
  misc_feature (1)..(25): SEQ ID NO: 4671; WAN0249EZ; Start 43; Stop 67
tttatgctatgcttaaggtagaaaa

SEQ ID NO: 388098 - DNA, 25 bp, Artificial
  probe
  misc_feature (1)..(25): SEQ ID NO: 4671; WAN0249EZ; Start 15; Stop 39
gaaacagattattttagcatttgtc

SEQ ID NO: 388099 - DNA, 25 bp, Artificial
  probe
  misc_feature (1)..(25): SEQ ID NO: 4671; WAN0249EZ; Start 12; Stop 36
agagaaacagattattttagcattt

SEQ ID NO: 388100 - DNA, 25 bp, Artificial
  probe
  misc_feature (1)..(25): SEQ ID NO: 4671; WAN0249EZ; Start 11; Stop 35
aagagaaacagattattttagcatt

SEQ ID NO: 388101 - DNA, 25 bp, Artificial
  probe
  misc_feature (1)..(25): SEQ ID NO: 4671; WAN0249EZ; Start 10; Stop 34
aaagagaaacagattattttagcat

SEQ ID NO: 388102 - DNA, 25 bp, Artificial
  probe
  misc_feature (1)..(25): SEQ ID NO: 4671; WAN0249EZ; Start 44; Stop 68
ttatgctatgcttaaggtagaaaat

SEQ ID NO: 388103 - DNA, 25 bp, Artificial
  probe
  misc_feature (1)..(25): SEQ ID NO: 4671; WAN0249EZ; Start 49; Stop 73
ctatgcttaaggtagaaaatgaaag

SEQ ID NO: 388104 - DNA, 25 bp, Artificial
  probe
  misc_feature (1)..(25): SEQ ID NO: 4671; WAN0249EZ; Start 9; Stop 33
aaaagagaaacagattattttagca

SEQ ID NO: 388105 - DNA, 25 bp, Artificial
  probe
  misc_feature (1)..(25): SEQ ID NO: 4671; WAN0249EZ; Start 25; Stop 49
attttagcatttgtcagatttatgc

SEQ ID NO: 388106 - DNA, 25 bp, Artificial
  probe
  misc_feature (1)..(25): SEQ ID NO: 4672; WAN024ABA; Start 124; Stop 148
aataaggacggaataacacaacaaa

SEQ ID NO: 388107 - DNA, 25 bp, Artificial
  probe
  misc_feature (1)..(25): SEQ ID NO: 4672; WAN024ABA; Start 123; Stop 147
aaataaggacggaataacacaacaa

SEQ ID NO: 388108 - DNA, 25 bp, Artificial
  probe
  misc_feature (1)..(25): SEQ ID NO: 4672; WAN024ABA; Start 125; Stop 149
ataaggacggaataacacaacaaat

SEQ ID NO: 388109 - DNA, 25 bp, Artificial
  probe
  misc_feature (1)..(25): SEQ ID NO: 4672; WAN024ABA; Start 126; Stop 150
taaggacggaataacacaacaaatt

SEQ ID NO: 388110 - DNA, 25 bp, Artificial
  probe
  misc_feature (1)..(25): SEQ ID NO: 4672; WAN024ABA; Start 85; Stop 109
gtaaggataagaggtcccacttaaa

SEQ ID NO: 388111 - DNA, 25 bp, Artificial
  probe
  misc_feature (1)..(25): SEQ ID NO: 4672; WAN024ABA; Start 130; Stop 154
gacggaataacacaacaaattctct

SEQ ID NO: 388112 - DNA, 25 bp, Artificial
  probe
  misc_feature (1)..(25): SEQ ID NO: 4672; WAN024ABA; Start 127; Stop 151
aaggacggaataacacaacaaattc

SEQ ID NO: 388113 - DNA, 25 bp, Artificial
  probe
  misc_feature (1)..(25): SEQ ID NO: 4672; WAN024ABA; Start 84; Stop 108
ggtaaggataagaggtcccacttaa

SEQ ID NO: 388114 - DNA, 25 bp, Artificial
  probe
  misc_feature (1)..(25): SEQ ID NO: 4672; WAN024ABA; Start 129; Stop 153
ggacggaataacacaacaaattctc

SEQ ID NO: 388115 - DNA, 25 bp, Artificial
  probe
  misc_feature (1)..(25): SEQ ID NO: 4672; WAN024ABA; Start 128; Stop 152
aggacggaataacacaacaaattct

SEQ ID NO: 388116 - DNA, 25 bp, Artificial
  probe
  misc_feature (1)..(25): SEQ ID NO: 4672; WAN024ABA; Start 131; Stop 155
acggaataacacaacaaattctcta

SEQ ID NO: 388117 - DNA, 25 bp, Artificial
  probe
  misc_feature (1)..(25): SEQ ID NO: 4672; WAN024ABA; Start 80; Stop 104
aaatggtaaggataagaggtcccac

SEQ ID NO: 388118 - DNA, 25 bp, Artificial
  probe
  misc_feature (1)..(25): SEQ ID NO: 4672; WAN024ABA; Start 83; Stop 107
tggtaaggataagaggtcccactta

SEQ ID NO: 388119 - DNA, 25 bp, Artificial
  probe
  misc_feature (1)..(25): SEQ ID NO: 4672; WAN024ABA; Start 120; Stop 144
gcaaaataaggacggaataacacaa

SEQ ID NO: 388120 - DNA, 25 bp, Artificial
  probe
  misc_feature (1)..(25): SEQ ID NO: 4672; WAN024ABA; Start 132; Stop 156
cggaataacacaacaaattctctaa

SEQ ID NO: 388121 - DNA, 25 bp, Artificial
  probe
  misc_feature (1)..(25): SEQ ID NO: 4672; WAN024ABA; Start 116; Stop 140
tatggcaaaataaggacggaataac

SEQ ID NO: 388122 - DNA, 25 bp, Artificial
  probe
  misc_feature (1)..(25): SEQ ID NO: 4672; WAN024ABA; Start 122; Stop 146
aaaataaggacggaataacacaaca

SEQ ID NO: 388123 - DNA, 25 bp, Artificial
  probe
  misc_feature (1)..(25): SEQ ID NO: 4672; WAN024ABA; Start 121; Stop 145
caaaataaggacggaataacacaac

SEQ ID NO: 388124 - DNA, 25 bp, Artificial
  probe
  misc_feature (1)..(25): SEQ ID NO: 4672; WAN024ABA; Start 117; Stop 141
atggcaaaataaggacggaataaca

SEQ ID NO: 388125 - DNA, 25 bp, Artificial
  probe
  misc_feature (1)..(25): SEQ ID NO: 4672; WAN024ABA; Start 82; Stop 106
atggtaaggataagaggtcccactt

SEQ ID NO: 388126 - DNA, 25 bp, Artificial
  probe
  misc_feature (1)..(25): SEQ ID NO: 4672; WAN024ABA; Start 81; Stop 105
aatggtaaggataagaggtcccact

SEQ ID NO: 388127 - DNA, 25 bp, Artificial
  probe
  misc_feature (1)..(25): SEQ ID NO: 4672; WAN024ABA; Start 115; Stop 139
ttatggcaaaataaggacggaataa

SEQ ID NO: 388128 - DNA, 25 bp, Artificial
  probe
  misc_feature (1)..(25): SEQ ID NO: 4672; WAN024ABA; Start 114; Stop 138
tttatggcaaaataaggacggaata

SEQ ID NO: 388129 - DNA, 25 bp, Artificial
  probe
  misc_feature (1)..(25): SEQ ID NO: 4672; WAN024ABA; Start 119; Stop 143
ggcaaaataaggacggaataacaca

SEQ ID NO: 388130 - DNA, 25 bp, Artificial
  probe
  misc_feature (1)..(25): SEQ ID NO: 4672; WAN024ABA; Start 118; Stop 142
tggcaaaataaggacggaataacac

SEQ ID NO: 388131 - DNA, 25 bp, Artificial
  probe
  misc_feature (1)..(25): SEQ ID NO: 4672; WAN024ABA; Start 111; Stop 135
caatttatggcaaaataaggacgga

SEQ ID NO: 388132 - DNA, 25 bp, Artificial
  probe
  misc_feature (1)..(25): SEQ ID NO: 4672; WAN024ABA; Start 112; Stop 136
aatttatggcaaaataaggacggaa

SEQ ID NO: 388133 - DNA, 25 bp, Artificial
  probe
  misc_feature (1)..(25): SEQ ID NO: 4672; WAN024ABA; Start 110; Stop 134
acaatttatggcaaaataaggacgg

SEQ ID NO: 388134 - DNA, 25 bp, Artificial
  probe
  misc_feature (1)..(25): SEQ ID NO: 4672; WAN024ABA; Start 113; Stop 137
atttatggcaaaataaggacggaat

SEQ ID NO: 388135 - DNA, 25 bp, Artificial
  probe
  misc_feature (1)..(25): SEQ ID NO: 4672; WAN024ABA; Start 93; Stop 117
aagaggtcccacttaaaacaattta

SEQ ID NO: 388136 - DNA, 25 bp, Artificial
  probe
  misc_feature (1)..(25): SEQ ID NO: 4672; WAN024ABA; Start 109; Stop 133
aacaatttatggcaaaataaggacg

SEQ ID NO: 388137 - DNA, 25 bp, Artificial
  probe
  misc_feature (1)..(25): SEQ ID NO: 4672; WAN024ABA; Start 95; Stop 119
gaggtcccacttaaaacaatttatg

SEQ ID NO: 388138 - DNA, 25 bp, Artificial
  probe
  misc_feature (1)..(25): SEQ ID NO: 4672; WAN024ABA; Start 94; Stop 118
agaggtcccacttaaaacaatttat

SEQ ID NO: 388139 - DNA, 25 bp, Artificial
  probe
  misc_feature (1)..(25): SEQ ID NO: 4673; WAN0249K5; Start 130; Stop 154
actttaatgcgataattgattggac

SEQ ID NO: 388140 - DNA, 25 bp, Artificial
  probe
  misc_feature (1)..(25): SEQ ID NO: 4673; WAN0249K5; Start 131; Stop 155
ctttaatgcgataattgattggact

SEQ ID NO: 388141 - DNA, 25 bp, Artificial
  probe
  misc_feature (1)..(25): SEQ ID NO: 4673; WAN0249K5; Start 133; Stop 157
ttaatgcgataattgattggacttt

SEQ ID NO: 388142 - DNA, 25 bp, Artificial
  probe
  misc_feature (1)..(25): SEQ ID NO: 4673; WAN0249K5; Start 132; Stop 156
tttaatgcgataattgattggactt

SEQ ID NO: 388143 - DNA, 25 bp, Artificial
  probe
  misc_feature (1)..(25): SEQ ID NO: 4673; WAN0249K5; Start 6; Stop 30
taaagaagaattgggacattcagtg

SEQ ID NO: 388144 - DNA, 25 bp, Artificial
  probe
  misc_feature (1)..(25): SEQ ID NO: 4673; WAN0249K5; Start 7; Stop 31
aaagaagaattgggacattcagtgg

SEQ ID NO: 388145 - DNA, 25 bp, Artificial
  probe
  misc_feature (1)..(25): SEQ ID NO: 4673; WAN0249K5; Start 1; Stop 25
tgaaataaagaagaattgggacatt

SEQ ID NO: 388146 - DNA, 25 bp, Artificial
  probe
  misc_feature (1)..(25): SEQ ID NO: 4673; WAN0249K5; Start 124; Stop 148
aaccatactttaatgcgataattga

SEQ ID NO: 388147 - DNA, 25 bp, Artificial
  probe
  misc_feature (1)..(25): SEQ ID NO: 4673; WAN0249K5; Start 5; Stop 29
ataaagaagaattgggacattcagt

SEQ ID NO: 388148 - DNA, 25 bp, Artificial
  probe
  misc_feature (1)..(25): SEQ ID NO: 4673; WAN0249K5; Start 129; Stop 153
tactttaatgcgataattgattgga

SEQ ID NO: 388149 - DNA, 25 bp, Artificial
  probe
  misc_feature (1)..(25): SEQ ID NO: 4673; WAN0249K5; Start 125; Stop 149
accatactttaatgcgataattgat

SEQ ID NO: 388150 - DNA, 25 bp, Artificial
  probe
  misc_feature (1)..(25): SEQ ID NO: 4673; WAN0249K5; Start 10; Stop 34
gaagaattgggacattcagtggatg

SEQ ID NO: 388151 - DNA, 25 bp, Artificial
  probe
  misc_feature (1)..(25): SEQ ID NO: 4673; WAN0249K5; Start 9; Stop 33
agaagaattgggacattcagtggat

SEQ ID NO: 388152 - DNA, 25 bp, Artificial
  probe
  misc_feature (1)..(25): SEQ ID NO: 4673; WAN0249K5; Start 8; Stop 32
aagaagaattgggacattcagtgga

SEQ ID NO: 388153 - DNA, 25 bp, Artificial
  probe
  misc_feature (1)..(25): SEQ ID NO: 4673; WAN0249K5; Start 136; Stop 160
atgcgataattgattggacttttgt

SEQ ID NO: 388154 - DNA, 25 bp, Artificial
  probe
  misc_feature (1)..(25): SEQ ID NO: 4673; WAN0249K5; Start 135; Stop 159
aatgcgataattgattggacttttg

SEQ ID NO: 388155 - DNA, 25 bp, Artificial
  probe
  misc_feature (1)..(25): SEQ ID NO: 4673; WAN0249K5; Start 4; Stop 28
aataaagaagaattgggacattcag

SEQ ID NO: 388156 - DNA, 25 bp, Artificial
  probe
  misc_feature (1)..(25): SEQ ID NO: 4673; WAN0249K5; Start 138; Stop 162
gcgataattgattggacttttgtca

SEQ ID NO: 388157 - DNA, 25 bp, Artificial
  probe
  misc_feature (1)..(25): SEQ ID NO: 4673; WAN0249K5; Start 137; Stop 161
tgcgataattgattggacttttgtc

SEQ ID NO: 388158 - DNA, 25 bp, Artificial
  probe
  misc_feature (1)..(25): SEQ ID NO: 4673; WAN0249K5; Start 3; Stop 27
aaataaagaagaattgggacattca

SEQ ID NO: 388159 - DNA, 25 bp, Artificial
  probe
  misc_feature (1)..(25): SEQ ID NO: 4673; WAN0249K5; Start 13; Stop 37
gaattgggacattcagtggatgttt

SEQ ID NO: 388160 - DNA, 25 bp, Artificial
  probe
  misc_feature (1)..(25): SEQ ID NO: 4673; WAN0249K5; Start 128; Stop 152
atactttaatgcgataattgattgg

SEQ ID NO: 388161 - DNA, 25 bp, Artificial
  probe
  misc_feature (1)..(25): SEQ ID NO: 4673; WAN0249K5; Start 147; Stop 171
gattggacttttgtcaaggagatgt

SEQ ID NO: 388162 - DNA, 25 bp, Artificial
  probe
  misc_feature (1)..(25): SEQ ID NO: 4673; WAN0249K5; Start 146; Stop 170
tgattggacttttgtcaaggagatg

SEQ ID NO: 388163 - DNA, 25 bp, Artificial
  probe
  misc_feature (1)..(25): SEQ ID NO: 4673; WAN0249K5; Start 126; Stop 150
ccatactttaatgcgataattgatt

SEQ ID NO: 388164 - DNA, 25 bp, Artificial
  probe
  misc_feature (1)..(25): SEQ ID NO: 4673; WAN0249K5; Start 148; Stop 172
attggacttttgtcaaggagatgtg

SEQ ID NO: 388165 - DNA, 25 bp, Artificial
  probe
  misc_feature (1)..(25): SEQ ID NO: 4673; WAN0249K5; Start 134; Stop 158
taatgcgataattgattggactttt

SEQ ID NO: 388166 - DNA, 25 bp, Artificial
  probe
  misc_feature (1)..(25): SEQ ID NO: 4673; WAN0249K5; Start 2; Stop 26
gaaataaagaagaattgggacattc

SEQ ID NO: 388167 - DNA, 25 bp, Artificial
  probe
  misc_feature (1)..(25): SEQ ID NO: 4673; WAN0249K5; Start 123; Stop 147
taaccatactttaatgcgataattg

SEQ ID NO: 388168 - DNA, 25 bp, Artificial
  probe
  misc_feature (1)..(25): SEQ ID NO: 4673; WAN0249K5; Start 122; Stop 146
gtaaccatactttaatgcgataatt

SEQ ID NO: 388169 - DNA, 25 bp, Artificial
  probe
  misc_feature (1)..(25): SEQ ID NO: 4673; WAN0249K5; Start 12; Stop 36
agaattgggacattcagtggatgtt

SEQ ID NO: 388170 - DNA, 25 bp, Artificial
  probe
  misc_feature (1)..(25): SEQ ID NO: 4673; WAN0249K5; Start 11; Stop 35
aagaattgggacattcagtggatgt

SEQ ID NO: 388171 - DNA, 25 bp, Artificial
  probe
  misc_feature (1)..(25): SEQ ID NO: 4673; WAN0249K5; Start 121; Stop 145
agtaaccatactttaatgcgataat

SEQ ID NO: 388172 - DNA, 25 bp, Artificial
  probe
  misc_feature (1)..(25): SEQ ID NO: 4674; WAN0249PT; Start 59; Stop 83
agcagtcaaggtgtactattataga

SEQ ID NO: 388173 - DNA, 25 bp, Artificial
  probe
  misc_feature (1)..(25): SEQ ID NO: 4674; WAN0249PT; Start 133; Stop 157
ctctggctctatctatttattcgga

SEQ ID NO: 388174 - DNA, 25 bp, Artificial
  probe
  misc_feature (1)..(25): SEQ ID NO: 4674; WAN0249PT; Start 132; Stop 156
tctctggctctatctatttattcgg

SEQ ID NO: 388175 - DNA, 25 bp, Artificial
  probe
  misc_feature (1)..(25): SEQ ID NO: 4674; WAN0249PT; Start 134; Stop 158
tctggctctatctatttattcggaa

SEQ ID NO: 388176 - DNA, 25 bp, Artificial
  probe
  misc_feature (1)..(25): SEQ ID NO: 4674; WAN0249PT; Start 60; Stop 84
gcagtcaaggtgtactattatagat

SEQ ID NO: 388177 - DNA, 25 bp, Artificial
  probe
  misc_feature (1)..(25): SEQ ID NO: 4674; WAN0249PT; Start 119; Stop 143
aggtttactaaattctctggctcta

SEQ ID NO: 388178 - DNA, 25 bp, Artificial
  probe
  misc_feature (1)..(25): SEQ ID NO: 4674; WAN0249PT; Start 118; Stop 142
taggtttactaaattctctggctct

SEQ ID NO: 388179 - DNA, 25 bp, Artificial
  probe
  misc_feature (1)..(25): SEQ ID NO: 4674; WAN0249PT; Start 7; Stop 31
aagatgtgaataactctatcaggaa

SEQ ID NO: 388180 - DNA, 25 bp, Artificial
  probe
  misc_feature (1)..(25): SEQ ID NO: 4674; WAN0249PT; Start 116; Stop 140
tctaggtttactaaattctctggct

SEQ ID NO: 388181 - DNA, 25 bp, Artificial
  probe
  misc_feature (1)..(25): SEQ ID NO: 4674; WAN0249PT; Start 135; Stop 159
ctggctctatctatttattcggaaa

SEQ ID NO: 388182 - DNA, 25 bp, Artificial
  probe
  misc_feature (1)..(25): SEQ ID NO: 4674; WAN0249PT; Start 117; Stop 141
ctaggtttactaaattctctggctc

SEQ ID NO: 388183 - DNA, 25 bp, Artificial
  probe
  misc_feature (1)..(25): SEQ ID NO: 4674; WAN0249PT; Start 120; Stop 144
ggtttactaaattctctggctctat

SEQ ID NO: 388184 - DNA, 25 bp, Artificial
  probe
  misc_feature (1)..(25): SEQ ID NO: 4674; WAN0249PT; Start 58; Stop 82
tagcagtcaaggtgtactattatag

SEQ ID NO: 388185 - DNA, 25 bp, Artificial
  probe
  misc_feature (1)..(25): SEQ ID NO: 4674; WAN0249PT; Start 131; Stop 155
ttctctggctctatctatttattcg

SEQ ID NO: 388186 - DNA, 25 bp, Artificial
  probe
  misc_feature (1)..(25): SEQ ID NO: 4674; WAN0249PT; Start 115; Stop 139
atctaggtttactaaattctctggc

SEQ ID NO: 388187 - DNA, 25 bp, Artificial
  probe
  misc_feature (1)..(25): SEQ ID NO: 4674; WAN0249PT; Start 12; Stop 36
gtgaataactctatcaggaaagtca

SEQ ID NO: 388188 - DNA, 25 bp, Artificial
  probe
  misc_feature (1)..(25): SEQ ID NO: 4674; WAN0249PT; Start 11; Stop 35
tgtgaataactctatcaggaaagtc

SEQ ID NO: 388189 - DNA, 25 bp, Artificial
  probe
  misc_feature (1)..(25): SEQ ID NO: 4674; WAN0249PT; Start 57; Stop 81
ttagcagtcaaggtgtactattata

SEQ ID NO: 388190 - DNA, 25 bp, Artificial
  probe
  misc_feature (1)..(25): SEQ ID NO: 4674; WAN0249PT; Start 6; Stop 30
taagatgtgaataactctatcagga

SEQ ID NO: 388191 - DNA, 25 bp, Artificial
  probe
  misc_feature (1)..(25): SEQ ID NO: 4674; WAN0249PT; Start 10; Stop 34
atgtgaataactctatcaggaaagt

SEQ ID NO: 388192 - DNA, 25 bp, Artificial
  probe
  misc_feature (1)..(25): SEQ ID NO: 4674; WAN0249PT; Start 13; Stop 37
tgaataactctatcaggaaagtcaa

SEQ ID NO: 388193 - DNA, 25 bp, Artificial
  probe
  misc_feature (1)..(25): SEQ ID NO: 4674; WAN0249PT; Start 121; Stop 145
gtttactaaattctctggctctatc

SEQ ID NO: 388194 - DNA, 25 bp, Artificial
  probe
  misc_feature (1)..(25): SEQ ID NO: 4674; WAN0249PT; Start 170; Stop 194
aatacttgctctagctcttcccaat

SEQ ID NO: 388195 - DNA, 25 bp, Artificial
  probe
  misc_feature (1)..(25): SEQ ID NO: 4674; WAN0249PT; Start 122; Stop 146
tttactaaattctctggctctatct

SEQ ID NO: 388196 - DNA, 25 bp, Artificial
  probe
  misc_feature (1)..(25): SEQ ID NO: 4674; WAN0249PT; Start 169; Stop 193
aaatacttgctctagctcttcccaa

SEQ ID NO: 388197 - DNA, 25 bp, Artificial
  probe
  misc_feature (1)..(25): SEQ ID NO: 4674; WAN0249PT; Start 8; Stop 32
agatgtgaataactctatcaggaaa

SEQ ID NO: 388198 - DNA, 25 bp, Artificial
  probe
  misc_feature (1)..(25): SEQ ID NO: 4674; WAN0249PT; Start 56; Stop 80
tttagcagtcaaggtgtactattat

SEQ ID NO: 388199 - DNA, 25 bp, Artificial
  probe
  misc_feature (1)..(25): SEQ ID NO: 4674; WAN0249PT; Start 9; Stop 33
gatgtgaataactctatcaggaaag

SEQ ID NO: 388200 - DNA, 25 bp, Artificial
  probe
  misc_feature (1)..(25): SEQ ID NO: 4674; WAN0249PT; Start 125; Stop 149
actaaattctctggctctatctatt

SEQ ID NO: 388201 - DNA, 25 bp, Artificial
  probe
  misc_feature (1)..(25): SEQ ID NO: 4674; WAN0249PT; Start 177; Stop 201
gctctagctcttcccaatggtattt

SEQ ID NO: 388202 - DNA, 25 bp, Artificial
  probe
  misc_feature (1)..(25): SEQ ID NO: 4674; WAN0249PT; Start 171; Stop 195
atacttgctctagctcttcccaatg

SEQ ID NO: 388203 - DNA, 25 bp, Artificial
  probe
  misc_feature (1)..(25): SEQ ID NO: 4674; WAN0249PT; Start 5; Stop 29
ataagatgtgaataactctatcagg

SEQ ID NO: 388204 - DNA, 25 bp, Artificial
  probe
  misc_feature (1)..(25): SEQ ID NO: 4674; WAN0249PT; Start 63; Stop 87
gtcaaggtgtactattatagattca

SEQ ID NO: 388205 - DNA, 25 bp, Artificial
  probe
  misc_feature (1)..(25): SEQ ID NO: 4675; WAN024ARB; Start 1; Stop 25
tgaacacatgaaatgtcaataaata

SEQ ID NO: 388206 - DNA, 25 bp, Artificial
  probe
  misc_feature (1)..(25): SEQ ID NO: 4675; WAN024ARB; Start 29; Stop 53
aggttaagataaattgttttgagtt

SEQ ID NO: 388207 - DNA, 25 bp, Artificial
  probe
  misc_feature (1)..(25): SEQ ID NO: 4675; WAN024ARB; Start 82; Stop 106
tgcttcaatatatgaaaacatacgt

SEQ ID NO: 388208 - DNA, 25 bp, Artificial
  probe
  misc_feature (1)..(25): SEQ ID NO: 4675; WAN024ARB; Start 81; Stop 105
atgcttcaatatatgaaaacatacg

SEQ ID NO: 388209 - DNA, 25 bp, Artificial
  probe
  misc_feature (1)..(25): SEQ ID NO: 4675; WAN024ARB; Start 83; Stop 107
gcttcaatatatgaaaacatacgtt

SEQ ID NO: 388210 - DNA, 25 bp, Artificial
  probe
  misc_feature (1)..(25): SEQ ID NO: 4675; WAN024ARB; Start 93; Stop 117
atgaaaacatacgttttaggaggga

SEQ ID NO: 388211 - DNA, 25 bp, Artificial
  probe
  misc_feature (1)..(25): SEQ ID NO: 4675; WAN024ARB; Start 92; Stop 116
tatgaaaacatacgttttaggaggg

SEQ ID NO: 388212 - DNA, 25 bp, Artificial
  probe
  misc_feature (1)..(25): SEQ ID NO: 4675; WAN024ARB; Start 91; Stop 115
atatgaaaacatacgttttaggagg

SEQ ID NO: 388213 - DNA, 25 bp, Artificial
  probe
  misc_feature (1)..(25): SEQ ID NO: 4675; WAN024ARB; Start 42; Stop 66
ttgttttgagtttgatataaactga

SEQ ID NO: 388214 - DNA, 25 bp, Artificial
  probe
  misc_feature (1)..(25): SEQ ID NO: 4675; WAN024ARB; Start 43; Stop 67
tgttttgagtttgatataaactgat

SEQ ID NO: 388215 - DNA, 25 bp, Artificial
  probe
  misc_feature (1)..(25): SEQ ID NO: 4675; WAN024ARB; Start 90; Stop 114
tatatgaaaacatacgttttaggag

SEQ ID NO: 388216 - DNA, 25 bp, Artificial
  probe
  misc_feature (1)..(25): SEQ ID NO: 4676; WAN024AAJ; Start 13; Stop 37
gatgtatttgtagatatcgtttgcg

SEQ ID NO: 388217 - DNA, 25 bp, Artificial
  probe
  misc_feature (1)..(25): SEQ ID NO: 4676; WAN024AAJ; Start 12; Stop 36
agatgtatttgtagatatcgtttgc

SEQ ID NO: 388218 - DNA, 25 bp, Artificial
  probe
  misc_feature (1)..(25): SEQ ID NO: 4676; WAN024AAJ; Start 14; Stop 38
atgtatttgtagatatcgtttgcgc

SEQ ID NO: 388219 - DNA, 25 bp, Artificial
  probe
  misc_feature (1)..(25): SEQ ID NO: 4676; WAN024AAJ; Start 73; Stop 97
gctctttaggtgacttttatagaag

SEQ ID NO: 388220 - DNA, 25 bp, Artificial
  probe
  misc_feature (1)..(25): SEQ ID NO: 4676; WAN024AAJ; Start 74; Stop 98
ctctttaggtgacttttatagaagt

SEQ ID NO: 388221 - DNA, 25 bp, Artificial
  probe
  misc_feature (1)..(25): SEQ ID NO: 4676; WAN024AAJ; Start 80; Stop 104
aggtgacttttatagaagtaaagtt

SEQ ID NO: 388222 - DNA, 25 bp, Artificial
  probe
  misc_feature (1)..(25): SEQ ID NO: 4676; WAN024AAJ; Start 81; Stop 105
ggtgacttttatagaagtaaagttt

SEQ ID NO: 388223 - DNA, 25 bp, Artificial
  probe
  misc_feature (1)..(25): SEQ ID NO: 4676; WAN024AAJ; Start 79; Stop 103
taggtgacttttatagaagtaaagt

SEQ ID NO: 388224 - DNA, 25 bp, Artificial
  probe
  misc_feature (1)..(25): SEQ ID NO: 4677; WAN024AMV; Start 19; Stop 43
atcaacaataaacctatttcaaccc

SEQ ID NO: 388225 - DNA, 25 bp, Artificial
  probe
  misc_feature (1)..(25): SEQ ID NO: 4677; WAN024AMV; Start 9; Stop 33
ctacaatctcatcaacaataaacct

SEQ ID NO: 388226 - DNA, 25 bp, Artificial
  probe
  misc_feature (1)..(25): SEQ ID NO: 4677; WAN024AMV; Start 8; Stop 32
tctacaatctcatcaacaataaacc

SEQ ID NO: 388227 - DNA, 25 bp, Artificial
  probe
  misc_feature (1)..(25): SEQ ID NO: 4677; WAN024AMV; Start 18; Stop 42
catcaacaataaacctatttcaacc

SEQ ID NO: 388228 - DNA, 25 bp, Artificial
  probe
  misc_feature (1)..(25): SEQ ID NO: 4677; WAN024AMV; Start 1; Stop 25
tgaattatctacaatctcatcaaca

SEQ ID NO: 388229 - DNA, 25 bp, Artificial
  probe
  misc_feature (1)..(25): SEQ ID NO: 4677; WAN024AMV; Start 11; Stop 35
acaatctcatcaacaataaacctat

SEQ ID NO: 388230 - DNA, 25 bp, Artificial
  probe
  misc_feature (1)..(25): SEQ ID NO: 4677; WAN024AMV; Start 21; Stop 45
caacaataaacctatttcaacccca

SEQ ID NO: 388231 - DNA, 25 bp, Artificial
  probe
  misc_feature (1)..(25): SEQ ID NO: 4677; WAN024AMV; Start 20; Stop 44
tcaacaataaacctatttcaacccc

SEQ ID NO: 388232 - DNA, 25 bp, Artificial
  probe
  misc_feature (1)..(25): SEQ ID NO: 4677; WAN024AMV; Start 23; Stop 47
acaataaacctatttcaaccccatt

SEQ ID NO: 388233 - DNA, 25 bp, Artificial
  probe
  misc_feature (1)..(25): SEQ ID NO: 4677; WAN024AMV; Start 22; Stop 46
aacaataaacctatttcaaccccat

SEQ ID NO: 388234 - DNA, 25 bp, Artificial
  probe
  misc_feature (1)..(25): SEQ ID NO: 4677; WAN024AMV; Start 15; Stop 39
tctcatcaacaataaacctatttca

SEQ ID NO: 388235 - DNA, 25 bp, Artificial
  probe
  misc_feature (1)..(25): SEQ ID NO: 4677; WAN024AMV; Start 2; Stop 26
gaattatctacaatctcatcaacaa

SEQ ID NO: 388236 - DNA, 25 bp, Artificial
  probe
  misc_feature (1)..(25): SEQ ID NO: 4677; WAN024AMV; Start 10; Stop 34
tacaatctcatcaacaataaaccta

SEQ ID NO: 388237 - DNA, 25 bp, Artificial
  probe
  misc_feature (1)..(25): SEQ ID NO: 4677; WAN024AMV; Start 17; Stop 41
tcatcaacaataaacctatttcaac

SEQ ID NO: 388238 - DNA, 25 bp, Artificial
  probe
  misc_feature (1)..(25): SEQ ID NO: 4677; WAN024AMV; Start 28; Stop 52
aaacctatttcaaccccattatcta

SEQ ID NO: 388239 - DNA, 25 bp, Artificial
  probe
  misc_feature (1)..(25): SEQ ID NO: 4677; WAN024AMV; Start 27; Stop 51
taaacctatttcaaccccattatct

SEQ ID NO: 388240 - DNA, 25 bp, Artificial
  probe
  misc_feature (1)..(25): SEQ ID NO: 4677; WAN024AMV; Start 29; Stop 53
aacctatttcaaccccattatctat

SEQ ID NO: 388241 - DNA, 25 bp, Artificial
  probe
  misc_feature (1)..(25): SEQ ID NO: 4677; WAN024AMV; Start 38; Stop 62
caaccccattatctataggcgtatt

SEQ ID NO: 388242 - DNA, 25 bp, Artificial
  probe
  misc_feature (1)..(25): SEQ ID NO: 4677; WAN024AMV; Start 16; Stop 40
ctcatcaacaataaacctatttcaa

SEQ ID NO: 388243 - DNA, 25 bp, Artificial
  probe
  misc_feature (1)..(25): SEQ ID NO: 4677; WAN024AMV; Start 34; Stop 58
atttcaaccccattatctataggcg

SEQ ID NO: 388244 - DNA, 25 bp, Artificial
  probe
  misc_feature (1)..(25): SEQ ID NO: 4677; WAN024AMV; Start 40; Stop 64
accccattatctataggcgtatttt

SEQ ID NO: 388245 - DNA, 25 bp, Artificial
  probe
  misc_feature (1)..(25): SEQ ID NO: 4677; WAN024AMV; Start 39; Stop 63
aaccccattatctataggcgtattt

SEQ ID NO: 388246 - DNA, 25 bp, Artificial
  probe
  misc_feature (1)..(25): SEQ ID NO: 4677; WAN024AMV; Start 37; Stop 61
tcaaccccattatctataggcgtat

SEQ ID NO: 388247 - DNA, 25 bp, Artificial
  probe
  misc_feature (1)..(25): SEQ ID NO: 4677; WAN024AMV; Start 36; Stop 60
ttcaaccccattatctataggcgta

SEQ ID NO: 388248 - DNA, 25 bp, Artificial
  probe
  misc_feature (1)..(25): SEQ ID NO: 4677; WAN024AMV; Start 24; Stop 48
caataaacctatttcaaccccatta

SEQ ID NO: 388249 - DNA, 25 bp, Artificial
  probe
  misc_feature (1)..(25): SEQ ID NO: 4677; WAN024AMV; Start 12; Stop 36
caatctcatcaacaataaacctatt

SEQ ID NO: 388250 - DNA, 25 bp, Artificial
  probe
  misc_feature (1)..(25): SEQ ID NO: 4677; WAN024AMV; Start 7; Stop 31
atctacaatctcatcaacaataaac

SEQ ID NO: 388251 - DNA, 25 bp, Artificial
  probe
  misc_feature (1)..(25): SEQ ID NO: 4677; WAN024AMV; Start 35; Stop 59
tttcaaccccattatctataggcgt

SEQ ID NO: 388252 - DNA, 25 bp, Artificial
  probe
  misc_feature (1)..(25): SEQ ID NO: 4677; WAN024AMV; Start 30; Stop 54
acctatttcaaccccattatctata

SEQ ID NO: 388253 - DNA, 25 bp, Artificial
  probe
  misc_feature (1)..(25): SEQ ID NO: 4677; WAN024AMV; Start 26; Stop 50
ataaacctatttcaaccccattatc

SEQ ID NO: 388254 - DNA, 25 bp, Artificial
  probe
  misc_feature (1)..(25): SEQ ID NO: 4677; WAN024AMV; Start 14; Stop 38
atctcatcaacaataaacctatttc

SEQ ID NO: 388255 - DNA, 25 bp, Artificial
  probe
  misc_feature (1)..(25): SEQ ID NO: 4677; WAN024AMV; Start 33; Stop 57
tatttcaaccccattatctataggc

SEQ ID NO: 388256 - DNA, 25 bp, Artificial
  probe
  misc_feature (1)..(25): SEQ ID NO: 4677; WAN024AMV; Start 25; Stop 49
aataaacctatttcaaccccattat

SEQ ID NO: 388257 - DNA, 25 bp, Artificial
  probe
  misc_feature (1)..(25): SEQ ID NO: 4678; WAN0249J8; Start 8; Stop 32
ccctcctctttctttctattcgtaa

SEQ ID NO: 388258 - DNA, 25 bp, Artificial
  probe
  misc_feature (1)..(25): SEQ ID NO: 4678; WAN0249J8; Start 9; Stop 33
cctcctctttctttctattcgtaaa

SEQ ID NO: 388259 - DNA, 25 bp, Artificial
  probe
  misc_feature (1)..(25): SEQ ID NO: 4678; WAN0249J8; Start 4; Stop 28
attcccctcctctttctttctattc

SEQ ID NO: 388260 - DNA, 25 bp, Artificial
  probe
  misc_feature (1)..(25): SEQ ID NO: 4678; WAN0249J8; Start 3; Stop 27
aattcccctcctctttctttctatt

SEQ ID NO: 388261 - DNA, 25 bp, Artificial
  probe
  misc_feature (1)..(25): SEQ ID NO: 4678; WAN0249J8; Start 7; Stop 31
cccctcctctttctttctattcgta

SEQ ID NO: 388262 - DNA, 25 bp, Artificial
  probe
  misc_feature (1)..(25): SEQ ID NO: 4678; WAN0249J8; Start 44; Stop 68
aataggtctggtttgtatcctaagt

SEQ ID NO: 388263 - DNA, 25 bp, Artificial
  probe
  misc_feature (1)..(25): SEQ ID NO: 4678; WAN0249J8; Start 5; Stop 29
ttcccctcctctttctttctattcg

SEQ ID NO: 388264 - DNA, 25 bp, Artificial
  probe
  misc_feature (1)..(25): SEQ ID NO: 4678; WAN0249J8; Start 43; Stop 67
aaataggtctggtttgtatcctaag

SEQ ID NO: 388265 - DNA, 25 bp, Artificial
  probe
  misc_feature (1)..(25): SEQ ID NO: 4678; WAN0249J8; Start 6; Stop 30
tcccctcctctttctttctattcgt

SEQ ID NO: 388266 - DNA, 25 bp, Artificial
  probe
  misc_feature (1)..(25): SEQ ID NO: 4678; WAN0249J8; Start 10; Stop 34
ctcctctttctttctattcgtaaaa

SEQ ID NO: 388267 - DNA, 25 bp, Artificial
  probe
  misc_feature (1)..(25): SEQ ID NO: 4678; WAN0249J8; Start 2; Stop 26
gaattcccctcctctttctttctat

SEQ ID NO: 388268 - DNA, 25 bp, Artificial
  probe
  misc_feature (1)..(25): SEQ ID NO: 4678; WAN0249J8; Start 1; Stop 25
tgaattcccctcctctttctttcta

SEQ ID NO: 388269 - DNA, 25 bp, Artificial
  probe
  misc_feature (1)..(25): SEQ ID NO: 4678; WAN0249J8; Start 42; Stop 66
aaaataggtctggtttgtatcctaa

SEQ ID NO: 388270 - DNA, 25 bp, Artificial
  probe
  misc_feature (1)..(25): SEQ ID NO: 4678; WAN0249J8; Start 11; Stop 35
tcctctttctttctattcgtaaaag

SEQ ID NO: 388271 - DNA, 25 bp, Artificial
  probe
  misc_feature (1)..(25): SEQ ID NO: 4678; WAN0249J8; Start 12; Stop 36
cctctttctttctattcgtaaaaga

SEQ ID NO: 388272 - DNA, 25 bp, Artificial
  probe
  misc_feature (1)..(25): SEQ ID NO: 4678; WAN0249J8; Start 18; Stop 42
tctttctattcgtaaaagacaagaa

SEQ ID NO: 388273 - DNA, 25 bp, Artificial
  probe
  misc_feature (1)..(25): SEQ ID NO: 4678; WAN0249J8; Start 17; Stop 41
ttctttctattcgtaaaagacaaga

SEQ ID NO: 388274 - DNA, 25 bp, Artificial
  probe
  misc_feature (1)..(25): SEQ ID NO: 4678; WAN0249J8; Start 14; Stop 38
tctttctttctattcgtaaaagaca

SEQ ID NO: 388275 - DNA, 25 bp, Artificial
  probe
  misc_feature (1)..(25): SEQ ID NO: 4678; WAN0249J8; Start 13; Stop 37
ctctttctttctattcgtaaaagac

SEQ ID NO: 388276 - DNA, 25 bp, Artificial
  probe
  misc_feature (1)..(25): SEQ ID NO: 4678; WAN0249J8; Start 19; Stop 43
ctttctattcgtaaaagacaagaaa

SEQ ID NO: 388277 - DNA, 25 bp, Artificial
  probe
  misc_feature (1)..(25): SEQ ID NO: 4678; WAN0249J8; Start 16; Stop 40
tttctttctattcgtaaaagacaag

SEQ ID NO: 388278 - DNA, 25 bp, Artificial
  probe
  misc_feature (1)..(25): SEQ ID NO: 4678; WAN0249J8; Start 15; Stop 39
ctttctttctattcgtaaaagacaa

SEQ ID NO: 388279 - DNA, 25 bp, Artificial
  probe
  misc_feature (1)..(25): SEQ ID NO: 4678; WAN0249J8; Start 20; Stop 44
tttctattcgtaaaagacaagaaaa

SEQ ID NO: 388280 - DNA, 25 bp, Artificial
  probe
  misc_feature (1)..(25): SEQ ID NO: 4679; WAN024AIW; Start 153; Stop 177
tagcctcgtctctctttatcttact

SEQ ID NO: 388281 - DNA, 25 bp, Artificial
  probe
  misc_feature (1)..(25): SEQ ID NO: 4679; WAN024AIW; Start 152; Stop 176
gtagcctcgtctctctttatcttac

SEQ ID NO: 388282 - DNA, 25 bp, Artificial
  probe
  misc_feature (1)..(25): SEQ ID NO: 4679; WAN024AIW; Start 151; Stop 175
ggtagcctcgtctctctttatctta

SEQ ID NO: 388283 - DNA, 25 bp, Artificial
  probe
  misc_feature (1)..(25): SEQ ID NO: 4679; WAN024AIW; Start 155; Stop 179
gcctcgtctctctttatcttactga

SEQ ID NO: 388284 - DNA, 25 bp, Artificial
  probe
  misc_feature (1)..(25): SEQ ID NO: 4679; WAN024AIW; Start 154; Stop 178
agcctcgtctctctttatcttactg

SEQ ID NO: 388285 - DNA, 25 bp, Artificial
  probe
  misc_feature (1)..(25): SEQ ID NO: 4679; WAN024AIW; Start 156; Stop 180
cctcgtctctctttatcttactgac

SEQ ID NO: 388286 - DNA, 25 bp, Artificial
  probe
  misc_feature (1)..(25): SEQ ID NO: 4679; WAN024AIW; Start 150; Stop 174
cggtagcctcgtctctctttatctt

SEQ ID NO: 388287 - DNA, 25 bp, Artificial
  probe
  misc_feature (1)..(25): SEQ ID NO: 4679; WAN024AIW; Start 148; Stop 172
ctcggtagcctcgtctctctttatc

SEQ ID NO: 388288 - DNA, 25 bp, Artificial
  probe
  misc_feature (1)..(25): SEQ ID NO: 4679; WAN024AIW; Start 149; Stop 173
tcggtagcctcgtctctctttatct

SEQ ID NO: 388289 - DNA, 25 bp, Artificial
  probe
  misc_feature (1)..(25): SEQ ID NO: 4679; WAN024AIW; Start 68; Stop 92
tcattatatcaacaaaagaaagcgt

SEQ ID NO: 388290 - DNA, 25 bp, Artificial
  probe
  misc_feature (1)..(25): SEQ ID NO: 4679; WAN024AIW; Start 80; Stop 104
caaaagaaagcgttgtcaattattt

SEQ ID NO: 388291 - DNA, 25 bp, Artificial
  probe
  misc_feature (1)..(25): SEQ ID NO: 4679; WAN024AIW; Start 69; Stop 93
cattatatcaacaaaagaaagcgtt

SEQ ID NO: 388292 - DNA, 25 bp, Artificial
  probe
  misc_feature (1)..(25): SEQ ID NO: 4679; WAN024AIW; Start 67; Stop 91
ttcattatatcaacaaaagaaagcg

SEQ ID NO: 388293 - DNA, 25 bp, Artificial
  probe
  misc_feature (1)..(25): SEQ ID NO: 4679; WAN024AIW; Start 81; Stop 105
aaaagaaagcgttgtcaattatttt

SEQ ID NO: 388294 - DNA, 25 bp, Artificial
  probe
  misc_feature (1)..(25): SEQ ID NO: 4679; WAN024AIW; Start 79; Stop 103
acaaaagaaagcgttgtcaattatt

SEQ ID NO: 388295 - DNA, 25 bp, Artificial
  probe
  misc_feature (1)..(25): SEQ ID NO: 4679; WAN024AIW; Start 78; Stop 102
aacaaaagaaagcgttgtcaattat

SEQ ID NO: 388296 - DNA, 25 bp, Artificial
  probe
  misc_feature (1)..(25): SEQ ID NO: 4679; WAN024AIW; Start 74; Stop 98
tatcaacaaaagaaagcgttgtcaa

SEQ ID NO: 388297 - DNA, 25 bp, Artificial
  probe
  misc_feature (1)..(25): SEQ ID NO: 4679; WAN024AIW; Start 73; Stop 97
atatcaacaaaagaaagcgttgtca

SEQ ID NO: 388298 - DNA, 25 bp, Artificial
  probe
  misc_feature (1)..(25): SEQ ID NO: 4679; WAN024AIW; Start 77; Stop 101
caacaaaagaaagcgttgtcaatta

SEQ ID NO: 388299 - DNA, 25 bp, Artificial
  probe
  misc_feature (1)..(25): SEQ ID NO: 4679; WAN024AIW; Start 75; Stop 99
atcaacaaaagaaagcgttgtcaat

SEQ ID NO: 388300 - DNA, 25 bp, Artificial
  probe
  misc_feature (1)..(25): SEQ ID NO: 4679; WAN024AIW; Start 76; Stop 100
tcaacaaaagaaagcgttgtcaatt

SEQ ID NO: 388301 - DNA, 25 bp, Artificial
  probe
  misc_feature (1)..(25): SEQ ID NO: 4679; WAN024AIW; Start 72; Stop 96
tatatcaacaaaagaaagcgttgtc

SEQ ID NO: 388302 - DNA, 25 bp, Artificial
  probe
  misc_feature (1)..(25): SEQ ID NO: 4679; WAN024AIW; Start 71; Stop 95
ttatatcaacaaaagaaagcgttgt

SEQ ID NO: 388303 - DNA, 25 bp, Artificial
  probe
  misc_feature (1)..(25): SEQ ID NO: 4679; WAN024AIW; Start 70; Stop 94
attatatcaacaaaagaaagcgttg

SEQ ID NO: 388304 - DNA, 25 bp, Artificial
  probe
  misc_feature (1)..(25): SEQ ID NO: 4680; WAN024AEY; Start 3; Stop 27
acgcatagatatagttaattgaagc

SEQ ID NO: 388305 - DNA, 25 bp, Artificial
  probe
  misc_feature (1)..(25): SEQ ID NO: 4680; WAN024AEY; Start 4; Stop 28
cgcatagatatagttaattgaagct

SEQ ID NO: 388306 - DNA, 25 bp, Artificial
  probe
  misc_feature (1)..(25): SEQ ID NO: 4680; WAN024AEY; Start 1; Stop 25
tgacgcatagatatagttaattgaa

SEQ ID NO: 388307 - DNA, 25 bp, Artificial
  probe
  misc_feature (1)..(25): SEQ ID NO: 4680; WAN024AEY; Start 2; Stop 26
gacgcatagatatagttaattgaag

SEQ ID NO: 388308 - DNA, 25 bp, Artificial
  probe
  misc_feature (1)..(25): SEQ ID NO: 4680; WAN024AEY; Start 19; Stop 43
aattgaagctttgtttgaaatctga

SEQ ID NO: 388309 - DNA, 25 bp, Artificial
  probe
  misc_feature (1)..(25): SEQ ID NO: 4680; WAN024AEY; Start 20; Stop 44
attgaagctttgtttgaaatctgat

SEQ ID NO: 388310 - DNA, 25 bp, Artificial
  probe
  misc_feature (1)..(25): SEQ ID NO: 4680; WAN024AEY; Start 22; Stop 46
tgaagctttgtttgaaatctgataa

SEQ ID NO: 388311 - DNA, 25 bp, Artificial
  probe
  misc_feature (1)..(25): SEQ ID NO: 4680; WAN024AEY; Start 21; Stop 45
ttgaagctttgtttgaaatctgata

SEQ ID NO: 388312 - DNA, 25 bp, Artificial
  probe
  misc_feature (1)..(25): SEQ ID NO: 4680; WAN024AEY; Start 18; Stop 42
taattgaagctttgtttgaaatctg

SEQ ID NO: 388313 - DNA, 25 bp, Artificial
  probe
  misc_feature (1)..(25): SEQ ID NO: 4680; WAN024AEY; Start 23; Stop 47
gaagctttgtttgaaatctgataaa

SEQ ID NO: 388314 - DNA, 25 bp, Artificial
  probe
  misc_feature (1)..(25): SEQ ID NO: 4680; WAN024AEY; Start 15; Stop 39
agttaattgaagctttgtttgaaat

SEQ ID NO: 388315 - DNA, 25 bp, Artificial
  probe
  misc_feature (1)..(25): SEQ ID NO: 4680; WAN024AEY; Start 16; Stop 40
gttaattgaagctttgtttgaaatc

SEQ ID NO: 388316 - DNA, 25 bp, Artificial
  probe
  misc_feature (1)..(25): SEQ ID NO: 4680; WAN024AEY; Start 17; Stop 41
ttaattgaagctttgtttgaaatct

SEQ ID NO: 388317 - DNA, 25 bp, Artificial
  probe
  misc_feature (1)..(25): SEQ ID NO: 4680; WAN024AEY; Start 25; Stop 49
agctttgtttgaaatctgataaaat

SEQ ID NO: 388318 - DNA, 25 bp, Artificial
  probe
  misc_feature (1)..(25): SEQ ID NO: 4680; WAN024AEY; Start 14; Stop 38
tagttaattgaagctttgtttgaaa

SEQ ID NO: 388319 - DNA, 25 bp, Artificial
  probe
  misc_feature (1)..(25): SEQ ID NO: 4680; WAN024AEY; Start 5; Stop 29
gcatagatatagttaattgaagctt

SEQ ID NO: 388320 - DNA, 25 bp, Artificial
  probe
  misc_feature (1)..(25): SEQ ID NO: 4680; WAN024AEY; Start 13; Stop 37
atagttaattgaagctttgtttgaa

SEQ ID NO: 388321 - DNA, 25 bp, Artificial
  probe
  misc_feature (1)..(25): SEQ ID NO: 4680; WAN024AEY; Start 12; Stop 36
tatagttaattgaagctttgtttga

SEQ ID NO: 388322 - DNA, 25 bp, Artificial
  probe
  misc_feature (1)..(25): SEQ ID NO: 4680; WAN024AEY; Start 24; Stop 48
aagctttgtttgaaatctgataaaa

SEQ ID NO: 388323 - DNA, 25 bp, Artificial
  probe
  misc_feature (1)..(25): SEQ ID NO: 4681; WAN024APP; Start 29; Stop 53
ctaccacacctagacattcaaagac

SEQ ID NO: 388324 - DNA, 25 bp, Artificial
  probe
  misc_feature (1)..(25): SEQ ID NO: 4681; WAN024APP; Start 30; Stop 54
taccacacctagacattcaaagaca

SEQ ID NO: 388325 - DNA, 25 bp, Artificial
  probe
  misc_feature (1)..(25): SEQ ID NO: 4681; WAN024APP; Start 32; Stop 56
ccacacctagacattcaaagacaag

SEQ ID NO: 388326 - DNA, 25 bp, Artificial
  probe
  misc_feature (1)..(25): SEQ ID NO: 4681; WAN024APP; Start 36; Stop 60
acctagacattcaaagacaaggaaa

SEQ ID NO: 388327 - DNA, 25 bp, Artificial
  probe
  misc_feature (1)..(25): SEQ ID NO: 4681; WAN024APP; Start 31; Stop 55
accacacctagacattcaaagacaa

SEQ ID NO: 388328 - DNA, 25 bp, Artificial
  probe
  misc_feature (1)..(25): SEQ ID NO: 4681; WAN024APP; Start 35; Stop 59
cacctagacattcaaagacaaggaa

SEQ ID NO: 388329 - DNA, 25 bp, Artificial
  probe
  misc_feature (1)..(25): SEQ ID NO: 4681; WAN024APP; Start 28; Stop 52
gctaccacacctagacattcaaaga

SEQ ID NO: 388330 - DNA, 25 bp, Artificial
  probe
  misc_feature (1)..(25): SEQ ID NO: 4681; WAN024APP; Start 37; Stop 61
cctagacattcaaagacaaggaaat

SEQ ID NO: 388331 - DNA, 25 bp, Artificial
  probe
  misc_feature (1)..(25): SEQ ID NO: 4681; WAN024APP; Start 33; Stop 57
cacacctagacattcaaagacaagg

SEQ ID NO: 388332 - DNA, 25 bp, Artificial
  probe
  misc_feature (1)..(25): SEQ ID NO: 4681; WAN024APP; Start 34; Stop 58
acacctagacattcaaagacaagga

SEQ ID NO: 388333 - DNA, 25 bp, Artificial
  probe
  misc_feature (1)..(25): SEQ ID NO: 4681; WAN024APP; Start 40; Stop 64
agacattcaaagacaaggaaataaa

SEQ ID NO: 388334 - DNA, 25 bp, Artificial
  probe
  misc_feature (1)..(25): SEQ ID NO: 4681; WAN024APP; Start 26; Stop 50
aagctaccacacctagacattcaaa

SEQ ID NO: 388335 - DNA, 25 bp, Artificial
  probe
  misc_feature (1)..(25): SEQ ID NO: 4681; WAN024APP; Start 25; Stop 49
aaagctaccacacctagacattcaa

SEQ ID NO: 388336 - DNA, 25 bp, Artificial
  probe
  misc_feature (1)..(25): SEQ ID NO: 4681; WAN024APP; Start 41; Stop 65
gacattcaaagacaaggaaataaag

SEQ ID NO: 388337 - DNA, 25 bp, Artificial
  probe
  misc_feature (1)..(25): SEQ ID NO: 4681; WAN024APP; Start 27; Stop 51
agctaccacacctagacattcaaag

SEQ ID NO: 388338 - DNA, 25 bp, Artificial
  probe
  misc_feature (1)..(25): SEQ ID NO: 4681; WAN024APP; Start 38; Stop 62
ctagacattcaaagacaaggaaata

SEQ ID NO: 388339 - DNA, 25 bp, Artificial
  probe
  misc_feature (1)..(25): SEQ ID NO: 4681; WAN024APP; Start 1; Stop 25
tgactcgaatctatcagaatgtaaa

SEQ ID NO: 388340 - DNA, 25 bp, Artificial
  probe
  misc_feature (1)..(25): SEQ ID NO: 4681; WAN024APP; Start 39; Stop 63
tagacattcaaagacaaggaaataa

SEQ ID NO: 388341 - DNA, 25 bp, Artificial
  probe
  misc_feature (1)..(25): SEQ ID NO: 4681; WAN024APP; Start 24; Stop 48
aaaagctaccacacctagacattca

SEQ ID NO: 388342 - DNA, 25 bp, Artificial
  probe
  misc_feature (1)..(25): SEQ ID NO: 4681; WAN024APP; Start 2; Stop 26
gactcgaatctatcagaatgtaaaa

SEQ ID NO: 388343 - DNA, 25 bp, Artificial
  probe
  misc_feature (1)..(25): SEQ ID NO: 4682; WAN0249QI; Start 46; Stop 70
agatggctaacttcattatagacct

SEQ ID NO: 388344 - DNA, 25 bp, Artificial
  probe
  misc_feature (1)..(25): SEQ ID NO: 4682; WAN0249QI; Start 47; Stop 71
gatggctaacttcattatagacctt

SEQ ID NO: 388345 - DNA, 25 bp, Artificial
  probe
  misc_feature (1)..(25): SEQ ID NO: 4682; WAN0249QI; Start 45; Stop 69
tagatggctaacttcattatagacc

SEQ ID NO: 388346 - DNA, 25 bp, Artificial
  probe
  misc_feature (1)..(25): SEQ ID NO: 4682; WAN0249QI; Start 38; Stop 62
ttgatactagatggctaacttcatt

SEQ ID NO: 388347 - DNA, 25 bp, Artificial
  probe
  misc_feature (1)..(25): SEQ ID NO: 4682; WAN0249QI; Start 50; Stop 74
ggctaacttcattatagacctttca

SEQ ID NO: 388348 - DNA, 25 bp, Artificial
  probe
  misc_feature (1)..(25): SEQ ID NO: 4682; WAN0249QI; Start 49; Stop 73
tggctaacttcattatagacctttc

SEQ ID NO: 388349 - DNA, 25 bp, Artificial
  probe
  misc_feature (1)..(25): SEQ ID NO: 4682; WAN0249QI; Start 39; Stop 63
tgatactagatggctaacttcatta

SEQ ID NO: 388350 - DNA, 25 bp, Artificial
  probe
  misc_feature (1)..(25): SEQ ID NO: 4682; WAN0249QI; Start 43; Stop 67
actagatggctaacttcattataga

SEQ ID NO: 388351 - DNA, 25 bp, Artificial
  probe
  misc_feature (1)..(25): SEQ ID NO: 4682; WAN0249QI; Start 48; Stop 72
atggctaacttcattatagaccttt

SEQ ID NO: 388352 - DNA, 25 bp, Artificial
  probe
  misc_feature (1)..(25): SEQ ID NO: 4682; WAN0249QI; Start 130; Stop 154
gctagaatgtagttagtgtataagg

SEQ ID NO: 388353 - DNA, 25 bp, Artificial
  probe
  misc_feature (1)..(25): SEQ ID NO: 4682; WAN0249QI; Start 51; Stop 75
gctaacttcattatagacctttcag

SEQ ID NO: 388354 - DNA, 25 bp, Artificial
  probe
  misc_feature (1)..(25): SEQ ID NO: 4682; WAN0249QI; Start 44; Stop 68
ctagatggctaacttcattatagac

SEQ ID NO: 388355 - DNA, 25 bp, Artificial
  probe
  misc_feature (1)..(25): SEQ ID NO: 4682; WAN0249QI; Start 55; Stop 79
acttcattatagacctttcagaact

SEQ ID NO: 388356 - DNA, 25 bp, Artificial
  probe
  misc_feature (1)..(25): SEQ ID NO: 4682; WAN0249QI; Start 134; Stop 158
gaatgtagttagtgtataaggttca

SEQ ID NO: 388357 - DNA, 25 bp, Artificial
  probe
  misc_feature (1)..(25): SEQ ID NO: 4682; WAN0249QI; Start 37; Stop 61
tttgatactagatggctaacttcat

SEQ ID NO: 388358 - DNA, 25 bp, Artificial
  probe
  misc_feature (1)..(25): SEQ ID NO: 4682; WAN0249QI; Start 133; Stop 157
agaatgtagttagtgtataaggttc

SEQ ID NO: 388359 - DNA, 25 bp, Artificial
  probe
  misc_feature (1)..(25): SEQ ID NO: 4682; WAN0249QI; Start 54; Stop 78
aacttcattatagacctttcagaac

SEQ ID NO: 388360 - DNA, 25 bp, Artificial
  probe
  misc_feature (1)..(25): SEQ ID NO: 4682; WAN0249QI; Start 40; Stop 64
gatactagatggctaacttcattat

SEQ ID NO: 388361 - DNA, 25 bp, Artificial
  probe
  misc_feature (1)..(25): SEQ ID NO: 4682; WAN0249QI; Start 12; Stop 36
ctagttcataagagctagtcggttt

SEQ ID NO: 388362 - DNA, 25 bp, Artificial
  probe
  misc_feature (1)..(25): SEQ ID NO: 4682; WAN0249QI; Start 129; Stop 153
tgctagaatgtagttagtgtataag

SEQ ID NO: 388363 - DNA, 25 bp, Artificial
  probe
  misc_feature (1)..(25): SEQ ID NO: 4682; WAN0249QI; Start 136; Stop 160
atgtagttagtgtataaggttcatt

SEQ ID NO: 388364 - DNA, 25 bp, Artificial
  probe
  misc_feature (1)..(25): SEQ ID NO: 4682; WAN0249QI; Start 135; Stop 159
aatgtagttagtgtataaggttcat

SEQ ID NO: 388365 - DNA, 25 bp, Artificial
  probe
  misc_feature (1)..(25): SEQ ID NO: 4682; WAN0249QI; Start 146; Stop 170
tgtataaggttcattagaacaccaa

SEQ ID NO: 388366 - DNA, 25 bp, Artificial
  probe
  misc_feature (1)..(25): SEQ ID NO: 4682; WAN0249QI; Start 3; Stop 27
agaaatcgactagttcataagagct

SEQ ID NO: 388367 - DNA, 25 bp, Artificial
  probe
  misc_feature (1)..(25): SEQ ID NO: 4682; WAN0249QI; Start 2; Stop 26
gagaaatcgactagttcataagagc

SEQ ID NO: 388368 - DNA, 25 bp, Artificial
  probe
  misc_feature (1)..(25): SEQ ID NO: 4682; WAN0249QI; Start 140; Stop 164
agttagtgtataaggttcattagaa

SEQ ID NO: 388369 - DNA, 25 bp, Artificial
  probe
  misc_feature (1)..(25): SEQ ID NO: 4682; WAN0249QI; Start 52; Stop 76
ctaacttcattatagacctttcaga

SEQ ID NO: 388370 - DNA, 25 bp, Artificial
  probe
  misc_feature (1)..(25): SEQ ID NO: 4682; WAN0249QI; Start 13; Stop 37
tagttcataagagctagtcggtttt

SEQ ID NO: 388371 - DNA, 25 bp, Artificial
  probe
  misc_feature (1)..(25): SEQ ID NO: 4682; WAN0249QI; Start 42; Stop 66
tactagatggctaacttcattatag

SEQ ID NO: 388372 - DNA, 25 bp, Artificial
  probe
  misc_feature (1)..(25): SEQ ID NO: 4682; WAN0249QI; Start 4; Stop 28
gaaatcgactagttcataagagcta

SEQ ID NO: 388373 - DNA, 25 bp, Artificial
  probe
  misc_feature (1)..(25): SEQ ID NO: 4682; WAN0249QI; Start 131; Stop 155
ctagaatgtagttagtgtataaggt

SEQ ID NO: 388374 - DNA, 25 bp, Artificial
  probe
  misc_feature (1)..(25): SEQ ID NO: 4682; WAN0249QI; Start 128; Stop 152
atgctagaatgtagttagtgtataa

SEQ ID NO: 388375 - DNA, 25 bp, Artificial
  probe
  misc_feature (1)..(25): SEQ ID NO: 4682; WAN0249QI; Start 124; Stop 148
ttatatgctagaatgtagttagtgt

SEQ ID NO: 388376 - DNA, 25 bp, Artificial
  probe
  misc_feature (1)..(25): SEQ ID NO: 4683; WAN0249HD; Start 85; Stop 109
ttgactattccagtatagcacactt

SEQ ID NO: 388377 - DNA, 25 bp, Artificial
  probe
  misc_feature (1)..(25): SEQ ID NO: 4683; WAN0249HD; Start 84; Stop 108
attgactattccagtatagcacact

SEQ ID NO: 388378 - DNA, 25 bp, Artificial
  probe
  misc_feature (1)..(25): SEQ ID NO: 4683; WAN0249HD; Start 83; Stop 107
tattgactattccagtatagcacac

SEQ ID NO: 388379 - DNA, 25 bp, Artificial
  probe
  misc_feature (1)..(25): SEQ ID NO: 4683; WAN0249HD; Start 82; Stop 106
ttattgactattccagtatagcaca

SEQ ID NO: 388380 - DNA, 25 bp, Artificial
  probe
  misc_feature (1)..(25): SEQ ID NO: 4683; WAN0249HD; Start 86; Stop 110
tgactattccagtatagcacacttt

SEQ ID NO: 388381 - DNA, 25 bp, Artificial
  probe
  misc_feature (1)..(25): SEQ ID NO: 4683; WAN0249HD; Start 69; Stop 93
atctccccgtgttttattgactatt

SEQ ID NO: 388382 - DNA, 25 bp, Artificial
  probe
  misc_feature (1)..(25): SEQ ID NO: 4683; WAN0249HD; Start 67; Stop 91
ctatctccccgtgttttattgacta

SEQ ID NO: 388383 - DNA, 25 bp, Artificial
  probe
  misc_feature (1)..(25): SEQ ID NO: 4683; WAN0249HD; Start 70; Stop 94
tctccccgtgttttattgactattc

SEQ ID NO: 388384 - DNA, 25 bp, Artificial
  probe
  misc_feature (1)..(25): SEQ ID NO: 4683; WAN0249HD; Start 68; Stop 92
tatctccccgtgttttattgactat

SEQ ID NO: 388385 - DNA, 25 bp, Artificial
  probe
  misc_feature (1)..(25): SEQ ID NO: 4683; WAN0249HD; Start 51; Stop 75
aaaacactcttcacaactatctccc

SEQ ID NO: 388386 - DNA, 25 bp, Artificial
  probe
  misc_feature (1)..(25): SEQ ID NO: 4683; WAN0249HD; Start 65; Stop 89
aactatctccccgtgttttattgac

SEQ ID NO: 388387 - DNA, 25 bp, Artificial
  probe
  misc_feature (1)..(25): SEQ ID NO: 4683; WAN0249HD; Start 71; Stop 95
ctccccgtgttttattgactattcc

SEQ ID NO: 388388 - DNA, 25 bp, Artificial
  probe
  misc_feature (1)..(25): SEQ ID NO: 4683; WAN0249HD; Start 66; Stop 90
actatctccccgtgttttattgact

SEQ ID NO: 388389 - DNA, 25 bp, Artificial
  probe
  misc_feature (1)..(25): SEQ ID NO: 4683; WAN0249HD; Start 64; Stop 88
caactatctccccgtgttttattga

SEQ ID NO: 388390 - DNA, 25 bp, Artificial
  probe
  misc_feature (1)..(25): SEQ ID NO: 4683; WAN0249HD; Start 73; Stop 97
ccccgtgttttattgactattccag

SEQ ID NO: 388391 - DNA, 25 bp, Artificial
  probe
  misc_feature (1)..(25): SEQ ID NO: 4683; WAN0249HD; Start 74; Stop 98
cccgtgttttattgactattccagt

SEQ ID NO: 388392 - DNA, 25 bp, Artificial
  probe
  misc_feature (1)..(25): SEQ ID NO: 4683; WAN0249HD; Start 75; Stop 99
ccgtgttttattgactattccagta

SEQ ID NO: 388393 - DNA, 25 bp, Artificial
  probe
  misc_feature (1)..(25): SEQ ID NO: 4683; WAN0249HD; Start 72; Stop 96
tccccgtgttttattgactattcca

SEQ ID NO: 388394 - DNA, 25 bp, Artificial
  probe
  misc_feature (1)..(25): SEQ ID NO: 4683; WAN0249HD; Start 63; Stop 87
acaactatctccccgtgttttattg

SEQ ID NO: 388395 - DNA, 25 bp, Artificial
  probe
  misc_feature (1)..(25): SEQ ID NO: 4683; WAN0249HD; Start 81; Stop 105
tttattgactattccagtatagcac

SEQ ID NO: 388396 - DNA, 25 bp, Artificial
  probe
  misc_feature (1)..(25): SEQ ID NO: 4683; WAN0249HD; Start 52; Stop 76
aaacactcttcacaactatctcccc

SEQ ID NO: 388397 - DNA, 25 bp, Artificial
  probe
  misc_feature (1)..(25): SEQ ID NO: 4683; WAN0249HD; Start 87; Stop 111
gactattccagtatagcacactttt

SEQ ID NO: 388398 - DNA, 25 bp, Artificial
  probe
  misc_feature (1)..(25): SEQ ID NO: 4683; WAN0249HD; Start 62; Stop 86
cacaactatctccccgtgttttatt

SEQ ID NO: 388399 - DNA, 25 bp, Artificial
  probe
  misc_feature (1)..(25): SEQ ID NO: 4683; WAN0249HD; Start 92; Stop 116
ttccagtatagcacacttttagaat

SEQ ID NO: 388400 - DNA, 25 bp, Artificial
  probe
  misc_feature (1)..(25): SEQ ID NO: 4683; WAN0249HD; Start 91; Stop 115
attccagtatagcacacttttagaa

SEQ ID NO: 388401 - DNA, 25 bp, Artificial
  probe
  misc_feature (1)..(25): SEQ ID NO: 4683; WAN0249HD; Start 93; Stop 117
tccagtatagcacacttttagaatt

SEQ ID NO: 388402 - DNA, 25 bp, Artificial
  probe
  misc_feature (1)..(25): SEQ ID NO: 4683; WAN0249HD; Start 61; Stop 85
tcacaactatctccccgtgttttat

SEQ ID NO: 388403 - DNA, 25 bp, Artificial
  probe
  misc_feature (1)..(25): SEQ ID NO: 4683; WAN0249HD; Start 60; Stop 84
ttcacaactatctccccgtgtttta

SEQ ID NO: 388404 - DNA, 25 bp, Artificial
  probe
  misc_feature (1)..(25): SEQ ID NO: 4683; WAN0249HD; Start 88; Stop 112
actattccagtatagcacactttta

SEQ ID NO: 388405 - DNA, 25 bp, Artificial
  probe
  misc_feature (1)..(25): SEQ ID NO: 4683; WAN0249HD; Start 90; Stop 114
tattccagtatagcacacttttaga

SEQ ID NO: 388406 - DNA, 25 bp, Artificial
  probe
  misc_feature (1)..(25): SEQ ID NO: 4683; WAN0249HD; Start 76; Stop 100
cgtgttttattgactattccagtat

SEQ ID NO: 388407 - DNA, 25 bp, Artificial
  probe
  misc_feature (1)..(25): SEQ ID NO: 4683; WAN0249HD; Start 3; Stop 27
agataaaacgtgctgtcggtaaaag

SEQ ID NO: 388408 - DNA, 25 bp, Artificial
  probe
  misc_feature (1)..(25): SEQ ID NO: 4683; WAN0249HD; Start 2; Stop 26
gagataaaacgtgctgtcggtaaaa

SEQ ID NO: 388409 - DNA, 25 bp, Artificial
  probe
  misc_feature (1)..(25): SEQ ID NO: 4684; WAN024ADG; Start 35; Stop 59
ttggttgtcacattccagttcataa

SEQ ID NO: 388410 - DNA, 25 bp, Artificial
  probe
  misc_feature (1)..(25): SEQ ID NO: 4684; WAN024ADG; Start 37; Stop 61
ggttgtcacattccagttcataaat

SEQ ID NO: 388411 - DNA, 25 bp, Artificial
  probe
  misc_feature (1)..(25): SEQ ID NO: 4684; WAN024ADG; Start 40; Stop 64
tgtcacattccagttcataaatcaa

SEQ ID NO: 388412 - DNA, 25 bp, Artificial
  probe
  misc_feature (1)..(25): SEQ ID NO: 4684; WAN024ADG; Start 39; Stop 63
ttgtcacattccagttcataaatca

SEQ ID NO: 388413 - DNA, 25 bp, Artificial
  probe
  misc_feature (1)..(25): SEQ ID NO: 4684; WAN024ADG; Start 38; Stop 62
gttgtcacattccagttcataaatc

SEQ ID NO: 388414 - DNA, 25 bp, Artificial
  probe
  misc_feature (1)..(25): SEQ ID NO: 4684; WAN024ADG; Start 41; Stop 65
gtcacattccagttcataaatcaaa

SEQ ID NO: 388415 - DNA, 25 bp, Artificial
  probe
  misc_feature (1)..(25): SEQ ID NO: 4684; WAN024ADG; Start 36; Stop 60
tggttgtcacattccagttcataaa

SEQ ID NO: 388416 - DNA, 25 bp, Artificial
  probe
  misc_feature (1)..(25): SEQ ID NO: 4684; WAN024ADG; Start 34; Stop 58
tttggttgtcacattccagttcata

SEQ ID NO: 388417 - DNA, 25 bp, Artificial
  probe
  misc_feature (1)..(25): SEQ ID NO: 4684; WAN024ADG; Start 65; Stop 89
aaatgtgacggtttcattgtatatg

SEQ ID NO: 388418 - DNA, 25 bp, Artificial
  probe
  misc_feature (1)..(25): SEQ ID NO: 4684; WAN024ADG; Start 66; Stop 90
aatgtgacggtttcattgtatatga

SEQ ID NO: 388419 - DNA, 25 bp, Artificial
  probe
  misc_feature (1)..(25): SEQ ID NO: 4684; WAN024ADG; Start 78; Stop 102
tcattgtatatgaaaccgcttcaaa

SEQ ID NO: 388420 - DNA, 25 bp, Artificial
  probe
  misc_feature (1)..(25): SEQ ID NO: 4684; WAN024ADG; Start 42; Stop 66
tcacattccagttcataaatcaaaa

SEQ ID NO: 388421 - DNA, 25 bp, Artificial
  probe
  misc_feature (1)..(25): SEQ ID NO: 4684; WAN024ADG; Start 149; Stop 173
aaaatcaagctctaatggagggaaa

SEQ ID NO: 388422 - DNA, 25 bp, Artificial
  probe
  misc_feature (1)..(25): SEQ ID NO: 4684; WAN024ADG; Start 148; Stop 172
gaaaatcaagctctaatggagggaa

SEQ ID NO: 388423 - DNA, 25 bp, Artificial
  probe
  misc_feature (1)..(25): SEQ ID NO: 4684; WAN024ADG; Start 145; Stop 169
agtgaaaatcaagctctaatggagg

SEQ ID NO: 388424 - DNA, 25 bp, Artificial
  probe
  misc_feature (1)..(25): SEQ ID NO: 4684; WAN024ADG; Start 33; Stop 57
ttttggttgtcacattccagttcat

SEQ ID NO: 388425 - DNA, 25 bp, Artificial
  probe
  misc_feature (1)..(25): SEQ ID NO: 4684; WAN024ADG; Start 143; Stop 167
ctagtgaaaatcaagctctaatgga

SEQ ID NO: 388426 - DNA, 25 bp, Artificial
  probe
  misc_feature (1)..(25): SEQ ID NO: 4684; WAN024ADG; Start 144; Stop 168
tagtgaaaatcaagctctaatggag

SEQ ID NO: 388427 - DNA, 25 bp, Artificial
  probe
  misc_feature (1)..(25): SEQ ID NO: 4684; WAN024ADG; Start 30; Stop 54
ttgttttggttgtcacattccagtt

SEQ ID NO: 388428 - DNA, 25 bp, Artificial
  probe
  misc_feature (1)..(25): SEQ ID NO: 4684; WAN024ADG; Start 146; Stop 170
gtgaaaatcaagctctaatggaggg

SEQ ID NO: 388429 - DNA, 25 bp, Artificial
  probe
  misc_feature (1)..(25): SEQ ID NO: 4684; WAN024ADG; Start 147; Stop 171
tgaaaatcaagctctaatggaggga

SEQ ID NO: 388430 - DNA, 25 bp, Artificial
  probe
  misc_feature (1)..(25): SEQ ID NO: 4684; WAN024ADG; Start 19; Stop 43
aattgacggtcttgttttggttgtc

SEQ ID NO: 388431 - DNA, 25 bp, Artificial
  probe
  misc_feature (1)..(25): SEQ ID NO: 4684; WAN024ADG; Start 28; Stop 52
tcttgttttggttgtcacattccag

SEQ ID NO: 388432 - DNA, 25 bp, Artificial
  probe
  misc_feature (1)..(25): SEQ ID NO: 4684; WAN024ADG; Start 26; Stop 50
ggtcttgttttggttgtcacattcc

SEQ ID NO: 388433 - DNA, 25 bp, Artificial
  probe
  misc_feature (1)..(25): SEQ ID NO: 4684; WAN024ADG; Start 32; Stop 56
gttttggttgtcacattccagttca

SEQ ID NO: 388434 - DNA, 25 bp, Artificial
  probe
  misc_feature (1)..(25): SEQ ID NO: 4684; WAN024ADG; Start 31; Stop 55
tgttttggttgtcacattccagttc

SEQ ID NO: 388435 - DNA, 25 bp, Artificial
  probe
  misc_feature (1)..(25): SEQ ID NO: 4684; WAN024ADG; Start 29; Stop 53
cttgttttggttgtcacattccagt

SEQ ID NO: 388436 - DNA, 25 bp, Artificial
  probe
  misc_feature (1)..(25): SEQ ID NO: 4684; WAN024ADG; Start 27; Stop 51
gtcttgttttggttgtcacattcca

SEQ ID NO: 388437 - DNA, 25 bp, Artificial
  probe
  misc_feature (1)..(25): SEQ ID NO: 4684; WAN024ADG; Start 25; Stop 49
cggtcttgttttggttgtcacattc

SEQ ID NO: 388438 - DNA, 25 bp, Artificial
  probe
  misc_feature (1)..(25): SEQ ID NO: 4684; WAN024ADG; Start 79; Stop 103
cattgtatatgaaaccgcttcaaaa

SEQ ID NO: 388439 - DNA, 25 bp, Artificial
  probe
  misc_feature (1)..(25): SEQ ID NO: 4684; WAN024ADG; Start 64; Stop 88
aaaatgtgacggtttcattgtatat

SEQ ID NO: 388440 - DNA, 25 bp, Artificial
  probe
  misc_feature (1)..(25): SEQ ID NO: 4684; WAN024ADG; Start 142; Stop 166
actagtgaaaatcaagctctaatgg

SEQ ID NO: 388441 - DNA, 25 bp, Artificial
  probe
  misc_feature (1)..(25): SEQ ID NO: 4684; WAN024ADG; Start 24; Stop 48
acggtcttgttttggttgtcacatt

SEQ ID NO: 388442 - DNA, 25 bp, Artificial
  probe
  misc_feature (1)..(25): SEQ ID NO: 4685; WAN0249H5; Start 77; Stop 101
tacacaaaccttaatcttatgcgtt

SEQ ID NO: 388443 - DNA, 25 bp, Artificial
  probe
  misc_feature (1)..(25): SEQ ID NO: 4685; WAN0249H5; Start 76; Stop 100
gtacacaaaccttaatcttatgcgt

SEQ ID NO: 388444 - DNA, 25 bp, Artificial
  probe
  misc_feature (1)..(25): SEQ ID NO: 4685; WAN0249H5; Start 75; Stop 99
ggtacacaaaccttaatcttatgcg

SEQ ID NO: 388445 - DNA, 25 bp, Artificial
  probe
  misc_feature (1)..(25): SEQ ID NO: 4685; WAN0249H5; Start 61; Stop 85
aacgtataagaacaggtacacaaac

SEQ ID NO: 388446 - DNA, 25 bp, Artificial
  probe
  misc_feature (1)..(25): SEQ ID NO: 4685; WAN0249H5; Start 60; Stop 84
aaacgtataagaacaggtacacaaa

SEQ ID NO: 388447 - DNA, 25 bp, Artificial
  probe
  misc_feature (1)..(25): SEQ ID NO: 4685; WAN0249H5; Start 78; Stop 102
acacaaaccttaatcttatgcgttt

SEQ ID NO: 388448 - DNA, 25 bp, Artificial
  probe
  misc_feature (1)..(25): SEQ ID NO: 4685; WAN0249H5; Start 62; Stop 86
acgtataagaacaggtacacaaacc

SEQ ID NO: 388449 - DNA, 25 bp, Artificial
  probe
  misc_feature (1)..(25): SEQ ID NO: 4685; WAN0249H5; Start 92; Stop 116
cttatgcgttttgttatagtttcca

SEQ ID NO: 388450 - DNA, 25 bp, Artificial
  probe
  misc_feature (1)..(25): SEQ ID NO: 4685; WAN0249H5; Start 96; Stop 120
tgcgttttgttatagtttccataca

SEQ ID NO: 388451 - DNA, 25 bp, Artificial
  probe
  misc_feature (1)..(25): SEQ ID NO: 4685; WAN0249H5; Start 91; Stop 115
tcttatgcgttttgttatagtttcc

SEQ ID NO: 388452 - DNA, 25 bp, Artificial
  probe
  misc_feature (1)..(25): SEQ ID NO: 4685; WAN0249H5; Start 95; Stop 119
atgcgttttgttatagtttccatac

SEQ ID NO: 388453 - DNA, 25 bp, Artificial
  probe
  misc_feature (1)..(25): SEQ ID NO: 4685; WAN0249H5; Start 97; Stop 121
gcgttttgttatagtttccatacac

SEQ ID NO: 388454 - DNA, 25 bp, Artificial
  probe
  misc_feature (1)..(25): SEQ ID NO: 4685; WAN0249H5; Start 93; Stop 117
ttatgcgttttgttatagtttccat

SEQ ID NO: 388455 - DNA, 25 bp, Artificial
  probe
  misc_feature (1)..(25): SEQ ID NO: 4685; WAN0249H5; Start 83; Stop 107
aaccttaatcttatgcgttttgtta

SEQ ID NO: 388456 - DNA, 25 bp, Artificial
  probe
  misc_feature (1)..(25): SEQ ID NO: 4685; WAN0249H5; Start 84; Stop 108
accttaatcttatgcgttttgttat

SEQ ID NO: 388457 - DNA, 25 bp, Artificial
  probe
  misc_feature (1)..(25): SEQ ID NO: 4685; WAN0249H5; Start 98; Stop 122
cgttttgttatagtttccatacaca

SEQ ID NO: 388458 - DNA, 25 bp, Artificial
  probe
  misc_feature (1)..(25): SEQ ID NO: 4685; WAN0249H5; Start 59; Stop 83
aaaacgtataagaacaggtacacaa

SEQ ID NO: 388459 - DNA, 25 bp, Artificial
  probe
  misc_feature (1)..(25): SEQ ID NO: 4685; WAN0249H5; Start 79; Stop 103
cacaaaccttaatcttatgcgtttt

SEQ ID NO: 388460 - DNA, 25 bp, Artificial
  probe
  misc_feature (1)..(25): SEQ ID NO: 4685; WAN0249H5; Start 81; Stop 105
caaaccttaatcttatgcgttttgt

SEQ ID NO: 388461 - DNA, 25 bp, Artificial
  probe
  misc_feature (1)..(25): SEQ ID NO: 4685; WAN0249H5; Start 80; Stop 104
acaaaccttaatcttatgcgttttg

SEQ ID NO: 388462 - DNA, 25 bp, Artificial
  probe
  misc_feature (1)..(25): SEQ ID NO: 4685; WAN0249H5; Start 82; Stop 106
aaaccttaatcttatgcgttttgtt

SEQ ID NO: 388463 - DNA, 25 bp, Artificial
  probe
  misc_feature (1)..(25): SEQ ID NO: 4685; WAN0249H5; Start 90; Stop 114
atcttatgcgttttgttatagtttc

SEQ ID NO: 388464 - DNA, 25 bp, Artificial
  probe
  misc_feature (1)..(25): SEQ ID NO: 4685; WAN0249H5; Start 69; Stop 93
agaacaggtacacaaaccttaatct

SEQ ID NO: 388465 - DNA, 25 bp, Artificial
  probe
  misc_feature (1)..(25): SEQ ID NO: 4685; WAN0249H5; Start 94; Stop 118
tatgcgttttgttatagtttccata

SEQ ID NO: 388466 - DNA, 25 bp, Artificial
  probe
  misc_feature (1)..(25): SEQ ID NO: 4685; WAN0249H5; Start 63; Stop 87
cgtataagaacaggtacacaaacct

SEQ ID NO: 388467 - DNA, 25 bp, Artificial
  probe
  misc_feature (1)..(25): SEQ ID NO: 4685; WAN0249H5; Start 70; Stop 94
gaacaggtacacaaaccttaatctt

SEQ ID NO: 388468 - DNA, 25 bp, Artificial
  probe
  misc_feature (1)..(25): SEQ ID NO: 4685; WAN0249H5; Start 68; Stop 92
aagaacaggtacacaaaccttaatc

SEQ ID NO: 388469 - DNA, 25 bp, Artificial
  probe
  misc_feature (1)..(25): SEQ ID NO: 4685; WAN0249H5; Start 74; Stop 98
aggtacacaaaccttaatcttatgc

SEQ ID NO: 388470 - DNA, 25 bp, Artificial
  probe
  misc_feature (1)..(25): SEQ ID NO: 4685; WAN0249H5; Start 64; Stop 88
gtataagaacaggtacacaaacctt

SEQ ID NO: 388471 - DNA, 25 bp, Artificial
  probe
  misc_feature (1)..(25): SEQ ID NO: 4685; WAN0249H5; Start 89; Stop 113
aatcttatgcgttttgttatagttt

SEQ ID NO: 388472 - DNA, 25 bp, Artificial
  probe
  misc_feature (1)..(25): SEQ ID NO: 4685; WAN0249H5; Start 85; Stop 109
ccttaatcttatgcgttttgttata

SEQ ID NO: 388473 - DNA, 25 bp, Artificial
  probe
  misc_feature (1)..(25): SEQ ID NO: 4685; WAN0249H5; Start 71; Stop 95
aacaggtacacaaaccttaatctta

SEQ ID NO: 388474 - DNA, 25 bp, Artificial
  probe
  misc_feature (1)..(25): SEQ ID NO: 4685; WAN0249H5; Start 67; Stop 91
taagaacaggtacacaaaccttaat

SEQ ID NO: 388475 - DNA, 25 bp, Artificial
  probe
  misc_feature (1)..(25): SEQ ID NO: 4686; WAN0249S3; Start 90; Stop 114
ttgtcacatgaattgaatcgagttc

SEQ ID NO: 388476 - DNA, 25 bp, Artificial
  probe
  misc_feature (1)..(25): SEQ ID NO: 4686; WAN0249S3; Start 89; Stop 113
gttgtcacatgaattgaatcgagtt

SEQ ID NO: 388477 - DNA, 25 bp, Artificial
  probe
  misc_feature (1)..(25): SEQ ID NO: 4686; WAN0249S3; Start 96; Stop 120
catgaattgaatcgagttccaacta

SEQ ID NO: 388478 - DNA, 25 bp, Artificial
  probe
  misc_feature (1)..(25): SEQ ID NO: 4686; WAN0249S3; Start 94; Stop 118
cacatgaattgaatcgagttccaac

SEQ ID NO: 388479 - DNA, 25 bp, Artificial
  probe
  misc_feature (1)..(25): SEQ ID NO: 4686; WAN0249S3; Start 95; Stop 119
acatgaattgaatcgagttccaact

SEQ ID NO: 388480 - DNA, 25 bp, Artificial
  probe
  misc_feature (1)..(25): SEQ ID NO: 4686; WAN0249S3; Start 93; Stop 117
tcacatgaattgaatcgagttccaa

SEQ ID NO: 388481 - DNA, 25 bp, Artificial
  probe
  misc_feature (1)..(25): SEQ ID NO: 4686; WAN0249S3; Start 97; Stop 121
atgaattgaatcgagttccaactaa

SEQ ID NO: 388482 - DNA, 25 bp, Artificial
  probe
  misc_feature (1)..(25): SEQ ID NO: 4686; WAN0249S3; Start 92; Stop 116
gtcacatgaattgaatcgagttcca

SEQ ID NO: 388483 - DNA, 25 bp, Artificial
  probe
  misc_feature (1)..(25): SEQ ID NO: 4686; WAN0249S3; Start 91; Stop 115
tgtcacatgaattgaatcgagttcc

SEQ ID NO: 388484 - DNA, 25 bp, Artificial
  probe
  misc_feature (1)..(25): SEQ ID NO: 4686; WAN0249S3; Start 88; Stop 112
cgttgtcacatgaattgaatcgagt

SEQ ID NO: 388485 - DNA, 25 bp, Artificial
  probe
  misc_feature (1)..(25): SEQ ID NO: 4686; WAN0249S3; Start 87; Stop 111
acgttgtcacatgaattgaatcgag

SEQ ID NO: 388486 - DNA, 25 bp, Artificial
  probe
  misc_feature (1)..(25): SEQ ID NO: 4686; WAN0249S3; Start 86; Stop 110
cacgttgtcacatgaattgaatcga

SEQ ID NO: 388487 - DNA, 25 bp, Artificial
  probe
  misc_feature (1)..(25): SEQ ID NO: 4686; WAN0249S3; Start 85; Stop 109
tcacgttgtcacatgaattgaatcg

SEQ ID NO: 388488 - DNA, 25 bp, Artificial
  probe
  misc_feature (1)..(25): SEQ ID NO: 4686; WAN0249S3; Start 98; Stop 122
tgaattgaatcgagttccaactaaa

SEQ ID NO: 388489 - DNA, 25 bp, Artificial
  probe
  misc_feature (1)..(25): SEQ ID NO: 4686; WAN0249S3; Start 84; Stop 108
ttcacgttgtcacatgaattgaatc

SEQ ID NO: 388490 - DNA, 25 bp, Artificial
  probe
  misc_feature (1)..(25): SEQ ID NO: 4686; WAN0249S3; Start 117; Stop 141
actaaaatctgtaggaaactagccg

SEQ ID NO: 388491 - DNA, 25 bp, Artificial
  probe
  misc_feature (1)..(25): SEQ ID NO: 4686; WAN0249S3; Start 118; Stop 142
ctaaaatctgtaggaaactagccgc

SEQ ID NO: 388492 - DNA, 25 bp, Artificial
  probe
  misc_feature (1)..(25): SEQ ID NO: 4686; WAN0249S3; Start 116; Stop 140
aactaaaatctgtaggaaactagcc

SEQ ID NO: 388493 - DNA, 25 bp, Artificial
  probe
  misc_feature (1)..(25): SEQ ID NO: 4686; WAN0249S3; Start 119; Stop 143
taaaatctgtaggaaactagccgca

SEQ ID NO: 388494 - DNA, 25 bp, Artificial
  probe
  misc_feature (1)..(25): SEQ ID NO: 4686; WAN0249S3; Start 83; Stop 107
tttcacgttgtcacatgaattgaat

SEQ ID NO: 388495 - DNA, 25 bp, Artificial
  probe
  misc_feature (1)..(25): SEQ ID NO: 4686; WAN0249S3; Start 115; Stop 139
caactaaaatctgtaggaaactagc

SEQ ID NO: 388496 - DNA, 25 bp, Artificial
  probe
  misc_feature (1)..(25): SEQ ID NO: 4686; WAN0249S3; Start 108; Stop 132
cgagttccaactaaaatctgtagga

SEQ ID NO: 388497 - DNA, 25 bp, Artificial
  probe
  misc_feature (1)..(25): SEQ ID NO: 4686; WAN0249S3; Start 265; Stop 289
cgttgacgtagtttgaagagatttt

SEQ ID NO: 388498 - DNA, 25 bp, Artificial
  probe
  misc_feature (1)..(25): SEQ ID NO: 4686; WAN0249S3; Start 264; Stop 288
acgttgacgtagtttgaagagattt

SEQ ID NO: 388499 - DNA, 25 bp, Artificial
  probe
  misc_feature (1)..(25): SEQ ID NO: 4686; WAN0249S3; Start 107; Stop 131
tcgagttccaactaaaatctgtagg

SEQ ID NO: 388500 - DNA, 25 bp, Artificial
  probe
  misc_feature (1)..(25): SEQ ID NO: 4686; WAN0249S3; Start 267; Stop 291
ttgacgtagtttgaagagattttcg

SEQ ID NO: 388501 - DNA, 25 bp, Artificial
  probe
  misc_feature (1)..(25): SEQ ID NO: 4686; WAN0249S3; Start 104; Stop 128
gaatcgagttccaactaaaatctgt

SEQ ID NO: 388502 - DNA, 25 bp, Artificial
  probe
  misc_feature (1)..(25): SEQ ID NO: 4686; WAN0249S3; Start 103; Stop 127
tgaatcgagttccaactaaaatctg

SEQ ID NO: 388503 - DNA, 25 bp, Artificial
  probe
  misc_feature (1)..(25): SEQ ID NO: 4686; WAN0249S3; Start 263; Stop 287
gacgttgacgtagtttgaagagatt

SEQ ID NO: 388504 - DNA, 25 bp, Artificial
  probe
  misc_feature (1)..(25): SEQ ID NO: 4686; WAN0249S3; Start 114; Stop 138
ccaactaaaatctgtaggaaactag

SEQ ID NO: 388505 - DNA, 25 bp, Artificial
  probe
  misc_feature (1)..(25): SEQ ID NO: 4686; WAN0249S3; Start 106; Stop 130
atcgagttccaactaaaatctgtag

SEQ ID NO: 388506 - DNA, 25 bp, Artificial
  probe
  misc_feature (1)..(25): SEQ ID NO: 4686; WAN0249S3; Start 102; Stop 126
ttgaatcgagttccaactaaaatct

SEQ ID NO: 388507 - DNA, 25 bp, Artificial
  probe
  misc_feature (1)..(25): SEQ ID NO: 4686; WAN0249S3; Start 266; Stop 290
gttgacgtagtttgaagagattttc

SEQ ID NO: 388508 - DNA, 25 bp, Artificial
  probe
  misc_feature (1)..(25): SEQ ID NO: 4687; WAN024AHO; Start 101; Stop 125
aaaagccagaattatactgactctt

SEQ ID NO: 388509 - DNA, 25 bp, Artificial
  probe
  misc_feature (1)..(25): SEQ ID NO: 4688; WAN024A8D; Start 398; Stop 422
ctgcttgaatcttggtttgttcttc

SEQ ID NO: 388510 - DNA, 25 bp, Artificial
  probe
  misc_feature (1)..(25): SEQ ID NO: 4688; WAN024A8D; Start 309; Stop 333
tgtaagctcagaagttgatgaacct

SEQ ID NO: 388511 - DNA, 25 bp, Artificial
  probe
  misc_feature (1)..(25): SEQ ID NO: 4688; WAN024A8D; Start 78; Stop 102
atgaatgatgtccaaacagttcttg

SEQ ID NO: 388512 - DNA, 25 bp, Artificial
  probe
  misc_feature (1)..(25): SEQ ID NO: 4688; WAN024A8D; Start 74; Stop 98
tcaaatgaatgatgtccaaacagtt

SEQ ID NO: 388513 - DNA, 25 bp, Artificial
  probe
  misc_feature (1)..(25): SEQ ID NO: 4688; WAN024A8D; Start 77; Stop 101
aatgaatgatgtccaaacagttctt

SEQ ID NO: 388514 - DNA, 25 bp, Artificial
  probe
  misc_feature (1)..(25): SEQ ID NO: 4688; WAN024A8D; Start 76; Stop 100
aaatgaatgatgtccaaacagttct

SEQ ID NO: 388515 - DNA, 25 bp, Artificial
  probe
  misc_feature (1)..(25): SEQ ID NO: 4688; WAN024A8D; Start 75; Stop 99
caaatgaatgatgtccaaacagttc

SEQ ID NO: 388516 - DNA, 25 bp, Artificial
  probe
  misc_feature (1)..(25): SEQ ID NO: 4688; WAN024A8D; Start 310; Stop 334
gtaagctcagaagttgatgaacctg

SEQ ID NO: 388517 - DNA, 25 bp, Artificial
  probe
  misc_feature (1)..(25): SEQ ID NO: 4688; WAN024A8D; Start 308; Stop 332
ctgtaagctcagaagttgatgaacc

SEQ ID NO: 388518 - DNA, 25 bp, Artificial
  probe
  misc_feature (1)..(25): SEQ ID NO: 4688; WAN024A8D; Start 342; Stop 366
aagagtttcctgctgataaataaga

SEQ ID NO: 388519 - DNA, 25 bp, Artificial
  probe
  misc_feature (1)..(25): SEQ ID NO: 4688; WAN024A8D; Start 79; Stop 103
tgaatgatgtccaaacagttcttgt

SEQ ID NO: 388520 - DNA, 25 bp, Artificial
  probe
  misc_feature (1)..(25): SEQ ID NO: 4688; WAN024A8D; Start 311; Stop 335
taagctcagaagttgatgaacctgt

SEQ ID NO: 388521 - DNA, 25 bp, Artificial
  probe
  misc_feature (1)..(25): SEQ ID NO: 4688; WAN024A8D; Start 397; Stop 421
cctgcttgaatcttggtttgttctt

SEQ ID NO: 388522 - DNA, 25 bp, Artificial
  probe
  misc_feature (1)..(25): SEQ ID NO: 4688; WAN024A8D; Start 395; Stop 419
ttcctgcttgaatcttggtttgttc

SEQ ID NO: 388523 - DNA, 25 bp, Artificial
  probe
  misc_feature (1)..(25): SEQ ID NO: 4688; WAN024A8D; Start 73; Stop 97
ttcaaatgaatgatgtccaaacagt

SEQ ID NO: 388524 - DNA, 25 bp, Artificial
  probe
  misc_feature (1)..(25): SEQ ID NO: 4688; WAN024A8D; Start 341; Stop 365
gaagagtttcctgctgataaataag

SEQ ID NO: 388525 - DNA, 25 bp, Artificial
  probe
  misc_feature (1)..(25): SEQ ID NO: 4688; WAN024A8D; Start 277; Stop 301
actaaactaccaacagctaataggc

SEQ ID NO: 388526 - DNA, 25 bp, Artificial
  probe
  misc_feature (1)..(25): SEQ ID NO: 4688; WAN024A8D; Start 72; Stop 96
tttcaaatgaatgatgtccaaacag

SEQ ID NO: 388527 - DNA, 25 bp, Artificial
  probe
  misc_feature (1)..(25): SEQ ID NO: 4688; WAN024A8D; Start 404; Stop 428
gaatcttggtttgttcttcatcacc

SEQ ID NO: 388528 - DNA, 25 bp, Artificial
  probe
  misc_feature (1)..(25): SEQ ID NO: 4688; WAN024A8D; Start 406; Stop 430
atcttggtttgttcttcatcacctt

SEQ ID NO: 388529 - DNA, 25 bp, Artificial
  probe
  misc_feature (1)..(25): SEQ ID NO: 4688; WAN024A8D; Start 405; Stop 429
aatcttggtttgttcttcatcacct

SEQ ID NO: 388530 - DNA, 25 bp, Artificial
  probe
  misc_feature (1)..(25): SEQ ID NO: 4688; WAN024A8D; Start 407; Stop 431
tcttggtttgttcttcatcaccttt

SEQ ID NO: 388531 - DNA, 25 bp, Artificial
  probe
  misc_feature (1)..(25): SEQ ID NO: 4688; WAN024A8D; Start 312; Stop 336
aagctcagaagttgatgaacctgtt

SEQ ID NO: 388532 - DNA, 25 bp, Artificial
  probe
  misc_feature (1)..(25): SEQ ID NO: 4688; WAN024A8D; Start 396; Stop 420
tcctgcttgaatcttggtttgttct

SEQ ID NO: 388533 - DNA, 25 bp, Artificial
  probe
  misc_feature (1)..(25): SEQ ID NO: 4688; WAN024A8D; Start 276; Stop 300
aactaaactaccaacagctaatagg

SEQ ID NO: 388534 - DNA, 25 bp, Artificial
  probe
  misc_feature (1)..(25): SEQ ID NO: 4688; WAN024A8D; Start 272; Stop 296
aaagaactaaactaccaacagctaa

SEQ ID NO: 388535 - DNA, 25 bp, Artificial
  probe
  misc_feature (1)..(25): SEQ ID NO: 4688; WAN024A8D; Start 394; Stop 418
attcctgcttgaatcttggtttgtt

SEQ ID NO: 388536 - DNA, 25 bp, Artificial
  probe
  misc_feature (1)..(25): SEQ ID NO: 4688; WAN024A8D; Start 393; Stop 417
aattcctgcttgaatcttggtttgt

SEQ ID NO: 388537 - DNA, 25 bp, Artificial
  probe
  misc_feature (1)..(25): SEQ ID NO: 4688; WAN024A8D; Start 273; Stop 297
aagaactaaactaccaacagctaat

SEQ ID NO: 388538 - DNA, 25 bp, Artificial
  probe
  misc_feature (1)..(25): SEQ ID NO: 4688; WAN024A8D; Start 307; Stop 331
gctgtaagctcagaagttgatgaac

SEQ ID NO: 388539 - DNA, 25 bp, Artificial
  probe
  misc_feature (1)..(25): SEQ ID NO: 4688; WAN024A8D; Start 164; Stop 188
gccttttaccctatcttttagccta

SEQ ID NO: 388540 - DNA, 25 bp, Artificial
  probe
  misc_feature (1)..(25): SEQ ID NO: 4688; WAN024A8D; Start 162; Stop 186
tagccttttaccctatcttttagcc

SEQ ID NO: 388541 - DNA, 25 bp, Artificial
  probe
  misc_feature (1)..(25): SEQ ID NO: 4688; WAN024A8D; Start 148; Stop 172
attttgtccgatgatagccttttac

SEQ ID NO: 388542 - DNA, 25 bp, Artificial
  probe
  misc_feature (1)..(25): SEQ ID NO: 4689; WAN024AK4; Start 20; Stop 44
aatgcttggagtatttgtttgtgtg

SEQ ID NO: 388543 - DNA, 25 bp, Artificial
  probe
  misc_feature (1)..(25): SEQ ID NO: 4689; WAN024AK4; Start 23; Stop 47
gcttggagtatttgtttgtgtgttt

SEQ ID NO: 388544 - DNA, 25 bp, Artificial
  probe
  misc_feature (1)..(25): SEQ ID NO: 4689; WAN024AK4; Start 21; Stop 45
atgcttggagtatttgtttgtgtgt

SEQ ID NO: 388545 - DNA, 25 bp, Artificial
  probe
  misc_feature (1)..(25): SEQ ID NO: 4689; WAN024AK4; Start 24; Stop 48
cttggagtatttgtttgtgtgttta

SEQ ID NO: 388546 - DNA, 25 bp, Artificial
  probe
  misc_feature (1)..(25): SEQ ID NO: 4689; WAN024AK4; Start 22; Stop 46
tgcttggagtatttgtttgtgtgtt

SEQ ID NO: 388547 - DNA, 25 bp, Artificial
  probe
  misc_feature (1)..(25): SEQ ID NO: 4689; WAN024AK4; Start 19; Stop 43
aaatgcttggagtatttgtttgtgt

SEQ ID NO: 388548 - DNA, 25 bp, Artificial
  probe
  misc_feature (1)..(25): SEQ ID NO: 4689; WAN024AK4; Start 26; Stop 50
tggagtatttgtttgtgtgtttatt

SEQ ID NO: 388549 - DNA, 25 bp, Artificial
  probe
  misc_feature (1)..(25): SEQ ID NO: 4689; WAN024AK4; Start 25; Stop 49
ttggagtatttgtttgtgtgtttat

SEQ ID NO: 388550 - DNA, 25 bp, Artificial
  probe
  misc_feature (1)..(25): SEQ ID NO: 4689; WAN024AK4; Start 27; Stop 51
ggagtatttgtttgtgtgtttattt

SEQ ID NO: 388551 - DNA, 25 bp, Artificial
  probe
  misc_feature (1)..(25): SEQ ID NO: 4689; WAN024AK4; Start 18; Stop 42
aaaatgcttggagtatttgtttgtg

SEQ ID NO: 388552 - DNA, 25 bp, Artificial
  probe
  misc_feature (1)..(25): SEQ ID NO: 4689; WAN024AK4; Start 28; Stop 52
gagtatttgtttgtgtgtttatttt

SEQ ID NO: 388553 - DNA, 25 bp, Artificial
  probe
  misc_feature (1)..(25): SEQ ID NO: 4690; WAN024A57; Start 32; Stop 56
tgtttcttgaaatcaactgctgttt

SEQ ID NO: 388554 - DNA, 25 bp, Artificial
  probe
  misc_feature (1)..(25): SEQ ID NO: 4690; WAN024A57; Start 31; Stop 55
ttgtttcttgaaatcaactgctgtt

SEQ ID NO: 388555 - DNA, 25 bp, Artificial
  probe
  misc_feature (1)..(25): SEQ ID NO: 4690; WAN024A57; Start 30; Stop 54
tttgtttcttgaaatcaactgctgt

SEQ ID NO: 388556 - DNA, 25 bp, Artificial
  probe
  misc_feature (1)..(25): SEQ ID NO: 4690; WAN024A57; Start 29; Stop 53
ttttgtttcttgaaatcaactgctg

SEQ ID NO: 388557 - DNA, 25 bp, Artificial
  probe
  misc_feature (1)..(25): SEQ ID NO: 4691; WAN024AHG; Start 37; Stop 61
aggttataagattctggtctgacaa

SEQ ID NO: 388558 - DNA, 25 bp, Artificial
  probe
  misc_feature (1)..(25): SEQ ID NO: 4691; WAN024AHG; Start 36; Stop 60
taggttataagattctggtctgaca

SEQ ID NO: 388559 - DNA, 25 bp, Artificial
  probe
  misc_feature (1)..(25): SEQ ID NO: 4691; WAN024AHG; Start 1; Stop 25
tgatagttggagggaagaattgttc

SEQ ID NO: 388560 - DNA, 25 bp, Artificial
  probe
  misc_feature (1)..(25): SEQ ID NO: 4691; WAN024AHG; Start 35; Stop 59
ttaggttataagattctggtctgac

SEQ ID NO: 388561 - DNA, 25 bp, Artificial
  probe
  misc_feature (1)..(25): SEQ ID NO: 4691; WAN024AHG; Start 94; Stop 118
cgtgctaactgctagaaattatggt

SEQ ID NO: 388562 - DNA, 25 bp, Artificial
  probe
  misc_feature (1)..(25): SEQ ID NO: 4691; WAN024AHG; Start 95; Stop 119
gtgctaactgctagaaattatggta

SEQ ID NO: 388563 - DNA, 25 bp, Artificial
  probe
  misc_feature (1)..(25): SEQ ID NO: 4691; WAN024AHG; Start 96; Stop 120
tgctaactgctagaaattatggtag

SEQ ID NO: 388564 - DNA, 25 bp, Artificial
  probe
  misc_feature (1)..(25): SEQ ID NO: 4691; WAN024AHG; Start 97; Stop 121
gctaactgctagaaattatggtaga

SEQ ID NO: 388565 - DNA, 25 bp, Artificial
  probe
  misc_feature (1)..(25): SEQ ID NO: 4691; WAN024AHG; Start 38; Stop 62
ggttataagattctggtctgacaaa

SEQ ID NO: 388566 - DNA, 25 bp, Artificial
  probe
  misc_feature (1)..(25): SEQ ID NO: 4691; WAN024AHG; Start 92; Stop 116
aacgtgctaactgctagaaattatg

SEQ ID NO: 388567 - DNA, 25 bp, Artificial
  probe
  misc_feature (1)..(25): SEQ ID NO: 4691; WAN024AHG; Start 90; Stop 114
gaaacgtgctaactgctagaaatta

SEQ ID NO: 388568 - DNA, 25 bp, Artificial
  probe
  misc_feature (1)..(25): SEQ ID NO: 4691; WAN024AHG; Start 83; Stop 107
tttatgagaaacgtgctaactgcta

SEQ ID NO: 388569 - DNA, 25 bp, Artificial
  probe
  misc_feature (1)..(25): SEQ ID NO: 4691; WAN024AHG; Start 91; Stop 115
aaacgtgctaactgctagaaattat

SEQ ID NO: 388570 - DNA, 25 bp, Artificial
  probe
  misc_feature (1)..(25): SEQ ID NO: 4691; WAN024AHG; Start 84; Stop 108
ttatgagaaacgtgctaactgctag

SEQ ID NO: 388571 - DNA, 25 bp, Artificial
  probe
  misc_feature (1)..(25): SEQ ID NO: 4691; WAN024AHG; Start 89; Stop 113
agaaacgtgctaactgctagaaatt

SEQ ID NO: 388572 - DNA, 25 bp, Artificial
  probe
  misc_feature (1)..(25): SEQ ID NO: 4691; WAN024AHG; Start 93; Stop 117
acgtgctaactgctagaaattatgg

SEQ ID NO: 388573 - DNA, 25 bp, Artificial
  probe
  misc_feature (1)..(25): SEQ ID NO: 4691; WAN024AHG; Start 88; Stop 112
gagaaacgtgctaactgctagaaat

SEQ ID NO: 388574 - DNA, 25 bp, Artificial
  probe
  misc_feature (1)..(25): SEQ ID NO: 4691; WAN024AHG; Start 85; Stop 109
tatgagaaacgtgctaactgctaga

SEQ ID NO: 388575 - DNA, 25 bp, Artificial
  probe
  misc_feature (1)..(25): SEQ ID NO: 4691; WAN024AHG; Start 2; Stop 26
gatagttggagggaagaattgttct

SEQ ID NO: 388576 - DNA, 25 bp, Artificial
  probe
  misc_feature (1)..(25): SEQ ID NO: 4691; WAN024AHG; Start 86; Stop 110
atgagaaacgtgctaactgctagaa

SEQ ID NO: 388577 - DNA, 25 bp, Artificial
  probe
  misc_feature (1)..(25): SEQ ID NO: 4691; WAN024AHG; Start 87; Stop 111
tgagaaacgtgctaactgctagaaa

SEQ ID NO: 388578 - DNA, 25 bp, Artificial
  probe
  misc_feature (1)..(25): SEQ ID NO: 4691; WAN024AHG; Start 34; Stop 58
tttaggttataagattctggtctga

SEQ ID NO: 388579 - DNA, 25 bp, Artificial
  probe
  misc_feature (1)..(25): SEQ ID NO: 4691; WAN024AHG; Start 98; Stop 122
ctaactgctagaaattatggtagaa

SEQ ID NO: 388580 - DNA, 25 bp, Artificial
  probe
  misc_feature (1)..(25): SEQ ID NO: 4691; WAN024AHG; Start 43; Stop 67
taagattctggtctgacaaaatcgt

SEQ ID NO: 388581 - DNA, 25 bp, Artificial
  probe
  misc_feature (1)..(25): SEQ ID NO: 4691; WAN024AHG; Start 42; Stop 66
ataagattctggtctgacaaaatcg

SEQ ID NO: 388582 - DNA, 25 bp, Artificial
  probe
  misc_feature (1)..(25): SEQ ID NO: 4691; WAN024AHG; Start 44; Stop 68
aagattctggtctgacaaaatcgtc

SEQ ID NO: 388583 - DNA, 25 bp, Artificial
  probe
  misc_feature (1)..(25): SEQ ID NO: 4691; WAN024AHG; Start 82; Stop 106
ttttatgagaaacgtgctaactgct

SEQ ID NO: 388584 - DNA, 25 bp, Artificial
  probe
  misc_feature (1)..(25): SEQ ID NO: 4691; WAN024AHG; Start 100; Stop 124
aactgctagaaattatggtagaata

SEQ ID NO: 388585 - DNA, 25 bp, Artificial
  probe
  misc_feature (1)..(25): SEQ ID NO: 4691; WAN024AHG; Start 99; Stop 123
taactgctagaaattatggtagaat

SEQ ID NO: 388586 - DNA, 25 bp, Artificial
  probe
  misc_feature (1)..(25): SEQ ID NO: 4691; WAN024AHG; Start 101; Stop 125
actgctagaaattatggtagaataa

SEQ ID NO: 388587 - DNA, 25 bp, Artificial
  probe
  misc_feature (1)..(25): SEQ ID NO: 4691; WAN024AHG; Start 39; Stop 63
gttataagattctggtctgacaaaa

SEQ ID NO: 388588 - DNA, 25 bp, Artificial
  probe
  misc_feature (1)..(25): SEQ ID NO: 4691; WAN024AHG; Start 3; Stop 27
atagttggagggaagaattgttctt

SEQ ID NO: 388589 - DNA, 25 bp, Artificial
  probe
  misc_feature (1)..(25): SEQ ID NO: 4691; WAN024AHG; Start 41; Stop 65
tataagattctggtctgacaaaatc

SEQ ID NO: 388590 - DNA, 25 bp, Artificial
  probe
  misc_feature (1)..(25): SEQ ID NO: 4692; WAN024A23; Start 62; Stop 86
ctgctagtctctttgttatcgtttc

SEQ ID NO: 388591 - DNA, 25 bp, Artificial
  probe
  misc_feature (1)..(25): SEQ ID NO: 4692; WAN024A23; Start 63; Stop 87
tgctagtctctttgttatcgtttca

SEQ ID NO: 388592 - DNA, 25 bp, Artificial
  probe
  misc_feature (1)..(25): SEQ ID NO: 4692; WAN024A23; Start 64; Stop 88
gctagtctctttgttatcgtttcat

SEQ ID NO: 388593 - DNA, 25 bp, Artificial
  probe
  misc_feature (1)..(25): SEQ ID NO: 4692; WAN024A23; Start 61; Stop 85
actgctagtctctttgttatcgttt

SEQ ID NO: 388594 - DNA, 25 bp, Artificial
  probe
  misc_feature (1)..(25): SEQ ID NO: 4692; WAN024A23; Start 60; Stop 84
aactgctagtctctttgttatcgtt

SEQ ID NO: 388595 - DNA, 25 bp, Artificial
  probe
  misc_feature (1)..(25): SEQ ID NO: 4692; WAN024A23; Start 59; Stop 83
aaactgctagtctctttgttatcgt

SEQ ID NO: 388596 - DNA, 25 bp, Artificial
  probe
  misc_feature (1)..(25): SEQ ID NO: 4692; WAN024A23; Start 67; Stop 91
agtctctttgttatcgtttcatcta

SEQ ID NO: 388597 - DNA, 25 bp, Artificial
  probe
  misc_feature (1)..(25): SEQ ID NO: 4692; WAN024A23; Start 66; Stop 90
tagtctctttgttatcgtttcatct

SEQ ID NO: 388598 - DNA, 25 bp, Artificial
  probe
  misc_feature (1)..(25): SEQ ID NO: 4692; WAN024A23; Start 65; Stop 89
ctagtctctttgttatcgtttcatc

SEQ ID NO: 388599 - DNA, 25 bp, Artificial
  probe
  misc_feature (1)..(25): SEQ ID NO: 4692; WAN024A23; Start 68; Stop 92
gtctctttgttatcgtttcatctat

SEQ ID NO: 388600 - DNA, 25 bp, Artificial
  probe
  misc_feature (1)..(25): SEQ ID NO: 4692; WAN024A23; Start 75; Stop 99
tgttatcgtttcatctatctttgtt

SEQ ID NO: 388601 - DNA, 25 bp, Artificial
  probe
  misc_feature (1)..(25): SEQ ID NO: 4692; WAN024A23; Start 74; Stop 98
ttgttatcgtttcatctatctttgt

SEQ ID NO: 388602 - DNA, 25 bp, Artificial
  probe
  misc_feature (1)..(25): SEQ ID NO: 4692; WAN024A23; Start 70; Stop 94
ctctttgttatcgtttcatctatct

SEQ ID NO: 388603 - DNA, 25 bp, Artificial
  probe
  misc_feature (1)..(25): SEQ ID NO: 4692; WAN024A23; Start 69; Stop 93
tctctttgttatcgtttcatctatc

SEQ ID NO: 388604 - DNA, 25 bp, Artificial
  probe
  misc_feature (1)..(25): SEQ ID NO: 4692; WAN024A23; Start 58; Stop 82
caaactgctagtctctttgttatcg

SEQ ID NO: 388605 - DNA, 25 bp, Artificial
  probe
  misc_feature (1)..(25): SEQ ID NO: 4692; WAN024A23; Start 52; Stop 76
caaacacaaactgctagtctctttg

SEQ ID NO: 388606 - DNA, 25 bp, Artificial
  probe
  misc_feature (1)..(25): SEQ ID NO: 4692; WAN024A23; Start 71; Stop 95
tctttgttatcgtttcatctatctt

SEQ ID NO: 388607 - DNA, 25 bp, Artificial
  probe
  misc_feature (1)..(25): SEQ ID NO: 4692; WAN024A23; Start 73; Stop 97
tttgttatcgtttcatctatctttg

SEQ ID NO: 388608 - DNA, 25 bp, Artificial
  probe
  misc_feature (1)..(25): SEQ ID NO: 4692; WAN024A23; Start 51; Stop 75
gcaaacacaaactgctagtctcttt

SEQ ID NO: 388609 - DNA, 25 bp, Artificial
  probe
  misc_feature (1)..(25): SEQ ID NO: 4692; WAN024A23; Start 72; Stop 96
ctttgttatcgtttcatctatcttt

SEQ ID NO: 388610 - DNA, 25 bp, Artificial
  probe
  misc_feature (1)..(25): SEQ ID NO: 4692; WAN024A23; Start 76; Stop 100
gttatcgtttcatctatctttgtta

SEQ ID NO: 388611 - DNA, 25 bp, Artificial
  probe
  misc_feature (1)..(25): SEQ ID NO: 4692; WAN024A23; Start 79; Stop 103
atcgtttcatctatctttgttaaaa

SEQ ID NO: 388612 - DNA, 25 bp, Artificial
  probe
  misc_feature (1)..(25): SEQ ID NO: 4692; WAN024A23; Start 80; Stop 104
tcgtttcatctatctttgttaaaag

SEQ ID NO: 388613 - DNA, 25 bp, Artificial
  probe
  misc_feature (1)..(25): SEQ ID NO: 4692; WAN024A23; Start 81; Stop 105
cgtttcatctatctttgttaaaaga

SEQ ID NO: 388614 - DNA, 25 bp, Artificial
  probe
  misc_feature (1)..(25): SEQ ID NO: 4693; WAN0249JE; Start 36; Stop 60
ttgacggtagtgaatggaacaatac

SEQ ID NO: 388615 - DNA, 25 bp, Artificial
  probe
  misc_feature (1)..(25): SEQ ID NO: 4693; WAN0249JE; Start 35; Stop 59
attgacggtagtgaatggaacaata

SEQ ID NO: 388616 - DNA, 25 bp, Artificial
  probe
  misc_feature (1)..(25): SEQ ID NO: 4693; WAN0249JE; Start 34; Stop 58
aattgacggtagtgaatggaacaat

SEQ ID NO: 388617 - DNA, 25 bp, Artificial
  probe
  misc_feature (1)..(25): SEQ ID NO: 4693; WAN0249JE; Start 33; Stop 57
aaattgacggtagtgaatggaacaa

SEQ ID NO: 388618 - DNA, 25 bp, Artificial
  probe
  misc_feature (1)..(25): SEQ ID NO: 4693; WAN0249JE; Start 23; Stop 47
ctatgtgctaaaattgacggtagtg

SEQ ID NO: 388619 - DNA, 25 bp, Artificial
  probe
  misc_feature (1)..(25): SEQ ID NO: 4693; WAN0249JE; Start 20; Stop 44
agactatgtgctaaaattgacggta

SEQ ID NO: 388620 - DNA, 25 bp, Artificial
  probe
  misc_feature (1)..(25): SEQ ID NO: 4693; WAN0249JE; Start 24; Stop 48
tatgtgctaaaattgacggtagtga

SEQ ID NO: 388621 - DNA, 25 bp, Artificial
  probe
  misc_feature (1)..(25): SEQ ID NO: 4693; WAN0249JE; Start 21; Stop 45
gactatgtgctaaaattgacggtag

SEQ ID NO: 388622 - DNA, 25 bp, Artificial
  probe
  misc_feature (1)..(25): SEQ ID NO: 4693; WAN0249JE; Start 18; Stop 42
gaagactatgtgctaaaattgacgg

SEQ ID NO: 388623 - DNA, 25 bp, Artificial
  probe
  misc_feature (1)..(25): SEQ ID NO: 4693; WAN0249JE; Start 17; Stop 41
tgaagactatgtgctaaaattgacg

SEQ ID NO: 388624 - DNA, 25 bp, Artificial
  probe
  misc_feature (1)..(25): SEQ ID NO: 4693; WAN0249JE; Start 31; Stop 55
taaaattgacggtagtgaatggaac

SEQ ID NO: 388625 - DNA, 25 bp, Artificial
  probe
  misc_feature (1)..(25): SEQ ID NO: 4693; WAN0249JE; Start 30; Stop 54
ctaaaattgacggtagtgaatggaa

SEQ ID NO: 388626 - DNA, 25 bp, Artificial
  probe
  misc_feature (1)..(25): SEQ ID NO: 4693; WAN0249JE; Start 27; Stop 51
gtgctaaaattgacggtagtgaatg

SEQ ID NO: 388627 - DNA, 25 bp, Artificial
  probe
  misc_feature (1)..(25): SEQ ID NO: 4693; WAN0249JE; Start 19; Stop 43
aagactatgtgctaaaattgacggt

SEQ ID NO: 388628 - DNA, 25 bp, Artificial
  probe
  misc_feature (1)..(25): SEQ ID NO: 4693; WAN0249JE; Start 26; Stop 50
tgtgctaaaattgacggtagtgaat

SEQ ID NO: 388629 - DNA, 25 bp, Artificial
  probe
  misc_feature (1)..(25): SEQ ID NO: 4693; WAN0249JE; Start 25; Stop 49
atgtgctaaaattgacggtagtgaa

SEQ ID NO: 388630 - DNA, 25 bp, Artificial
  probe
  misc_feature (1)..(25): SEQ ID NO: 4693; WAN0249JE; Start 32; Stop 56
aaaattgacggtagtgaatggaaca

SEQ ID NO: 388631 - DNA, 25 bp, Artificial
  probe
  misc_feature (1)..(25): SEQ ID NO: 4693; WAN0249JE; Start 29; Stop 53
gctaaaattgacggtagtgaatgga

SEQ ID NO: 388632 - DNA, 25 bp, Artificial
  probe
  misc_feature (1)..(25): SEQ ID NO: 4693; WAN0249JE; Start 37; Stop 61
tgacggtagtgaatggaacaatacc

SEQ ID NO: 388633 - DNA, 25 bp, Artificial
  probe
  misc_feature (1)..(25): SEQ ID NO: 4693; WAN0249JE; Start 28; Stop 52
tgctaaaattgacggtagtgaatgg

SEQ ID NO: 388634 - DNA, 25 bp, Artificial
  probe
  misc_feature (1)..(25): SEQ ID NO: 4693; WAN0249JE; Start 16; Stop 40
atgaagactatgtgctaaaattgac

SEQ ID NO: 388635 - DNA, 25 bp, Artificial
  probe
  misc_feature (1)..(25): SEQ ID NO: 4693; WAN0249JE; Start 22; Stop 46
actatgtgctaaaattgacggtagt

SEQ ID NO: 388636 - DNA, 25 bp, Artificial
  probe
  misc_feature (1)..(25): SEQ ID NO: 4693; WAN0249JE; Start 15; Stop 39
catgaagactatgtgctaaaattga

SEQ ID NO: 388637 - DNA, 25 bp, Artificial
  probe
  misc_feature (1)..(25): SEQ ID NO: 4693; WAN0249JE; Start 14; Stop 38
tcatgaagactatgtgctaaaattg

SEQ ID NO: 388638 - DNA, 25 bp, Artificial
  probe
  misc_feature (1)..(25): SEQ ID NO: 4694; WAN024ABM; Start 205; Stop 229
agatgcctcttagtccctagtctag

SEQ ID NO: 388639 - DNA, 25 bp, Artificial
  probe
  misc_feature (1)..(25): SEQ ID NO: 4694; WAN024ABM; Start 95; Stop 119
atagaatatgcgatgagtcgatagg

SEQ ID NO: 388640 - DNA, 25 bp, Artificial
  probe
  misc_feature (1)..(25): SEQ ID NO: 4694; WAN024ABM; Start 98; Stop 122
gaatatgcgatgagtcgataggtag

SEQ ID NO: 388641 - DNA, 25 bp, Artificial
  probe
  misc_feature (1)..(25): SEQ ID NO: 4694; WAN024ABM; Start 168; Stop 192
gaccttgatgagttgtgtgaacctg

SEQ ID NO: 388642 - DNA, 25 bp, Artificial
  probe
  misc_feature (1)..(25): SEQ ID NO: 4694; WAN024ABM; Start 97; Stop 121
agaatatgcgatgagtcgataggta

SEQ ID NO: 388643 - DNA, 25 bp, Artificial
  probe
  misc_feature (1)..(25): SEQ ID NO: 4694; WAN024ABM; Start 96; Stop 120
tagaatatgcgatgagtcgataggt

SEQ ID NO: 388644 - DNA, 25 bp, Artificial
  probe
  misc_feature (1)..(25): SEQ ID NO: 4694; WAN024ABM; Start 99; Stop 123
aatatgcgatgagtcgataggtagt

SEQ ID NO: 388645 - DNA, 25 bp, Artificial
  probe
  misc_feature (1)..(25): SEQ ID NO: 4694; WAN024ABM; Start 193; Stop 217
ctcatcacatgaagatgcctcttag

SEQ ID NO: 388646 - DNA, 25 bp, Artificial
  probe
  misc_feature (1)..(25): SEQ ID NO: 4694; WAN024ABM; Start 196; Stop 220
atcacatgaagatgcctcttagtcc

SEQ ID NO: 388647 - DNA, 25 bp, Artificial
  probe
  misc_feature (1)..(25): SEQ ID NO: 4694; WAN024ABM; Start 5; Stop 29
atgtatagggaaactcttgaatacg

SEQ ID NO: 388648 - DNA, 25 bp, Artificial
  probe
  misc_feature (1)..(25): SEQ ID NO: 4694; WAN024ABM; Start 195; Stop 219
catcacatgaagatgcctcttagtc

SEQ ID NO: 388649 - DNA, 25 bp, Artificial
  probe
  misc_feature (1)..(25): SEQ ID NO: 4694; WAN024ABM; Start 100; Stop 124
atatgcgatgagtcgataggtagtc

SEQ ID NO: 388650 - DNA, 25 bp, Artificial
  probe
  misc_feature (1)..(25): SEQ ID NO: 4694; WAN024ABM; Start 89; Stop 113
agtaatatagaatatgcgatgagtc

SEQ ID NO: 388651 - DNA, 25 bp, Artificial
  probe
  misc_feature (1)..(25): SEQ ID NO: 4694; WAN024ABM; Start 194; Stop 218
tcatcacatgaagatgcctcttagt

SEQ ID NO: 388652 - DNA, 25 bp, Artificial
  probe
  misc_feature (1)..(25): SEQ ID NO: 4694; WAN024ABM; Start 1; Stop 25
tgatatgtatagggaaactcttgaa

SEQ ID NO: 388653 - DNA, 25 bp, Artificial
  probe
  misc_feature (1)..(25): SEQ ID NO: 4694; WAN024ABM; Start 90; Stop 114
gtaatatagaatatgcgatgagtcg

SEQ ID NO: 388654 - DNA, 25 bp, Artificial
  probe
  misc_feature (1)..(25): SEQ ID NO: 4694; WAN024ABM; Start 171; Stop 195
cttgatgagttgtgtgaacctgctc

SEQ ID NO: 388655 - DNA, 25 bp, Artificial
  probe
  misc_feature (1)..(25): SEQ ID NO: 4694; WAN024ABM; Start 101; Stop 125
tatgcgatgagtcgataggtagtct

SEQ ID NO: 388656 - DNA, 25 bp, Artificial
  probe
  misc_feature (1)..(25): SEQ ID NO: 4694; WAN024ABM; Start 206; Stop 230
gatgcctcttagtccctagtctagc

SEQ ID NO: 388657 - DNA, 25 bp, Artificial
  probe
  misc_feature (1)..(25): SEQ ID NO: 4694; WAN024ABM; Start 92; Stop 116
aatatagaatatgcgatgagtcgat

SEQ ID NO: 388658 - DNA, 25 bp, Artificial
  probe
  misc_feature (1)..(25): SEQ ID NO: 4694; WAN024ABM; Start 94; Stop 118
tatagaatatgcgatgagtcgatag

SEQ ID NO: 388659 - DNA, 25 bp, Artificial
  probe
  misc_feature (1)..(25): SEQ ID NO: 4694; WAN024ABM; Start 204; Stop 228
aagatgcctcttagtccctagtcta

SEQ ID NO: 388660 - DNA, 25 bp, Artificial
  probe
  misc_feature (1)..(25): SEQ ID NO: 4694; WAN024ABM; Start 106; Stop 130
gatgagtcgataggtagtcttcgga

SEQ ID NO: 388661 - DNA, 25 bp, Artificial
  probe
  misc_feature (1)..(25): SEQ ID NO: 4694; WAN024ABM; Start 192; Stop 216
gctcatcacatgaagatgcctctta

SEQ ID NO: 388662 - DNA, 25 bp, Artificial
  probe
  misc_feature (1)..(25): SEQ ID NO: 4694; WAN024ABM; Start 91; Stop 115
taatatagaatatgcgatgagtcga

SEQ ID NO: 388663 - DNA, 25 bp, Artificial
  probe
  misc_feature (1)..(25): SEQ ID NO: 4694; WAN024ABM; Start 167; Stop 191
ggaccttgatgagttgtgtgaacct

SEQ ID NO: 388664 - DNA, 25 bp, Artificial
  probe
  misc_feature (1)..(25): SEQ ID NO: 4694; WAN024ABM; Start 201; Stop 225
atgaagatgcctcttagtccctagt

SEQ ID NO: 388665 - DNA, 25 bp, Artificial
  probe
  misc_feature (1)..(25): SEQ ID NO: 4694; WAN024ABM; Start 107; Stop 131
atgagtcgataggtagtcttcggac

SEQ ID NO: 388666 - DNA, 25 bp, Artificial
  probe
  misc_feature (1)..(25): SEQ ID NO: 4694; WAN024ABM; Start 102; Stop 126
atgcgatgagtcgataggtagtctt

SEQ ID NO: 388667 - DNA, 25 bp, Artificial
  probe
  misc_feature (1)..(25): SEQ ID NO: 4694; WAN024ABM; Start 200; Stop 224
catgaagatgcctcttagtccctag

SEQ ID NO: 388668 - DNA, 25 bp, Artificial
  probe
  misc_feature (1)..(25): SEQ ID NO: 4694; WAN024ABM; Start 93; Stop 117
atatagaatatgcgatgagtcgata

SEQ ID NO: 388669 - DNA, 25 bp, Artificial
  probe
  misc_feature (1)..(25): SEQ ID NO: 4694; WAN024ABM; Start 185; Stop 209
tgaacctgctcatcacatgaagatg

SEQ ID NO: 388670 - DNA, 25 bp, Artificial
  probe
  misc_feature (1)..(25): SEQ ID NO: 4694; WAN024ABM; Start 203; Stop 227
gaagatgcctcttagtccctagtct

SEQ ID NO: 388671 - DNA, 25 bp, Artificial
  probe
  misc_feature (1)..(25): SEQ ID NO: 4695; WAN0249Y8; Start 55; Stop 79
aggttcgctcacaataaactattat

SEQ ID NO: 388672 - DNA, 25 bp, Artificial
  probe
  misc_feature (1)..(25): SEQ ID NO: 4695; WAN0249Y8; Start 54; Stop 78
gaggttcgctcacaataaactatta

SEQ ID NO: 388673 - DNA, 25 bp, Artificial
  probe
  misc_feature (1)..(25): SEQ ID NO: 4695; WAN0249Y8; Start 56; Stop 80
ggttcgctcacaataaactattata

SEQ ID NO: 388674 - DNA, 25 bp, Artificial
  probe
  misc_feature (1)..(25): SEQ ID NO: 4695; WAN0249Y8; Start 4; Stop 28
tatgttcctccttttggtctaatga

SEQ ID NO: 388675 - DNA, 25 bp, Artificial
  probe
  misc_feature (1)..(25): SEQ ID NO: 4695; WAN0249Y8; Start 1; Stop 25
tgatatgttcctccttttggtctaa

SEQ ID NO: 388676 - DNA, 25 bp, Artificial
  probe
  misc_feature (1)..(25): SEQ ID NO: 4695; WAN0249Y8; Start 3; Stop 27
atatgttcctccttttggtctaatg

SEQ ID NO: 388677 - DNA, 25 bp, Artificial
  probe
  misc_feature (1)..(25): SEQ ID NO: 4695; WAN0249Y8; Start 2; Stop 26
gatatgttcctccttttggtctaat

SEQ ID NO: 388678 - DNA, 25 bp, Artificial
  probe
  misc_feature (1)..(25): SEQ ID NO: 4695; WAN0249Y8; Start 57; Stop 81
gttcgctcacaataaactattatac

SEQ ID NO: 388679 - DNA, 25 bp, Artificial
  probe
  misc_feature (1)..(25): SEQ ID NO: 4695; WAN0249Y8; Start 5; Stop 29
atgttcctccttttggtctaatgac

SEQ ID NO: 388680 - DNA, 25 bp, Artificial
  probe
  misc_feature (1)..(25): SEQ ID NO: 4695; WAN0249Y8; Start 58; Stop 82
ttcgctcacaataaactattatact

SEQ ID NO: 388681 - DNA, 25 bp, Artificial
  probe
  misc_feature (1)..(25): SEQ ID NO: 4695; WAN0249Y8; Start 53; Stop 77
tgaggttcgctcacaataaactatt

SEQ ID NO: 388682 - DNA, 25 bp, Artificial
  probe
  misc_feature (1)..(25): SEQ ID NO: 4695; WAN0249Y8; Start 59; Stop 83
tcgctcacaataaactattatacta

SEQ ID NO: 388683 - DNA, 25 bp, Artificial
  probe
  misc_feature (1)..(25): SEQ ID NO: 4695; WAN0249Y8; Start 60; Stop 84
cgctcacaataaactattatactag

SEQ ID NO: 388684 - DNA, 25 bp, Artificial
  probe
  misc_feature (1)..(25): SEQ ID NO: 4695; WAN0249Y8; Start 21; Stop 45
tctaatgaccccaagactttgcaag

SEQ ID NO: 388685 - DNA, 25 bp, Artificial
  probe
  misc_feature (1)..(25): SEQ ID NO: 4695; WAN0249Y8; Start 16; Stop 40
tttggtctaatgaccccaagacttt

SEQ ID NO: 388686 - DNA, 25 bp, Artificial
  probe
  misc_feature (1)..(25): SEQ ID NO: 4695; WAN0249Y8; Start 15; Stop 39
ttttggtctaatgaccccaagactt

SEQ ID NO: 388687 - DNA, 25 bp, Artificial
  probe
  misc_feature (1)..(25): SEQ ID NO: 4695; WAN0249Y8; Start 22; Stop 46
ctaatgaccccaagactttgcaagg

SEQ ID NO: 388688 - DNA, 25 bp, Artificial
  probe
  misc_feature (1)..(25): SEQ ID NO: 4695; WAN0249Y8; Start 14; Stop 38
cttttggtctaatgaccccaagact

SEQ ID NO: 388689 - DNA, 25 bp, Artificial
  probe
  misc_feature (1)..(25): SEQ ID NO: 4695; WAN0249Y8; Start 6; Stop 30
tgttcctccttttggtctaatgacc

SEQ ID NO: 388690 - DNA, 25 bp, Artificial
  probe
  misc_feature (1)..(25): SEQ ID NO: 4695; WAN0249Y8; Start 17; Stop 41
ttggtctaatgaccccaagactttg

SEQ ID NO: 388691 - DNA, 25 bp, Artificial
  probe
  misc_feature (1)..(25): SEQ ID NO: 4695; WAN0249Y8; Start 11; Stop 35
ctccttttggtctaatgaccccaag

SEQ ID NO: 388692 - DNA, 25 bp, Artificial
  probe
  misc_feature (1)..(25): SEQ ID NO: 4695; WAN0249Y8; Start 7; Stop 31
gttcctccttttggtctaatgaccc

SEQ ID NO: 388693 - DNA, 25 bp, Artificial
  probe
  misc_feature (1)..(25): SEQ ID NO: 4695; WAN0249Y8; Start 13; Stop 37
ccttttggtctaatgaccccaagac

SEQ ID NO: 388694 - DNA, 25 bp, Artificial
  probe
  misc_feature (1)..(25): SEQ ID NO: 4695; WAN0249Y8; Start 12; Stop 36
tccttttggtctaatgaccccaaga

SEQ ID NO: 388695 - DNA, 25 bp, Artificial
  probe
  misc_feature (1)..(25): SEQ ID NO: 4695; WAN0249Y8; Start 32; Stop 56
caagactttgcaaggggtaagtgag

SEQ ID NO: 388696 - DNA, 25 bp, Artificial
  probe
  misc_feature (1)..(25): SEQ ID NO: 4695; WAN0249Y8; Start 20; Stop 44
gtctaatgaccccaagactttgcaa

SEQ ID NO: 388697 - DNA, 25 bp, Artificial
  probe
  misc_feature (1)..(25): SEQ ID NO: 4695; WAN0249Y8; Start 8; Stop 32
ttcctccttttggtctaatgacccc

SEQ ID NO: 388698 - DNA, 25 bp, Artificial
  probe
  misc_feature (1)..(25): SEQ ID NO: 4695; WAN0249Y8; Start 10; Stop 34
cctccttttggtctaatgaccccaa

SEQ ID NO: 388699 - DNA, 25 bp, Artificial
  probe
  misc_feature (1)..(25): SEQ ID NO: 4695; WAN0249Y8; Start 33; Stop 57
aagactttgcaaggggtaagtgagg

SEQ ID NO: 388700 - DNA, 25 bp, Artificial
  probe
  misc_feature (1)..(25): SEQ ID NO: 4695; WAN0249Y8; Start 18; Stop 42
tggtctaatgaccccaagactttgc

SEQ ID NO: 388701 - DNA, 25 bp, Artificial
  probe
  misc_feature (1)..(25): SEQ ID NO: 4695; WAN0249Y8; Start 19; Stop 43
ggtctaatgaccccaagactttgca

SEQ ID NO: 388702 - DNA, 25 bp, Artificial
  probe
  misc_feature (1)..(25): SEQ ID NO: 4695; WAN0249Y8; Start 36; Stop 60
actttgcaaggggtaagtgaggttc

SEQ ID NO: 388703 - DNA, 25 bp, Artificial
  probe
  misc_feature (1)..(25): SEQ ID NO: 4695; WAN0249Y8; Start 35; Stop 59
gactttgcaaggggtaagtgaggtt

SEQ ID NO: 388704 - DNA, 25 bp, Artificial
  probe
  misc_feature (1)..(25): SEQ ID NO: 4696; WAN024BGR; Start 71; Stop 95
tctattgccatgatatgaagttgtt

SEQ ID NO: 388705 - DNA, 25 bp, Artificial
  probe
  misc_feature (1)..(25): SEQ ID NO: 4696; WAN024BGR; Start 70; Stop 94
ttctattgccatgatatgaagttgt

SEQ ID NO: 388706 - DNA, 25 bp, Artificial
  probe
  misc_feature (1)..(25): SEQ ID NO: 4696; WAN024BGR; Start 72; Stop 96
ctattgccatgatatgaagttgttc

SEQ ID NO: 388707 - DNA, 25 bp, Artificial
  probe
  misc_feature (1)..(25): SEQ ID NO: 4696; WAN024BGR; Start 169; Stop 193
atatatcctcaagcacaaactccac

SEQ ID NO: 388708 - DNA, 25 bp, Artificial
  probe
  misc_feature (1)..(25): SEQ ID NO: 4696; WAN024BGR; Start 74; Stop 98
attgccatgatatgaagttgttcaa

SEQ ID NO: 388709 - DNA, 25 bp, Artificial
  probe
  misc_feature (1)..(25): SEQ ID NO: 4696; WAN024BGR; Start 67; Stop 91
tgtttctattgccatgatatgaagt

SEQ ID NO: 388710 - DNA, 25 bp, Artificial
  probe
  misc_feature (1)..(25): SEQ ID NO: 4696; WAN024BGR; Start 44; Stop 68
attgtcacaagtcaagggagaattg

SEQ ID NO: 388711 - DNA, 25 bp, Artificial
  probe
  misc_feature (1)..(25): SEQ ID NO: 4696; WAN024BGR; Start 170; Stop 194
tatatcctcaagcacaaactccacg

SEQ ID NO: 388712 - DNA, 25 bp, Artificial
  probe
  misc_feature (1)..(25): SEQ ID NO: 4696; WAN024BGR; Start 73; Stop 97
tattgccatgatatgaagttgttca

SEQ ID NO: 388713 - DNA, 25 bp, Artificial
  probe
  misc_feature (1)..(25): SEQ ID NO: 4696; WAN024BGR; Start 69; Stop 93
tttctattgccatgatatgaagttg

SEQ ID NO: 388714 - DNA, 25 bp, Artificial
  probe
  misc_feature (1)..(25): SEQ ID NO: 4696; WAN024BGR; Start 68; Stop 92
gtttctattgccatgatatgaagtt

SEQ ID NO: 388715 - DNA, 25 bp, Artificial
  probe
  misc_feature (1)..(25): SEQ ID NO: 4696; WAN024BGR; Start 66; Stop 90
ttgtttctattgccatgatatgaag

SEQ ID NO: 388716 - DNA, 25 bp, Artificial
  probe
  misc_feature (1)..(25): SEQ ID NO: 4696; WAN024BGR; Start 54; Stop 78
gtcaagggagaattgtttctattgc

SEQ ID NO: 388717 - DNA, 25 bp, Artificial
  probe
  misc_feature (1)..(25): SEQ ID NO: 4696; WAN024BGR; Start 57; Stop 81
aagggagaattgtttctattgccat

SEQ ID NO: 388718 - DNA, 25 bp, Artificial
  probe
  misc_feature (1)..(25): SEQ ID NO: 4696; WAN024BGR; Start 53; Stop 77
agtcaagggagaattgtttctattg

SEQ ID NO: 388719 - DNA, 25 bp, Artificial
  probe
  misc_feature (1)..(25): SEQ ID NO: 4696; WAN024BGR; Start 51; Stop 75
caagtcaagggagaattgtttctat

SEQ ID NO: 388720 - DNA, 25 bp, Artificial
  probe
  misc_feature (1)..(25): SEQ ID NO: 4696; WAN024BGR; Start 27; Stop 51
ctatgaaggctcaagcgattgtcac

SEQ ID NO: 388721 - DNA, 25 bp, Artificial
  probe
  misc_feature (1)..(25): SEQ ID NO: 4696; WAN024BGR; Start 55; Stop 79
tcaagggagaattgtttctattgcc

SEQ ID NO: 388722 - DNA, 25 bp, Artificial
  probe
  misc_feature (1)..(25): SEQ ID NO: 4696; WAN024BGR; Start 60; Stop 84
ggagaattgtttctattgccatgat

SEQ ID NO: 388723 - DNA, 25 bp, Artificial
  probe
  misc_feature (1)..(25): SEQ ID NO: 4696; WAN024BGR; Start 56; Stop 80
caagggagaattgtttctattgcca

SEQ ID NO: 388724 - DNA, 25 bp, Artificial
  probe
  misc_feature (1)..(25): SEQ ID NO: 4696; WAN024BGR; Start 65; Stop 89
attgtttctattgccatgatatgaa

SEQ ID NO: 388725 - DNA, 25 bp, Artificial
  probe
  misc_feature (1)..(25): SEQ ID NO: 4696; WAN024BGR; Start 64; Stop 88
aattgtttctattgccatgatatga

SEQ ID NO: 388726 - DNA, 25 bp, Artificial
  probe
  misc_feature (1)..(25): SEQ ID NO: 4696; WAN024BGR; Start 52; Stop 76
aagtcaagggagaattgtttctatt

SEQ ID NO: 388727 - DNA, 25 bp, Artificial
  probe
  misc_feature (1)..(25): SEQ ID NO: 4696; WAN024BGR; Start 59; Stop 83
gggagaattgtttctattgccatga

SEQ ID NO: 388728 - DNA, 25 bp, Artificial
  probe
  misc_feature (1)..(25): SEQ ID NO: 4696; WAN024BGR; Start 58; Stop 82
agggagaattgtttctattgccatg

SEQ ID NO: 388729 - DNA, 25 bp, Artificial
  probe
  misc_feature (1)..(25): SEQ ID NO: 4696; WAN024BGR; Start 75; Stop 99
ttgccatgatatgaagttgttcaaa

SEQ ID NO: 388730 - DNA, 25 bp, Artificial
  probe
  misc_feature (1)..(25): SEQ ID NO: 4696; WAN024BGR; Start 63; Stop 87
gaattgtttctattgccatgatatg

SEQ ID NO: 388731 - DNA, 25 bp, Artificial
  probe
  misc_feature (1)..(25): SEQ ID NO: 4696; WAN024BGR; Start 176; Stop 200
ctcaagcacaaactccacgtaaatc

SEQ ID NO: 388732 - DNA, 25 bp, Artificial
  probe
  misc_feature (1)..(25): SEQ ID NO: 4696; WAN024BGR; Start 50; Stop 74
acaagtcaagggagaattgtttcta

SEQ ID NO: 388733 - DNA, 25 bp, Artificial
  probe
  misc_feature (1)..(25): SEQ ID NO: 4696; WAN024BGR; Start 184; Stop 208
caaactccacgtaaatccagcaaac

SEQ ID NO: 388734 - DNA, 25 bp, Artificial
  probe
  misc_feature (1)..(25): SEQ ID NO: 4696; WAN024BGR; Start 185; Stop 209
aaactccacgtaaatccagcaaact

SEQ ID NO: 388735 - DNA, 25 bp, Artificial
  probe
  misc_feature (1)..(25): SEQ ID NO: 4696; WAN024BGR; Start 49; Stop 73
cacaagtcaagggagaattgtttct

SEQ ID NO: 388736 - DNA, 25 bp, Artificial
  probe
  misc_feature (1)..(25): SEQ ID NO: 4696; WAN024BGR; Start 48; Stop 72
tcacaagtcaagggagaattgtttc

SEQ ID NO: 388737 - DNA, 25 bp, Artificial
  probe
  misc_feature (1)..(25): SEQ ID NO: 4697; WAN024C68-3; Start 1102; Stop 1126
ttcttacgattagtcaggctcataa

SEQ ID NO: 388738 - DNA, 25 bp, Artificial
  probe
  misc_feature (1)..(25): SEQ ID NO: 4697; WAN024C68-3; Start 271; Stop 295
agaccattgttcaatcggatagtta

SEQ ID NO: 388739 - DNA, 25 bp, Artificial
  probe
  misc_feature (1)..(25): SEQ ID NO: 4697; WAN024C68-3; Start 270; Stop 294
aagaccattgttcaatcggatagtt

SEQ ID NO: 388740 - DNA, 25 bp, Artificial
  probe
  misc_feature (1)..(25): SEQ ID NO: 4697; WAN024C68-3; Start 218; Stop 242
aatagcggatatgtctgaaggagaa

SEQ ID NO: 388741 - DNA, 25 bp, Artificial
  probe
  misc_feature (1)..(25): SEQ ID NO: 4697; WAN024C68-3; Start 1061; Stop 1085
tatcaatgaaggacagtcagacaag

SEQ ID NO: 388742 - DNA, 25 bp, Artificial
  probe
  misc_feature (1)..(25): SEQ ID NO: 4697; WAN024C68-3; Start 1060; Stop 1084
atatcaatgaaggacagtcagacaa

SEQ ID NO: 388743 - DNA, 25 bp, Artificial
  probe
  misc_feature (1)..(25): SEQ ID NO: 4697; WAN024C68-3; Start 272; Stop 296
gaccattgttcaatcggatagttat

SEQ ID NO: 388744 - DNA, 25 bp, Artificial
  probe
  misc_feature (1)..(25): SEQ ID NO: 4697; WAN024C68-3; Start 269; Stop 293
gaagaccattgttcaatcggatagt

SEQ ID NO: 388745 - DNA, 25 bp, Artificial
  probe
  misc_feature (1)..(25): SEQ ID NO: 4697; WAN024C68-3; Start 488; Stop 512
gaattacgaacacatgaacaaggaa

SEQ ID NO: 388746 - DNA, 25 bp, Artificial
  probe
  misc_feature (1)..(25): SEQ ID NO: 4697; WAN024C68-3; Start 482; Stop 506
taccttgaattacgaacacatgaac

SEQ ID NO: 388747 - DNA, 25 bp, Artificial
  probe
  misc_feature (1)..(25): SEQ ID NO: 4697; WAN024C68-3; Start 217; Stop 241
gaatagcggatatgtctgaaggaga

SEQ ID NO: 388748 - DNA, 25 bp, Artificial
  probe
  misc_feature (1)..(25): SEQ ID NO: 4697; WAN024C68-3; Start 481; Stop 505
gtaccttgaattacgaacacatgaa

SEQ ID NO: 388749 - DNA, 25 bp, Artificial
  probe
  misc_feature (1)..(25): SEQ ID NO: 4697; WAN024C68-3; Start 273; Stop 297
accattgttcaatcggatagttatt

SEQ ID NO: 388750 - DNA, 25 bp, Artificial
  probe
  misc_feature (1)..(25): SEQ ID NO: 4697; WAN024C68-3; Start 487; Stop 511
tgaattacgaacacatgaacaagga

SEQ ID NO: 388751 - DNA, 25 bp, Artificial
  probe
  misc_feature (1)..(25): SEQ ID NO: 4697; WAN024C68-3; Start 1103; Stop 1127
tcttacgattagtcaggctcataag

SEQ ID NO: 388752 - DNA, 25 bp, Artificial
  probe
  misc_feature (1)..(25): SEQ ID NO: 4697; WAN024C68-3; Start 486; Stop 510
ttgaattacgaacacatgaacaagg

SEQ ID NO: 388753 - DNA, 25 bp, Artificial
  probe
  misc_feature (1)..(25): SEQ ID NO: 4697; WAN024C68-3; Start 484; Stop 508
ccttgaattacgaacacatgaacaa

SEQ ID NO: 388754 - DNA, 25 bp, Artificial
  probe
  misc_feature (1)..(25): SEQ ID NO: 4697; WAN024C68-3; Start 483; Stop 507
accttgaattacgaacacatgaaca

SEQ ID NO: 388755 - DNA, 25 bp, Artificial
  probe
  misc_feature (1)..(25): SEQ ID NO: 4697; WAN024C68-3; Start 595; Stop 619
caacagttaatccatataagatgcc

SEQ ID NO: 388756 - DNA, 25 bp, Artificial
  probe
  misc_feature (1)..(25): SEQ ID NO: 4697; WAN024C68-3; Start 594; Stop 618
ccaacagttaatccatataagatgc

SEQ ID NO: 388757 - DNA, 25 bp, Artificial
  probe
  misc_feature (1)..(25): SEQ ID NO: 4697; WAN024C68-3; Start 593; Stop 617
gccaacagttaatccatataagatg

SEQ ID NO: 388758 - DNA, 25 bp, Artificial
  probe
  misc_feature (1)..(25): SEQ ID NO: 4697; WAN024C68-3; Start 608; Stop 632
atataagatgcctggtacaacagag

SEQ ID NO: 388759 - DNA, 25 bp, Artificial
  probe
  misc_feature (1)..(25): SEQ ID NO: 4697; WAN024C68-3; Start 607; Stop 631
catataagatgcctggtacaacaga

SEQ ID NO: 388760 - DNA, 25 bp, Artificial
  probe
  misc_feature (1)..(25): SEQ ID NO: 4697; WAN024C68-3; Start 596; Stop 620
aacagttaatccatataagatgcct

SEQ ID NO: 388761 - DNA, 25 bp, Artificial
  probe
  misc_feature (1)..(25): SEQ ID NO: 4697; WAN024C68-3; Start 609; Stop 633
tataagatgcctggtacaacagaga

SEQ ID NO: 388762 - DNA, 25 bp, Artificial
  probe
  misc_feature (1)..(25): SEQ ID NO: 4697; WAN024C68-3; Start 597; Stop 621
acagttaatccatataagatgcctg

SEQ ID NO: 388763 - DNA, 25 bp, Artificial
  probe
  misc_feature (1)..(25): SEQ ID NO: 4697; WAN024C68-3; Start 216; Stop 240
cgaatagcggatatgtctgaaggag

SEQ ID NO: 388764 - DNA, 25 bp, Artificial
  probe
  misc_feature (1)..(25): SEQ ID NO: 4697; WAN024C68-3; Start 599; Stop 623
agttaatccatataagatgcctggt

SEQ ID NO: 388765 - DNA, 25 bp, Artificial
  probe
  misc_feature (1)..(25): SEQ ID NO: 4697; WAN024C68-3; Start 598; Stop 622
cagttaatccatataagatgcctgg

SEQ ID NO: 388766 - DNA, 25 bp, Artificial
  probe
  misc_feature (1)..(25): SEQ ID NO: 4697; WAN024C68-3; Start 1595; Stop 1619
ccgtagaggaaagaacaactaacta

SEQ ID NO: 388767 - DNA, 25 bp, Artificial
  probe
  misc_feature (1)..(25): SEQ ID NO: 4697; WAN024C68-3; Start 1374; Stop 1398
attgcctactataatcctgaaaccc

SEQ ID NO: 388768 - DNA, 25 bp, Artificial
  probe
  misc_feature (1)..(25): SEQ ID NO: 4697; WAN024C68-3; Start 1100; Stop 1124
atttcttacgattagtcaggctcat

SEQ ID NO: 388769 - DNA, 25 bp, Artificial
  probe
  misc_feature (1)..(25): SEQ ID NO: 4697; WAN024C68-3; Start 623; Stop 647
tacaacagagacggatgctaagaga

SEQ ID NO: 388770 - DNA, 25 bp, Artificial
  probe
  misc_feature (1)..(25): SEQ ID NO: 4698; WAN024A5H; Start 25; Stop 49
gctatactatcctaagcaaaggttt

SEQ ID NO: 388771 - DNA, 25 bp, Artificial
  probe
  misc_feature (1)..(25): SEQ ID NO: 4698; WAN024A5H; Start 26; Stop 50
ctatactatcctaagcaaaggtttt

SEQ ID NO: 388772 - DNA, 25 bp, Artificial
  probe
  misc_feature (1)..(25): SEQ ID NO: 4698; WAN024A5H; Start 48; Stop 72
ttttaatgtcatcccgtgaggtgac

SEQ ID NO: 388773 - DNA, 25 bp, Artificial
  probe
  misc_feature (1)..(25): SEQ ID NO: 4698; WAN024A5H; Start 49; Stop 73
tttaatgtcatcccgtgaggtgacg

SEQ ID NO: 388774 - DNA, 25 bp, Artificial
  probe
  misc_feature (1)..(25): SEQ ID NO: 4699; WAN024AOP; Start 64; Stop 88
gcttatctgtcttgtcatctctatt

SEQ ID NO: 388775 - DNA, 25 bp, Artificial
  probe
  misc_feature (1)..(25): SEQ ID NO: 4699; WAN024AOP; Start 69; Stop 93
tctgtcttgtcatctctattaagga

SEQ ID NO: 388776 - DNA, 25 bp, Artificial
  probe
  misc_feature (1)..(25): SEQ ID NO: 4699; WAN024AOP; Start 70; Stop 94
ctgtcttgtcatctctattaaggat

SEQ ID NO: 388777 - DNA, 25 bp, Artificial
  probe
  misc_feature (1)..(25): SEQ ID NO: 4699; WAN024AOP; Start 68; Stop 92
atctgtcttgtcatctctattaagg

SEQ ID NO: 388778 - DNA, 25 bp, Artificial
  probe
  misc_feature (1)..(25): SEQ ID NO: 4699; WAN024AOP; Start 162; Stop 186
ggacataaggaatacctatctctca

SEQ ID NO: 388779 - DNA, 25 bp, Artificial
  probe
  misc_feature (1)..(25): SEQ ID NO: 4699; WAN024AOP; Start 63; Stop 87
agcttatctgtcttgtcatctctat

SEQ ID NO: 388780 - DNA, 25 bp, Artificial
  probe
  misc_feature (1)..(25): SEQ ID NO: 4699; WAN024AOP; Start 161; Stop 185
aggacataaggaatacctatctctc

SEQ ID NO: 388781 - DNA, 25 bp, Artificial
  probe
  misc_feature (1)..(25): SEQ ID NO: 4699; WAN024AOP; Start 56; Stop 80
ttaactgagcttatctgtcttgtca

SEQ ID NO: 388782 - DNA, 25 bp, Artificial
  probe
  misc_feature (1)..(25): SEQ ID NO: 4699; WAN024AOP; Start 55; Stop 79
attaactgagcttatctgtcttgtc

SEQ ID NO: 388783 - DNA, 25 bp, Artificial
  probe
  misc_feature (1)..(25): SEQ ID NO: 4699; WAN024AOP; Start 57; Stop 81
taactgagcttatctgtcttgtcat

SEQ ID NO: 388784 - DNA, 25 bp, Artificial
  probe
  misc_feature (1)..(25): SEQ ID NO: 4699; WAN024AOP; Start 58; Stop 82
aactgagcttatctgtcttgtcatc

SEQ ID NO: 388785 - DNA, 25 bp, Artificial
  probe
  misc_feature (1)..(25): SEQ ID NO: 4699; WAN024AOP; Start 88; Stop 112
taaggatggtttagataatcgggtg

SEQ ID NO: 388786 - DNA, 25 bp, Artificial
  probe
  misc_feature (1)..(25): SEQ ID NO: 4699; WAN024AOP; Start 158; Stop 182
tgaaggacataaggaatacctatct

SEQ ID NO: 388787 - DNA, 25 bp, Artificial
  probe
  misc_feature (1)..(25): SEQ ID NO: 4699; WAN024AOP; Start 62; Stop 86
gagcttatctgtcttgtcatctcta

SEQ ID NO: 388788 - DNA, 25 bp, Artificial
  probe
  misc_feature (1)..(25): SEQ ID NO: 4699; WAN024AOP; Start 228; Stop 252
tgaaggcttggatttctaaaggtta

SEQ ID NO: 388789 - DNA, 25 bp, Artificial
  probe
  misc_feature (1)..(25): SEQ ID NO: 4699; WAN024AOP; Start 60; Stop 84
ctgagcttatctgtcttgtcatctc

SEQ ID NO: 388790 - DNA, 25 bp, Artificial
  probe
  misc_feature (1)..(25): SEQ ID NO: 4699; WAN024AOP; Start 225; Stop 249
tagtgaaggcttggatttctaaagg

SEQ ID NO: 388791 - DNA, 25 bp, Artificial
  probe
  misc_feature (1)..(25): SEQ ID NO: 4699; WAN024AOP; Start 142; Stop 166
aaaggagtgatgaatttgaaggaca

SEQ ID NO: 388792 - DNA, 25 bp, Artificial
  probe
  misc_feature (1)..(25): SEQ ID NO: 4699; WAN024AOP; Start 87; Stop 111
ttaaggatggtttagataatcgggt

SEQ ID NO: 388793 - DNA, 25 bp, Artificial
  probe
  misc_feature (1)..(25): SEQ ID NO: 4699; WAN024AOP; Start 61; Stop 85
tgagcttatctgtcttgtcatctct

SEQ ID NO: 388794 - DNA, 25 bp, Artificial
  probe
  misc_feature (1)..(25): SEQ ID NO: 4699; WAN024AOP; Start 59; Stop 83
actgagcttatctgtcttgtcatct

SEQ ID NO: 388795 - DNA, 25 bp, Artificial
  probe
  misc_feature (1)..(25): SEQ ID NO: 4699; WAN024AOP; Start 54; Stop 78
aattaactgagcttatctgtcttgt

SEQ ID NO: 388796 - DNA, 25 bp, Artificial
  probe
  misc_feature (1)..(25): SEQ ID NO: 4699; WAN024AOP; Start 320; Stop 344
aagaacttgaataatttcgcacctt

SEQ ID NO: 388797 - DNA, 25 bp, Artificial
  probe
  misc_feature (1)..(25): SEQ ID NO: 4699; WAN024AOP; Start 144; Stop 168
aggagtgatgaatttgaaggacata

SEQ ID NO: 388798 - DNA, 25 bp, Artificial
  probe
  misc_feature (1)..(25): SEQ ID NO: 4699; WAN024AOP; Start 160; Stop 184
aaggacataaggaatacctatctct

SEQ ID NO: 388799 - DNA, 25 bp, Artificial
  probe
  misc_feature (1)..(25): SEQ ID NO: 4699; WAN024AOP; Start 143; Stop 167
aaggagtgatgaatttgaaggacat

SEQ ID NO: 388800 - DNA, 25 bp, Artificial
  probe
  misc_feature (1)..(25): SEQ ID NO: 4699; WAN024AOP; Start 159; Stop 183
gaaggacataaggaatacctatctc

SEQ ID NO: 388801 - DNA, 25 bp, Artificial
  probe
  misc_feature (1)..(25): SEQ ID NO: 4699; WAN024AOP; Start 148; Stop 172
gtgatgaatttgaaggacataagga

SEQ ID NO: 388802 - DNA, 25 bp, Artificial
  probe
  misc_feature (1)..(25): SEQ ID NO: 4699; WAN024AOP; Start 145; Stop 169
ggagtgatgaatttgaaggacataa

SEQ ID NO: 388803 - DNA, 25 bp, Artificial
  probe
  misc_feature (1)..(25): SEQ ID NO: 4699; WAN024AOP; Start 92; Stop 116
gatggtttagataatcgggtgtctg

SEQ ID NO: 388804 - DNA, 25 bp, Artificial
  probe
  misc_feature (1)..(25): SEQ ID NO: 4699; WAN024AOP; Start 321; Stop 345
agaacttgaataatttcgcacctta

SEQ ID NO: 388805 - DNA, 25 bp, Artificial
  probe
  misc_feature (1)..(25): SEQ ID NO: 4699; WAN024AOP; Start 319; Stop 343
taagaacttgaataatttcgcacct

SEQ ID NO: 388806 - DNA, 25 bp, Artificial
  probe
  misc_feature (1)..(25): SEQ ID NO: 4699; WAN024AOP; Start 147; Stop 171
agtgatgaatttgaaggacataagg

SEQ ID NO: 388807 - DNA, 25 bp, Artificial
  probe
  misc_feature (1)..(25): SEQ ID NO: 4700; WAN024AIO; Start 34; Stop 58
agattatccgtgaatttcttgctta

SEQ ID NO: 388808 - DNA, 25 bp, Artificial
  probe
  misc_feature (1)..(25): SEQ ID NO: 4700; WAN024AIO; Start 41; Stop 65
ccgtgaatttcttgcttatttatga

SEQ ID NO: 388809 - DNA, 25 bp, Artificial
  probe
  misc_feature (1)..(25): SEQ ID NO: 4700; WAN024AIO; Start 40; Stop 64
tccgtgaatttcttgcttatttatg

SEQ ID NO: 388810 - DNA, 25 bp, Artificial
  probe
  misc_feature (1)..(25): SEQ ID NO: 4700; WAN024AIO; Start 35; Stop 59
gattatccgtgaatttcttgcttat

SEQ ID NO: 388811 - DNA, 25 bp, Artificial
  probe
  misc_feature (1)..(25): SEQ ID NO: 4700; WAN024AIO; Start 37; Stop 61
ttatccgtgaatttcttgcttattt

SEQ ID NO: 388812 - DNA, 25 bp, Artificial
  probe
  misc_feature (1)..(25): SEQ ID NO: 4700; WAN024AIO; Start 39; Stop 63
atccgtgaatttcttgcttatttat

SEQ ID NO: 388813 - DNA, 25 bp, Artificial
  probe
  misc_feature (1)..(25): SEQ ID NO: 4700; WAN024AIO; Start 36; Stop 60
attatccgtgaatttcttgcttatt

SEQ ID NO: 388814 - DNA, 25 bp, Artificial
  probe
  misc_feature (1)..(25): SEQ ID NO: 4700; WAN024AIO; Start 38; Stop 62
tatccgtgaatttcttgcttattta

SEQ ID NO: 388815 - DNA, 25 bp, Artificial
  probe
  misc_feature (1)..(25): SEQ ID NO: 4700; WAN024AIO; Start 33; Stop 57
aagattatccgtgaatttcttgctt

SEQ ID NO: 388816 - DNA, 25 bp, Artificial
  probe
  misc_feature (1)..(25): SEQ ID NO: 4700; WAN024AIO; Start 32; Stop 56
aaagattatccgtgaatttcttgct

SEQ ID NO: 388817 - DNA, 25 bp, Artificial
  probe
  misc_feature (1)..(25): SEQ ID NO: 4700; WAN024AIO; Start 42; Stop 66
cgtgaatttcttgcttatttatgat

SEQ ID NO: 388818 - DNA, 25 bp, Artificial
  probe
  misc_feature (1)..(25): SEQ ID NO: 4700; WAN024AIO; Start 31; Stop 55
taaagattatccgtgaatttcttgc

SEQ ID NO: 388819 - DNA, 25 bp, Artificial
  probe
  misc_feature (1)..(25): SEQ ID NO: 4700; WAN024AIO; Start 87; Stop 111
aatgactcatcgtattcaattttga

SEQ ID NO: 388820 - DNA, 25 bp, Artificial
  probe
  misc_feature (1)..(25): SEQ ID NO: 4700; WAN024AIO; Start 102; Stop 126
tcaattttgagtaaaactaggagga

SEQ ID NO: 388821 - DNA, 25 bp, Artificial
  probe
  misc_feature (1)..(25): SEQ ID NO: 4700; WAN024AIO; Start 101; Stop 125
ttcaattttgagtaaaactaggagg

SEQ ID NO: 388822 - DNA, 25 bp, Artificial
  probe
  misc_feature (1)..(25): SEQ ID NO: 4700; WAN024AIO; Start 103; Stop 127
caattttgagtaaaactaggaggat

SEQ ID NO: 388823 - DNA, 25 bp, Artificial
  probe
  misc_feature (1)..(25): SEQ ID NO: 4700; WAN024AIO; Start 30; Stop 54
ttaaagattatccgtgaatttcttg

SEQ ID NO: 388824 - DNA, 25 bp, Artificial
  probe
  misc_feature (1)..(25): SEQ ID NO: 4700; WAN024AIO; Start 86; Stop 110
aaatgactcatcgtattcaattttg

SEQ ID NO: 388825 - DNA, 25 bp, Artificial
  probe
  misc_feature (1)..(25): SEQ ID NO: 4700; WAN024AIO; Start 104; Stop 128
aattttgagtaaaactaggaggatc

SEQ ID NO: 388826 - DNA, 25 bp, Artificial
  probe
  misc_feature (1)..(25): SEQ ID NO: 4700; WAN024AIO; Start 53; Stop 77
tgcttatttatgataaaatgggagt

SEQ ID NO: 388827 - DNA, 25 bp, Artificial
  probe
  misc_feature (1)..(25): SEQ ID NO: 4700; WAN024AIO; Start 88; Stop 112
atgactcatcgtattcaattttgag

SEQ ID NO: 388828 - DNA, 25 bp, Artificial
  probe
  misc_feature (1)..(25): SEQ ID NO: 4700; WAN024AIO; Start 52; Stop 76
ttgcttatttatgataaaatgggag

SEQ ID NO: 388829 - DNA, 25 bp, Artificial
  probe
  misc_feature (1)..(25): SEQ ID NO: 4700; WAN024AIO; Start 51; Stop 75
cttgcttatttatgataaaatggga

SEQ ID NO: 388830 - DNA, 25 bp, Artificial
  probe
  misc_feature (1)..(25): SEQ ID NO: 4700; WAN024AIO; Start 50; Stop 74
tcttgcttatttatgataaaatggg

SEQ ID NO: 388831 - DNA, 25 bp, Artificial
  probe
  misc_feature (1)..(25): SEQ ID NO: 4700; WAN024AIO; Start 94; Stop 118
catcgtattcaattttgagtaaaac

SEQ ID NO: 388832 - DNA, 25 bp, Artificial
  probe
  misc_feature (1)..(25): SEQ ID NO: 4700; WAN024AIO; Start 29; Stop 53
tttaaagattatccgtgaatttctt

SEQ ID NO: 388833 - DNA, 25 bp, Artificial
  probe
  misc_feature (1)..(25): SEQ ID NO: 4700; WAN024AIO; Start 95; Stop 119
atcgtattcaattttgagtaaaact

SEQ ID NO: 388834 - DNA, 25 bp, Artificial
  probe
  misc_feature (1)..(25): SEQ ID NO: 4700; WAN024AIO; Start 93; Stop 117
tcatcgtattcaattttgagtaaaa

SEQ ID NO: 388835 - DNA, 25 bp, Artificial
  probe
  misc_feature (1)..(25): SEQ ID NO: 4700; WAN024AIO; Start 100; Stop 124
attcaattttgagtaaaactaggag

SEQ ID NO: 388836 - DNA, 25 bp, Artificial
  probe
  misc_feature (1)..(25): SEQ ID NO: 4700; WAN024AIO; Start 106; Stop 130
ttttgagtaaaactaggaggatccc

SEQ ID NO: 388837 - DNA, 25 bp, Artificial
  probe
  misc_feature (1)..(25): SEQ ID NO: 4700; WAN024AIO; Start 28; Stop 52
ttttaaagattatccgtgaatttct

SEQ ID NO: 388838 - DNA, 25 bp, Artificial
  probe
  misc_feature (1)..(25): SEQ ID NO: 4700; WAN024AIO; Start 105; Stop 129
attttgagtaaaactaggaggatcc

SEQ ID NO: 388839 - DNA, 25 bp, Artificial
  probe
  misc_feature (1)..(25): SEQ ID NO: 4700; WAN024AIO; Start 96; Stop 120
tcgtattcaattttgagtaaaacta

SEQ ID NO: 388840 - DNA, 25 bp, Artificial
  probe
  misc_feature (1)..(25): SEQ ID NO: 4701; WAN0249Z4; Start 23; Stop 47
tgtgattttaagacttgttagctga

SEQ ID NO: 388841 - DNA, 25 bp, Artificial
  probe
  misc_feature (1)..(25): SEQ ID NO: 4701; WAN0249Z4; Start 22; Stop 46
ttgtgattttaagacttgttagctg

SEQ ID NO: 388842 - DNA, 25 bp, Artificial
  probe
  misc_feature (1)..(25): SEQ ID NO: 4701; WAN0249Z4; Start 20; Stop 44
ttttgtgattttaagacttgttagc

SEQ ID NO: 388843 - DNA, 25 bp, Artificial
  probe
  misc_feature (1)..(25): SEQ ID NO: 4701; WAN0249Z4; Start 24; Stop 48
gtgattttaagacttgttagctgat

SEQ ID NO: 388844 - DNA, 25 bp, Artificial
  probe
  misc_feature (1)..(25): SEQ ID NO: 4701; WAN0249Z4; Start 21; Stop 45
tttgtgattttaagacttgttagct

SEQ ID NO: 388845 - DNA, 25 bp, Artificial
  probe
  misc_feature (1)..(25): SEQ ID NO: 4701; WAN0249Z4; Start 25; Stop 49
tgattttaagacttgttagctgatt

SEQ ID NO: 388846 - DNA, 25 bp, Artificial
  probe
  misc_feature (1)..(25): SEQ ID NO: 4701; WAN0249Z4; Start 26; Stop 50
gattttaagacttgttagctgattt

SEQ ID NO: 388847 - DNA, 25 bp, Artificial
  probe
  misc_feature (1)..(25): SEQ ID NO: 4701; WAN0249Z4; Start 27; Stop 51
attttaagacttgttagctgatttt

SEQ ID NO: 388848 - DNA, 25 bp, Artificial
  probe
  misc_feature (1)..(25): SEQ ID NO: 4702; WAN024B7P; Start 18; Stop 42
aatgaaacaagaacaggacaaatcg

SEQ ID NO: 388849 - DNA, 25 bp, Artificial
  probe
  misc_feature (1)..(25): SEQ ID NO: 4702; WAN024B7P; Start 17; Stop 41
aaatgaaacaagaacaggacaaatc

SEQ ID NO: 388850 - DNA, 25 bp, Artificial
  probe
  misc_feature (1)..(25): SEQ ID NO: 4702; WAN024B7P; Start 2; Stop 26
gcgatctatatagtaaaatgaaaca

SEQ ID NO: 388851 - DNA, 25 bp, Artificial
  probe
  misc_feature (1)..(25): SEQ ID NO: 4702; WAN024B7P; Start 1; Stop 25
tgcgatctatatagtaaaatgaaac

SEQ ID NO: 388852 - DNA, 25 bp, Artificial
  probe
  misc_feature (1)..(25): SEQ ID NO: 4703; WAN0249YV; Start 153; Stop 177
atatcataatgcgtcgtttaaggag

SEQ ID NO: 388853 - DNA, 25 bp, Artificial
  probe
  misc_feature (1)..(25): SEQ ID NO: 4703; WAN0249YV; Start 152; Stop 176
aatatcataatgcgtcgtttaagga

SEQ ID NO: 388854 - DNA, 25 bp, Artificial
  probe
  misc_feature (1)..(25): SEQ ID NO: 4703; WAN0249YV; Start 145; Stop 169
tctatcaaatatcataatgcgtcgt

SEQ ID NO: 388855 - DNA, 25 bp, Artificial
  probe
  misc_feature (1)..(25): SEQ ID NO: 4703; WAN0249YV; Start 151; Stop 175
aaatatcataatgcgtcgtttaagg

SEQ ID NO: 388856 - DNA, 25 bp, Artificial
  probe
  misc_feature (1)..(25): SEQ ID NO: 4703; WAN0249YV; Start 144; Stop 168
ctctatcaaatatcataatgcgtcg

SEQ ID NO: 388857 - DNA, 25 bp, Artificial
  probe
  misc_feature (1)..(25): SEQ ID NO: 4703; WAN0249YV; Start 146; Stop 170
ctatcaaatatcataatgcgtcgtt

SEQ ID NO: 388858 - DNA, 25 bp, Artificial
  probe
  misc_feature (1)..(25): SEQ ID NO: 4703; WAN0249YV; Start 149; Stop 173
tcaaatatcataatgcgtcgtttaa

SEQ ID NO: 388859 - DNA, 25 bp, Artificial
  probe
  misc_feature (1)..(25): SEQ ID NO: 4703; WAN0249YV; Start 148; Stop 172
atcaaatatcataatgcgtcgttta

SEQ ID NO: 388860 - DNA, 25 bp, Artificial
  probe
  misc_feature (1)..(25): SEQ ID NO: 4703; WAN0249YV; Start 147; Stop 171
tatcaaatatcataatgcgtcgttt

SEQ ID NO: 388861 - DNA, 25 bp, Artificial
  probe
  misc_feature (1)..(25): SEQ ID NO: 4703; WAN0249YV; Start 150; Stop 174
caaatatcataatgcgtcgtttaag

SEQ ID NO: 388862 - DNA, 25 bp, Artificial
  probe
  misc_feature (1)..(25): SEQ ID NO: 4703; WAN0249YV; Start 56; Stop 80
ttggagaaggtcgagacaagataaa

SEQ ID NO: 388863 - DNA, 25 bp, Artificial
  probe
  misc_feature (1)..(25): SEQ ID NO: 4703; WAN0249YV; Start 55; Stop 79
tttggagaaggtcgagacaagataa

SEQ ID NO: 388864 - DNA, 25 bp, Artificial
  probe
  misc_feature (1)..(25): SEQ ID NO: 4703; WAN0249YV; Start 44; Stop 68
tatagcaattctttggagaaggtcg

SEQ ID NO: 388865 - DNA, 25 bp, Artificial
  probe
  misc_feature (1)..(25): SEQ ID NO: 4703; WAN0249YV; Start 54; Stop 78
ctttggagaaggtcgagacaagata

SEQ ID NO: 388866 - DNA, 25 bp, Artificial
  probe
  misc_feature (1)..(25): SEQ ID NO: 4703; WAN0249YV; Start 143; Stop 167
tctctatcaaatatcataatgcgtc

SEQ ID NO: 388867 - DNA, 25 bp, Artificial
  probe
  misc_feature (1)..(25): SEQ ID NO: 4703; WAN0249YV; Start 43; Stop 67
ttatagcaattctttggagaaggtc

SEQ ID NO: 388868 - DNA, 25 bp, Artificial
  probe
  misc_feature (1)..(25): SEQ ID NO: 4703; WAN0249YV; Start 42; Stop 66
attatagcaattctttggagaaggt

SEQ ID NO: 388869 - DNA, 25 bp, Artificial
  probe
  misc_feature (1)..(25): SEQ ID NO: 4703; WAN0249YV; Start 142; Stop 166
ttctctatcaaatatcataatgcgt

SEQ ID NO: 388870 - DNA, 25 bp, Artificial
  probe
  misc_feature (1)..(25): SEQ ID NO: 4703; WAN0249YV; Start 58; Stop 82
ggagaaggtcgagacaagataaaat

SEQ ID NO: 388871 - DNA, 25 bp, Artificial
  probe
  misc_feature (1)..(25): SEQ ID NO: 4703; WAN0249YV; Start 62; Stop 86
aaggtcgagacaagataaaataggt

SEQ ID NO: 388872 - DNA, 25 bp, Artificial
  probe
  misc_feature (1)..(25): SEQ ID NO: 4703; WAN0249YV; Start 61; Stop 85
gaaggtcgagacaagataaaatagg

SEQ ID NO: 388873 - DNA, 25 bp, Artificial
  probe
  misc_feature (1)..(25): SEQ ID NO: 4703; WAN0249YV; Start 45; Stop 69
atagcaattctttggagaaggtcga

SEQ ID NO: 388874 - DNA, 25 bp, Artificial
  probe
  misc_feature (1)..(25): SEQ ID NO: 4703; WAN0249YV; Start 2; Stop 26
gctaaaatttgaagtgtagtgcaga

SEQ ID NO: 388875 - DNA, 25 bp, Artificial
  probe
  misc_feature (1)..(25): SEQ ID NO: 4703; WAN0249YV; Start 63; Stop 87
aggtcgagacaagataaaataggta

SEQ ID NO: 388876 - DNA, 25 bp, Artificial
  probe
  misc_feature (1)..(25): SEQ ID NO: 4703; WAN0249YV; Start 50; Stop 74
aattctttggagaaggtcgagacaa

SEQ ID NO: 388877 - DNA, 25 bp, Artificial
  probe
  misc_feature (1)..(25): SEQ ID NO: 4703; WAN0249YV; Start 57; Stop 81
tggagaaggtcgagacaagataaaa

SEQ ID NO: 388878 - DNA, 25 bp, Artificial
  probe
  misc_feature (1)..(25): SEQ ID NO: 4703; WAN0249YV; Start 141; Stop 165
tttctctatcaaatatcataatgcg

SEQ ID NO: 388879 - DNA, 25 bp, Artificial
  probe
  misc_feature (1)..(25): SEQ ID NO: 4703; WAN0249YV; Start 60; Stop 84
agaaggtcgagacaagataaaatag

SEQ ID NO: 388880 - DNA, 25 bp, Artificial
  probe
  misc_feature (1)..(25): SEQ ID NO: 4703; WAN0249YV; Start 59; Stop 83
gagaaggtcgagacaagataaaata

SEQ ID NO: 388881 - DNA, 25 bp, Artificial
  probe
  misc_feature (1)..(25): SEQ ID NO: 4703; WAN0249YV; Start 51; Stop 75
attctttggagaaggtcgagacaag

SEQ ID NO: 388882 - DNA, 25 bp, Artificial
  probe
  misc_feature (1)..(25): SEQ ID NO: 4703; WAN0249YV; Start 46; Stop 70
tagcaattctttggagaaggtcgag

SEQ ID NO: 388883 - DNA, 25 bp, Artificial
  probe
  misc_feature (1)..(25): SEQ ID NO: 4703; WAN0249YV; Start 64; Stop 88
ggtcgagacaagataaaataggtat

SEQ ID NO: 388884 - DNA, 25 bp, Artificial
  probe
  misc_feature (1)..(25): SEQ ID NO: 4703; WAN0249YV; Start 49; Stop 73
caattctttggagaaggtcgagaca

SEQ ID NO: 388885 - DNA, 25 bp, Artificial
  probe
  misc_feature (1)..(25): SEQ ID NO: 4704; WAN024FEJ-3; Start 164; Stop 188
gttgtggtgaatacgattgctagtc

SEQ ID NO: 388886 - DNA, 25 bp, Artificial
  probe
  misc_feature (1)..(25): SEQ ID NO: 4704; WAN024FEJ-3; Start 162; Stop 186
cagttgtggtgaatacgattgctag

SEQ ID NO: 388887 - DNA, 25 bp, Artificial
  probe
  misc_feature (1)..(25): SEQ ID NO: 4704; WAN024FEJ-3; Start 163; Stop 187
agttgtggtgaatacgattgctagt

SEQ ID NO: 388888 - DNA, 25 bp, Artificial
  probe
  misc_feature (1)..(25): SEQ ID NO: 4704; WAN024FEJ-3; Start 165; Stop 189
ttgtggtgaatacgattgctagtca

SEQ ID NO: 388889 - DNA, 25 bp, Artificial
  probe
  misc_feature (1)..(25): SEQ ID NO: 4704; WAN024FEJ-3; Start 473; Stop 497
tatccaggaaatatcaaggtaaccg

SEQ ID NO: 388890 - DNA, 25 bp, Artificial
  probe
  misc_feature (1)..(25): SEQ ID NO: 4704; WAN024FEJ-3; Start 317; Stop 341
gaagaaattgctaacggctttgaag

SEQ ID NO: 388891 - DNA, 25 bp, Artificial
  probe
  misc_feature (1)..(25): SEQ ID NO: 4704; WAN024FEJ-3; Start 474; Stop 498
atccaggaaatatcaaggtaaccgt

SEQ ID NO: 388892 - DNA, 25 bp, Artificial
  probe
  misc_feature (1)..(25): SEQ ID NO: 4704; WAN024FEJ-3; Start 309; Stop 333
atgatttggaagaaattgctaacgg

SEQ ID NO: 388893 - DNA, 25 bp, Artificial
  probe
  misc_feature (1)..(25): SEQ ID NO: 4704; WAN024FEJ-3; Start 380; Stop 404
attcgtatcatggtcaatccaggaa

SEQ ID NO: 388894 - DNA, 25 bp, Artificial
  probe
  misc_feature (1)..(25): SEQ ID NO: 4704; WAN024FEJ-3; Start 379; Stop 403
aattcgtatcatggtcaatccagga

SEQ ID NO: 388895 - DNA, 25 bp, Artificial
  probe
  misc_feature (1)..(25): SEQ ID NO: 4704; WAN024FEJ-3; Start 427; Stop 451
aatcttggctcacaaagttcgtaag

SEQ ID NO: 388896 - DNA, 25 bp, Artificial
  probe
  misc_feature (1)..(25): SEQ ID NO: 4704; WAN024FEJ-3; Start 375; Stop 399
gtgaaattcgtatcatggtcaatcc

SEQ ID NO: 388897 - DNA, 25 bp, Artificial
  probe
  misc_feature (1)..(25): SEQ ID NO: 4704; WAN024FEJ-3; Start 472; Stop 496
ttatccaggaaatatcaaggtaacc

SEQ ID NO: 388898 - DNA, 25 bp, Artificial
  probe
  misc_feature (1)..(25): SEQ ID NO: 4704; WAN024FEJ-3; Start 430; Stop 454
cttggctcacaaagttcgtaagaaa

SEQ ID NO: 388899 - DNA, 25 bp, Artificial
  probe
  misc_feature (1)..(25): SEQ ID NO: 4704; WAN024FEJ-3; Start 469; Stop 493
cgattatccaggaaatatcaaggta

SEQ ID NO: 388900 - DNA, 25 bp, Artificial
  probe
  misc_feature (1)..(25): SEQ ID NO: 4704; WAN024FEJ-3; Start 374; Stop 398
cgtgaaattcgtatcatggtcaatc

SEQ ID NO: 388901 - DNA, 25 bp, Artificial
  probe
  misc_feature (1)..(25): SEQ ID NO: 4704; WAN024FEJ-3; Start 426; Stop 450
caatcttggctcacaaagttcgtaa

SEQ ID NO: 388902 - DNA, 25 bp, Artificial
  probe
  misc_feature (1)..(25): SEQ ID NO: 4704; WAN024FEJ-3; Start 313; Stop 337
tttggaagaaattgctaacggcttt

SEQ ID NO: 388903 - DNA, 25 bp, Artificial
  probe
  misc_feature (1)..(25): SEQ ID NO: 4704; WAN024FEJ-3; Start 274; Stop 298
tagtgagtctcttgaaagctacatc

SEQ ID NO: 388904 - DNA, 25 bp, Artificial
  probe
  misc_feature (1)..(25): SEQ ID NO: 4704; WAN024FEJ-3; Start 419; Stop 443
aaagtcacaatcttggctcacaaag

SEQ ID NO: 388905 - DNA, 25 bp, Artificial
  probe
  misc_feature (1)..(25): SEQ ID NO: 4704; WAN024FEJ-3; Start 405; Stop 429
aaatcaaggacgacaaagtcacaat

SEQ ID NO: 388906 - DNA, 25 bp, Artificial
  probe
  misc_feature (1)..(25): SEQ ID NO: 4704; WAN024FEJ-3; Start 308; Stop 332
catgatttggaagaaattgctaacg

SEQ ID NO: 388907 - DNA, 25 bp, Artificial
  probe
  misc_feature (1)..(25): SEQ ID NO: 4704; WAN024FEJ-3; Start 475; Stop 499
tccaggaaatatcaaggtaaccgtg

SEQ ID NO: 388908 - DNA, 25 bp, Artificial
  probe
  misc_feature (1)..(25): SEQ ID NO: 4704; WAN024FEJ-3; Start 468; Stop 492
tcgattatccaggaaatatcaaggt

SEQ ID NO: 388909 - DNA, 25 bp, Artificial
  probe
  misc_feature (1)..(25): SEQ ID NO: 4704; WAN024FEJ-3; Start 312; Stop 336
atttggaagaaattgctaacggctt

SEQ ID NO: 388910 - DNA, 25 bp, Artificial
  probe
  misc_feature (1)..(25): SEQ ID NO: 4704; WAN024FEJ-3; Start 418; Stop 442
caaagtcacaatcttggctcacaaa

SEQ ID NO: 388911 - DNA, 25 bp, Artificial
  probe
  misc_feature (1)..(25): SEQ ID NO: 4704; WAN024FEJ-3; Start 406; Stop 430
aatcaaggacgacaaagtcacaatc

SEQ ID NO: 388912 - DNA, 25 bp, Artificial
  probe
  misc_feature (1)..(25): SEQ ID NO: 4704; WAN024FEJ-3; Start 318; Stop 342
aagaaattgctaacggctttgaagg

SEQ ID NO: 388913 - DNA, 25 bp, Artificial
  probe
  misc_feature (1)..(25): SEQ ID NO: 4704; WAN024FEJ-3; Start 316; Stop 340
ggaagaaattgctaacggctttgaa

SEQ ID NO: 388914 - DNA, 25 bp, Artificial
  probe
  misc_feature (1)..(25): SEQ ID NO: 4704; WAN024FEJ-3; Start 467; Stop 491
ctcgattatccaggaaatatcaagg

SEQ ID NO: 388915 - DNA, 25 bp, Artificial
  probe
  misc_feature (1)..(25): SEQ ID NO: 4704; WAN024FEJ-3; Start 476; Stop 500
ccaggaaatatcaaggtaaccgtga

SEQ ID NO: 388916 - DNA, 25 bp, Artificial
  probe
  misc_feature (1)..(25): SEQ ID NO: 4704; WAN024FEJ-3; Start 460; Stop 484
aaacaatctcgattatccaggaaat

SEQ ID NO: 388917 - DNA, 25 bp, Artificial
  probe
  misc_feature (1)..(25): SEQ ID NO: 4704; WAN024FEJ-3; Start 314; Stop 338
ttggaagaaattgctaacggctttg

SEQ ID NO: 388918 - DNA, 25 bp, Artificial
  probe
  misc_feature (1)..(25): SEQ ID NO: 4705; WAN024ABR; Start 52; Stop 76
tgaaacacgaaacattgaaaggaaa

SEQ ID NO: 388919 - DNA, 25 bp, Artificial
  probe
  misc_feature (1)..(25): SEQ ID NO: 4705; WAN024ABR; Start 51; Stop 75
atgaaacacgaaacattgaaaggaa

SEQ ID NO: 388920 - DNA, 25 bp, Artificial
  probe
  misc_feature (1)..(25): SEQ ID NO: 4705; WAN024ABR; Start 41; Stop 65
ttaggatacaatgaaacacgaaaca

SEQ ID NO: 388921 - DNA, 25 bp, Artificial
  probe
  misc_feature (1)..(25): SEQ ID NO: 4705; WAN024ABR; Start 42; Stop 66
taggatacaatgaaacacgaaacat

SEQ ID NO: 388922 - DNA, 25 bp, Artificial
  probe
  misc_feature (1)..(25): SEQ ID NO: 4705; WAN024ABR; Start 37; Stop 61
tgatttaggatacaatgaaacacga

SEQ ID NO: 388923 - DNA, 25 bp, Artificial
  probe
  misc_feature (1)..(25): SEQ ID NO: 4705; WAN024ABR; Start 40; Stop 64
tttaggatacaatgaaacacgaaac

SEQ ID NO: 388924 - DNA, 25 bp, Artificial
  probe
  misc_feature (1)..(25): SEQ ID NO: 4705; WAN024ABR; Start 36; Stop 60
atgatttaggatacaatgaaacacg

SEQ ID NO: 388925 - DNA, 25 bp, Artificial
  probe
  misc_feature (1)..(25): SEQ ID NO: 4705; WAN024ABR; Start 38; Stop 62
gatttaggatacaatgaaacacgaa

SEQ ID NO: 388926 - DNA, 25 bp, Artificial
  probe
  misc_feature (1)..(25): SEQ ID NO: 4705; WAN024ABR; Start 39; Stop 63
atttaggatacaatgaaacacgaaa

SEQ ID NO: 388927 - DNA, 25 bp, Artificial
  probe
  misc_feature (1)..(25): SEQ ID NO: 4705; WAN024ABR; Start 50; Stop 74
aatgaaacacgaaacattgaaagga

SEQ ID NO: 388928 - DNA, 25 bp, Artificial
  probe
  misc_feature (1)..(25): SEQ ID NO: 4705; WAN024ABR; Start 43; Stop 67
aggatacaatgaaacacgaaacatt

SEQ ID NO: 388929 - DNA, 25 bp, Artificial
  probe
  misc_feature (1)..(25): SEQ ID NO: 4705; WAN024ABR; Start 54; Stop 78
aaacacgaaacattgaaaggaaaac

SEQ ID NO: 388930 - DNA, 25 bp, Artificial
  probe
  misc_feature (1)..(25): SEQ ID NO: 4705; WAN024ABR; Start 53; Stop 77
gaaacacgaaacattgaaaggaaaa

SEQ ID NO: 388931 - DNA, 25 bp, Artificial
  probe
  misc_feature (1)..(25): SEQ ID NO: 4705; WAN024ABR; Start 55; Stop 79
aacacgaaacattgaaaggaaaaca

SEQ ID NO: 388932 - DNA, 25 bp, Artificial
  probe
  misc_feature (1)..(25): SEQ ID NO: 4705; WAN024ABR; Start 5; Stop 29
ccatttatgagccttttaattgcct

SEQ ID NO: 388933 - DNA, 25 bp, Artificial
  probe
  misc_feature (1)..(25): SEQ ID NO: 4705; WAN024ABR; Start 4; Stop 28
tccatttatgagccttttaattgcc

SEQ ID NO: 388934 - DNA, 25 bp, Artificial
  probe
  misc_feature (1)..(25): SEQ ID NO: 4705; WAN024ABR; Start 57; Stop 81
cacgaaacattgaaaggaaaacagt

SEQ ID NO: 388935 - DNA, 25 bp, Artificial
  probe
  misc_feature (1)..(25): SEQ ID NO: 4705; WAN024ABR; Start 56; Stop 80
acacgaaacattgaaaggaaaacag

SEQ ID NO: 388936 - DNA, 25 bp, Artificial
  probe
  misc_feature (1)..(25): SEQ ID NO: 4705; WAN024ABR; Start 8; Stop 32
tttatgagccttttaattgccttct

SEQ ID NO: 388937 - DNA, 25 bp, Artificial
  probe
  misc_feature (1)..(25): SEQ ID NO: 4705; WAN024ABR; Start 6; Stop 30
catttatgagccttttaattgcctt

SEQ ID NO: 388938 - DNA, 25 bp, Artificial
  probe
  misc_feature (1)..(25): SEQ ID NO: 4705; WAN024ABR; Start 12; Stop 36
tgagccttttaattgccttctataa

SEQ ID NO: 388939 - DNA, 25 bp, Artificial
  probe
  misc_feature (1)..(25): SEQ ID NO: 4705; WAN024ABR; Start 9; Stop 33
ttatgagccttttaattgccttcta

SEQ ID NO: 388940 - DNA, 25 bp, Artificial
  probe
  misc_feature (1)..(25): SEQ ID NO: 4705; WAN024ABR; Start 7; Stop 31
atttatgagccttttaattgccttc

SEQ ID NO: 388941 - DNA, 25 bp, Artificial
  probe
  misc_feature (1)..(25): SEQ ID NO: 4705; WAN024ABR; Start 11; Stop 35
atgagccttttaattgccttctata

SEQ ID NO: 388942 - DNA, 25 bp, Artificial
  probe
  misc_feature (1)..(25): SEQ ID NO: 4705; WAN024ABR; Start 10; Stop 34
tatgagccttttaattgccttctat

SEQ ID NO: 388943 - DNA, 25 bp, Artificial
  probe
  misc_feature (1)..(25): SEQ ID NO: 4705; WAN024ABR; Start 3; Stop 27
ctccatttatgagccttttaattgc

SEQ ID NO: 388944 - DNA, 25 bp, Artificial
  probe
  misc_feature (1)..(25): SEQ ID NO: 4705; WAN024ABR; Start 35; Stop 59
aatgatttaggatacaatgaaacac

SEQ ID NO: 388945 - DNA, 25 bp, Artificial
  probe
  misc_feature (1)..(25): SEQ ID NO: 4705; WAN024ABR; Start 15; Stop 39
gccttttaattgccttctataatga

SEQ ID NO: 388946 - DNA, 25 bp, Artificial
  probe
  misc_feature (1)..(25): SEQ ID NO: 4705; WAN024ABR; Start 14; Stop 38
agccttttaattgccttctataatg

SEQ ID NO: 388947 - DNA, 25 bp, Artificial
  probe
  misc_feature (1)..(25): SEQ ID NO: 4705; WAN024ABR; Start 13; Stop 37
gagccttttaattgccttctataat

SEQ ID NO: 388948 - DNA, 25 bp, Artificial
  probe
  misc_feature (1)..(25): SEQ ID NO: 4705; WAN024ABR; Start 26; Stop 50
gccttctataatgatttaggataca

SEQ ID NO: 388949 - DNA, 25 bp, Artificial
  probe
  misc_feature (1)..(25): SEQ ID NO: 4705; WAN024ABR; Start 25; Stop 49
tgccttctataatgatttaggatac

SEQ ID NO: 388950 - DNA, 25 bp, Artificial
  probe
  misc_feature (1)..(25): SEQ ID NO: 4705; WAN024ABR; Start 22; Stop 46
aattgccttctataatgatttagga

SEQ ID NO: 388951 - DNA, 25 bp, Artificial
  probe
  misc_feature (1)..(25): SEQ ID NO: 4706; WAN0249LH; Start 9; Stop 33
gctaggcaagagataaactttcaga

SEQ ID NO: 388952 - DNA, 25 bp, Artificial
  probe
  misc_feature (1)..(25): SEQ ID NO: 4706; WAN0249LH; Start 5; Stop 29
aatcgctaggcaagagataaacttt

SEQ ID NO: 388953 - DNA, 25 bp, Artificial
  probe
  misc_feature (1)..(25): SEQ ID NO: 4706; WAN0249LH; Start 4; Stop 28
aaatcgctaggcaagagataaactt

SEQ ID NO: 388954 - DNA, 25 bp, Artificial
  probe
  misc_feature (1)..(25): SEQ ID NO: 4706; WAN0249LH; Start 3; Stop 27
gaaatcgctaggcaagagataaact

SEQ ID NO: 388955 - DNA, 25 bp, Artificial
  probe
  misc_feature (1)..(25): SEQ ID NO: 4706; WAN0249LH; Start 6; Stop 30
atcgctaggcaagagataaactttc

SEQ ID NO: 388956 - DNA, 25 bp, Artificial
  probe
  misc_feature (1)..(25): SEQ ID NO: 4706; WAN0249LH; Start 28; Stop 52
ttcagatatccgcagagagatcatc

SEQ ID NO: 388957 - DNA, 25 bp, Artificial
  probe
  misc_feature (1)..(25): SEQ ID NO: 4706; WAN0249LH; Start 10; Stop 34
ctaggcaagagataaactttcagat

SEQ ID NO: 388958 - DNA, 25 bp, Artificial
  probe
  misc_feature (1)..(25): SEQ ID NO: 4706; WAN0249LH; Start 2; Stop 26
ggaaatcgctaggcaagagataaac

SEQ ID NO: 388959 - DNA, 25 bp, Artificial
  probe
  misc_feature (1)..(25): SEQ ID NO: 4706; WAN0249LH; Start 8; Stop 32
cgctaggcaagagataaactttcag

SEQ ID NO: 388960 - DNA, 25 bp, Artificial
  probe
  misc_feature (1)..(25): SEQ ID NO: 4706; WAN0249LH; Start 12; Stop 36
aggcaagagataaactttcagatat

SEQ ID NO: 388961 - DNA, 25 bp, Artificial
  probe
  misc_feature (1)..(25): SEQ ID NO: 4706; WAN0249LH; Start 7; Stop 31
tcgctaggcaagagataaactttca

SEQ ID NO: 388962 - DNA, 25 bp, Artificial
  probe
  misc_feature (1)..(25): SEQ ID NO: 4706; WAN0249LH; Start 1; Stop 25
tggaaatcgctaggcaagagataaa

SEQ ID NO: 388963 - DNA, 25 bp, Artificial
  probe
  misc_feature (1)..(25): SEQ ID NO: 4706; WAN0249LH; Start 22; Stop 46
taaactttcagatatccgcagagag

SEQ ID NO: 388964 - DNA, 25 bp, Artificial
  probe
  misc_feature (1)..(25): SEQ ID NO: 4706; WAN0249LH; Start 21; Stop 45
ataaactttcagatatccgcagaga

SEQ ID NO: 388965 - DNA, 25 bp, Artificial
  probe
  misc_feature (1)..(25): SEQ ID NO: 4706; WAN0249LH; Start 11; Stop 35
taggcaagagataaactttcagata

SEQ ID NO: 388966 - DNA, 25 bp, Artificial
  probe
  misc_feature (1)..(25): SEQ ID NO: 4706; WAN0249LH; Start 27; Stop 51
tttcagatatccgcagagagatcat

SEQ ID NO: 388967 - DNA, 25 bp, Artificial
  probe
  misc_feature (1)..(25): SEQ ID NO: 4706; WAN0249LH; Start 24; Stop 48
aactttcagatatccgcagagagat

SEQ ID NO: 388968 - DNA, 25 bp, Artificial
  probe
  misc_feature (1)..(25): SEQ ID NO: 4706; WAN0249LH; Start 23; Stop 47
aaactttcagatatccgcagagaga

SEQ ID NO: 388969 - DNA, 25 bp, Artificial
  probe
  misc_feature (1)..(25): SEQ ID NO: 4706; WAN0249LH; Start 19; Stop 43
agataaactttcagatatccgcaga

SEQ ID NO: 388970 - DNA, 25 bp, Artificial
  probe
  misc_feature (1)..(25): SEQ ID NO: 4706; WAN0249LH; Start 17; Stop 41
agagataaactttcagatatccgca

SEQ ID NO: 388971 - DNA, 25 bp, Artificial
  probe
  misc_feature (1)..(25): SEQ ID NO: 4706; WAN0249LH; Start 26; Stop 50
ctttcagatatccgcagagagatca

SEQ ID NO: 388972 - DNA, 25 bp, Artificial
  probe
  misc_feature (1)..(25): SEQ ID NO: 4706; WAN0249LH; Start 25; Stop 49
actttcagatatccgcagagagatc

SEQ ID NO: 388973 - DNA, 25 bp, Artificial
  probe
  misc_feature (1)..(25): SEQ ID NO: 4706; WAN0249LH; Start 20; Stop 44
gataaactttcagatatccgcagag

SEQ ID NO: 388974 - DNA, 25 bp, Artificial
  probe
  misc_feature (1)..(25): SEQ ID NO: 4706; WAN0249LH; Start 18; Stop 42
gagataaactttcagatatccgcag

SEQ ID NO: 388975 - DNA, 25 bp, Artificial
  probe
  misc_feature (1)..(25): SEQ ID NO: 4706; WAN0249LH; Start 29; Stop 53
tcagatatccgcagagagatcatcg

SEQ ID NO: 388976 - DNA, 25 bp, Artificial
  probe
  misc_feature (1)..(25): SEQ ID NO: 4706; WAN0249LH; Start 16; Stop 40
aagagataaactttcagatatccgc

SEQ ID NO: 388977 - DNA, 25 bp, Artificial
  probe
  misc_feature (1)..(25): SEQ ID NO: 4706; WAN0249LH; Start 14; Stop 38
gcaagagataaactttcagatatcc

SEQ ID NO: 388978 - DNA, 25 bp, Artificial
  probe
  misc_feature (1)..(25): SEQ ID NO: 4706; WAN0249LH; Start 13; Stop 37
ggcaagagataaactttcagatatc

SEQ ID NO: 388979 - DNA, 25 bp, Artificial
  probe
  misc_feature (1)..(25): SEQ ID NO: 4706; WAN0249LH; Start 15; Stop 39
caagagataaactttcagatatccg

SEQ ID NO: 388980 - DNA, 25 bp, Artificial
  probe
  misc_feature (1)..(25): SEQ ID NO: 4706; WAN0249LH; Start 30; Stop 54
cagatatccgcagagagatcatcgc

SEQ ID NO: 388981 - DNA, 25 bp, Artificial
  probe
  misc_feature (1)..(25): SEQ ID NO: 4707; WAN024API; Start 75; Stop 99
caagtgattggaagtgtgataaact

SEQ ID NO: 388982 - DNA, 25 bp, Artificial
  probe
  misc_feature (1)..(25): SEQ ID NO: 4707; WAN024API; Start 77; Stop 101
agtgattggaagtgtgataaactaa

SEQ ID NO: 388983 - DNA, 25 bp, Artificial
  probe
  misc_feature (1)..(25): SEQ ID NO: 4707; WAN024API; Start 76; Stop 100
aagtgattggaagtgtgataaacta

SEQ ID NO: 388984 - DNA, 25 bp, Artificial
  probe
  misc_feature (1)..(25): SEQ ID NO: 4707; WAN024API; Start 78; Stop 102
gtgattggaagtgtgataaactaat

SEQ ID NO: 388985 - DNA, 25 bp, Artificial
  probe
  misc_feature (1)..(25): SEQ ID NO: 4707; WAN024API; Start 139; Stop 163
tcttagataaacttaggaatcagga

SEQ ID NO: 388986 - DNA, 25 bp, Artificial
  probe
  misc_feature (1)..(25): SEQ ID NO: 4707; WAN024API; Start 79; Stop 103
tgattggaagtgtgataaactaata

SEQ ID NO: 388987 - DNA, 25 bp, Artificial
  probe
  misc_feature (1)..(25): SEQ ID NO: 4707; WAN024API; Start 140; Stop 164
cttagataaacttaggaatcaggat

SEQ ID NO: 388988 - DNA, 25 bp, Artificial
  probe
  misc_feature (1)..(25): SEQ ID NO: 4707; WAN024API; Start 105; Stop 129
aacaacgaaaatcttatgagagaat

SEQ ID NO: 388989 - DNA, 25 bp, Artificial
  probe
  misc_feature (1)..(25): SEQ ID NO: 4707; WAN024API; Start 138; Stop 162
atcttagataaacttaggaatcagg

SEQ ID NO: 388990 - DNA, 25 bp, Artificial
  probe
  misc_feature (1)..(25): SEQ ID NO: 4707; WAN024API; Start 110; Stop 134
cgaaaatcttatgagagaataaagc

SEQ ID NO: 388991 - DNA, 25 bp, Artificial
  probe
  misc_feature (1)..(25): SEQ ID NO: 4707; WAN024API; Start 104; Stop 128
taacaacgaaaatcttatgagagaa

SEQ ID NO: 388992 - DNA, 25 bp, Artificial
  probe
  misc_feature (1)..(25): SEQ ID NO: 4707; WAN024API; Start 142; Stop 166
tagataaacttaggaatcaggattt

SEQ ID NO: 388993 - DNA, 25 bp, Artificial
  probe
  misc_feature (1)..(25): SEQ ID NO: 4707; WAN024API; Start 141; Stop 165
ttagataaacttaggaatcaggatt

SEQ ID NO: 388994 - DNA, 25 bp, Artificial
  probe
  misc_feature (1)..(25): SEQ ID NO: 4707; WAN024API; Start 88; Stop 112
gtgtgataaactaatataacaacga

SEQ ID NO: 388995 - DNA, 25 bp, Artificial
  probe
  misc_feature (1)..(25): SEQ ID NO: 4707; WAN024API; Start 87; Stop 111
agtgtgataaactaatataacaacg

SEQ ID NO: 388996 - DNA, 25 bp, Artificial
  probe
  misc_feature (1)..(25): SEQ ID NO: 4707; WAN024API; Start 106; Stop 130
acaacgaaaatcttatgagagaata

SEQ ID NO: 388997 - DNA, 25 bp, Artificial
  probe
  misc_feature (1)..(25): SEQ ID NO: 4707; WAN024API; Start 103; Stop 127
ataacaacgaaaatcttatgagaga

SEQ ID NO: 388998 - DNA, 25 bp, Artificial
  probe
  misc_feature (1)..(25): SEQ ID NO: 4707; WAN024API; Start 143; Stop 167
agataaacttaggaatcaggatttt

SEQ ID NO: 388999 - DNA, 25 bp, Artificial
  probe
  misc_feature (1)..(25): SEQ ID NO: 4707; WAN024API; Start 189; Stop 213
agtgtcaataataagaaaagaggta

SEQ ID NO: 389000 - DNA, 25 bp, Artificial
  probe
  misc_feature (1)..(25): SEQ ID NO: 4707; WAN024API; Start 188; Stop 212
tagtgtcaataataagaaaagaggt

SEQ ID NO: 389001 - DNA, 25 bp, Artificial
  probe
  misc_feature (1)..(25): SEQ ID NO: 4707; WAN024API; Start 107; Stop 131
caacgaaaatcttatgagagaataa

SEQ ID NO: 389002 - DNA, 25 bp, Artificial
  probe
  misc_feature (1)..(25): SEQ ID NO: 4707; WAN024API; Start 109; Stop 133
acgaaaatcttatgagagaataaag

SEQ ID NO: 389003 - DNA, 25 bp, Artificial
  probe
  misc_feature (1)..(25): SEQ ID NO: 4707; WAN024API; Start 102; Stop 126
tataacaacgaaaatcttatgagag

SEQ ID NO: 389004 - DNA, 25 bp, Artificial
  probe
  misc_feature (1)..(25): SEQ ID NO: 4707; WAN024API; Start 111; Stop 135
gaaaatcttatgagagaataaagct

SEQ ID NO: 389005 - DNA, 25 bp, Artificial
  probe
  misc_feature (1)..(25): SEQ ID NO: 4707; WAN024API; Start 149; Stop 173
acttaggaatcaggattttataaga

SEQ ID NO: 389006 - DNA, 25 bp, Artificial
  probe
  misc_feature (1)..(25): SEQ ID NO: 4708; WAN0249PX; Start 15; Stop 39
aatatatgtttgagactggattgcc

SEQ ID NO: 389007 - DNA, 25 bp, Artificial
  probe
  misc_feature (1)..(25): SEQ ID NO: 4708; WAN0249PX; Start 16; Stop 40
atatatgtttgagactggattgcca

SEQ ID NO: 389008 - DNA, 25 bp, Artificial
  probe
  misc_feature (1)..(25): SEQ ID NO: 4708; WAN0249PX; Start 14; Stop 38
taatatatgtttgagactggattgc

SEQ ID NO: 389009 - DNA, 25 bp, Artificial
  probe
  misc_feature (1)..(25): SEQ ID NO: 4708; WAN0249PX; Start 50; Stop 74
tgatggtcaaaatcaacagactttt

SEQ ID NO: 389010 - DNA, 25 bp, Artificial
  probe
  misc_feature (1)..(25): SEQ ID NO: 4708; WAN0249PX; Start 49; Stop 73
atgatggtcaaaatcaacagacttt

SEQ ID NO: 389011 - DNA, 25 bp, Artificial
  probe
  misc_feature (1)..(25): SEQ ID NO: 4708; WAN0249PX; Start 48; Stop 72
tatgatggtcaaaatcaacagactt

SEQ ID NO: 389012 - DNA, 25 bp, Artificial
  probe
  misc_feature (1)..(25): SEQ ID NO: 4708; WAN0249PX; Start 47; Stop 71
ttatgatggtcaaaatcaacagact

SEQ ID NO: 389013 - DNA, 25 bp, Artificial
  probe
  misc_feature (1)..(25): SEQ ID NO: 4708; WAN0249PX; Start 46; Stop 70
tttatgatggtcaaaatcaacagac

SEQ ID NO: 389014 - DNA, 25 bp, Artificial
  probe
  misc_feature (1)..(25): SEQ ID NO: 4708; WAN0249PX; Start 45; Stop 69
ttttatgatggtcaaaatcaacaga

SEQ ID NO: 389015 - DNA, 25 bp, Artificial
  probe
  misc_feature (1)..(25): SEQ ID NO: 4708; WAN0249PX; Start 17; Stop 41
tatatgtttgagactggattgccag

SEQ ID NO: 389016 - DNA, 25 bp, Artificial
  probe
  misc_feature (1)..(25): SEQ ID NO: 4709; WAN024A8S; Start 40; Stop 64
tctgttaattgagacgagattgaca

SEQ ID NO: 389017 - DNA, 25 bp, Artificial
  probe
  misc_feature (1)..(25): SEQ ID NO: 4709; WAN024A8S; Start 41; Stop 65
ctgttaattgagacgagattgacaa

SEQ ID NO: 389018 - DNA, 25 bp, Artificial
  probe
  misc_feature (1)..(25): SEQ ID NO: 4709; WAN024A8S; Start 42; Stop 66
tgttaattgagacgagattgacaaa

SEQ ID NO: 389019 - DNA, 25 bp, Artificial
  probe
  misc_feature (1)..(25): SEQ ID NO: 4709; WAN024A8S; Start 39; Stop 63
gtctgttaattgagacgagattgac

SEQ ID NO: 389020 - DNA, 25 bp, Artificial
  probe
  misc_feature (1)..(25): SEQ ID NO: 4709; WAN024A8S; Start 38; Stop 62
tgtctgttaattgagacgagattga

SEQ ID NO: 389021 - DNA, 25 bp, Artificial
  probe
  misc_feature (1)..(25): SEQ ID NO: 4709; WAN024A8S; Start 32; Stop 56
tgactatgtctgttaattgagacga

SEQ ID NO: 389022 - DNA, 25 bp, Artificial
  probe
  misc_feature (1)..(25): SEQ ID NO: 4709; WAN024A8S; Start 34; Stop 58
actatgtctgttaattgagacgaga

SEQ ID NO: 389023 - DNA, 25 bp, Artificial
  probe
  misc_feature (1)..(25): SEQ ID NO: 4709; WAN024A8S; Start 37; Stop 61
atgtctgttaattgagacgagattg

SEQ ID NO: 389024 - DNA, 25 bp, Artificial
  probe
  misc_feature (1)..(25): SEQ ID NO: 4709; WAN024A8S; Start 33; Stop 57
gactatgtctgttaattgagacgag

SEQ ID NO: 389025 - DNA, 25 bp, Artificial
  probe
  misc_feature (1)..(25): SEQ ID NO: 4709; WAN024A8S; Start 31; Stop 55
atgactatgtctgttaattgagacg

SEQ ID NO: 389026 - DNA, 25 bp, Artificial
  probe
  misc_feature (1)..(25): SEQ ID NO: 4709; WAN024A8S; Start 35; Stop 59
ctatgtctgttaattgagacgagat

SEQ ID NO: 389027 - DNA, 25 bp, Artificial
  probe
  misc_feature (1)..(25): SEQ ID NO: 4709; WAN024A8S; Start 36; Stop 60
tatgtctgttaattgagacgagatt

SEQ ID NO: 389028 - DNA, 25 bp, Artificial
  probe
  misc_feature (1)..(25): SEQ ID NO: 4709; WAN024A8S; Start 43; Stop 67
gttaattgagacgagattgacaaaa

SEQ ID NO: 389029 - DNA, 25 bp, Artificial
  probe
  misc_feature (1)..(25): SEQ ID NO: 4709; WAN024A8S; Start 29; Stop 53
atatgactatgtctgttaattgaga

SEQ ID NO: 389030 - DNA, 25 bp, Artificial
  probe
  misc_feature (1)..(25): SEQ ID NO: 4709; WAN024A8S; Start 20; Stop 44
gtttagagaatatgactatgtctgt

SEQ ID NO: 389031 - DNA, 25 bp, Artificial
  probe
  misc_feature (1)..(25): SEQ ID NO: 4709; WAN024A8S; Start 16; Stop 40
cagagtttagagaatatgactatgt

SEQ ID NO: 389032 - DNA, 25 bp, Artificial
  probe
  misc_feature (1)..(25): SEQ ID NO: 4709; WAN024A8S; Start 15; Stop 39
acagagtttagagaatatgactatg

SEQ ID NO: 389033 - DNA, 25 bp, Artificial
  probe
  misc_feature (1)..(25): SEQ ID NO: 4709; WAN024A8S; Start 24; Stop 48
agagaatatgactatgtctgttaat

SEQ ID NO: 389034 - DNA, 25 bp, Artificial
  probe
  misc_feature (1)..(25): SEQ ID NO: 4709; WAN024A8S; Start 19; Stop 43
agtttagagaatatgactatgtctg

SEQ ID NO: 389035 - DNA, 25 bp, Artificial
  probe
  misc_feature (1)..(25): SEQ ID NO: 4709; WAN024A8S; Start 18; Stop 42
gagtttagagaatatgactatgtct

SEQ ID NO: 389036 - DNA, 25 bp, Artificial
  probe
  misc_feature (1)..(25): SEQ ID NO: 4709; WAN024A8S; Start 17; Stop 41
agagtttagagaatatgactatgtc

SEQ ID NO: 389037 - DNA, 25 bp, Artificial
  probe
  misc_feature (1)..(25): SEQ ID NO: 4709; WAN024A8S; Start 30; Stop 54
tatgactatgtctgttaattgagac

SEQ ID NO: 389038 - DNA, 25 bp, Artificial
  probe
  misc_feature (1)..(25): SEQ ID NO: 4709; WAN024A8S; Start 21; Stop 45
tttagagaatatgactatgtctgtt

SEQ ID NO: 389039 - DNA, 25 bp, Artificial
  probe
  misc_feature (1)..(25): SEQ ID NO: 4709; WAN024A8S; Start 14; Stop 38
aacagagtttagagaatatgactat

SEQ ID NO: 389040 - DNA, 25 bp, Artificial
  probe
  misc_feature (1)..(25): SEQ ID NO: 4709; WAN024A8S; Start 13; Stop 37
aaacagagtttagagaatatgacta

SEQ ID NO: 389041 - DNA, 25 bp, Artificial
  probe
  misc_feature (1)..(25): SEQ ID NO: 4709; WAN024A8S; Start 12; Stop 36
aaaacagagtttagagaatatgact

SEQ ID NO: 389042 - DNA, 25 bp, Artificial
  probe
  misc_feature (1)..(25): SEQ ID NO: 4710; WAN024AG2; Start 1; Stop 25
tggatggaagtcatttcttaggaag

SEQ ID NO: 389043 - DNA, 25 bp, Artificial
  probe
  misc_feature (1)..(25): SEQ ID NO: 4710; WAN024AG2; Start 2; Stop 26
ggatggaagtcatttcttaggaagc

SEQ ID NO: 389044 - DNA, 25 bp, Artificial
  probe
  misc_feature (1)..(25): SEQ ID NO: 4710; WAN024AG2; Start 3; Stop 27
gatggaagtcatttcttaggaagcg

SEQ ID NO: 389045 - DNA, 25 bp, Artificial
  probe
  misc_feature (1)..(25): SEQ ID NO: 4710; WAN024AG2; Start 4; Stop 28
atggaagtcatttcttaggaagcgg

SEQ ID NO: 389046 - DNA, 25 bp, Artificial
  probe
  misc_feature (1)..(25): SEQ ID NO: 4710; WAN024AG2; Start 43; Stop 67
tttaagagttgagacaaagtcattt

SEQ ID NO: 389047 - DNA, 25 bp, Artificial
  probe
  misc_feature (1)..(25): SEQ ID NO: 4710; WAN024AG2; Start 118; Stop 142
aaataagactctgaaaggaagagca

SEQ ID NO: 389048 - DNA, 25 bp, Artificial
  probe
  misc_feature (1)..(25): SEQ ID NO: 4710; WAN024AG2; Start 119; Stop 143
aataagactctgaaaggaagagcac

SEQ ID NO: 389049 - DNA, 25 bp, Artificial
  probe
  misc_feature (1)..(25): SEQ ID NO: 4710; WAN024AG2; Start 75; Stop 99
gtaaagcttgctactagacaaacta

SEQ ID NO: 389050 - DNA, 25 bp, Artificial
  probe
  misc_feature (1)..(25): SEQ ID NO: 4710; WAN024AG2; Start 74; Stop 98
agtaaagcttgctactagacaaact

SEQ ID NO: 389051 - DNA, 25 bp, Artificial
  probe
  misc_feature (1)..(25): SEQ ID NO: 4710; WAN024AG2; Start 44; Stop 68
ttaagagttgagacaaagtcatttt

SEQ ID NO: 389052 - DNA, 25 bp, Artificial
  probe
  misc_feature (1)..(25): SEQ ID NO: 4710; WAN024AG2; Start 42; Stop 66
ttttaagagttgagacaaagtcatt

SEQ ID NO: 389053 - DNA, 25 bp, Artificial
  probe
  misc_feature (1)..(25): SEQ ID NO: 4710; WAN024AG2; Start 5; Stop 29
tggaagtcatttcttaggaagcggc

SEQ ID NO: 389054 - DNA, 25 bp, Artificial
  probe
  misc_feature (1)..(25): SEQ ID NO: 4710; WAN024AG2; Start 76; Stop 100
taaagcttgctactagacaaactag

SEQ ID NO: 389055 - DNA, 25 bp, Artificial
  probe
  misc_feature (1)..(25): SEQ ID NO: 4710; WAN024AG2; Start 45; Stop 69
taagagttgagacaaagtcattttg

SEQ ID NO: 389056 - DNA, 25 bp, Artificial
  probe
  misc_feature (1)..(25): SEQ ID NO: 4710; WAN024AG2; Start 117; Stop 141
aaaataagactctgaaaggaagagc

SEQ ID NO: 389057 - DNA, 25 bp, Artificial
  probe
  misc_feature (1)..(25): SEQ ID NO: 4710; WAN024AG2; Start 115; Stop 139
ataaaataagactctgaaaggaaga

SEQ ID NO: 389058 - DNA, 25 bp, Artificial
  probe
  misc_feature (1)..(25): SEQ ID NO: 4710; WAN024AG2; Start 111; Stop 135
tgaaataaaataagactctgaaagg

SEQ ID NO: 389059 - DNA, 25 bp, Artificial
  probe
  misc_feature (1)..(25): SEQ ID NO: 4710; WAN024AG2; Start 8; Stop 32
aagtcatttcttaggaagcggccaa

SEQ ID NO: 389060 - DNA, 25 bp, Artificial
  probe
  misc_feature (1)..(25): SEQ ID NO: 4710; WAN024AG2; Start 112; Stop 136
gaaataaaataagactctgaaagga

SEQ ID NO: 389061 - DNA, 25 bp, Artificial
  probe
  misc_feature (1)..(25): SEQ ID NO: 4710; WAN024AG2; Start 77; Stop 101
aaagcttgctactagacaaactagc

SEQ ID NO: 389062 - DNA, 25 bp, Artificial
  probe
  misc_feature (1)..(25): SEQ ID NO: 4710; WAN024AG2; Start 114; Stop 138
aataaaataagactctgaaaggaag

SEQ ID NO: 389063 - DNA, 25 bp, Artificial
  probe
  misc_feature (1)..(25): SEQ ID NO: 4710; WAN024AG2; Start 9; Stop 33
agtcatttcttaggaagcggccaag

SEQ ID NO: 389064 - DNA, 25 bp, Artificial
  probe
  misc_feature (1)..(25): SEQ ID NO: 4710; WAN024AG2; Start 7; Stop 31
gaagtcatttcttaggaagcggcca

SEQ ID NO: 389065 - DNA, 25 bp, Artificial
  probe
  misc_feature (1)..(25): SEQ ID NO: 4710; WAN024AG2; Start 116; Stop 140
taaaataagactctgaaaggaagag

SEQ ID NO: 389066 - DNA, 25 bp, Artificial
  probe
  misc_feature (1)..(25): SEQ ID NO: 4710; WAN024AG2; Start 84; Stop 108
gctactagacaaactagcaagtttt

SEQ ID NO: 389067 - DNA, 25 bp, Artificial
  probe
  misc_feature (1)..(25): SEQ ID NO: 4710; WAN024AG2; Start 90; Stop 114
agacaaactagcaagttttattgaa

SEQ ID NO: 389068 - DNA, 25 bp, Artificial
  probe
  misc_feature (1)..(25): SEQ ID NO: 4710; WAN024AG2; Start 91; Stop 115
gacaaactagcaagttttattgaaa

SEQ ID NO: 389069 - DNA, 25 bp, Artificial
  probe
  misc_feature (1)..(25): SEQ ID NO: 4710; WAN024AG2; Start 89; Stop 113
tagacaaactagcaagttttattga

SEQ ID NO: 389070 - DNA, 25 bp, Artificial
  probe
  misc_feature (1)..(25): SEQ ID NO: 4710; WAN024AG2; Start 87; Stop 111
actagacaaactagcaagttttatt

SEQ ID NO: 389071 - DNA, 25 bp, Artificial
  probe
  misc_feature (1)..(25): SEQ ID NO: 4710; WAN024AG2; Start 85; Stop 109
ctactagacaaactagcaagtttta

SEQ ID NO: 389072 - DNA, 25 bp, Artificial
  probe
  misc_feature (1)..(25): SEQ ID NO: 4710; WAN024AG2; Start 88; Stop 112
ctagacaaactagcaagttttattg

SEQ ID NO: 389073 - DNA, 25 bp, Artificial
  probe
  misc_feature (1)..(25): SEQ ID NO: 4710; WAN024AG2; Start 92; Stop 116
acaaactagcaagttttattgaaat

SEQ ID NO: 389074 - DNA, 25 bp, Artificial
  probe
  misc_feature (1)..(25): SEQ ID NO: 4710; WAN024AG2; Start 86; Stop 110
tactagacaaactagcaagttttat

SEQ ID NO: 389075 - DNA, 25 bp, Artificial
  probe
  misc_feature (1)..(25): SEQ ID NO: 4711; WAN024AMA; Start 51; Stop 75
acccaatcctaaacagtctttgaaa

SEQ ID NO: 389076 - DNA, 25 bp, Artificial
  probe
  misc_feature (1)..(25): SEQ ID NO: 4711; WAN024AMA; Start 50; Stop 74
cacccaatcctaaacagtctttgaa

SEQ ID NO: 389077 - DNA, 25 bp, Artificial
  probe
  misc_feature (1)..(25): SEQ ID NO: 4711; WAN024AMA; Start 147; Stop 171
gcaattcaagacatttcaatgacaa

SEQ ID NO: 389078 - DNA, 25 bp, Artificial
  probe
  misc_feature (1)..(25): SEQ ID NO: 4711; WAN024AMA; Start 146; Stop 170
cgcaattcaagacatttcaatgaca

SEQ ID NO: 389079 - DNA, 25 bp, Artificial
  probe
  misc_feature (1)..(25): SEQ ID NO: 4711; WAN024AMA; Start 224; Stop 248
aaacacagttgccagaagtaagact

SEQ ID NO: 389080 - DNA, 25 bp, Artificial
  probe
  misc_feature (1)..(25): SEQ ID NO: 4711; WAN024AMA; Start 148; Stop 172
caattcaagacatttcaatgacaat

SEQ ID NO: 389081 - DNA, 25 bp, Artificial
  probe
  misc_feature (1)..(25): SEQ ID NO: 4711; WAN024AMA; Start 52; Stop 76
cccaatcctaaacagtctttgaaaa

SEQ ID NO: 389082 - DNA, 25 bp, Artificial
  probe
  misc_feature (1)..(25): SEQ ID NO: 4711; WAN024AMA; Start 219; Stop 243
tatcaaaacacagttgccagaagta

SEQ ID NO: 389083 - DNA, 25 bp, Artificial
  probe
  misc_feature (1)..(25): SEQ ID NO: 4711; WAN024AMA; Start 212; Stop 236
ctaacagtatcaaaacacagttgcc

SEQ ID NO: 389084 - DNA, 25 bp, Artificial
  probe
  misc_feature (1)..(25): SEQ ID NO: 4711; WAN024AMA; Start 211; Stop 235
actaacagtatcaaaacacagttgc

SEQ ID NO: 389085 - DNA, 25 bp, Artificial
  probe
  misc_feature (1)..(25): SEQ ID NO: 4711; WAN024AMA; Start 57; Stop 81
tcctaaacagtctttgaaaactcct

SEQ ID NO: 389086 - DNA, 25 bp, Artificial
  probe
  misc_feature (1)..(25): SEQ ID NO: 4711; WAN024AMA; Start 56; Stop 80
atcctaaacagtctttgaaaactcc

SEQ ID NO: 389087 - DNA, 25 bp, Artificial
  probe
  misc_feature (1)..(25): SEQ ID NO: 4711; WAN024AMA; Start 20; Stop 44
aagaataacagaaaaggtctagccc

SEQ ID NO: 389088 - DNA, 25 bp, Artificial
  probe
  misc_feature (1)..(25): SEQ ID NO: 4711; WAN024AMA; Start 213; Stop 237
taacagtatcaaaacacagttgcca

SEQ ID NO: 389089 - DNA, 25 bp, Artificial
  probe
  misc_feature (1)..(25): SEQ ID NO: 4711; WAN024AMA; Start 23; Stop 47
aataacagaaaaggtctagcccaag

SEQ ID NO: 389090 - DNA, 25 bp, Artificial
  probe
  misc_feature (1)..(25): SEQ ID NO: 4711; WAN024AMA; Start 22; Stop 46
gaataacagaaaaggtctagcccaa

SEQ ID NO: 389091 - DNA, 25 bp, Artificial
  probe
  misc_feature (1)..(25): SEQ ID NO: 4711; WAN024AMA; Start 53; Stop 77
ccaatcctaaacagtctttgaaaac

SEQ ID NO: 389092 - DNA, 25 bp, Artificial
  probe
  misc_feature (1)..(25): SEQ ID NO: 4711; WAN024AMA; Start 220; Stop 244
atcaaaacacagttgccagaagtaa

SEQ ID NO: 389093 - DNA, 25 bp, Artificial
  probe
  misc_feature (1)..(25): SEQ ID NO: 4711; WAN024AMA; Start 19; Stop 43
aaagaataacagaaaaggtctagcc

SEQ ID NO: 389094 - DNA, 25 bp, Artificial
  probe
  misc_feature (1)..(25): SEQ ID NO: 4711; WAN024AMA; Start 58; Stop 82
cctaaacagtctttgaaaactccta

SEQ ID NO: 389095 - DNA, 25 bp, Artificial
  probe
  misc_feature (1)..(25): SEQ ID NO: 4711; WAN024AMA; Start 217; Stop 241
agtatcaaaacacagttgccagaag

SEQ ID NO: 389096 - DNA, 25 bp, Artificial
  probe
  misc_feature (1)..(25): SEQ ID NO: 4711; WAN024AMA; Start 21; Stop 45
agaataacagaaaaggtctagccca

SEQ ID NO: 389097 - DNA, 25 bp, Artificial
  probe
  misc_feature (1)..(25): SEQ ID NO: 4711; WAN024AMA; Start 223; Stop 247
aaaacacagttgccagaagtaagac

SEQ ID NO: 389098 - DNA, 25 bp, Artificial
  probe
  misc_feature (1)..(25): SEQ ID NO: 4711; WAN024AMA; Start 222; Stop 246
caaaacacagttgccagaagtaaga

SEQ ID NO: 389099 - DNA, 25 bp, Artificial
  probe
  misc_feature (1)..(25): SEQ ID NO: 4711; WAN024AMA; Start 221; Stop 245
tcaaaacacagttgccagaagtaag

SEQ ID NO: 389100 - DNA, 25 bp, Artificial
  probe
  misc_feature (1)..(25): SEQ ID NO: 4711; WAN024AMA; Start 218; Stop 242
gtatcaaaacacagttgccagaagt

SEQ ID NO: 389101 - DNA, 25 bp, Artificial
  probe
  misc_feature (1)..(25): SEQ ID NO: 4711; WAN024AMA; Start 216; Stop 240
cagtatcaaaacacagttgccagaa

SEQ ID NO: 389102 - DNA, 25 bp, Artificial
  probe
  misc_feature (1)..(25): SEQ ID NO: 4711; WAN024AMA; Start 7; Stop 31
ctcctcctaagaaaagaataacaga

SEQ ID NO: 389103 - DNA, 25 bp, Artificial
  probe
  misc_feature (1)..(25): SEQ ID NO: 4711; WAN024AMA; Start 214; Stop 238
aacagtatcaaaacacagttgccag

SEQ ID NO: 389104 - DNA, 25 bp, Artificial
  probe
  misc_feature (1)..(25): SEQ ID NO: 4711; WAN024AMA; Start 149; Stop 173
aattcaagacatttcaatgacaatt

SEQ ID NO: 389105 - DNA, 25 bp, Artificial
  probe
  misc_feature (1)..(25): SEQ ID NO: 4711; WAN024AMA; Start 6; Stop 30
tctcctcctaagaaaagaataacag

SEQ ID NO: 389106 - DNA, 25 bp, Artificial
  probe
  misc_feature (1)..(25): SEQ ID NO: 4711; WAN024AMA; Start 54; Stop 78
caatcctaaacagtctttgaaaact

SEQ ID NO: 389107 - DNA, 25 bp, Artificial
  probe
  misc_feature (1)..(25): SEQ ID NO: 4711; WAN024AMA; Start 8; Stop 32
tcctcctaagaaaagaataacagaa

SEQ ID NO: 389108 - DNA, 25 bp, Artificial
  probe
  misc_feature (1)..(25): SEQ ID NO: 4712; WAN024AKZ; Start 4; Stop 28
ctgtaccactcacttattcacctcc

SEQ ID NO: 389109 - DNA, 25 bp, Artificial
  probe
  misc_feature (1)..(25): SEQ ID NO: 4712; WAN024AKZ; Start 115; Stop 139
ttgagtgaaacgaaaggaatgaatt

SEQ ID NO: 389110 - DNA, 25 bp, Artificial
  probe
  misc_feature (1)..(25): SEQ ID NO: 4712; WAN024AKZ; Start 114; Stop 138
cttgagtgaaacgaaaggaatgaat

SEQ ID NO: 389111 - DNA, 25 bp, Artificial
  probe
  misc_feature (1)..(25): SEQ ID NO: 4712; WAN024AKZ; Start 116; Stop 140
tgagtgaaacgaaaggaatgaatta

SEQ ID NO: 389112 - DNA, 25 bp, Artificial
  probe
  misc_feature (1)..(25): SEQ ID NO: 4712; WAN024AKZ; Start 3; Stop 27
gctgtaccactcacttattcacctc

SEQ ID NO: 389113 - DNA, 25 bp, Artificial
  probe
  misc_feature (1)..(25): SEQ ID NO: 4712; WAN024AKZ; Start 117; Stop 141
gagtgaaacgaaaggaatgaattat

SEQ ID NO: 389114 - DNA, 25 bp, Artificial
  probe
  misc_feature (1)..(25): SEQ ID NO: 4712; WAN024AKZ; Start 99; Stop 123
cattctgtgttgtgccttgagtgaa

SEQ ID NO: 389115 - DNA, 25 bp, Artificial
  probe
  misc_feature (1)..(25): SEQ ID NO: 4712; WAN024AKZ; Start 97; Stop 121
ttcattctgtgttgtgccttgagtg

SEQ ID NO: 389116 - DNA, 25 bp, Artificial
  probe
  misc_feature (1)..(25): SEQ ID NO: 4712; WAN024AKZ; Start 2; Stop 26
ggctgtaccactcacttattcacct

SEQ ID NO: 389117 - DNA, 25 bp, Artificial
  probe
  misc_feature (1)..(25): SEQ ID NO: 4712; WAN024AKZ; Start 118; Stop 142
agtgaaacgaaaggaatgaattata

SEQ ID NO: 389118 - DNA, 25 bp, Artificial
  probe
  misc_feature (1)..(25): SEQ ID NO: 4712; WAN024AKZ; Start 100; Stop 124
attctgtgttgtgccttgagtgaaa

SEQ ID NO: 389119 - DNA, 25 bp, Artificial
  probe
  misc_feature (1)..(25): SEQ ID NO: 4712; WAN024AKZ; Start 26; Stop 50
tccccgtgatttgtagtagtgatag

SEQ ID NO: 389120 - DNA, 25 bp, Artificial
  probe
  misc_feature (1)..(25): SEQ ID NO: 4712; WAN024AKZ; Start 25; Stop 49
ctccccgtgatttgtagtagtgata

SEQ ID NO: 389121 - DNA, 25 bp, Artificial
  probe
  misc_feature (1)..(25): SEQ ID NO: 4712; WAN024AKZ; Start 96; Stop 120
tttcattctgtgttgtgccttgagt

SEQ ID NO: 389122 - DNA, 25 bp, Artificial
  probe
  misc_feature (1)..(25): SEQ ID NO: 4712; WAN024AKZ; Start 5; Stop 29
tgtaccactcacttattcacctccc

SEQ ID NO: 389123 - DNA, 25 bp, Artificial
  probe
  misc_feature (1)..(25): SEQ ID NO: 4712; WAN024AKZ; Start 98; Stop 122
tcattctgtgttgtgccttgagtga

SEQ ID NO: 389124 - DNA, 25 bp, Artificial
  probe
  misc_feature (1)..(25): SEQ ID NO: 4712; WAN024AKZ; Start 27; Stop 51
ccccgtgatttgtagtagtgatagg

SEQ ID NO: 389125 - DNA, 25 bp, Artificial
  probe
  misc_feature (1)..(25): SEQ ID NO: 4712; WAN024AKZ; Start 101; Stop 125
ttctgtgttgtgccttgagtgaaac

SEQ ID NO: 389126 - DNA, 25 bp, Artificial
  probe
  misc_feature (1)..(25): SEQ ID NO: 4712; WAN024AKZ; Start 1; Stop 25
tggctgtaccactcacttattcacc

SEQ ID NO: 389127 - DNA, 25 bp, Artificial
  probe
  misc_feature (1)..(25): SEQ ID NO: 4712; WAN024AKZ; Start 119; Stop 143
gtgaaacgaaaggaatgaattataa

SEQ ID NO: 389128 - DNA, 25 bp, Artificial
  probe
  misc_feature (1)..(25): SEQ ID NO: 4712; WAN024AKZ; Start 95; Stop 119
ttttcattctgtgttgtgccttgag

SEQ ID NO: 389129 - DNA, 25 bp, Artificial
  probe
  misc_feature (1)..(25): SEQ ID NO: 4712; WAN024AKZ; Start 106; Stop 130
tgttgtgccttgagtgaaacgaaag

SEQ ID NO: 389130 - DNA, 25 bp, Artificial
  probe
  misc_feature (1)..(25): SEQ ID NO: 4712; WAN024AKZ; Start 105; Stop 129
gtgttgtgccttgagtgaaacgaaa

SEQ ID NO: 389131 - DNA, 25 bp, Artificial
  probe
  misc_feature (1)..(25): SEQ ID NO: 4712; WAN024AKZ; Start 113; Stop 137
ccttgagtgaaacgaaaggaatgaa

SEQ ID NO: 389132 - DNA, 25 bp, Artificial
  probe
  misc_feature (1)..(25): SEQ ID NO: 4712; WAN024AKZ; Start 24; Stop 48
cctccccgtgatttgtagtagtgat

SEQ ID NO: 389133 - DNA, 25 bp, Artificial
  probe
  misc_feature (1)..(25): SEQ ID NO: 4712; WAN024AKZ; Start 120; Stop 144
tgaaacgaaaggaatgaattataaa

SEQ ID NO: 389134 - DNA, 25 bp, Artificial
  probe
  misc_feature (1)..(25): SEQ ID NO: 4712; WAN024AKZ; Start 70; Stop 94
aaaacaaaataaagatcacaacact

SEQ ID NO: 389135 - DNA, 25 bp, Artificial
  probe
  misc_feature (1)..(25): SEQ ID NO: 4712; WAN024AKZ; Start 71; Stop 95
aaacaaaataaagatcacaacactt

SEQ ID NO: 389136 - DNA, 25 bp, Artificial
  probe
  misc_feature (1)..(25): SEQ ID NO: 4712; WAN024AKZ; Start 6; Stop 30
gtaccactcacttattcacctcccc

SEQ ID NO: 389137 - DNA, 25 bp, Artificial
  probe
  misc_feature (1)..(25): SEQ ID NO: 4712; WAN024AKZ; Start 23; Stop 47
acctccccgtgatttgtagtagtga

SEQ ID NO: 389138 - DNA, 25 bp, Artificial
  probe
  misc_feature (1)..(25): SEQ ID NO: 4712; WAN024AKZ; Start 112; Stop 136
gccttgagtgaaacgaaaggaatga

SEQ ID NO: 389139 - DNA, 25 bp, Artificial
  probe
  misc_feature (1)..(25): SEQ ID NO: 4712; WAN024AKZ; Start 73; Stop 97
acaaaataaagatcacaacactttt

SEQ ID NO: 389140 - DNA, 25 bp, Artificial
  probe
  misc_feature (1)..(25): SEQ ID NO: 4712; WAN024AKZ; Start 72; Stop 96
aacaaaataaagatcacaacacttt

SEQ ID NO: 389141 - DNA, 25 bp, Artificial
  probe
  misc_feature (1)..(25): SEQ ID NO: 4713; WAN0249MI; Start 272; Stop 296
gttcattatctaatagagcgttgcg

SEQ ID NO: 389142 - DNA, 25 bp, Artificial
  probe
  misc_feature (1)..(25): SEQ ID NO: 4713; WAN0249MI; Start 267; Stop 291
aggcagttcattatctaatagagcg

SEQ ID NO: 389143 - DNA, 25 bp, Artificial
  probe
  misc_feature (1)..(25): SEQ ID NO: 4713; WAN0249MI; Start 273; Stop 297
ttcattatctaatagagcgttgcgt

SEQ ID NO: 389144 - DNA, 25 bp, Artificial
  probe
  misc_feature (1)..(25): SEQ ID NO: 4713; WAN0249MI; Start 268; Stop 292
ggcagttcattatctaatagagcgt

SEQ ID NO: 389145 - DNA, 25 bp, Artificial
  probe
  misc_feature (1)..(25): SEQ ID NO: 4713; WAN0249MI; Start 258; Stop 282
cttgtgtataggcagttcattatct

SEQ ID NO: 389146 - DNA, 25 bp, Artificial
  probe
  misc_feature (1)..(25): SEQ ID NO: 4713; WAN0249MI; Start 257; Stop 281
tcttgtgtataggcagttcattatc

SEQ ID NO: 389147 - DNA, 25 bp, Artificial
  probe
  misc_feature (1)..(25): SEQ ID NO: 4713; WAN0249MI; Start 274; Stop 298
tcattatctaatagagcgttgcgtc

SEQ ID NO: 389148 - DNA, 25 bp, Artificial
  probe
  misc_feature (1)..(25): SEQ ID NO: 4713; WAN0249MI; Start 271; Stop 295
agttcattatctaatagagcgttgc

SEQ ID NO: 389149 - DNA, 25 bp, Artificial
  probe
  misc_feature (1)..(25): SEQ ID NO: 4713; WAN0249MI; Start 269; Stop 293
gcagttcattatctaatagagcgtt

SEQ ID NO: 389150 - DNA, 25 bp, Artificial
  probe
  misc_feature (1)..(25): SEQ ID NO: 4713; WAN0249MI; Start 255; Stop 279
aatcttgtgtataggcagttcatta

SEQ ID NO: 389151 - DNA, 25 bp, Artificial
  probe
  misc_feature (1)..(25): SEQ ID NO: 4713; WAN0249MI; Start 17; Stop 41
aacatactgaactcaacttccttaa

SEQ ID NO: 389152 - DNA, 25 bp, Artificial
  probe
  misc_feature (1)..(25): SEQ ID NO: 4713; WAN0249MI; Start 256; Stop 280
atcttgtgtataggcagttcattat

SEQ ID NO: 389153 - DNA, 25 bp, Artificial
  probe
  misc_feature (1)..(25): SEQ ID NO: 4713; WAN0249MI; Start 275; Stop 299
cattatctaatagagcgttgcgtcc

SEQ ID NO: 389154 - DNA, 25 bp, Artificial
  probe
  misc_feature (1)..(25): SEQ ID NO: 4713; WAN0249MI; Start 266; Stop 290
taggcagttcattatctaatagagc

SEQ ID NO: 389155 - DNA, 25 bp, Artificial
  probe
  misc_feature (1)..(25): SEQ ID NO: 4713; WAN0249MI; Start 260; Stop 284
tgtgtataggcagttcattatctaa

SEQ ID NO: 389156 - DNA, 25 bp, Artificial
  probe
  misc_feature (1)..(25): SEQ ID NO: 4713; WAN0249MI; Start 259; Stop 283
ttgtgtataggcagttcattatcta

SEQ ID NO: 389157 - DNA, 25 bp, Artificial
  probe
  misc_feature (1)..(25): SEQ ID NO: 4713; WAN0249MI; Start 270; Stop 294
cagttcattatctaatagagcgttg

SEQ ID NO: 389158 - DNA, 25 bp, Artificial
  probe
  misc_feature (1)..(25): SEQ ID NO: 4713; WAN0249MI; Start 247; Stop 271
aggttagaaatcttgtgtataggca

SEQ ID NO: 389159 - DNA, 25 bp, Artificial
  probe
  misc_feature (1)..(25): SEQ ID NO: 4713; WAN0249MI; Start 248; Stop 272
ggttagaaatcttgtgtataggcag

SEQ ID NO: 389160 - DNA, 25 bp, Artificial
  probe
  misc_feature (1)..(25): SEQ ID NO: 4713; WAN0249MI; Start 252; Stop 276
agaaatcttgtgtataggcagttca

SEQ ID NO: 389161 - DNA, 25 bp, Artificial
  probe
  misc_feature (1)..(25): SEQ ID NO: 4713; WAN0249MI; Start 24; Stop 48
tgaactcaacttccttaaacgacta

SEQ ID NO: 389162 - DNA, 25 bp, Artificial
  probe
  misc_feature (1)..(25): SEQ ID NO: 4713; WAN0249MI; Start 21; Stop 45
tactgaactcaacttccttaaacga

SEQ ID NO: 389163 - DNA, 25 bp, Artificial
  probe
  misc_feature (1)..(25): SEQ ID NO: 4713; WAN0249MI; Start 253; Stop 277
gaaatcttgtgtataggcagttcat

SEQ ID NO: 389164 - DNA, 25 bp, Artificial
  probe
  misc_feature (1)..(25): SEQ ID NO: 4713; WAN0249MI; Start 254; Stop 278
aaatcttgtgtataggcagttcatt

SEQ ID NO: 389165 - DNA, 25 bp, Artificial
  probe
  misc_feature (1)..(25): SEQ ID NO: 4713; WAN0249MI; Start 26; Stop 50
aactcaacttccttaaacgactaga

SEQ ID NO: 389166 - DNA, 25 bp, Artificial
  probe
  misc_feature (1)..(25): SEQ ID NO: 4713; WAN0249MI; Start 27; Stop 51
actcaacttccttaaacgactagat

SEQ ID NO: 389167 - DNA, 25 bp, Artificial
  probe
  misc_feature (1)..(25): SEQ ID NO: 4713; WAN0249MI; Start 20; Stop 44
atactgaactcaacttccttaaacg

SEQ ID NO: 389168 - DNA, 25 bp, Artificial
  probe
  misc_feature (1)..(25): SEQ ID NO: 4713; WAN0249MI; Start 23; Stop 47
ctgaactcaacttccttaaacgact

SEQ ID NO: 389169 - DNA, 25 bp, Artificial
  probe
  misc_feature (1)..(25): SEQ ID NO: 4713; WAN0249MI; Start 249; Stop 273
gttagaaatcttgtgtataggcagt

SEQ ID NO: 389170 - DNA, 25 bp, Artificial
  probe
  misc_feature (1)..(25): SEQ ID NO: 4713; WAN0249MI; Start 25; Stop 49
gaactcaacttccttaaacgactag

SEQ ID NO: 389171 - DNA, 25 bp, Artificial
  probe
  misc_feature (1)..(25): SEQ ID NO: 4713; WAN0249MI; Start 22; Stop 46
actgaactcaacttccttaaacgac

SEQ ID NO: 389172 - DNA, 25 bp, Artificial
  probe
  misc_feature (1)..(25): SEQ ID NO: 4713; WAN0249MI; Start 276; Stop 300
attatctaatagagcgttgcgtccg

SEQ ID NO: 389173 - DNA, 25 bp, Artificial
  probe
  misc_feature (1)..(25): SEQ ID NO: 4713; WAN0249MI; Start 246; Stop 270
aaggttagaaatcttgtgtataggc

SEQ ID NO: 389174 - DNA, 25 bp, Artificial
  probe
  misc_feature (1)..(25): SEQ ID NO: 4714; WAN024EWX-3; Start 569; Stop 593
tcaccttgaagaatacgaatcagaa

SEQ ID NO: 389175 - DNA, 25 bp, Artificial
  probe
  misc_feature (1)..(25): SEQ ID NO: 4714; WAN024EWX-3; Start 1093; Stop 1117
gtatgaatatcggtcaggttatgga

SEQ ID NO: 389176 - DNA, 25 bp, Artificial
  probe
  misc_feature (1)..(25): SEQ ID NO: 4714; WAN024EWX-3; Start 1094; Stop 1118
tatgaatatcggtcaggttatggag

SEQ ID NO: 389177 - DNA, 25 bp, Artificial
  probe
  misc_feature (1)..(25): SEQ ID NO: 4714; WAN024EWX-3; Start 684; Stop 708
attatccgtattggtgctgaggtta

SEQ ID NO: 389178 - DNA, 25 bp, Artificial
  probe
  misc_feature (1)..(25): SEQ ID NO: 4714; WAN024EWX-3; Start 1092; Stop 1116
cgtatgaatatcggtcaggttatgg

SEQ ID NO: 389179 - DNA, 25 bp, Artificial
  probe
  misc_feature (1)..(25): SEQ ID NO: 4714; WAN024EWX-3; Start 685; Stop 709
ttatccgtattggtgctgaggttaa

SEQ ID NO: 389180 - DNA, 25 bp, Artificial
  probe
  misc_feature (1)..(25): SEQ ID NO: 4714; WAN024EWX-3; Start 1004; Stop 1028
ctctcgtatcgttcctgtagaagac

SEQ ID NO: 389181 - DNA, 25 bp, Artificial
  probe
  misc_feature (1)..(25): SEQ ID NO: 4714; WAN024EWX-3; Start 1002; Stop 1026
gtctctcgtatcgttcctgtagaag

SEQ ID NO: 389182 - DNA, 25 bp, Artificial
  probe
  misc_feature (1)..(25): SEQ ID NO: 4714; WAN024EWX-3; Start 1003; Stop 1027
tctctcgtatcgttcctgtagaaga

SEQ ID NO: 389183 - DNA, 25 bp, Artificial
  probe
  misc_feature (1)..(25): SEQ ID NO: 4714; WAN024EWX-3; Start 1802; Stop 1826
agaagctgctgaacaagaataacta

SEQ ID NO: 389184 - DNA, 25 bp, Artificial
  probe
  misc_feature (1)..(25): SEQ ID NO: 4714; WAN024EWX-3; Start 1803; Stop 1827
gaagctgctgaacaagaataactaa

SEQ ID NO: 389185 - DNA, 25 bp, Artificial
  probe
  misc_feature (1)..(25): SEQ ID NO: 4714; WAN024EWX-3; Start 999; Stop 1023
gttgtctctcgtatcgttcctgtag

SEQ ID NO: 389186 - DNA, 25 bp, Artificial
  probe
  misc_feature (1)..(25): SEQ ID NO: 4714; WAN024EWX-3; Start 1800; Stop 1824
gaagaagctgctgaacaagaataac

SEQ ID NO: 389187 - DNA, 25 bp, Artificial
  probe
  misc_feature (1)..(25): SEQ ID NO: 4714; WAN024EWX-3; Start 1799; Stop 1823
agaagaagctgctgaacaagaataa

SEQ ID NO: 389188 - DNA, 25 bp, Artificial
  probe
  misc_feature (1)..(25): SEQ ID NO: 4714; WAN024EWX-3; Start 1006; Stop 1030
ctcgtatcgttcctgtagaagacat

SEQ ID NO: 389189 - DNA, 25 bp, Artificial
  probe
  misc_feature (1)..(25): SEQ ID NO: 4714; WAN024EWX-3; Start 850; Stop 874
atggtgtcgttcgtgatgttaagat

SEQ ID NO: 389190 - DNA, 25 bp, Artificial
  probe
  misc_feature (1)..(25): SEQ ID NO: 4714; WAN024EWX-3; Start 1801; Stop 1825
aagaagctgctgaacaagaataact

SEQ ID NO: 389191 - DNA, 25 bp, Artificial
  probe
  misc_feature (1)..(25): SEQ ID NO: 4714; WAN024EWX-3; Start 1804; Stop 1828
aagctgctgaacaagaataactaat

SEQ ID NO: 389192 - DNA, 25 bp, Artificial
  probe
  misc_feature (1)..(25): SEQ ID NO: 4714; WAN024EWX-3; Start 683; Stop 707
gattatccgtattggtgctgaggtt

SEQ ID NO: 389193 - DNA, 25 bp, Artificial
  probe
  misc_feature (1)..(25): SEQ ID NO: 4714; WAN024EWX-3; Start 1095; Stop 1119
atgaatatcggtcaggttatggagc

SEQ ID NO: 389194 - DNA, 25 bp, Artificial
  probe
  misc_feature (1)..(25): SEQ ID NO: 4714; WAN024EWX-3; Start 1001; Stop 1025
tgtctctcgtatcgttcctgtagaa

SEQ ID NO: 389195 - DNA, 25 bp, Artificial
  probe
  misc_feature (1)..(25): SEQ ID NO: 4714; WAN024EWX-3; Start 1000; Stop 1024
ttgtctctcgtatcgttcctgtaga

SEQ ID NO: 389196 - DNA, 25 bp, Artificial
  probe
  misc_feature (1)..(25): SEQ ID NO: 4714; WAN024EWX-3; Start 1667; Stop 1691
cttggatgaaggaatggacgaagat

SEQ ID NO: 389197 - DNA, 25 bp, Artificial
  probe
  misc_feature (1)..(25): SEQ ID NO: 4714; WAN024EWX-3; Start 288; Stop 312
aaggtagaagttcgtcgtgaagatg

SEQ ID NO: 389198 - DNA, 25 bp, Artificial
  probe
  misc_feature (1)..(25): SEQ ID NO: 4714; WAN024EWX-3; Start 287; Stop 311
caaggtagaagttcgtcgtgaagat

SEQ ID NO: 389199 - DNA, 25 bp, Artificial
  probe
  misc_feature (1)..(25): SEQ ID NO: 4714; WAN024EWX-3; Start 1668; Stop 1692
ttggatgaaggaatggacgaagatg

SEQ ID NO: 389200 - DNA, 25 bp, Artificial
  probe
  misc_feature (1)..(25): SEQ ID NO: 4714; WAN024EWX-3; Start 946; Stop 970
aacgtaagattaaggtcggagataa

SEQ ID NO: 389201 - DNA, 25 bp, Artificial
  probe
  misc_feature (1)..(25): SEQ ID NO: 4714; WAN024EWX-3; Start 698; Stop 722
tgctgaggttaaagaaggtgatatt

SEQ ID NO: 389202 - DNA, 25 bp, Artificial
  probe
  misc_feature (1)..(25): SEQ ID NO: 4714; WAN024EWX-3; Start 1631; Stop 1655
cctagacgaagatgaccaagaagtg

SEQ ID NO: 389203 - DNA, 25 bp, Artificial
  probe
  misc_feature (1)..(25): SEQ ID NO: 4714; WAN024EWX-3; Start 1208; Stop 1232
tgttaaagaagcaggtatggatagc

SEQ ID NO: 389204 - DNA, 25 bp, Artificial
  probe
  misc_feature (1)..(25): SEQ ID NO: 4714; WAN024EWX-3; Start 697; Stop 721
gtgctgaggttaaagaaggtgatat

SEQ ID NO: 389205 - DNA, 25 bp, Artificial
  probe
  misc_feature (1)..(25): SEQ ID NO: 4714; WAN024EWX-3; Start 1630; Stop 1654
tcctagacgaagatgaccaagaagt

SEQ ID NO: 389206 - DNA, 25 bp, Artificial
  probe
  misc_feature (1)..(25): SEQ ID NO: 4714; WAN024EWX-3; Start 699; Stop 723
gctgaggttaaagaaggtgatattc

SEQ ID NO: 389207 - DNA, 25 bp, Artificial
  probe
  misc_feature (1)..(25): SEQ ID NO: 4717; WAN024A6G; Start 65; Stop 89
aaactgagaatctctgtctaaagaa

SEQ ID NO: 389208 - DNA, 25 bp, Artificial
  probe
  misc_feature (1)..(25): SEQ ID NO: 4717; WAN024A6G; Start 78; Stop 102
ctgtctaaagaattcccaaatgctt

SEQ ID NO: 389209 - DNA, 25 bp, Artificial
  probe
  misc_feature (1)..(25): SEQ ID NO: 4717; WAN024A6G; Start 67; Stop 91
actgagaatctctgtctaaagaatt

SEQ ID NO: 389210 - DNA, 25 bp, Artificial
  probe
  misc_feature (1)..(25): SEQ ID NO: 4717; WAN024A6G; Start 66; Stop 90
aactgagaatctctgtctaaagaat

SEQ ID NO: 389211 - DNA, 25 bp, Artificial
  probe
  misc_feature (1)..(25): SEQ ID NO: 4717; WAN024A6G; Start 76; Stop 100
ctctgtctaaagaattcccaaatgc

SEQ ID NO: 389212 - DNA, 25 bp, Artificial
  probe
  misc_feature (1)..(25): SEQ ID NO: 4717; WAN024A6G; Start 77; Stop 101
tctgtctaaagaattcccaaatgct

SEQ ID NO: 389213 - DNA, 25 bp, Artificial
  probe
  misc_feature (1)..(25): SEQ ID NO: 4717; WAN024A6G; Start 53; Stop 77
aatttgccgctaaaactgagaatct

SEQ ID NO: 389214 - DNA, 25 bp, Artificial
  probe
  misc_feature (1)..(25): SEQ ID NO: 4717; WAN024A6G; Start 75; Stop 99
tctctgtctaaagaattcccaaatg

SEQ ID NO: 389215 - DNA, 25 bp, Artificial
  probe
  misc_feature (1)..(25): SEQ ID NO: 4717; WAN024A6G; Start 85; Stop 109
aagaattcccaaatgctttccagtc

SEQ ID NO: 389216 - DNA, 25 bp, Artificial
  probe
  misc_feature (1)..(25): SEQ ID NO: 4717; WAN024A6G; Start 73; Stop 97
aatctctgtctaaagaattcccaaa

SEQ ID NO: 389217 - DNA, 25 bp, Artificial
  probe
  misc_feature (1)..(25): SEQ ID NO: 4717; WAN024A6G; Start 60; Stop 84
cgctaaaactgagaatctctgtcta

SEQ ID NO: 389218 - DNA, 25 bp, Artificial
  probe
  misc_feature (1)..(25): SEQ ID NO: 4717; WAN024A6G; Start 74; Stop 98
atctctgtctaaagaattcccaaat

SEQ ID NO: 389219 - DNA, 25 bp, Artificial
  probe
  misc_feature (1)..(25): SEQ ID NO: 4717; WAN024A6G; Start 71; Stop 95
agaatctctgtctaaagaattccca

SEQ ID NO: 389220 - DNA, 25 bp, Artificial
  probe
  misc_feature (1)..(25): SEQ ID NO: 4717; WAN024A6G; Start 94; Stop 118
caaatgctttccagtcccgttttag

SEQ ID NO: 389221 - DNA, 25 bp, Artificial
  probe
  misc_feature (1)..(25): SEQ ID NO: 4717; WAN024A6G; Start 83; Stop 107
taaagaattcccaaatgctttccag

SEQ ID NO: 389222 - DNA, 25 bp, Artificial
  probe
  misc_feature (1)..(25): SEQ ID NO: 4717; WAN024A6G; Start 82; Stop 106
ctaaagaattcccaaatgctttcca

SEQ ID NO: 389223 - DNA, 25 bp, Artificial
  probe
  misc_feature (1)..(25): SEQ ID NO: 4717; WAN024A6G; Start 81; Stop 105
tctaaagaattcccaaatgctttcc

SEQ ID NO: 389224 - DNA, 25 bp, Artificial
  probe
  misc_feature (1)..(25): SEQ ID NO: 4717; WAN024A6G; Start 70; Stop 94
gagaatctctgtctaaagaattccc

SEQ ID NO: 389225 - DNA, 25 bp, Artificial
  probe
  misc_feature (1)..(25): SEQ ID NO: 4717; WAN024A6G; Start 52; Stop 76
aaatttgccgctaaaactgagaatc

SEQ ID NO: 389226 - DNA, 25 bp, Artificial
  probe
  misc_feature (1)..(25): SEQ ID NO: 4717; WAN024A6G; Start 61; Stop 85
gctaaaactgagaatctctgtctaa

SEQ ID NO: 389227 - DNA, 25 bp, Artificial
  probe
  misc_feature (1)..(25): SEQ ID NO: 4717; WAN024A6G; Start 79; Stop 103
tgtctaaagaattcccaaatgcttt

SEQ ID NO: 389228 - DNA, 25 bp, Artificial
  probe
  misc_feature (1)..(25): SEQ ID NO: 4717; WAN024A6G; Start 95; Stop 119
aaatgctttccagtcccgttttaga

SEQ ID NO: 389229 - DNA, 25 bp, Artificial
  probe
  misc_feature (1)..(25): SEQ ID NO: 4717; WAN024A6G; Start 72; Stop 96
gaatctctgtctaaagaattcccaa

SEQ ID NO: 389230 - DNA, 25 bp, Artificial
  probe
  misc_feature (1)..(25): SEQ ID NO: 4717; WAN024A6G; Start 80; Stop 104
gtctaaagaattcccaaatgctttc

SEQ ID NO: 389231 - DNA, 25 bp, Artificial
  probe
  misc_feature (1)..(25): SEQ ID NO: 4717; WAN024A6G; Start 54; Stop 78
atttgccgctaaaactgagaatctc

SEQ ID NO: 389232 - DNA, 25 bp, Artificial
  probe
  misc_feature (1)..(25): SEQ ID NO: 4717; WAN024A6G; Start 69; Stop 93
tgagaatctctgtctaaagaattcc

SEQ ID NO: 389233 - DNA, 25 bp, Artificial
  probe
  misc_feature (1)..(25): SEQ ID NO: 4717; WAN024A6G; Start 96; Stop 120
aatgctttccagtcccgttttagag

SEQ ID NO: 389234 - DNA, 25 bp, Artificial
  probe
  misc_feature (1)..(25): SEQ ID NO: 4717; WAN024A6G; Start 84; Stop 108
aaagaattcccaaatgctttccagt

SEQ ID NO: 389235 - DNA, 25 bp, Artificial
  probe
  misc_feature (1)..(25): SEQ ID NO: 4717; WAN024A6G; Start 59; Stop 83
ccgctaaaactgagaatctctgtct

SEQ ID NO: 389236 - DNA, 25 bp, Artificial
  probe
  misc_feature (1)..(25): SEQ ID NO: 4717; WAN024A6G; Start 64; Stop 88
aaaactgagaatctctgtctaaaga

SEQ ID NO: 389237 - DNA, 25 bp, Artificial
  probe
  misc_feature (1)..(25): SEQ ID NO: 4717; WAN024A6G; Start 55; Stop 79
tttgccgctaaaactgagaatctct

SEQ ID NO: 389238 - DNA, 25 bp, Artificial
  probe
  misc_feature (1)..(25): SEQ ID NO: 4717; WAN024A6G; Start 86; Stop 110
agaattcccaaatgctttccagtcc

SEQ ID NO: 389239 - DNA, 25 bp, Artificial
  probe
  misc_feature (1)..(25): SEQ ID NO: 4717; WAN024A6G; Start 100; Stop 124
ctttccagtcccgttttagagtgac

SEQ ID NO: 389240 - DNA, 25 bp, Artificial
  probe
  misc_feature (1)..(25): SEQ ID NO: 4718; WAN0249ZL; Start 20; Stop 44
cccctaatcgcttattttatagtaa

SEQ ID NO: 389241 - DNA, 25 bp, Artificial
  probe
  misc_feature (1)..(25): SEQ ID NO: 4719; WAN024BEG; Start 14; Stop 38
gtcagtttcatctacaacctcaaag

SEQ ID NO: 389242 - DNA, 25 bp, Artificial
  probe
  misc_feature (1)..(25): SEQ ID NO: 4719; WAN024BEG; Start 17; Stop 41
agtttcatctacaacctcaaagcag

SEQ ID NO: 389243 - DNA, 25 bp, Artificial
  probe
  misc_feature (1)..(25): SEQ ID NO: 4719; WAN024BEG; Start 15; Stop 39
tcagtttcatctacaacctcaaagc

SEQ ID NO: 389244 - DNA, 25 bp, Artificial
  probe
  misc_feature (1)..(25): SEQ ID NO: 4719; WAN024BEG; Start 16; Stop 40
cagtttcatctacaacctcaaagca

SEQ ID NO: 389245 - DNA, 25 bp, Artificial
  probe
  misc_feature (1)..(25): SEQ ID NO: 4719; WAN024BEG; Start 18; Stop 42
gtttcatctacaacctcaaagcagg

SEQ ID NO: 389246 - DNA, 25 bp, Artificial
  probe
  misc_feature (1)..(25): SEQ ID NO: 4719; WAN024BEG; Start 19; Stop 43
tttcatctacaacctcaaagcaggg

SEQ ID NO: 389247 - DNA, 25 bp, Artificial
  probe
  misc_feature (1)..(25): SEQ ID NO: 4719; WAN024BEG; Start 20; Stop 44
ttcatctacaacctcaaagcagggc

SEQ ID NO: 389248 - DNA, 25 bp, Artificial
  probe
  misc_feature (1)..(25): SEQ ID NO: 4719; WAN024BEG; Start 22; Stop 46
catctacaacctcaaagcagggctt

SEQ ID NO: 389249 - DNA, 25 bp, Artificial
  probe
  misc_feature (1)..(25): SEQ ID NO: 4720; WAN024A34; Start 51; Stop 75
aaacgagattaaagaatggcgaaat

SEQ ID NO: 389250 - DNA, 25 bp, Artificial
  probe
  misc_feature (1)..(25): SEQ ID NO: 4720; WAN024A34; Start 50; Stop 74
taaacgagattaaagaatggcgaaa

SEQ ID NO: 389251 - DNA, 25 bp, Artificial
  probe
  misc_feature (1)..(25): SEQ ID NO: 4720; WAN024A34; Start 48; Stop 72
cttaaacgagattaaagaatggcga

SEQ ID NO: 389252 - DNA, 25 bp, Artificial
  probe
  misc_feature (1)..(25): SEQ ID NO: 4720; WAN024A34; Start 47; Stop 71
acttaaacgagattaaagaatggcg

SEQ ID NO: 389253 - DNA, 25 bp, Artificial
  probe
  misc_feature (1)..(25): SEQ ID NO: 4720; WAN024A34; Start 59; Stop 83
ttaaagaatggcgaaatcccttgat

SEQ ID NO: 389254 - DNA, 25 bp, Artificial
  probe
  misc_feature (1)..(25): SEQ ID NO: 4720; WAN024A34; Start 58; Stop 82
attaaagaatggcgaaatcccttga

SEQ ID NO: 389255 - DNA, 25 bp, Artificial
  probe
  misc_feature (1)..(25): SEQ ID NO: 4720; WAN024A34; Start 49; Stop 73
ttaaacgagattaaagaatggcgaa

SEQ ID NO: 389256 - DNA, 25 bp, Artificial
  probe
  misc_feature (1)..(25): SEQ ID NO: 4720; WAN024A34; Start 33; Stop 57
gctccatatacaacacttaaacgag

SEQ ID NO: 389257 - DNA, 25 bp, Artificial
  probe
  misc_feature (1)..(25): SEQ ID NO: 4720; WAN024A34; Start 46; Stop 70
cacttaaacgagattaaagaatggc

SEQ ID NO: 389258 - DNA, 25 bp, Artificial
  probe
  misc_feature (1)..(25): SEQ ID NO: 4720; WAN024A34; Start 60; Stop 84
taaagaatggcgaaatcccttgatg

SEQ ID NO: 389259 - DNA, 25 bp, Artificial
  probe
  misc_feature (1)..(25): SEQ ID NO: 4720; WAN024A34; Start 35; Stop 59
tccatatacaacacttaaacgagat

SEQ ID NO: 389260 - DNA, 25 bp, Artificial
  probe
  misc_feature (1)..(25): SEQ ID NO: 4720; WAN024A34; Start 338; Stop 362
aagaatcaaagagcaaaccatgaat

SEQ ID NO: 389261 - DNA, 25 bp, Artificial
  probe
  misc_feature (1)..(25): SEQ ID NO: 4720; WAN024A34; Start 34; Stop 58
ctccatatacaacacttaaacgaga

SEQ ID NO: 389262 - DNA, 25 bp, Artificial
  probe
  misc_feature (1)..(25): SEQ ID NO: 4720; WAN024A34; Start 337; Stop 361
taagaatcaaagagcaaaccatgaa

SEQ ID NO: 389263 - DNA, 25 bp, Artificial
  probe
  misc_feature (1)..(25): SEQ ID NO: 4720; WAN024A34; Start 32; Stop 56
agctccatatacaacacttaaacga

SEQ ID NO: 389264 - DNA, 25 bp, Artificial
  probe
  misc_feature (1)..(25): SEQ ID NO: 4720; WAN024A34; Start 339; Stop 363
agaatcaaagagcaaaccatgaata

SEQ ID NO: 389265 - DNA, 25 bp, Artificial
  probe
  misc_feature (1)..(25): SEQ ID NO: 4720; WAN024A34; Start 336; Stop 360
ataagaatcaaagagcaaaccatga

SEQ ID NO: 389266 - DNA, 25 bp, Artificial
  probe
  misc_feature (1)..(25): SEQ ID NO: 4720; WAN024A34; Start 335; Stop 359
aataagaatcaaagagcaaaccatg

SEQ ID NO: 389267 - DNA, 25 bp, Artificial
  probe
  misc_feature (1)..(25): SEQ ID NO: 4720; WAN024A34; Start 28; Stop 52
gcaaagctccatatacaacacttaa

SEQ ID NO: 389268 - DNA, 25 bp, Artificial
  probe
  misc_feature (1)..(25): SEQ ID NO: 4720; WAN024A34; Start 52; Stop 76
aacgagattaaagaatggcgaaatc

SEQ ID NO: 389269 - DNA, 25 bp, Artificial
  probe
  misc_feature (1)..(25): SEQ ID NO: 4720; WAN024A34; Start 31; Stop 55
aagctccatatacaacacttaaacg

SEQ ID NO: 389270 - DNA, 25 bp, Artificial
  probe
  misc_feature (1)..(25): SEQ ID NO: 4720; WAN024A34; Start 56; Stop 80
agattaaagaatggcgaaatccctt

SEQ ID NO: 389271 - DNA, 25 bp, Artificial
  probe
  misc_feature (1)..(25): SEQ ID NO: 4720; WAN024A34; Start 57; Stop 81
gattaaagaatggcgaaatcccttg

SEQ ID NO: 389272 - DNA, 25 bp, Artificial
  probe
  misc_feature (1)..(25): SEQ ID NO: 4720; WAN024A34; Start 45; Stop 69
acacttaaacgagattaaagaatgg

SEQ ID NO: 389273 - DNA, 25 bp, Artificial
  probe
  misc_feature (1)..(25): SEQ ID NO: 4720; WAN024A34; Start 55; Stop 79
gagattaaagaatggcgaaatccct

SEQ ID NO: 389274 - DNA, 25 bp, Artificial
  probe
  misc_feature (1)..(25): SEQ ID NO: 4720; WAN024A34; Start 36; Stop 60
ccatatacaacacttaaacgagatt

SEQ ID NO: 389275 - DNA, 25 bp, Artificial
  probe
  misc_feature (1)..(25): SEQ ID NO: 4720; WAN024A34; Start 340; Stop 364
gaatcaaagagcaaaccatgaatat

SEQ ID NO: 389276 - DNA, 25 bp, Artificial
  probe
  misc_feature (1)..(25): SEQ ID NO: 4720; WAN024A34; Start 27; Stop 51
tgcaaagctccatatacaacactta

SEQ ID NO: 389277 - DNA, 25 bp, Artificial
  probe
  misc_feature (1)..(25): SEQ ID NO: 4720; WAN024A34; Start 26; Stop 50
atgcaaagctccatatacaacactt

SEQ ID NO: 389278 - DNA, 25 bp, Artificial
  probe
  misc_feature (1)..(25): SEQ ID NO: 4720; WAN024A34; Start 42; Stop 66
acaacacttaaacgagattaaagaa

SEQ ID NO: 389279 - DNA, 25 bp, Artificial
  probe
  misc_feature (1)..(25): SEQ ID NO: 4720; WAN024A34; Start 53; Stop 77
acgagattaaagaatggcgaaatcc

SEQ ID NO: 389280 - DNA, 25 bp, Artificial
  probe
  misc_feature (1)..(25): SEQ ID NO: 4720; WAN024A34; Start 25; Stop 49
tatgcaaagctccatatacaacact

SEQ ID NO: 389281 - DNA, 25 bp, Artificial
  probe
  misc_feature (1)..(25): SEQ ID NO: 4720; WAN024A34; Start 341; Stop 365
aatcaaagagcaaaccatgaatatt

SEQ ID NO: 389282 - DNA, 25 bp, Artificial
  probe
  misc_feature (1)..(25): SEQ ID NO: 4721; WAN024AOB; Start 321; Stop 345
ttctgactggaaggatagttacact

SEQ ID NO: 389283 - DNA, 25 bp, Artificial
  probe
  misc_feature (1)..(25): SEQ ID NO: 4721; WAN024AOB; Start 322; Stop 346
tctgactggaaggatagttacacta

SEQ ID NO: 389284 - DNA, 25 bp, Artificial
  probe
  misc_feature (1)..(25): SEQ ID NO: 4721; WAN024AOB; Start 323; Stop 347
ctgactggaaggatagttacactag

SEQ ID NO: 389285 - DNA, 25 bp, Artificial
  probe
  misc_feature (1)..(25): SEQ ID NO: 4721; WAN024AOB; Start 265; Stop 289
gcttgattgcctaacgagataaatt

SEQ ID NO: 389286 - DNA, 25 bp, Artificial
  probe
  misc_feature (1)..(25): SEQ ID NO: 4721; WAN024AOB; Start 264; Stop 288
tgcttgattgcctaacgagataaat

SEQ ID NO: 389287 - DNA, 25 bp, Artificial
  probe
  misc_feature (1)..(25): SEQ ID NO: 4721; WAN024AOB; Start 263; Stop 287
ttgcttgattgcctaacgagataaa

SEQ ID NO: 389288 - DNA, 25 bp, Artificial
  probe
  misc_feature (1)..(25): SEQ ID NO: 4721; WAN024AOB; Start 262; Stop 286
tttgcttgattgcctaacgagataa

SEQ ID NO: 389289 - DNA, 25 bp, Artificial
  probe
  misc_feature (1)..(25): SEQ ID NO: 4721; WAN024AOB; Start 324; Stop 348
tgactggaaggatagttacactagt

SEQ ID NO: 389290 - DNA, 25 bp, Artificial
  probe
  misc_feature (1)..(25): SEQ ID NO: 4721; WAN024AOB; Start 238; Stop 262
taatgtttgtactatcgtcgagttt

SEQ ID NO: 389291 - DNA, 25 bp, Artificial
  probe
  misc_feature (1)..(25): SEQ ID NO: 4721; WAN024AOB; Start 236; Stop 260
gataatgtttgtactatcgtcgagt

SEQ ID NO: 389292 - DNA, 25 bp, Artificial
  probe
  misc_feature (1)..(25): SEQ ID NO: 4721; WAN024AOB; Start 235; Stop 259
tgataatgtttgtactatcgtcgag

SEQ ID NO: 389293 - DNA, 25 bp, Artificial
  probe
  misc_feature (1)..(25): SEQ ID NO: 4721; WAN024AOB; Start 266; Stop 290
cttgattgcctaacgagataaattt

SEQ ID NO: 389294 - DNA, 25 bp, Artificial
  probe
  misc_feature (1)..(25): SEQ ID NO: 4721; WAN024AOB; Start 237; Stop 261
ataatgtttgtactatcgtcgagtt

SEQ ID NO: 389295 - DNA, 25 bp, Artificial
  probe
  misc_feature (1)..(25): SEQ ID NO: 4721; WAN024AOB; Start 66; Stop 90
aattagctcgtatctataggatgat

SEQ ID NO: 389296 - DNA, 25 bp, Artificial
  probe
  misc_feature (1)..(25): SEQ ID NO: 4721; WAN024AOB; Start 261; Stop 285
ttttgcttgattgcctaacgagata

SEQ ID NO: 389297 - DNA, 25 bp, Artificial
  probe
  misc_feature (1)..(25): SEQ ID NO: 4721; WAN024AOB; Start 325; Stop 349
gactggaaggatagttacactagta

SEQ ID NO: 389298 - DNA, 25 bp, Artificial
  probe
  misc_feature (1)..(25): SEQ ID NO: 4721; WAN024AOB; Start 234; Stop 258
atgataatgtttgtactatcgtcga

SEQ ID NO: 389299 - DNA, 25 bp, Artificial
  probe
  misc_feature (1)..(25): SEQ ID NO: 4721; WAN024AOB; Start 97; Stop 121
aatcttcttgttgctttaaatcaca

SEQ ID NO: 389300 - DNA, 25 bp, Artificial
  probe
  misc_feature (1)..(25): SEQ ID NO: 4721; WAN024AOB; Start 87; Stop 111
tgatactgaaaatcttcttgttgct

SEQ ID NO: 389301 - DNA, 25 bp, Artificial
  probe
  misc_feature (1)..(25): SEQ ID NO: 4721; WAN024AOB; Start 96; Stop 120
aaatcttcttgttgctttaaatcac

SEQ ID NO: 389302 - DNA, 25 bp, Artificial
  probe
  misc_feature (1)..(25): SEQ ID NO: 4721; WAN024AOB; Start 326; Stop 350
actggaaggatagttacactagtat

SEQ ID NO: 389303 - DNA, 25 bp, Artificial
  probe
  misc_feature (1)..(25): SEQ ID NO: 4721; WAN024AOB; Start 62; Stop 86
tcttaattagctcgtatctatagga

SEQ ID NO: 389304 - DNA, 25 bp, Artificial
  probe
  misc_feature (1)..(25): SEQ ID NO: 4721; WAN024AOB; Start 88; Stop 112
gatactgaaaatcttcttgttgctt

SEQ ID NO: 389305 - DNA, 25 bp, Artificial
  probe
  misc_feature (1)..(25): SEQ ID NO: 4721; WAN024AOB; Start 86; Stop 110
atgatactgaaaatcttcttgttgc

SEQ ID NO: 389306 - DNA, 25 bp, Artificial
  probe
  misc_feature (1)..(25): SEQ ID NO: 4721; WAN024AOB; Start 65; Stop 89
taattagctcgtatctataggatga

SEQ ID NO: 389307 - DNA, 25 bp, Artificial
  probe
  misc_feature (1)..(25): SEQ ID NO: 4721; WAN024AOB; Start 233; Stop 257
tatgataatgtttgtactatcgtcg

SEQ ID NO: 389308 - DNA, 25 bp, Artificial
  probe
  misc_feature (1)..(25): SEQ ID NO: 4721; WAN024AOB; Start 83; Stop 107
aggatgatactgaaaatcttcttgt

SEQ ID NO: 389309 - DNA, 25 bp, Artificial
  probe
  misc_feature (1)..(25): SEQ ID NO: 4721; WAN024AOB; Start 91; Stop 115
actgaaaatcttcttgttgctttaa

SEQ ID NO: 389310 - DNA, 25 bp, Artificial
  probe
  misc_feature (1)..(25): SEQ ID NO: 4721; WAN024AOB; Start 89; Stop 113
atactgaaaatcttcttgttgcttt

SEQ ID NO: 389311 - DNA, 25 bp, Artificial
  probe
  misc_feature (1)..(25): SEQ ID NO: 4721; WAN024AOB; Start 184; Stop 208
tcttatccgaaaaccttactaaagt

SEQ ID NO: 389312 - DNA, 25 bp, Artificial
  probe
  misc_feature (1)..(25): SEQ ID NO: 4721; WAN024AOB; Start 329; Stop 353
ggaaggatagttacactagtattgt

SEQ ID NO: 389313 - DNA, 25 bp, Artificial
  probe
  misc_feature (1)..(25): SEQ ID NO: 4721; WAN024AOB; Start 328; Stop 352
tggaaggatagttacactagtattg

SEQ ID NO: 389314 - DNA, 25 bp, Artificial
  probe
  misc_feature (1)..(25): SEQ ID NO: 4721; WAN024AOB; Start 102; Stop 126
tcttgttgctttaaatcacaatcga

SEQ ID NO: 389315 - DNA, 25 bp, Artificial
  probe
  misc_feature (1)..(25): SEQ ID NO: 4722; WAN024CBM; Start 219; Stop 243
cagatgtgaaagaaatgaaatggct

SEQ ID NO: 389316 - DNA, 25 bp, Artificial
  probe
  misc_feature (1)..(25): SEQ ID NO: 4722; WAN024CBM; Start 218; Stop 242
acagatgtgaaagaaatgaaatggc

SEQ ID NO: 389317 - DNA, 25 bp, Artificial
  probe
  misc_feature (1)..(25): SEQ ID NO: 4722; WAN024CBM; Start 190; Stop 214
cgctaagaaatatgctaaagttcgt

SEQ ID NO: 389318 - DNA, 25 bp, Artificial
  probe
  misc_feature (1)..(25): SEQ ID NO: 4722; WAN024CBM; Start 220; Stop 244
agatgtgaaagaaatgaaatggcta

SEQ ID NO: 389319 - DNA, 25 bp, Artificial
  probe
  misc_feature (1)..(25): SEQ ID NO: 4722; WAN024CBM; Start 217; Stop 241
aacagatgtgaaagaaatgaaatgg

SEQ ID NO: 389320 - DNA, 25 bp, Artificial
  probe
  misc_feature (1)..(25): SEQ ID NO: 4722; WAN024CBM; Start 221; Stop 245
gatgtgaaagaaatgaaatggctat

SEQ ID NO: 389321 - DNA, 25 bp, Artificial
  probe
  misc_feature (1)..(25): SEQ ID NO: 4722; WAN024CBM; Start 223; Stop 247
tgtgaaagaaatgaaatggctataa

SEQ ID NO: 389322 - DNA, 25 bp, Artificial
  probe
  misc_feature (1)..(25): SEQ ID NO: 4722; WAN024CBM; Start 191; Stop 215
gctaagaaatatgctaaagttcgta

SEQ ID NO: 389323 - DNA, 25 bp, Artificial
  probe
  misc_feature (1)..(25): SEQ ID NO: 4722; WAN024CBM; Start 222; Stop 246
atgtgaaagaaatgaaatggctata

SEQ ID NO: 389324 - DNA, 25 bp, Artificial
  probe
  misc_feature (1)..(25): SEQ ID NO: 4722; WAN024CBM; Start 216; Stop 240
aaacagatgtgaaagaaatgaaatg

SEQ ID NO: 389325 - DNA, 25 bp, Artificial
  probe
  misc_feature (1)..(25): SEQ ID NO: 4722; WAN024CBM; Start 130; Stop 154
tttaggtttacgaagagacaaaagc

SEQ ID NO: 389326 - DNA, 25 bp, Artificial
  probe
  misc_feature (1)..(25): SEQ ID NO: 4722; WAN024CBM; Start 126; Stop 150
cagttttaggtttacgaagagacaa

SEQ ID NO: 389327 - DNA, 25 bp, Artificial
  probe
  misc_feature (1)..(25): SEQ ID NO: 4722; WAN024CBM; Start 41; Stop 65
agttgttgcatcgtagctaaggatt

SEQ ID NO: 389328 - DNA, 25 bp, Artificial
  probe
  misc_feature (1)..(25): SEQ ID NO: 4722; WAN024CBM; Start 40; Stop 64
aagttgttgcatcgtagctaaggat

SEQ ID NO: 389329 - DNA, 25 bp, Artificial
  probe
  misc_feature (1)..(25): SEQ ID NO: 4722; WAN024CBM; Start 141; Stop 165
gaagagacaaaagcggagtatttaa

SEQ ID NO: 389330 - DNA, 25 bp, Artificial
  probe
  misc_feature (1)..(25): SEQ ID NO: 4722; WAN024CBM; Start 140; Stop 164
cgaagagacaaaagcggagtattta

SEQ ID NO: 389331 - DNA, 25 bp, Artificial
  probe
  misc_feature (1)..(25): SEQ ID NO: 4722; WAN024CBM; Start 203; Stop 227
gctaaagttcgtaaaacagatgtga

SEQ ID NO: 389332 - DNA, 25 bp, Artificial
  probe
  misc_feature (1)..(25): SEQ ID NO: 4722; WAN024CBM; Start 202; Stop 226
tgctaaagttcgtaaaacagatgtg

SEQ ID NO: 389333 - DNA, 25 bp, Artificial
  probe
  misc_feature (1)..(25): SEQ ID NO: 4722; WAN024CBM; Start 125; Stop 149
gcagttttaggtttacgaagagaca

SEQ ID NO: 389334 - DNA, 25 bp, Artificial
  probe
  misc_feature (1)..(25): SEQ ID NO: 4722; WAN024CBM; Start 127; Stop 151
agttttaggtttacgaagagacaaa

SEQ ID NO: 389335 - DNA, 25 bp, Artificial
  probe
  misc_feature (1)..(25): SEQ ID NO: 4722; WAN024CBM; Start 201; Stop 225
atgctaaagttcgtaaaacagatgt

SEQ ID NO: 389336 - DNA, 25 bp, Artificial
  probe
  misc_feature (1)..(25): SEQ ID NO: 4722; WAN024CBM; Start 46; Stop 70
ttgcatcgtagctaaggatttatct

SEQ ID NO: 389337 - DNA, 25 bp, Artificial
  probe
  misc_feature (1)..(25): SEQ ID NO: 4722; WAN024CBM; Start 45; Stop 69
gttgcatcgtagctaaggatttatc

SEQ ID NO: 389338 - DNA, 25 bp, Artificial
  probe
  misc_feature (1)..(25): SEQ ID NO: 4722; WAN024CBM; Start 208; Stop 232
agttcgtaaaacagatgtgaaagaa

SEQ ID NO: 389339 - DNA, 25 bp, Artificial
  probe
  misc_feature (1)..(25): SEQ ID NO: 4722; WAN024CBM; Start 207; Stop 231
aagttcgtaaaacagatgtgaaaga

SEQ ID NO: 389340 - DNA, 25 bp, Artificial
  probe
  misc_feature (1)..(25): SEQ ID NO: 4722; WAN024CBM; Start 44; Stop 68
tgttgcatcgtagctaaggatttat

SEQ ID NO: 389341 - DNA, 25 bp, Artificial
  probe
  misc_feature (1)..(25): SEQ ID NO: 4722; WAN024CBM; Start 43; Stop 67
ttgttgcatcgtagctaaggattta

SEQ ID NO: 389342 - DNA, 25 bp, Artificial
  probe
  misc_feature (1)..(25): SEQ ID NO: 4722; WAN024CBM; Start 131; Stop 155
ttaggtttacgaagagacaaaagcg

SEQ ID NO: 389343 - DNA, 25 bp, Artificial
  probe
  misc_feature (1)..(25): SEQ ID NO: 4722; WAN024CBM; Start 47; Stop 71
tgcatcgtagctaaggatttatcta

SEQ ID NO: 389344 - DNA, 25 bp, Artificial
  probe
  misc_feature (1)..(25): SEQ ID NO: 4722; WAN024CBM; Start 212; Stop 236
cgtaaaacagatgtgaaagaaatga

SEQ ID NO: 389345 - DNA, 25 bp, Artificial
  probe
  misc_feature (1)..(25): SEQ ID NO: 4722; WAN024CBM; Start 211; Stop 235
tcgtaaaacagatgtgaaagaaatg

SEQ ID NO: 389346 - DNA, 25 bp, Artificial
  probe
  misc_feature (1)..(25): SEQ ID NO: 4722; WAN024CBM; Start 209; Stop 233
gttcgtaaaacagatgtgaaagaaa

SEQ ID NO: 389347 - DNA, 25 bp, Artificial
  probe
  misc_feature (1)..(25): SEQ ID NO: 4722; WAN024CBM; Start 206; Stop 230
aaagttcgtaaaacagatgtgaaag

SEQ ID NO: 389348 - DNA, 25 bp, Artificial
  probe
  misc_feature (1)..(25): SEQ ID NO: 4723; WAN024AAL; Start 30; Stop 54
tccaatacctcaataaagtgttgtt

SEQ ID NO: 389349 - DNA, 25 bp, Artificial
  probe
  misc_feature (1)..(25): SEQ ID NO: 4723; WAN024AAL; Start 29; Stop 53
atccaatacctcaataaagtgttgt

SEQ ID NO: 389350 - DNA, 25 bp, Artificial
  probe
  misc_feature (1)..(25): SEQ ID NO: 4723; WAN024AAL; Start 25; Stop 49
gcgtatccaatacctcaataaagtg

SEQ ID NO: 389351 - DNA, 25 bp, Artificial
  probe
  misc_feature (1)..(25): SEQ ID NO: 4723; WAN024AAL; Start 15; Stop 39
tattagcaaagcgtatccaatacct

SEQ ID NO: 389352 - DNA, 25 bp, Artificial
  probe
  misc_feature (1)..(25): SEQ ID NO: 4723; WAN024AAL; Start 24; Stop 48
agcgtatccaatacctcaataaagt

SEQ ID NO: 389353 - DNA, 25 bp, Artificial
  probe
  misc_feature (1)..(25): SEQ ID NO: 4723; WAN024AAL; Start 14; Stop 38
ctattagcaaagcgtatccaatacc

SEQ ID NO: 389354 - DNA, 25 bp, Artificial
  probe
  misc_feature (1)..(25): SEQ ID NO: 4723; WAN024AAL; Start 21; Stop 45
caaagcgtatccaatacctcaataa

SEQ ID NO: 389355 - DNA, 25 bp, Artificial
  probe
  misc_feature (1)..(25): SEQ ID NO: 4723; WAN024AAL; Start 31; Stop 55
ccaatacctcaataaagtgttgttt

SEQ ID NO: 389356 - DNA, 25 bp, Artificial
  probe
  misc_feature (1)..(25): SEQ ID NO: 4723; WAN024AAL; Start 23; Stop 47
aagcgtatccaatacctcaataaag

SEQ ID NO: 389357 - DNA, 25 bp, Artificial
  probe
  misc_feature (1)..(25): SEQ ID NO: 4723; WAN024AAL; Start 16; Stop 40
attagcaaagcgtatccaatacctc

SEQ ID NO: 389358 - DNA, 25 bp, Artificial
  probe
  misc_feature (1)..(25): SEQ ID NO: 4723; WAN024AAL; Start 20; Stop 44
gcaaagcgtatccaatacctcaata

SEQ ID NO: 389359 - DNA, 25 bp, Artificial
  probe
  misc_feature (1)..(25): SEQ ID NO: 4723; WAN024AAL; Start 26; Stop 50
cgtatccaatacctcaataaagtgt

SEQ ID NO: 389360 - DNA, 25 bp, Artificial
  probe
  misc_feature (1)..(25): SEQ ID NO: 4723; WAN024AAL; Start 22; Stop 46
aaagcgtatccaatacctcaataaa

SEQ ID NO: 389361 - DNA, 25 bp, Artificial
  probe
  misc_feature (1)..(25): SEQ ID NO: 4723; WAN024AAL; Start 18; Stop 42
tagcaaagcgtatccaatacctcaa

SEQ ID NO: 389362 - DNA, 25 bp, Artificial
  probe
  misc_feature (1)..(25): SEQ ID NO: 4723; WAN024AAL; Start 17; Stop 41
ttagcaaagcgtatccaatacctca

SEQ ID NO: 389363 - DNA, 25 bp, Artificial
  probe
  misc_feature (1)..(25): SEQ ID NO: 4723; WAN024AAL; Start 19; Stop 43
agcaaagcgtatccaatacctcaat

SEQ ID NO: 389364 - DNA, 25 bp, Artificial
  probe
  misc_feature (1)..(25): SEQ ID NO: 4723; WAN024AAL; Start 28; Stop 52
tatccaatacctcaataaagtgttg

SEQ ID NO: 389365 - DNA, 25 bp, Artificial
  probe
  misc_feature (1)..(25): SEQ ID NO: 4723; WAN024AAL; Start 13; Stop 37
gctattagcaaagcgtatccaatac

SEQ ID NO: 389366 - DNA, 25 bp, Artificial
  probe
  misc_feature (1)..(25): SEQ ID NO: 4723; WAN024AAL; Start 4; Stop 28
gattattaggctattagcaaagcgt

SEQ ID NO: 389367 - DNA, 25 bp, Artificial
  probe
  misc_feature (1)..(25): SEQ ID NO: 4723; WAN024AAL; Start 3; Stop 27
tgattattaggctattagcaaagcg

SEQ ID NO: 389368 - DNA, 25 bp, Artificial
  probe
  misc_feature (1)..(25): SEQ ID NO: 4723; WAN024AAL; Start 8; Stop 32
attaggctattagcaaagcgtatcc

SEQ ID NO: 389369 - DNA, 25 bp, Artificial
  probe
  misc_feature (1)..(25): SEQ ID NO: 4723; WAN024AAL; Start 12; Stop 36
ggctattagcaaagcgtatccaata

SEQ ID NO: 389370 - DNA, 25 bp, Artificial
  probe
  misc_feature (1)..(25): SEQ ID NO: 4723; WAN024AAL; Start 7; Stop 31
tattaggctattagcaaagcgtatc

SEQ ID NO: 389371 - DNA, 25 bp, Artificial
  probe
  misc_feature (1)..(25): SEQ ID NO: 4723; WAN024AAL; Start 27; Stop 51
gtatccaatacctcaataaagtgtt

SEQ ID NO: 389372 - DNA, 25 bp, Artificial
  probe
  misc_feature (1)..(25): SEQ ID NO: 4723; WAN024AAL; Start 6; Stop 30
ttattaggctattagcaaagcgtat

SEQ ID NO: 389373 - DNA, 25 bp, Artificial
  probe
  misc_feature (1)..(25): SEQ ID NO: 4723; WAN024AAL; Start 5; Stop 29
attattaggctattagcaaagcgta

SEQ ID NO: 389374 - DNA, 25 bp, Artificial
  probe
  misc_feature (1)..(25): SEQ ID NO: 4723; WAN024AAL; Start 2; Stop 26
gtgattattaggctattagcaaagc

SEQ ID NO: 389375 - DNA, 25 bp, Artificial
  probe
  misc_feature (1)..(25): SEQ ID NO: 4723; WAN024AAL; Start 10; Stop 34
taggctattagcaaagcgtatccaa

SEQ ID NO: 389376 - DNA, 25 bp, Artificial
  probe
  misc_feature (1)..(25): SEQ ID NO: 4723; WAN024AAL; Start 9; Stop 33
ttaggctattagcaaagcgtatcca

SEQ ID NO: 389377 - DNA, 25 bp, Artificial
  probe
  misc_feature (1)..(25): SEQ ID NO: 4723; WAN024AAL; Start 11; Stop 35
aggctattagcaaagcgtatccaat

SEQ ID NO: 389378 - DNA, 25 bp, Artificial
  probe
  misc_feature (1)..(25): SEQ ID NO: 4723; WAN024AAL; Start 1; Stop 25
tgtgattattaggctattagcaaag

SEQ ID NO: 389379 - DNA, 25 bp, Artificial
  probe
  misc_feature (1)..(25): SEQ ID NO: 4723; WAN024AAL; Start 32; Stop 56
caatacctcaataaagtgttgtttt

SEQ ID NO: 389380 - DNA, 25 bp, Artificial
  probe
  misc_feature (1)..(25): SEQ ID NO: 4724; WAN0249T9; Start 107; Stop 131
acagacacaagtgaagtaggattac

SEQ ID NO: 389381 - DNA, 25 bp, Artificial
  probe
  misc_feature (1)..(25): SEQ ID NO: 4724; WAN0249T9; Start 105; Stop 129
ttacagacacaagtgaagtaggatt

SEQ ID NO: 389382 - DNA, 25 bp, Artificial
  probe
  misc_feature (1)..(25): SEQ ID NO: 4724; WAN0249T9; Start 106; Stop 130
tacagacacaagtgaagtaggatta

SEQ ID NO: 389383 - DNA, 25 bp, Artificial
  probe
  misc_feature (1)..(25): SEQ ID NO: 4724; WAN0249T9; Start 108; Stop 132
cagacacaagtgaagtaggattact

SEQ ID NO: 389384 - DNA, 25 bp, Artificial
  probe
  misc_feature (1)..(25): SEQ ID NO: 4724; WAN0249T9; Start 104; Stop 128
tttacagacacaagtgaagtaggat

SEQ ID NO: 389385 - DNA, 25 bp, Artificial
  probe
  misc_feature (1)..(25): SEQ ID NO: 4724; WAN0249T9; Start 28; Stop 52
cctgagggacatcttatattggtga

SEQ ID NO: 389386 - DNA, 25 bp, Artificial
  probe
  misc_feature (1)..(25): SEQ ID NO: 4724; WAN0249T9; Start 27; Stop 51
gcctgagggacatcttatattggtg

SEQ ID NO: 389387 - DNA, 25 bp, Artificial
  probe
  misc_feature (1)..(25): SEQ ID NO: 4724; WAN0249T9; Start 25; Stop 49
gtgcctgagggacatcttatattgg

SEQ ID NO: 389388 - DNA, 25 bp, Artificial
  probe
  misc_feature (1)..(25): SEQ ID NO: 4724; WAN0249T9; Start 24; Stop 48
ggtgcctgagggacatcttatattg

SEQ ID NO: 389389 - DNA, 25 bp, Artificial
  probe
  misc_feature (1)..(25): SEQ ID NO: 4724; WAN0249T9; Start 256; Stop 280
acttctcatgattcgttgttactac

SEQ ID NO: 389390 - DNA, 25 bp, Artificial
  probe
  misc_feature (1)..(25): SEQ ID NO: 4724; WAN0249T9; Start 221; Stop 245
ttacggaagtttcctcactactatg

SEQ ID NO: 389391 - DNA, 25 bp, Artificial
  probe
  misc_feature (1)..(25): SEQ ID NO: 4724; WAN0249T9; Start 219; Stop 243
cattacggaagtttcctcactacta

SEQ ID NO: 389392 - DNA, 25 bp, Artificial
  probe
  misc_feature (1)..(25): SEQ ID NO: 4724; WAN0249T9; Start 255; Stop 279
gacttctcatgattcgttgttacta

SEQ ID NO: 389393 - DNA, 25 bp, Artificial
  probe
  misc_feature (1)..(25): SEQ ID NO: 4724; WAN0249T9; Start 254; Stop 278
tgacttctcatgattcgttgttact

SEQ ID NO: 389394 - DNA, 25 bp, Artificial
  probe
  misc_feature (1)..(25): SEQ ID NO: 4724; WAN0249T9; Start 253; Stop 277
ctgacttctcatgattcgttgttac

SEQ ID NO: 389395 - DNA, 25 bp, Artificial
  probe
  misc_feature (1)..(25): SEQ ID NO: 4724; WAN0249T9; Start 220; Stop 244
attacggaagtttcctcactactat

SEQ ID NO: 389396 - DNA, 25 bp, Artificial
  probe
  misc_feature (1)..(25): SEQ ID NO: 4724; WAN0249T9; Start 26; Stop 50
tgcctgagggacatcttatattggt

SEQ ID NO: 389397 - DNA, 25 bp, Artificial
  probe
  misc_feature (1)..(25): SEQ ID NO: 4724; WAN0249T9; Start 23; Stop 47
tggtgcctgagggacatcttatatt

SEQ ID NO: 389398 - DNA, 25 bp, Artificial
  probe
  misc_feature (1)..(25): SEQ ID NO: 4724; WAN0249T9; Start 22; Stop 46
ttggtgcctgagggacatcttatat

SEQ ID NO: 389399 - DNA, 25 bp, Artificial
  probe
  misc_feature (1)..(25): SEQ ID NO: 4724; WAN0249T9; Start 222; Stop 246
tacggaagtttcctcactactatgg

SEQ ID NO: 389400 - DNA, 25 bp, Artificial
  probe
  misc_feature (1)..(25): SEQ ID NO: 4724; WAN0249T9; Start 252; Stop 276
gctgacttctcatgattcgttgtta

SEQ ID NO: 389401 - DNA, 25 bp, Artificial
  probe
  misc_feature (1)..(25): SEQ ID NO: 4724; WAN0249T9; Start 21; Stop 45
tttggtgcctgagggacatcttata

SEQ ID NO: 389402 - DNA, 25 bp, Artificial
  probe
  misc_feature (1)..(25): SEQ ID NO: 4724; WAN0249T9; Start 103; Stop 127
ttttacagacacaagtgaagtagga

SEQ ID NO: 389403 - DNA, 25 bp, Artificial
  probe
  misc_feature (1)..(25): SEQ ID NO: 4724; WAN0249T9; Start 148; Stop 172
ctctttctagcgacagacctcaaac

SEQ ID NO: 389404 - DNA, 25 bp, Artificial
  probe
  misc_feature (1)..(25): SEQ ID NO: 4724; WAN0249T9; Start 218; Stop 242
ccattacggaagtttcctcactact

SEQ ID NO: 389405 - DNA, 25 bp, Artificial
  probe
  misc_feature (1)..(25): SEQ ID NO: 4724; WAN0249T9; Start 217; Stop 241
tccattacggaagtttcctcactac

SEQ ID NO: 389406 - DNA, 25 bp, Artificial
  probe
  misc_feature (1)..(25): SEQ ID NO: 4724; WAN0249T9; Start 147; Stop 171
tctctttctagcgacagacctcaaa

SEQ ID NO: 389407 - DNA, 25 bp, Artificial
  probe
  misc_feature (1)..(25): SEQ ID NO: 4724; WAN0249T9; Start 146; Stop 170
ttctctttctagcgacagacctcaa

SEQ ID NO: 389408 - DNA, 25 bp, Artificial
  probe
  misc_feature (1)..(25): SEQ ID NO: 4724; WAN0249T9; Start 145; Stop 169
tttctctttctagcgacagacctca

SEQ ID NO: 389409 - DNA, 25 bp, Artificial
  probe
  misc_feature (1)..(25): SEQ ID NO: 4724; WAN0249T9; Start 150; Stop 174
ctttctagcgacagacctcaaacag

SEQ ID NO: 389410 - DNA, 25 bp, Artificial
  probe
  misc_feature (1)..(25): SEQ ID NO: 4724; WAN0249T9; Start 263; Stop 287
atgattcgttgttactacgctttca

SEQ ID NO: 389411 - DNA, 25 bp, Artificial
  probe
  misc_feature (1)..(25): SEQ ID NO: 4724; WAN0249T9; Start 262; Stop 286
catgattcgttgttactacgctttc

SEQ ID NO: 389412 - DNA, 25 bp, Artificial
  probe
  misc_feature (1)..(25): SEQ ID NO: 4724; WAN0249T9; Start 109; Stop 133
agacacaagtgaagtaggattactt

SEQ ID NO: 389413 - DNA, 25 bp, Artificial
  probe
  misc_feature (1)..(25): SEQ ID NO: 4725; WAN024A8P; Start 15; Stop 39
ttcagcctactataactgtcataga

SEQ ID NO: 389414 - DNA, 25 bp, Artificial
  probe
  misc_feature (1)..(25): SEQ ID NO: 4725; WAN024A8P; Start 16; Stop 40
tcagcctactataactgtcatagat

SEQ ID NO: 389415 - DNA, 25 bp, Artificial
  probe
  misc_feature (1)..(25): SEQ ID NO: 4725; WAN024A8P; Start 18; Stop 42
agcctactataactgtcatagattg

SEQ ID NO: 389416 - DNA, 25 bp, Artificial
  probe
  misc_feature (1)..(25): SEQ ID NO: 4725; WAN024A8P; Start 17; Stop 41
cagcctactataactgtcatagatt

SEQ ID NO: 389417 - DNA, 25 bp, Artificial
  probe
  misc_feature (1)..(25): SEQ ID NO: 4725; WAN024A8P; Start 9; Stop 33
tccaatttcagcctactataactgt

SEQ ID NO: 389418 - DNA, 25 bp, Artificial
  probe
  misc_feature (1)..(25): SEQ ID NO: 4725; WAN024A8P; Start 10; Stop 34
ccaatttcagcctactataactgtc

SEQ ID NO: 389419 - DNA, 25 bp, Artificial
  probe
  misc_feature (1)..(25): SEQ ID NO: 4725; WAN024A8P; Start 7; Stop 31
attccaatttcagcctactataact

SEQ ID NO: 389420 - DNA, 25 bp, Artificial
  probe
  misc_feature (1)..(25): SEQ ID NO: 4725; WAN024A8P; Start 11; Stop 35
caatttcagcctactataactgtca

SEQ ID NO: 389421 - DNA, 25 bp, Artificial
  probe
  misc_feature (1)..(25): SEQ ID NO: 4725; WAN024A8P; Start 8; Stop 32
ttccaatttcagcctactataactg

SEQ ID NO: 389422 - DNA, 25 bp, Artificial
  probe
  misc_feature (1)..(25): SEQ ID NO: 4725; WAN024A8P; Start 12; Stop 36
aatttcagcctactataactgtcat

SEQ ID NO: 389423 - DNA, 25 bp, Artificial
  probe
  misc_feature (1)..(25): SEQ ID NO: 4725; WAN024A8P; Start 14; Stop 38
tttcagcctactataactgtcatag

SEQ ID NO: 389424 - DNA, 25 bp, Artificial
  probe
  misc_feature (1)..(25): SEQ ID NO: 4725; WAN024A8P; Start 3; Stop 27
tgctattccaatttcagcctactat

SEQ ID NO: 389425 - DNA, 25 bp, Artificial
  probe
  misc_feature (1)..(25): SEQ ID NO: 4725; WAN024A8P; Start 2; Stop 26
gtgctattccaatttcagcctacta

SEQ ID NO: 389426 - DNA, 25 bp, Artificial
  probe
  misc_feature (1)..(25): SEQ ID NO: 4725; WAN024A8P; Start 13; Stop 37
atttcagcctactataactgtcata

SEQ ID NO: 389427 - DNA, 25 bp, Artificial
  probe
  misc_feature (1)..(25): SEQ ID NO: 4725; WAN024A8P; Start 4; Stop 28
gctattccaatttcagcctactata

SEQ ID NO: 389428 - DNA, 25 bp, Artificial
  probe
  misc_feature (1)..(25): SEQ ID NO: 4725; WAN024A8P; Start 6; Stop 30
tattccaatttcagcctactataac

SEQ ID NO: 389429 - DNA, 25 bp, Artificial
  probe
  misc_feature (1)..(25): SEQ ID NO: 4725; WAN024A8P; Start 1; Stop 25
tgtgctattccaatttcagcctact

SEQ ID NO: 389430 - DNA, 25 bp, Artificial
  probe
  misc_feature (1)..(25): SEQ ID NO: 4725; WAN024A8P; Start 5; Stop 29
ctattccaatttcagcctactataa

SEQ ID NO: 389431 - DNA, 25 bp, Artificial
  probe
  misc_feature (1)..(25): SEQ ID NO: 4726; WAN024AE4; Start 14; Stop 38
agagattcattctgctagactaact

SEQ ID NO: 389432 - DNA, 25 bp, Artificial
  probe
  misc_feature (1)..(25): SEQ ID NO: 4726; WAN024AE4; Start 13; Stop 37
gagagattcattctgctagactaac

SEQ ID NO: 389433 - DNA, 25 bp, Artificial
  probe
  misc_feature (1)..(25): SEQ ID NO: 4726; WAN024AE4; Start 12; Stop 36
tgagagattcattctgctagactaa

SEQ ID NO: 389434 - DNA, 25 bp, Artificial
  probe
  misc_feature (1)..(25): SEQ ID NO: 4726; WAN024AE4; Start 17; Stop 41
gattcattctgctagactaacttct

SEQ ID NO: 389435 - DNA, 25 bp, Artificial
  probe
  misc_feature (1)..(25): SEQ ID NO: 4726; WAN024AE4; Start 16; Stop 40
agattcattctgctagactaacttc

SEQ ID NO: 389436 - DNA, 25 bp, Artificial
  probe
  misc_feature (1)..(25): SEQ ID NO: 4726; WAN024AE4; Start 15; Stop 39
gagattcattctgctagactaactt

SEQ ID NO: 389437 - DNA, 25 bp, Artificial
  probe
  misc_feature (1)..(25): SEQ ID NO: 4726; WAN024AE4; Start 18; Stop 42
attcattctgctagactaacttctt

SEQ ID NO: 389438 - DNA, 25 bp, Artificial
  probe
  misc_feature (1)..(25): SEQ ID NO: 4726; WAN024AE4; Start 19; Stop 43
ttcattctgctagactaacttctta

SEQ ID NO: 389439 - DNA, 25 bp, Artificial
  probe
  misc_feature (1)..(25): SEQ ID NO: 4726; WAN024AE4; Start 20; Stop 44
tcattctgctagactaacttcttat

SEQ ID NO: 389440 - DNA, 25 bp, Artificial
  probe
  misc_feature (1)..(25): SEQ ID NO: 4726; WAN024AE4; Start 11; Stop 35
atgagagattcattctgctagacta

SEQ ID NO: 389441 - DNA, 25 bp, Artificial
  probe
  misc_feature (1)..(25): SEQ ID NO: 4726; WAN024AE4; Start 21; Stop 45
cattctgctagactaacttcttatt

SEQ ID NO: 389442 - DNA, 25 bp, Artificial
  probe
  misc_feature (1)..(25): SEQ ID NO: 4726; WAN024AE4; Start 23; Stop 47
ttctgctagactaacttcttattag

SEQ ID NO: 389443 - DNA, 25 bp, Artificial
  probe
  misc_feature (1)..(25): SEQ ID NO: 4726; WAN024AE4; Start 22; Stop 46
attctgctagactaacttcttatta

SEQ ID NO: 389444 - DNA, 25 bp, Artificial
  probe
  misc_feature (1)..(25): SEQ ID NO: 4726; WAN024AE4; Start 10; Stop 34
aatgagagattcattctgctagact

SEQ ID NO: 389445 - DNA, 25 bp, Artificial
  probe
  misc_feature (1)..(25): SEQ ID NO: 4726; WAN024AE4; Start 3; Stop 27
tgggagaaatgagagattcattctg

SEQ ID NO: 389446 - DNA, 25 bp, Artificial
  probe
  misc_feature (1)..(25): SEQ ID NO: 4726; WAN024AE4; Start 2; Stop 26
gtgggagaaatgagagattcattct

SEQ ID NO: 389447 - DNA, 25 bp, Artificial
  probe
  misc_feature (1)..(25): SEQ ID NO: 4726; WAN024AE4; Start 5; Stop 29
ggagaaatgagagattcattctgct

SEQ ID NO: 389448 - DNA, 25 bp, Artificial
  probe
  misc_feature (1)..(25): SEQ ID NO: 4726; WAN024AE4; Start 1; Stop 25
tgtgggagaaatgagagattcattc

SEQ ID NO: 389449 - DNA, 25 bp, Artificial
  probe
  misc_feature (1)..(25): SEQ ID NO: 4726; WAN024AE4; Start 9; Stop 33
aaatgagagattcattctgctagac

SEQ ID NO: 389450 - DNA, 25 bp, Artificial
  probe
  misc_feature (1)..(25): SEQ ID NO: 4726; WAN024AE4; Start 8; Stop 32
gaaatgagagattcattctgctaga

SEQ ID NO: 389451 - DNA, 25 bp, Artificial
  probe
  misc_feature (1)..(25): SEQ ID NO: 4726; WAN024AE4; Start 6; Stop 30
gagaaatgagagattcattctgcta

SEQ ID NO: 389452 - DNA, 25 bp, Artificial
  probe
  misc_feature (1)..(25): SEQ ID NO: 4726; WAN024AE4; Start 4; Stop 28
gggagaaatgagagattcattctgc

SEQ ID NO: 389453 - DNA, 25 bp, Artificial
  probe
  misc_feature (1)..(25): SEQ ID NO: 4726; WAN024AE4; Start 7; Stop 31
agaaatgagagattcattctgctag

SEQ ID NO: 389454 - DNA, 25 bp, Artificial
  probe
  misc_feature (1)..(25): SEQ ID NO: 4727; WAN024A7T; Start 215; Stop 239
agcaagttatctgaaaggaaattga

SEQ ID NO: 389455 - DNA, 25 bp, Artificial
  probe
  misc_feature (1)..(25): SEQ ID NO: 4727; WAN024A7T; Start 219; Stop 243
agttatctgaaaggaaattgaagga

SEQ ID NO: 389456 - DNA, 25 bp, Artificial
  probe
  misc_feature (1)..(25): SEQ ID NO: 4727; WAN024A7T; Start 216; Stop 240
gcaagttatctgaaaggaaattgaa

SEQ ID NO: 389457 - DNA, 25 bp, Artificial
  probe
  misc_feature (1)..(25): SEQ ID NO: 4727; WAN024A7T; Start 214; Stop 238
cagcaagttatctgaaaggaaattg

SEQ ID NO: 389458 - DNA, 25 bp, Artificial
  probe
  misc_feature (1)..(25): SEQ ID NO: 4727; WAN024A7T; Start 220; Stop 244
gttatctgaaaggaaattgaaggaa

SEQ ID NO: 389459 - DNA, 25 bp, Artificial
  probe
  misc_feature (1)..(25): SEQ ID NO: 4727; WAN024A7T; Start 218; Stop 242
aagttatctgaaaggaaattgaagg

SEQ ID NO: 389460 - DNA, 25 bp, Artificial
  probe
  misc_feature (1)..(25): SEQ ID NO: 4727; WAN024A7T; Start 121; Stop 145
tagtgtttgtattgtgaaatagcaa

SEQ ID NO: 389461 - DNA, 25 bp, Artificial
  probe
  misc_feature (1)..(25): SEQ ID NO: 4727; WAN024A7T; Start 120; Stop 144
atagtgtttgtattgtgaaatagca

SEQ ID NO: 389462 - DNA, 25 bp, Artificial
  probe
  misc_feature (1)..(25): SEQ ID NO: 4727; WAN024A7T; Start 221; Stop 245
ttatctgaaaggaaattgaaggaaa

SEQ ID NO: 389463 - DNA, 25 bp, Artificial
  probe
  misc_feature (1)..(25): SEQ ID NO: 4727; WAN024A7T; Start 325; Stop 349
agaaagaacaaaaggagagtcaaac

SEQ ID NO: 389464 - DNA, 25 bp, Artificial
  probe
  misc_feature (1)..(25): SEQ ID NO: 4727; WAN024A7T; Start 324; Stop 348
aagaaagaacaaaaggagagtcaaa

SEQ ID NO: 389465 - DNA, 25 bp, Artificial
  probe
  misc_feature (1)..(25): SEQ ID NO: 4727; WAN024A7T; Start 323; Stop 347
aaagaaagaacaaaaggagagtcaa

SEQ ID NO: 389466 - DNA, 25 bp, Artificial
  probe
  misc_feature (1)..(25): SEQ ID NO: 4727; WAN024A7T; Start 322; Stop 346
aaaagaaagaacaaaaggagagtca

SEQ ID NO: 389467 - DNA, 25 bp, Artificial
  probe
  misc_feature (1)..(25): SEQ ID NO: 4727; WAN024A7T; Start 217; Stop 241
caagttatctgaaaggaaattgaag

SEQ ID NO: 389468 - DNA, 25 bp, Artificial
  probe
  misc_feature (1)..(25): SEQ ID NO: 4727; WAN024A7T; Start 326; Stop 350
gaaagaacaaaaggagagtcaaact

SEQ ID NO: 389469 - DNA, 25 bp, Artificial
  probe
  misc_feature (1)..(25): SEQ ID NO: 4727; WAN024A7T; Start 124; Stop 148
tgtttgtattgtgaaatagcaatga

SEQ ID NO: 389470 - DNA, 25 bp, Artificial
  probe
  misc_feature (1)..(25): SEQ ID NO: 4727; WAN024A7T; Start 123; Stop 147
gtgtttgtattgtgaaatagcaatg

SEQ ID NO: 389471 - DNA, 25 bp, Artificial
  probe
  misc_feature (1)..(25): SEQ ID NO: 4727; WAN024A7T; Start 122; Stop 146
agtgtttgtattgtgaaatagcaat

SEQ ID NO: 389472 - DNA, 25 bp, Artificial
  probe
  misc_feature (1)..(25): SEQ ID NO: 4727; WAN024A7T; Start 132; Stop 156
ttgtgaaatagcaatgattatccta

SEQ ID NO: 389473 - DNA, 25 bp, Artificial
  probe
  misc_feature (1)..(25): SEQ ID NO: 4727; WAN024A7T; Start 224; Stop 248
tctgaaaggaaattgaaggaaaatc

SEQ ID NO: 389474 - DNA, 25 bp, Artificial
  probe
  misc_feature (1)..(25): SEQ ID NO: 4727; WAN024A7T; Start 197; Stop 221
ctaggatagaagattttcagcaagt

SEQ ID NO: 389475 - DNA, 25 bp, Artificial
  probe
  misc_feature (1)..(25): SEQ ID NO: 4727; WAN024A7T; Start 199; Stop 223
aggatagaagattttcagcaagtta

SEQ ID NO: 389476 - DNA, 25 bp, Artificial
  probe
  misc_feature (1)..(25): SEQ ID NO: 4727; WAN024A7T; Start 198; Stop 222
taggatagaagattttcagcaagtt

SEQ ID NO: 389477 - DNA, 25 bp, Artificial
  probe
  misc_feature (1)..(25): SEQ ID NO: 4727; WAN024A7T; Start 240; Stop 264
aggaaaatccagaaaatgcttgaaa

SEQ ID NO: 389478 - DNA, 25 bp, Artificial
  probe
  misc_feature (1)..(25): SEQ ID NO: 4727; WAN024A7T; Start 239; Stop 263
aaggaaaatccagaaaatgcttgaa

SEQ ID NO: 389479 - DNA, 25 bp, Artificial
  probe
  misc_feature (1)..(25): SEQ ID NO: 4727; WAN024A7T; Start 238; Stop 262
gaaggaaaatccagaaaatgcttga

SEQ ID NO: 389480 - DNA, 25 bp, Artificial
  probe
  misc_feature (1)..(25): SEQ ID NO: 4727; WAN024A7T; Start 236; Stop 260
ttgaaggaaaatccagaaaatgctt

SEQ ID NO: 389481 - DNA, 25 bp, Artificial
  probe
  misc_feature (1)..(25): SEQ ID NO: 4727; WAN024A7T; Start 235; Stop 259
attgaaggaaaatccagaaaatgct

SEQ ID NO: 389482 - DNA, 25 bp, Artificial
  probe
  misc_feature (1)..(25): SEQ ID NO: 4727; WAN024A7T; Start 237; Stop 261
tgaaggaaaatccagaaaatgcttg

SEQ ID NO: 389483 - DNA, 25 bp, Artificial
  probe
  misc_feature (1)..(25): SEQ ID NO: 4727; WAN024A7T; Start 226; Stop 250
tgaaaggaaattgaaggaaaatcca

SEQ ID NO: 389484 - DNA, 25 bp, Artificial
  probe
  misc_feature (1)..(25): SEQ ID NO: 4727; WAN024A7T; Start 77; Stop 101
tatagtggtgttcttttgttgtttt

SEQ ID NO: 389485 - DNA, 25 bp, Artificial
  probe
  misc_feature (1)..(25): SEQ ID NO: 4727; WAN024A7T; Start 241; Stop 265
ggaaaatccagaaaatgcttgaaaa

SEQ ID NO: 389486 - DNA, 25 bp, Artificial
  probe
  misc_feature (1)..(25): SEQ ID NO: 4727; WAN024A7T; Start 234; Stop 258
aattgaaggaaaatccagaaaatgc

SEQ ID NO: 389487 - DNA, 25 bp, Artificial
  probe
  misc_feature (1)..(25): SEQ ID NO: 4728; WAN0249R3; Start 164; Stop 188
aaaataaaggtgtagacattaccgt

SEQ ID NO: 389488 - DNA, 25 bp, Artificial
  probe
  misc_feature (1)..(25): SEQ ID NO: 4729; WAN0249SX; Start 22; Stop 46
tttactatatttgaagaggcgttta

SEQ ID NO: 389489 - DNA, 25 bp, Artificial
  probe
  misc_feature (1)..(25): SEQ ID NO: 4729; WAN0249SX; Start 61; Stop 85
aaactcgttctagaggaaagacatc

SEQ ID NO: 389490 - DNA, 25 bp, Artificial
  probe
  misc_feature (1)..(25): SEQ ID NO: 4729; WAN0249SX; Start 23; Stop 47
ttactatatttgaagaggcgtttaa

SEQ ID NO: 389491 - DNA, 25 bp, Artificial
  probe
  misc_feature (1)..(25): SEQ ID NO: 4729; WAN0249SX; Start 47; Stop 71
aactatctgacataaaactcgttct

SEQ ID NO: 389492 - DNA, 25 bp, Artificial
  probe
  misc_feature (1)..(25): SEQ ID NO: 4729; WAN0249SX; Start 19; Stop 43
cattttactatatttgaagaggcgt

SEQ ID NO: 389493 - DNA, 25 bp, Artificial
  probe
  misc_feature (1)..(25): SEQ ID NO: 4729; WAN0249SX; Start 48; Stop 72
actatctgacataaaactcgttcta

SEQ ID NO: 389494 - DNA, 25 bp, Artificial
  probe
  misc_feature (1)..(25): SEQ ID NO: 4729; WAN0249SX; Start 46; Stop 70
aaactatctgacataaaactcgttc

SEQ ID NO: 389495 - DNA, 25 bp, Artificial
  probe
  misc_feature (1)..(25): SEQ ID NO: 4729; WAN0249SX; Start 24; Stop 48
tactatatttgaagaggcgtttaaa

SEQ ID NO: 389496 - DNA, 25 bp, Artificial
  probe
  misc_feature (1)..(25): SEQ ID NO: 4729; WAN0249SX; Start 62; Stop 86
aactcgttctagaggaaagacatcc

SEQ ID NO: 389497 - DNA, 25 bp, Artificial
  probe
  misc_feature (1)..(25): SEQ ID NO: 4729; WAN0249SX; Start 21; Stop 45
ttttactatatttgaagaggcgttt

SEQ ID NO: 389498 - DNA, 25 bp, Artificial
  probe
  misc_feature (1)..(25): SEQ ID NO: 4729; WAN0249SX; Start 18; Stop 42
tcattttactatatttgaagaggcg

SEQ ID NO: 389499 - DNA, 25 bp, Artificial
  probe
  misc_feature (1)..(25): SEQ ID NO: 4729; WAN0249SX; Start 20; Stop 44
attttactatatttgaagaggcgtt

SEQ ID NO: 389500 - DNA, 25 bp, Artificial
  probe
  misc_feature (1)..(25): SEQ ID NO: 4729; WAN0249SX; Start 49; Stop 73
ctatctgacataaaactcgttctag

SEQ ID NO: 389501 - DNA, 25 bp, Artificial
  probe
  misc_feature (1)..(25): SEQ ID NO: 4729; WAN0249SX; Start 60; Stop 84
aaaactcgttctagaggaaagacat

SEQ ID NO: 389502 - DNA, 25 bp, Artificial
  probe
  misc_feature (1)..(25): SEQ ID NO: 4729; WAN0249SX; Start 53; Stop 77
ctgacataaaactcgttctagagga

SEQ ID NO: 389503 - DNA, 25 bp, Artificial
  probe
  misc_feature (1)..(25): SEQ ID NO: 4729; WAN0249SX; Start 52; Stop 76
tctgacataaaactcgttctagagg

SEQ ID NO: 389504 - DNA, 25 bp, Artificial
  probe
  misc_feature (1)..(25): SEQ ID NO: 4729; WAN0249SX; Start 44; Stop 68
ttaaactatctgacataaaactcgt

SEQ ID NO: 389505 - DNA, 25 bp, Artificial
  probe
  misc_feature (1)..(25): SEQ ID NO: 4729; WAN0249SX; Start 54; Stop 78
tgacataaaactcgttctagaggaa

SEQ ID NO: 389506 - DNA, 25 bp, Artificial
  probe
  misc_feature (1)..(25): SEQ ID NO: 4729; WAN0249SX; Start 59; Stop 83
taaaactcgttctagaggaaagaca

SEQ ID NO: 389507 - DNA, 25 bp, Artificial
  probe
  misc_feature (1)..(25): SEQ ID NO: 4729; WAN0249SX; Start 45; Stop 69
taaactatctgacataaaactcgtt

SEQ ID NO: 389508 - DNA, 25 bp, Artificial
  probe
  misc_feature (1)..(25): SEQ ID NO: 4729; WAN0249SX; Start 56; Stop 80
acataaaactcgttctagaggaaag

SEQ ID NO: 389509 - DNA, 25 bp, Artificial
  probe
  misc_feature (1)..(25): SEQ ID NO: 4729; WAN0249SX; Start 55; Stop 79
gacataaaactcgttctagaggaaa

SEQ ID NO: 389510 - DNA, 25 bp, Artificial
  probe
  misc_feature (1)..(25): SEQ ID NO: 4729; WAN0249SX; Start 58; Stop 82
ataaaactcgttctagaggaaagac

SEQ ID NO: 389511 - DNA, 25 bp, Artificial
  probe
  misc_feature (1)..(25): SEQ ID NO: 4729; WAN0249SX; Start 57; Stop 81
cataaaactcgttctagaggaaaga

SEQ ID NO: 389512 - DNA, 25 bp, Artificial
  probe
  misc_feature (1)..(25): SEQ ID NO: 4729; WAN0249SX; Start 51; Stop 75
atctgacataaaactcgttctagag

SEQ ID NO: 389513 - DNA, 25 bp, Artificial
  probe
  misc_feature (1)..(25): SEQ ID NO: 4729; WAN0249SX; Start 66; Stop 90
cgttctagaggaaagacatccttta

SEQ ID NO: 389514 - DNA, 25 bp, Artificial
  probe
  misc_feature (1)..(25): SEQ ID NO: 4729; WAN0249SX; Start 65; Stop 89
tcgttctagaggaaagacatccttt

SEQ ID NO: 389515 - DNA, 25 bp, Artificial
  probe
  misc_feature (1)..(25): SEQ ID NO: 4729; WAN0249SX; Start 64; Stop 88
ctcgttctagaggaaagacatcctt

SEQ ID NO: 389516 - DNA, 25 bp, Artificial
  probe
  misc_feature (1)..(25): SEQ ID NO: 4729; WAN0249SX; Start 50; Stop 74
tatctgacataaaactcgttctaga

SEQ ID NO: 389517 - DNA, 25 bp, Artificial
  probe
  misc_feature (1)..(25): SEQ ID NO: 4729; WAN0249SX; Start 67; Stop 91
gttctagaggaaagacatcctttaa

SEQ ID NO: 389518 - DNA, 25 bp, Artificial
  probe
  misc_feature (1)..(25): SEQ ID NO: 4729; WAN0249SX; Start 63; Stop 87
actcgttctagaggaaagacatcct

SEQ ID NO: 389519 - DNA, 25 bp, Artificial
  probe
  misc_feature (1)..(25): SEQ ID NO: 4729; WAN0249SX; Start 68; Stop 92
ttctagaggaaagacatcctttaaa

SEQ ID NO: 389520 - DNA, 25 bp, Artificial
  probe
  misc_feature (1)..(25): SEQ ID NO: 4729; WAN0249SX; Start 43; Stop 67
tttaaactatctgacataaaactcg

SEQ ID NO: 389521 - DNA, 25 bp, Artificial
  probe
  misc_feature (1)..(25): SEQ ID NO: 4731; WAN0249SY; Start 65; Stop 89
aggtctaaacctcttaactcaatta

SEQ ID NO: 389522 - DNA, 25 bp, Artificial
  probe
  misc_feature (1)..(25): SEQ ID NO: 4732; WAN0249OT; Start 56; Stop 80
agccagattatcctttacagtcttt

SEQ ID NO: 389523 - DNA, 25 bp, Artificial
  probe
  misc_feature (1)..(25): SEQ ID NO: 4732; WAN0249OT; Start 55; Stop 79
aagccagattatcctttacagtctt

SEQ ID NO: 389524 - DNA, 25 bp, Artificial
  probe
  misc_feature (1)..(25): SEQ ID NO: 4732; WAN0249OT; Start 57; Stop 81
gccagattatcctttacagtctttc

SEQ ID NO: 389525 - DNA, 25 bp, Artificial
  probe
  misc_feature (1)..(25): SEQ ID NO: 4732; WAN0249OT; Start 58; Stop 82
ccagattatcctttacagtctttct

SEQ ID NO: 389526 - DNA, 25 bp, Artificial
  probe
  misc_feature (1)..(25): SEQ ID NO: 4732; WAN0249OT; Start 66; Stop 90
tcctttacagtctttctatctagtg

SEQ ID NO: 389527 - DNA, 25 bp, Artificial
  probe
  misc_feature (1)..(25): SEQ ID NO: 4732; WAN0249OT; Start 54; Stop 78
aaagccagattatcctttacagtct

SEQ ID NO: 389528 - DNA, 25 bp, Artificial
  probe
  misc_feature (1)..(25): SEQ ID NO: 4732; WAN0249OT; Start 67; Stop 91
cctttacagtctttctatctagtgt

SEQ ID NO: 389529 - DNA, 25 bp, Artificial
  probe
  misc_feature (1)..(25): SEQ ID NO: 4732; WAN0249OT; Start 1; Stop 25
tgtgtctccttttagtcaatctgtg

SEQ ID NO: 389530 - DNA, 25 bp, Artificial
  probe
  misc_feature (1)..(25): SEQ ID NO: 4732; WAN0249OT; Start 72; Stop 96
acagtctttctatctagtgtaacaa

SEQ ID NO: 389531 - DNA, 25 bp, Artificial
  probe
  misc_feature (1)..(25): SEQ ID NO: 4732; WAN0249OT; Start 3; Stop 27
tgtctccttttagtcaatctgtgaa

SEQ ID NO: 389532 - DNA, 25 bp, Artificial
  probe
  misc_feature (1)..(25): SEQ ID NO: 4732; WAN0249OT; Start 2; Stop 26
gtgtctccttttagtcaatctgtga

SEQ ID NO: 389533 - DNA, 25 bp, Artificial
  probe
  misc_feature (1)..(25): SEQ ID NO: 4732; WAN0249OT; Start 4; Stop 28
gtctccttttagtcaatctgtgaaa

SEQ ID NO: 389534 - DNA, 25 bp, Artificial
  probe
  misc_feature (1)..(25): SEQ ID NO: 4732; WAN0249OT; Start 65; Stop 89
atcctttacagtctttctatctagt

SEQ ID NO: 389535 - DNA, 25 bp, Artificial
  probe
  misc_feature (1)..(25): SEQ ID NO: 4732; WAN0249OT; Start 73; Stop 97
cagtctttctatctagtgtaacaaa

SEQ ID NO: 389536 - DNA, 25 bp, Artificial
  probe
  misc_feature (1)..(25): SEQ ID NO: 4732; WAN0249OT; Start 5; Stop 29
tctccttttagtcaatctgtgaaat

SEQ ID NO: 389537 - DNA, 25 bp, Artificial
  probe
  misc_feature (1)..(25): SEQ ID NO: 4732; WAN0249OT; Start 59; Stop 83
cagattatcctttacagtctttcta

SEQ ID NO: 389538 - DNA, 25 bp, Artificial
  probe
  misc_feature (1)..(25): SEQ ID NO: 4732; WAN0249OT; Start 53; Stop 77
aaaagccagattatcctttacagtc

SEQ ID NO: 389539 - DNA, 25 bp, Artificial
  probe
  misc_feature (1)..(25): SEQ ID NO: 4732; WAN0249OT; Start 71; Stop 95
tacagtctttctatctagtgtaaca

SEQ ID NO: 389540 - DNA, 25 bp, Artificial
  probe
  misc_feature (1)..(25): SEQ ID NO: 4732; WAN0249OT; Start 6; Stop 30
ctccttttagtcaatctgtgaaata

SEQ ID NO: 389541 - DNA, 25 bp, Artificial
  probe
  misc_feature (1)..(25): SEQ ID NO: 4732; WAN0249OT; Start 8; Stop 32
ccttttagtcaatctgtgaaataac

SEQ ID NO: 389542 - DNA, 25 bp, Artificial
  probe
  misc_feature (1)..(25): SEQ ID NO: 4732; WAN0249OT; Start 7; Stop 31
tccttttagtcaatctgtgaaataa

SEQ ID NO: 389543 - DNA, 25 bp, Artificial
  probe
  misc_feature (1)..(25): SEQ ID NO: 4732; WAN0249OT; Start 12; Stop 36
ttagtcaatctgtgaaataacattt

SEQ ID NO: 389544 - DNA, 25 bp, Artificial
  probe
  misc_feature (1)..(25): SEQ ID NO: 4732; WAN0249OT; Start 11; Stop 35
tttagtcaatctgtgaaataacatt

SEQ ID NO: 389545 - DNA, 25 bp, Artificial
  probe
  misc_feature (1)..(25): SEQ ID NO: 4732; WAN0249OT; Start 30; Stop 54
aacatttctctagaataatggcaaa

SEQ ID NO: 389546 - DNA, 25 bp, Artificial
  probe
  misc_feature (1)..(25): SEQ ID NO: 4732; WAN0249OT; Start 68; Stop 92
ctttacagtctttctatctagtgta

SEQ ID NO: 389547 - DNA, 25 bp, Artificial
  probe
  misc_feature (1)..(25): SEQ ID NO: 4732; WAN0249OT; Start 74; Stop 98
agtctttctatctagtgtaacaaaa

SEQ ID NO: 389548 - DNA, 25 bp, Artificial
  probe
  misc_feature (1)..(25): SEQ ID NO: 4732; WAN0249OT; Start 9; Stop 33
cttttagtcaatctgtgaaataaca

SEQ ID NO: 389549 - DNA, 25 bp, Artificial
  probe
  misc_feature (1)..(25): SEQ ID NO: 4732; WAN0249OT; Start 29; Stop 53
taacatttctctagaataatggcaa

SEQ ID NO: 389550 - DNA, 25 bp, Artificial
  probe
  misc_feature (1)..(25): SEQ ID NO: 4732; WAN0249OT; Start 14; Stop 38
agtcaatctgtgaaataacatttct

SEQ ID NO: 389551 - DNA, 25 bp, Artificial
  probe
  misc_feature (1)..(25): SEQ ID NO: 4732; WAN0249OT; Start 15; Stop 39
gtcaatctgtgaaataacatttctc

SEQ ID NO: 389552 - DNA, 25 bp, Artificial
  probe
  misc_feature (1)..(25): SEQ ID NO: 4732; WAN0249OT; Start 28; Stop 52
ataacatttctctagaataatggca

SEQ ID NO: 389553 - DNA, 25 bp, Artificial
  probe
  misc_feature (1)..(25): SEQ ID NO: 4732; WAN0249OT; Start 16; Stop 40
tcaatctgtgaaataacatttctct

SEQ ID NO: 389554 - DNA, 25 bp, Artificial
  probe
  misc_feature (1)..(25): SEQ ID NO: 4732; WAN0249OT; Start 10; Stop 34
ttttagtcaatctgtgaaataacat

SEQ ID NO: 389555 - DNA, 25 bp, Artificial
  probe
  misc_feature (1)..(25): SEQ ID NO: 4733; WAN024ALF; Start 36; Stop 60
gctaatgtgactttgtgactttact

SEQ ID NO: 389556 - DNA, 25 bp, Artificial
  probe
  misc_feature (1)..(25): SEQ ID NO: 4733; WAN024ALF; Start 41; Stop 65
tgtgactttgtgactttacttgatt

SEQ ID NO: 389557 - DNA, 25 bp, Artificial
  probe
  misc_feature (1)..(25): SEQ ID NO: 4733; WAN024ALF; Start 39; Stop 63
aatgtgactttgtgactttacttga

SEQ ID NO: 389558 - DNA, 25 bp, Artificial
  probe
  misc_feature (1)..(25): SEQ ID NO: 4733; WAN024ALF; Start 42; Stop 66
gtgactttgtgactttacttgattg

SEQ ID NO: 389559 - DNA, 25 bp, Artificial
  probe
  misc_feature (1)..(25): SEQ ID NO: 4733; WAN024ALF; Start 40; Stop 64
atgtgactttgtgactttacttgat

SEQ ID NO: 389560 - DNA, 25 bp, Artificial
  probe
  misc_feature (1)..(25): SEQ ID NO: 4733; WAN024ALF; Start 43; Stop 67
tgactttgtgactttacttgattga

SEQ ID NO: 389561 - DNA, 25 bp, Artificial
  probe
  misc_feature (1)..(25): SEQ ID NO: 4733; WAN024ALF; Start 44; Stop 68
gactttgtgactttacttgattgat

SEQ ID NO: 389562 - DNA, 25 bp, Artificial
  probe
  misc_feature (1)..(25): SEQ ID NO: 4733; WAN024ALF; Start 38; Stop 62
taatgtgactttgtgactttacttg

SEQ ID NO: 389563 - DNA, 25 bp, Artificial
  probe
  misc_feature (1)..(25): SEQ ID NO: 4733; WAN024ALF; Start 35; Stop 59
agctaatgtgactttgtgactttac

SEQ ID NO: 389564 - DNA, 25 bp, Artificial
  probe
  misc_feature (1)..(25): SEQ ID NO: 4733; WAN024ALF; Start 37; Stop 61
ctaatgtgactttgtgactttactt

SEQ ID NO: 389565 - DNA, 25 bp, Artificial
  probe
  misc_feature (1)..(25): SEQ ID NO: 4733; WAN024ALF; Start 34; Stop 58
gagctaatgtgactttgtgacttta

SEQ ID NO: 389566 - DNA, 25 bp, Artificial
  probe
  misc_feature (1)..(25): SEQ ID NO: 4733; WAN024ALF; Start 33; Stop 57
ggagctaatgtgactttgtgacttt

SEQ ID NO: 389567 - DNA, 25 bp, Artificial
  probe
  misc_feature (1)..(25): SEQ ID NO: 4733; WAN024ALF; Start 45; Stop 69
actttgtgactttacttgattgata

SEQ ID NO: 389568 - DNA, 25 bp, Artificial
  probe
  misc_feature (1)..(25): SEQ ID NO: 4733; WAN024ALF; Start 130; Stop 154
gattgaaatgattaaaaggcacaga

SEQ ID NO: 389569 - DNA, 25 bp, Artificial
  probe
  misc_feature (1)..(25): SEQ ID NO: 4733; WAN024ALF; Start 131; Stop 155
attgaaatgattaaaaggcacagag

SEQ ID NO: 389570 - DNA, 25 bp, Artificial
  probe
  misc_feature (1)..(25): SEQ ID NO: 4733; WAN024ALF; Start 129; Stop 153
agattgaaatgattaaaaggcacag

SEQ ID NO: 389571 - DNA, 25 bp, Artificial
  probe
  misc_feature (1)..(25): SEQ ID NO: 4733; WAN024ALF; Start 49; Stop 73
tgtgactttacttgattgatattct

SEQ ID NO: 389572 - DNA, 25 bp, Artificial
  probe
  misc_feature (1)..(25): SEQ ID NO: 4733; WAN024ALF; Start 128; Stop 152
aagattgaaatgattaaaaggcaca

SEQ ID NO: 389573 - DNA, 25 bp, Artificial
  probe
  misc_feature (1)..(25): SEQ ID NO: 4733; WAN024ALF; Start 32; Stop 56
cggagctaatgtgactttgtgactt

SEQ ID NO: 389574 - DNA, 25 bp, Artificial
  probe
  misc_feature (1)..(25): SEQ ID NO: 4733; WAN024ALF; Start 48; Stop 72
ttgtgactttacttgattgatattc

SEQ ID NO: 389575 - DNA, 25 bp, Artificial
  probe
  misc_feature (1)..(25): SEQ ID NO: 4733; WAN024ALF; Start 30; Stop 54
ctcggagctaatgtgactttgtgac

SEQ ID NO: 389576 - DNA, 25 bp, Artificial
  probe
  misc_feature (1)..(25): SEQ ID NO: 4733; WAN024ALF; Start 46; Stop 70
ctttgtgactttacttgattgatat

SEQ ID NO: 389577 - DNA, 25 bp, Artificial
  probe
  misc_feature (1)..(25): SEQ ID NO: 4733; WAN024ALF; Start 31; Stop 55
tcggagctaatgtgactttgtgact

SEQ ID NO: 389578 - DNA, 25 bp, Artificial
  probe
  misc_feature (1)..(25): SEQ ID NO: 4733; WAN024ALF; Start 50; Stop 74
gtgactttacttgattgatattctt

SEQ ID NO: 389579 - DNA, 25 bp, Artificial
  probe
  misc_feature (1)..(25): SEQ ID NO: 4733; WAN024ALF; Start 90; Stop 114
atagattaagtacaacccaagtaaa

SEQ ID NO: 389580 - DNA, 25 bp, Artificial
  probe
  misc_feature (1)..(25): SEQ ID NO: 4733; WAN024ALF; Start 47; Stop 71
tttgtgactttacttgattgatatt

SEQ ID NO: 389581 - DNA, 25 bp, Artificial
  probe
  misc_feature (1)..(25): SEQ ID NO: 4733; WAN024ALF; Start 127; Stop 151
taagattgaaatgattaaaaggcac

SEQ ID NO: 389582 - DNA, 25 bp, Artificial
  probe
  misc_feature (1)..(25): SEQ ID NO: 4733; WAN024ALF; Start 116; Stop 140
aaagtccaatttaagattgaaatga

SEQ ID NO: 389583 - DNA, 25 bp, Artificial
  probe
  misc_feature (1)..(25): SEQ ID NO: 4733; WAN024ALF; Start 118; Stop 142
agtccaatttaagattgaaatgatt

SEQ ID NO: 389584 - DNA, 25 bp, Artificial
  probe
  misc_feature (1)..(25): SEQ ID NO: 4733; WAN024ALF; Start 117; Stop 141
aagtccaatttaagattgaaatgat

SEQ ID NO: 389585 - DNA, 25 bp, Artificial
  probe
  misc_feature (1)..(25): SEQ ID NO: 4733; WAN024ALF; Start 126; Stop 150
ttaagattgaaatgattaaaaggca

SEQ ID NO: 389586 - DNA, 25 bp, Artificial
  probe
  misc_feature (1)..(25): SEQ ID NO: 4733; WAN024ALF; Start 91; Stop 115
tagattaagtacaacccaagtaaaa

SEQ ID NO: 389587 - DNA, 25 bp, Artificial
  probe
  misc_feature (1)..(25): SEQ ID NO: 4733; WAN024ALF; Start 26; Stop 50
gttgctcggagctaatgtgactttg

SEQ ID NO: 389588 - DNA, 25 bp, Artificial
  probe
  misc_feature (1)..(25): SEQ ID NO: 4734; WAN024AP2; Start 45; Stop 69
ccacataccgtactatgttatcaca

SEQ ID NO: 389589 - DNA, 25 bp, Artificial
  probe
  misc_feature (1)..(25): SEQ ID NO: 4734; WAN024AP2; Start 44; Stop 68
accacataccgtactatgttatcac

SEQ ID NO: 389590 - DNA, 25 bp, Artificial
  probe
  misc_feature (1)..(25): SEQ ID NO: 4734; WAN024AP2; Start 43; Stop 67
caccacataccgtactatgttatca

SEQ ID NO: 389591 - DNA, 25 bp, Artificial
  probe
  misc_feature (1)..(25): SEQ ID NO: 4734; WAN024AP2; Start 40; Stop 64
tagcaccacataccgtactatgtta

SEQ ID NO: 389592 - DNA, 25 bp, Artificial
  probe
  misc_feature (1)..(25): SEQ ID NO: 4734; WAN024AP2; Start 42; Stop 66
gcaccacataccgtactatgttatc

SEQ ID NO: 389593 - DNA, 25 bp, Artificial
  probe
  misc_feature (1)..(25): SEQ ID NO: 4734; WAN024AP2; Start 41; Stop 65
agcaccacataccgtactatgttat

SEQ ID NO: 389594 - DNA, 25 bp, Artificial
  probe
  misc_feature (1)..(25): SEQ ID NO: 4734; WAN024AP2; Start 39; Stop 63
ctagcaccacataccgtactatgtt

SEQ ID NO: 389595 - DNA, 25 bp, Artificial
  probe
  misc_feature (1)..(25): SEQ ID NO: 4734; WAN024AP2; Start 18; Stop 42
agatctaatatagcggatgtgctag

SEQ ID NO: 389596 - DNA, 25 bp, Artificial
  probe
  misc_feature (1)..(25): SEQ ID NO: 4734; WAN024AP2; Start 80; Stop 104
ttttgcaagggaattggaagatttt

SEQ ID NO: 389597 - DNA, 25 bp, Artificial
  probe
  misc_feature (1)..(25): SEQ ID NO: 4734; WAN024AP2; Start 17; Stop 41
tagatctaatatagcggatgtgcta

SEQ ID NO: 389598 - DNA, 25 bp, Artificial
  probe
  misc_feature (1)..(25): SEQ ID NO: 4735; WAN024AMM; Start 167; Stop 191
atagaatgataataagtcgcctgcc

SEQ ID NO: 389599 - DNA, 25 bp, Artificial
  probe
  misc_feature (1)..(25): SEQ ID NO: 4735; WAN024AMM; Start 166; Stop 190
tatagaatgataataagtcgcctgc

SEQ ID NO: 389600 - DNA, 25 bp, Artificial
  probe
  misc_feature (1)..(25): SEQ ID NO: 4735; WAN024AMM; Start 168; Stop 192
tagaatgataataagtcgcctgccg

SEQ ID NO: 389601 - DNA, 25 bp, Artificial
  probe
  misc_feature (1)..(25): SEQ ID NO: 4735; WAN024AMM; Start 151; Stop 175
ccgactgaaagtgcttatagaatga

SEQ ID NO: 389602 - DNA, 25 bp, Artificial
  probe
  misc_feature (1)..(25): SEQ ID NO: 4735; WAN024AMM; Start 152; Stop 176
cgactgaaagtgcttatagaatgat

SEQ ID NO: 389603 - DNA, 25 bp, Artificial
  probe
  misc_feature (1)..(25): SEQ ID NO: 4735; WAN024AMM; Start 150; Stop 174
cccgactgaaagtgcttatagaatg

SEQ ID NO: 389604 - DNA, 25 bp, Artificial
  probe
  misc_feature (1)..(25): SEQ ID NO: 4735; WAN024AMM; Start 165; Stop 189
ttatagaatgataataagtcgcctg

SEQ ID NO: 389605 - DNA, 25 bp, Artificial
  probe
  misc_feature (1)..(25): SEQ ID NO: 4735; WAN024AMM; Start 149; Stop 173
gcccgactgaaagtgcttatagaat

SEQ ID NO: 389606 - DNA, 25 bp, Artificial
  probe
  misc_feature (1)..(25): SEQ ID NO: 4735; WAN024AMM; Start 71; Stop 95
tttgaacggctgatgtagatatttt

SEQ ID NO: 389607 - DNA, 25 bp, Artificial
  probe
  misc_feature (1)..(25): SEQ ID NO: 4735; WAN024AMM; Start 70; Stop 94
ttttgaacggctgatgtagatattt

SEQ ID NO: 389608 - DNA, 25 bp, Artificial
  probe
  misc_feature (1)..(25): SEQ ID NO: 4735; WAN024AMM; Start 170; Stop 194
gaatgataataagtcgcctgccgaa

SEQ ID NO: 389609 - DNA, 25 bp, Artificial
  probe
  misc_feature (1)..(25): SEQ ID NO: 4735; WAN024AMM; Start 163; Stop 187
gcttatagaatgataataagtcgcc

SEQ ID NO: 389610 - DNA, 25 bp, Artificial
  probe
  misc_feature (1)..(25): SEQ ID NO: 4735; WAN024AMM; Start 72; Stop 96
ttgaacggctgatgtagatatttta

SEQ ID NO: 389611 - DNA, 25 bp, Artificial
  probe
  misc_feature (1)..(25): SEQ ID NO: 4735; WAN024AMM; Start 73; Stop 97
tgaacggctgatgtagatattttat

SEQ ID NO: 389612 - DNA, 25 bp, Artificial
  probe
  misc_feature (1)..(25): SEQ ID NO: 4735; WAN024AMM; Start 153; Stop 177
gactgaaagtgcttatagaatgata

SEQ ID NO: 389613 - DNA, 25 bp, Artificial
  probe
  misc_feature (1)..(25): SEQ ID NO: 4735; WAN024AMM; Start 162; Stop 186
tgcttatagaatgataataagtcgc

SEQ ID NO: 389614 - DNA, 25 bp, Artificial
  probe
  misc_feature (1)..(25): SEQ ID NO: 4735; WAN024AMM; Start 169; Stop 193
agaatgataataagtcgcctgccga

SEQ ID NO: 389615 - DNA, 25 bp, Artificial
  probe
  misc_feature (1)..(25): SEQ ID NO: 4735; WAN024AMM; Start 76; Stop 100
acggctgatgtagatattttatact

SEQ ID NO: 389616 - DNA, 25 bp, Artificial
  probe
  misc_feature (1)..(25): SEQ ID NO: 4735; WAN024AMM; Start 154; Stop 178
actgaaagtgcttatagaatgataa

SEQ ID NO: 389617 - DNA, 25 bp, Artificial
  probe
  misc_feature (1)..(25): SEQ ID NO: 4735; WAN024AMM; Start 171; Stop 195
aatgataataagtcgcctgccgaaa

SEQ ID NO: 389618 - DNA, 25 bp, Artificial
  probe
  misc_feature (1)..(25): SEQ ID NO: 4735; WAN024AMM; Start 75; Stop 99
aacggctgatgtagatattttatac

SEQ ID NO: 389619 - DNA, 25 bp, Artificial
  probe
  misc_feature (1)..(25): SEQ ID NO: 4735; WAN024AMM; Start 74; Stop 98
gaacggctgatgtagatattttata

SEQ ID NO: 389620 - DNA, 25 bp, Artificial
  probe
  misc_feature (1)..(25): SEQ ID NO: 4735; WAN024AMM; Start 164; Stop 188
cttatagaatgataataagtcgcct

SEQ ID NO: 389621 - DNA, 25 bp, Artificial
  probe
  misc_feature (1)..(25): SEQ ID NO: 4735; WAN024AMM; Start 77; Stop 101
cggctgatgtagatattttatactt

SEQ ID NO: 389622 - DNA, 25 bp, Artificial
  probe
  misc_feature (1)..(25): SEQ ID NO: 4735; WAN024AMM; Start 148; Stop 172
agcccgactgaaagtgcttatagaa

SEQ ID NO: 389623 - DNA, 25 bp, Artificial
  probe
  misc_feature (1)..(25): SEQ ID NO: 4735; WAN024AMM; Start 258; Stop 282
cttattttcaacaatttagcagagt

SEQ ID NO: 389624 - DNA, 25 bp, Artificial
  probe
  misc_feature (1)..(25): SEQ ID NO: 4735; WAN024AMM; Start 257; Stop 281
acttattttcaacaatttagcagag

SEQ ID NO: 389625 - DNA, 25 bp, Artificial
  probe
  misc_feature (1)..(25): SEQ ID NO: 4735; WAN024AMM; Start 155; Stop 179
ctgaaagtgcttatagaatgataat

SEQ ID NO: 389626 - DNA, 25 bp, Artificial
  probe
  misc_feature (1)..(25): SEQ ID NO: 4735; WAN024AMM; Start 161; Stop 185
gtgcttatagaatgataataagtcg

SEQ ID NO: 389627 - DNA, 25 bp, Artificial
  probe
  misc_feature (1)..(25): SEQ ID NO: 4735; WAN024AMM; Start 263; Stop 287
tttcaacaatttagcagagtatttt

SEQ ID NO: 389628 - DNA, 25 bp, Artificial
  probe
  misc_feature (1)..(25): SEQ ID NO: 4735; WAN024AMM; Start 262; Stop 286
ttttcaacaatttagcagagtattt

SEQ ID NO: 389629 - DNA, 25 bp, Artificial
  probe
  misc_feature (1)..(25): SEQ ID NO: 4735; WAN024AMM; Start 253; Stop 277
gcatacttattttcaacaatttagc

SEQ ID NO: 389630 - DNA, 25 bp, Artificial
  probe
  misc_feature (1)..(25): SEQ ID NO: 4735; WAN024AMM; Start 147; Stop 171
cagcccgactgaaagtgcttataga

SEQ ID NO: 389631 - DNA, 25 bp, Artificial
  probe
  misc_feature (1)..(25): SEQ ID NO: 4736; WAN024AMZ; Start 44; Stop 68
agactataatagacagaaagaagga

SEQ ID NO: 389632 - DNA, 25 bp, Artificial
  probe
  misc_feature (1)..(25): SEQ ID NO: 4736; WAN024AMZ; Start 52; Stop 76
atagacagaaagaaggaaattgtaa

SEQ ID NO: 389633 - DNA, 25 bp, Artificial
  probe
  misc_feature (1)..(25): SEQ ID NO: 4736; WAN024AMZ; Start 51; Stop 75
aatagacagaaagaaggaaattgta

SEQ ID NO: 389634 - DNA, 25 bp, Artificial
  probe
  misc_feature (1)..(25): SEQ ID NO: 4736; WAN024AMZ; Start 50; Stop 74
taatagacagaaagaaggaaattgt

SEQ ID NO: 389635 - DNA, 25 bp, Artificial
  probe
  misc_feature (1)..(25): SEQ ID NO: 4736; WAN024AMZ; Start 45; Stop 69
gactataatagacagaaagaaggaa

SEQ ID NO: 389636 - DNA, 25 bp, Artificial
  probe
  misc_feature (1)..(25): SEQ ID NO: 4736; WAN024AMZ; Start 49; Stop 73
ataatagacagaaagaaggaaattg

SEQ ID NO: 389637 - DNA, 25 bp, Artificial
  probe
  misc_feature (1)..(25): SEQ ID NO: 4736; WAN024AMZ; Start 46; Stop 70
actataatagacagaaagaaggaaa

SEQ ID NO: 389638 - DNA, 25 bp, Artificial
  probe
  misc_feature (1)..(25): SEQ ID NO: 4738; WAN024A76; Start 75; Stop 99
tgtcacgaatatgccttatagttct

SEQ ID NO: 389639 - DNA, 25 bp, Artificial
  probe
  misc_feature (1)..(25): SEQ ID NO: 4738; WAN024A76; Start 76; Stop 100
gtcacgaatatgccttatagttctc

SEQ ID NO: 389640 - DNA, 25 bp, Artificial
  probe
  misc_feature (1)..(25): SEQ ID NO: 4738; WAN024A76; Start 74; Stop 98
ttgtcacgaatatgccttatagttc

SEQ ID NO: 389641 - DNA, 25 bp, Artificial
  probe
  misc_feature (1)..(25): SEQ ID NO: 4738; WAN024A76; Start 69; Stop 93
aaactttgtcacgaatatgccttat

SEQ ID NO: 389642 - DNA, 25 bp, Artificial
  probe
  misc_feature (1)..(25): SEQ ID NO: 4738; WAN024A76; Start 72; Stop 96
ctttgtcacgaatatgccttatagt

SEQ ID NO: 389643 - DNA, 25 bp, Artificial
  probe
  misc_feature (1)..(25): SEQ ID NO: 4738; WAN024A76; Start 71; Stop 95
actttgtcacgaatatgccttatag

SEQ ID NO: 389644 - DNA, 25 bp, Artificial
  probe
  misc_feature (1)..(25): SEQ ID NO: 4738; WAN024A76; Start 81; Stop 105
gaatatgccttatagttctcgatgt

SEQ ID NO: 389645 - DNA, 25 bp, Artificial
  probe
  misc_feature (1)..(25): SEQ ID NO: 4738; WAN024A76; Start 73; Stop 97
tttgtcacgaatatgccttatagtt

SEQ ID NO: 389646 - DNA, 25 bp, Artificial
  probe
  misc_feature (1)..(25): SEQ ID NO: 4738; WAN024A76; Start 70; Stop 94
aactttgtcacgaatatgccttata

SEQ ID NO: 389647 - DNA, 25 bp, Artificial
  probe
  misc_feature (1)..(25): SEQ ID NO: 4738; WAN024A76; Start 39; Stop 63
cctagacaacttcattctatcactt

SEQ ID NO: 389648 - DNA, 25 bp, Artificial
  probe
  misc_feature (1)..(25): SEQ ID NO: 4738; WAN024A76; Start 112; Stop 136
tttagtggtttagaggctgaaatag

SEQ ID NO: 389649 - DNA, 25 bp, Artificial
  probe
  misc_feature (1)..(25): SEQ ID NO: 4738; WAN024A76; Start 77; Stop 101
tcacgaatatgccttatagttctcg

SEQ ID NO: 389650 - DNA, 25 bp, Artificial
  probe
  misc_feature (1)..(25): SEQ ID NO: 4738; WAN024A76; Start 83; Stop 107
atatgccttatagttctcgatgtaa

SEQ ID NO: 389651 - DNA, 25 bp, Artificial
  probe
  misc_feature (1)..(25): SEQ ID NO: 4738; WAN024A76; Start 82; Stop 106
aatatgccttatagttctcgatgta

SEQ ID NO: 389652 - DNA, 25 bp, Artificial
  probe
  misc_feature (1)..(25): SEQ ID NO: 4738; WAN024A76; Start 37; Stop 61
tccctagacaacttcattctatcac

SEQ ID NO: 389653 - DNA, 25 bp, Artificial
  probe
  misc_feature (1)..(25): SEQ ID NO: 4738; WAN024A76; Start 38; Stop 62
ccctagacaacttcattctatcact

SEQ ID NO: 389654 - DNA, 25 bp, Artificial
  probe
  misc_feature (1)..(25): SEQ ID NO: 4738; WAN024A76; Start 78; Stop 102
cacgaatatgccttatagttctcga

SEQ ID NO: 389655 - DNA, 25 bp, Artificial
  probe
  misc_feature (1)..(25): SEQ ID NO: 4738; WAN024A76; Start 79; Stop 103
acgaatatgccttatagttctcgat

SEQ ID NO: 389656 - DNA, 25 bp, Artificial
  probe
  misc_feature (1)..(25): SEQ ID NO: 4738; WAN024A76; Start 80; Stop 104
cgaatatgccttatagttctcgatg

SEQ ID NO: 389657 - DNA, 25 bp, Artificial
  probe
  misc_feature (1)..(25): SEQ ID NO: 4738; WAN024A76; Start 36; Stop 60
ttccctagacaacttcattctatca

SEQ ID NO: 389658 - DNA, 25 bp, Artificial
  probe
  misc_feature (1)..(25): SEQ ID NO: 4738; WAN024A76; Start 86; Stop 110
tgccttatagttctcgatgtaaacg

SEQ ID NO: 389659 - DNA, 25 bp, Artificial
  probe
  misc_feature (1)..(25): SEQ ID NO: 4738; WAN024A76; Start 85; Stop 109
atgccttatagttctcgatgtaaac

SEQ ID NO: 389660 - DNA, 25 bp, Artificial
  probe
  misc_feature (1)..(25): SEQ ID NO: 4738; WAN024A76; Start 87; Stop 111
gccttatagttctcgatgtaaacgt

SEQ ID NO: 389661 - DNA, 25 bp, Artificial
  probe
  misc_feature (1)..(25): SEQ ID NO: 4738; WAN024A76; Start 35; Stop 59
tttccctagacaacttcattctatc

SEQ ID NO: 389662 - DNA, 25 bp, Artificial
  probe
  misc_feature (1)..(25): SEQ ID NO: 4738; WAN024A76; Start 110; Stop 134
gttttagtggtttagaggctgaaat

SEQ ID NO: 389663 - DNA, 25 bp, Artificial
  probe
  misc_feature (1)..(25): SEQ ID NO: 4738; WAN024A76; Start 68; Stop 92
aaaactttgtcacgaatatgcctta

SEQ ID NO: 389664 - DNA, 25 bp, Artificial
  probe
  misc_feature (1)..(25): SEQ ID NO: 4738; WAN024A76; Start 84; Stop 108
tatgccttatagttctcgatgtaaa

SEQ ID NO: 389665 - DNA, 25 bp, Artificial
  probe
  misc_feature (1)..(25): SEQ ID NO: 4738; WAN024A76; Start 109; Stop 133
cgttttagtggtttagaggctgaaa

SEQ ID NO: 389666 - DNA, 25 bp, Artificial
  probe
  misc_feature (1)..(25): SEQ ID NO: 4738; WAN024A76; Start 111; Stop 135
ttttagtggtttagaggctgaaata

SEQ ID NO: 389667 - DNA, 25 bp, Artificial
  probe
  misc_feature (1)..(25): SEQ ID NO: 4738; WAN024A76; Start 32; Stop 56
gattttccctagacaacttcattct

SEQ ID NO: 389668 - DNA, 25 bp, Artificial
  probe
  misc_feature (1)..(25): SEQ ID NO: 4738; WAN024A76; Start 31; Stop 55
ggattttccctagacaacttcattc

SEQ ID NO: 389669 - DNA, 25 bp, Artificial
  probe
  misc_feature (1)..(25): SEQ ID NO: 4738; WAN024A76; Start 40; Stop 64
ctagacaacttcattctatcacttt

SEQ ID NO: 389670 - DNA, 25 bp, Artificial
  probe
  misc_feature (1)..(25): SEQ ID NO: 4738; WAN024A76; Start 34; Stop 58
ttttccctagacaacttcattctat

SEQ ID NO: 389671 - DNA, 25 bp, Artificial
  probe
  misc_feature (1)..(25): SEQ ID NO: 4739; WAN0249IP; Start 25; Stop 49
aggactactatatcaaatttcagct

SEQ ID NO: 389672 - DNA, 25 bp, Artificial
  probe
  misc_feature (1)..(25): SEQ ID NO: 4739; WAN0249IP; Start 9; Stop 33
cctttgtcttttacataggactact

SEQ ID NO: 389673 - DNA, 25 bp, Artificial
  probe
  misc_feature (1)..(25): SEQ ID NO: 4739; WAN0249IP; Start 26; Stop 50
ggactactatatcaaatttcagcta

SEQ ID NO: 389674 - DNA, 25 bp, Artificial
  probe
  misc_feature (1)..(25): SEQ ID NO: 4739; WAN0249IP; Start 24; Stop 48
taggactactatatcaaatttcagc

SEQ ID NO: 389675 - DNA, 25 bp, Artificial
  probe
  misc_feature (1)..(25): SEQ ID NO: 4739; WAN0249IP; Start 3; Stop 27
ttttctcctttgtcttttacatagg

SEQ ID NO: 389676 - DNA, 25 bp, Artificial
  probe
  misc_feature (1)..(25): SEQ ID NO: 4739; WAN0249IP; Start 1; Stop 25
tgttttctcctttgtcttttacata

SEQ ID NO: 389677 - DNA, 25 bp, Artificial
  probe
  misc_feature (1)..(25): SEQ ID NO: 4739; WAN0249IP; Start 37; Stop 61
tcaaatttcagctacttttacaaga

SEQ ID NO: 389678 - DNA, 25 bp, Artificial
  probe
  misc_feature (1)..(25): SEQ ID NO: 4739; WAN0249IP; Start 2; Stop 26
gttttctcctttgtcttttacatag

SEQ ID NO: 389679 - DNA, 25 bp, Artificial
  probe
  misc_feature (1)..(25): SEQ ID NO: 4739; WAN0249IP; Start 28; Stop 52
actactatatcaaatttcagctact

SEQ ID NO: 389680 - DNA, 25 bp, Artificial
  probe
  misc_feature (1)..(25): SEQ ID NO: 4739; WAN0249IP; Start 27; Stop 51
gactactatatcaaatttcagctac

SEQ ID NO: 389681 - DNA, 25 bp, Artificial
  probe
  misc_feature (1)..(25): SEQ ID NO: 4739; WAN0249IP; Start 38; Stop 62
caaatttcagctacttttacaagat

SEQ ID NO: 389682 - DNA, 25 bp, Artificial
  probe
  misc_feature (1)..(25): SEQ ID NO: 4739; WAN0249IP; Start 36; Stop 60
atcaaatttcagctacttttacaag

SEQ ID NO: 389683 - DNA, 25 bp, Artificial
  probe
  misc_feature (1)..(25): SEQ ID NO: 4739; WAN0249IP; Start 10; Stop 34
ctttgtcttttacataggactacta

SEQ ID NO: 389684 - DNA, 25 bp, Artificial
  probe
  misc_feature (1)..(25): SEQ ID NO: 4739; WAN0249IP; Start 6; Stop 30
tctcctttgtcttttacataggact

SEQ ID NO: 389685 - DNA, 25 bp, Artificial
  probe
  misc_feature (1)..(25): SEQ ID NO: 4739; WAN0249IP; Start 5; Stop 29
ttctcctttgtcttttacataggac

SEQ ID NO: 389686 - DNA, 25 bp, Artificial
  probe
  misc_feature (1)..(25): SEQ ID NO: 4739; WAN0249IP; Start 8; Stop 32
tcctttgtcttttacataggactac

SEQ ID NO: 389687 - DNA, 25 bp, Artificial
  probe
  misc_feature (1)..(25): SEQ ID NO: 4739; WAN0249IP; Start 7; Stop 31
ctcctttgtcttttacataggacta

SEQ ID NO: 389688 - DNA, 25 bp, Artificial
  probe
  misc_feature (1)..(25): SEQ ID NO: 4739; WAN0249IP; Start 4; Stop 28
tttctcctttgtcttttacatagga

SEQ ID NO: 389689 - DNA, 25 bp, Artificial
  probe
  misc_feature (1)..(25): SEQ ID NO: 4739; WAN0249IP; Start 11; Stop 35
tttgtcttttacataggactactat

SEQ ID NO: 389690 - DNA, 25 bp, Artificial
  probe
  misc_feature (1)..(25): SEQ ID NO: 4739; WAN0249IP; Start 35; Stop 59
tatcaaatttcagctacttttacaa

SEQ ID NO: 389691 - DNA, 25 bp, Artificial
  probe
  misc_feature (1)..(25): SEQ ID NO: 4739; WAN0249IP; Start 34; Stop 58
atatcaaatttcagctacttttaca

SEQ ID NO: 389692 - DNA, 25 bp, Artificial
  probe
  misc_feature (1)..(25): SEQ ID NO: 4740; WAN0249JY; Start 52; Stop 76
acaaaatatacaatagttctggaga

SEQ ID NO: 389693 - DNA, 25 bp, Artificial
  probe
  misc_feature (1)..(25): SEQ ID NO: 4740; WAN0249JY; Start 53; Stop 77
caaaatatacaatagttctggagac

SEQ ID NO: 389694 - DNA, 25 bp, Artificial
  probe
  misc_feature (1)..(25): SEQ ID NO: 4741; WAN024A8E; Start 37; Stop 61
gaagaacaaaccaagattcaagcag

SEQ ID NO: 389695 - DNA, 25 bp, Artificial
  probe
  misc_feature (1)..(25): SEQ ID NO: 4741; WAN024A8E; Start 357; Stop 381
caagaactgtttggacatcattcat

SEQ ID NO: 389696 - DNA, 25 bp, Artificial
  probe
  misc_feature (1)..(25): SEQ ID NO: 4741; WAN024A8E; Start 126; Stop 150
aggttcatcaacttctgagcttaca

SEQ ID NO: 389697 - DNA, 25 bp, Artificial
  probe
  misc_feature (1)..(25): SEQ ID NO: 4741; WAN024A8E; Start 361; Stop 385
aactgtttggacatcattcatttga

SEQ ID NO: 389698 - DNA, 25 bp, Artificial
  probe
  misc_feature (1)..(25): SEQ ID NO: 4741; WAN024A8E; Start 360; Stop 384
gaactgtttggacatcattcatttg

SEQ ID NO: 389699 - DNA, 25 bp, Artificial
  probe
  misc_feature (1)..(25): SEQ ID NO: 4741; WAN024A8E; Start 359; Stop 383
agaactgtttggacatcattcattt

SEQ ID NO: 389700 - DNA, 25 bp, Artificial
  probe
  misc_feature (1)..(25): SEQ ID NO: 4741; WAN024A8E; Start 358; Stop 382
aagaactgtttggacatcattcatt

SEQ ID NO: 389701 - DNA, 25 bp, Artificial
  probe
  misc_feature (1)..(25): SEQ ID NO: 4741; WAN024A8E; Start 127; Stop 151
ggttcatcaacttctgagcttacag

SEQ ID NO: 389702 - DNA, 25 bp, Artificial
  probe
  misc_feature (1)..(25): SEQ ID NO: 4741; WAN024A8E; Start 125; Stop 149
caggttcatcaacttctgagcttac

SEQ ID NO: 389703 - DNA, 25 bp, Artificial
  probe
  misc_feature (1)..(25): SEQ ID NO: 4741; WAN024A8E; Start 93; Stop 117
tcttatttatcagcaggaaactctt

SEQ ID NO: 389704 - DNA, 25 bp, Artificial
  probe
  misc_feature (1)..(25): SEQ ID NO: 4741; WAN024A8E; Start 356; Stop 380
acaagaactgtttggacatcattca

SEQ ID NO: 389705 - DNA, 25 bp, Artificial
  probe
  misc_feature (1)..(25): SEQ ID NO: 4741; WAN024A8E; Start 124; Stop 148
acaggttcatcaacttctgagctta

SEQ ID NO: 389706 - DNA, 25 bp, Artificial
  probe
  misc_feature (1)..(25): SEQ ID NO: 4741; WAN024A8E; Start 40; Stop 64
gaacaaaccaagattcaagcaggaa

SEQ ID NO: 389707 - DNA, 25 bp, Artificial
  probe
  misc_feature (1)..(25): SEQ ID NO: 4741; WAN024A8E; Start 38; Stop 62
aagaacaaaccaagattcaagcagg

SEQ ID NO: 389708 - DNA, 25 bp, Artificial
  probe
  misc_feature (1)..(25): SEQ ID NO: 4741; WAN024A8E; Start 362; Stop 386
actgtttggacatcattcatttgaa

SEQ ID NO: 389709 - DNA, 25 bp, Artificial
  probe
  misc_feature (1)..(25): SEQ ID NO: 4741; WAN024A8E; Start 94; Stop 118
cttatttatcagcaggaaactcttc

SEQ ID NO: 389710 - DNA, 25 bp, Artificial
  probe
  misc_feature (1)..(25): SEQ ID NO: 4741; WAN024A8E; Start 158; Stop 182
gcctattagctgttggtagtttagt

SEQ ID NO: 389711 - DNA, 25 bp, Artificial
  probe
  misc_feature (1)..(25): SEQ ID NO: 4741; WAN024A8E; Start 363; Stop 387
ctgtttggacatcattcatttgaaa

SEQ ID NO: 389712 - DNA, 25 bp, Artificial
  probe
  misc_feature (1)..(25): SEQ ID NO: 4741; WAN024A8E; Start 31; Stop 55
ggtgatgaagaacaaaccaagattc

SEQ ID NO: 389713 - DNA, 25 bp, Artificial
  probe
  misc_feature (1)..(25): SEQ ID NO: 4741; WAN024A8E; Start 30; Stop 54
aggtgatgaagaacaaaccaagatt

SEQ ID NO: 389714 - DNA, 25 bp, Artificial
  probe
  misc_feature (1)..(25): SEQ ID NO: 4741; WAN024A8E; Start 29; Stop 53
aaggtgatgaagaacaaaccaagat

SEQ ID NO: 389715 - DNA, 25 bp, Artificial
  probe
  misc_feature (1)..(25): SEQ ID NO: 4741; WAN024A8E; Start 28; Stop 52
aaaggtgatgaagaacaaaccaaga

SEQ ID NO: 389716 - DNA, 25 bp, Artificial
  probe
  misc_feature (1)..(25): SEQ ID NO: 4741; WAN024A8E; Start 123; Stop 147
aacaggttcatcaacttctgagctt

SEQ ID NO: 389717 - DNA, 25 bp, Artificial
  probe
  misc_feature (1)..(25): SEQ ID NO: 4741; WAN024A8E; Start 163; Stop 187
ttagctgttggtagtttagttcttt

SEQ ID NO: 389718 - DNA, 25 bp, Artificial
  probe
  misc_feature (1)..(25): SEQ ID NO: 4741; WAN024A8E; Start 159; Stop 183
cctattagctgttggtagtttagtt

SEQ ID NO: 389719 - DNA, 25 bp, Artificial
  probe
  misc_feature (1)..(25): SEQ ID NO: 4741; WAN024A8E; Start 39; Stop 63
agaacaaaccaagattcaagcagga

SEQ ID NO: 389720 - DNA, 25 bp, Artificial
  probe
  misc_feature (1)..(25): SEQ ID NO: 4741; WAN024A8E; Start 162; Stop 186
attagctgttggtagtttagttctt

SEQ ID NO: 389721 - DNA, 25 bp, Artificial
  probe
  misc_feature (1)..(25): SEQ ID NO: 4741; WAN024A8E; Start 42; Stop 66
acaaaccaagattcaagcaggaatt

SEQ ID NO: 389722 - DNA, 25 bp, Artificial
  probe
  misc_feature (1)..(25): SEQ ID NO: 4741; WAN024A8E; Start 41; Stop 65
aacaaaccaagattcaagcaggaat

SEQ ID NO: 389723 - DNA, 25 bp, Artificial
  probe
  misc_feature (1)..(25): SEQ ID NO: 4741; WAN024A8E; Start 128; Stop 152
gttcatcaacttctgagcttacagc

SEQ ID NO: 389724 - DNA, 25 bp, Artificial
  probe
  misc_feature (1)..(25): SEQ ID NO: 4741; WAN024A8E; Start 292; Stop 316
aggctatcatcggacaaaataaaga

SEQ ID NO: 389725 - DNA, 25 bp, Artificial
  probe
  misc_feature (1)..(25): SEQ ID NO: 4741; WAN024A8E; Start 287; Stop 311
gtaaaaggctatcatcggacaaaat

SEQ ID NO: 389726 - DNA, 25 bp, Artificial
  probe
  misc_feature (1)..(25): SEQ ID NO: 4741; WAN024A8E; Start 273; Stop 297
ggctaaaagatagggtaaaaggcta

SEQ ID NO: 389727 - DNA, 25 bp, Artificial
  probe
  misc_feature (1)..(25): SEQ ID NO: 4742; WAN0249PW; Start 74; Stop 98
agaaagatttgctggatagtttact

SEQ ID NO: 389728 - DNA, 25 bp, Artificial
  probe
  misc_feature (1)..(25): SEQ ID NO: 4742; WAN0249PW; Start 75; Stop 99
gaaagatttgctggatagtttactt

SEQ ID NO: 389729 - DNA, 25 bp, Artificial
  probe
  misc_feature (1)..(25): SEQ ID NO: 4742; WAN0249PW; Start 73; Stop 97
tagaaagatttgctggatagtttac

SEQ ID NO: 389730 - DNA, 25 bp, Artificial
  probe
  misc_feature (1)..(25): SEQ ID NO: 4742; WAN0249PW; Start 71; Stop 95
aatagaaagatttgctggatagttt

SEQ ID NO: 389731 - DNA, 25 bp, Artificial
  probe
  misc_feature (1)..(25): SEQ ID NO: 4742; WAN0249PW; Start 83; Stop 107
tgctggatagtttacttaaatttcg

SEQ ID NO: 389732 - DNA, 25 bp, Artificial
  probe
  misc_feature (1)..(25): SEQ ID NO: 4742; WAN0249PW; Start 84; Stop 108
gctggatagtttacttaaatttcga

SEQ ID NO: 389733 - DNA, 25 bp, Artificial
  probe
  misc_feature (1)..(25): SEQ ID NO: 4742; WAN0249PW; Start 78; Stop 102
agatttgctggatagtttacttaaa

SEQ ID NO: 389734 - DNA, 25 bp, Artificial
  probe
  misc_feature (1)..(25): SEQ ID NO: 4742; WAN0249PW; Start 77; Stop 101
aagatttgctggatagtttacttaa

SEQ ID NO: 389735 - DNA, 25 bp, Artificial
  probe
  misc_feature (1)..(25): SEQ ID NO: 4742; WAN0249PW; Start 76; Stop 100
aaagatttgctggatagtttactta

SEQ ID NO: 389736 - DNA, 25 bp, Artificial
  probe
  misc_feature (1)..(25): SEQ ID NO: 4742; WAN0249PW; Start 96; Stop 120
acttaaatttcgattgtcatcatct

SEQ ID NO: 389737 - DNA, 25 bp, Artificial
  probe
  misc_feature (1)..(25): SEQ ID NO: 4742; WAN0249PW; Start 72; Stop 96
atagaaagatttgctggatagttta

SEQ ID NO: 389738 - DNA, 25 bp, Artificial
  probe
  misc_feature (1)..(25): SEQ ID NO: 4742; WAN0249PW; Start 70; Stop 94
taatagaaagatttgctggatagtt

SEQ ID NO: 389739 - DNA, 25 bp, Artificial
  probe
  misc_feature (1)..(25): SEQ ID NO: 4742; WAN0249PW; Start 44; Stop 68
tgaaaaccttgataggatgcctttt

SEQ ID NO: 389740 - DNA, 25 bp, Artificial
  probe
  misc_feature (1)..(25): SEQ ID NO: 4742; WAN0249PW; Start 43; Stop 67
gtgaaaaccttgataggatgccttt

SEQ ID NO: 389741 - DNA, 25 bp, Artificial
  probe
  misc_feature (1)..(25): SEQ ID NO: 4742; WAN0249PW; Start 98; Stop 122
ttaaatttcgattgtcatcatcttg

SEQ ID NO: 389742 - DNA, 25 bp, Artificial
  probe
  misc_feature (1)..(25): SEQ ID NO: 4742; WAN0249PW; Start 97; Stop 121
cttaaatttcgattgtcatcatctt

SEQ ID NO: 389743 - DNA, 25 bp, Artificial
  probe
  misc_feature (1)..(25): SEQ ID NO: 4742; WAN0249PW; Start 42; Stop 66
tgtgaaaaccttgataggatgcctt

SEQ ID NO: 389744 - DNA, 25 bp, Artificial
  probe
  misc_feature (1)..(25): SEQ ID NO: 4742; WAN0249PW; Start 79; Stop 103
gatttgctggatagtttacttaaat

SEQ ID NO: 389745 - DNA, 25 bp, Artificial
  probe
  misc_feature (1)..(25): SEQ ID NO: 4742; WAN0249PW; Start 82; Stop 106
ttgctggatagtttacttaaatttc

SEQ ID NO: 389746 - DNA, 25 bp, Artificial
  probe
  misc_feature (1)..(25): SEQ ID NO: 4742; WAN0249PW; Start 95; Stop 119
tacttaaatttcgattgtcatcatc

SEQ ID NO: 389747 - DNA, 25 bp, Artificial
  probe
  misc_feature (1)..(25): SEQ ID NO: 4742; WAN0249PW; Start 41; Stop 65
gtgtgaaaaccttgataggatgcct

SEQ ID NO: 389748 - DNA, 25 bp, Artificial
  probe
  misc_feature (1)..(25): SEQ ID NO: 4742; WAN0249PW; Start 91; Stop 115
agtttacttaaatttcgattgtcat

SEQ ID NO: 389749 - DNA, 25 bp, Artificial
  probe
  misc_feature (1)..(25): SEQ ID NO: 4742; WAN0249PW; Start 80; Stop 104
atttgctggatagtttacttaaatt

SEQ ID NO: 389750 - DNA, 25 bp, Artificial
  probe
  misc_feature (1)..(25): SEQ ID NO: 4742; WAN0249PW; Start 93; Stop 117
tttacttaaatttcgattgtcatca

SEQ ID NO: 389751 - DNA, 25 bp, Artificial
  probe
  misc_feature (1)..(25): SEQ ID NO: 4742; WAN0249PW; Start 92; Stop 116
gtttacttaaatttcgattgtcatc

SEQ ID NO: 389752 - DNA, 25 bp, Artificial
  probe
  misc_feature (1)..(25): SEQ ID NO: 4742; WAN0249PW; Start 81; Stop 105
tttgctggatagtttacttaaattt

SEQ ID NO: 389753 - DNA, 25 bp, Artificial
  probe
  misc_feature (1)..(25): SEQ ID NO: 4742; WAN0249PW; Start 94; Stop 118
ttacttaaatttcgattgtcatcat

SEQ ID NO: 389754 - DNA, 25 bp, Artificial
  probe
  misc_feature (1)..(25): SEQ ID NO: 4742; WAN0249PW; Start 85; Stop 109
ctggatagtttacttaaatttcgat

SEQ ID NO: 389755 - DNA, 25 bp, Artificial
  probe
  misc_feature (1)..(25): SEQ ID NO: 4742; WAN0249PW; Start 90; Stop 114
tagtttacttaaatttcgattgtca

SEQ ID NO: 389756 - DNA, 25 bp, Artificial
  probe
  misc_feature (1)..(25): SEQ ID NO: 4743; WAN0249DS; Start 179; Stop 203
gaaaggactatatcgaaggagaaca

SEQ ID NO: 389757 - DNA, 25 bp, Artificial
  probe
  misc_feature (1)..(25): SEQ ID NO: 4743; WAN0249DS; Start 178; Stop 202
tgaaaggactatatcgaaggagaac

SEQ ID NO: 389758 - DNA, 25 bp, Artificial
  probe
  misc_feature (1)..(25): SEQ ID NO: 4743; WAN0249DS; Start 181; Stop 205
aaggactatatcgaaggagaacaaa

SEQ ID NO: 389759 - DNA, 25 bp, Artificial
  probe
  misc_feature (1)..(25): SEQ ID NO: 4743; WAN0249DS; Start 180; Stop 204
aaaggactatatcgaaggagaacaa

SEQ ID NO: 389760 - DNA, 25 bp, Artificial
  probe
  misc_feature (1)..(25): SEQ ID NO: 4743; WAN0249DS; Start 177; Stop 201
ttgaaaggactatatcgaaggagaa

SEQ ID NO: 389761 - DNA, 25 bp, Artificial
  probe
  misc_feature (1)..(25): SEQ ID NO: 4743; WAN0249DS; Start 176; Stop 200
attgaaaggactatatcgaaggaga

SEQ ID NO: 389762 - DNA, 25 bp, Artificial
  probe
  misc_feature (1)..(25): SEQ ID NO: 4743; WAN0249DS; Start 175; Stop 199
aattgaaaggactatatcgaaggag

SEQ ID NO: 389763 - DNA, 25 bp, Artificial
  probe
  misc_feature (1)..(25): SEQ ID NO: 4743; WAN0249DS; Start 169; Stop 193
tgctataattgaaaggactatatcg

SEQ ID NO: 389764 - DNA, 25 bp, Artificial
  probe
  misc_feature (1)..(25): SEQ ID NO: 4743; WAN0249DS; Start 91; Stop 115
ttacagtatcctttacacaaatctg

SEQ ID NO: 389765 - DNA, 25 bp, Artificial
  probe
  misc_feature (1)..(25): SEQ ID NO: 4743; WAN0249DS; Start 174; Stop 198
taattgaaaggactatatcgaagga

SEQ ID NO: 389766 - DNA, 25 bp, Artificial
  probe
  misc_feature (1)..(25): SEQ ID NO: 4743; WAN0249DS; Start 90; Stop 114
tttacagtatcctttacacaaatct

SEQ ID NO: 389767 - DNA, 25 bp, Artificial
  probe
  misc_feature (1)..(25): SEQ ID NO: 4743; WAN0249DS; Start 173; Stop 197
ataattgaaaggactatatcgaagg

SEQ ID NO: 389768 - DNA, 25 bp, Artificial
  probe
  misc_feature (1)..(25): SEQ ID NO: 4743; WAN0249DS; Start 170; Stop 194
gctataattgaaaggactatatcga

SEQ ID NO: 389769 - DNA, 25 bp, Artificial
  probe
  misc_feature (1)..(25): SEQ ID NO: 4743; WAN0249DS; Start 118; Stop 142
aaaagcaaggctgatttattttgat

SEQ ID NO: 389770 - DNA, 25 bp, Artificial
  probe
  misc_feature (1)..(25): SEQ ID NO: 4743; WAN0249DS; Start 89; Stop 113
atttacagtatcctttacacaaatc

SEQ ID NO: 389771 - DNA, 25 bp, Artificial
  probe
  misc_feature (1)..(25): SEQ ID NO: 4743; WAN0249DS; Start 121; Stop 145
agcaaggctgatttattttgataaa

SEQ ID NO: 389772 - DNA, 25 bp, Artificial
  probe
  misc_feature (1)..(25): SEQ ID NO: 4743; WAN0249DS; Start 120; Stop 144
aagcaaggctgatttattttgataa

SEQ ID NO: 389773 - DNA, 25 bp, Artificial
  probe
  misc_feature (1)..(25): SEQ ID NO: 4743; WAN0249DS; Start 119; Stop 143
aaagcaaggctgatttattttgata

SEQ ID NO: 389774 - DNA, 25 bp, Artificial
  probe
  misc_feature (1)..(25): SEQ ID NO: 4743; WAN0249DS; Start 93; Stop 117
acagtatcctttacacaaatctgta

SEQ ID NO: 389775 - DNA, 25 bp, Artificial
  probe
  misc_feature (1)..(25): SEQ ID NO: 4743; WAN0249DS; Start 92; Stop 116
tacagtatcctttacacaaatctgt

SEQ ID NO: 389776 - DNA, 25 bp, Artificial
  probe
  misc_feature (1)..(25): SEQ ID NO: 4743; WAN0249DS; Start 94; Stop 118
cagtatcctttacacaaatctgtaa

SEQ ID NO: 389777 - DNA, 25 bp, Artificial
  probe
  misc_feature (1)..(25): SEQ ID NO: 4743; WAN0249DS; Start 122; Stop 146
gcaaggctgatttattttgataaat

SEQ ID NO: 389778 - DNA, 25 bp, Artificial
  probe
  misc_feature (1)..(25): SEQ ID NO: 4743; WAN0249DS; Start 127; Stop 151
gctgatttattttgataaattacgg

SEQ ID NO: 389779 - DNA, 25 bp, Artificial
  probe
  misc_feature (1)..(25): SEQ ID NO: 4743; WAN0249DS; Start 126; Stop 150
ggctgatttattttgataaattacg

SEQ ID NO: 389780 - DNA, 25 bp, Artificial
  probe
  misc_feature (1)..(25): SEQ ID NO: 4744; WAN024AH5; Start 55; Stop 79
aaggattttctcaagttggaggaag

SEQ ID NO: 389781 - DNA, 25 bp, Artificial
  probe
  misc_feature (1)..(25): SEQ ID NO: 4744; WAN024AH5; Start 54; Stop 78
caaggattttctcaagttggaggaa

SEQ ID NO: 389782 - DNA, 25 bp, Artificial
  probe
  misc_feature (1)..(25): SEQ ID NO: 4744; WAN024AH5; Start 44; Stop 68
tatcacgttccaaggattttctcaa

SEQ ID NO: 389783 - DNA, 25 bp, Artificial
  probe
  misc_feature (1)..(25): SEQ ID NO: 4744; WAN024AH5; Start 43; Stop 67
ttatcacgttccaaggattttctca

SEQ ID NO: 389784 - DNA, 25 bp, Artificial
  probe
  misc_feature (1)..(25): SEQ ID NO: 4744; WAN024AH5; Start 42; Stop 66
tttatcacgttccaaggattttctc

SEQ ID NO: 389785 - DNA, 25 bp, Artificial
  probe
  misc_feature (1)..(25): SEQ ID NO: 4744; WAN024AH5; Start 41; Stop 65
ttttatcacgttccaaggattttct

SEQ ID NO: 389786 - DNA, 25 bp, Artificial
  probe
  misc_feature (1)..(25): SEQ ID NO: 4744; WAN024AH5; Start 56; Stop 80
aggattttctcaagttggaggaagg

SEQ ID NO: 389787 - DNA, 25 bp, Artificial
  probe
  misc_feature (1)..(25): SEQ ID NO: 4744; WAN024AH5; Start 45; Stop 69
atcacgttccaaggattttctcaag

SEQ ID NO: 389788 - DNA, 25 bp, Artificial
  probe
  misc_feature (1)..(25): SEQ ID NO: 4744; WAN024AH5; Start 40; Stop 64
attttatcacgttccaaggattttc

SEQ ID NO: 389789 - DNA, 25 bp, Artificial
  probe
  misc_feature (1)..(25): SEQ ID NO: 4744; WAN024AH5; Start 47; Stop 71
cacgttccaaggattttctcaagtt

SEQ ID NO: 389790 - DNA, 25 bp, Artificial
  probe
  misc_feature (1)..(25): SEQ ID NO: 4744; WAN024AH5; Start 48; Stop 72
acgttccaaggattttctcaagttg

SEQ ID NO: 389791 - DNA, 25 bp, Artificial
  probe
  misc_feature (1)..(25): SEQ ID NO: 4744; WAN024AH5; Start 58; Stop 82
gattttctcaagttggaggaagggg

SEQ ID NO: 389792 - DNA, 25 bp, Artificial
  probe
  misc_feature (1)..(25): SEQ ID NO: 4744; WAN024AH5; Start 57; Stop 81
ggattttctcaagttggaggaaggg

SEQ ID NO: 389793 - DNA, 25 bp, Artificial
  probe
  misc_feature (1)..(25): SEQ ID NO: 4744; WAN024AH5; Start 36; Stop 60
ctttattttatcacgttccaaggat

SEQ ID NO: 389794 - DNA, 25 bp, Artificial
  probe
  misc_feature (1)..(25): SEQ ID NO: 4744; WAN024AH5; Start 33; Stop 57
atcctttattttatcacgttccaag

SEQ ID NO: 389795 - DNA, 25 bp, Artificial
  probe
  misc_feature (1)..(25): SEQ ID NO: 4744; WAN024AH5; Start 46; Stop 70
tcacgttccaaggattttctcaagt
